United States Patent Application Publication US 2004/0214272 A1 - sequence listing, part 40

SEQ ID NO: 166690 - DNA, 2234 bp, Zea mays
  unsure (1)..(2234): unsure at all n locations
  Clone ID: MRT4577_835C.1
aacagaatattcaaagtcctgtgtaacattgttgctcccaaatgtacagctctgcttactgaggtacgcaacagacaaaatcttatcgctctagcatgtaaaagttaagtctcgtatgcatgccattgccctggcatccctaattacagagtttggaatccgaactctagttaaacatcagctttctgaaagaagatgaggtccattttcccactttgtctaataccgtcctatgcaagtgttctcagccatctgagtagcccaagaagaccagcatctagaactggagacttctgctctagtccaatatctgcagcaactcggtgagcacacatgatccctgagaatgctacagctatgacaccttgcccggggaaacagctgtcaccgacacagtaaaggccatctattgaggtagtattgaaaggcatagccagtaatcccttcggtttaccccgcggcattggtccatatgtaccgtcatttcgagcaagaaatcttcggtgtgtttttggtgagcctacctctttgaggactattgaatcttgaagaccaggaaacaacttcttttcaagccttcttataatctcattggccaccacctcttttttctcttcatattccttcctagaaagaccctcccagtcttctatgcctgcggtagtaaatatatgaagtatatgatgtccttcgggagctaatgatggatcaagaactgtagggatacttaagaatatgcttccataaggcttttccaaattactccaattatcctcaagtataaaatggtggcagtcagtgccagcaggcagaactgacgctttgacacccatatgaattgaaaggaacgatggtgccttaacgtaattcttttgaaagtttttctcctcttctggaagttcctctttcacgagttttccaaaagtgtcccatctggtggcatttgatatcactgttttagcaaagaactccttcccattcgataacctcaccccaacagcctttccattttcaagaataatgttggttacattcgccttgtaacggatttcactgcccttttcaacaaggccatctgccagggatattgcaataccaccaacgccaccaactggataattaatccctccaaagtgccatgcttgcatttatcatgggtgtttgcaaggcattgactgtgctcacaataaaacaaaatctctcacacctcggcatctatgaaggagagtagctccttatcttttatgaacttgcgagcgatatccccagcattctgtggcaaataataagctagagttaagcattcccgaggcttctggaaaaattgccgaaaaagataaaggggttcctctagagacttcagctccaacgaatttagtgaattgaagatcgtccagcatgtatcgtagaatttaaggatcccttctttctcgtgagggaatttgctgaccagttcgttgatgaagtcttcatactttctatgcacaaggacagagagatcaccgggtaggtggaaatgaactgtagaagggtcaggtagaactctcatcttacgcccaactgcttccaatgcttgtgtgatcaaattcaagttacccttgtcggagaagccgaacatgacggaggagccgacgtcgaaggtgaacccgtcgcggcggtagtacccggagcttcccccggggatgaggtacttctcgaggaccagcacccgcgcgcccttggccgcgagctgcgtcgccgccaccaggcccccgatccctgacccgatcacgatcgcatcatacggaccctcgccctctcctcctccaccttcgccgcccgctttctccgcgaccgccaccgccgccgccttctccgatgccagcgcgcctctcctgaacccgccgacgccgcggggcccgctcgctgcgcagagccgcgtggcggggcgaggggagggcggcgggggcgaggagaagcggggcgtggaggcgcgcggcgagcggcggcatggcggcgccgaggacgggacggttgcgtttggattgtgcgcgggcggtgggagcgagtggagtggggcgtgtccgtgcgtgtgggttttagtgggacgaggtcgggggtcgtctcgtggctggcggcttggcggtggtggggggaatctgggtgggcgggaggccggaggatcnccgggcgggaggagacgaaggcggggaacggaagccagtgcgagccaaggaccccggccggcctcgagg

SEQ ID NO: 166691 - DNA, 590 bp, Zea mays
  Clone ID: MRT4577_83600C.1
ttgggtacctcgaggccggccggggatgcgtctttctgcctgcggcattcttacacgggataggcagcgaccgcgagtacggtatagcgctgcatattcatcttcgccgcggaccaagatgggtacacgtgtcgtgagagcaacaacactgattgaaaaagcaaagagtggaagaagcatagactccaccaggtgactcatgataagaagtgcatggatagtctgctctgtccagtgaattggctagctatgacctcatgcagccagaatatgcgggtctgatcaatactgtcttcgacaagaatgacaagaccagcaatcatattgttctgaaactgcaacgccagaactgcagggactactcacatcacaccatcaagagatgtaatgattttgacaatggcggagaccagaacggcgagggtgcatctctttgcgaagcttctcgagctcgtgtgtgatgtgtgagagatcgaagaagaggctctactattactgatatacaagcatgtcgtcgaagttcaatgctaatgcagcaatgaaagcagatcatgttatgaatacaaatatcaatacctgacatttgttct

SEQ ID NO: 166692 - DNA, 534 bp, Zea mays
  unsure (1)..(534): unsure at all n locations
  Clone ID: MRT4577_83601C.1
cccacgcgcggacgcgtggggcccgatatgtgccaaaaccgcatcacaaagggaagaagcacactgtgcatagtttgaaggaagagtatgagaaaaaacgtgctgaggaggagaaggctaaggaagagcgtgatgcaatggttcaggcaaagagggagcaccgggagaagtctgaggcgaagcggaaagaactgagggagaagatgttcaagaagacaagatctggccaacctgtgatgagataccggatcgagcatctcttggagactgcactgagcaagtaacacgatacgtcgataccaacctcgccttttgagaccaaagtgtgctaccaaattttgtagctccgtgcaaccatttgtttactgtaaccgtcttttgtcgcttcatcgttgtacatatctttggatttgttgatcatatcactccagagttctctgctgttggcgccgtgcgcttccattcctgcaggtgatgtaatgtgatctgataactgactccttgaaaaacaagcaagccttgatttctttnntt

SEQ ID NO: 166693 - DNA, 322 bp, Zea mays
  Clone ID: MRT4577_83602C.1
gcggcagacgcgatttcattcgtgcgctgatcacaaaacattaggcctccgtgacggcagcgatgcactcgatctccacgagggcgttcttgggcagacaccccacctttacgggcgagcgcgccggtttgtgcggggcgaaaaactcctcgtagatggggttaaccttagcgaagtcccccatgttctttaagaacaccgtcgtttttaacacactgggcgtgcttgcaccggccgccttaacgacagccttgagggttttgagcgcctggcgcgtttgcgccttaaccccccccttgacaatttggattgtcgacgggtt

SEQ ID NO: 166694 - DNA, 676 bp, Zea mays
  unsure (1)..(676): unsure at all n locations
  Clone ID: MRT4577_83603C.1
ccggccgggagactcatccaacgtcaagccgacgtggagcgagcgccccactgatttttacctggctctcctctccggtggcgaccgatacatcctggcgagggacagaaggaagtcagtgactactgccgctcccatgcggaggaggagatgccttgccatccctcggatcaagctcccccggcgagatcggacaggcccatgagcgcccgcgccatcacatcgcgtggatcaacacgcgagccgcatgcctcggccggcgcgctatagcagaggaagaatgttctggatggacgactaagtaccgctcataggtaacatgtggcttccccaccgtcgcatactgctgtacgacgatgagttccactccttcctacgagaggacctctgactgaataagaaaatgagggtactaggctgggaggatccatatgatgtcagctcatatgaacaggacgttctaggagcatcgataagattggataccagcactgattgcctccgagctctggaattggactagtgttgatacagaactggcatttaactccctataactctgccggtccgttgcgcagacattgatatccaggattctgcacatgtaactggccgcatcgagnacagcttgaggtgcttgaaggaacacgggatgatcatggaatgtttttgcatc

SEQ ID NO: 166695 - DNA, 613 bp, Zea mays
  Clone ID: MRT4577_83604C.1
aattcggcacgaggcaggggaagaagggtgaggtagaggttgacacagaaatcaattatccggcttctcggtctcgcgagcaagcctcgccatggatatctgcaccagttgcttccaagccagatattagagctgcctactacttgcgtcgcgcggagagcgggttgggaccagaaacaagagtagagcaagactcctatcttttttccacgcgccagtcttctctgaaccggtgaacccattcctcctcctcttcctactcaacgccacgatcgaagaggagactcagtcaatctcgccttgctctcctcttcgacccatcgtcggttcctgggatcagcatcgacgagcaggatttttccggctgtggaggattactgctgcttgacaaatccgagcgcaaaggttgcttcctgacgcgttcccccatggcacgagcaggagcacgagcacgagcaggagaaggcggctacaaggttcctgctcccgggcgtggcctctcacaccgcatggtggttgcttcgccggggaggcgcaacgcgtatggtccataggagcagggccgtgctcagcggggtcaccgctggagtagcggccgccgactagagagctc

SEQ ID NO: 166696 - DNA, 1668 bp, Zea mays
  unsure (1)..(1668): unsure at all n locations
  Clone ID: MRT4577_83605C.1
tcaaatcatacatcgccggagccccgaccaattatccacacacgcgcctcgcctcccactcccccgaactcacgcgccgcggcggagcaccaccgcggccgcccaccatgacctccgcctccaccttcctctctctgcgcctgcccactccctcccacgccacttcgtccccttccttccccccgtctctgctccggcaggcgcgtggcggtgtggcgtcctcgacgctggtggcgcgggcgggagggccaacgggagcggcgggagctccatcgccgctattcaacccccggggagacccgttcctgtctaccctcgcagccgcctcaccggaggaccttgcggccgccgctggtggcgagcgccgtggagaggaccacctgccgttcctcgagatcttccagaacaccaaactcatggcctcgcccgcgcaggtggaacggtctagcagctcgtatagtcagcacagacctagaaggcctcctccagatttgccttcattgcttcttcacggccgaatcgtttatattggcatgccgttggtaccagcagtgactgagctcattgttgcccagttgatgtaccttgaatggatgaacagtaaagaacctgtttatatatacatcaactcaactggaacggctcgcgatgatggtgaaccggtcgggatggagagcgaaggttttgcaatctatgatgcaatgatgcgtatgaaaactgagatccacacactttgtataggagctgcagcaggccatgcatgtcttgtgcttgcagctggaaaaaaaggcaaacgttatatgttccctcatgccaaagctatgattcagcaaccacgtattccttcttatgggatgatgcaagcatcagatgttgttattcgtgcaaaggaggttgtgcacaacaggaacacattggtcaaacttttagcaaggcatactggaaatccaccagagaaaatagacaaggtaatgagaggaccattttacatggactccttgaaggcaaaggagtttggagtcattgacaagatcctttggcgcggtcaggagaagtacatggctgacatgctctccccagatgagtgggacaaagttgccggagtcagacatcctgatctaatgtaatgttattcattgaaagttcaacatttggttaggttaatagcttccagggggcagaaacaggtgacgctgaacaataatgcttgattatcaatgataatggttggtaagagccaaggagtacttgtttaactaggtaaacttagagctcagggctgggggctgcgccaccaagatgttgttaatggtctctggatgagagcaggcacgtgtttctcatgaattatcgttgttccccacatcagttctagtccagattttggtatttattagtatatagtccacacattttgatagacccagtggttgaactagccaagttcatattgttatcagcacgaagcgcgatgataatatgatatgttgtccttgaaatttccatggctactgcgcccttgtccttgtgttctggacgttggaaatcctatgtatggatcatatggttttcaaccatcaaatcaaaggactcaggtttgtgtcaaaannnnnnnnnnnnnnnnnnnnnnnnnnnccnnnaaaaaaaaaaaaaaaggcccctagggcc

SEQ ID NO: 166697 - DNA, 284 bp, Zea mays
  Clone ID: MRT4577_83606C.1
tgaacctgctgaagctggtagtgatgacagcgatgacgatagcgatgatgatgtgatggatgtagacatggcggcaacctcttctaaaggttcaaggagtaaaaaggcagatctagcgtaaaaacatgctgctttggtgaaggagaaatgctcatcaactggaccttcaccatatgtcattgttgcatgtcgcctcatcacaccatagaaatacatctccaatttctcggcactcgcaacaccgacaactagagatctagcgtagaaacatgctgctttggtga

SEQ ID NO: 166698 - DNA, 212 bp, Zea mays
  Clone ID: MRT4577_83607C.1
gccggccggtttcgcgaactcccgccgatttgatttctccctcatcctccgcccgtctcgccgcggccaccgcttcctccatgcccgcgcccgtgggccggcttctactgctgcgctccgctgtcgcggtaggcctggcgctccccgtggcgcccgacatcaagaacgacgccttccgggaggccccgccctcgcccattatggtcccacaa

SEQ ID NO: 166699 - DNA, 572 bp, Zea mays
  Clone ID: MRT4577_83608C.1
catcagtggcagtactgattgaatcttagaatctgtaggcacaaagttacaatcaacaaaaactccatcaccatttgcctaataagccatgcaaaaaaacagttagcatattatagtcacatgcaacataaaaaatcaactagcatgtccaacaaaaggaggtgtgccgcaaactggtgcccgacaagcttgaccgacgtccggtcatgcccaacaggactttgtgcggcaaactgttacccgccagaaagcctaatggcgtcggctaggtcagtgtcgggcatgtcctacgagaccatgcgcaagaaattgttgtccgacaaacatacctgacagcgtcggatatgtagaaccagtgtattagtttccccctgtttactatttgcctaattaaccatgcaaaagaaaaacatctagcatattatagttacattcaacataaaaagatcaactaacatacatgtgttaacctttcccacacagcatcggttttagttttgaacaaggacaaatcattcagcaacacatatattttgtcttcaaacttagatattgtaattaagttttcattc

SEQ ID NO: 166700 - DNA, 441 bp, Zea mays
  Clone ID: MRT4577_83609C.1
gccgggttcagaaaaagccttaacccacaacccaattccttaactacatctatagccaccccatctcattgcatacctccatcctccctgcttgtgataatgctgccactgatgtgcacggcgctgatactagtgcactgcacagatgcaaattacttgaaaacatgcgtttataagaataccttcatgtcctaggtgacgccctctattccgtgacttggcatggacttctaccaaaacatcctgaacgcccctagtgtacccgcgcgatctagaacaaatgaatcccccccgctgagatcacttccatatacccatgataactaacgacgacctccaggcgaggaccgcaacccctgtacatgttcatcgagttcaattacgcccactcaatgatcgacattttacactaccccgactgctaacacctcggcattaccc

SEQ ID NO: 166701 - DNA, 231 bp, Zea mays
  Clone ID: MRT4577_8360C.1
tcgagccggcggaggcggtcgagccggacaagccgccattgatggtgtggccctcaacctcagtgaccacctcccgcagagagccttcgtcggtttactggcgtcaacagacacgagcaccgagctccactccgtcctcagctggaacctgcaagtcagtctccccggcgatggtccgagcatggactggaaggcgatactgccggcggttttggacgtgatcctcttcac

SEQ ID NO: 166702 - DNA, 295 bp, Zea mays
  Clone ID: MRT4577_83610C.1
ggcatgcactccttccccgtcggcgccgacggatacctgctatacattaccaggctagcgtggtatcaccactaagcgcgacgccaaggtgggcacaaaaaagacgaacaaatgcacgcgcaagattaatatcacgctggatctgggtatgtagagtgacatgtacactctagactacaataccggacgcaagactttaaggcactgtaagtcgaagcgagagttcatgggtaacaagtgaccggcgacacgttagtctgatattgagtactgtgctatgccgaccgaagtcact

SEQ ID NO: 166703 - DNA, 306 bp, Zea mays
  Clone ID: MRT4577_83611C.1
ccgcagagccctagctgtttatcctgttttcctgttttactttgtcatcagttggatgattctcacctttactcctcagtaaatcaggaatgggaaattaaaaaccagtgaattgaaagcacatctgaaagatgaaattcaccatggagctttgtctctagcccttatatgtctaattttggaggtatttgataactgagtaggtgaggagattaaaagggagccatatagcactgtcaccccttatttgaggaactgatgtttgaaaggctgttctattctctcttaattacatatctttaaaaa

SEQ ID NO: 166704 - DNA, 417 bp, Zea mays
  Clone ID: MRT4577_83612C.1
tctctcacgcgtccggttctagatcgcgagcggccgtccgcgatctagcggacgcgtgggggcgcctacaggggcacgagcggcggcaaggcgatgctcatcagcggctacagtgacggtaaatgccaagttccagtcgtggccagtgcgcagaaaccggaggcctgcgcgaccatgggggccatgacgcacagcttcatcacggcggtggaacgcgagctcgagggtgtcacctacggccgcctgctcacctccatgaaggccatcatgaccaacttcggtggctgcgccgtgcagggtccttattggcgccggcgtggccgcccgtaaggtcgccaacttcagcggtgtggaggaacccaacctgtcctccttggataagttcgacatttaccgcatggcctttggggctgaaac

SEQ ID NO: 166705 - DNA, 588 bp, Zea mays
  Clone ID: MRT4577_83613C.1
catagagcattaaaagagatccctcctctttttaccaaaagacacaggacatcctttggcccaaacatttaacacaggaaccccagactgggaaaactaaactttaagctttttccggcagtttacccatcctgggccccatattaaaaaccccctttacgatcagaacaattaaaggggcaaaacaaggtttgggagggactattggggggaaagggtgaacacggcccaacagggtttttcacctacggggggaagggactacaaaccaaaccgggtggttccaaaaaagattacttaaacgggggcacaaaaggggggcattttttttcacaggggaaaaagggaacttcagggcccggtttttggttttccactaggaaggattcactcgattttaagttccacaaacgcggcctttttggacgggtaatttggcccaaattttcgataaagcaacaacaaaggccctaagcccaagccaaaaaagatgggcatttttttttgggggagctttaaaagttctccgggggaccacgggggcagggctaattccttgctcaggctggaaaccttccttggggaccc

SEQ ID NO: 166706 - DNA, 243 bp, Zea mays
  unsure (1)..(243): unsure at all n locations
  Clone ID: MRT4577_83614C.1
attctaccattttttcctttttttttgtcnccattacngctacttctggtgggccttttctcattgtggggggataaaaacctccaccccttttttcaactttatttccctttcaaccatcttttgactccaaatcaccagggaaaagttcgggaaacactcccctttttaaccccatactaaatagcctccgagaaaaatcccaccccaaaaaaggaactttttgctccccttttttttttc

SEQ ID NO: 166707 - DNA, 532 bp, Zea mays
  Clone ID: MRT4577_83615C.1
tttttttttttttttttttttttttttttttttttttttttttttttttttttttttttttttttttttttttttttttttttttggaaaacctgggaaaacaagccttccccaaatattggaaaaaacaaattctagaacaacaccccttaaaggaagggaacagttcaaacctaagggacaaaaacaaagcccccttattttaacaacagggcatcgcctacaatctaaactaaaggcaaccaacggcaaggggggcccaaaaaaaataaagcgggccccaaatcaaggaatcaaaaatctataggggaaaccccttaaaggtctaccagggtaaactttacagggacaccataaacgggaaacttccaaggccagggtccactggccataaattcggcacggaaaaaaaccaatttaaaaacaaatcctgctctggcctgaaggaggcacattctatgaccatcaggaacttcaaatacaggggtacccttaaaaaaacattttttgcccaaaattcgggggttccaag

SEQ ID NO: 166708 - DNA, 733 bp, Zea mays
  Clone ID: MRT4577_83616C.1
agtccgcccccaatcccctccccactcccaagttcccgccagtctcctccattcccctccccacctctcccaaatccaatccccaaatcctcatctccctccccatctctctcgtcggcggcgaggcggcgcaagaagatgctgtgggtggacaagcaccggccgaaaaccctagacaaggtcatcgtccatgagcaggtcgcgcagaacctcaagaaattcgtggcggagcaggactgcccgcacctgctcttctatggcccaccggggtccggcaagaaaaccctaatcatggcgctcatcaagcagatgttcggcgccggtgtggagaaggtgaagatggagaataagacgtggaagatcgatactgggacgaggacatttgatcttgagctggcgatgttgtcaagttcccaccatgtggagatgaaccccagcgatgctggctttcaggacaggtatgttgttcaggaggtcatcaaagagatggccaagagtaggcccattgatgccaagggcaagagagcatttaaagtgcttgtcctaaatgaagttgacaagctgtcacgagaagcacaacattccctccgtaggacaatggagaaatacagtgcatcgtgtagactcatattatgctgtaatagctcctcaaagtgacagaagctgtaaagtcccgttgcttgaatgtgcgagtgaatgcacctaccgaagatcagattgtacaagtactgga

SEQ ID NO: 166709 - DNA, 453 bp, Zea mays
  Clone ID: MRT4577_83617C.1
ggctacccgccagcggggtacccgccggccggctacccccctccggcgcagggctacccgccgcaggggtacccgcagcagggctacccgccgcagtacgctcagccgcctccacagcagcagcagagcagcgggccttccttcatggagggatgcttggctgccctctgctgctgctgcctccttgacgcttgcttctgagagggccatccgacggattcaacacgacagcaagtgaaactactactagcttatggaagagctggaactgaactgagcttcaaacgctagcgtgcttctattctagctttgtcctgcattatcgccttcttttttctctctgttatgagactactagtactatatcgatgttgattggatcagactaggctggtgtgtattctctggatgttccgtgtttctggtggaattcaaccctgggattgttattgt

SEQ ID NO: 166710 - DNA, 272 bp, Zea mays
  Clone ID: MRT4577_83618C.1
tttgagctactagcccgcctgtgtccaaatcggatgtctctttccacactacttatgcgaaaatgagatctaaagatgtggaaagagacatccgatttgagctacttgcccgcctgtgtccaaacagtactggagcggagattagaagcgtttgcacagaggctggtatgtttgcactccgagcctggagaaagattgctacagagaaggactcttagaagcgtaaataggtcacaatcgtatgcaatttagtgctactcccgctactgaca

SEQ ID NO: 166711 - DNA, 1553 bp, Zea mays
  Clone ID: MRT4577_83619C.1
cattgggtacctcgaggccggccgggagctcaaagaccgtgtgtgtcaaagagagaaccagcacacagcagagtagcacctgatcgatcgatctcctactactagctcgttcgctttcacaaccagggagcagcaatggcatctgctgctactactctcctcaagtcgtcattcctccccaagaaggctgaatggggatccaagccccagctggttgccgctcatcccaggccggcgaccgtcgtcgtctccatggttgcccgcgctagcgcctacgctgacgagcttgtccagaccgcgtttgcaattctcttaattatatttctgcagaaaaccatcgcgtcgccgggaaggggcatcctcgccatggacgagtcgaacgcgacctgcgggaagaggctcgactccatcggcctcgagaacaccgaggccaaccgccaggcctacaggaccctcctcgtcagcgctccaggcctgggacagtacatctctggtgccatcctcttcgaggagaccctctaccagtcgaccgtcgacggcaagaagatcgtcgacgtgcttagtgagcagggaatcgtgcctggtatcaaggtcgacaagggtcttgtgccactcgctggctccaacaacgagtcatggtgccaaggtctcgatggccttgcttcacgtgaggcagcctactaccaggccggtgcccgcttcgccaaatggcgcactgttgtcagcatccccaacggtccatctcaactagccgtgaaggaagctgcctggggcctcgcccgctacgccgccatctcacaggaaaatggtctggtgccgatcgtggagcccgagatccttctggatggcgagcacggcatcgagaggaccttcgaggtggcgcagaaggtgtgggcggagaccttcttctacatggccgagaacagcgtgatgttcgagggcatcctgctgaagcccagcatggtgacccctggtgccgagtgcgaggagaaggccaccccggagcaagtagccgagtacaccctcaggctcctgcgcacaaggatccctcccgccgtgccgggcatcatgttcctgtccggcgggcagtctgaggtggaggcgacccagaacctgaacgccatgaaccagagccccaacccgtggcacgtgtccttctcctacgccagggcgctgcagaacacctgcctcaagacgtggggcggcaggcccgagaacgtcaaggcggcgcaggacgcgctgctgctgcgcgccaaggccaactccctggcgcagctcggcaagtacaccggcgatggcgaggccgcggcggcaaaggagggcatgttcgtcaagaactacagctactaattaaagacgacggcgatacaccactcctgctgctagtacgttcctcgatcgggggcgggtgccgttacaggtttcagctggaaaacatacactactgcaaattttactgctaccctgagtgaaaacatggaacgggtcactggatttgggcatcatttttctagagaagaggtcgacacacgataatactcactagtacacag

SEQ ID NO: 166712 - DNA, 455 bp, Zea mays
  Clone ID: MRT4577_8361C.1
cccactctttcgtacattactgcagaagtgagggtgctcctactcttactccttatagtattagatcactcctacatccatgatgactactacgatatcaactaccaggtgcatcttatgtttccactatcatactacgaccagaccacctctcggatcaccaagcacaccaccgggggcgcgtccaacatctacttctacatcaagctctacaccatccataacactaccaccaacactaaagtaaaccgattcagcaacaaatctttttacgaccctaacctctataccagcattcaatgccagaacaacaactccagcaacatcacttgcccgaccaacaactactatatcaactggaacaacgcctagaacaataaacggcacctactcctaactcaacaacaaaaactacttacagactgccctataattaaagagacctatcaacccaa

SEQ ID NO: 166713 - DNA, 162 bp, Zea mays
  unsure (1)..(162): unsure at all n locations
  Clone ID: MRT4577_83620C.1
atnttgagattcatcagcagccaacagctttgtctccaactctttccttggtttaggtgaaagtcctttggctaacatctcctcatcatacttcctgggcatatctatgagggccttgtccacaagagcatctatcaaggcattgtaagccgcagcatcagg

SEQ ID NO: 166714 - DNA, 480 bp, Zea mays
  Clone ID: MRT4577_83621C.1
actcaggcaaatgcccaaatcttacaaaagcaaacgggtccggattcacggttacaagcagctcaacctgacggggacaactggtggtccaaggaaaagcaaacgatgcgagcggcgccggcgcagcgggggcctgaaacagtcgacgatgcatgcccgtgcccgaaaaaaactaaacgatcgacggcgagcggggaaaaaaagctggatgctaactgcccacccctgggtcgggcggcttcggcttttaatagtcgggggaggggagctgctcgtgggtgtgggaaaaaaaaaacaactcgtaaataaccccggcgaggccccccccgatgaggggccccacccaatacacccactggtagccccactcccaactgacaagggcggggccaaaggacacgggggggttcatggaccccccgtcaaaggccccccccaccaggatgttggcccccacaatgaaaccgatggcaatggggg

SEQ ID NO: 166715 - DNA, 422 bp, Zea mays
  Clone ID: MRT4577_83622C.1
ggcctacgcccttatcagtcaccatattcctctttatgaacaaaaacctgtgtaaagtagcccgtaaattcatggcgactattccaatccatttccacactcaaaagttgtaacaagtccaaggagaaaaatattttccagacaatggtaactcaagaaagaggccaacctataacaacttaaatagtgcaaggagcaactcttgctcaaatccaagactcatgaacctttctaattaatcagaacattatcgtgatcaggaaaaggtttatcatatgctctaacaagctcaacttcatgcttgtgctgcataaccactgtaaagggtaccttccggaggcttaagagccacagtttcaacaaagggaaggttttggtcaccagccaggtctctttaaaggtacaggaaaaggtgcttaaag

SEQ ID NO: 166716 - DNA, 583 bp, Zea mays
  Clone ID: MRT4577_83623C.1
cacgcgttcgcaacacgctggccaagcccgatcggtccattgcatgggtgtaaaaaaaaattgtacgcaatacatgatcgaacaattacaggcttttgtcctgcgggcattaccaacttgtttaaacagacccaatgggtgctaagggtgcacataatgcaacgagccgacagctcctgtgctggacagattcatcatgtaggtgacggccatcccgttagctcaggcataccccacgagcttctccctgatctgccagagcttcttgcccttctccggatcgctggtcttctgccacaggtggctctagaacgacaccaaggccttgttgcagctccagtacacccccaacttggtgaggctggtggtcatgaccacctgccccagcctgttgccggactcctgctctgacacaagcccttggtgacgaacttatgcaactgcgggaagagcacccggaacagcgggatgtgctcacggtacagccccatggtggcgatgcaccccggctagagcgaccccaacgtgatgcccacatcctcatgataccaccggtgcacatactggcttgttagcatgtggc

SEQ ID NO: 166717 - DNA, 341 bp, Zea mays
  Clone ID: MRT4577_83624C.1
gcgtccgaacaagcaacataaaaagcacaattttttaccaacaatccaacacaaacaacggcggggatttataatcttcggccgctccgcaagagttcctaccgcaaccattaaaccacaatgctcacaagctcatataaatctcctacttccctcatacctctaaccaacctaccatcaaatgtttcaaaacccaattactcaaccgttcagcatcccactagccaacagcacatcatttaccactgcgtcatatagttaccacctaccctccaacaatcgttacacttatcccactagcaacatttgactctgctgctgattcaccacatcaacaacta

SEQ ID NO: 166718 - DNA, 714 bp, Zea mays
  Clone ID: MRT4577_83625C.1
ggaatcgcttcaggcgcttctccctcgcgctggccgactcgaggaaggccagcgggtgcagctctacaccagcggcttgctgccaccgctcagccaccaggtgcgcatccacgcgccggaaaccctcgcggcagccatgagtctggcacgggcgttggaactggtcgagctggatcgtacaactccgttcccggcaaggctgcggcgcgcgcacttggcccaccgcccgcgccacacccaggcgtcttggcggccctccctactccaatccagcaggcgcctgtggtccaggcgctgccagcaccctaggcacagcaactggcaataccagcgccactaccaccacgaggcgggggcaagcgcctctcgacggaggagcaggtggaacggcgctgcctcggcctctgctataactgcaacgagccatactcccgcggccacaacagagtctgccgccgcatcttctataccgacgacgtcgagctggttgaggacgagcccgctgaggaggcacccgtctactccctccacgccgtcgccggcgttccagtgggcggtactctccaaatcgaggtgcaggtgggcgcggccacgttgatcgccctcatcgacacgggctccacccactacttcattggcgaggtggcagcacagcgggccggcatgcccatcgcgcctcggctgactgcgaccgtggccaacggggaacagatc

SEQ ID NO: 166719 - DNA, 264 bp, Zea mays
  Clone ID: MRT4577_83626C.1
atcgtggagtggtaaccctactcgtccccttccgcatccgtcgccgcccaattcccccaccgaggggccactctccagtcgacagatccatacatgattggagaggccaaagataacgacgtctatgaagaggagcttctggactacgaggaggactactacaatacggtcgatggctccgctgcctatcccaccggataggtcactaagaaaggctacttctggatccacagtttcatgtttcagatacttactgctcaatcc

SEQ ID NO: 166720 - DNA, 286 bp, Zea mays
  Clone ID: MRT4577_83627C.1
cccacgcgtccgaaaaaaaaaaaaaaaaaaaaaaaaaaaaaaaaaaaaaaaagggcggacaggggggaggatctaaactatacctaggtcaccttcccacgcattcgatgttatatatcgtcacttaagttcactaaattgaatcgactgtccacaacttttacaactgggaaaactcgtaaaaccactgaacttacatcaactttaaacgacatgcagcattatcccagtttgcgcagatagcgaagatagccaaaagggatcgcaccttatcaacatttgcaac

SEQ ID NO: 166721 - DNA, 232 bp, Zea mays
  Clone ID: MRT4577_83628C.1
aggacgcgtgggctcccttttttttgcaaatcctgcagacaccaccggtcgtcgttctcttcgggacaggataaaagggtagagagaggtgaggcgcgttgtaccagccgatctgttttgtcctgacgcatttgttacgacttcttcagtcttagtctggagcaagatgtgtgccggtggcaggttgacctagaagtagtgtgagaagcagcagcatatttatctagctatc

SEQ ID NO: 166722 - DNA, 492 bp, Zea mays
  Clone ID: MRT4577_83629C.1
aagggggccaacccttataaaaattagacaaacattccaggtgggaacccagctgggaatgggcccagctaaacccaggggaaccgaaggggctttaagggggccggccccaggaagcaggccattagggacaaaaagggtttctaaaaaacacgggtacaggcggctttttagaacaaaagaaacaaaatccgggggccccctaaccccttggaaaaaaaaagggccaggaagttctaggcggacccagccggcccaaagggatttcggggtcagggcatttaatttaaaacaaggggcactaaagggggtgggacactgggggttcaaaaacatttaaacgcccggaagggggttggtcccagaaaaagaagggggggccccccagtttcctgggttttacaaagcccagcagggggaatgcaaatgccagaaaaatgcagagccccccaactttaaggggggcaaagccaaaaaaatggttcttccccc

SEQ ID NO: 166723 - DNA, 452 bp, Zea mays
  Clone ID: MRT4577_8362C.1
ggggcgggggtggttcgtatggcgggcgggctgagccaatgtgacggtcccttggggcggcgacgccctagcgtgggtcgtggcggacggggagcagaggcgccggttgctagcttggattttgacttagaggcgttgagtcataatgggggggacgggagattagggctactgggttttcaagtaagttcggagacctattgtgtgaatgaacggttactgtgggactatgttgaattactatctaggagctggaatgagttgggttgaaactaaatctgtatcacgtacggtgtaaaagcaggtcatgttacgtattgtagtggtgagcaatccaggacttggagaattgtggttcagattgatagagaagagtggatggttgaaggatcaaaaagcagtgtggatatgaacgcttggttgggacaagcgatttatcgcgtgggggaact

SEQ ID NO: 166724 - DNA, 402 bp, Zea mays
  unsure (1)..(402): unsure at all n locations
  Clone ID: MRT4577_83630C.1
tttttattttttttttttaaatttgtccctttttgaggggnnatatcccgtttttttccccaaacaaaaaattttttttggggggaaaaaacgtgaacgaatctttgtaaacaaataccgggcctcaaaaaatagggccccgctgcgggggccttttccaaaaacattgggggccacccccccccgtttttttgggggactaagtgaaagggtcccgggttagtttccaaaaaatatccccccctaggaccccccagctccaatttggtcctgggggacaaaaatatccccattgttttaacggtttttaagatgtggaagccttaaaaaatttggtcccaagattgctttaaaggggttggggtttatatccgggacaaaattttgtgtagggatggcaaa

SEQ ID NO: 166725 - DNA, 224 bp, Zea mays
  Clone ID: MRT4577_83631C.1
ctcatcactacctcacccacccagccccctaagaactacccatcaaccatgggggcggcgggggtgttcgcctcccagctccgaatcaccctctcgcgttcaaagcccaagcctgtctgcctgagggccgcggggctccctctcgccaaggcctttgcaggatcgggggagctcctggcgcgcgcggcctcttccgcgcttgccggcgactcgccggtgcatgc

SEQ ID NO: 166726 - DNA, 170 bp, Zea mays
  Clone ID: MRT4577_83632C.1
cgctctcctggcactcgatgcttagcgtttactaacacacatacttgcacacgggtgctgtagatatccacatcctacgtgtgatcaacgtccttctactaatctgccaaaattggttcacaattcaaataagctgcatcgctcatcgtgccattatctcacaactcctc

SEQ ID NO: 166727 - DNA, 611 bp, Zea mays
  unsure (1)..(611): unsure at all n locations
  Clone ID: MRT4577_83633C.1
taccctcgnaggcnncggccgggaggcaaaggcactgcacgccaccttatctctagccggagatcaaagaagtagccgttaacgatggcttccgacgagctcgcaaaggccgtcgagcccaggaagaagggcaacgtcaagtatgcctccatgtgtgccatcctggcctccatggcctctgtcatccttggctatgacattggggtgatgagtggagcggccatgtacatcaagaaggacctgaatatcacggacgtgcagctggagatcctgatcgggatcctcagtctctactcgctgttcggatccttcgctggcgcgcgggcgtccgacaggatcgggcgccgcttgaccgtcgtgttcgccgctgtcatcttcttcgtgggctcgttgctcatgggtttcgccgtcnnctacggnatgctcatggcggnccgcttcccgcccggcgtcggtgcggccctactgggcctgacccccccccggctccccccccccctccccccccctccccccccccccccccccccccccccnccccccccgttccccccccccccccccncccccctccccccccccccctccccccccccccccccccccccccc

SEQ ID NO: 166728 - DNA, 424 bp, Zea mays
  Clone ID: MRT4577_83634C.1
ctctaaccggagatcaaagaagtagccgttaacgatggcttccgacgagctcgcaaaggccgtcgagcccaggaagaagggcaacgtcaagtatgcctccatatgtgccatcctggcctccatggcctctgtcatccttggctatggtacccacgcaccctttcgtttactgtcaaaatattttccttttttttgcttttaagagttcgtaggtgaagtttttttttgtgctgctgttcaccaacgctgtagacattggggtgatgagtggagcggccatgtacattaagaaggacctgaatatcacggacgtgcagatgatgatcctgatcgggatcctcagtctctactcgctggacggatccttctctggcgctctgtacgtcagaaaggtttgagcgcacattgaccgtgatggtgtccg

SEQ ID NO: 166729 - DNA, 802 bp, Zea mays
  Clone ID: MRT4577_83635C.1
aacccgattcaagaccacttacttctttccacaagaaaccgttcactttatttaggcgtgcattgtcactagaaagaaagaacttcatcacaaaaatcaatgccttatttttatcactctcacgccgctccaccttcccaagcacatggacttgttgtccttggttcttcagtggatctttggtgagtagtactaaatcattctctgtgcaacctctgaatttgatcgactggctatgctcaggacgggcacggacaataaggaaatcatcaactctttcaactgcgagaatagatacgcatccacacatcatgtcatcagggggagtctcaacataagcattttgcaactgagccttgaactcttctagaactaatggctggaaaatttcaacatattgagctggtgaatcaaaacataccggaacttcttttaaagcaggttttcttactatctcaggagaagataacccaacaacagcgaagtagtccatttccaatatgtttctaaaccagctacccagtttaggtggttgaagtcgtcgagtacttgtaaccctactgccagaacctggttttcttccaacaggcactggaagctgaacaacttgtctcttgggaactaatatacaaggctttcttgaaagaacctgtggcctccggtaattatcaagtgcatggtctaaaggatcatcttcatcatcagatatatccctgaagatggatttaaatttttctgtatctgacaacaatttaggatgcagttgttgagaagtgccagtaacagatgatcgacagcaacg

SEQ ID NO: 166730 - DNA, 353 bp, Zea mays
  unsure (1)..(353): unsure at all n locations
  Clone ID: MRT4577_83636C.1
ctgcattggtaatntaataaaatctcagttacttccagattctaagcctaaactatcttggaaaatttttatctcttgattcatctactgtaaacataatactatttcaatcgagtctagaatcaatttataataatgttatcatatcattttcttttttaatttaatatctcttttaatttcttattattttattctttttatttttttactcctttatttatttattttttctatttctttatttttatattttttttctttttattttatttatttcttttatttatttatctctttttttttcttttatttatctcattatatctttcttttttttttttatttttttt

SEQ ID NO: 166731 - DNA, 848 bp, Zea mays
  unsure (1)..(848): unsure at all n locations
  Clone ID: MRT4577_83637C.1
ctcgaggccggccgggaccagctcgcaactcagaaacaacaacaagcacttctcgatgcttcgcccagcttctatcttcgcacttggtgcccttctcttcctttcacttctcgattctgtgtccgctgcgacagctggctgtggaaaaaccccaagactgaacagtggtgttcacaccatcacagtcaacaacaagcagcgccgctacactcttcgcgtgcctcaaaactatgataacaagcgtcaataccgcttcatctttggcctgcactggctcaacggtgacatgaacgcggtcgctagtggagctgctccctactacggcctcgctgctcttgccggtgagagctccttctttgtagccccacacggtctcaacaggggatggggaaaccagaatggagaggacattgccttccttgacgcagtcaggaagcagattgacgacgagttctgtgtcaacgagaagctccgcttctccctaggtttctcctacggtggtgccatgtccttcagcctggcttgcagcaaggcggctgacttccgaggtattgctgtcttgtctggtgccaccctctctggatgtgctggcggcaacacccccattgcgttctacggtcaacacggtgtcaaggacagcgttctgcccatctcttccggaaagcagatccgtgaccgctttgtccagcttaatggatgccagtctaagaacgcacccgacccatcgcccaacagccgccagcgcgtcaagaccgtatacgatggatgcaagtacccaactcaatggacttccttcgatggagatcacgtcgcgnctcccggagatgcaggaaacgatgntggcgctc

SEQ ID NO: 166732 - DNA, 496 bp, Zea mays
  Clone ID: MRT4577_83638C.1
gataataaatttttactttttggggagaaaaaaagaaaaacagggggggaacgcttgcaaaacaggagggggggacctcaaaacacgggggggggggggcaaattcctaaaaaagggcccgaggcccccaggaaaaccagagaaccggcccaagttgggacagaggccccaaacggattgtgaaacacagccaaagggggggggggaacggaatccaaaacaagggaaggcccccccagtgggagggggggggcccgaaaacctcgggggagggggcgaaaaccacacaggagggggcggcaacccccccaaaggagagcccaaagccctcctccttaggcccagggcccggcacaggaaacggggggccaggccccaaaactcagagggcctgggccccaaccacaaaaaccaggaggtccttggccaaagaggggacgccgggctccttggaaagaacgccaaggggttcgggaatctccccaaaagcccaggg

SEQ ID NO: 166733 - DNA, 3866 bp, Zea mays
  Clone ID: MRT4577_83639C.1
atggctaccggggaggatgagaaggcggcggggcgcgtggcgttgcaccggctgttcgtgttcgcggacaggacggacgcggcgctcatggccgtgggcgccgtcgccgcggtggcgaacgggatggtgcagccgatcatggccttcatcttcggcgacgtcattgacgccttcggctccggagccaccgacggcgtcgtacgcagggtcgtccaggtatcatgttggacaatcgccggagaaagacaggcggcacgaatcagagccatgtatctcaaggcaattctgaggcaggacattgcgttctttgacatggaaatgagtgctgggcaggcagttgagaggatggcaggggacacattcctcatccaagacgccattggagaaaaggttgggaaggccatacaactcctttctactttcattggtggattcatcattgcattcacgagaggatggctcctggcccttgtcatgctttcaagcgtccctccgattgccattgccggtgcaattgtttcaaagttgatgacagggctctccacccgaatgcaagcaaactacagtgatgctggaaacgtggtggagcaaactcttggtgccattaggacggttgtttcattcaatggcgagaatcaggctataacaaaatataacatgttcataagaaaggcgtaccggtcttctctgcaagaaggtgctgtaaatgcccttggattcggttctgtgatagcaatcttattttcaagttatggcttggctgtttggtatggatctaagctgatagtcgagcgaggttacaatggtggcatggtcatttctgttatcatgtctgtcatgatcggagcaatgtccttaggccaggcaacacgatcagtgacagcttttgcagaaggccaaggagcagcacatagaatgttcaagataattgaacgcaagccagatattgacatagatgataacacaggtatcatattggaggatgtcaagggtgatgttcaactgaaggacgtgtacttcagctatccgaccaagcaagagccggcgctgttcgcgacgacgacctacgacaacatcctgtatggcaaggacggggccacggaggccgaggtcgtcgaggcggccaagctggcgaacgcgcactcgttcatcagctcgctgccggaggggtacaagaccaaggtcggggagcgcggcgtgcagctgtcgggcgggcagaagcagcgcatcgcgatcgcgcgcgccatcgtgaaggacccggccatcctgctgctggacgaggcgacgagcgcgctggacgtggagtcggagcgcgtcgtgcagcaggcgctgaacagggtgatgaggaaccggaccaccgtgatggtggcgcaccggctgtccacggtcaagaacgccgacgtcatctcggtgctgcaggacggcaagatcatagagcagggggcgcaccagcacctgatcgaggacaagaacggcgcctaccacaagctcgtcagcttgcagcagcagcaacagatgcagacgcagcagagctcatcagaagacatttgaataagatcgtgcgtttctgtatcttgctgtggctttgtctttcttgggcttttgtaaaagatctgcgctggttatcttttcaatgaaagggagtgttcagaattacaggatgaagcattattgggttcttattcctgactcccgtaaaaaaatatatatattgtacatagaatcttgcaatgtaattctgctccatggatctcaatgtttagtgcctacttctgattcctcctcttttgggcagtctatccctgctccacttggctcacccgatccaacggaagtcagtggtgctcctgacacagaggaaggagctacagacagagtgaaagtgggtaggtctcagaagaaagcttcgatcgccagactcttcaagctcaacaagccagagactcttgtccttgcacttggttctatagctgccgtagcgcatggcactatatttcctatctacggcacgctgatttccactgcgataaaggtgttctatgaaccgccacaagagctactgaagggctccagattctgggcaggcatgtttgctctgctaggcgcttgcgcgtttgttctgattccagtgcagtacttcctgttcggactagcaggcgggaagctcgtggagcgcatttttatctatttacttactgataccataagtctccaaacttgtgtcagcggatcaatttgcgcgaggctgtctaccgatgctctgaatgtgaagcgactagtcggggacaatctagcactgaatgtccagaccgcatcgaccatcatgtcaggcttcaccatagcaatggtggcgaactggaagctggcgctggtcatcacagtcgtgatcccttttgtggctttccaagcctacgctcaaatgctgttcctgaaaggtcttaacagaaacgcaaagctgaggtacgaggaagcaagtcaggtagcaacggacgcggtcggtggcatcaggaccgtggcgtcgttctgcgccgagagtaaggtgatggacgcctacgagaacaagtgcgagtcgccgaggaggcaagggatgaaggaaggcgtcgttggtggcttggggttcggcttctcgttcgtcgtcttctacctgacgtacgctctgtgcttctacgttggcgcaagaacagtggcttctcaggttttcttcgtgctggctttggccacaagtggggtctcgcagacgagtgcggctggggcagacagtgccaaggccaacgactcggccgtctccatctttgcaatccttgaccgtgaatccaagatcgactacagcagcgaggagggcgtgaccatcgcgagcgtgaggggcgacgtcgacttccagaaagtctgcttcaagtacccgttgagaccgaacgtccagatcttcaaggatttttcactgaggattccttccggaaagactgtcgcgctggtcggagagagtggaagcggcaagtcgacggtgatcgccctgctcgaaaggttctacgacccggaatccggcaagatcttcatcgacggcgtggagcttgggaccctcaaggtgagctggcttcggcagcaggctgggctcgtcgcgcaagagccggtgctgttcaacgacacgatccgcgccaaccccacgcgtccgcccacgcgtccggtggtgtcggaggaagaggtcgtggctgccgccgaagcagccaacgcgcacgggttcatcgccgcgctgcccgacggctacgacaccgtcgtgggcgagagagggagccggctgtcgggcgggcagaagcagcgcgtcgccatcgcacgggccgtcgttaaggaccccaggctgctgctgctggacgaggccacgagcgcgctggacgtggagtcggagcgcgtggttcaggaggccctagaccgggtgatggttgggaggaccaccgtggtggtggcgcatcgcctgtccacgatcagaggcgcggatgtcatcgccgtcttgaaggacggggcggttttggagaagggcaggcacgaagaactgatgcaggtgaaggacggagcctatgcttcgcttcttgagctcagttctagttctgcatgatcagaggggtagttggcagaatggaggcgtgtctgcattttttagattaataaggaaccaaagtattccagactccagacgcgtgcttgtgcacggataactagttaatcgcacaggtcactacggcaaaaacatgtatttggtgacgtgtttccgattttatgttgccaattaaatctgtttagcgactcctaaaaaagatatcactaatagaaccattttagtgacgcgtttttattaaaaaaaaaaaaggaggaaa

SEQ ID NO: 166734 - DNA, 228 bp, Zea mays
  Clone ID: MRT4577_8363C.1
gggcccacgcgtccggcataaggtagcagactttatcacattaactttcacatagagcataacgagggggggggaaaacagtgttttcctaacaccacaagaaaaaaataacccaatcaactcttcgactcgtctgccgaaacttcactgctccaacagataatgtatctaaagaacacgtacgacccacattataagctcggctacataattcgcctcgcggctctt

SEQ ID NO: 166735 - DNA, 180 bp, Zea mays
  Clone ID: MRT4577_83640C.1
atgcaggtggcatgcaaccacaccgcggaggcgcacccctccggcttcgtcgtgtctagcatggaggttcaggcccacacgtcatgtaaccggcgcgccggttactacgtgcgagaaactgcaccgccacttgcgccaataccgcgcctcctcgactgtggaacaggtgccgcgacttga

SEQ ID NO: 166736 - DNA, 411 bp, Zea mays
  Clone ID: MRT4577_83641C.1
cggccgctcaggcggcgggcgggactgccactgagcacgaacagagagcaccatcaccgctcccgattctaggccacgcaccgccaagtggacgagctagcaacctcctgatcttcgccatggacgacgccggatcatcatcctcgccgctgcgcgtcgtgatcgtcccgtggctcgcgctgggccacctgctcccgtacatggagctcgccgagcggctcgcgtcccggggccaccgagtgtcctacgtctccacgccgcgcaacctcgcgcgcctcccgccgccggcgccgcgcgtggagctcgtggcgctcccgctgccgcgcgtgcacggcctccccgacggcgccgagtccaccaacgacgtcccggcacaccagcgggagctccactggaaggccttcgacgacc

SEQ ID NO: 166737 - DNA, 536 bp, Zea mays
  Clone ID: MRT4577_83642C.1
gttctagtagctttttcctttaattttttattgcctgctattttctcctgagaacaaactaaatcaatcaaccgaatgatcaaattttcggcatactttttttctaatggaatttttcttcacaaactatcaaatgtttaattaactaagcatactgcagaacaccatcggatagggagaatttaaatcatattgttagctgtcttgcattgacgcatagcttcattgaatccttggcatagcgtgagatcgtgttggttttcagcgcattgcaagaattgtttgatttcccatgagcatggtccagtttgtggttgttgggattgttggtaggttgagtcttggtaagctggttgagctgctggtgctacttctgcctttgaatcactgccacctgagaataatcctgtgaccgcatgtccaacagtgtgtccgatagctgaaccaaccgcgacacctcctgctgtagcggccatttgttggaacattgatggttggcttgcttgagctgttggagatccaacggcgcttggtgc

SEQ ID NO: 166738 - DNA, 316 bp, Zea mays
  Clone ID: MRT4577_83643C.1
ccagaggaatccacattttatttcattttatcccccggggcccggaaaaaaacaggaaaatacttcccatcgacaacgggaatgaccttataaacacaaccgtttaagccctaagctccatatcctacggaatttttacgaccctttcggggggcataaacccccctacgggtttttttaaacatttagattccccgcccagaacatatccgtaaaactgggcccctacacaaagcccacgaaccacattagaccattggttacaaactttggtggcccaagccgaaaacaaggggcttggaatcctccacgtttt

SEQ ID NO: 166739 - DNA, 297 bp, Zea mays
  Clone ID: MRT4577_83644C.1
cgcttacgtacaacaggacacgccaagcattcatcatcacagagcttactgagattatctctggtgcatcagcccttgacggatatgtggatagactatcatcacttgtccctttgtacccatttgcgttcctctcacatgtacgctactattcttccggcggctcacattcaaccctaatcgtttcactaggacttgatacacgtattcttacgcttgattgccgttatgcggacaacgacagttattatgccagagcgctctttgcatattgcaaaaagaatgttctacatctac

SEQ ID NO: 166740 - DNA, 237 bp, Zea mays
  Clone ID: MRT4577_83645C.1
agagatatatctcagccctttattagtttttttctaggacacacatgccgctatgaaggtcacattagcacaatacctcataatagaaataaaaagagggcacccaaacaatgggttgttgtctaaagctgaccggattgatcaaacaaaaccggttgaatggcagcatttgttgatgctgaagaaaggcggggccctatgggttaggctctgacaaaggattaagtaactggtgtc

SEQ ID NO: 166741 - DNA, 408 bp, Zea mays
  Clone ID: MRT4577_83646C.1
cccacgcgtacgatcacgattatgctttttgcggcacatcacatccaatcattgaatgcaatgaggcacatgcatggaaacgagcctgcaagccaaaaacaacaccaaggccacgctgacccaggcggacgggattgacgaactccctggggctgcgcgacgcgatgccgggcacgagcaggccggtggcccgggataccagagagacagggccctcggggtagttcttgccctccttggccgcacgagcaaggggagggaaacactcccccgcaatggtaaccggacaggcactgatctcaccctgggccaaaggaaggcttgacggacgcgtcgccagccttggcgacccgcgatcccttgaaccagcccccccaattaaacgcaaggggccaccgtgctcgaagt

SEQ ID NO: 166742 - DNA, 251 bp, Zea mays
  unsure (1)..(251): unsure at all n locations
  Clone ID: MRT4577_83647C.1
ccgtccgcccacctcgggggtgtgtcagcgcaccggtgtgaaggactcgtcgtattcctggcatggggatctgaccatgacagctcgtttacggggccttgctctcttttgtttatggtctaccccgtcntgtggggggggggggggctttgtgtttgcctttctcttctcgcgggggtagtccctactttaacatgctcggtagttttctggatgccctgacattgttttcgtgacacgtggcttcctct

SEQ ID NO: 166743 - DNA, 524 bp, Zea mays
  unsure (1)..(524): unsure at all n locations
  Clone ID: MRT4577_83648C.1
cgaggtcgagtctcagctcactctcgccactgctctcctactttcctcgccagcggcggcgggctcctccggcgacgaggctccaggagtctacggctaagccccgtccgtctgaatcctgcgcgcttcggtgcagccgcccgctcccgccggccgcgtgatctggttgtgctgaaatggccggcggcattacctgtgggtccttgctgcagaaattacagcttgtatgggatgaagttggtgagagcgacgaggaccgtgacaaggtcctgtaccagctggaccaggagtgcctggatgtttacaagaggaaagttgaccaggccaccaactctagggatctccttatccaggcgctggatgactcaaagatcgagcttgccagacttctttctgcccttggggaaaaagctgttgcgagaactcctgagaagacatcagggacaatcaagcaacagntagctgctatcgctccaacacttgagcagntgaataagaagaagaatgagagaaagagggaattt

SEQ ID NO: 166744 - DNA, 168 bp, Zea mays
  unsure (1)..(168): unsure at all n locations
  Clone ID: MRT4577_83649C.1
gttttgtttatctcattcgttgtagttcgatggcagcattcacctcgcagggagtgcataaactcatatagaggatcagctaccacgacttggtgtcattcaaaaacccaccctacgtttaccgnnnnatagacctcccgctgcgttagccaaccctctccaatggag

SEQ ID NO: 166745 - DNA, 353 bp, Zea mays
  Clone ID: MRT4577_8364C.1
aggggggaaaccaagagctaaattttacacttggcgtaaattataataatgcaggtaaaaggtgctaatttaaaacagactgcattaacgttgtccgggcaaaaggaacacgagatctgtgcaaaagacgttacacattagaaaaggttgaagtatcaagggtagttcttgcgctctgtgccttggatttctgttccatttgcgagatattcggatcgggaggcctaagaggaccatctcaacattacccgattggtttaaagataaggggttgccactgatgacggaggaaaccacaaggctcatgaatttacgggaggtagagactgttgtggtagtaagagagccaaacc

SEQ ID NO: 166746 - DNA, 613 bp, Zea mays
  Clone ID: MRT4577_83650C.1
cctcgaggccggccggatcctgaaattattagcgcaggtcgagtatcaagctagctattccggagcacgcgctagacacgccagcagcaatggcggttcatctggtcgtcgaggatctcgacttgttgtcctcctctgccttcttgggcgtgtctagaccagaagttcaacgtcatcttcatcttccacggactacatgtccgacaccggcaacctgcgcgtgaatgacccccccgccgacctgacgctcatccagccgtcctacggggagaacatctttggccgctccacctgccgctgctccgaggggcggctcgacgccgacttcctggacgagaagctcggcatgccgctgctgaagacgtggaagcacggcgactcagagttcaagcagagcgcctgcatggggatctttggggagaccaccatgaactcggaggttctatccagactctgggcatcgcctacatagatctgagacaacggtgccctcaacactgagatctagcggatgctatagctgatgctcgtcatctgtacctctatgatgcctgacagtcgtacctgtgcaagtacctgctcaagctgaactacttcatcggaaaatactaca

SEQ ID NO: 166747 - DNA, 225 bp, Zea mays
  Clone ID: MRT4577_83651C.1
agatgatagtttgaagaactattttaaacaactgtgtgacaacttgcgttcactggttcagtgcacggagaacatccagagtctctccataatgacatgctgctccctggttttcatggatgatttgggtgagaattggacccctcaatgtctccagaagctcgaggtcggttgcagcgcatttgacatattgccaagttggtttggctcactttctagtatctc

SEQ ID NO: 166748 - DNA, 328 bp, Zea mays
  unsure (1)..(328): unsure at all n locations
  Clone ID: MRT4577_83652C.1
cacccctcctccgtctcacgctctttcaggtctatgtccctgatccacctgtgnangcgcaagatttacggctcttaaaaccccacaacctgtttatcacagaaaaaaaaaaaaactctccaaccccaaacaaaccatccatggaaagcattgcccattatactctattatgttcacaaaaggttacgacatcagtgcacaacgcttacttaccaccagcatagctcaaagattcacaaacgaaactcaaggacatacttatctctagaaacacagaaagaagtaccttatttaccatataagcacacacatgatccaaccaccatac

SEQ ID NO: 166749 - DNA, 313 bp, Zea mays
  Clone ID: MRT4577_83653C.1
aaaacccggctcgacccactcatccggtttttttttgaaaggctgatccaataatttaggagacaagattctgcgactgaggagtggttataaatatataaaaaactcaacccaatgtccataaaaattaaaaaaaatttaacttataaaaatattaatatacttaaattaaaaataaaattgtcttcacttttttataaattcaaaattttacttacaccttgattgtccactataataatttttttttatttgtgtaacttaaattaaattaatttgccacattgtttacaactttattactagcaaaaac

SEQ ID NO: 166750 - DNA, 608 bp, Zea mays
  unsure (1)..(608): unsure at all n locations
  Clone ID: MRT4577_83654C.1
ctctcaagtctcaaccgcagcgacacgccaccacctgagcgcgccaacctcgtgctcgtgaacacacacacacacacacgcagctagccaaccgtctgccgcggatggccacctcgggccacgccgccgtggtggtcgacatcgacgagccagcctcgtgcggcggcaacgccgatgcggcgggcacgcgacagctgctcccaccggttgtgctcccgccggtgacgtacgtgctccgtttcaccgacctgtcgtacagcgtgaagaagcgcggtggcggtctgggctgcctgctgccgcggcggcggcccagcaaccgcctggcgtcctcggacgcgccggcgccggcgccgtccgacaccaccaccaagacccttctcgacggcatctccggggaggcgcgggacggggagctgctggcggtcatgggcgcgagcgggtcgggcaagtcgacgctggtggacgccctggcggngaggatcgcgcgcggcagcctccgcggcggcgtcacgctcaacggngagccgctgcagggccggcgcctgcgcgccatcttcgcgcacgtgatgcaggacgacctgctgcacccgatgctgacggtgcgcgag

SEQ ID NO: 166751 - DNA, 870 bp, Zea mays
  Clone ID: MRT4577_83655C.1
attgggacctcgaaaaggagaagggaaagcattctccaatatccacctcctcctcgcccccctctctctctctaaaagaactgaaaagataagggggaaatcctcaagtgctcgttacataaaccctaacctcgttggattcgcagcaaaagcccaccaattggaagccctccgatgttccagctgcatgctggagctgagccgtgctcggtttgacgaaattttgcatcccttctgtgcttggaccacccgattgaggctgtttctccgagggggcgtgccagcggtttcgcggcccaggtcctcacctgtgctatccggcgccggatccgggtttgttccggtgagaggtcgggcttttggtggggtctgtacagcttggagctcaatttgccggcctgagttggagtcgcgactgcggtggcggtgattgaggtagtcgcgtcgatttggcacgcgtttcctgccatttgggtgagccagcctttcctggcaatcttggcgggcgtttcgtcttgctgcgtggcagaaaggtgtgacctttgtgccgtgcgatgcatcccaaggcacgaatccacgccgacccagtgcgcgaggtcgaccactttgactgcctgccggattcgctcgtcctgctgatcctgaacaaggtcgaggacgtgcgatcgctcggccggtgctacgccgtgtccaagcggctttgtgggcttgtcccccttgtccatgatgtgtatgtcaagattgaccgcgtcgtggcggtcgacggcgacgctgaggacgcgctcaacctgtcatcgccgaagcctcggaacatcttctcgcacttcctgaagctgatgctcttcaccatcatcaagcctttccacacat

SEQ ID NO: 166752 - DNA, 687 bp, Zea mays
  Clone ID: MRT4577_83656C.1
aaaaagggaaagcattctccatatccacctcctcctcgcccccctctctctctctaaaagagctgaaaagataagggggaaatcctcaagtgctcgttacataaaccctaacctcgttggattcgcagcaaaagcccaccaattggaagccctccgatgttccagctgcatgctggagctgagccgtgctcggtttgacgaaattttgcatcccttctgtgcttggaccacccgattgaggctgtttctccgagggggcgtgccagcggtttcgcggcccaggtcctcacctgtgctatccggcgccggatccgggtttgttccggtgagaggtcgggcttttggtggggtctgtacagcttggagctcaatttgccggcctgagttggagtcgcgactgcggtggcggtgattgaggtacaccattcttcgatttgcttgttgcagttctcgatctgaggttcttgttgatttattatagcacttctgacgcatgcggccatgcaggtttgcttaaccgcatgccatttctgccatttctgccatttttctctgctcgctcatccgtgttcttacttcttaccaccgatgttcgttctctcttcaggtagtcgcgtcgatttggcacgcgtttcctgccatttgggtgagccagcctttcctggcaatcttggcgggcgtttcgtc

SEQ ID NO: 166753 - DNA, 157 bp, Zea mays
  Clone ID: MRT4577_83657C.1
gcagctagagcacaaacaccaccagaacatccattattctccaacagaacctacaccaagtcagctttatatagcacaatggaagacccatactcacactcacactgacggctccacgactcaccatctctgcctgacatcacataacctcctcacg

SEQ ID NO: 166754 - DNA, 273 bp, Zea mays
  Clone ID: MRT4577_83658C.1
gataccgctataaaatattgagtgaactatcaaagtcattttgttatattactgaaggtaacctaggtaatcatatattgtggaccagatttcttatgtatacgattatacttttttttcttatgtttattatactactattggtatgaatgtgagagttcaaatgaagaagatgaatactctccaaaggtgtgagcattttaagtcgccttgtccttttattttgacattcccttaaactttattttgtatgatattctgatgttagttttt

SEQ ID NO: 166755 - DNA, 464 bp, Zea mays
  Clone ID: MRT4577_83659C.1
tttcttttttttttttttttttttttttttttttttttttattaaaaccaaaaacttgctggtactgccaaatattcggtaacgcatgcatgcatgttttactgatccgctggggttatgcacacccaggacacaaaccgaggcgaggcgaaacgaggcaatactagcactccctggtgcaaaagcagggggggcgtaggcccttgcacaccccgccggggaaacctttggtcaggcaaacgtttgcgcatttggcgtccctccagcaaggccccttgaagcggaagctttgggactggaactttctcgccgacaccatagtcaccggcccgccttgggtcccggggtaacaaacgagcaggggggggaccacaaaaagcttgggggagagaccgcccattattctatcctttgaaatggaatggaatggaaagtttttgtgtgtgtgttggctataagatata

SEQ ID NO: 166756 - DNA, 300 bp, Zea mays
  unsure (1)..(300): unsure at all n locations
  Clone ID: MRT4577_8365C.1
catcctggttgtgaaaaggggggtgtgcgtagctacttcttcatcatcgccgccgcggtcgttgccgtcgtcctcgcgcttatcccggccggcgccacaggtgccggnctcaaggtcggtttntacagnaagacatgcccgtnggnggagtncttggtgcagaaggcggtggctgncgncttnaagaacaacagnggnatngncgncggncttatncgnctgnacttncatgactgnttngtnaggggctgngaaggtttggtgctgatngactttgaggngaacaacacggnggagaag

SEQ ID NO: 166757 - DNA, 506 bp, Zea mays
  unsure (1)..(506): unsure at all n locations
  Clone ID: MRT4577_83660C.1
cggncgcccnntntttttttttttttttttttttagtgctcacaacatgaattttctttcacttttggacttttgaaaaaggacaccatttgggcttttctgatatcacatttccatccttgattgaaacgggctttatttttcattaccaaaacgggttaaggccccatcctttaaaaatcttagggtctgcaccaaacccttaaagtttggaagaaaagggtaaatttttgcacctctggggggggaccagaaccttctggaagcaaaaccttgagaaaatagggggcccggccctttaataccccctgccaggaccgggggcgcccaaaaatttgcctgtgtgaatggtggaggacccttccttgttgtacccgaccaacccctgcgtgttcttcaccccgtccttgtgtgctgccggggtgttcaaaaccgtggccttggcccccgcggtggtgatgaaaaccacgacttatggccccaagagggatgtgacaccttctccc

SEQ ID NO: 166758 - DNA, 299 bp, Zea mays
  unsure (1)..(299): unsure at all n locations
  Clone ID: MRT4577_83661C.1
actgtttactaaaaacacagggttcgtgctaagccttttttggtgagatacaacnctcccacaaaaaaaaatggaaaggattagaggagcgaccttccaaacacaacggctatgacccccaacaagggcaaggagccgagatccatacaccctggaccaacattaggccacaaaatgagagccacgcgctattagcgcctgcccctcctaagtccagcatcaccacaagactctgcggggacatgcttgacttcagaaacaccaccccgccgttagccccggatctgaacaatcatcac

SEQ ID NO: 166759 - DNA, 885 bp, Zea mays
  unsure (1)..(885): unsure at all n locations
  Clone ID: MRT4577_83662C.1
cggccgggnnattcagtcccttcaaactagttgcaagaacaaatgcgaacgatgcagatgctcaccacccacctgaccaattcacacatcgcagaggccggcgggcgttgctgaagaacccagccatgtcgtcgtcgtcgtcgtcaggtccagcgagggggagcagcgctagcgcgggcgagagcctccggaactcgtgcaacgacttcgcccggaccctgtctcggctgccggccagcatcatggaggggctgtcgaggtccatcccccgccgcgccccgaggaggagtcacccctcggttccccaccatctcctgcctccgccgccgcctccgcctcagctcgtccccgacgagctcttcttcttcagcgtcttcgagcagcagtacggcggccaccaccccttcttctacgggtgccgcttcgccgacgccctgcgggccgcgcggagggagggcaagctcgttttcgtgtacctccacgacccgggccacccctacaccgagcccttctgccggaggacgctctgctccgacgtggtggtggagttcctcgacgccaacttcgtgtcctggggcgccgtcagcggcagcggggagggccccggcatggtagcctcgctgcagcccggcagcttcccgttctgcgccatcgtcgctcccgtctccgatgaaagcatagcagtcctgcaacagatagaggggccagtctcaccgtccgagctggtggagatcttgcagcgcaccattgacgagcagcgcgcgactttcgggccctccggccctgtcgaccaacctgcagctgccagatcggcagaagaagaaagagaggaggagatcggcgcagcggctacgacaagaacaggacgctgcttacatggagtcc

SEQ ID NO: 166760 - DNA, 268 bp, Zea mays
  Clone ID: MRT4577_83663C.1
ggggtatgtaactcttggcttacacaaagacaattaaaacaaaaacaatggggagctcgtgcgccttccgcacgtcgctgcagctctcatggagatggaagaatggaagcgagctgccgtcagctagcatagactagtcttgtctcggattacctgcggcagctctctccttttgtcctcttcttcacttgtggtaaggaggatgagattagctgattgattaccgatttgtctagtctagttagttctgagagaccaaacttattta

SEQ ID NO: 166761 - DNA, 424 bp, Zea mays
  unsure (1)..(424): unsure at all n locations
  Clone ID: MRT4577_83664C.1
aggaacgcggcacaaaccatcagggcacaacagctgcagcaactcgtgctacctagtgatcaaccaagtagatatggcaaacctttgtacctactctcagcaacaacaatttgttgcattcaaccaactggcagcattgaactctactgcttattgacaggagaaacaactactaccattcagncagctagctggagtgagccctggtaccttcttgatacaaccacagttgttgacgttgtaacagaacgctgngcataaagatggtagnatgttacaaatggaataattggtggaattgaagtaagttgttttgataaaaataggaggattatatgaagaagccatgattggtgagtggaaaattttagatttgttatgagttatagttaagtaataaaggagtttgtttgatgtttagggg

SEQ ID NO: 166762 - DNA, 385 bp, Zea mays
  Clone ID: MRT4577_83665C.1
gggaaggaaaaaaaaatataaacaagccctgggcctcaaattatccaatgttcacagagttaaaatccctcttccccaatataccccgggtttcctgcaaaatttctggacaatttacaacttggctcattttttacgaaaacaaagaaaacggggaagccttaaccctgggttgggcagggggaacctggccctacaaaaaggagtactacccgtttaccctcctgaaccacataaacataggggggtttatcacaactgcatcgacaaacccataaaaacgggatgactggtcatgcaaacttcattgcagtgattgccaagaaaattaatgccccgaaaaggatcctcgtcacacttttttcttttttcactgggaccccgt

SEQ ID NO: 166763 - DNA, 205 bp, Zea mays
  unsure (1)..(205): unsure at all n locations
  Clone ID: MRT4577_83666C.1
tctgttacagtcttcgcacaaatattcgctcccccaatgccaaaagccgcgagactttccaaatctttcttcccccccttcatcttctttgcgcaaaactagttttgattctcgttcttctcttccatttcngccgaataaagatggcgttngatgcccccctcctcgcgccgttctccacgcgcggcgtcgtctctgtggctct

SEQ ID NO: 166764 - DNA, 558 bp, Zea mays
  unsure (1)..(558): unsure at all n locations
  Clone ID: MRT4577_83667C.1
gccagccgtgcggaagggcgggactgtgggagccctcgcaggagccgcggcgcaggacgcggagcaggaacaacgggaggccgcaggggatgccgtgcgggctggggaacacgctcgtggaaacgctacttctcgcggtatcggtggggctcttgaccgccatgctgaccgacctgctaagcaaccagcatagcaacgagtattactccgacctctacatgctaccagtgacgcttcaactaccacggctactgcaacggcctctgcgtcgtctactcgctgtacactgccgtgtacactgccgcgaccaggcctggctccgggttcggcttcttgctcgaccagctgctcaaccacctgatcactgtacctgatcccagcggcgggcgcactgctggaccatctcttcaacctcgactacgacgggaacaaggaggagacttgcagtgaatcttgcagcttttgccgtaaggtgtgcagctaggcgcgcatcaccttcggcatcancctctgcaccatcctctggttcatcatcctgtccctcatcctcttgaaccg

SEQ ID NO: 166765 - DNA, 269 bp, Zea mays
  Clone ID: MRT4577_83668C.1
cgggcggtccgtcgtccggatcctcggcgtcaccgacgacccgccgccgccttcgtccgcctcctctactccggcgtgttcggcgaggatgaggatgacgacatgtaggagcacgctgtgcaggtgctggtgctggcgcacgcgtaccaggtgccctggcagaagcgggcgtgcgagttctccatcggctctctcctcaccgcggactctgtggtggacgttctgcagctggccggcctcttcaacgctccgcgccttcagctgcgctg

SEQ ID NO: 166766 - DNA, 231 bp, Zea mays
  Clone ID: MRT4577_83669C.1
cccactcgaccgcccgcgcgtccgaatacacatatgaagaatatactcccacacataacaccagggaaatatgaaaattttaaaaaagcggagcgcttacaaaagatccaaaacgcaggaacacttaccgatcatcacgcaaaacacattattccaacaacagaaatcacaagttacacacaaccactcaatacacatataccatagacactacaaactagaaaacactct

SEQ ID NO: 166767 - DNA, 652 bp, Zea mays
  unsure (1)..(652): unsure at all n locations
  Clone ID: MRT4577_8366C.1
aggctaccgatccagcagatcggcctcccccagcagctcctcgcctctaccaggccatctcccccttcccttcaggtccgcagcagatcgccggcgtcgcccccaggtcgtttccctaggtcgctcaagctcggcccaggctgtccgccggcaccgccaatcgcctcgcttcaggtcgcccaagccagccggcgccgcccctcagatcgaggtcaccggcagcagatcaaggtcaccggcagctaatcgcctcgcttcaggtcgcccaaagcgtgctcccatggtgggcgctccgagaggacgacgacggcgtcttcaggtggacaacattgatgaaagcgacttatttgatgatatggttcaagagatggaacagattttactcaattcaggggagccccgtgaaagtggaccttctactgataaccgcgtgaataatgctcaccaaaatcagcatttcagagatggcagcaccactgcctctacctctggtacagatgatgcatatgtatatcccctttctcgcaatctttcggaaattgattcggtggaggttgtggnggcaaagcaaagaacaggngatgtttctttcggcgagcggatggttggggtcaaagagtacactgtatacttgttgaaaagtgagagtggc

SEQ ID NO: 166768 - DNA, 299 bp, Zea mays
  Clone ID: MRT4577_83670C.1
ctgtttcttttcaataatgaacccaaccaaagaagtgcaatagtcatatcagaaatccaacccacttcctcccaaaaacatatctacataccaacaacaacaattgcaacagtttctaccagcacctagtcaactaaccatattaaaccctaccgcctacctacaacagcaacaactgctatcatctaaccctctcactataaacaaagcacctacatacctgcaacaacaattattacaacaaaatataccatctctgactcaactaacttttgcaaacccttcttcccacttacaac

SEQ ID NO: 166769 - DNA, 212 bp, Zea mays
  Clone ID: MRT4577_83671C.1
agcagtggtaacaacgcagagtaccgggatcgatggccttgtttattttttatacgccgtctggtagctttacctggacttactataaaaacgcctaattctggaagtaatctgaaaaagaaattccattctgggaaaaaagagcaatatcggatacggcttcctaaacaaggaggggggaaaaaaaagtactctgcgttgttaccactgct

SEQ ID NO: 166770 - DNA, 211 bp, Zea mays
  Clone ID: MRT4577_83672C.1
gatgagggaactttttcactaacgctatctcccgatctcgatggcgaaacctcgcgtcttcttcgacatgaccgtcggctgcacatcggcggtccggatcgagatggagctgtacgccatctaggtgcccaagaccgcggagaacttatgctcgctgtgcacgggcgataaagccgtcggcaagtccgggaagccggtccactagaagggc

SEQ ID NO: 166771 - DNA, 189 bp, Zea mays
  unsure (1)..(189): unsure at all n locations
  Clone ID: MRT4577_83673C.1
attgggtacctcgaggccggccgggagacggtagtccgcaccgcacacacacgcacaggcaaagcacagcgatctgccttctaccctgccctgccccgcccccatccagcccagagcagcagcgcgcggtgccggncggcaaccgcagctggtcatcaggtctctggggtctctttctctcatccccct

SEQ ID NO: 166772 - DNA, 748 bp, Zea mays
  unsure (1)..(748): unsure at all n locations
  Clone ID: MRT4577_83674C.1
ggctgtggtgcagcgcgtcctctcggccagtgtcgaggtcgaggggcgaatagtgtctgcgatcggccctggactcctcgttctcgtcggcgtccacgaggcggacacggactccgacgccgactacatttgtcggaaggtcctgaacatgaggctgttttcaaatgacaagactggaaaagcatgggatcaaagtgttatgcagcgtaactttgaagtgctattggtcagtcagttcaccttatacggcatcctgaagggtaataagccagattttcacgtggctatgtcacctgcaaaagcgaaaccattctatgcttctctagttgagaaatttcaaaggtcatactcggctgattcagtgaaagatggtgtttttggagcgatgatgaaggtttctttggtgaatgatggccccgtgacaatgcaaatcgactcaccctcactgcaaggtgctgctcagtcaagttggatctgaaagccctcctgctgtgcacttggtatgaactttgcgtctatctgttctagcgctttgtcattgccagtcagttacagcactgcttcagtctgcggaggcatagccttttgcgcaaatgacagaaccagacacattctctagactatatttgtcatcttattcatttttctactgcggataatactcttatcaatatgggagctacacatgagncttgtggcttctcaacattgtagtatctaggggtcttattactgaattagcaatctg

SEQ ID NO: 166773 - DNA, 305 bp, Zea mays
  Clone ID: MRT4577_83675C.1
gctgaggatgatgatgaccttgatctttttggtgatgaaactgatgaggacatggaggcagctgatgagcgtgccgacgctgacaaggccttttctaaaaagaaagaaagtggtgaatcctccgtccttatggatgtcaaaccatgggacgatgagactgatatgaagaagctggaggaggctggccgcagtgcccagatggagggcctgacttaaggagcatcaaagcttgttcccgctggttacggcatcaataagatgactgttatgtagtcaattgtggtgtgtcttgcgtacatacacac

SEQ ID NO: 166774 - DNA, 1211 bp, Zea mays
  Clone ID: MRT4577_83676C.1
cattgggtacctcgaggccggccgggaacaaaggcccatcaacgaggcggacgggtgcgcgcattgcactagctccccccaggctctaccggaaccgccgccgtttctggatctctcgacggcgagcagcgactcgtccggtcgtccctcagcactgtgcttggcggacgcaggacaagacacaggatgagggctgtggtgcagcgcgtcctctcggccagtgtcgaggtcgaggggcgaatagtgtctgcgatcggccctggactcctcgttctcgtcggcgtccacgaggcggacacggactccgacgccgactacatttgtcggaaggtcctgaacatgaggctgttttcaaatgacaagactggaaaagcatgggatcaaagtgttatgcagcgtaactttgaagtgctattggtcagtcagttcaccttatacggcatcctgaagggtaataagccagattttcacgtggctatgtcacctgcaaaagcgaaaccattctatgcttctctagttgagaaatttcaaaggtcatactcggctgattcagtgaaagatggtgtttttggagcgatgatgaaggtttctttggtgaatgatggccccgtgacaatgcaaatcgactcaccctcactgcaaggtgctgctcagtcaagcaatggttatgatgatttggttgcggatggtgaagcaagagtagctaaagagacgtgttaaaattctgggtctcttgctgacctagggtttagggttctccatcacatctttctcattcagatttttttggtgcagttggatctgaaagccctcctgctgtgcacttggtatgaactttgcgtctatctggtaggctggtcacaaagaaaatatcagaattgaagttggtattagtcatgtgatttgccgttaattttttttaaacagttctagcgctttgtcattgccagtcagttacagcactgcttcagtctgcggaggcatagccttttgcgcaaatgacagaaccagacacattctctagactataaaaaaaaaaaaaaaaaaaccgctactacggataatactcttatcaatatgggagctacacatgagcttgtggcttctcaacaatgtagtatctagggtcttattactgaattagcaatcttcagtacatttatggatgaagttcagctctgatctatatatcagctgaactgtctttgtct

SEQ ID NO: 166775 - DNA, 786 bp, Zea mays
  Clone ID: MRT4577_83677C.1
ggccgcttttttttttttttttttattgaagattgctaattcagtaataagaccctagatattacattgttgagcagccacaagctcatgtatagctcccatattgataagagtattatccgcagtagaaaaatgaataagatgacaaatatagtctagagaatgtgtctggttctgtcatttgcgcaaaaggcttatgtctccgcagactgaagcagtgctgtaactgactggcaatgacaaagcgctagaactgtttaaaaaaattaacggcaaatcacatgactaataccaacttcaattctgatattttctttgtgaccagcctaccagatagacgcaaagttcataccaagtgcacagcaggagggctttcagatccaactgcaccaaaaaaatctgaatgagaaagatgtgattgagaacttatattcaccaaggctcaatcacacctaggtcagcaggagacccagaattttaacacgtctctttagctactcttgcttcaccatccgcaaccaaatcatcataaccattgcttgactgagcagcaccttgcagtgagggtgagtcgatttgcattgtcacggggccatcattcaccaaagaaacctgcaaggctttccaatttacacctttttttctgagaaggtcaatcaaacgctatgagggccaataacatgtttcactcagaggcaccttcatcatcgctccaaaacaccatctgccagtcaaagtaggaacatcatcacatatattttcatgtgatacagtgactcatggcag

SEQ ID NO: 166776 - DNA, 452 bp, Zea mays
  unsure (1)..(452): unsure at all n locations
  Clone ID: MRT4577_83678C.1
acccccggttcgacccacgacgtgctttaatgatgaaggccggcactgactggaggaaggcgtctcggcagtactcgaggcaacggttcagcaacctgagcctgaagctccagaaggatgggtccctcagtgccgagacacgataggcaggtcaccacgccaccagacggagaagtcgagaaggccatatgccgatgtcctgagctgaagcatggtggctactgagtgttcatccgtttgtctgtttgttttgctgtgcgggatttggtcagtcagtcaggttattcgattccacgctccattttacacgtacggtgaatctgtaattcttgggtttgtgattgtaaagatggtggttgtgcccgtncgtattgtngatcgatgcagnagtgtgtacttacgaagaacgctggtgtggctgaagttgagttttggttgtaacttgtgtttgt

SEQ ID NO: 166777 - DNA, 269 bp, Zea mays
  Clone ID: MRT4577_83679C.1
tagagcaaacatctcattccccaggccaccccccctctgccctccctcacctccccccctctaccttttgtagctttcccattccccctcttgcgtgcaagcatcttctccggttctccccgctctcccatctttaaccgccccccctccctccctctccgtggtcttggaggagctcgctgttctacggctggctgcctgccgcggcgatccctgtctgttcgtttccgtcgcgcgggagccgcggttgcttttgctagcttgccttg

SEQ ID NO: 166778 - DNA, 840 bp, Zea mays
  unsure (1)..(840): unsure at all n locations
  Clone ID: MRT4577_8367C.1
gncgggtttcatacaaggggctgcgcggngtatatttcctccacttcacacgcttcctccacgccacctcgatctgtgcggcggcaaacccagagatccttgccccgtccgccggcgaaaggcgctcacctcccctcttcgctgtctgcgatgcagaggatactatcgagggccgctcgccggtgcacgaactcctcggcggcgttcaactcacctcacgcgcaggccaatgcagcaagtgttcactctgaagacgccccaacttgttcaaacatgattacagagaacgatgattttacatggaagactagttttgttagacccatgcaatcagaatncgtcaatgccctccgcacaggtgaccggcagcgagcatcattgattctttcgaactttcatcacactaaggaatcactgaccaaggaagatttttcttatatattggagtattgtgcagaggcacctgatcctttgtttgttatggaaactttggaactcatggaggagaaggccattggcatgagtaaaagtatctacagatatgtcattagagctctgagcagagggggatatgcgaaggaggcacttcactggctggctcttctaggggagaaagaaagcactcatgccactacaccgatttttaatatctttctaaatgcctgtggtagagcaaatctgaaggacgccgaaaactgtctagagatactggaaaatctttttcttgggaagtctgaaatacatactgtgagcttttgagcttgcagtgttacagggaaatttgcctgcagcttatgatatctggaaggagtgctctaggtattatagccccagcattat

SEQ ID NO: 166779 - DNA, 243 bp, Zea mays
  Clone ID: MRT4577_83680C.1
ctcacccgtacacggacgcgtgtgttgtctacgaggacacacacggatatggtgagtaccgtgaccgagtggagcggggacaaaggaagaggcccgcacttatagattttgtctatggcaatatctaagcaccaaggctgggcccaccttaagtttaaaggaacagaggtctgtcgttgacgatagatctggacttaaactaggtatactgaggtttctttactagcactccatgcatgagga

SEQ ID NO: 166780 - DNA, 354 bp, Zea mays
  Clone ID: MRT4577_83681C.1
ctgacgcctatccaacgctttcgtattgaacaacttgctcaaggacgggggacggtgtcaatgcggactgcgctatgccactggatcaataatgagccctgcaaatattgcgaaaagtacacttttgaatcatactctccgcaccaattgttagcttgatggatgccttcagatgaatgtcacatacttccaaacgtatatcgctagcgaaagcccatgaatattgatccgtgcacccttgtaatgatattcgcaaggaactgattgaagagagaggggagaggatgatacagtatttgacaagcaaagtgcattgttagctttggccgtttcatacatagtggtgattaatat

SEQ ID NO: 166781 - DNA, 244 bp, Zea mays
  Clone ID: MRT4577_83682C.1
ggggggggaaaacccaccccggtttgggtgcatatttgcgggaaaagacaggacaaactttccatttctggtcatgggggggggggcacttcgctttcgggaaccaatggttttttttttttggccacgttcaggggcttacgggttggggcaataaggttttttttttaccgccaatcaaacccgccaaaaaaggggaggggggcccgcgttctttaccctttttctggggagccccaacttt

SEQ ID NO: 166782 - DNA, 216 bp, Zea mays
  Clone ID: MRT4577_83683C.1
cggcccggaatcccggggcggaccacacccttccggactggtttaatggattctggaaaagatcttgcttttttggcaccacagggtcggggatgttttgcaactgcggatcaagctgcggttgcggttaaagctgcaagggcggcaggaagtcccctgacctggaggagacaagcaccgccggccaggccaccgttgtcctggggggggccccgg

SEQ ID NO: 166783 - DNA, 412 bp, Zea mays
  Clone ID: MRT4577_83684C.1
aaaacccagggccttccccttgggtggctttcccctttcccaaggcgggggctaaccctttcccaaccccctaaaaaagggggtaacccgaaccacaaacgggaaaaaaatcggaaacgggggctgctaaaacggaccgggggattttggttttttacccttgggcaaccggtcccaggaatgggccgggcaaggccgggggggagcccaaacaaggggggggcacccccggcagggggcccagcaaccggggcggggggtcccggcccgaagcggggcttggggggggcccgcccctgcgggggacaaataggattgccggggtggcgggggccccccccacgggcctgcgggggggggaacccccccccggggggcacctggataagccccgggggttgggccaccccct

SEQ ID NO: 166784 - DNA, 290 bp, Zea mays
  Clone ID: MRT4577_83685C.1
ggaaaaaaagcccttgcaagctcactcaaatggggagaaggacccctccaagagtttcaaatttgaagcatgaaaaattctccctcctctccataaaaaagggccgaaaacacccgccccgcccataattgattaaggaaattgggcttttttttttttggaccatcccatggcaggggcaaatccctttaagggcattaacccccccggtttgggtgggggccccccccctaggggatctgggaagaacttatttgctaaaacaagggcaagaagggttttttgcattc

SEQ ID NO: 166785 - DNA, 420 bp, Zea mays
  Clone ID: MRT4577_83686C.1
ggggaaaaaaaggtcccaaaaaaaaaaattgggggtgggttttaacccaaaaacccatttttttttcaaaagggagccctttaaatcaaaaactttttgctttttttgcccgggggacccggggaaaagaataattcctttaaaaacccggtggcgccattattttcaggttggggccttttagcaaggagggactttttgaatttctttaggggggcccagggccacccccatgggaaggggagggattcccccaaagaggtggtggaaactttcccggtttcaccaacacccccaattttttccaaaggggaagggggggaaccccccctttcctaaacaaatttgggcccttggccattttcttttttttaaccctaaaaaagtgcccttaaaaaatttttttgggcccttttggtt

SEQ ID NO: 166786 - DNA, 445 bp, Zea mays
  Clone ID: MRT4577_83687C.1
aaaaaaaaaagggggccaaaatggttaataattattaagggaacccggtaaataaaataagaaccaaaaggagtggggctgggaaaagaggcaaaagcccaaagggggggtttaattaattaaaagaaaggccaggcttttaaaaacaaagcgggtttttgaatcggccgccctgttggcggggaggaaaacctacccaggagggatcgaacgggggtttggggctaaaaagaaaaaaaacgggtattcaacggggggggggccaattgggaatcccgggccgggggggccaaacttttgaaacaccggttcaaattcaagggccaggccgcctgtgtggaaaaggcccaaaaccctcccaaaaagggacacccccgtagaaaggtttttaacccttaggcattggccgaagggggctggacctttttccccggggggcccaaaa

SEQ ID NO: 166787 - DNA, 1711 bp, Zea mays
  Clone ID: MRT4577_83688C.1
ttgggtacctcgaggcccggccgggatccgttgttgactcagctgccgagtcgcacactccaatgaagggaagctttggttggttgactgctccatccacccaccccctacagttcagttcagttcagttggtctaggccatggccatgtccgcttcctcctcctcgcgcgccctcctccgccggatcggcggcgcgctcctccgccgctccttctcctcctcatccgccgccgccgccgcagggtaccacgtcgcgggcgggcccagctacatgcgcggcgccgtcttctgggagcccggccgcccgctcacgctcgaggagttccgcatgccgcgccccaaggccggcgagctcctcatcaagaccaaagcctgcggggtctgccactccgatctccatgtcctcaaaggcgagctccctttctccacgccctgtgtcgtgggccatgagatcactggagaggtggttgaccatggcacgcacactcctgctgagatcatcaacaggttcccagtcggaagtcacgtcgtcggcgccttcataatgccatgtgggaactgcttctactgcgttaagggccaagaagatctgtgcgagtctttcttcgcgtataatcgtgccaaggggacactctatgatggcgagacacggctgtttctaaggggcaatgggaaaccggtgtacatgtatagtatgggagggcttgcagagtattgtgttgtcccagccaatgcgctagcagttctccctgactcactgccatacacagaatcagcaattttaggatgtgcagtgtttaccgcgtatggtgccctgaggcatgctgctgaaatgcggcctggtgattcagtagctgtgatcggagttggaggggttgggtcaagctgtttacagatagcaaaagcctttggagcttcccaagtcattgcagtggatgtccttgatgagaagcttcagaacgctacaacacttggagcaacccacactgtaaatgcagcaaaagatgatgcagttgaaaggataaaggaaattactgatggtaggggtgtagatgtggctatagaggcacttggtaaggcgttaacattttcccagtgcgccaagagcgtgcgtgatggaggcaaagctgttatgatcgggcttgctgcaacgaacgtaatgggagaggttgatataacccgtcttgtccgacgacaggtgaaaatcattggctcatatggcgcaagggctaggcaagaccttcctcagatagtgaagctcgcggagagtggtgccttcaatctccaaaacaccatatcaaggaaatgcaaatttgaggaggcgaatggcgcctatgaggatctcaatcagggcaagatcgtaggacgagctgtggttgagatcatggagtgatgacggacaaggtaatcaatcctgtggttccaagtctgggtcacacaacaataaagttttgcgtgctctttcacagcattgtcaaaatctgtagatgaccaaactgcattgtgtgtgtgtgtgacagtgtgttgctggaaaaaaaaaaaaaaaaaaaaaaaaaaaaaaaaaaaaaacggaaaaaaaaaaaaaaaaaaaaaggggggggcaatataaaaaaaaaaatttaattaatcacgtatacgaaaaaataaatattttttttagtgacccaaataaataaaaatatgaaaagggggtcctcatttggggttcag

SEQ ID NO: 166788 - DNA, 360 bp, Zea mays
  Clone ID: MRT4577_83689C.1
aacgacccactcgtccgagaccaaacatattcattcaataatctcagaagacacatttttaacgggatcaaacggattggatcgaaggcgctcctatcctgtggccaggtctcggtgctaatcgcgtgtatgttcagtggtgggattttgcgatctgacacggtttctgatcttggcgattacatgctcccacttgccgattcaaaccataaatgatctgctgatgcgacctccgccgccagtgactctccacctgatgtctgcagaccgaccaggcaatcgagcctactttcaagccggtgccggcatcatgtaagctgactgcgcgctcaccctggaatcacaaggaccaggcttcgg

SEQ ID NO: 166789 - DNA, 221 bp, Zea mays
  unsure (1)..(221): unsure at all n locations
  Clone ID: MRT4577_8368C.1
ggaaaaaaaaaaaaaaaaaaattttntaatatctttctaaatgcctgtggtagagcaaatctgaaggacgccgaaaactgtctagagatactggaaaatctttttcttgggaagtctgaaataacatactgtgagctnttgaagcttgcagtgttacagggaaaatttgcctgcagcttatgatatctggaaggagtgctctaggtattatagcccaagca

SEQ ID NO: 166790 - DNA, 399 bp, Zea mays
  Clone ID: MRT4577_83690C.1
gagaatacgaccagggcatcatctctctaccatgtggtgtgacttgtatggtaaaacagccgggctgccccgcgaacaaagatgagcctcttgaagctcacctgaccctgacaccagtaaaggggtataatgaacaataccgagaggaatgccaacccgacttatcgcacatgcagaaacaacagtacctagaaatcttgtatatgccggaacaactcaactagtgaatattttttattacgcaggataaatatgacgttttaatcatctaacatgacaatcgaatctggaattgccccaaattctcaaacctagttctttatactagaatcatatattccagaagctttctccagtcaaatgcattttcttcaacggtcaatagaagacccccactgc

SEQ ID NO: 166791 - DNA, 394 bp, Zea mays
  Clone ID: MRT4577_83691C.1
tggagcatggtgttatcccagcgcctaaaagaatgcaaacacttctctggattatgtcttccagagccaagtcaagggaaagattcccatggttaagcctaagtttctgatacccaaccaactagagcatggaaacataaaatttcatcagagacgtgtgacatgcttggagtttcatccaactaagaacagtgttcttttatcaggagacaagaaaggacttctgggtatctgggattatgttaagttgcatgagaaaatcacttatgattctgtgcactcctgcattctgaatagcatgaagattgataccaccaacgatggtatgatatatacagcttcctctgatggtactatcagttgcactgatttggatactggtattggctctccc

SEQ ID NO: 166792 - DNA, 261 bp, Zea mays
  Clone ID: MRT4577_83692C.1
cattgggtggggtttttaaagcaggcggtttttttttattttttttctttttttttacaattttctttttttttttttttttttttttgttacggcccaaaaatatcaaaaagaggggccaaattttaaggaccctttccagggcatttttcccgggggggggcccaagaaaaatataggtttggctcaaaaccaattccatacaggggtgcccccggaaattaaaaaccggttccttttgcccaaaattttaaaattttt

SEQ ID NO: 166793 - DNA, 252 bp, Zea mays
  Clone ID: MRT4577_83693C.1
cccacgcgtccgcccacgcgtccgcccacgcgtccgcccacgcgtccgcccacgcgtccgcccacgcgtccgcccacgcgtccgagccccatcagtgaagttggtcgcgggaggaagtttgcctcccactttgaaaacaataaacttttgtgcgggaggtgttttgccttcctggcctgtaataataccttatgcactcgtaataccctggtattgtaataataatactctctctatatatttaatgaatgt

SEQ ID NO: 166794 - DNA, 348 bp, Zea mays
  Clone ID: MRT4577_83694C.1
cagcagcggcagcggtagcggcgagagcgagcacagccgcgcagacagacagacgcacgcacgccacgccacgccattacaaatcgccccaagcaccaaaccctacccaaccaggcaaccaccacccgccagccctcccgcggatccccgccctcagctcgcgccttcctcccgtctcgtctcgcctgtccttttttctctcccgccgccgcgccatggaggaggggaggagggggacgaggacgctgcgggtgcggaacatctcagatctggccggggagcgggaggtgcgcgagtccttctccttctccggcgaaatcgaccacgtcgacatcacccctgacgggg

SEQ ID NO: 166795 - DNA, 416 bp, Zea mays
  unsure (1)..(416): unsure at all n locations
  Clone ID: MRT4577_83695C.1
gcgcccacgcgttcgggttaatcaggtttaatggatccagacgatgactgaaatgtcattgaaggaatgctttgtgcacaggcatttgatgtgtgcctagtagctgttggtgcataaattttgtctaagcttcggatgaaaaaggttatcaatcttttaaaaaaaaaaaaaaaaaaaaaaaaaaaaaaaaaaaaaaaaaaaaaaaaaaaaaaaaaaaaaaaaaataaaaaaaaaaaaaaaaaaaaaaaaaaagtttttnttaaataaaaaaaaataaaataattaataataaaattataatattatttttttttttattatatattaaaaaataaaatttagggggggcgtcttttaaaaaaaacaaattttattatccgggtggtttgacgaaataatttttttttttgggggcc

SEQ ID NO: 166796 - DNA, 631 bp, Zea mays
  Clone ID: MRT4577_83696C.1
acagccactgtactactatccacggtaccgctatgcgcacgcgatgatactcaggagcacgatcgcctaccatccccccattccgcgccgacatctccgcctctaggtccctccttacaccgatcttcatggtgctgatacctgcctacctatccgatagggaacacagaaagagagctgacaactttcgcgcggacgagcatgggctctcggatgtcgccgctgacgccccgcttcttcaatgggatctcgatcgcttcacaacccgatacgcccgtccacgacgacgcacgtcccccgagtacgccttgactaccacctcaccagcaccagatgttgctctgacttccgcctcgggccaccgtgaacgctaatgaaaccactgaactgatgtgaaaagtgatgctggacacaggacttcctaccagagccgtcatctaatgtgctgtaggaggcactgacagaactgagggagctgtgacatgacatacgtggagagtactcagcccgcctaagtggtgtaatgcgtcactggacgacaggcataccataggtacccaaccaggcctatcaatcatgatgtactatggatgatactagaggcacgtgcaaccacggggatgattatgca

SEQ ID NO: 166797 - DNA, 2205 bp, Zea mays
  Clone ID: MRT4577_83697C.1
atgactcatgagacgacggcagtctccgtctcccgctgttattggacggcgctttcggcattgacgagcaccgatgccctaatccgcatgctgggcccggccgtcgcttttcccaaggccgccgatcccgacgacgacccaacaaagtggcagccagaaaactcggcagagcatctcgcttgcgaaacaaaggacggcgcgccagaggaggggaaaggaaaacaaccaccacgaccccgtccattccgttccacttccacccgagctcagcgatcgcggcggcggatgcggatgcggatggggaaggggccgtcgtcgcgggcggggtcgcggcaccggcagttccgcgcccgagccatgacccgcgtcgacgacctccaggaggtcttctcgggcctgcagtccgcgcgcaaggactcacgctccgcggacgccgccgtcctcgaggcgcagctccagcagatgctgcgggagtggcgctccgagctcagcgatccctcccccgcctcctccctgcagggcaacgccagggaactgtcggatccgccttccgatactcttcgtctgctgcagttggtggtggccgaggaggaggatgacgccacgagcaagatggtcgagcagcagcagcagcagcccccacctccgctcccagctaaccggagccaggggcacgcgcatgttgtgtgccagggcatgaagccggagccgcgcgaggaagcagttgacgtcgctgtggaccagccgcagctgctgagtcagggggttctgcctaatggtgctgctaccgcgtctgcgatgttccatgatcagctgtactatgtgaaccaggagctcacggtcgaggattttctttaccctaatgcataccttgacatgaattgttgtgggcagagtgccggggctgttttcctgcacatgccagatttgctcacatcaatgacttcatcaccttctggattcctcaagccaaaatgccctgtcttgaactgttctaggcctgctgttggagcagaattctggcacaattcttgtagcctgtctaatacggatttagctgtgcatgaagaccgcactccaagcacaatgccttggatccgtccaaggcccattgatctgaaagatggccgcctgtttgatggcagcatgtatcatgctgatttggctgtgcaggaagagggccctccaggcacaatgcctgtgatccgtccaagaggcattgatctgaaagatggccccctgtttacagctcttagtgcaaaagtccaaggaaaaaacgttggggtccctatctgtgaaggagctgccactgcaaagtctccatggaatgcacctgaacttttcgatctttacatatttgaaggtgaatctatcagagaatggttgttttttgacaaaccaaggagggcatttgatagtggaaatcggaagcagcggtccttgccagactacaacggccgtggttggcatgaatctaggaagcaggtgatgaaggactttgggggtctgaagaggtcctattacatggatcctgcaacatccaaagtaggttgttgtcaactgaatgaaattcagcagcaaatggatagactcagtgcagacagtcctgtcgacaccaaacggacggcccggagccggacagagcctaacccgatagatgtcaatactaacatctattcagttccaaacaccacagttcaaactgatgttccaaatgcttatcagccagggtcacaagtggaccagatgacatatttgaacggtagtgtcgtttatgggcctcatctgccgtacggttactcgactgaaagaagtgacttctattggaactcaaatgatgggacatgagaagatataaacacatgttcgatttatggcatattttggccttcaagttctaacaattcccgttatgattattgggtcaaatctattagcatgacccccatcttcttgtaattgtagttggcccaatctacaggaaacatctctgaaacaagggatgccaataggcaatactgcagttctattttctgtggcaactttgtcgttgtaatatagccatatcatgataatagcaccctcctcgatgtgcagctgtatgtaacatatatctctggcttggtggacgataaccgttaaccagtcacgttggtgcctccatttatcggttacgttgtatgtgtaccgaaaaaaaaaaaaaaa

SEQ ID NO: 166798 - DNA, 302 bp, Zea mays
  Clone ID: MRT4577_83698C.1
ccccagggggggtttgtggggcgttaacgaccccaaaaaaaatgttttcattcttccctatcttttaaagaggctacagccttttcactcttttaaaagaagcatagggtcctatttgaaaaattaaattgtctacactgtcttggctccatggggtggttgttccccccactcaggttaattgggttttcgttgctcccccctaagtgcccctcctcttgaaaaagattttttgaatgttgtgggctgcgtgggtatttcttatagacctggccccacccccacccacacaagtgtttctt

SEQ ID NO: 166799 - DNA, 354 bp, Zea mays
  unsure (1)..(354): unsure at all n locations
  Clone ID: MRT4577_83699C.1
ctttcttttccttttttttctcttatcgtttggtagagcttcttatcgttaccagaaggcggaggaacatcaagggcggaaaggaggtcccattattgtgtccaagcgcaccatgtggcaagagctctgaatatcccaagctcaactggcccgtgcttagggggggcccccgcccccttcccatattggaccaattccattctacgagcactaaaacaggtcagggcacactgaaatctttggagccgtggcaagagccttccagttgtattgtgactcccaacgggcttacacccacgcaagggggtacacctngggcgacccttgaattttgaaccgcttcctttcggcaaa

SEQ ID NO: 166800 - DNA, 617 bp, Zea mays
  Clone ID: MRT4577_8369C.1
aattcggcacgagggatctgtgcggcggcaaacccagagatccttgccccgtccgccggcgaaaggcgctcacctcccctcttcgctgtctgcgatgcagaggatactatcgagggccgctcgccggtgcacgaactcctcggcggcgttcaactcacctcacgcgcaggccaatgcagcaagtgttcactctgaagacgccccaacttgttcaaacatgattacagagaacgatgattttacatggaagactagttttgttagacccatgcaatcagaagtcgtcaatgccctccgtagaggtgaccggcagcgagcatcattgattctttcgaactttcatcacactaaggaatcactgaccaaggaagatttttcttatatattggagtattgtgcagaggcacctgatcctttgaactccatttggagcttttccaatacttctagtttgttatggaaactttggaactcatggaggagaaggccattggcatgagtaaaagtatctacagatatgtcattagagctctgagcagagggggatatgcgaaggaggcacttcactggctggctcttctaggggagaaagaaagcctcatgcactacaccgattt

SEQ ID NO: 166801 - DNA, 714 bp, Zea mays
  Clone ID: MRT4577_836C.1
aacaagggtgtcgagttcatcaactcgaactcattatcccaagggtctcccacattcatgcatattacaggaatcacactcgatacatacacacttcggagatagagcggaagactttacaaaacatattttacagttccaaagctcaagttttataacataagaagaatggtaattattacaagtcctgatagtacccaaagtgcataacttattaccataattggaagggtgaagcctttccataagatatatacatacacattctaagcttcaaggcctccacatgaagtaactaaccaaaagataagggaataaaacttctcctttgttgcagagaagaggttctagatacttctaacacgatgatcagttagatggctccatccacttgatgaacaggcactggagtagactcctcttcagcaaccactttatcttaaatcttcactctttattttgggagctcatagagcagaccaaccctagatcacgcacgcaaccggccccaaacaaggtctgccacggcgagatcattcccagcggcgttcaccggcggcaccgcggcgttcccaatgagacactgatggccggggagagtaaacaccgacgtgaacatgaaccacaacactcacacgatgcactctcgctagaactcaagaacgagaagagacttcactgccctggccctgcagcgactagataaaagggcag

SEQ ID NO: 166802 - DNA, 1916 bp, Zea mays
  Clone ID: MRT4577_83700C.1
cgggatctaggtacgtaggaaaatatgtgtacctaaaaagcactgttttcaagttatccgattaatcacggttagtcgcgattaatcgttcaagtcggtttggactaatcacgactaatcgtacaagtcgttcgactaatcgtgattgatcgcgattaatcgctcaagtcgattattcagaacgactagcaagtcgtccgacttgaaaacaatgctaaaaagccataacgacttgcagtttggggaggagagagtaattctttggtcctagatattgcgacattttagatgctatatgtactgatttataagtaattatggcatgcatgtaattggcatgtcagtgactttacctctgtgccaatttcaaaaaagttgaagtccaatggagttgtgcccggatcagctgtcgtatgtgtgggaggagctcacggtcgaggattttctttatgatgatgattacaagatagatctttctgggtctaatctggatgtcattaataacctagaagggattgttcagctggaatatccagatcacaatttgccgcaagggttagcccctaatgcataccttgacatgaatagttgtgggcagagtgccggggctgttttcctgcacatgccagatttgctcacaacaatgacttcagcaccttctgcattcctgaagccaaaatgcgctctctgggactgccccaggcctgctattggatcagaaagatggcataattattgcagcatgtatcatgctgatttggctgtgcaggaagagggccctccaggcacaatgcctgtgatccgtccaagaggcattgatctgaaagatggccccctgtttgctgctcttagtgcaaaagtccaaggaaaaaacgttggggtccctatctgtgaaggagctgccactgcaaagtctccgtggaatgcacctgaacttttcgatctttacatctttgaaggtgagtctatcagagaatggttgttttttgacaaaccaaggagggcatttgttagtggaaatcggaagcagcggtccttgccagattacggcggccgtggttggcatgaatctaggaagcaggcgatgaaggactttgggggtctgaagaggtcctattacatggatccacaaccatccaacagctacgaatggcacctatatgaatatgagatcaatgagtgtgatgcttttgccttatatcggcttgagttcaagtcttcagatgcaaagaaaattgcaaaatccaaattagcttgtaatccactgaatgaaattcagcagcaaatggatagactcagtgcagacagtcctgtcgacaacaaacggacggcccggggcaggccacaggctaacccgatagatgtcgatactaacatctattcagttccaaacaccacagctcaagccaatgttccaaatgcttatcagccagggtcacaagtggaccagatgacatatttgaatggtagtgtcgtttatgggcctcatctgccgtatggttactcgactgaaagaagtgacttttattggaactcagctgatgggacatgagaagatgaacacatattcgatttatggcatatttggccttcaaattctaacagttccagttatggttattgggtctactctattagcatgaccctcccatcttcttttaattggaactggtccaatctacaggaaacatctctgaaacaaaggatgtcaatactgcagttctattttctgtggtaacttttgttgttgtaatataggtgtatcttgaaaatagcaagcaagcatctccccgatgtgcatgcagctgtatcatatgcaagataaatctctggtttggtggacaaaaaaaaaaaaaaaaaagcggttccatttatctgtcacgttgtacgtgcatcaatacatcctgttctgaatc

SEQ ID NO: 166803 - DNA, 1538 bp, Zea mays
  unsure (1)..(1538): unsure at all n locations
  Clone ID: MRT4577_83701C.1
aacaagtggcagccagaaaactcggcagagcatctcgcttgcgaaacaaaggacggcgcgcgagaggaggggaaaggaaaacaaccaccacgaccccgtccattccgttccacttccacccgagctcagcgatcgcggcggcggatgcggatggggaaggggctgtcgtcgcgggcggggtcgcggcaccggcagttccgcgcccgagccatgacccgcgtcgacgacctccaggaggtcttctcgggcctgcagtccgcgcgcaaggactcacgctccgcggacgccgccgtcctcgaggcgcagctccagcagatgctgcgggagtggcgctccgagctcagcgatccctcccccgcctcctccctgcagggcaacgccagggaactgtcggatccgccttccgatactcttcgtctgctgcagttggtggtggccgaggaggaggatgacgccacgagcaagatggtcgagcagcagcagcagcagcccccacctccgctcccagctaaccggagccaggggcacgcgcatgttgtgtgccagggcatgaagccggagccgcgcgaggaagcagttgacgtcgctgtggaccagccgcagctgctcagtcagggggttctgcctaatggtgctgctaccgcgtctgcgatgttccatgatcagctgtactatgtgaaccaggagcttacggtcgaggattttctttatgatgatgattacaagatagatctttctgggtctaatctggatgtcattaataacctagaagggattgttcagctggaatatccagatcacaatttgccgcaagggttagcccctaatgcataccttgacatgaatagttgtgggcagagtgccggggctgttttcctgcacatgccagatttgctcacaacaatgacttcagcaccttctgcattcctgaagccaaaatgcgctctctgggactgccccaggcctgctattggatcagaaagatggcataattattgcagcatgtatcatgctgatttggctgtgcaggaagagggccctccgggcacaatgcctgtgatccgtccaagaggcattgatctgaaagatggccccctgtttgctgctcttagtgcaaaagtccaaggaaaaaatgttggggtccctatctgtgaaggagctgccactgcaaagtctccatggaatgcacctggtaagcttttccttcatgacttgtgccttcacacggtactgatgaacgtttttactaatcgttagccattctgtatcattacagaacttttcgatctttacatatttgaaggtgaatctatcagagaatggttgttttttgacaaaccaaggagggcatttgatagtggaaatcggaagcagcggtccttgccagactacaacggncgtggttggcatgaatctaggaagcaggtgatgaaggactttgggggtctgaagaaggtctattacatggatccacnaccatccaacagctatgaatggcacctatatgaatatgagatcaatgactgtgatgcttttgc

SEQ ID NO: 166804 - DNA, 293 bp, Zea mays
  Clone ID: MRT4577_83702C.1
cttaacccgaaaaaaaacaaattttattcaaaaacaaaatggggttaaagaattttttccatacggacatgcttattgggggaaaccccactgaccacctaaaggtggatacttacttattcaaactggtccagcatgggggaacattggaaggtaaaatgcttacagacgaaaaatttttaaaacaaaagcctggcttgggtggttcacagaataaccaaacgacaaccacgaaattgggaccttttaaaataaacaacttaaaaacaacggacccctgggttaaccccgga

SEQ ID NO: 166805 - DNA, 475 bp, Zea mays
  Clone ID: MRT4577_83703C.1
cacgcctgcgtgtaccgggctgctattacacggtcgacctcagcgttcgtaactagcacataaagagctcatttatgtaccaacactgcgcaacaaaatatcaagatatcttatgctgctcggtctctcagaaagagttgataccagggcactacctacgacagtggctgacagagctgaacatctgcttggcctttgttcaaaccatacctggttacaatgggagtaattgaatgcagtgaaacacaagttgccaaaccctacatgatccaacaggcagaacgaacaacatgctgaccattataacacgtggtactgctacaaccatctagcctattacatgagataccttggggccattgggaggaacaaaacatgatgacacatacatctacaacaacatgggctaaaaaaccttggtggtactctcaaaacatctgaatgttacatgtcaaccaactagatgcattgaact

SEQ ID NO: 166806 - DNA, 434 bp, Zea mays
  Clone ID: MRT4577_83704C.1
gtaatgatccctatcggctcatgaatatgctaatctctagcttctatctaggtatatagattaaggtctagtaggcagcggatagatggaatagaatagattccaggagaattgggttccgcgggtcatcagcctcttgcagacatatcatcgatctctctccccaatctagactagagcctggctccatccagtccaattccatcagagccagtagtggactgatgcaaagcaaagggagagattctttgggtcgtcggtggcatgcaactgggtaaagcttatctctctggctctggctctgatgagggagaagctgaatcgctcttggatttctcttcttgagttgtgtgcgtaggttcctgttcagctaacaaggagattgttccagtggagaaaggagaagatggcgcctcctgcatcaccgtcaccgt

SEQ ID NO: 166807 - DNA, 315 bp, Zea mays
  unsure (1)..(315): unsure at all n locations
  Clone ID: MRT4577_83705C.1
nacggcctcccaaactccgccgccgccctgctgcttccagtctcccctgggccctggcaatctccgccttgcaaaccctagccgctgccatggcatctctagctcccgcgaccgccgcctcttccctccgcacccccatctacgtagccgcctcttcccggcgccgttcctttctccccgccgccgtcaaagccatcgccagttctgcacatcccagggggtcctccctccggatggccgactccgacgccgatctgttcgccgacactttgccccggcagctgtgcacacagtggggggggccggagatcgcgc

SEQ ID NO: 166808 - DNA, 2177 bp, Zea mays
  Clone ID: MRT4577_83706C.1
aacaaaaagaacagaattcctagcaattttatttgcctccaactttcaaagaatatagaaacaggtggctttaattcgggtttgggtcaacggggacatttgcagcaacccagtactgaaactagacggggtttgattcaatgaacggggacccgttttttttttttttgaaatcagacaccactgtaatcgcagtggttcaatctttatttggagatggaaataggatctaattatagacggtgggaatggtttgcaatggtaacgcatagtagtagttggttacgttacattttagccaaccaaacggctagtaggatctcatctcatggaacctactccactagccggacctgaatggattggaacaccgaggtggcagcacaaggttggtttagatcagaatctgataccaccaagaccgtgtctccgggtttcactgaacccttcgacctcatcaggctgatggttttgttgaagttatcctccatgctatttgacaatggtagatgaagtggaatcactccccagtagaggttcatgctctttcttgaattggcattatcagtgaacgcgaatatgggagggttgggtcggttgcgcgatagaagtgatgccatgtgaccatgctttgtgtagacaaatatggcatccacagcaaggttgtttgccatttctacagcacagctgcaaatctgctctgagatccggtcaggcaatgcaattgcaagctgatgccgtggaagaagtttctgcatgttttcctcacggctccatgattccatcctttcactggctgcacgaagtacagatagcgctttttggggatatgcacctatagctgactctgctgatagcatcacagcgtctgcatattgccgcactgcttccgaaacatcggccacctctgctcgagttggtgttgggtattcaaccattgattcgagaagctgagaagcaactatcacaggcttgttcaggtgtctacatagtttaacaattgattcttgaatggctgggatctgttcaagaggaatctgaactccaagatcccctcgtgctaccataactccatcagatgcctctatgatgtctttcaggttcttgagagattctagactctcaatctttgcaaatactttgatgtgctctaacgatcttctagagaggtaagctttcaactgctttatatcattagcatcatttacaaatgatagagcaatgcaatcaactccttcagctatcccaaattcgatgtcagcccaatcctttgttgacaatgtaggaaggccaaagttcctttgaactatttttccgttcctccagaatgacaatttggctcgaggaagaagcaaacctgggtccgtgcacttacagcgcaaatcatttcctattttctcagtaacttcaaatgttgccattccaccatctattacaagctcatcaccaaccaaaatgccttcagaaaacttatcaaaattcacatgcattgtgaactgatgggcttcatcagcttttttgtttgtaaatatccactctgacccatcctcggccttgactgaggtggcgcctccgtggtccgcgacgaggagctgggaaccctcggtgtcgaccataagcgtcacgcagaatcctccctcctcgttgagcctccgcacagagcgcatggcggcacgatgccactcccggccaccgtggcagaggttgatccgcgccacgcccatcccgccgcgcgccagcgccggcagcgcctcgacgcaggcgggccccaccgtgcacaccagtttcgttttccgcatccccaagaaccctttctcccgcagctccgcctccgacaccacgtccattgtcgcctcccccaccgaggcgcggatcgggtggctggccccgtggcggtgagccgcgggggaggagacggcgactaggtagggcaacgagctggtagtcctggcggaggcagccattgggattagggtttgcggagaatgagggaagaaacggaggccgcggagggagaggagtcagaggtggtgtgccggcggacgctgcgaggtggggagccgggagggaggcttgtgcttttgtgcagttgtgttgtgcgagtagttgagctgccccacggccgaggacggcagctcgcaggatatacatcccggccggcctcgaggtacccaatg

SEQ ID NO: 166809 - DNA, 377 bp, Zea mays
  Clone ID: MRT4577_83707C.1
gtggtgttttttttttttttttttttttttttcaccaaaaaaactgtttataacttagaacgccctcaatccatagtggagacgcacaaaaaagatcacctactcaaacctctaaaacaaatgggccctgatgcccacattgcaagaatataaggggagtaccgtttaaacacaatagcccacgtattggaccaccattaaacacgaccgggcaagggactacactagtgcacccatgctaaaggaggcaaggacctcacactaggggatgagaaggacctaacaagttggtaaaaggaatggtacaaatgcttgacaccaaagccgagaaaacacggatgtgtggtagcacgataaccaatatttacaggcctgaa

SEQ ID NO: 166810 - DNA, 320 bp, Zea mays
  Clone ID: MRT4577_83708C.1
tacgtaagctcggaattcggctcgagggacattatcccaagttttttcgcgcccaatgcccgctgacacacaagggggtttttaacgagtcgcaggtgtatgacaagccgcgcgcgcacacgcaacacatgctaaggactggagtgcagaagctgatacgactgcggcactagccacgcctggaaactgagacatcactacaacgtgggggaggtgcacttccaccaaccttcaactaatacatactcagaatcctatggcctgtgaaaggtggacccccggctagccgatatcccctacaataagaagtgatgttactc

SEQ ID NO: 166811 - DNA, 273 bp, Zea mays
  Clone ID: MRT4577_83709C.1
gatcgctaccttgtgtcaacagtggacgtgccagatcaaaaaccattagaaaacctccgtacaattccatctatcaataacatgacgaacataacacatcaatgcatggatttataccaattctcataaggtaaattacactttgcacatatgcatacatgacaccctcaaatacctatcaaattatacaagtctacagtattctaaatcaacaaccactctctataagtgccaaaactattattcgttgacaaatgcaactctcacgaataa

SEQ ID NO: 166812 - DNA, 1584 bp, Zea mays
  Clone ID: MRT4577_8370C.1
cattgggaacctcgttgggaggccggccgggccgggagcacaccgcaggacaggagaagcttgggtctcctatcctccccacccctctctcggtctcttccccaccgcgtcttcgtcgtctcgtcttcctgcctccttcgcccgagaaaggagagaatggggagcagcgagaagaccgttaccgcctacggcgagtacacctacgctgagctggagagggagccctactggccgagtgagaagctgaggatttcgattactggggctggtggtttcattggatcccacattgctcgccgtctgaagaacgagggccattacatcattgcctctgactggaagaagaacgagcacatgaccgaggacatgttctgccatgagttccacctcgttgatctcagggtcatggacaactgtctcaaggtcacccagggtgtcgaccatgtcttcaatctcgctgctgatatgggtggcatggggttcatccagtcaaatcactctgtgatcatgtacaacaacaccatgatcagttttaacatgctggaggctgcacgtatcaatggtgtgaagaggttcttctatgcctcgagtgcatgcatttaccctgagttcaagcagctcgacacaaatgtgagcttgaaggaatctgatgcctggcctgctgagcctcaagacgcctatggcttggagaagcttgcaaccgaggagctgtgcaagcactacaccaaggactttggcatcgagtgccgcgtcggccgcttccacaacatctacggccctttcggaacatggaaaggtggccgcgagaaggcaccggctgccttctgcagaaaggctcagacatccacggagaggtttgagatgtggggcgatggtctccagaccaggtccttcaccttcatcgacgagtgcgtggagggtgttctgagattgaccaagtcagacttccgcgagccagtgaacatcggaagcgatgagatggtgagcatgaacgagatggctgagatcgtgctgggctttgaggataggaagctgcccatccaccacatccctggcccggaaggggtccgcgggcgcaactctgacaacacccttatcaaggagaagcttggctgggccccgacgatgaagctcaaggatgggctgcggttcacctacttctggatcaaagagcagatcgagaaggagaagacgcagggggtcgacatcgcggcgtacgggtcgtccaaggtggtgtccacccaggcgcccgtgcagctgggctccctccgcgccgccgacggcaaggagggcctctaagcgacgacccagggctggggctgtcttcgtccatcacagctggcgtaccatggcaggatatactgtttgcggtagaatatcacagtagcagcaaaactagtacttctggaggttcagacatgacggtcgccttctattctattttcccattcatcgctccatttatttatgatgccatgcaactcgttgattttttgctgtactccctttatttggtcttggccggccggcaataaaattctccctgtttctactaaaaaaaaaaagaacaaaaaaaaaaaaaaa

SEQ ID NO: 166813 - DNA, 383 bp, Zea mays
  Clone ID: MRT4577_83710C.1
actgcctaccggcaggcactagccaggtgcccgccctcatcgcgtcgaccgcacagatcgtgccagcgcgtctgcccgctcgtcatcgcgcactccaccagcgggcctccgactgggagataaccttatgaccactcctccagaggccatcttcaagacaccgattagaaactcgccgacgagggcgagattacccactcacccaaagcaaggaacgatgacatgcaggagaatgtaatgcacacagtggacaatgatggagataccattgaccgcgcaatagagcctgctgatcgccagggagaatgatgaagctacctagatgcgtgaaggtgctaacgagactaatgactcatatggtgatggaaccacaactggctctg

SEQ ID NO: 166814 - DNA, 430 bp, Zea mays
  Clone ID: MRT4577_83711C.1
aaaaaaaaaaaaaaaaaaaaaaaaaaaaaaaaaaaaaaaaaaaaaaaaaaaaaaaaaaaaaaaaaggagagggaaaaaaaaaaaaaagaaaaaagaaaaaaaaaaaaaaaaaaaaaaaaaaaaaaaagggggcgcccctttaaaagaaccaaagtttacttccccggccttccaacgaaaaaccttttttatggggcccccaaaattaaattccctgcccgcggtttaaaaacttcggaactggaaaaaccttggcttacccaaattaaatcccttggcaaaaaatccccttttcccaaggtgggaaaaaaacaaaaagccccccccctatcccccttccaaaaatttgcccaccctaaatggaaaagggaaccccccttttaccgccccataaaccccggcgggttgggggtttcccccaaggggaccc

SEQ ID NO: 166815 - DNA, 142 bp, Zea mays
  unsure (1)..(142): unsure at all n locations
  Clone ID: MRT4577_83712C.1
aaaaaccttcgtaaattatacaacaccccccgcccntcacattatattccaaaactttcatccaaccccatatcatttttcaaataacataaaacctttatcacataacaattnttttcttttactaaacaaattaccaaaa

SEQ ID NO: 166816 - DNA, 763 bp, Zea mays
  unsure (1)..(763): unsure at all n locations
  Clone ID: MRT4577_83713C.1
cctcgaggccggccgggccgggattggctttgtcatgcgcctttttatttttctcgaaacggcaccctatcggaaggctgtcctgcccaaccctttggggatcctcagctcatcatggatcgcgtcaagcatcctgccacagagtgtcctcactagggctggcccaagagccgtccaacatgggaagggtagatagtttcttgggagcttcttcaatttttttcattgtcttttccgaggatgggtagtgttttcgtatgacgtttttcgatcagcgtacttcagggtgcaccgggtatatcgcccattaacattataaacggttccttcgggtggccttgccataccatgctctatcctctttgtcaaaagtcgggtgatctcctttcagctcctcatggatgcaggcaaacgtccagtggggaaccttccccaacgctaagacctcttaggaaacagatacttgagtcaaggtataggttttctccctttttgtcacagagtccttaggactctgattctacttttcactttacgtgcattctacttttccctttacatgccttgnacagccaggtgatttcggtgggtcagaggaaggactttgggatgcccttttgctagggtgagcttcccattctccggacacaaaccccatcagatctctaggagagtctgctcgtcgccccacagccctcgaggtcgctgatggtgaggtggctagtctttgtgactgcttggaggaggcggaccaatgtattgc

SEQ ID NO: 166817 - DNA, 817 bp, Zea mays
  Clone ID: MRT4577_83714C.1
ccggccgggaattaaggctatctaccttggcaggccctgatcattatgtcgacgaacagtgaggaagaaaaaaagccggcgggacgtgtcgagtccgccatcgttaccggtacatctgtgaaataccacaacaagtttggagcgcttcgtcttcgtcatccagaaacgaatcaaatcattcttattccaactccaactgatgacccaaatgaccctttgaactggtctaagtcgtaccgcgtgtacatcgccgtcctggtatctttcgctatctttttcagcaacttcttggctgccggacctactgtcgccatccttgacactactaccgacttcttcggaccagctgatgatgatctcgatgacaacatcgccaagattgcctacttcttcaccaccactgcgctccttcagggcatgtccaacttggtgtggatgcctctcatggcaaaatttggccgccgtcctatctacgttatatcttttacgctgtacacagcgttttcagcttgggccggcggcgccacaacgtacggcagtgcgcttgcggcgcggatcatgatgggtgctgcttcgggagcagcggaatgcctggcaccactgacaatttcggaccttttcttcgctcatgtgagaggtgctatcatggggatttacactacagccttgtctgccggcgtcggctgtggtattatcgtcgctggactcatcactaaggaccttgactggcgtacatatactgggtgtctggcgctgttattggctcttgcactctcttgatcattttcacctgtcccgagacaggctatgaccgctc

SEQ ID NO: 166818 - DNA, 614 bp, Zea mays
  Clone ID: MRT4577_83715C.1
aacacagcgaacacatctcctcgctttcttcccatccgatccccccttcgctaccgaatcccctactcgccccgcatcgatggcggccaagtccgagaagaaaccgcggcgaacaagcggcgccaggatcgacccgcgcacgacaacgcagcccgccgagaacaatccgaacgtggagaagcgacgtccccgcgtggcaatgcccgctgccaaggaaggcgactgaggtgagagcgctgagaagaaagccaagaaaagcggggagacctacacatatctacatcttcaaggtgctgaagcaggcgcacccgtacattgccatctcctcctcggccatgtgcatcatgaactccttcattaacgatatcttcgagaagctcgctgctgaggccgccaagctcgcgcgctataacaagaagtctatccatcacctcccgtgagatccagacctccgtgcgcctcgtccttcccggacagatcgacaagcacgccgatctccgacgcgaccgaggacgtcaccgaggtcgcctcgacctactactgcgcggccgccgcttgcatgattctctcctgagttcacgccgcttgcatgtagatacgagctgctgcctgct

SEQ ID NO: 166819 - DNA, 448 bp, Zea mays
  Clone ID: MRT4577_83716C.1
gtgattaagccaccccgcccaggtgggcggcagggccaatcaccgaaagcggggaaaaaaacaaacagcgcaggaaaacccggaaccccgggccggccaccccgggaaccccggaccggccccagcgggcggaccagcggacccgagagggaggcggagcaaagcggggcggaaagagggacaaagcggcgcccagggggaaacaggaaaccgggcacaaaaccacaaaacaaacaacccggaagcaaaaaggggaaagccgggggagccaaaagagggagcgaacccagaaaaaaggcgaggcgcaaaacgcccgctgcccagcgggaaaaccagtcgggccacccgcagaaagaaaccggccaacgcccggggagaggggggtggccgattgggccccaggggggggtcaacagtaaccagggaaacgggcaaaagccgagagccc

SEQ ID NO: 166820 - DNA, 462 bp, Zea mays
  Clone ID: MRT4577_83717C.1
cacaggaaacgggaacaatgagatattgctggacgcagataacggcacttattccttaaggccgctagtgctaggctatacttattcataaatgccttgaacagggaactagccctcctttggctcggacctgttttaccagaaagcagggatccctcagcatcttcctgaagctgacgaacggcgcccagggcatcttcgctgggtagaataggtaggaaaacctgaataggccgtccgttgcctttaattcacgccctttccaacttggcctcatggggtgcaccaacagcggatgagctaccattaacttgagcagagccaacaccggccttggaagcaggacacgcccgaaggtcgatgccccactgccttgcatcggcagctccgccgtttcctaatcagatgaaggaactgagccgctgcgtaactctgttgacagcccctggagatgggacctct

SEQ ID NO: 166821 - DNA, 679 bp, Zea mays
  Clone ID: MRT4577_83718C.1
ggaaaggaatctttgtaacattgacaaggagaacctttttacttcgtgccttgagggagaaaaccctggagcctccctatcgttggcaccagcaatccgctccctacgagccactcagtactatattgcgtccccctgaaacagatagctgctgaagcgtcgagctcaatcctacctaaaagctgtacaggatccatagcccaaggcgtaccggattgttaccacacgtcagcagggcctgaccctgctccatccaactactatcgctattaccctacacacaagcctataacggggcagccgcagcacagtgcatccttgcccatagcctttaccatggagctgctttctgaaagagcatatcatgggatggaaccgcccatgaaactgatcggaacatatctttttggagtccaggacccatcattgagactgggaaaataacctgcccggaaatggatgcctttttcggtggaccacacagattcattcgcttatgcaaacccagaggaccaacaagccatctacggcatatacggcctttgtggctgcggaaggcccaaccatcttgacccatgcatgatgcgatcacatggggcggaccaaaacattgctatcgtaaggcttcctacgacgtgatcctgccatcatacgaagactcacctaccttcgaggctga

SEQ ID NO: 166822 - DNA, 507 bp, Zea mays
  Clone ID: MRT4577_83719C.1
gaaaaagaagggatcaaaaatattttgcccctgggaacaaattgaaaccttgggccccttttttttggggggcaaaaaaaagaattttttctcgtggttcgttaacgggaatttgaatttataaccccggaaaatcggaaaaaccctttttgaaaaaatgaccttaggggcccaaaccaaacctttaaagaaaacaaccccaagggcaaaagccaaaaaaaacggccttcaaagggggggccaggttaactttaatggcccaattaaaacggttaaacccccctgaccaatggggggaaatggggggaacaaaaccccggcccgggcctcccaaaaagggacttcacctggggcccccttatggagggcaggggttgcgtcggggtttttttcgggttaacctctttaaaacccgacctgaaagcgggggacctgcaaatgccgtaaaaaccggccccggcctcggccttggccggggccgaaactttgcccttccctttgccggcc

SEQ ID NO: 166823 - DNA, 137 bp, Zea mays
  unsure (1)..(137): unsure at all n locations
  Clone ID: MRT4577_8371C.1
aagcgtcaataagctagcctcacaaananccgtggcagcctggacctttattgggtgttcggcatccagcactagctgaaatgtacccggcctccaagaatcagaaccagaatatatgctcagaatggaactcaaaa

SEQ ID NO: 166824 - DNA, 336 bp, Zea mays
  Clone ID: MRT4577_83720C.1
aagagcctcatatcctattgcccttaatggtgcactggcctaattgtgctggtgtcggcccctcactaatgcagccaagtcatgtaattagtcatctggaacatagactaaaatctgcagagaattgcgggttctacccagtcagaagatcacaccatcgagactttctactagaggacttgaaagataactgaggggccacaaaataaacttcaccttccattaagtgttcaagcatgtctgcaaattaggagggagttacaaacagtctttttcatcctttgagatgaagcctgaaattgtgccgtgttgccttatatgaatatgcagtatggg

SEQ ID NO: 166825 - DNA, 378 bp, Zea mays
  unsure (1)..(378): unsure at all n locations
  Clone ID: MRT4577_83721C.1
tccatgctaagacataagtggggaaagcaatacggagaacatcattgcctgcaatcgtacataataataaacaccatgttgtccggctgaaagcctttgctactctgcaatgacntttcacgcgttcattgactgtgttcaatccatgcaagctcaagtcacctgcgccattgtccaccatgtccgacaacatctgccggtgcaacgatgctctaagtagcacgttggtctcctcctcaatgtctccgacctccaacaccaatatcatatgaccgggaatcaaaacactttgtgctaatagtcacaataattgctttcaatatcggacagagtttgttaacaccaaacattttgcaaatgacgacgttgcacaaaata

SEQ ID NO: 166826 - DNA, 364 bp, Zea mays
  Clone ID: MRT4577_83722C.1
cccatagattaccgacccaaacagcagaccgacgagggggggattgaataagaaaggcccgccctgccttcccacagggtgcaaaaagcagaaggcggacaacacgacgccaaagacgaaaagaagatggccaatctacacatcaatgcgaagaagaaacaccccggaggcctgaaggaaaacccgcaagagagcgaaactagaaggaggcagcagccaaaagaaaaagacatgcgaagatagtacatggggctcggagagaaaaaacgtccatccagagaaccagagaaggcgaaagagagcataaaacagaatcagaaaatggcctaatgaaggatacccgcccatacggcaggtaaagaag

SEQ ID NO: 166827 - DNA, 459 bp, Zea mays
  Clone ID: MRT4577_83723C.1
atatgtccaggaccgacgtctcaacagtggcaaacaaaacttatgacttcttatgcttcttggtctttatgcaactgctgctacggtgacctatgaccaagagctcggggggcaaatatcttgcctgcttttgttggaccctcgggcgcggacgcgcgaaggggggatttccggcccccggcgggcggtacttgggggaccggggccgggtcccagcctggcggtcacctgggccttggcggtttctgggttgcctacccccagcaatttcttccattcaaccaactggcagcattgaactctcctgcttatttacagccgcaacaactaccaccattcagccagctagctggtgtgagccctgctaccttcttggcactaccacagttgttgcctttctaccagcacgctgtgcctaaccctggcaccctccttcaactgcgacatattgctgccatt

SEQ ID NO: 166828 - DNA, 1261 bp, Zea mays
  Clone ID: MRT4577_83724C.1
cattgggtacctcgaggccggccgggaatatttgttgccggctagtttatttctgaactaaaacgtgacaaataaaaaaacagagagggagtagacaataaccgagacgggaggagaccagaccagcagcagcccatccgaaccccgcctcctcctcctcctcccgggttcgcgtgaggctgtgtgctgctgggaggcggcgccggcgccggcgccatggaggcggagaagaagccgccggcggtgtccgacgtgggcgcgtgggcgatgaacgtcgtcagctccgtcagcctcatcatggccaacaagcagctcatgtcctcctccggctacgccttcgccttcgccaccacgctcaccgggttccacttcaccgtcacggcgctcgtcgggtggatctccaacgccaccggctactccgtctccaagcacgtcccgctctgggagcttgtctggttctcgctcgtcgccaacacctccatcaccgggatgaacctcagcctcatgctcaactccgtcggattctaccagatctccaaactgagcatgattccggtggtctgcctcatggaatgggtgctcaacagcaagcactacaccactaaggtcatatccgcagtcatcgtcgtggccgccggtgtcgggatttgtactgtcacggatgtcgaggtcaatgccaaggggttcatctgcgcttgcgtggcagtgttctgcacgtcgcttcaacagattacaattggctcctttcagaagaagtacaacattggatcatttgagctgctgagcaaaactgcgccaattcaggcactttcactcattatactgggcccctttgtgcactactatctaaatggacggtcagtcttgaactacccttcttcaggaggggctagctgcttcagctgccgcagctgccgctgattcgttcattcttcttgttcttttgtaactgtgcgcgcgcgatcgctcgatccaaagttgcttgtccgtcagccctcagctatcgacactacactgttatttttggccccttgttggggagagtccagttcctacgtgacgacgaccacccccagttcggcgtagatgaaacacaaactagcagaatgcagattgttaccattttttttttcaggcggcggggtggagccattcattgtcatggtgacaggactcataatagaaatacaggtaacatgtgtatctccgtccgtggtaggattgataaggaattatggatccagccggcgatgtattcctt

SEQ ID NO: 166829 - DNA, 273 bp, Zea mays
  Clone ID: MRT4577_83727C.1
ccttcactttttaaatcgaggcaagtactcgggtattcatccatggcagtggcatttgtacatcagatcagtgccgatggactcatgcatgcatccacccaccatccaacgtcggacaacacagaccgctcaatgtttgatttacagcacagcccatatcagaaactacgaggcccatcgagtctagtgttggcagatgaggctaagcaagagcctgcttaggttgtacctaatattaatatattagttttacctattagaaggcttctcatt

SEQ ID NO: 166830 - DNA, 373 bp, Zea mays
  Clone ID: MRT4577_83728C.1
ctttttcattttagcgcacaaagccggacgggaccagcatataaagaagggcaaccaagcacacggcacggcgaagaagagaccaccacctcacactccattcacggcaggatcgatcgctatagctgctgcgcccccctgcacccttgcgtcttctgccgctgctgcgctgcggctccggcacaggtgcgtttcttgatttactgggctcatggagttcggtagcgtgatccggaaaacaccccgatttggtgccggccggcggccgggccgctgcgctcgtgcgttagtgctttttttttccgttcgtttgcgtgacctaatggaacgaagggagcttggcggtcgcttgggctgccgtggaattcgatgt

SEQ ID NO: 166831 - DNA, 233 bp, Zea mays
  Clone ID: MRT4577_83729C.1
gccggccgggcctgggccatattgttcgagacacgaagcgactttcaaacgaggatccgttgagtcacaatatgagcaacgatgcgcgagcgagatacttttgcctccttatgctccgttgcgtctttctacatgatgttggtaacgcgcacactttccctccccgggcacaagcatcctatagcttcccttcttcccccatagcgtccatgagagagagtttcagtatgtga

SEQ ID NO: 166832 - DNA, 256 bp, Zea mays
  Clone ID: MRT4577_8372C.1
tacgccccctgccctcattccttatcctgtatactctaagccctcgccctttttttttgatttaaaaaattttaacacttttcttttttacctaacataaaaccacaggttaaaactgcctataaatatattccaatttatgaaagatttttctataacaatttaagccccaaaaaaatccatgcgtaattggttatgtcatccaaagaattacaacaatcccttaactcaaaggaaaccaaccatttttaaacca

SEQ ID NO: 166833 - DNA, 347 bp, Zea mays
  unsure (1)..(347): unsure at all n locations
  Clone ID: MRT4577_83730C.1
cgtccccagactttttcatgngatctggaggagatgtgatagtattttgttccggattagagcgcaggcgcaaccgcgcaacgacgaacgaaatgtacaggtcgcttcttgtcaaggttacatggacgaaacaggctctcgtggccgtgctcctttttctccccccaattgagtgcttgagtgtggacnaatntnnncccaaaaaaaaaaaaaaaaaaaaaaaaaaaaaaaaaaaaaaaaaaaaaaaanaaaaaaaaaaaanaaaaaaaaaanaaaaaaaaaanaaaaaaaaaaaaaaaaaggccnccccttttaaaaaatccaaccttacttacccttccttccaa

SEQ ID NO: 166834 - DNA, 483 bp, Zea mays
  Clone ID: MRT4577_83731C.1
gtacgtaagctcggaattcggctcgtggtgatttgctcagtttctttttttgtgtcccaccggttcacggctatcagcggtggggcaatcgctgaaggtgtgcttattccacctaaagcgtttgtgaaatggcctataacgaggccggggatggagccgccaccacatactttactgaggagagcgaagagtgtgtagatacgtgaggcgaactacctgctgctgaccatcccacatctcagggctgcccggatatacctgctcaactacatcctctcgtacatgatgtccaagtgcgactccaaagctagcagttattagcccacagattaggagcctgagctgtctctactgcagctggagagcaacatggccaccatgcgccaattatgcctgctggcaaccttctctccctatgcctctatggcgaacatcgtcttaagctctgggtgtgatctgattttaccagcacgcaagtgatgg

SEQ ID NO: 166835 - DNA, 184 bp, Zea mays
  Clone ID: MRT4577_83732C.1
attcggctcgaggacggcagcccactggttgtagacgaggcaatgattgagggcaggggcctgaaatctgccatctccagtagagttttcgtgggacccactcttgaattgtgcgtccggcaccatgcaggtctggtctgttgcacgtggcgagggttgtccttgcagcgctgtctcactgtga

SEQ ID NO: 166836 - DNA, 523 bp, Zea mays
  Clone ID: MRT4577_83733C.1
agaggatctgacaaacctctatatttagaggacaggagcttttacaggacctgctggagccagccttaggctgtgacgagcagatagtgcatatggacaaatacaccgatacaaatatttggatcactattgggagctcagatattgtcctttgccaatatatacaagaagctaattgggatttgggagccaccaccaagttcatgatgccttcaagtggatttggaagtcctcctgccaacacaggcacgaagtctcttctggttgctcagcaacgatagacccatcgcaagaaatattcgaagaaacatggttcttgactcttttgattgtgttctctgccagcaaacaatagcagaaactgctgagcacctgtttcttagatgtccctttgccacctcttgttggagcttcattatatctacacattccaagccagggtagtttccctgaagttgctgaagatttgaaggctcaactacaccaaggcttctccatgaacataattatcctcactttatga

SEQ ID NO: 166837 - DNA, 262 bp, Zea mays
  unsure (1)..(262): unsure at all n locations
  Clone ID: MRT4577_83734C.1
acattcgggtacgcttttttatcccaaaaacatcaaataacttcactcttatcaaataaactacatcgcggcgttctattaatactgcatccatcctccttnacaaatacataaacacctctttaattctcttccttaaaaaaccttcccctgataataataaacttttaacccacttctctatcttcatctctccaactcgactttctattctactaacacttatatccaatattcctcataacataagaaactattttta

SEQ ID NO: 166838 - DNA, 489 bp, Zea mays
  Clone ID: MRT4577_83735C.1
ggctctggacctttgggctgatttatgtgcttggatccccgttctcggaacatccgcctttacaagtcacactcggttcgccatattagacaacgattcgtcgttccacatcctagcggccgacgacgtctataaagtaggatcagaaactcacgtcgtcgaccccgtaaacgatccaattactagtcacaatcatagtcccgacttaccagtggaacactcccctcctaccgacaatggcgttcctctcgccgacggcgcaccgatcgaccctttgaccatcttcctagaggtagccggccgtcccagcaattcgaatattagtaagaccgactacgtcaaattctcagccactctgtacaacggcgtcagcggcgatcatttagatcgtatcgattaagtccacgaaaaggtagccgttgacggcgtggacgctaccgatcgcttcgcctaagcgatcaaagacggtacatcgacacgtacgagtct

SEQ ID NO: 166839 - DNA, 1095 bp, Zea mays
  Clone ID: MRT4577_83736C.1
ccggccggggcctccaccaagttcctcctcccttcgacttcctctcccccgtctggccgtgcagccccggtcccccgaggcgtcactgggcaaggaggctggggtggggacctcaaacgccatggatgtgcagccctaggcaccaggatggatggagtcacacaagctgttgaaaatcttaagaaagaatggggccaagcagtttcacagcttgacgagaacattactgcaatcaaatcatgtggaaaaacagggaaagggacagaggaagcaaattctcttccaaggttgaatggttctgcacaggatgctctgcagttgctgaagtcactgcagttccagcttgatcttctagcacaacagcttcccacttttgatgaggtgcagtctggtcaagcaaccttgaagtcatgggatgaacaatacaagaagcttcgtattagcttgaggaatgctaacttagaagcaaaagacaacattagacaagctgctgaagaggagagggcacttcttctaggcggtggtgaagagtctaccatccgtaggcgtaatctccagacaaaggctggaatgacatctgctgctgaaagtatcactgagagcctccgacggtctcgccagatgatggttcagacgaatcaacaggtgttctccagaaggctgaaggtgaatatcaaggacatcgctctttgctgatgcgtacccgtggtttgctctccacaatgcaacgacaagatgtttttgataggatcatcctgactattggtttcaccattttctccttggcggttctttacgtcgtctcgagacgtattggtctgttgactctgcaaaggaaactggccgatgccatcagatcaggttctttatcagctgaggacattgtcgcgaaagcccaacatggacctgccccgggaaatgttcctgctcctgctcctcgcgtttacgatgaattatgaatcgcttttattttccgttttatgaaatgtgtgaccaggagcgattgttaaggtaatactttccacaagtaagctattaagatttcttatctgtagtctcaaatgatgatgcaccaacctgtcaacgtttgaaact

SEQ ID NO: 166840 - DNA, 143 bp, Zea mays
  Clone ID: MRT4577_83737C.1
atataatcaatgcattgagggtgtcttgaacaacagaggtttgaaccatggagcaaggtggaagttttacattactggaaaaaaaaagggagatgggattgaagaattttatgaacactgctgctagtaatgacgacatcaga

SEQ ID NO: 166841 - DNA, 840 bp, Zea mays
  Clone ID: MRT4577_83738C.1
ggacctcagcggcggctagcgcattgggtacctcgaggccggccgggctccccaagttcctcctcccttcgacttcctctcccccgtctggccgtgcagccccggaggcgtcactgggcaaggaggctggggtggggacctcaaacgccatggatgtgcagccctaggcaccagatattaggatggatggagtcacacaagctgttgaaaatcttaagaaagaatggggccaagcagtttcacagcttgacgagaacattactgcaatcaaatcatgtggaaaaacagggaaagggacagaggaagcaaattctcttccaaggttgaatggttctgcacaggatgctctgcagttgctgaagtcactgcagttccagcttgatcttctagcacagcagcttcccacttttgatgaggtgcagtctggtcaagcaaccttgaagtcatgggatgaacaatacaagaagcttcgtattagcttgaggaatgctaacttagaagcaaaagacaacattagacaagctgctgaagaggagagggcacttcttctaggcggtggtgaagagtctaccatccgtaggcgtaatctccagacaaaggctggaatgacatctgctgctgaaagtatcactgagagcctccgacggtctcgccagatgatggttcaggaagtggaaagaagtgctagtaccttggcaacatttgacgaatcaacaagtgttctccagaaggctgaaggtgaatatcaaggacatcgctctttgctgatgcgtacccgtggtttgctctccacaatgcaacgacaagatgtttttgataggatcatcctgactattggtt

SEQ ID NO: 166842 - DNA, 103 bp, Zea mays
  Clone ID: MRT4577_83739C.1
cgccaacgtgggccgcgttcgcgccagaaccgtgaagaaggcggcccgggtcgtcgtggaggagtgctacacgcgcctgggcagcgacttccacacgacgtgc

SEQ ID NO: 166843 - DNA, 214 bp, Zea mays
  Clone ID: MRT4577_8373C.1
cagagccacttgaacttttttcccacagttctgttgaccacacaagtgagctgcccttcaccgtgtagttatatattatttgctagctgcgcagagttcccatcactcactcagacacatatacactcacgtactgcacattgtgatgtctgcgccgaatactcgtgtccagatatacaatggttgggcatcatgaggttgtcgtgagcggctg

SEQ ID NO: 166844 - DNA, 547 bp, Zea mays
  Clone ID: MRT4577_83740C.1
gcacgaggaacgccctctctccacgcttgtgccaatttcttcgccctccaccagtgagcacgccaagccaccgccccttcctgttgcccagcgcccccctgcagcgcgcccgcccgcccgcctccctaccctggccgcggcggccttcgctccatgcacctgctttaggttgcgccgccgtgcgccctcgctgtgccggccttcgctccagctctgcctcgccatcgactgagtccccacgtccctgcgcggcgacgtgctcgcccaggccctgccaaggactcctgcgaactccaacctcatcgcctagccccgccaccgtttctaaagtgatgatccattcagcatgtcctcgtgctcatcgcatggatcatatctgggctcacactggggctcgtcgctcggcctcgtcgagctagagatcctccaacatagcagcacagacgccaagaaggcttagcctttgcaggcacttcctatatttcttgataggatgtttcatcatgttcttgctgtaatattgtcagtgacatttgttcttgccttt

SEQ ID NO: 166845 - DNA, 216 bp, Zea mays
  Clone ID: MRT4577_83741C.1
tacctcatcccagttaaatcgaatcaggggtggtcatggaggccgtgagcaccgaccacacattggaattgctaattccgcagcgccgccagatgcaaccgatccatgcagcgaccgtcggcggtaggcaatcgtgtgaaaaacgcgcgtcatacgatgccggagtggtcatgatgtgctaccaatgaggggattatgacctaattcgatccagag

SEQ ID NO: 166846 - DNA, 1134 bp, Zea mays
  Clone ID: MRT4577_83742C.1
agcacagacgtgctcaagaacgccctctctccacgcttgtgccaatttcttcgccctccaccagtgagcacgccaagccaccgccccttcctgttgcccagcgcccccctgcagcgcgcccgcccgcccgcctccctaccctggccgcggcggccttcgctccatgcacctgctttaggttgcgccgccgtgcgccctcgctgtgccggccgacctcgccgcggcctgacccagtcatcgtccctgcttcatctccccgtcatgctcctccatgggcgtggtgatcacctatgccgtcgtagccatgccttgggcgccacaccggccgtcagcctcatctctctgctcgcctgtctccttgcctccctgtgctcaccacgccggagcgccgctcccaaccctccacacttccctccccaggccgcggcggccttcgctccagctctgcctcgccatcgactgagtccccacgtccctgcgcggcgacgtgctcgcccaggccctgccaaggactcctgcgaactccaacctcatcgcctagccccgccaccgtttctaaagtgatgatccattcagcatgtcctcgtgctcatcgcatggatcatatctgggctcacactggggctcgtcgctcggcctcgtcgagctagagatcctccaacatagcagcacagacgccaagaaggcttagcctttgcaggcacttcctatatttcttgataggatgtttcatcatgttcttgctgtaatattgtcagtgacatttgttcttgccttttggagagggatcatatctgagctcagactggggctcatgtcgctcggcctaatgtagcagcacagtcatttcaggagaccattgatagtatgatgaggtcgatgcaaaaaaaaataacaaccaccttcatcaactattaagcttcagtcgaggtcaagcgtgtccatctttaagtctgcttgcccactataggatctgtacccttatggatgttatagtagctagtaccaatatgcttaatatttagtacttgagttgaagttataggattttctttggaattgaagttaaaggatttgtagatatatgttttgacgttatatgattctctaatggatgaaatattcgtgttcacc

SEQ ID NO: 166847 - DNA, 172 bp, Zea mays
  Clone ID: MRT4577_83743C.1
ccggccgggacatctcatcttcgtctgtgttcttgggcgtacgcggacacagcccctatccgaattgtacgccttgcgagcctcgccgatccttgactacgatctcctcggttaaagaggcagatgtttaggaagacgactgaccaggtacgactatcagatcttgaggtcg

SEQ ID NO: 166848 - DNA, 596 bp, Zea mays
  Clone ID: MRT4577_83744C.1
gaaggcaatggttaaaaagtgcatgatggagttggatcatttctatggatacatcaaagaacagattgaaagcagtgcaacctttacaaatactgaaggtcaagtgttttactatccacttgcataaattatactccttcctggtgacgaaggataagcaaaggaatatttgctaggacctgggaagccacaattatttgagataggaacagggggctattatgagcagccccacctcgtctactgtcgctgaacgcaggagcctcgagctctcccagacgccatgtgctcgctcggtttctcccctgcctcaacgggccctgtgggatggcgggcagttctctaacccatcagagcatcagcaacacgattgggatttgggagcagcattgtcttcctcacgccgctatttctcgcttgcctcagttggcctcccccgcctatccaggcacagcgggtggactgagtgttcgctgatcagatgtggcatgcgggtccttactcagcggtgaggctggaaggtctgaacagattagatgtggatggcatggaagttcctcttcacaatccatctctgagccccgacgacaggcaag

SEQ ID NO: 166849 - DNA, 509 bp, Zea mays
  Clone ID: MRT4577_83745C.1
cgcccagctgcccaggcaccgactaccggcgtccggatctcctgctccactgctcgctgcctcggggctctctggcgttggctcagcgcggtggcccccccaatagcctagttccggatccccccaccacccacgccccacaggtcaagcaccggccaccgatgtctgacgaacgagcgaactccccgcggatgcaggaggaggaggtgtaggagcgaccaccgaccatccgcgtttcaccatccccttctccgatctcaagggtttgtccgctggtttgctaaggcaagcaacgtacatagactgctcgtcttggatccttcaggtttgtatagtgtgttgctttatgatcaattgaccattcattacctccgcctgatggcccttattaacaacagtaagaactaactaagaatgtgcgctaagattttgctatctgaagtggtaaatttgttaatcctaattttttgttgaatgggtatggggttttgtgggtggtggatggtgtt

SEQ ID NO: 166850 - DNA, 125 bp, Zea mays
  unsure (1)..(125): unsure at all n locations
  Clone ID: MRT4577_83746C.1
cggggccgaacaccggcgggccgcgggcccgcncttctctttcaaacagcttcgtgtgtcgttgcgccgcgcatagntccagcgccagctcggcactgaagaatctggggaccggcctggatcga

SEQ ID NO: 166851 - DNA, 355 bp, Zea mays
  Clone ID: MRT4577_83747C.1
acgaggaaagcaagttatccacaaccccccaagaacaagggcaaatcccctacaaaggaaaaacacataagtagagccaccaaaacaaaactgccattgggcaccgaaaactccccaaccccacgcgctcccccccataaattccaaaaaaaaaaaaaaaaaccccccccccccccccaagcaaagggacaccccccatgggaaccccgcaaaaccaaccgcccaaaataaaaaaagacaacccccccccaaaaaaacaccacaaaagcccccatactcctcccccaaaaaacccacacccccccccgggggaacaacaaaacaccccgcaacgtcagccaccccaaaaccacac

SEQ ID NO: 166852 - DNA, 479 bp, Zea mays
  Clone ID: MRT4577_83748C.1
cccccaaaaaaaaaaaacggtttaaaaaaaacaggaaccccgttttttccgggcccaaaaactttggggggggaaataaaccccccccccaaaagggggggtttaaggccacattaaaagggtaagggccccgagggcaagcggggaaaaaccctaaggcaccttttttcccctagaaacttggcccccaacttgggaaaaaacccggtggttttcctttaaccaaaaagggggcaaaaaaaaccaacgggggggggccacccccaatattttggttcccttggcaacccaaaaggggaaaaaaaaaaaccctttcggggggtgaaacctgctaaaaaagggggggaaaaaatggggccccacgggggggggtgggggaaaacccccccctggctaaaacaggaaaaacccccccttgcgcccaaaaaaggggggccccacccccacttttttccacagggaaaccggggccccgcccc

SEQ ID NO: 166853 - DNA, 538 bp, Zea mays
  Clone ID: MRT4577_83749C.1
atcgagataaatctcaatcaatatattgattatttctaggaaacacatgtcggtatgagggcaccattgtcgagtacatcccccccccccttttttttttttttttttttttttttttttttttttttttttttttttttttttttttttttttttttttttttttttttttacccccccgggggggcctttgaaagggggaattccccccccctggggggcgttttttggggatcccagcttgggccccaatttggggaaataaagggcaaaactgtttcccgggggaaaatgttttcccctcaaaattccccaaaaaaaaagagccggaaacaaaaagggaaaaccccggggggcccaaagggggggccaacccccatttattggggggggcccactgcccctttttcaaagggaaaaccttgcgggcccctttttttaataaaaccccccccccccggggggagggggtttgggttttgggggcttttccggtttcttgttaactgaacccgtgggcccgggcgttcgggtgggg

SEQ ID NO: 166854 - DNA, 878 bp, Zea mays
  Clone ID: MRT4577_8374C.1
gggtacctcgaggccggccgggaataccaacaaccttgacagagccaccaaaggaaccgatatcctctgggagacacatcagccaacatgtcgaaaatctctgtcgccggcgttcgtacgaacgttcaacagctcctcgagtactccaacgagaccaagaagaggaacttcctcgagaccgtcgaactccagatcggccttaagaactacgacccccagcgtgacaagcgtttctcgggaaccatcaagctccctacgcttccccgtcctcgcatgagcatttgcgttctcggtgaccagcacgatatcgatcgtgccaagcaccatggtgttgatgccatgagcactgatgacttgaagaagctcaacaagaacaagaagctcatcaagaagctcgccaagaagtacgatgccttcatggcctccgatgctctcatcaagcagattccccgtctcctcggacccggtctctccaaggccggaaagttccctactcccgtctcccacaacgaggacctcgccaacaagatgaacgaagtcaagtccaccatcaagttccagttgaagaaggttctctgcatgggtgtcgctatcggcaacgttggcatgactgaggatgagctgattggcaacatcatgttggccatcaactacctcgtctctctgcttaagaagggatggcagaacgtgggctccttgaccatcaaggccaccatgagccctcccaagcgtctctactagagtgtttgtcgttgcgtctgctgggtttttccgtggccatctgtcgaaagatgggtggccatgttttaccatctgacggaatctgatggatattattggatgggtctagctagcttgaatgcgtgcatgaacctgct

SEQ ID NO: 166855 - DNA, 283 bp, Zea mays
  Clone ID: MRT4577_83750C.1
agcagtggtaacaacgcagagtactttttttttttttttttttttttttttttcttcttaaataataaaggtaagccgagatgtaaaaggcttaaccctaagtcgtgtcaggtaagtctatggcagctcgaggacgagctggtcctcaagggagggggagatgtcatgggcataatagggagcgagaggcaacagctaggctgggataaggctagagaataagattgagatgagttgggataaggttagagaatccccggtactctgcgttgttaccactgct

SEQ ID NO: 166856 - DNA, 349 bp, Zea mays
  unsure (1)..(349): unsure at all n locations
  Clone ID: MRT4577_83751C.1
agacttncaaattttngnnaccnnggaagaaccgaaatggggggcattaaactgttaatttacacccgcacttcttatcaacggatacattagtgactagtgagagattcaggagaaaactatattacacaaagctggcatctacaaaataaaacctacgcaaacagatgattaggaaaaaaatcatcaagagcacaggtcacagctatttttaccttctacatggggaaaatgtaaacctatccatctctatcgatgtgcacaaatnggaggctgtggcttctttaatctctgaacgacctgcttaatacatggccccatagggggggaatcaacattgcatattact

SEQ ID NO: 166857 - DNA, 514 bp, Zea mays
  Clone ID: MRT4577_83752C.1
gatgatgccgagcgagatactgagtggaaaattgagtgaataccagtgcatgtgtccatgctgaccatcaatgactacaaggaagttaatggcagtgaatcatacgctaagctctatgctggggataacacatctggaacgcaaagggaaaggaaaatgatgctggcgtagggggggtcggcgagactgatggaagtgatgctaacaggggttctgtcatgaaagtggattatgaatgcgctataattgacggtgaccgacatggagtgtatccactagttggttccgtacgagggtgacacagtgtccgagaacttagcagatcccgaggaatacatcttctggagatgcgatcacccatatgtggacctcacagtgacattaccagggtggcgacactgaggcacacatatgcattggaaaagactactaacaaagttatagttcaaagctgccgaaaggcggcatgtacaacttgtgttttcataacccacatgtagcacctaaaactgcc

SEQ ID NO: 166858 - DNA, 268 bp, Zea mays
  Clone ID: MRT4577_83753C.1
ctcctatacctcacttttagctcctctttcctccgctcctgccgcctcgcatccagctccctacttcccaccgactcccgctgacacccggcgagcgctccactccaaccacttatgctctgatgacacacgagtaagcagatgacaccgcaccaccatgccccaggacgaatgtatcccccgcacacccgtggccggaacagcccaacttccttgacaatgatgcagtacaagggagtactctcttagcaaggatttgcccatccag

SEQ ID NO: 166859 - DNA, 319 bp, Zea mays
  Clone ID: MRT4577_83754C.1
accgggagagcacccctcctagggcctttgatccatggccctaaaagattcggccgtggccactcgggggccaaaaaaggctcctccggctttttttttttgccctggccgccgtggccgccttcctctttttaaagttggccaccgccgtcaatggggactggaccctcgattcccggggtccgccgttgcggaagagggtcaacggcaaggccgggtggataactggagctagccgcgggattgggaaggttcttgcaatgccactttccaaatttaggggcaaagctgttcctttttgcccgtaacaaggaccccc

SEQ ID NO: 166860 - DNA, 442 bp, Zea mays
  Clone ID: MRT4577_83755C.1
cccaaacacccttttccccaaaaaaaaatcccttcccattaaaaggggggatccggggcatggcccaccccgccccccaggggggggggggaccccccggtccccaccgccggtaaacgggggaaccagctttgcccctaagggggggtgggcagggggcccattccattattccccccggccaaagttccccaaaaagaaaacccccccgggagttgggttgaagggggggggacccggttggtgaaattgaaaaccccaaaaccccgcaaggggggggcctcccggggcccccaaaagcccccggggccccccccgggggtgttgctgcaggaaggaccgcaggccccccccctttggccccgggacccggggcagggggcccccccgcctgaacggggggaaaaactggtgctgaaacccctggcactgggggaagccc

SEQ ID NO: 166861 - DNA, 251 bp, Zea mays
  Clone ID: MRT4577_83756C.1
tttacgtgtgggcggacacgcggaccgacgggggggggtactctttatcgcggtcgcgttcgcaccccctgagacagaatccatcctcaaagatatatcagaaagggccatgggcaagggaaacttcctctacaggcgcactctttgccgagcgcgagctctgggcccgctggcgtgcaagctcaggacgatcgcgacgctggagaccgtcaacatgagcggtaaccatctcttaggcgaggtcctacggg

SEQ ID NO: 166862 - DNA, 606 bp, Zea mays
  unsure (1)..(606): unsure at all n locations
  Clone ID: MRT4577_83757C.1
tatagaacacctgtgacgtcgcatgcacccgggctcctgcagagcggccgcccancgtttttttttttttttttttttttttttttttttttttttttttttttttttttttttttttttttggaaggaaactcacaaaaaaaaaaccggcgcgatgtcccttgtacggcaaaaactacgagcggggccccccccgaaaaaaactaaaaaaagggtattgatttttttgaccccaaaattgccgttttttttaataagtccctttcccacggaaatttttttttgttttccccggccataaaacccgtggagttcaaaatggggtagggatcaacacacacgtgctgttcgcccattgaaaggctcaatttttgtacagactttcacggacaaacgagcttggctgtttacccaaatccgaaccctttttttgcttcggggattgccaacagaaccctttcctggagctgttttttggacgtgtcctcaggcaagtttagttggttaaagcaagtttaacctgaaggcaaatggttcgggctgccgtatgccttgggtttctaaaacctttggggcccaaaaatcccttgaagttcactaaaacct

SEQ ID NO: 166863 - DNA, 147 bp, Zea mays
  Clone ID: MRT4577_83758C.1
tcgcggagtttccgcacccagcgaccctcccgaaggctaaccctagatccgggaccggccatggtgttccgtctgggtcggctcctcgctccctcgatccgactcccgcctccgggacgcctcggccgccgcggcgcggtccgcgcg

SEQ ID NO: 166864 - DNA, 644 bp, Zea mays
  Clone ID: MRT4577_83759C.1
ggtttgtgctgtgcgcccccccccccctccccctgttgcactggctgaaggagcttttttagtagggtttcaatatttcaaaatatttaatactattggaggattaataccatttgcttatgctccatttttcctgtctctcccatatgcctttataatataattttgtctctaatatccaaactagttacttttattgggcgtgaagtaggaagtggatgatcataggttcccatcgtgtgccacctgttaatattattatttttgtttctatacactctagaggaatattttatttatccttgcacaatatcaattgtccaattctcaaacactgccacattgcagtgtttgagattatcagttctatctatggtgacttttattgtgatgctatttctaggtgttgcatatgacttacatgctgggagcctgcatgaatacctttaatgattgggtgatatgcacatccggctggtttggattgtctttcgacaaagaaatcccatgtgttggaatatttaatgattaatttccatcggtcctgtgccattttgagaaaacctggaacatttgcttgggtctttaattgcttgtgtgctaacttgccatttttaggtggttcttggtgcatgattttccat

SEQ ID NO: 166865 - DNA, 1061 bp, Zea mays
  Clone ID: MRT4577_8375C.1
cgcacgcgtccgcggacgcgtgggcttacgcgtgggttccttggtaagatggtgtgggctaattgatatagagagctcattgatttattatccaaacacaaaaacgacctggaaggattcatgatagatgtatatggaaatggcgaggactctgaagctgtccagaacgctgctaggaaatttgatttgaacatcaattttttcaagggaaaggaccatgcagatgattcactccatgggtacaaggtttttgtcaatccaagtgttagtgatgtgctatgcacagcaacagctgaggcccttgcaatggggaaatttgtagtctgtgcagatcatccatcaaacgatttttttaagtcattccctaactgcttaacatatagaacttcagccgaatttgttgctcgtgtcaaagaagccatggctactgaacctcaacctctgacctcagagcaacggtacagtttgtcatgggaagcggcgactgagaggtttatggaatactcagagcttgacaaagttctgaacagaaatcgtcaccctggacgaaatgggaaggttaacaaagcaagaaagataccgttacttcctaaattgtcagatgtggtggatgggggactggcatttgctcatcactgcctgactggtaacgaaatcctcagattagcgacgggagcaattcctggtacacgtgactatgataaacagcagtgcatggatctgaacctgctgcctcctcaagttcaacaccctgtatatggctggtgatcaaaccagttcacattgaactatgtatagtcgtaggatgtacatattaagtgatccagttcctgtgtactgtcaggagcatgaacttttgtagagtcttggtaattcctagggtccatggggaacctgccttgttgcactctttgattgtaattatattccttttcactatccaaataggttagttatgtagttgaatgatctttaatctgaggtatgcgtatacacataattaccagtgcctgtactctgaagtcttatgggacagcaaggattgtgactgtttcggtttc

SEQ ID NO: 166866 - DNA, 2487 bp, Zea mays
  Clone ID: MRT4577_83760C.1
cattgggaccctcgaggccggccgggagttgcttctattcctccaccctccctatcgccgggacctaccccgggccttgcgtggcgatcgagttgccaccagacaactcggctcggctcgtcgtccaccgaccctcctcctcgctccaagcttccctctcccctcctcctccgtcagctggggagctagctagggagcggcgccggcggctgatcgagcggacagacagctgaacgagccggaaatggcggcggggcgcgcgccgtggctcgccgccggcctcgtggcggtgctgatggtggtggccgcgcgcgcgcggttcgtggtggagaagagcagcgtgcgggtgctggcgcccgagcacatccggggccaccacgacgccgccatcggcaacttcggcgtgcccgactacggcggcacgctcaccggcgtcgtcatctacccggacaccaagcccacggggtgcgacgacttcgacgccaagttcaaggccaagtcccgccgccccgtcatcctcctgctcgaccgcggagaatgctacttcgcgctcaaggcgtggaacgcgcagcgcgcgggcgcggcggcggtgctgatcgccgacagcgtggacgagcagctgctgacgatggacagcccggaggcgtcgccgggcacggagtacatcgacaagatcaacatcccgtcggcgctggtgaaccgcgcgttcggcgagtccctgaaaaagatggcgcagaaggtggccggcgcgggcagcgaggaggtggtggtgaagctggactggcgggagtcgatgcctcacccggacgagcgcgtggagtacgagctgtggaccaacagcaacgacgagtgcggcgcgcggtgcgacgagcagatggcgttcgtgcgcggcttccgcggccacgcgcagctcctggagcgcgccgggtacgcgcgcttcacgccgcactacatcacctggttctgccccgaggcgttccgggcgacgcagcagtgccggtcgcagtgcatcaaccgcggcaggtactgcgcgcccgacccggagggggacttcggcgccggctacgagggcaaggacgtggtggtggagaacctgcgccagctctgcgtgcaccgcgtcgccaacgaaacgggccgcccctgggcctggtgggactacgtcatggactacaagatccggtgctccatgaaggagaagaagtacaccaagacctgcgccgaggacgtcgtcaccgcgctcggtctggatctcaagaaggtgctggagtgcatgggcgaccccgaggccgacgtcgacaacgccgtcctgtccaaggagcaggaagaccagatcggtagcggatcgcgaggcgacgtcaccatcctgccgaccctggtcatcaacaacgtccagtacagagggaaattggagcggacggcagtgctgaaggccgtgtgcgccggcttcaaggaagggaccgagcccggcgtctgcctcagccatgacatcgagacgaacgagtgcctgcacaggaacggcgggtgctggcgcgacgaggccaccaacgtgacggctgggcaggacacgtaccggggccgggtgtgcgagtgccccgtggtgaacggcgtccgctacgagggcgacggctacactgactgcaaagctattgggccgggcaggtgcgctctcaacaacggcgggtgctggtcggcgacgcgagggcaccagaccttctccgcctgcacggagaccgcgctgacagggtgccggtgcccgccggggttccatggcgacggccacaaatgtgaagacctggacgagtgcagggagaagctggcgtgcacgtgcccggactgccagtgcaagaacacgtggggcaactacgagtgcaagtgcaagggcaaccagctctacatccggggcgaggacgtctgcatagctaacagcatgtcgaagctcggctggttcatcaccatcgcggccgtggcgtgcgtcctcggcgtcggggtcgccggctacgtcttctacaagtacaggctcaggtcgtacatggactcggagatcatgtccatcatgtcccagtacatgccgctggacagccagaacaacgagaaccagcctctgcggcagcacgattcggaggctctgaggcactaaaggggccccaatgcaagatgcgcacatgatctcgacagatataatctgctccggtttcgacgacgatggtttgcttcgcttttgtatagcgcgtagaaaacaaaaaggaggacggtttgtactgtgccgaggacaaagttgagctctaaagagtttagacaggtaggcatttcgctcggctctcttgggagctagtagtcttgtgggtcaaaagccgtttaaagcacacaaacagcatgtagaaaaaaaaggcgtatacgagctgctatacatgtacattgtacagtagacaaatcctactacggacaatttgttactgccatatttggtatgcgcgggagtttcccctt

SEQ ID NO: 166867 - DNA, 907 bp, Zea mays
  Clone ID: MRT4577_83761C.1
ttgagctcactagtttttggccgcccttttttttttttttttgggcgaggacgtctgcataggtgagcgagatacacacactacatacagacatgtgccagcgacagcgacctgcaagctagctctgcgcgcgtctgccatctgattttcctggacctgtcacgcacgcatatgcagctaacagcatgtcgaagctcggctggttcatcaccatcgcggccgtggcgtgcgtcctcggcgtcggggtcgccggctacgtcttctacaagtacaggctcagggtaagcccatgcccatctgaaattagaatacatggttcatcagtgaaccccgtagaacctcggttgactgacgaactcttcggccgtcgtcaagtagttgttcaagtcgtacatggactcggagatcatgtccatcatgtcccagtacatgccgctggacagccagaacaacgagaaccagcctctgcggcagcacgattcggaggctctgaggtaacttcaactctgctgctgcacccatgttgaggacgacgagcgaatggcaccggattctgatgcccagatgcgtgcatttcaggcactaaaggggccccaatgcaagatgcgcacatgatctcgacagatataatctgctccggtttcgacgacgatggtttgcttcgcttttgtatagcgcgtagaaaacaaaaaggaggacggtttgtactgtgccgaggacagagttgagctctagagagtttagacaggtaggcatttcgctcggctctcttgggagctagtagtcttgtgggtcaagagccgtttaaagcacacaaacagcatgtagaaaaaaaaggcgtatacgagctgctatacatgtacattgtacagtagacaaatcctactacggacaatttgttactgcc

SEQ ID NO: 166868 - DNA, 1199 bp, Zea mays
  Clone ID: MRT4577_83762C.1
cccatccacccctctcctctcgctctcgctctcccgcgcctgcaccgatcagttgccatatattcctccaccctccctatctcaagcacctaccccgggccttgcgtggcgatcgagttgccaccagacaactcggctcggctcgtcgcccaccgatcctcctcctcgctccaagcttccctctcccctcccctccccctccgtcagctggggagggcgccggcggctgatcgaccggacagacagctgaacggccggaaatggcggcggggcgcgcgccgtggctcgccgccggcctcgtggcggtgctgatggtggtggccgcgcccgtgcccgcgcgcgcgcggttcgtggtggagaagagcagcgtgcgggtgctccgggatacatagcattgtgttactgatggcaatccttgaagcatttggactgaaacttaaatattgaaaatgtggacgacaaacatcatcatcagaaagttagaagtgtatttcttgttgcccttattattaaactcgctctcccgcgcctgcaccgatcagttgccatatattcctccaccctccctatctcaagcacctacccccaggccttgcgtggcgatcgagttgccaccaaccagacaactcggctcgtcgcccaccgatcctcctcctcgctccaagcttccctctcccctcctcctccgtcagctggggagctagggagggcgccggcggctgatcgaccggacagacagctgaacggccggaaatggcggcggggcgcgcgccgtggctcgccgccggcctcgtggcggtgctgatggtggtggccgcgcgcgcgcggttcgtggtggagaagagcagcgtgcgggtgctggcgcccgagcacatccggggccaccacgacgccgccatcggcaacttcggcgtgcccgactacggcggcacgctcaccggcgtcgtcatctacccggacacgaagcccactgggtgcgacgacttcgacgccaagttcaaggccaagtcccgccgccccgtcatcctcctgctcgaccgcggagaatgctacttcgcgctcaaggcgtggaacgcgcagcgcgcgggcgcggcggcggtgctgatcgcggacagcgtggacgagcagctgctgacgatggacagcccggaggcgtcgccgggcacggagtacatcgaacagatcaacatcccgtcggc

SEQ ID NO: 166869 - DNA, 264 bp, Zea mays
  unsure (1)..(264): unsure at all n locations
  Clone ID: MRT4577_83763C.1
gacccacgcgaccggcgcagcctactttattgaccttttctttccctatatgacgctcaccaccatnaaggggcgcttttttattactcgcgactacaatttctacccatactacaattactaccccaactcccttcccgatgtttccaacatcatcttcctatactttttccccacccgagtctacaattaagcagcccgccttcatctcattcataacacaccgttctacaacatcttcttttccaactttaccatctacct

SEQ ID NO: 166870 - DNA, 734 bp, Zea mays
  Clone ID: MRT4577_83764C.1
cattgggtacctcgaggccggccgggacctaccccgggccttgcgtggcgatcgagttgccaccagacaactcggctcggctcgtcgcccaccgatcctcctcctcgctccaagcttccctctcccctcctcctccgtcagctggggagctagatagggagcggcgccggcggctgatcgaccggacagacagctgaacggccggaaatggcggcggggcgcgcgccgtggctcgccggcctcgtggcggcggtgctgatggtggtggccgcgcccgtgccggctcgcgcgcggttcgtggtggagaagagcagcgtacgggtgctggcgcccgagcacatccggggccaccacgacgccgccatcggcaaacttcggcgtgcccgactacggcggcacgctcaccggcgtcgtcatctaccctgaaacgaagcccacggggtgcgacgacttcgaggccaagttcaaggccaagtcccgccgccccgtcatcctcctgctcgaccgcggagaatgctacttcgcgctcaaggcgtggaacgcgcagcgcgcgggcgcggcggcggtgctgatcgccgacagcgtggacgagcagctgctgacgatggacagcccggaggcgtcaccgggcacggagtacatcgacaagatcaacatcccgtcggcgctggtgaaccgcgcgttcggcgagtccctgaaaaagatggcgcagaagggggccggcgcgggcagcg

SEQ ID NO: 166871 - DNA, 431 bp, Zea mays
  Clone ID: MRT4577_83765C.1
actggggcaaatatgtagccctgagtgttacattgcccgtaacattcatataccaaaaccacagactagttaatagacacatagacacacagcctcaaacatacatggaactgaaacacaattgaaactgtaaacaggcatagaggctgatgctgccaccgaatattcatggatcaccttagcctaaagagccatcttgagggcaaccacgttggacggaagaaatccatgggctgaggaacgaccccaacctgcaggagtgtctattctgcaagttcttggggatgaaagaacaacccatggccaacatgtaatggtgcctgctgctgaggagagagcctctagtggcggacaaagttgcaaccgggctgcgacactaggccaagcaccagattgacggtctcctccaggtgttttctaggcacttattt

SEQ ID NO: 166872 - DNA, 296 bp, Zea mays
  Clone ID: MRT4577_83766C.1
ggaagtcatcagttttacttgatagtgaagccatgggacgatgagactgacatgggcaagcttgaagaagcagataggagtgtccagatggaagggctgttttggggcgcatccaagcttgtcccagtcggatatggtagcaagatgctgcaattcatgatgaccatattcgacgatcttgtctttggcgcactctcattgaggactatctgtgcgctgagccagtcaacgagttcgtccagagcttcgacatttttgccttcaccaagatctaggctggactttttatcaatcct

SEQ ID NO: 166873 - DNA, 279 bp, Zea mays
  Clone ID: MRT4577_83767C.1
accgtccgggacctgggggacttgagaaatgtaaagttgtaaccaatgtttgacagcatgaccatacaaactatatctgtagtttagaaatattactgttgtcagttgaattgtgggaccatgaacctgatttttgtggcatttaatgggtgatggatggtgctgttctatccaccgatttctttgtcttgtgtccacgcagtcagaactatgataattgaagagatacgatcttttaatttcagcttgtcactggaggtgctaattgaacaacctctt

SEQ ID NO: 166874 - DNA, 151 bp, Zea mays
  Clone ID: MRT4577_83768C.1
ccacctttaagtgagccatgagccctcgagagaccatcagctagctagataaccagccagctcgagcatggaggcggctgctgcatcggtgctcatccactcggcggaggcgaacggaaaaatgatgcacgtggcatgaatacatacccca

SEQ ID NO: 166875 - DNA, 400 bp, Zea mays
  Clone ID: MRT4577_83769C.1
ctgctcccggacgtgtcgttcagcagatgacgcgtcgctgctccggctccacttccacgactgcttcgtccaaggctgcgacgcgtacattctgctgaacgacacgtgcgtagagcagacccgcaacgcgtatcacgtctcgtatctcctaaggcatgcaacccccaacaagccgaagcgtacacgcgcacagcgaataccgccctgcgaagtaccgcccctgactccactccgtgcgaataaaaaaaagacggagacccctaaaatggaaacttcccttacacagtccctgcacatgtagacgtgaccgctgcccaagtggatctgcgacccgaaccaatgccgcaccttgccgtacaccagaggtgcccgacataccctcctcggactggtacaggac

SEQ ID NO: 166876 - DNA, 186 bp, Zea mays
  Clone ID: MRT4577_8376C.1
caaatgctctcgaggggtttcgtgggtgtttgagggcggtgccctgccttctctgggaaaagttgtgggcttgtggctagcatagtggtatttatccacgaaggcgcctgctttaactccaaaaacgccgagctgctgggtgtgctcaataaagttgtgaacaaggctgatgacacctatccaagc

SEQ ID NO: 166877 - DNA, 558 bp, Zea mays
  Clone ID: MRT4577_83770C.1
cattggtacctcgagccggcgggcatccttctgtactcagactgcaaagcggctcttgagagacagagagagacaatagtcctgtttcgtcgagatgtaccacaaccaggcttttctatctgtgtctgagctgcctgccgggttgtagatctactgccgcgtcaacgacaactacttgctggacgtcctggaagacccggtcaagctggcccctgtataatccaaggttgatcaccatcactgcgacaaggatgtttgctacaaaacccttgttgacgcagctgaaagggtgtctgatattgctgtccattccaggtcacggagctcgcaacttatgactccactcggtcatgtcccagcacgtccaagatcacgtctttcatccctctgacatgtaggacagcatcgagactgtgtacgttgacatatgtcgtgagcaaggggttcctgtgtatctccttggctagctgcatgctctctcaacttctacgtgttgaacggctacaaggtgcacggtgttgtggattaggatattgcccacatgctctgaatagtccg

SEQ ID NO: 166878 - DNA, 536 bp, Zea mays
  Clone ID: MRT4577_83771C.1
ggccgctttttttttttttttttttttttttttttttttttttttttttttttttttttttttttttttttttttttttttttttgagcgggggaaaattttactcccaaattttacaagttacaaaaattttatttttttttatggggggggttacaaaagtttaagttggaaatattggggggctaaaagggccccccccaaaaagaaatataggggggtttcttaaacttataaaaagggcgggccccccggcccttaacaccattacaggagcccaggggtagaacctgggtaacactgggttagggttgttagacggggatcctttggggagcagtttttgttttgccactcgttcaacttatccattttgaggttaataattggcataacctcggagaaaaatctgcccttggggacaacttggctggggttctccgcataacggggttaattcacataccgggaataaactgattttggattttgcaaggcccatgactccccccagttttttttttttaccggccggg

SEQ ID NO: 166879 - DNA, 657 bp, Zea mays
  unsure (1)..(657): unsure at all n locations
  Clone ID: MRT4577_83772C.1
gccgggagcggtgcacatcccaccccaatttagtgttctcacactgtagcacttaactttctggctcacgtaccctgcatacggacttggctcctgagtcgtggtgaacctggatttgaagtacgggagctttaagatgtatcctgatgacgtgatgggcagggcgtggatactcataggtccacagtcaacgtgcttttgaagcctgaacatggtcaggaggttatgatcctattgctttttcgaaattcctggacgctgttaggttgttggtatggcctgtacaacccaattatctgcaggtgcaattgtcagcgttgatatatactctttgctatactgaatcaagaaattgcacgaaggaattgttagcctgactagtataatcatacggtggatggagttttaatgttcattcgaattcattgggtcctgcatgaccgtgttgtatatgggacatcttgttaaaatgatcagttcagctttgtaaactatcaggtgtgaatgaatttataagctattttcacctgacattggtaggaccattttgtaaggtatttctcactaccaattaatcgatgacaactctgttctattccactacaggtatctcttgatattggatcgcacanattggaagaccaacatgctgacagc

SEQ ID NO: 166880 - DNA, 421 bp, Zea mays
  Clone ID: MRT4577_83773C.1
gttcaaaattgggtggccgggccttttttttttttagtggaaagggcacaaaagggtccactccccttagaccagggccacaaaaaaaagggggggggcgaacccccgaaacccgcgcgcgcagaggccaaagggccccccagacaaaaaaagcccagaacatttttggaacaccaaaaacagcaaaaaccccgggccccaaatggcaaggggggtaaagaaaaccgggcaaacatatttgggccgcccgccgaaagaaaggtcccagaaaaaaacccccaaaagggggaccaaaaggacccgccaacaaacccggggggggggccgggaataccggccccgaacccgaaggccgaccagggaaacctaaagagaggggggagaaaaaccggggggaaccacgggaaaacccggccccccc

SEQ ID NO: 166881 - DNA, 410 bp, Zea mays
  Clone ID: MRT4577_83774C.1
ctcggaattcggctcgagcctctctctcgtccggtcctcccttttgttcctgaggcgttccctctctctcctcccctttcctctgctggtctctactctcttgtcatcgcacccgtctccccgccgccgcctcgtcccgatcgacccccgaatcgccggaaaccgtggacttcgcgaggttgtgtctttacctccgagcggtgtagggaatataacagggtgacagctgaattgcagaaaaaaggaggacatttggttgttgcatgatggtggaaggccccaatttcgctggcctgattggtggtcatgacaatggtgggaatttttgcgacatggcatactaccggaaactcggtgagggctcaaacatgtcgatagatagccttaacagcatgcagaccagcacgcat

SEQ ID NO: 166882 - DNA, 407 bp, Zea mays
  Clone ID: MRT4577_83775C.1
ctgaatcctgatggacagacgagcaatgaagatatcacattcctttatcggtaactacacaagaaaccagcgatgctttattctggttcctgttttgttttccttatgtattatttttttaatttgtaatgcacatgatgaagactggtacctgggcaagctctcttaagctttggtaagcttacatacttttctatggatccttttggatcagttacaaggtaacaatttttttatttgccttgcaggtctgcattgtgcacagcttgctggtgttccaaatgaagtcgtccagagagctggcattgttttggaggacatgcattccaagaaacctacgaggcgcgtgaccagtgagaaattaacagcaacagacaagcagtaccaggatgcagtgactaaactga

SEQ ID NO: 166883 - DNA, 836 bp, Zea mays
  Clone ID: MRT4577_83776C.1
atcaaacaagagagttgaaatgaactccatggaagcgtaattgagtgtatttatcatgtgtgcaaacttcgctcagctgagggagaaagcacacctgagtttatggctgtatgtgtgtatactcaggtgtaagccttgttgtctttgaaatattcctgcacttagaaatatacctagttcgcgttttcaaaaaaaaaaaaaaaaaaaaaaaaaaaaatcatgaccaggtactgggatccaaatcctaaaatccgtccgacgttcactgaagttgtgaggatgctggagcatgctgtggtggagggggtgagcactgtccgcaaggcccgatttcggtgttgcatctcccaaccgatgaccaccgactgaatcaaacagaagagagtcgaagagaactccatggaagcataattgagtaaatttatcttgtgtccagacttcgctcagctgaagtagaaagcacacctgagtgtatggccgtgtgtgtgtatactcaggtgtaagcatattgtctttgaaatattcctgccattagaaatatacctagttcgcggtttcagactcttgagatgttttagggctagcctatgccctgtcgaaacatcatgcgggcttcctattcttgtaatgtccttgtggccctgctgctttgttcatgttataaccctcctactggattatgcaaacactttgttgcttctgagtaaaaaaaaaaaaaaaaaaaaaaaaaaaaaaaaaaaaaaaaaaaaaaaaaaaacaaagataaaatataaaaaaaaaaaaaaaaagaaaataaaaaaaaaacaaaagggaaaagaaagcgcctaaaaagtaca

SEQ ID NO: 166884 - DNA, 691 bp, Zea mays
  unsure (1)..(691): unsure at all n locations
  Clone ID: MRT4577_83777C.1
ccgggttaccaanananagaaaagcgagaggcgactccacgcgtctcgtcgggtctcgtctccctctctctcctccggtcctccctccccttccttcctgaggcgttccctctctctcctcccctttcctctgctggtctctactctcttgtaatcgcacccgtctccccgctctgactccgtcccgagcggccgactccgcccgcgccgccgccgccgccgccgcctcgtcccgatcgacccccgaatcgccggaaaccgtggacttcgcgagttaccatcccaggccggtttgatgcaacttcggtgtctgcagctgttccaagcgtttcttgaattttcaactctaaaatgcctgtagcttttagaccctggttgtgtctttacctccgagcagtgtagggaagataacagggtgacagctgaattgcagaaaaaaaggaggacatttggttgttgcacgatggtggaaggccccaatttcgctggcctgattggtggtcatgacaatggtgggaatttttgcgacatggcatactaccggaaactcggtgagggctccaacatgtngatagatagccttaacagnatgcagaccagcacacatggcggntccattgcaatgtctgtggacaatagcagggtagggtcctgcagctcccatactaggatgctcaatcatcctggcctc

SEQ ID NO: 166885 - DNA, 2106 bp, Zea mays
  Clone ID: MRT4577_83778C.1
ctcgaggccggccgggaggtaatccggaaaaaaaaaaaaaaaaaacaatcaaccagcggccgggaaccaccggccgtgctaacccccgcacttaccaagagagagaaaaagcgagaggcgactccacgcgtctcgtctcgtctcgtctcgtctccctctctctcgtccggtcctccctccccttcctgaggcgttccctctctctcctcccctttcctctgctggtctctactctcttgtcatcgcacccgtctccccgctctgactccgtcccgagcggccgactccgcccgcgccgccgccgccgccgcctcgtcccgatcgacccccgaatcgccggaaaccgtggacttcgcgaggttgtgtctttacctccgagcggtgtagggaatataacagggtgacagctgaattgcagaaaaaaggaggacatttggttgttgcatgatggtggaaggccccaatttcgctggcctgattggtggtcatgacaatggtgggaatttttgcgacatggcatactaccggaaactcggtgagggctcaaacatgtcgatagatagccttaacagcatgcagaccagcacgcatggcggctccattgcaatgtctgtggacaatagcagtgtagggtcctgcagctcccatactaggatgctcaatcatcctggcctcaagggacctgttgttggcaattactccgtcggtgggcacagtattttccgtcatggacgggtgtctcatgccttgagcgatgatgcgctagcacaggcgttgatggacccaaggtacccgactgagacactcaaagattatgaggagtggacaattgatttagccaagctccacatgggaatgccctttgcacagggcgcctttggaaagctctacaggggtacctacaatggggaagatgttgccattaagcttttggagaggccagaggctgatccagagagagctgggttaatggagcagcagtttgttcaagaagttatgatgcttgcaaccttgaggcaccagaatattgttaaatttattggagcatgcaggaagccagtggtttggtgcattgtgacggagtatgccaagggtggatcagttagacagtttctagcgaagaggcagaataggtcggttccactaaaactggcggttaagcaagcattggatgttgcaagggggatggcctatgttcatggtcttgggttcatccatagggatcttaagtcagataacctcttgatatctggtgataaatctatcaagatagctgactttggagtagctcgcattgaagtaaaaactgaggggatgacacctgaaacgggaacctaccgttggatggcaccagagatgattcagcataggccatatgaccagaaagttgatgtctacagctttggcattgtgctgtgggagctcataactggcatgctcccttttgctaacatgacagcagtgcaagctgcttttgctgtggtgaacaagggtgtccgcccagctataccccaggactgcctgcccaccctcggtgagatcatgaccaggtgctgggatccaaatcctgatgtccgtccgccgttcactgaagttgtgaggatgctggagcatgctgaggtggagatcctgagcactgtccgcaaggcccgatttcggtgttgcatctcccaaccgatgaccaccgactgaatcaaacagaagagagtcgaaaagaactccatgcaagcataattgagtaaatttatcttgtgtccagacttcgctcagctgaagtagaaagcacacctgagtggctgagtgtatggccgtgtgtgtgtgtatactcaggtgtaagcatattgtctttgaaatattcctgccattagaaatatacctagttcgcggtttcagactcttgagatgttttagggctagcctatgccctgtcgaaacatcatgcaggcttcctattcttgtaatgtcgttgtggccctgctgctttgttcatgttataaccctcctactggattatgcaaacactttgttttgttgcttctgagtatatagcatgtataatttccttccaaaaaaaaaaaaaaaagggcggccgccaccgcggtggag

SEQ ID NO: 166886 - DNA, 386 bp, Zea mays
  Clone ID: MRT4577_83779C.1
cgtgttaatcttttctaggaggtgggttttgggccaaaaaaatcatccggtcttcgccgcgaattgatgataaaagggggggatttttacggccctcttaaacccccgacccaggggattaaaccctaccgggggtataacccttgtgggggcccaccctcataattttacatacattacagttgacatgcgggggtttgcacatttcaagggggcaaaaacaaattaatgtatccctcaacaaaaaacatgggggactgggggtgcctttagccccatcgggccaatttgtgcccgaaaaccttgaaaaaaataaaagggccccggttttggtgcacgtggggggacatgaaccccttcccataatagaaaaacccgagcttggc

SEQ ID NO: 166887 - DNA, 201 bp, Zea mays
  Clone ID: MRT4577_8377C.1
ctggtgctgcagtggcggttcagaatcatgcgatgatgaattagtcaaacatagaagtgaccgggcctttatactcaggaattgataatgatacaaaccttggtacaatgatcaacccacaagcataggattctatctcgacagctagccaaagttggcttaagagagatgctctgatactgctagatggcagaaagatct

SEQ ID NO: 166888 - DNA, 430 bp, Zea mays
  Clone ID: MRT4577_83780C.1
aaacggggggggggaggggttaattacatacagggcaaaactcaaagggggcgcgacgaccacgatgacgggggggggcaaaacagcagaggggggggggagaaaaaaaaaggaaaaaggcagcagtttactactagcacggacaatacaatacacagtactatgggacaggcccagcaaaagtcctagtctagcagggggacatggacaagtacaacccgtgcgggcagggggcggaaaaagaaacgaggaccccccgcgcgggccaaaaggcaaaggcaggggctgtgctgaaaaaaaagcgcttcacttcacctcatttgggcccccaaagcaacaggggcaagaccttggccgtcttgccggggccgggggggggatccttccggtcccggccgggccaccccggcgtttccctcccggcccgggc

SEQ ID NO: 166889 - DNA, 2793 bp, Zea mays
  Clone ID: MRT4577_83781C.1
gaacccgtctcccaccgttgtctctcacctccgatcctgctcccccttcctcaggcgcacaacctctcgccctcccttgcctccgctctcttcccgccgctgatcgccgcactcgccaccgtcgccctgcccgctgcaggggcgcccactctcccgccagtgcccgccagcgcccgagattcggtccccccgcatgcccgagcccgcccaggccgcggccggcgcggacggctactccaaatcaccgatcgaatcgcagggatctcaggctttctccaaattgatgcaccagctgggagcggagtccagacatcagctggcgagcaccgatgctgtatcgacatcaagacgacaatgtgcagttccaaaatgctgaacaggcgcaaattggctggcgtgatgggggcataatatcgcaagttgggtttgaggacagttcaatcttggggcaaggtgcgagttcatgtgaatgggtagcctaccgggactatggtaagctttcggaagatatgttagacatcattaaacccgctaagaatgcaacacagtatagagaacagaccaaaacttcgctccactgcaatatcaacggccacctgagattatgagtctccatgcccaaattggcgttcggtggtcggtgttttctctttcgaagtgcaagcaggaattgaccgggagcatatcacctgatttttctgagtaggaaagttcccagacgccatgtgcgtcgatacgttggataaggcaatgatgcatatcaagaatgtcttcggagacatttgcagcggcacctccactcgtgactcgtgagtcgtgagtagtgactcgtctggtctcccctctctcgtccgtctggtcctcccgtccagaggcgttctctctccctccccctttcctctggtcatcgcacccgtctccccgctctgactccgcccgcgccgccgactcccggcacggccccccaggcttcatctccgccgccgccgtcgccgccgcctcgctccgatcgacccccgaaacgccggaaaccgtgggcttcgcgaggttgcctctcttcgtccaagcggtagataacataacagtgcgacaggtgaattgcagagagaagggggggcatttggtcgctgcatgatggcggaaggccccaatttcgctggcatgattggtggccatgacaatggtggggatttctgcgacatggcatactaccggaagctcggtgagggctcaaacatgtcggtagacaaccttaatagcatgcagaccagcacacatggtggctccattgcaatgtctgtggacaacagcagcgtagggtcctgtgactcccatactaggatgctcaatcaccctggcctcaagggacctgtcgttggcaattactcggtcggcgggcacagcattttccgtcatggacgggtgtctcacgccttgagcgacgatgcgctggcacaggcgttgatggacccaaggtacccgactgagacactcaaggattatgaggagtggacgattgatttagctaagctccacatgggaatgccctttgcacagggcgcctttggaaagctctacaggggtacctacaacggtgaggatgttgccattaagcttttggagaggccagaggcagatccggagagagccgggttaatggaacagcagtttgtgcaagaagttatgatgcttgcaaccttgaggcaccagaatattgttaaatttattggagcatgcaggaagccagtggtttggtgcattgttacggagtatgccaagggcggatcagttaggcagtttctggcaaagaggcagaataggtcagttccactaaaactggcggttaagcaagcactggatgttgcaagggggatggcgtatgttcatggtcttggcttcattcatagggatcttaagtcagataacctcttgatatctggtgataaatctatcaagatagctgactttggagtagctcggattgaagtaaaaactgaggggatgacacctgaaacgggaacctatcgttggatggcaccagagatgattcagcacaggccatatgaccaaaaagttgatgtctacagctttggcattgtgctgtgggagctcataactggcatgctcccttttgctaatatgacagcagtgcaggctgctttcgctgtggtgaacaagggtgtccgcccagctataccccaggactgcctgcccacccttgctgagatcatgaccaggtgctgggatccaaatcctgatgtccgtccgccattcactgaagttgtgaggatgctggagcatgctgagatggagatcctgagcactgtccgcaaggcccgatttcggtgttgcatgtcccaaccgatgactaccgactgaatcaaacaagagagttgaaatgaactccatggaagcgtaattgagtgtatttatcatgtgtccaaacttcgctcagctgaagtagaaagcacacctgagtttatggctgtatgtgtgtatactcaggtgtaagccttgttgtctttgaaatattcctgcacttagaaatatacctagttcgcgttttcagactcttgagatgttttagggctagtctatgtcctgtcgaaacatcatgcagggttcctattcttgtaatgttcttgtgatcctgctactggaatgtgcctcctactggaggtggtctgttcatgttataaccctcctactggaatatgcacaaatacttcgttgcttgagcaaaaaaaaaaaaaaaaaaaaaaaaaaaaaaaaaaaaaaaaaaaaaaaaaaaaa

SEQ ID NO: 166890 - DNA, 110 bp, Zea mays
  Clone ID: MRT4577_83782C.1
catggcagcgtacgtggcactcgaagatgcagacgatgcgtcaggtggaatctctcctggacttggcgtcctacttgaaatagtgacgattgcttactatcacaacaact

SEQ ID NO: 166891 - DNA, 338 bp, Zea mays
  Clone ID: MRT4577_83783C.1
ggggggtgtttcttgtcggtgtgggtttatatttatttgtttttcttctctttctacaaaatgcgagaggtgagaggtaattccggggggggggtgttttttaaagtccccaacggtctcttttggaaacccggacaggtgcacaaaaggggggtttgtttttgttggaattttggccccaacgttcttgggctcctttgttctagggacccccttccctaacctggttggacgctttatgtatcaaccaattctaggggtaaagctgggtaaggcctcttccctggggaacagggaatctcttttataacccggggggcccttggctggaacaattt

SEQ ID NO: 166892 - DNA, 222 bp, Zea mays
  Clone ID: MRT4577_83784C.1
agatagatgactgtctttagtaatgactatgcttaggaactagggaagcatattggagtttaaactgagatagggctggacagtggggataaattcgaatatgaagaaatgggaatagaggtataaaaaaccacctatatatgagaagagtagtagggcaaggagtatagagatgagtttcttatgaaggaattttaagtgagaaaataaaatctatttttc

SEQ ID NO: 166893 - DNA, 557 bp, Zea mays
  Clone ID: MRT4577_83785C.1
ggggtggggggggttattttttttttttttttttttttttttttttttttttttttttttttttttttttttttttttttttttttggaaggggcaaccccatttacgggttccaacccattttttcaaatccattgttttcagggtcagggggggaggggttttttgtaaaccccaacccccccctaaaagggtggggtcgggttcttgtaaaaacaacccaaaatgtgagggggggtgacccaattttttaaaaacgggggggcccccacataattttgggggggtacaaattttttgcagtccacctagggatcaagcggcattgaacaaggcttgggctgtttgggcttttttactataataacggggcaaggcccgtgatgggcacaatattccttcacacttccaaaaacagcccttttaatgggtccgaaaccatgggtgccgacaacaagaattttggccccgggccttttgacaggcttgaaaaggaagttcctagggtccccctccagcgcctaaaaaaaaggttgttcgcctgtgtgcaaaggcct

SEQ ID NO: 166894 - DNA, 387 bp, Zea mays
  Clone ID: MRT4577_83786C.1
catttcaaagcaagcaaaaaactactcctatttatatgtgcaaataagagtgacactttatccattagctccctttgggagctaaagttttcactgatctatcttgaatcccaggctaatgaatttcatctgtacattgtactgttggctgctaaattgtggctatttttgtccaatttcatggccaaattttggtgatgctttgtcattctttgaacatatacttcataatgtatctgcaattcagatttctaaagcattgtgtgtggcacaaaactgcatggatataattcagttactacctgcatttgttgctccatttagaaaaataagtatgttggcctactcattattgccatcgccacatattccttgggaaaattcttt

SEQ ID NO: 166895 - DNA, 229 bp, Zea mays
  Clone ID: MRT4577_83787C.1
accacgcgtacggttaagctcaaggcgtaaggtgctgaggtgcatcgacatgggggatatgtcaaaatcattaaactgagaaacttttttttgttaccttgctgtaccaagttttgattctggataatttgggagcatgattaggttttatgttgattgtactaatataaaataataagtataattatatctataaaaataataaaaaaaagggcgtttctttataggt

SEQ ID NO: 166896 - DNA, 367 bp, Zea mays
  Clone ID: MRT4577_83788C.1
actcggctcgagggagcccaaactgccttctttttttccatgcatgggtcatcggacgatgggcggcgattgctcgatagaacgctgtggaggaacctgtcctagtgactagcttcactacctttccggtgtgcggcctgccatatgaaccaagatccatgccgtgatccgagtggcacacaaaggagggggatactgctctaaccagcacgctccatggagtgcaccatgtgtccgtttgcactgtaagggacagacagatgcaatggaaggataaggatggcgcccctgtacagcatgcaagtgaaccactcaaaatgctgaggaagcggagccccgcgagactctaaagacgcgagtcgtttgc

SEQ ID NO: 166897 - DNA, 538 bp, Zea mays
  unsure (1)..(538): unsure at all n locations
  Clone ID: MRT4577_83789C.1
ctgattcttcattagtaatcnccagtcgctcaggtgnaggcgcttgatctgtgcctattccaagatgaggtctagctagcagatatgcaacatcacattcacatcttctcgttgtaggtttccaactctcgtatgtactcaggaatcagaatccacatcaaaaaggtattattctctcatacatgaacatatgatgatgatgtgcaccataaagtatagatgacgagagagatgagtaagtatcaagtagagaagcatcagaacaatcaagatcaaagagtcttgccacgtccgcaccatgtgatcctggagatatatacgaacaggcatttggactaattcagaactcaagtattgctctctagcagaatcaacaatagctttttaggcggccatggtttgaaaccgcctgaagatttggctatcaccacaccaatcttgtggcatgtttcctgctgagtaatcgacactccaccataagcgacaactaccctaacaccagtctgatacgaaagtttcctcgtctcttcatgaattt

SEQ ID NO: 166898 - DNA, 678 bp, Zea mays
  Clone ID: MRT4577_8378C.1
ggccgcttttttttttttttttttcgatagaacaaaaaatgagccttcgattccattctaacgattatctttgtaaactccattttaaataccaagcgtagggaaaaatgtagattctaatcatgatgacgtagctcgaacagtcggatgacacaaaccaattattcatgaatccaagctaaacctgatcgattccatgcaaaccaacaaactcccgatagcaacctgatctggaacacacggcactggaacatgctgaagagtgaagacaccaccttcgtgatccgcattccaacagctagaccacatcttgcttgcaattgatcataaattgaagtttgtgaaaaaggcaacataaccgtccacacccttaacacatgatcaggattggaggaatggcaaggcaacgacctcacgctcccagtatgcccaaacaagagaccaatgcatttcctatttcctaaactccatactatgactgttcaatcacccaatgcagcaagtaattgggatccctcctacattagtaacacataagttgaaactctgtcagaaaggaacacttgctgaaatttttaacatgtggatccgctctttcgttggactgttacaatcagtgcataaagtcctgaattccttgattcccttcttgagttagaccaagcgaatactccatgc

SEQ ID NO: 166899 - DNA, 774 bp, Zea mays
  unsure (1)..(774): unsure at all n locations
  Clone ID: MRT4577_83790C.1
attgggaccctcgaggccggccgggacaagatagtacgctctctgctagcacccatcgtcttgcagcaggcggagccgcccgacccgatccgtgcgtgtgttggtcgagatggctacaacagcttacgctcccatggcgagccaggtgatgaagagcagcccggtgcactcgaggccgaggggcctgtcaggcgctgcgctcacgcggccccggccccggttcagcgtcgtcaaggccgccatccagcccgagaaggcaacgtaccaggtggtgcagcccatcaacggcgacccgttcatcggcagcctggagacgcccgtcacctccagcccgctcatcgcgtggtacctctccaacctgccggcctaccgcaccgccgtgagcccgctgctgcggggcgtcgaggtcggcctcgcccacggctacctcctcgtcgggcccttcgcgctcaccggcccgctccgcaacacgcccgtgcacggccaggcgggcgcgctcggcgccgccggcctcgtcgccatcctcagcgtccacggcgcccacgctcacgctcaccggncggaagaaggaggccgacaagctgcagaccgccgacggctgggccaagttcaccggagggttcttcttcggtggtatctccggcgtgctctgggcatacttcctcctctacgtgctcgacctcccctactacttcaagtagaatacaattcataaagatgcatatatataatatagctccggcctccgatccaaaaaaaaaaaaaaaagcggcc

SEQ ID NO: 166900 - DNA, 105 bp, Zea mays
  unsure (1)..(105): unsure at all n locations
  Clone ID: MRT4577_83791C.1
ggtaatccagtcaccccaaactttgctaggtcgggannttcaccggtctttctctctggacataacccggttaaaccttcttacgtttcttggtagaaggaaacc

SEQ ID NO: 166901 - DNA, 484 bp, Zea mays
  Clone ID: MRT4577_83792C.1
ggaactaacgagaaatatttagttttcagaatttgttacctgccacaatcaccagcttggagctgcagcagcttctgatcttgtcatggcatctgggagtacagaaaatgatcaagatgatggatttgatcaggcagatagatcacccgatgattctgttcacaagcaaaatctgatttatggaagtaccactctgagttccctagaaggtagaagttgcaaaagatacaagtatacaaagactccacgctcaggtgatgttggcgctacactagaatacctgcaaaaggtgcaacatgataacccttcattcttctatgctgtaaaatctgatgatgatgggaacttcacaaattttttctgggcagattcaaaatctattgtggactttttccattttggtgacgtagtctgttttgattcaggatatgcattgcaaggctatgataggccattggcttttgttacaggtgtgaatcatcat

SEQ ID NO: 166902 - DNA, 1011 bp, Zea mays
  Clone ID: MRT4577_83793C.1
attgggtacctcgaggccggccgggattttctcctaaagatcacagactttacttaggccatcacaaggagacgtacgctctctgctagcacccatcgtcttgcagcaggcggagccgcccgacccgatccgtgcgtgtgttggtcgagatggctacaacagcttacgctcccatggcgagccaggtgatgaagagcagcccggtgcactcgaggccgaggggcctgtcaggcgctgcgctcacgcggccccggccccggttcagcgtcgtcaaggccgccatccagcccgagaaggcaacgtaccaggtggtgcagcccatcaacggcgacccgttcatcggcagcctggagacgcccgtcacctccagcccgctcatcgcgtggtacctctccaacctgccggcctaccgcaccgccgtgagcccgctgctgcggggcgtcgaggtcggcctcgcccacggctacctcctcgtcgggcccttcgcgctcaccggcccgctccgcaacacgcccgtgcacggccaggcgggcgcgctcggcgccgccggcctcgtcgccatcctcagcgtctgcctcaccatgtacggcgtcgcctccttcaacgagggcgacccgtccacggcgcccacgctcacgctcaccggccggaagaaggaggccgacaagctgcagacctccgacggctgggccaagttcaccgggggattcttcttcggcggcatctccggcgtgctctgggcctactttctcctctacgtgctcgacctcccctacttcttcaagtagatatcatcgaagatgcgtatacatagctccggccgatcctcctctctagctgcatggtatgtaggtggtgtggttcttgtttcatttcactccagcggtgatcagcaccgtgtataaatgtaattcctctgctctgcacatggatggattgggatgtaacctgttaaatttttttaccttggatgcatcattcatgtaaaaaaaaaaaaaaaaaaggccccta

SEQ ID NO: 166903 - DNA, 1118 bp, Zea mays
  Clone ID: MRT4577_83794C.1
ccggccgggatcacaaggagaggtacgctctctgctagcacccatcttgcagcaggcggagccgcccgacccgatccgtgcgtgtgttggtcgagatggctacagcagcttacgctcccatggcgagccaggtgatggaaagcagcccgagcccggtgcactcgcggccgaggggcctgtcaggcgctgcgctcacgcggcggccccggttcagcgtcaaggccatggccatccagcccgagaaggcaacgtaccaagtggtgcagcccatcaacggcgacccgttcatcggcagcctggagacgcccgtcacctccagcccactcatcgcgtggtacctctccaacctgccggcctaccgcaccgccgtgagcccgctgctgcggggcgtcgaggtcggcctcgcgcacggctacctcctcgtcgggcccttcgcgctcaccggcccgctccgcaacacgcccgtgcacggccaggcgggcgcgctcggcgccgccggcctcgtcgccatcctcagcgtctgcctcaccatgtacggcgtcgcctccttcaacgagggcgacccgtccacggcgcccacgctcacgctcaccggccggaagaaggaggccgacaagctgcagaccgccgacggctgggccaagttcaccggagggttcttcttcggtggtatctccggcgtgctctgggcatacttcctcctctacgtgctcgacctcccctactacttcaagtagaatacaaattcataaagatgcatatatataatatagctccgcctccgatcctcctctctgcgtgcaaaggtatgccatttcagcagtgacgagcatcgtggatacatgcaattcctctgcacatggatggattgggatgtaacttggaactgttaatttttttttactttgatttggatgcatcatgacccccccttcaaaccagctagtgaaatgccattttaggtaaaagtcgacctcctagtatcatattgtcgttgtcttgatccgagtatctcaccaaccagtgaaatgatgttgcgtgccttggcccagatgagtgatgtaaggtcacacaagtcatttatcctagtttgggcgagagaaagccctacttccagc

SEQ ID NO: 166904 - DNA, 1106 bp, Zea mays
  Clone ID: MRT4577_83795C.1
ttgggtacctcgaggccggccgggtattcttgtgtcctaggcgtagaggaaccacaccaatccatcccgaatttggtggttaaactctactgcggtgacgatactgtaggggaggtcctgcggcaaaatagctcgatgccagaataaaaagatcacagactttacttaggccatcacaaggagacgtacgctctctgctagcacccatcgtcttgcagcaggcggagccgcccgacccgatccgtgcgtgtgttggtcgagatggctacaacagcttacgctcccatggcgagccaggtgatgaagagcagcccggtgcactcgaggccgaggggcctgtcaggcgctgcgctcacgcggccccggccccggttcagcgtcgtcaaggccgccatccagcccgagaaggcaacgtaccaggtggtgcagcccatcaacggcgacccgttcatcggcagcctggagacgcccgtcacctccagcccgctcatcgcgtggtacctctccaacctgccggcctaccgcaccgccgtgagcccgctgctgcggggcgtcgaggtcggcctcgcccacggctacctcctcgtcgggcccttcgcgctcaccggcccgctccgcaacacgcccgtgcacggccaggcgggcgcgctcggcgccgccggcctcgtcgccatcctcagcgtctgcctcaccatgtacggcgtcgcctccttcaacgagggcgacccgtccacggcgcccacgctcacgctcaccggccggaagaaggaggccgacaagctgcagaccgccgacggctgggccaagttcaccggagggttcttcttcggtggtatctccggcgtgctctgggcatacttcctcctctacgtgctcgacctcccctactacttcaagtagaatacaaattcataaagatgcatatatataatatagctccgcctccgatcctcctctctgcgtgcaaaggtatgccatttcagcagtgacgagcatcgtggatacatgcaattcctctgcacatggatggattgggatgtaacttggaactgttaattttttttactttgatttggatgcatcaaaaaaaaaaaaaaaaagcggcc

SEQ ID NO: 166905 - DNA, 122 bp, Zea mays
  Clone ID: MRT4577_83796C.1
cgcaacacttatttactttattaccctccctctattgttcatgattcttgaaacctgaatcacatggtctcaactcgtcatatggttccttttcttctgtacttcatatgttatcaatttaa

SEQ ID NO: 166906 - DNA, 500 bp, Zea mays
  unsure (1)..(500): unsure at all n locations
  Clone ID: MRT4577_83797C.1
tccaccgcggtggcggccgccctttttttttttttttttttttttttttttttttttttttttttttttggtgggccaaaaagggggcaagaaaaattttatgcgggggcctgtttgggaaccanagtttttaaattcccccaactaacttaaacttggccaaaccgggaatggccaaaccctctatgtaaaaaatgggggccagaatgaaattttgaaaacttttaaactactattgcatttgaaacaactacctttttaaaacggggattttatgttggctggcaaacacccgtttgattataaaacatgctgacatcgaaaatactctgcgattgtttctaaaaattggaaaaaaattggttccaaagccacccttaaataccggtgccggagatgcttcccacaagagacgacgtacctataatataatggtataaaaacgagctaatggctggtggggatccttgtgctccaaacacaaggggatctcattgggt

SEQ ID NO: 166907 - DNA, 621 bp, Zea mays
  Clone ID: MRT4577_83798C.1
aattcccaaagaagtcgatcaccgacatgatctatcgacgcagtcagaggaacccggtgcaaacgagcaccccacgtcaccggagctacggaagcggtgcatggggaaatgcccgcatcacacctgatccaataacgctctacatcatctacgtcaactgcatcaagaggacgcctcaacctcactcatcgcgctgcctgctgccgcggacgtggtcatcgagaaccgtacagaagcaaacgcccgacctctaacaacaaaatggtctccgcagtcgtcttcagctacgacaaggagtgcatgcgcgaggaccgcgtcaacatgtactacgaagataaagctgaagtgtatgagaatcacaaggacaagatgaacaggactcacaacactgaaccgataggtgaagagtacactcatcttatgaacaggatcgccagcgaagacatgccatgtccgagactcgtgaaatggcccaacataatatgaagtctcattgatgatgcagagatataagggtactattgcacttgatagctccaaatacgtccgtacagacgactccgtagagaacataaatgtgtggatgcctcatggcgatatattaggtggccgctaatgccc

SEQ ID NO: 166908 - DNA, 408 bp, Zea mays
  Clone ID: MRT4577_83799C.1
ggacaaaaagatattacatttagttcgcagacataacgttgtctctaatcccagaaggcgagcggcggcgcgaccagtaacccagtacactgcagcaaacagtacccgcgcgcacttgttgtttggcgcagactaaaaggttcaacgacaaaccgagcgagggctgctgctaagcataggaggactcgtactacgcgaggggcacctattttaagcttatagaaggacaaggtgccgtcctgcttgcttgacaattgggacagattagaacagcctttcacaggagagcacttgacaactgaaaaaacctgggcaccgtttaacatgggaatctttgagcggctcatgtcagcagtaccatctatgcctatatacatgtcacttgatagcttgttgcaatgaagacaa

SEQ ID NO: 166909 - DNA, 109 bp, Zea mays
  Clone ID: MRT4577_8379C.1
gttggtgttggtgctcggagagtgaggtctttgtttcaagctgcaaagaagaaggcgccagtcattttcttcattgatgaaatagatgctatgggttcaactagaaaac

SEQ ID NO: 166910 - DNA, 293 bp, Zea mays
  Clone ID: MRT4577_837C.1
acggatccatccacgcgtccagtaaagggaaccttcacttagctaccaaactagcgattataggcctcacatcggtgatgggtcgtacatgtaacgagatctcaaaactgggagctgaagagcttaagacagctcataaggctgatggcatagcttgatacaacacatacataagatcatcacttccaagacgaagacgtctagcaattcatgtgtatggttgaaactcacatattgctgatgctgataaactccagcagctatcttgaactataatatatcacgtacaatca

SEQ ID NO: 166911 - DNA, 303 bp, Zea mays
  unsure (1)..(303): unsure at all n locations
  Clone ID: MRT4577_83800C.1
ccgggctcgtgaagtttgtgttacagtggttttctcttgtgccgcctcgttgcaggggtaagggggtcctgggtttgcgtggcgcggcgtaggcgcgttgttgttcacgtgtggttgaacgcattgtctcgttctcttgtgttgggttctttgtttgttgtcctgtgtggcntgctgggtcggttttttgtttctcttttgtttagtagcatgtgtggnatcactttttctgtggtgggggggggggggggtttttttctcttttttttttttcttttcgtttgttttctttttttttttttt

SEQ ID NO: 166912 - DNA, 233 bp, Zea mays
  Clone ID: MRT4577_83801C.1
aaaaaaaaaacaaaaacacaatttaaaataaaaaaaaaaaaaaaaaaaaaaaaggggaaggaaaaaaaaaataaatacacaaaaatgcaacgatgctattcttcaataaagataccgtaattcaattcactaggctcataactttacaacgtcgtcactgagaaaacatttgttctaccatcagcttaaaaacaattgcacaggtaagactttaaccagatggacttttatca

SEQ ID NO: 166913 - DNA, 372 bp, Zea mays
  Clone ID: MRT4577_83802C.1
ctaggcagaggcactagccttgccgagccgcgccgcgccaccacgaccacgagtcgaccggcgagtggttggcgcaagttgtcaggtgaggggggcaccgcaccttccgcgccgcatcttgtcacgcacttgttgtagctgctgtatcctgtatgtattgcctgccgcccctggcttgtgctcatgggcgctgctgctgcggccaatgaaggggcgttgccgtagccgtgcggcggccggtgttctgtagcggggccgattgggcgctacgagctcgtccgcagcgacgacgcgcctgccgtcgccgcggatctggaagccggcaccgccgcgccgtgcgacagctaccccaagcgccgcgtgcccacgccc

SEQ ID NO: 166914 - DNA, 730 bp, Zea mays
  Clone ID: MRT4577_83803C.1
attcgctcctcccgaccgccgccgtcgccgcctcctctccccagcacccggagctcgaccgaacgccgctcaccgtcgacacgccctcccgtcccgagagttctgaatcgaaaccgtcggccacgagagcagtgcgaagcgcccaccgcgatggctcgaaccaagcaccaggccgtgaggaagacgcaggaaagggctgctgggaccgggggaagagcggcgtctggaggtgactcagttaagaagacgaaaccacgccaccgctggcggccagggactgtagcgctgcgggagatcaggaagtaccagaagtccactgaaccgctcatcccctttgcgcctttcgtccgtgtggtgagggagttaaccaatttcgtaacaaacgggaaagtagagcgctataccgcagaagccctccttgcgctgcaagaggcagcagaattccacttgatagaactgtttgaaatggcgaatctgtgtgccatccatgccaagcgtgtcacaatcatgcaaaaggacatacaacttgcaaggcgtatcggaggaaggcgttgggcatgatatataatatccattctgattgcatcattcttgtgaatttgtttgtaggagctagacattagtgttgttgaatgctgcatggttcctaatccttttcgcagtctaacatctgtggagttagtatgttacatggcaacagctgaacatctgtggactataactatatgac

SEQ ID NO: 166915 - DNA, 1286 bp, Zea mays
  Clone ID: MRT4577_83804C.1
cggccgggccgggatctcctgcccccttaaaaaaagactcaccgtcgacacgccctcccgtcccgagagttctgaatcgaaaccgtcggccacgagagcagtgcgaggcgcccaccgcgatggctcgaaccaagcaccaggccgtgaggaagacggcggagaagcccaagaagaagctccagttcgagcgctcaggtggtgcgagtacctcggcgacgccggtgagcgcgtgcgtgcggggatcagttccctccttttgccttttttgtgggctgctcttacttgcttgcaagctgtttgatggaatgcaggaaagggctgctgggaccgggggaagagcggcgtctggaggtgactcagttaagaagacgaaaccacgccaccgctggcggccagggactgtagcgctgcgggagatcaggaagtaccagaagtccactgaaccgctcatcccctttgcgcctttcgtccgtgtggtgagggagttaaccaatttcgtaacaaacgggaaagtagagcgctataccgcagaagccctccttgcgctgcaagaggcagcagaattccacttgatagaactgtttgaaatggcgaatctgtgtgccatccatgccaagcgtgtcacaatcatgcaaaaggacatacaacttgcaaggcgtatcggaggaaggcgttgggcatgatatataatatccattctgattgcatcattcttgtgaatttgtttgtaggagctagacattagtgttgttgaatgctgcatggttcctaatccttttcgcagtctaacatctgtggagttagtatgttacatggcaacagctgaacatctgtggactataactatatggcaacagccgaagattgtgtctgtgggataactggttgttttggttgctcttcagtagtttgtttgcttcaggtaaccatgctgcgaactatgatgttttcattctcggtttgcttcagctaaccgagatcgattcagtctgcagtatatggactatggagtaaactgcatgctgaaacccgaaccactgctgaaacggcagttgccaggatagcaggagggcctttatgcacagtggaattgagtagagaactgagtaaaccatggttctttctccttttgaactggaacacacacagttggatcttgtttctcttcttaggccattgtcatcgtgtttctaaggggtgtaaatggtatctgtccgtattcgaatttgatctatctaacaaggctgaaatccgaaaaaaaaaaaaaaaaaaaaaaaaaaaaaaaa

SEQ ID NO: 166916 - DNA, 341 bp, Zea mays
  unsure (1)..(341): unsure at all n locations
  Clone ID: MRT4577_83805C.1
cgggtaccttcatgtcaatccaatgcaacaagagatttccacatttctatccatngacatgcttcaacgggaagttgtattttttatactctttcattatcatctatcctttattttaacttttgatatgataattcttttactaaatatcttttgattgttacagaatggccaagctccttctatgtttgactctcatgtccagaatctatatggcaatttatgagtttgattaacaaaccaatccacaacataacaatgttccctaattcaaattattcatcggtagatagagcaaaccagtaacctgttatttactaattccactacattattgactt

SEQ ID NO: 166917 - DNA, 298 bp, Zea mays
  unsure (1)..(298): unsure at all n locations
  Clone ID: MRT4577_83806C.1
cggacgcactcccaagccagtactgagncctacgattagacgcatgcaagtggcaagagacgaagcggtcgacatggctcgtacgcaatctgccgtagcggtcgacgaggtggccgcggggctgctgctggcagcggcggcgacaacctcggaggccgtcatcacctgcgggcaggtgagctccgacatcgcgccctgactgtcctacgcccgcggcacggggtccgacccctgcgagtcctgctgtagcggcgtgaagaacctgaagagcgccgtcagcaccgtcgtcgacaggcgc

SEQ ID NO: 166918 - DNA, 106 bp, Zea mays
  unsure (1)..(106): unsure at all n locations
  Clone ID: MRT4577_83807C.1
agtgncggcacgaggcaccgatgaacgtccgtacccgcaccactgccgcaccgggcgggagcccaccaagagcgaccctctcagcgagagcgggctcacgctggtc

SEQ ID NO: 166919 - DNA, 251 bp, Zea mays
  Clone ID: MRT4577_83808C.1
tttttctcttttcttttttttttttttttttttttgggtttttttttatctttttcggggtatttaacccaaccccaactcataagcaaaacggccccaaccaaaccatcttgttcccccaagctcccgctcaccatgtaaagatcacacccacttggaccctttggcggttacaataataacttagtccctcaaataaaaaatacaatgtctcgctaaacccacaaatcaaattggggggggggggaacc

SEQ ID NO: 166920 - DNA, 219 bp, Zea mays
  Clone ID: MRT4577_83809C.1
gccggccgggtcccaaattcgcaattaccagccccattctccgtcagtcgactgcagcgagtgacttctccccggacgcaaccactaccagtcaccagcgatgtgtggacaggaggaggagaacgccgcggcgctcaagatcggcgaagagtgcgtcacggccaagcgccgtgatgaactgagaagtggcaagcatcccgaagcacaagtaggagcaaa

SEQ ID NO: 166921 - DNA, 647 bp, Zea mays
  Clone ID: MRT4577_8380C.1
agggaaaaagtagattcttatcatgatgacgtagctcgaacagccggacgacacaaaccaattattcatgaatccaagctaaacctgattgattccatgcaaaccaacagactcccgatagcaacccgatctggaacacacggcactggaacatgctgaagagtgaagacaccaccttcgtgatccgcattccaacagctagaccacatcttgcttgcaattgatcataaattgaagtttgtgaaaaaggcaacataaccgtccacacccttaacacatgatacttgcttatcttgatgttccagtcaagttcttgttctctccggattggaggaatggcaaggcaacgacctcacgctcccagtatgcccaaacaagagaccaatgcatttcctgtttcctaaactccatactatgactgttcgatcacccaatgcagcaagtaattgggatcccttctacattagtaacacataagttgaaactctgtcagaaaggaacacttgctgagatttttaacatgtggatccgctctttcgttggactgttacaatcagtgcataaagtcctgaattccttgattcccttcttgagtagaaccaagcgaatactccatgcttgcctaacaaacaggtcggacgcgtggg

SEQ ID NO: 166922 - DNA, 623 bp, Zea mays
  Clone ID: MRT4577_83810C.1
ccggccggggtagtggctccgcggtgacacccccaccacgatgcacgagcgatggcgcccctccctgccgatgtgcgcatggcggcggttccttgagggaacacgacgacgggcatccgaggtgggagcgacggcgtcgacctcttctagccgcgagcggcaacgatggatcccatagacgcgcgggatggcggcggctccccgaggccgcactgcaacagcggtcacctgaggcgcgcatgatggcggcacatccaaggcgagttcaaaggtggtggccccccggacgcgcgaacaacggcagatctgggaggcgcgcatgcggcggtggatcctagaggtgcatgcggtgtcggctccccgaagactcgcgcgacgacaacgacttgctccaatcattgtttatgtatggcgctgttggttgggcacatattaggacttttttcatcaattatgatgcgtgggtagatatttatgcaattctctatgagagtttatgcttttcacgattcctgtcatctattttttgcgtctatacagggaacgaaaatgacattcaaaatttgcatgcatgcaaaaactctcacaacctaccaaaaaaaaaaaaaaaaaaatttgcggcc

SEQ ID NO: 166923 - DNA, 910 bp, Zea mays
  unsure (1)..(910): unsure at all n locations
  Clone ID: MRT4577_83811C.1
ngatgaaggaactccaggttgccagcctgntgtgcagacatactcgattctcattaagtcatgcttacatgcttatgattttgagaaggtgaagagtttgctggctgatatggcacgagcgggcattccgcctaacaccgtcacctataatacattgatcgatgcctatgggaaagcaggaaggtttgctgagatggaatcaactcttctgaagatgttgtcacaaaattgcaagcctgatgtgtggacaatgaattctactctcagagcttttggcagtagtggtcagattgagacaatggaaagctgctacgagaagttccaggcctctggtattgtcccaaacattaagacctacaatatcttactcgattcctatggcaaagccaaaatgtatgagaagatgggagctgtgatggaatacatgcagaagtactactattcttggacaatagtcacatacaatgtagtgattgatgcatttggaagggccggagacctcgagcagatggaatatatatttaggctaatgaaatctgagcgtataaagcccaattgtgttacactctgttcagtggttagagcatatggaagagctggggaagttaagaaaataaagacagcgttgagaatcattgagaattctgacataacattggatattgtgttcttcaactgtttggtggatgcatatgggagggtggggtgcttggcagagatgtgggatattcttgatttgatgaaggagcatagatgcaaaccagacaaggtaacctgcactaccatgatcaaatggtttctcatcaaaggaatcgacgatcatcgtgttcagtacctacgtgatcttaaagatgggcgagcaaaagatgatacataggagtgaaaacaagaaaaactcttggagcagtga

SEQ ID NO: 166924 - DNA, 267 bp, Zea mays
  Clone ID: MRT4577_83812C.1
cacaacatggccctctctcgccttctcctcccgctcttcctccggcgcggcgcctccatccccagccgcgctctctccacggctgtcgcacctgcggaggtggcctcggaggaggactaggcggacgtcaccgtcaagggcgtgcgcatctcgggccgcccactctacatggacatgcaagcgacaacccccgtcgacccgcgtatcctcgacgccatgctccccttttacctctcttgctacgggaaaccctaatcccgaacccac

SEQ ID NO: 166925 - DNA, 1117 bp, Zea mays
  Clone ID: MRT4577_83813C.1
ggctcgatacacgcgcctcggatgcgtgggccgtcccccgggacgaccctcctcggggcgcacgccgacggcgtcctgggggtcttggcgcgagatttcccggacggtccgccgccgagcggcacggcgatgtcggtggggaccaagctcaagaagctcagctacaactcggtggtggagatcgtgctgcagaacccggcggccgtcccgacggagaaccacccgatccacctccacggcttcaacttcttcgtgctggcgcaggggatgggtaccttcgccccgggaagcgtggcctacaacctggtggacccggtggcccgcaacaccatcgccgtgcctggcggtggctgggctgtcatacgcttcgtcgccaacaatccaggcatgtggttctttcactgccacctggacccgcacgtgcctatgggcctgggcatggtgttgctggaggacagggggacgacgccctcgcttgtttcttgtgttctgtcctccttttctttcttcttcgtcaacacaaggcctagctcatgggaagctttggcgtgatacccgcgcagaatctgcagttttgttcgttcgtgtaagtaatatgaaattgttttttcctttaaatcttttatacacgcgtatatggatttatattcggatgtaactccgcgaccggttccccacaagccgtcgcccaaccttcctcagcgcagggagcacacgggtacctctaattccgctgctggacctggacggagagctaaggggcacctcgcttgtttcttgtgttctgtcctccttttctttcttcttcgtcaacccaaggcctagctcatgggaagctttggcgtgatacccgcgcagaatctacagttttgttcgttcgtgtaagtaatatgaaatttttttctttaaatcttttatacacgtgtatatggatttatattctgatgtaattgtgtgaccttttccttctccacgtgggaagttgtgcatagcaaagttcatgtttagggttaattggctctgtattcatgataaacattgatacaaagttatatcatacactacggtttgatttgaaaaaaaaaaaacaaaaaaaaaaaagaaaaactcgaggggg

SEQ ID NO: 166926 - DNA, 551 bp, Zea mays
  Clone ID: MRT4577_83814C.1
ggccgccccccccccccccccccccccccccccccccccccccccccccccccccccccccccccccctctcccccttttttttttttttttttttttttttttttttttttttttttttttggaagaacccggggcggtttttgggaattaaaggaacaaataggccgggaaaaaccctgggttttttggaaacaagcccccccccaaaggacccaagggtcggttaacaagggctttttaccaccagttaaggcccaaaagggccccgttttcagggccctttttatgggagggcccacaaatggggggcaacatgccccaccccaaatcctgtccaaggggccccctggaaaaaattttggccccgcaaaacccaaatcatttaagggtaagtttcaaaaatccccccccccggggaaaccccccccaaatctataatggaattccggccaacaaatccaaaaccgaggggtccctccttatataaccaaatttttccctccacgctcctcccattatccaagggggttggaagaagagtttcacccc

SEQ ID NO: 166927 - DNA, 346 bp, Zea mays
  Clone ID: MRT4577_83815C.1
cacgacgaatcgagaaaagatattggatttataatcattatcaatatatgataattattttttattacaataataataattattattattcccttcttatttccacacccccgttgcaccagtgggagctgaagcagttgcattggtagtcactgggatgatgttaaggaattaaggggataccggatacgcaggggccattccatcgggcatgacgggggggtggaacatgagcttgttcatgtgaggccccttccttggggggccgctgatgaggttcatgaggaggccgttgtccccggcgattattagcccggggatggggcccccggcgaagccggggaga

SEQ ID NO: 166928 - DNA, 462 bp, Zea mays
  Clone ID: MRT4577_83816C.1
ggaacaatacttatttcttttcatttcaattggtcattcagggcattgctcacactgacactgccacccatggggatgcgcgacacattattactcaatcatcgccgctcaatgactcaactagcaagctagccagcgggtatactacaggacacagtttcttcaggggggaacaccgccggctgctgcctcggggcatggagtcggctgctgcaggccgcacatcgccggcacttgctgcgctatctgcgccggcaacaagcccgcaacctggccgctttgcggctggtgctgccggatggtctgggggaccaagccgaaaatcgcctggtcccggagctgtggttccaccagcctgagctggtggcaacactgctgccggaacgactggccctgaggcaagcagtagggcctcgccgtccggcctgaactgaaccctcagaaacttggcacactggccca

SEQ ID NO: 166929 - DNA, 435 bp, Zea mays
  Clone ID: MRT4577_83817C.1
gatattaatctcccgggcataaagtcccgcgcctccagggggcccccggcccccgaccaccacgaccccgcccccaccccccccggagcgaaaacacccagaacaacaacgagcccaaaaaaaaaaaaagaaccaaaaacaaaaaaaaacaaaaaaaaaaaaaaacccccgaaaaggagggagaaagacaaagaagagaggcccgaagaaagcccgagcgaagagagccccagagagggcgggagcgcaggggccaagagaggcagcgagcaaaccccgagggggggggcgagcggcgcggccgaaggggaggccaaagggaggccggccgaggaggagaaggcgagagggggagaggggcgcgccgcggagagacaccccgcggagagagggggcgtcgccgaccaagacagaacccggggggcgccaagcagc

SEQ ID NO: 166930 - DNA, 347 bp, Zea mays
  Clone ID: MRT4577_83818C.1
ggacaagaaaaaaaaccttgtttttatatataacaaaaccggcgggcagcgcattttatttacacaacggccgtcgccccacaggcatcgcacatggcgaacctacgggtttgcgccaggcaaaagcttatcgggaacccattattcagggttttctcctccgcccacaaggaaattgtgtaatccccgttccggcgctttatctgggggggcgctacgaggaatgccttgtgcatttattccaaagaggcaccaacaaggcttgcaaacgcccccatcccgttttagtcactcaaccaactttccctggatgtacttcgcaccaccgtactctgcccaccgcatga

SEQ ID NO: 166931 - DNA, 255 bp, Zea mays
  Clone ID: MRT4577_83819C.1
gcgagctgccgtccttatgttgcttctgctgcaaacgctcaatggcactacgcaaagatagattgtcatgtgcttgttaggtttttactggaactgaattaataagcgacagggaatgctgatctgatggcagcttacctctaacctgctgctcattgccgtggaaggattagcgacacctgctctctatgatgagctgcagatcttgtttgctcagattataggttacaatcgatgcatcttattccctccgga

SEQ ID NO: 166932 - DNA, 2488 bp, Zea mays
  Clone ID: MRT4577_8381C.1
ggggggtttttttgcaaatgcactcttaagctatatatgtgaagtgaatctgaatatgagttagttatatgtctggaaaaaataataaatcaagatccattcaaaaaccgtactatttgggagtaaatataacaaaaattataagggtttaggcggggggcgaggcacccaggtttaaacataactctgcaaagggagaaatatgaatgtatagagaacaaatgatgcatcctcattccttgaagaataggagaaacagcaagctgccagtccgcatcaacctccctcctttaagcacatctgttgtgtgaacatgaagctgcaaacactgatacagtatcttttgttgcctccactgccagacccactgccaacagtagctttgtttctatgttccaggatgctatgtaaggccatgaagaaatcattagtagcagaatgcatatgggaaatcaggaagtgagacaccctaatattgaactgggctaccaaagcagttctcaggatcattttgtggaacaatgtagcacagtagttttttttcagtgagataagggctcagttaaatggtgctgaaaaggcacctgggtgctcaattttaagaaaagttacagcagactgaaaacaaatccatcttcattacctactaggtgagtgcccgtgcgttgcaacgaaccacaatttattcgatataatgtttatacataatgattacatgaaaacaaacaatatttattattattaacttcaatatcttataaatttaaattgcatttcattcgttcggctattatcagatagaacaaaaaatgagccttcgattccattctaacgattatctttgtaaactccattttaaatacaagcgtaggaaaaaatgtagattctaatcatgatgacgtagctcgaacagccggacgacacaaatcaattattcatgaatccaagctaaacctgatcgattccatgcaaaccaatagactcctgatagcaactcgatctggaacacacagcattggaacatgctgaagagtgaagacaccaccttcgtgatccgcattccaacagctataccacatcttgcttgcaattgatcataaattgagtttgtgaaaaaggcaacataaccatccacacccttaacacatgatccgtaaggacacgttttatgggaatcacaatacttccagaatttaccttcaataaatcatttaatgcaagcatgttataataccaaggaggcaagaacacaacatacaaaaggcatgtgtttgaattaaaactaccaattccaaggtgggtatttacacttgcttatcttgatgttccagtcaagttcttgttacatggacaatactgaaggttaagatattttaaatcggggtgctgtctaatatcacgttaagagaacattttccatatatttgaacttctagtcgtacatggaacaatatcatagatgggcaaataatacttatggacctagtttggcagcatcagaatacaaaagtaaaatatattgttggtgatatggagcaatttagggtttagatgttagataagtattaagaatgtatgtagagaagtcaaatcattttatagtttgaaacaaataagtaatttctattatgctaaatgcaaagtaaataacatgacaaagcgaatgatcttacccagtttaaatgcaaagtaaataacatgacaaagaactaatcatcttacccggttcattaacagatgaactaaacagattgccaaaaaaatagagaaaactctaatgggaaatttacaagcctaggttgcaggaatgtacaacatttgcgatttgaatatcaagcatgtaattttcctcaaaagtttagtaatttccaaacgccaacaaaactaaaacataatactccctctgttttagaggacaggacaatacaagaaaaaatcgtgtgtaaagctttagggcctcttcggtgcataggacggagaaacttgcagtttgtgaaaaaggcaacataaccgtccacaccccttaatacatgatacttgcttatcttgatgttccagtcaagttcttgttctctccggattggaggaatggcaaggcaacgacctcacgctcccagtatgcccaaacaagagaccaatgcatttcctgtttcctaaactccatactatgactgttcgatcacccaatgcagcaagtaattgggatcccttctacattagtaacacataagttgaaactctgtcagaaaggaacacttgctgagatttttaacatgtggatccgctctttcgttggactattacaatcagtgcataaagtcctgaattccttgattcccttcttgagtagaaccaagcgaatactccatgcttgcctaacaaacaggtagacaacaaattcgaaagaggtagctgaaaaaattagcagggcacttaagcacttactcgcatcatcctctagaacgaatcgtacccaattaatcccaga

SEQ ID NO: 166933 - DNA, 278 bp, Zea mays
  Clone ID: MRT4577_83820C.1
ggaacaagggcgggttcttttcatttggggggggcattcaaggcattgctcacaccgacactgccacccatggggatgcgtgacacattttttctctatcatcgccgcttaatgtcccaactttcttgcttgccagggggttttcttcagcacattgtttcttcaaagggggacaccgcccgctgcaacgtttgggcatggagtcggctgcttctagccgctcatcgccgtcagttgctgcgcttcctgcggcgttggcagcaccccaatcctgggcc

SEQ ID NO: 166934 - DNA, 489 bp, Zea mays
  Clone ID: MRT4577_83821C.1
tcgcctttgcgtccgccaagagaagtttactgatagtagctggctaatgtcactgacacacatacaaaatcgaaagaccaatctgattcagcatccaagtaccccttaggcaaagctgattcacagtaggagggagcaaaccaacggtgtaaatgggcgcctgctgatacgcgaccactattaagtaatcgaatggatgtttgccattgaggagccttcagagaccttcatgttgcttgggactgtcacctctgttgaagaatgcatcatctgcttctgactgtcacctctgttgaagaatgcatcatatgatgaggaagctgcactagttgcgcaatctcaaaaatgttgcttcggactgtcacctctgttggagaatgaatcagatgacgaggaggctgtactaggtgcacaatctactttggaggatcctatttttcttaccactatcgaaggctggacttctcattctatgggtgaggacaatgc

SEQ ID NO: 166935 - DNA, 292 bp, Zea mays
  Clone ID: MRT4577_83822C.1
aaacacaaggacagttatatttccctaaaattaaaacactgttccaggagctatataatatgcaatggtgatcggacaaattactgaatgatcccttggaccagagaccaacagaagtattatcgtatcatatatgggagagtacatattaccagatcgctggaagcacctggaactggatgcgggtggtagctaattacaaaaggtcacattaaaagctagaaccactgacttagtagcaagaagaaagaatgaaagaacgaacgaacaaattaaacagatggctcccaga

SEQ ID NO: 166936 - DNA, 278 bp, Zea mays
  Clone ID: MRT4577_83823C.1
ccacgcacgcgttgatacatgacatcgtgagcataatatgatacacatacacgaatggtacattgactgagcacatgtaggaagccatttaagaaaaaaagaagaccttcccaccccaccatatatgagagctaagaacaagcttgccatgatcttcttggaattggacgtccaaaatgagaaatggaggtagctggaccccaagcggtgtctacgaggtggttacctttagatcagctgctcgttgcccgaacccaaaaggaagtttacaaattttt

SEQ ID NO: 166937 - DNA, 351 bp, Zea mays
  Clone ID: MRT4577_83824C.1
ccccccacgaacagcattttgaattttttttcgctgacgaaagttttttttttgggatctatttttgcacaggtggggtacccgatgcagcacaatacacaagccgtttgggaaaaggggagcaacaataatttgccaattcagggccccttgcaagttttttactgtcccgggggaaacttgacagaaaattcaaattgttagggggaaactggagtttgtcaagtagccttcccttggtgacaaaaaagggcgggcggtctcagggaaatcttggtggaatctttgttctgaaaatttttgtgcacgttttctagccggagctgccattttttgccttttccgctttgg

SEQ ID NO: 166938 - DNA, 778 bp, Zea mays
  unsure (1)..(778): unsure at all n locations
  Clone ID: MRT4577_83825C.1
tcgagggccggccggggaagccaagcaaaaccctaagaaaccaccctccctccagtctcctcgacccccgccgccgccgccgccgccatcaccccaccttgtcccgatggctgcggacgccgccgctgcggcgatgtccgcgacttccctctgcgacgatctcgagcccgccaccgtgcgcacccgcatccgcgatgtcctggccgcaggtgccgcgcgtgccggggaccgcgtcgtggtcggtgggtgggtccggacgggccgggagcaggggaagggctctttcgccttcctggagctcagcgacgggtcctgcgccgccacgcttcaggccatcgttgacgccgccgtgcacccgctagcgcgcctcaccgccaccggcacctccgtcctcgtcgagggcgtgatcaaggagccgcccgaggggaccaagcagaacgtcgagctgaaggtcagccgcgtgcttgaggtcggcgaggttgatgccgccgtctacccgctgcccaagggcaaggtcaaactcacgctcgagaagctcagggacgtcgttcatctccgttcgcgcaccaacacgattggagcggttgctaggattaggcaccagttagcctatgcatcacacaggttctttgatgagaatggatttctctatgtacatacaccaataataactacgagtgactgtgaaggtgctggtgagatgtttcaagtgacaactttatttagncaggctgagaaaactgaggaggaattgagagagaacccaaacctttctgat

SEQ ID NO: 166939 - DNA, 330 bp, Zea mays
  Clone ID: MRT4577_83826C.1
tgacactatagacaaagctaccacttcccatgacacgacgtgacctaagtctcttgcattccacattacttagcctccatcataaggtattctaatatgaacaacggcgttcacctttcagcatcttataccgactcatttcataagctaacacataaaccctcttatcatatctccaatgttttacaacttcacgagccccgtaacgatcccttacactttaacccgctttcttgtgtacatccatagctcttttaaccttaatatacttactcacgtccacctcttcaacttttaaatgttcatcgctggacttgactaaaaaaacat

SEQ ID NO: 166940 - DNA, 2264 bp, Zea mays
  Clone ID: MRT4577_83827C.1
gccgccacgcttaggccatcattgggtacctcgaggccggccgggttgcaagccacaaatatttgcaagccacaagccaagccaagcaaaaccctaagaaacccaccctccctccagtctcctcgacccccgccgccgccgccgccatcacaacccagagcaccccctccccaccccaccctgtcccgatggctgcggacgccgccgctgcggcgatgtccgcgacttccctctgcgacgatctcgagcccgccaccgtgcgcacccgcatccgcgatgtcctggccgcaggtgccgcgcgtgccggggaccgcgtcgtggtcggtgggtgggtccggacgggccgggagcaggggaagggctctttcgccttcctggagctcagcgacgggtcctgcgctgccacgcttcaggccatcgttgacgccgccgtgcacccgctagcgcgcctcaccgccaccggcacctccgtcctcgtcgagggcgtgatcaaggagccgcccgaggggaccaagcagaacgtcgagctgaaggtcagccgcgtgcttgaggtcggcgaggtcgatgccgccgtctacccgctgcccaagggcaaggtcaaactcacgctcgagaagctcagggacgtcgttcatctccgttcgcgcaccaacacgattggagcggttgctaggattaggcaccagttagcctatgcatcacacaggttctttgatgagaatggatttctctatgtacatacaccaataataactacgagtgactgtgaaggtgctggtgagatgtttcaagtgacaactttatttagccaggctgagaaaactgagaaggaattgagagagaacccaaaaccttctgattctgaaattgaggcagctaaagttcttgtcaaggaaaaaggtgatgtggtcgcacagcttaaagctgcaaaagccagcaaacaagagatatcaactgctgtcgatgagcttaatagggcaaaggaaattgtttcaaaactggaggagaggttcaagttaaagcctgggattccacgcaaggatgatggttcaatagcttttgaaaatgacttcttcaaacgtcaagcttttttgacagtgtctggacagcttcaggttgagacatatgcatgtgctcttagtagcgtttatacctttggaccaacattccgggcagagaactcacatacgtcacgacatttggcagagttttggatggttgaaccggaaatcgcatttgcaaacttgcaggatgacatgaactgtgcagaaaaatatgtacagtacctttgcaagtggctgcttgaccattgccaggaagatatggagtttatggtgaaaaattatgataagagtgcaattgaacgcctggagcttgtttcgtcaactccttttgtgcggatttcatacacaaaggctgtggagctcttgaaaaatgttaccgacaagaagtttgacaacaaagttgaatggggaattgatttagcctctgagcatgaaaggtatttaacagaggatatatttaagaagccagttattgtctataactatccgaaaggaataaaggcattttatatgagactcaatgatgatgacaagacggtggctgcaatggatgttcttgtgcctaaggttggtgaattgattggtggaagccaaagggaggaacggttagatgttctgaaacagaggatacttgatgctggcctgcctttggaaccctatgaatggtacttggacctccgtcgctttggatctgtaaagcacagtggttttgggttgggttttgaaaggatgattctatttgcaaccggaatggagaacatcagagatgttatacccttcccaaggtacccaggaagggctgatctgtgatctttggagacattggttaaacagatgcgagttgaattcaacacgcgactagtgattttgatatgttttcaccgttaagtttctacttcctaatttgcacattttaattataaattgtggaactggtacggttgtcaaaaatcatgtaattttctggttgtattttattatatttgtatctctgatcaaacttctgtctttgctagttgtgctcaacaggcaatgtttttttctaaatgaaaaaaacaggtcaaaactgaattgtttaattaattgacatttcagtgtaagggatgcgagttctcgctatttaggataaagttaatattttttactggctaaatccgagctttcttggttgaggagcagaagattgtcaagaaggggctg

SEQ ID NO: 166941 - DNA, 465 bp, Zea mays
  unsure (1)..(465): unsure at all n locations
  Clone ID: MRT4577_83828C.1
ggnagataaacatatccggaggtgcatgtaaggagcagcgtgaactacactatttaccctgctttgcctcactgacacatgctcttggtaggacaagagaatatatggtgtttctttgatcttggccacgagcttgctgactgatatagagcaaatgagacgccaccacaggcgtactggcagactaccatgaacgatctaataatactgcttaactcacggaccgttcccactaaaaaaacattgatatcaacttaaggcaacggctctagagcaaaaacaaccgattggttgatataccaatacacaatggaagattatgaatcaatttgatgctctatctatcaaatgatgcttaactactactcttaaactattacaaaaagatgcctgtgtgcaagaatcgaagaaacatatctgactccattttatgaaaacgaatgggatcatgcatgaagtctaaac

SEQ ID NO: 166942 - DNA, 553 bp, Zea mays
  unsure (1)..(553): unsure at all n locations
  Clone ID: MRT4577_83829C.1
gccggccggttcgggaaggtcccaagagtagagttggatctcgccttctccctgtcgtacccaacggcgttttcccctacattgtcctatcatgcttgccggaggattcgagctaccgcggcggcagcggtgacgtatcggtatcggcggcagcgatggcggcggcggagtgggacagccggagcgtggcgagccccaccggggattggccaccggcggccgccgcgtccccgataaaggggaaggcggcgctgccggagtccgatggaggtgcctcggcgtccgggtcatcggagggcaaggtcgacgatggcaacatccaggaggcggagtcgtcgctccgcgagggtctctccctccactacgaggaagctagagctctccttgggagactggaatatccnagaggcaatgtggaagctgctctgcgagtatttgatggaattggccttcaagctggtattcagcgcttccaaccttctctttctgatataccactctcgaagcgaagtaacacattacgggcagattcatctaattcaggatcacagca

SEQ ID NO: 166943 - DNA, 251 bp, Zea mays
  Clone ID: MRT4577_8382C.1
ggggcccaaagcttcatttttcccaaaatgggaaaacaaaaagctttcccctgtcttaaggtgccttaaaaagttaccaacccagccccttttaacattttaaccttccaagtcccttttttttgccaaaaaccccaaaaaaatttttcttggcgcctagttttttttttataataaaaaaaacaagtgagccggtccttttttctccaaaaccccagaggagttttttacattgggggcattcctttttt

SEQ ID NO: 166944 - DNA, 231 bp, Zea mays
  Clone ID: MRT4577_83830C.1
atagatctagatagctagcatagggggggaaaaaggcatggattctcgctggtgtcatgaaccacgctgcagcccagtgctgaccttaggagccacctagtaggacccaagaatgagagaagctcacggcaccagctgccgtattgttctccacagagcaataggagaaggagtaagcttatctttactacaagatctgggggaggagggagccaacatggagcccaaaag

SEQ ID NO: 166945 - DNA, 415 bp, Zea mays
  Clone ID: MRT4577_83831C.1
cgaagctcggaattcggctcggcgcagtctacccctgttcagatgtctgcgaggccaacaagccaatgggtgtcgtccgccagcaccgccagctgccggtaccttaccgtatccggtagaccacttggtccggcgcttgtcaacttatccatgaacctaccgctccgccagtccaggtccacgtgcgagggccggctctctgactacgaaaggttctgcgttctggggcaccgcaacagtgggaccgtctacaaggcgcggtacccgcggtcctcggatgctctcgcactcaagtatcttcgcggacagggactcctccgctgtgcgcgaggccgagatcctcatgctcgtctctgacgcgccctacgtctggcgcctgcacacagcgatcccgtctgtcgctccggggaggcgc

SEQ ID NO: 166946 - DNA, 404 bp, Zea mays
  Clone ID: MRT4577_83832C.1
gcgccttcctcagcgactcctactggggccgatacgttacgtgcgccgtcttccagatcatctacgtgatgggcctggtggtcctgtcgctcgcgtcatggctcttgctggtgaagccgtccggctgcggcggcgtcaaggcgcactgcgacgggccgtcggcgcccggcgtcgcgctgttctacctgtccacctacatgatcgcgttcggcaacggagggtaccagccttccatcgcgacgttcgggtcggaccagttcgacgagacggaccccgaggaggcgcgctccaaggtggccttcttcagctacttctacctggcgctcaacgtcggctccctgctctccaacacggtgctggtgtactacgaggactcggggcggtgggtcatggggttctgggtc

SEQ ID NO: 166947 - DNA, 365 bp, Zea mays
  Clone ID: MRT4577_83833C.1
gggccggattcgaatcaacctctctgtatccgggggggaaagtcttgcctcgatttatccctttcttagacctcactcagtggcagatggcctaatatggctaagtatggcccgagccataccttggcccagctcattaccccagaagcctcttcttcgcggctctttcgatctcgactcttcgtcgcagctgctcgcttctccagcttctgcagccgcaggtcgccgtcgccctctctccaattctctgtactctccagcaagggtgaggcggcttccgtgccgtgcgcggtgcgtgtgcacttcacggttttaggctctggccttcaacaattagcagttcagcacctgtgctttaagggctg

SEQ ID NO: 166948 - DNA, 378 bp, Zea mays
  Clone ID: MRT4577_83834C.1
gcgtgactttctcaaagactgaactagacaggctactggtatcggttccggcacaggctgatgactacgagaaaaactactagcacatgaaaccgaacaggataccaggcaggatacatggattgctacatggacatctgcaagcacaggggcaagatctgcctaaaggcatcagtgagagcgctgtatgccccgcgggaaggggcccagcagtgagacgactatatgtacagggcaatgagaacaacggagcggtcattaatgctagctttgctgctcgctaggatgttgacgaaagggcagcagaaggggcactaggggggtcagtagcttgaggagctgctttaacatctgctactacattagagcctgcgtacc

SEQ ID NO: 166949 - DNA, 774 bp, Zea mays
  unsure (1)..(774): unsure at all n locations
  Clone ID: MRT4577_83835C.1
ggattgggttcatcgaggccggccgggaccttcggaagacgggcaggcgagcagcgaaggtgcgacggaaatcagtggggatgaggcgcaatagcccgccgacggcgagcggcaaccgcctcgcggtcatcgcttcccacttatccctccctccgctcggcagtccggcagccatatgcggggagaaggaagccgccctcgccaccgacctcaacagcacccccaccatttttgacaaaattattcggaaggagatcccatctcaggtggtttatgaggatgagaaggttcttgcatgtagagacatatcaccacaagctcctacacatattataatcattgcgaaggttaagtatgggctgtctaggttgtcgaaggcagaggaagggcatgtcgagcttctgggcaatcttctgtatgctgcaaaggttgtagcagagcaggaagggcttgctgatggcttcagaattgtcatggacgatgggcccagaggatctcaatcggtctaccaccggcacctacacgttcatcttctcgggggacggcagatgaattggccaccggggtgagttggtgttgtaagactcaagcaatgacttcgtgaggcatgttgttcactcgttagaatttcataatatgctgtcatttgcagtttgctattagggttgcacaaatagtcatcggtagacgctgtcccaatgattttgtgtacggagctcaaatagtataaaaagttttcatttcgtagaaaaaaaanaaaaaaaaagcgccccc

SEQ ID NO: 166950 - DNA, 491 bp, Zea mays
  Clone ID: MRT4577_83836C.1
attcggctcgagtgggcccagaggatgtgagtacagttcactgattctaacaggacccatcttgttggtgccctggtgggggaatggggtttcgactgatttttctgtcttctgttggcacgtagctcaatcggtctaccaccggcacctacacgttcatcttctcgggggacggcagatgaattggccaccggggtgagttggtgttgtaaaggtctgtttggttcactgcctaacttgccacactttacctaacttttctgcctaaggttagttcttcaattcgaacgcctaaccttagacaaagtgtggcgcagttagccacgaaccaaacagaccctaagactcaagcaatgacttcgtaaggcatgtgttgttcactcgttagaatttcataatatgctgtcatttgcagtttgctattagggttgcacaaatagtcatcggtagacgctgtcccaatgattttgtgtacggagctcaaatagtat

SEQ ID NO: 166951 - DNA, 374 bp, Zea mays
  unsure (1)..(374): unsure at all n locations
  Clone ID: MRT4577_83837C.1
agcagtggtaacaacgcagagtacgcggggtttcgactgatttttctgtcttctgttggcacgtagctcaatcggtctaccaccggcacctacacgttcatcttctcgggggacggcagatgaattggccaccggggtgagttggtgttgtaagactcaagcaatgacttcgtgaggcatgtgttgttcactcgttagaatttcataatatgctgtcatttgcagtttgctattagggttgcacaaatagtcatcggtagacgctgtcccaatgattttgtgtacggagctcaaatagtataaaaagttttcatttcgtaaaattatctgtttctcaaaaaaaaaaaaaaaaaaaaaaaannnnnnnnnnanna

SEQ ID NO: 166952 - DNA, 374 bp, Zea mays
  Clone ID: MRT4577_83838C.1
aaaagggggggatttggtctggagctgggatttaaaaaacccggggtacaacaatcggtttgggtctttgggggctgggaaaaaaatagccccgggacaaaacaagaggggggcccgttttattttacagaaggggggacagattcagcatactggcaagggaaaaaattttagggggcctagtttttacggtcaccttacattacctaaaattaacttgccctggagacaacaaacgtcacttgaaaaggggctcggggattcattggccaacatggcaagggcccaggctggtgtacccaaggaaccctttggcaacaataagggtctgaaagcaaaatattgggtggacaaattccttcccctggttaagg

SEQ ID NO: 166953 - DNA, 971 bp, Zea mays
  Clone ID: MRT4577_83839C.1
tgtgagtacagttcactgattctaacaggacccatcttgttggtggccggccgggaggcggggatcaactggtcaactgctctacaacttcacgtcttcttcaccttcggaagacgggcaggcgagcagcgaaggtgcgacggaaatcagtggggatgaggcgcaatagcccgccgacggcgagcggcaaccgcctcgcggtcatcgcttcccacttatccctccctccgctcggcagtccggcagccatatccggggagaaggaagccgccctcgccaccgacctcaacagcacccccaccatttttgacaaaattattcggaaggagatcccatctgaggtggtttatgaggatgagaaggttcttgcatgtagagacatatcaccacaagctcctacacatattataatcattgcgaaggttaagtatgggctgtctaggttgtcgaaggcagaggaagggcatgtcgagcttctgggcaatcttctgtatgctgcaaaggttgtagcagagcaggaagggcttgctgatggcttcagaattgtcatggacgatgggcccagaggatctcaatcggtctaccaccggcacctacacgttcatcttctcgggggacggcagatgaattggccaccggggtgagttggtgttgtaaaggtctgtttggttcactgcctaacttgccacactttacctaacttttctgcctaaggttagttcttcaattcgaacgcctaaccttagacaaagtgtggcgcagttagccacgaaccaaacagaccctaagactcaagcaatgacttcgtaaggcatgtgttgttcactcgttagaatttcataatatgctgtcatttgcagtttgctattagggttgcacaaatagtcatcggtagacgctgtcccaatgattttgtgtacggagctcaaatagtataaaaagttttcatttcgtaacaaaaaaaaaaaaaa

SEQ ID NO: 166954 - DNA, 264 bp, Zea mays
  Clone ID: MRT4577_8383C.1
gatcagaatgagttttgtataaccaaaactacgtttccagattcaaattgactggatacatgcgacagatactagccccttccaaccacacttgggatacactaaaatcaactgtatcactcacacaacgatcttctagtgccactgccaatgatagggtcttaaactgggatcagtttcttagagagacctctctgacaagcctaacacaggaataccctgctttccaatgaaacaattatcggctgcaggtgaaaatgacca

SEQ ID NO: 166955 - DNA, 276 bp, Zea mays
  Clone ID: MRT4577_83840C.1
ctctaagcggcgatctgtgctaagaggtcaggactcagccgaagtcctcggcgttgatcggcagctggggggacatgatccatggacaaggccatcccggccgttggagaccccagtcccgacgtcttgcctgcaggagtactggggtcccctggggccctctttactgtcacgtcatctctaggaaccctatctctgagttttgggaccaggtcggtttgggtttaacttctgcctcttcttgctcactgtgtgaccaagtgacacactccttct

SEQ ID NO: 166956 - DNA, 288 bp, Zea mays
  Clone ID: MRT4577_83841C.1
gaccgaaatcccgcattgacctacgcgttcgtccacacgtgcagagttgtcgaggtcttgtggaacctgagattggcattactgtgggccttgaacctcttacgggagcaaatgatattgaatatacttgaactacatcatagaaggatgttccttcaagatcatacagatgcaagttccttaatgatgcatacaagattggtgttggggttaaacaaggttatgctgacgtggtagcattatgggagattttaactagagcgtctagtacatggcctgatttacaat

SEQ ID NO: 166957 - DNA, 382 bp, Zea mays
  Clone ID: MRT4577_83842C.1
atcttgctgaaaacgtcgttgtggtgagagagggagggcggtcaaggagtaatttgggtcgtcgtcggtggttctcatcgatactaggtttccgttctcggggtgtggccgaggagggtcgccaacgcctcgggaagtcgtccgtgaccgcaattggaaggcgggacccgcggaccgtgggcgatttctcgccgtcgaccgaactccatcgtgggtagccctgttccgtgaccgggagtttctactgtgtcactgccgactgtaaccttgctgacggagagtacgtcctcgtgccggagcaaggagccgctcaggaggtagccccggatccagcacccgagtcttcaccagaggatctgccttccacagctttggaaggttc

SEQ ID NO: 166958 - DNA, 187 bp, Zea mays
  Clone ID: MRT4577_83843C.1
gcgcgtcgtgcggaggctcgcggttcgtgccgtgcggcgcctgttgcggcagccaccgacggttcagcgacaagaccggcggtttccgcgtctgcacgtcctgcaatgagaatgggcttgtccggtgtgccgcctgctcctccggcagctgacgtgcacagatgagatcaatatcatcccatcatca

SEQ ID NO: 166959 - DNA, 791 bp, Zea mays
  unsure (1)..(791): unsure at all n locations
  Clone ID: MRT4577_83844C.1
tatcacacatttgagatgcatctgaatttgtccttaactccgggtgtgatatgtagaaaatttatgtgtgtacaatacacatatactttcatcgtcaaacaaaagagagatatgtactaatatacatgtataaataggatctagagtaggtactactagacgcctagacctggcacaaaatcaggtcatgcgactcatgccgaagcagtctagattggctagtgcatcgtgtcgtgccagcccacgggccactagtgagacccacgtatggcataggccagtaatcatgtcagatcgacccatgcctcttgcttaatggacctatggcagtttatggtgtgttaattacaaaaataagctaaaatatatacaagtctctactatattaaagcaccagtttcaacggttgtcccgcgtcaatatttaaaaaacctacatttctttagaatcaatccgcactcttataatctcttctctactactataataggagagtttatgtgaaaaataaggtgaaattatgtataagtaagtgtttaaaacttggctgttggctctacattcacactcacctaatcaatagaaaacatatanttttgtgatttattaaaacaacatttatcctatgtcatatatatgtaaaaactgtagcaatgcacgggtatatgactagtagagttttaaacccttgttggctctaaaacacattcacacctatctagggaatagaacacaaatgttttaattttatactctatacttaagtattatatagatattttgatggaaaa

SEQ ID NO: 166960 - DNA, 365 bp, Zea mays
  unsure (1)..(365): unsure at all n locations
  Clone ID: MRT4577_83845C.1
ttttttttttttttttttttttttttttaangaaaaggaaagctggcagttatagcctctaaccatgtgtttaccggttaccaattacaaaaattttctttgcgcaatacaagcccctgggttggaccatttaccaaacatatgtgtactgtagctatacttgctaaatgggactaatcaaacacacccctttggggttggaagagcccggctatttacaaaaaattgggccaaatagcccacaaggtcaaggacctataaatacatttttcaagtccctacacctaaatggtcttccttgacaaggttagggggcacccgtgtatttcacttcaaaaaaaaagcccccaacttatcatatttac

SEQ ID NO: 166961 - DNA, 498 bp, Zea mays
  Clone ID: MRT4577_83847C.1
cattgggtacctcgaggccggccggatggaatctcatttatgggattaccttcgttccgagttggaccctcggatagtcgccgtccggcggcggcgggataaagtccggtgccaccctaccaccaatgcaacgctgagtagctgagtccgtggcctcgaggtggagaaggcggcggggtcgccgacgcccgacgacgaggacgaaacgggtgggaggaccgcgaggagcgctctacaattcgaaagccgcggcggagcgaattcaggggacgggaagttgaattctatcactgacccccaaagctctctagtccctacacaactccgtctggtacggaccatgccatttggctcctcccgatctgtaagggcgacacgcacctttgcctcgccttcaacttggctgattcagctggtttagggcggctgaaatttggtttactgcaccaacgtggtagggggaatctggatgattaatttattctgctatttcagctt

SEQ ID NO: 166962 - DNA, 2340 bp, Zea mays
  Clone ID: MRT4577_83848C.1
cacttggccacgccgatgatgcaatgaagattgctgaagtcaatgcaggggaggtggagattctctcaaatgaagttgttcgcttgaaaggcttgcttgattcgagtgctgccagcgaagagagtaagagccgtgaagctgagcttcttgttaagaatctggagtctgaagtttcatctctgaaaggcaaacttgaggaggcaaaagtccttgaagacaggttagccgacgcagaaaaaatgattgaggagcttaaatcagagatagctaatgcgcagaaggtcgaggaagacatccgtcagcagttagaagaatggaagcagaagtcagtatcacttgagatgaaattggaggaagttactctatctgagaagttcaaaagtgactcacttgtttccacgactgaagagctgtacaagatccagtcgatattgcaagatcgagaatcggaaattgaagttcttaaaggaaagacaactgccttggaaatcgaggtgacaaggcttttagcagatgtgactgattcaaatgagcatcttgatgcatcacagcaagaggtgtttgggctgcagacaacaatagatgttctgaagaacaagcttgaggctgcagagctagctgcctcagaggctttggacaatgagaggactgctaccacaaagattgaagtcctgactgaggagaaaaccaaccttattagtgagctggatgacgctagagacagagaggagagagagaaaagggcaattgaggatcttactgctgcattggataaggtaactggtgaagcacaggaagcacatgataggtgtcagaagaaagaagatgattatgaacatgcccttgcgcagataggtgatctgaagatggccctgaagactatggaagagtgttatagggtaatgcttgatgaggcaaaacacgacataactggcctaagggaaactgtggagaagctggaagctgaagtgagcaagtgcagagaagaatgtgaatgtaaggagcttgaccttatcacggctactaagcagtctgaacaagaaattgctgctcttaaagaagaagcccagcatttatctgcatcactgcaagttgcagagcacgagcttgaagcagtcaatgaagagagagaaaggtttcaggagaaactggcacgcacagaatcagccgttgctgaagccaacgatgctgtgcaggaggcaaaagctgaaaatgagaggcttcaagagaaacttgcacacgtggaatcagaggttgctgaggccaacatggctgcagaggaatctaagaatgagatcgagaggcttcaagagaaactgacatacacagagtcggcggttgctgaagccaacaagactgtgcaagaggcaaaggctgagagttcacagctgaaggagcgattacttgacaaagagaatgcattgcagagcataacccaggagaatgatgagttcaggatgcgagaagctgacgccatgaagaaaatagaggagctatctgccctgcttgccgaagccatgacaaagaagcatcccgaggaggaagagaagctggtggttgttgatgaggcacacaattctggacgtgaagctatccgttctgtggcagaaaatgaagatacagaagaaactgaccataagaaaccaaagcttgaagctgatgcagtcgatacgaactccaacggagaaccgaagcacgacgagaaagacgacagcaaggtggaagaagaggagctgaagactgagctcagcctacaggagagcgacagagctagctctgagaaggaagcacagtccgaaaacaggagacaagaaacagaaccatccaacgacgagttagacccgaagaaggacagcagcaccgagagcgccaacggaacggccgtgccagaggatacggcagcgacgacgactaaagcggcaacgtctcctacgaaaccgcagcagccgcagcagaaaaagaacaagcctctgctgaagaagtttgggagcttactgaaaaagaaaaacagcaagtagccgaacggtgggctgtactactactagtgttgttttgattttcttctttcctctccctttttcttttttttttctttttggggtctgtttgacgaggtgttgtgcttgctatgcgtcgtttaccgccaatgcctgtatttgtgggtgattggagaagtttgtgggtgtcgtgaattttttaacttggggacctatatggtgttggctgctgctgtctacacgtttgtggcagatcctcccatgtgtgtaaatggagttactcttcctgatcagaatgcatggctattcgtttctggaaaaaaaaaaaaaaaaaaggccccta

SEQ ID NO: 166963 - DNA, 384 bp, Zea mays
  Clone ID: MRT4577_83849C.1
gcgtgggcggacgcgtggggaaaggtttcaggagaaactggcgtgcacagaatcagcagttgctgaagccaaccacgctgtgcaggaggcaaaggccgagaaggagaggcttcaagagaagcttgcacacacggaatcagaggttgctgtggccaacatggctgcacatgaatctaagattgagttcgacaggcttcaagagaaacttacatacacagagttggtggttgctgaagccaacaaggctgtgcaggaggcaaaggctgagagttcgcatctgaaggagcggttacttgacaaagagaatgcattgcagagcataacccaggagaatgatgaattcaggatgcgagaagctgacgccatgaagaaaatagacgagct

SEQ ID NO: 166964 - DNA, 274 bp, Zea mays
  Clone ID: MRT4577_8384C.1
tgtggagggcagatcctggtacaccccccacagaggacgactttggatagcagccacagctaaaaaaccctcccctcaagaagtctcagaactccaggctacatatcgtcttcttcgtgggaaagatgtggaatttcctaatgactatccgtcaggttgtcttctgggctgtgtggacctaattgactgcttgtcccagaagcaatttaaggagcagtttccagacatcagtcaagaatctgattctccatttgttttcatctgcaaaaatcct

SEQ ID NO: 166965 - DNA, 3199 bp, Zea mays
  Clone ID: MRT4577_83850C.1
gataccaactgcatgccagatcacattctctgctaggaggtttacatcacatgaccttgcaatcaatcagggttttttttttttccagaaacgaatagccatgcattctgatcaggaagagtaactccatttacacacatgggaggatctgccacaaacgtgtagacagcagcagccaacaccatataggtccccaagttaaaaaattcacgacacccacaaacttctccaatcacccacaaatacaggcattggcggtaaacgacgcatagcaagcacaacacctcgtcaaacagaccccaaaaagaaaaaaaaaagaaaaagggagaggaaagaagaaaatcaaaacaacactagtagtagtacagcccaccgttcggctacttgctgtttttctttttcagtaagctcccaaacttcttcagcagaggcttgttctttttctgctgcggctgctgcggtttcgtaggagacgttgccgctttagtcgtcgtcgccgccgtatcctctggcacgcgttctgttcaggcgctctcggtgctgctacactcatggggggatctgccacaaacggtaacagcagcagccaataccatatatgtcccctggttttccttctcacagctagctctgtcgctctcctgcaggctgagctcagtcttcagctcctcttcttccaccttgctgacatcatcctcgtcaaacagacccaaaaaaaaagaagaaaatcaaaacaacactaatattgcaggtgcagctaccgttcggctacttgctgtttttctttttcactgagctcccaaagatagtttcaagtggcgaattgtgtgcctcatcaacaaccaccagcttctcttcctcctcgggatgcttctttgtcatggcttcggcaagcagggcagatagctcctctattttcttcatggcgtcagcttctcgcatcctgaactcatcattctcctgggttatgctctgcaatgcattctctttgtcaagtaatcgctccttcagctgtgaactctcagcctttgcctcttgcacagtcttgttggcttcagcaaccgccgactctgtgtatgtcagtttctcttgaagcctctcgatctcattcttagattcctctgcagccatgttggcctcagcaacctctgattccacgtgtgcaagtttctcttgaagcctctcattttcagccggcacgcccagaattgtgtgcctcgtcaacaaccaccagcttctcttcctcctcgggatgcttctttgtcatggcttcggcaagcagagcagatagctcctctattttcttcatggcgtcagcttctcgcatcctgaattcatcattctcctgggttatgctctgcaatgcgttctctttgtcaagtaatcgctccttcagatgcgaactctcagcctttgcctcctgcacagccttgttggcttcagcaaccaccgactctgtgtatgtcagtttctcttgaagcctgtcgaactcattcttagattcctctgcagccatgttggccacagcaacctctgattccacgtgtgcaagtttctcttgaagcctctcattctcagcctttgcctcctgcacagcatcgttggcttcagcaactgctgattctgtgcgtgccaatttcccctcaagcctccagcagagtctttttctttttttgatgctgtggtttcgttggagaggctgacactttagtcgccgtatcctctggtataatggccctgcttgcgttctcggtgctgctgctaaccttcttcgagcctaactcatcattgggcgattcagtttcttgttttttgttttttgtccatgtgtccttgtcgaagctaactttcttgctctcttgcaagctgagctcagttttcagttcctcttgttccaccttgctgtcatctttctcttcatgcttggattgaccattggacttcatatcgactgcttcaacttcaagctttgacttttaatcagcagtttcttccgtatctccattttctgcaacagaacggataacgatcctcaattgcccttttctctctctcctctctgtctctagcgtcatccagctcacaaattagtttgtttttatggttagctaggccttcaatctttgcgttagcagtctcttcattgtgcaaagccttcgattcatctacttcggctgccccaagcttatgccctagaacatcttctgtttttcaagtcacagatccttcttatgcgaactcatagccattcgcattctaatcagtaccattctctatctgccttcccacatcaatctccatggcagttattttcccttgaagaacttcaatttcagattctcgatcttgtaatatcatgtggatcacggacagctcttcagtcgtgggggcaagctagtctcgaagcctctcctcctctgccgtaaccacctccaaagcctgctcggcttcacctacttcatcctttcagcccgctagttgctgacagatgcctgctctctcctcattcactttatctagctcgggctctggctcttccagcgatgtttctgcttcagctaacctgtcttcaaggacttttgcctcctcaagttttcctttcagagatgaaacttcagactccagattcttaacaagaagctcagcttcccggctcttactctcttcgctggcagcactcgaatcaagcaagcctttcaagcgaacaacttcatttgagagaatctccaccttctccgcattgacttcagcaatcttcattgcatcatcggcgtggccaagtgcagccttcttggcctcgttcgccatggaaagatcacgcatgagcctctccacctcctccgttgtgttgaccagactctccaagtcggcggcatgctggccacgcacacactcaatctccctctgccactcgtcctcccgcctatgcgcctcgtcgatgcctgcctgctcgagctcatccgcccggaacttctcgatctcagtggcctcctcggcccacctcttggccatgagggcatcctggagcttctcgtgagtctcatcagcgactctcttggcctcgttgagctccccgacgagacggtcccgctctccgaggatgaatgccagttgatccttggccttcttcaggtcctcctgggcggactcaagcagcgccagcagttcggcctccctccggaacttataaatctaagtg

SEQ ID NO: 166966 - DNA, 437 bp, Zea mays
  Clone ID: MRT4577_83851C.1
gccgcccgggcaggtacaagcttttttttttttttttttttttttttttgttttttttttttttttttttttttttttttttttatatatatatccattttttaacttgtattgcccaatgttagcaacataaaaaattattgttcaatgttagaaacaaaagccaaataccataaacaacatccacaacaaccaccacaacataaacagcaacaagaaccaccaacacaacaaaaacaacaggagcacccacaacaacaacaagttcacagagaaccacgaaaacaacaccaccacaagcagttgcggctgcacaacaacaacaacaaccgcaggaccaccaccaacaacagcgacagccgacacaacaataacatcaatgaaaaggccacgagcaccaacccaaccagaacaaggaccagcaccacagcccgaac

SEQ ID NO: 166967 - DNA, 313 bp, Zea mays
  Clone ID: MRT4577_83852C.1
gagcgacagcacggggccgatcgggtacaccggcgagcgcgggccggccgggcacgcaccggcctcgggcgacggccgtcaggggccccggctcgagctcgttcgatgtgttggcgatgacccccgaagcgttcatgaagcggtcgccgaggcgcacgaagcacgcgtagttggggctcctattgtccgccacggggcacggcatggagtccggcggcaccagcggcattcccggcagcggcacatccccctgcatctcgtcgaagtccacggttgggacagactcgtggagcacgggcaggtgcaacatgag

SEQ ID NO: 166968 - DNA, 335 bp, Zea mays
  Clone ID: MRT4577_83853C.1
aagcaacagttatccccaatgatgccaaacctgaaaatttctgcttagggggcagcagggtcaacatattctatgaatcggtcattttatgccacgcagtacactcccatttttaggataagcaaccgtcccgagtttgactaaagagacctaacacctctcttcgagtgggatcagttgaaaaaatatacaggggaaagcaactgaatgctgacatgagataattgtttgagaattgccgcacaccaattggagactcattcaacttgcccaagctggttcttcacaatatatgctgagacctggggtcacattgcctgaccttcttcttgaac

SEQ ID NO: 166969 - DNA, 758 bp, Zea mays
  Clone ID: MRT4577_83854C.1
gccatgaacaggatggacagggaagaacacctctacaccgcgttccagtacttcgacaaggacggcagcgggtgcatctccaaggaggagctggagcaggcgctcaaggagaaggggctcctggacggcagggacatcaaggacatcatctcggaggtcgacgccgacaacgacgggaggatcgactacagcgagttcgtggcgatgatgaggaaagggaccgccgagccgaaccccaagaagcggcgcgacgtcgtgttgtagcctgtgtaggagcatgcgtagaggtagctgctgatatatggtatggtatatcggatggtaaaatggaacggcgtccagcagttgatgccattgccacgacggtggttgcttgcacgctggtcgagcagcacaaggcgcgcgcggtggtggcagggagatgcgcgcactcggctgcgaatacgtggagatgctggagcatggaggggacagagactctttgacaatgtacgtagctactatgggatgatggaatggaaggatgcacgcatacctgatcgaccgaccgaggacctgtgctggagcctctgaacacacagcagcagcagctgctgctgctgtgtcttggatccgtaggtatgcttactgatggttcgagaattcgtatgcgtaaaacgtgcaatggccatggactgtgtatatatcctcagatgtgtaagtgtaagtaacgtcgtaaagggaagaagaaaaatataatatgatgagacagttttttt

SEQ ID NO: 166970 - DNA, 242 bp, Zea mays
  Clone ID: MRT4577_83855C.1
ctcaaggtgctcgtgcccttgaacgccgacttgcaggacaggcgccgctacccggggcccttcgcggaggcgacgcggcgcgagctcgagggcgcctcgatggagctcggcctcgccgtcgccagcatgggcagcggtccgccacctgtctctccggggcggtggaattttaatctgatcatgagctgattgatttggatttttatcttaaggaggttgaaacactttattttgttctattg

SEQ ID NO: 166971 - DNA, 397 bp, Zea mays
  Clone ID: MRT4577_83856C.1
tttgtcgccacgtcgaggcacatcatcacccgtctaacatttaaaaatgcggcatccacatttagggctgctagttaaagctggatgagatctccaccgcctgaaacgcgcataaggagagggaacaggtggtggggcataaggcctcgaaaacggatcattagacctttgacgcactagtccacggtctgtaatttttttctctgacaccatgctggaacatcattaaaccctatctcggactatgcattatgattcatagggagatatacgtcgatgtcatgcctataggcataatactgaggcttcatcatcagaagaaaccatgcaaggcaaactcatcggagggctcatactatgtataaggaatggggacaccataaaaggcaccatcatc

SEQ ID NO: 166972 - DNA, 439 bp, Zea mays
  Clone ID: MRT4577_83857C.1
taggggccttttttttttttttttttacaaaaatagtatggcataattatatattagcactgctccaagcaactttcagatgacaaacacttccactacagtcaaaaggcgccacggagcttaaggacctactacaaaaggagcttaagaggaggcgaacttggggacggccttggtagccctccaagaccgcgtgcttggcgagctcgccgcctataaccagggggacaggaggtctggatactcccgccaggtgatggtgtactccatgaagcagaaccctagattgggagcctcaacggtaatcttctccaacatgtcctaataagccacatcatgaggctctccaccgtgttctccacaaatgcccaccttcgagttaggtctagctttgcggcccctctctgtagaaaattcaccagctcgtccactcccctct

SEQ ID NO: 166973 - DNA, 1219 bp, Zea mays
  Clone ID: MRT4577_83858C.1
gggtacctcgaggccggccgggccgggaagcccgtgccacgggtcagataagcttttctctccccttcgcagctgcaaccgctcgccgcgtgctccctttgtgactgaaccgcatcctccccgcgccgacctgctccggcgagttaaacatggccgtcctcctccgcggcacctccgccgccgcctcgactgctggcccctcctcggcgctgctcgccaccaccttccgccgctcccgcggctgccttctgccccgtgccgcgccgcagcgccgcttgtatgtggcccgcgcctcggcccagccccttgaggtctgcgctaaggagtccatcaccatccctggccgcctcggagactgtcctttcacacagagggttttgttgactatagaggagaagcatctgccttatgatctgaagctagttgatctagctaataagccagattggttatttgaaatcaacccagaaggtaaagtgcctatcgtgaagctcgaggaaaaatggattggtgattctgatgttataacacaagcattagaggagaaataccctgaaccacccttggcaactccaccagaaaaagcttcagttggatcaaaaatattttccactttcattggtttcctcaaaagcaaagatccaagcgatggaacagaagaggcactacttaatgagcttacttcatttgatagttatctaaaagacaatggtccatttattaatggtggaataatttctgctgctgatctctctctgggtcctaaactatatcacatggagataactctgggccactacaagaattggtctgttccagattcactttcttatgtaaaaacatatatgaagtcgattttctcaatggattcttttgtcaaaactcaagctctgacagaggatgtaattgctggatggcgcccaaaagtcatgggttaaattcatttctaaagttagacgttaaggagagggagagaggtgtcgattggcgaatggagggtctagatgcaaaggtttgtcgcatggctgtaatatgtacatgaattgtggtggattttgttaggaattttctagggcatagcatatctggtattcatatccaatctcctttgctttgtatgtcaaatggaaaacatctatacaattgtaaaacatatattttatgtaaatgagcattctcggtttacttagcaataaacaaaaagggagcgccctctcag

SEQ ID NO: 166974 - DNA, 313 bp, Zea mays
  Clone ID: MRT4577_83859C.1
tcggcggcagggcgtaaagaggatcgccgaacagaacaacatgaagatggtcatcggtctcgtcgtgtgcctggctttgtcagctggcagcgcctttgcaatgcaaatgccctgcccctgcgcggggctgcaaggcttggaccgcgcttgcgccggcctgaccaccatgatgggcgccggcaggctgtacccctacgcggagtacctgaggcatgcccaaagcaacccggttgcggcggcgccctactacgcccgtgaaggcagacgagcgccatgtaccaaccccttcggcaacaatgctgccagcagcaca

SEQ ID NO: 166975 - DNA, 529 bp, Zea mays
  Clone ID: MRT4577_8385C.1
attctacgtgtttgcgtgagaatgtgtacacgatttgtatgatgcttcctactcatactatactcaggcggcggaacttccaatgcgtacgccctgcgatgtattacgtgcgatcacgtacattaaggactgatggcaaaatgttacatgctgttaccatcccggccacaagggtgctctagtacaagaacctcgcggtatcattttgaacaggtaacacggcaccatctagcctcgtgctatcatgatgcagcaaacacgaaggccggaaattacggggccactcgctaacccatcccttggctgccatctggggtagctgggcacaggacctcgtccagcgcgtattggggtggggcgaactgtttgtcgggcttcggggtagctctcgatctttgcggcatgggcaagatcaggcctggcgctgaagagctcgccagggagctccttgaggctctgcttctcctccttgggcttggaaacgattacgggcttgacgtgcactcgcaggtcggacgccccagggcgg

SEQ ID NO: 166976 - DNA, 588 bp, Zea mays
  Clone ID: MRT4577_83860C.1
gaatttgaaagataatattggcatctgtttcttactgttgggctacattgatattaccagaatggaagtgtgtgaatcctgtttcctttatatgagaatgtaacaccacagtttaaggtttttaactgcatcacaagtttttttgctctgattattgaaatacttgacagtctgaattaaatttcacatgttggccacaggtcctttcacacagagggttttgttgactatagaggagaagcatctgccttatgatctgaagctagttgatctagctaataagccagattggtacctatctgcaagacatgcctaacctttctgttcagattattactggctgtttttctggttgatagttccatggccgtgagcccattaaccatcatgcttttgtcttgcttcattaggttatttgaaatcaacccagaaggtaaagtgcctatcgtgaagctcgaggaaaaatggattggtgattctgatgttataacacaagcattagaggagaaataccctgaaccacccttggcaactccaccagaaaaagcttcagtgtatgtgatatttccagtgccctaattaataact

SEQ ID NO: 166977 - DNA, 2680 bp, Zea mays
  Clone ID: MRT4577_83861C.1
cctagtgatgcgactggtggcagtccggcttcacctcaagcatcagagagaagcccagatactattatgtttgcccctaggtgtacgacttcaggagcagtgtgttctggtgatgcaataatttttgttttgcgcccaaaagtcatgggttaaattcatttctaaagttagacgttaaggtaaactgcataataagtgcatatatccccttttaatagaatgaataaatttggcatgcttagatttccttggttcgctattttgtgtctatggaaataatgatgacgggatacacacctcatgattacctagagaactggaaacatgggaggcttaagcttgtcgttggttaataagatgcaaaagtatatgtattatgtatttccaatgtatgtataactgcatttgtataaaaatacaaatacatttataaagaataatgaaatgtttagcgagccattgtgaggaattctgctatttgcttataatacatgggaagatcaatatcttctgctgaggacaccaaatagtagttcacttaaatgatgggctaacgattgtgtagtggctattttggccttcagtttctgaattatttgaggctagaagctacttgcacttagcaactgttgcagtgatgcctcctaccattaaccaaggcctagcaaccaacatctcttcatacttcataccctgcttattcgtatgaaaaggaagtagaatttttagaagataataagattaagggttgatttggtgacaagtggatcacggggagattgagggggaaatgaactaatttacccctcaatcccctccaatcctcccgtgatcactggtcaccaaattagccctaaggtgtaagcttttatagcactggatgtaatattatcacagccagacgttcaagtttcatcgttaaagtaaggttcggttgtgcgcaacatgtttgtatatagcaggggcggatgtagtacaggtgcatggggatacaggtacaagcagaacagaacaggctcttgatcagttcattaaggataacaaagaagcaaaaaaactcatatgcttacggtgacattggcaatggctatacttgtggataaatgttggtgaattgtatccttatatccgcacacctaactatttaatgtcattcagtcgtcatattacattttgagtgaattgcatcgtttaggtctatgccccatgattgaaatcctgtatctagggatgaaaacggtcggaaacggtatttattcggtaatcagttttttctttgattgcgaataaatagaatatagaatctaccatacaaatttgtattcttgtttctaacatccagcttgtaaagattcatagatgataaaccttaaatttatgctatattttcttaaataatagatataaacttcggtatggattcggaaacaaattcgataattttttcaactatttgtgttgtagggaccaaataacacttaaaacaatttatgtaatattttattcatatttgtactaatgtgcttgataacataggaaaagatcaacatcaaattttatacatatctattttaaaatattaaatttgtcctaacagttcggattaccactttcatccctacctgtatctgccactggcatatggccataaccattggtgtttccattttcctatatcagttatcacagtacttattctgtatccttctcaatggatcccactaattggcactccatctgagctgctagtgaatgtctgttggaaaataagaatctgccattctgcttatgtacccagcagttaacatatctttgcaatagggatatggttctgtcaatctttgcttaaaccagtttcacaagatgtgcaacgatttgtcttatcatgtgatgttttcttttcttattattaggagagggagagaggtgtcgattggcgaatggagggtctagatgcaaaggtttgtcgcatggctgtaatatgtacatgaaatgtggtggattttgttaggaattttctagggcatagcatatctggtattcatatccaatctcctttgctttgtatgtcaaatggaaaactccttcgagactcaggtttaatttctttagtggcaaattttttggattggtttaacatgcaagtattttgccatccatggcagataaagaaccctagtcccggcggtggcccccccccggaggcagcgagcaaggaaaaccaggcccccgtccggtcgggcgaaagtgaccgggactgcgagctcatggggctcatgtggctgttgcagcgcaaccccccgcgttacggagcgacggccccggccgtcatccaggcgtttatggccgtggacgaggcgtcccccccgggtgtcccggtggcggcaaacccggggccggccccggggtgctccctgcccgtggacgacatgcccctcccggccgaatacgcccaggtcggcggggccaacaacgcccctcccggggtttgctgctttttttgcctgctcgtgctgttttccgttttaagcttccgctcccgggtactccctgtagcaattttgtggttcaattgaagttcgttatatgccccggcccaaaaaaaaaaaaaaaaaaaaaaaaaaaaaaaaaaaaaaaaaaaaaaaaaaaaaaaaaaaaactcgagggaggccgcggtacc

SEQ ID NO: 166978 - DNA, 392 bp, Zea mays
  Clone ID: MRT4577_83862C.1
gcgatcaaccgtactaaaaaaattaataattcaaacacccttacaggtctatatatacatgtacgaaaggaactgcacgagccagcttcaaaaacggtgttggatgcatctcccatttgacatttctagcactgatcttgtatatgaaaccaaaaaccatgtttttgtgtatgcagaaaattctgttcacactatatatcaggttgaaagactacttaacctttctccatacacattcttttacatccatgcagatgcaaaatatccatctcctcgtataagacaaagttccttgaccccacctttctcatctccatgtaccttgccgacttccccttctaccatatactgatacaaatcaaccccacccaaataaactcctccttatacat

SEQ ID NO: 166979 - DNA, 127 bp, Zea mays
  Clone ID: MRT4577_83863C.1
tctctccgccgggcaggccaactccggtgtcctcgcgtgtcctctacataggcgcgcactaggcgcaggatctgaatccggtgctgcagatgaagcagcactcgtgcagcttcgcgctgtactccca

SEQ ID NO: 166980 - DNA, 434 bp, Zea mays
  unsure (1)..(434): unsure at all n locations
  Clone ID: MRT4577_83864C.1
gacggnnatcgataagcttccatcatcatacanaacttagatgagcanaacatttgccttcaanctccgccacagtctcttcgacttaacgcatcagccacgacatttgcttttcctagatggtacttgatcgaacagtcatagtcctttaacaactctatccaccttcgctgtctaagattcatctccttttgagtcagcaagtacttaagactcttgtaatccgtatagatgatacatttctccccatacaagtaatgcctccatatcttaagtgcgaaaatcaccgctaccaactccaagtcatgcgtaggatagttcccctcgtgaggcttgagctgttgagaagcataagcgaccactttacccttttgcatcaacgcgcagcccaaacctacaagtgacgcatcgctgaacacagtgaaatccttacc

SEQ ID NO: 166981 - DNA, 198 bp, Zea mays
  Clone ID: MRT4577_83865C.1
aagagtctcgaatctgaaatcgatcgtgttgtatatgttccacgatcgcaacgacgtaaaatggttcaaggcaaagtattatgcgtgccattgacatagccaatttaaccaatttcgaagcaacgacaatgttatttttgcagcctaatgagcggtggaaaaaacatggtcctcgtggccgcatcatggaaaacgttg

SEQ ID NO: 166982 - DNA, 237 bp, Zea mays
  Clone ID: MRT4577_83866C.1
cgactcctcatctgtatgctcgcctccgggaccctgctcagcaagtgcggaaaacagcggggctggtgatgacccacctgatcctcaaggacatggtgaaggtgaaggggcaggtcagcgagatggcggtgctgctcatcgaccccgagcctcagattgctgccctggccaagaacttctctaatgagctctcccacaagggcaatgcaatctataatctccttccagatatcatca

SEQ ID NO: 166983 - DNA, 206 bp, Zea mays
  Clone ID: MRT4577_83867C.1
gcaaatcaccggcaaggctaccaagatcctatgtcattcctgtgttactctccgtggtcgggggggctttttttggccgcgggtggtgagatagaaaagctaaacgacatgcccacgtactccaccttccctaagctgctccatgacaccaacgacttgggcgcctccaatcatgtccagacagacacgcctctggctgttcccga

SEQ ID NO: 166984 - DNA, 230 bp, Zea mays
  Clone ID: MRT4577_83868C.1
gtcatacactattcgagagggatcatcacattgggcttattatggcttattgctacgagggcggatcggacctggtttgactaggctgaaccatggaagctacaatggcggagactactatcgtgactaggaacaagggcagctgatcgtaattgctaggactgactgaggcattacattggaagccacaaggtggcgagaccggaggcctcgagttccctcgcccggcg

SEQ ID NO: 166985 - DNA, 271 bp, Zea mays
  Clone ID: MRT4577_83869C.1
cccggtcgccccgcgtccgctctggctccttccggccagtttctctgcacccatcgttcactcaccggtctcccctgcctgcgctggctgttggctctcccttcgcgtgcgccatgcacggccgcccctgtgcacagcagcagcagcgctgctcggtggccgtcacgctcacgctttccctccgccgcggcagcggggtgggcccgtggccgcgtgcgacgacccaccgaactctgtgtcgtaggctcgccaaaacatcagcgttatctca

SEQ ID NO: 166986 - DNA, 415 bp, Zea mays
  Clone ID: MRT4577_8386C.1
agctattgaagtttgactgccaagaattctaattaaaaccatctcgctcgatacattttggatgtgcaaaagctcacatattctcttctattgatacacatgttggatatttgctatctaggtactcagtgccccacgtatttgacgtatgtctgtaaataagtggcacattcgagcgctcttcgctctgccattgaggtggatcgaagctgccacatattttctccgcaggacatcggcacgaattttgtcttagcaaaccagttaattttgtactctttagattctttaattggttccatgctctctttggtacttttcatgtcagtttgctttgcaaacattatcagcgtgcccttgtagatttcgtaatggttatatgtatatgccctattgaaattgtcaaaaataaaaa

SEQ ID NO: 166987 - DNA, 385 bp, Zea mays
  Clone ID: MRT4577_83870C.1
gatgatccatgcgttctttgtttcccacccttcggtgttcgcccgcacgactaccgtctgtgaagaggagtaagcacaaatggcttgcccttctcaatccattctatccgccagcgtctgcatactactgagcagcaagcctcgggcttcctccttccacttgcgagggagcatcatctcactgttgctgtaacatcaagccctgccaactaaccagcaactcttcctcttccccatctcctctctcgccgacgcctacacagtaagaccccaacttcaacaactagaagcgctccatgtagaaccaggtactgaatctccactttcatccctttacttgacttaactacctaggctcacatccatagaccgaatactccagcac

SEQ ID NO: 166988 - DNA, 527 bp, Zea mays
  unsure (1)..(527): unsure at all n locations
  Clone ID: MRT4577_83871C.1
aagctcggaattcggctcgaggcaaccggaccaacactcttttgctttccacagcaagggcagccaccacggggcgggcgccaccacggcgacggccggcacccccaccaaggagggagcccacggcgagggccgcaacaccacgcgcaagaccgagggcaagcccaaggaggcggcgaccggcagccccaggcacggccccgaccgcgacaagcaccacggcccacacaccggcgagcccccgagccaccacaccggcgagaaccccggcgaccacggcagggacaccgacgggccgaccgccgaccccgagacacncgccaagaaccgcgagcaggaggagaaccactcccgctgggccatgctcggcgcgctcggctgcgtcttccccgagctgctctcccgcaacggcgtcaagttcggcgaggccgtctggttcaaggtcggcttccatatcttcagcgagggcgggctggactaccttcggaaccccagcctgatccacgcgcagagcattctcgtcatct

SEQ ID NO: 166989 - DNA, 399 bp, Zea mays
  unsure (1)..(399): unsure at all n locations
  Clone ID: MRT4577_83872C.1
cncccanacaacaaccatctaggatgtaactaattccaacaacagaggccggggctcaacttttgttttcggtgcaagcacaaatcattaactgggatattcatatgtataataaggagatcggcaataccactcatgtgcacacatcaaactagaatgacccaatgaggacctcagcaccgttcatacaatattttctgataaaaccacaccattaaccagaatgaacaccccaaaatcttgatgttttctatgagtcatccacattctcaactattcctgacaccatttaacattatattaccgttcaaccatcatccaacataatccttttacaaccattggtggcaagcctgaccatacatatcgtttgttccaaatcatcaagaacgcttacat

SEQ ID NO: 166990 - DNA, 438 bp, Zea mays
  Clone ID: MRT4577_83873C.1
ggaagggacaagagggggctggcctttgggcttttcagaggtgggtcacaaaggcaaaccggcccagagggaacaagcccatttgcccaaagggtcaaccacaaacccccaattcagcctttttcctgggcctttgggaagggggcttccttttcccgagacaagggacaagcttcaagccaaccaaaaatcagcttggcctgccaagggcgacgcccattggataaacgcacccaaaagtcggtatgactggcgctttgaatttcaaaaatatgaaaagggccttggcaactttggggtccaccccccccgacattggaacggcgatgatctttttcatcacaactgcatgtttgcatgggggcactggagcatgcttcccagccaaaaagggggggggggccccaaaaggcaccggttttcgggcggggccttggc

SEQ ID NO: 166991 - DNA, 540 bp, Zea mays
  Clone ID: MRT4577_83874C.1
cgttcctataaaaaaaaaaaaaaaaaaaaaaaaagggggggagggggggggggaaaaaaaaaaaaaaaaaaaaaaaaaaaaaaaaaaaaaaaaaaaaaaaaaaaaaaaaaaaaaaaaaaaaaaaaaaaaaaaaaaaaaggggcgggcctttttaaaaggtcccaattttttttccccttccttccaaacttattatttttggggggggggccctttttttaattccattgcccggtttttaaaaacggggggattggaaaacccttgggtttcccaaatttattccctttgaaaaaattccctttttccccagttgggttaatacaaaaaaggccccccccattcccctttccaaaaatttgcccaccttaattggcaattggacccccccttttaccggccttttaaccccggggggtttggggtttccccccagggtaacctttacttttgccaggcccttagccccccttcttttcctttttttcctttcttttttcccccctttccccgtttttcccctaaaatttttaaatgggg

SEQ ID NO: 166992 - DNA, 1184 bp, Zea mays
  Clone ID: MRT4577_83875C.1
ggtctagctaaaagtgttctggattcaagcaagcctcaaacagattcattggatggacaagtgacaaatgacctgaagaaagctggcagccttagattttacaaaccaaaattcaaatatattttttgtgatatggatggtacgctgctcaacagtaaaagtcaagtttcagcaaggaatgcagaagctctaagggaagctaggtcaagaggagtaaacatagttattgccactggaaaggcacgtcctgctgtaatcgacgctcttagtatggtggacttatctggaaggactggggctgttggtttatggtttggaagggagacggatttataaaagaaatttggaccaagaagtatgtagagaggcactctcatattctatagagaacaagataccatttgtagcatttagtcaggatcattgttattcgatgtttgaccaccctttggtcgattctctccattacatataccatgaacctaaggctaaaatagtgccatctattggtcagcttttagaaacagctgagatacagaaagtattgttccttgaaactcctgagaggatttcgtctgcactgagaccgtactgggcaaaggcgatagagggaagggcccatgttgttcaggcacagcctgatatgcttgaacttgtaccacctgcaacttcgaaaggcaatggtgtgaaggttctgttgaaccacctttccattagtccagatgaggtaatggcaattggtgacggagaaaatgacattgaaatgttgcaactagcttcgtttggggttgctcttgcaaatggatctgacaagacaaaagcagcggcaaatgtaattggcgccacgaatgatgaagatggagttgcacaggctatttatgaatatgccttctaagagcaacgaatcattttggactgggttaatttcttctgatttcccatttttcgtggactcaacacagaacaattgtagtggttccaacttgcaagtacacaccgctccaccggagcgcaatctcgctctggtgttacagtttctgaactgtttgcaactgtaagacattttttagttggcatgaaccgaaatccagctaccagctcgacatactcttggctggatatgtaaccgctaaccgaattactatttttttctcatttttttatgcaaaagctttccttttttt

SEQ ID NO: 166993 - DNA, 1252 bp, Zea mays
  Clone ID: MRT4577_83876C.1
ggacaagtgacaaatgaatctgtttgaggcttgcttgaatccagattcattggatggacaagtgacaaatgacctgaagaaagctggcagccttagattttacaaaccaaaattcaaatatattttttgtgatatggatggtacgctgctcaacagtaaaagtcaagtttcagcaaggaatgcagaagctctaagggaagctaggtcaagaggagtaaacatagttattgccactggaaaggcacgtcctgctgtaatcgacgctcttagtatggtggacttatctggaaggactggtattgtttcagaatcatcacctggtgtattccttcaggggctgttggtttatggtttggaagggagacggatttataaaagaaatttggaccaagaagtatgtagagaggcactctcatattctatagagaacaagataccattagtagcatttagtcaggatcattgttattcgatgtttgaccaccctttggtcgattctctccattacatataccatgaacctaaggctaaaatagtgccatctattggtcagcttttagaaacagctgagatacagaaagtattgttccttgaaactcctgagaggatttcgtctgcactgagaccgtactgggcaaaggcgatagagggaagggcccatgttgttcaggcacagcctgatatgcttgaacttgtaccacctgcaacttcgaaaggcaatggtgtgaaggttctgttgaaccacctttccattagtccagatgaggtaatggcaattggtgacggagaaaatgacattgaaatgttgcaactagcttcgtttggggttgctcttgcaaatggatctgacaagacaaaagcagcggcaaatgtaattggcgccacgaatgatgaagatggagttgcacaggctatttatgaatatgccttctaagagcaacgaatcattttggactgggttaatttcttctgatttcccatttttcgtggactcaacacagaacaattgtagtggttccaacttgcaagtacacaccgctccaccggagcgcaatctcgctctggtgttacagtttctgaactgttagcaactgtaagacattttttagttggcatgaaccgaaatccagctaccagctctacatactcttggctggaatatgtaaccgctaaccgaattactattttttctcatttttttatgcaaaagcgttccttttttttacccaaaaaaaaaaaaaaaaaaaaaaaa

SEQ ID NO: 166994 - DNA, 287 bp, Zea mays
  Clone ID: MRT4577_83877C.1
ttgcaccggcgagacttagagaggatcctccttacccttgggatccggctcagtgcagagcaggccaagcagctggtcagcagggtggtgacccagaacatctgccagtaccggagccttcagtacagccgccaggagggcctggatggtggccttcccgaggaggtgctcttcggaaacctggacctgctgccccctcctgggaaaagcacgaagccaggtgctgcccccacagaacacaaagccttggtgtcccacaatggcagcctgattaacgtggggagcct

SEQ ID NO: 166995 - DNA, 366 bp, Zea mays
  Clone ID: MRT4577_83878C.1
aaaaaaaaaaaaaaaaaaaaaaaaaaaaaaaaaaaaaaaaaaaaaaaggaaaaaaagatataaaaaacaagaaaaaaaaaaaaataaaataaaaaataaaaaaagggggggtcgttttacgtgatcgtggttttcttccgcgtggtttgggaaaatcctttttttttagggcttgttatttttaattttttggccctttttttacattggcgtttttggaaaaacctttgtttccgcccagtttattccctttggggccattccccttttggcctgttggacttatctttggggggccctttctgttggccttttcaaagagttgccccgtttgattggctattgttaggcccctttattgggccc

SEQ ID NO: 166996 - DNA, 246 bp, Zea mays
  Clone ID: MRT4577_83879C.1
ccccccccgagaacggcgggtgaatgggagccgctcatcaaagcttacgaaaaggaccatgtctcccgtggagaggcagtgcacatcatgggtcacgatgctaactatgacattccatatcataggaagcagatgcatgatactcagcatcaggtccgccatcttgaccgaagggaggctgatcccaagcggcttgaggcgcttgcagctactagatatgtagaagcctgccaggatctcgggtta

SEQ ID NO: 166997 - DNA, 649 bp, Zea mays
  Clone ID: MRT4577_8387C.1
cattgggtacctcgaggccggccgggaccaccatccccatatagcgccactgtccagtgcgctagccaagcttgcttagctaaccgccatgacctccctcggcggcgtctccgtgaagcccggggccatcaaaggtctcgctggtagctccatctcctgaaggaagctaggcctcgccagggcgtctgaccgctgcatccctatgccccgcgcagccgccgtggtggccaagtaccgcaacaagagcgtctaattagacctcgacgacgtcggcaacaccagcggacagtgggacctctacgggtctgacgctacggtaccctacaacccggtacagagcaagttcttcgacacgttcgcggctccgtgcaccaagagaggtctgctgctcaagttcctggtgctgggcggcggctcacttatggcctacgtcagcgagtcggcatcaccggatctcctgccgatcaagaagggacctcagtatccaccgtcagatgtgcccgcgcgacaagatctaagctcaacttctccatttgcatggtctagtagcttgctttgtactgctagagccggacgatccgtcgcaatcgtcatggatcatctctctatctagctgctacgctgctcataatttggtatatttgccatt

SEQ ID NO: 166998 - DNA, 414 bp, Zea mays
  unsure (1)..(414): unsure at all n locations
  Clone ID: MRT4577_83880C.1
ttcgcagttcgactgcaagtacgttatcaaaatatgaaattcagacggatacgacaagccaaggctccgctgaaaaaatcactaaacaaataccacatctagaagaacatttactccgcaatttggacagaaatggagttgtgaggttgggatcctgggtagaaactggcgatattttagtaggtaaattaacgcctcagatagcgagcgaatcgtcgtatatcgcggaagctggattattacgggctatttttggtcttgaggtatccacttcaaaagaaacttctcttncaaacttacctataggtggaagagggcgcgttatcgatgtgaaatggatccagagggacccctttgacataatggttcgtgtatatattttacacgaacgtgaatcaaagttggggataaagt

SEQ ID NO: 166999 - DNA, 586 bp, Zea mays
  Clone ID: MRT4577_83881C.1
cctttcagaacgagggggaagcgagctagcgtcggagtcgcgtacccttggtgtcagagagtaaaaggcatcacaaggacagtaacagaaacctaataaggtcttcggcagcggcacaccatgcagcgatggacccgcaacgggatgctcgacttctcgcagccgtcggcgtcgtccccatacggcttctacaacgccggccagggagcgtcgagcagccgcggcaggtcacacggctgccggagccaggacaaggagcagcgcaatctggagaagaacctgaccaaggtgcgcaaggagtggatgaaggtgaaggaggagatggggtacgcgaggctgctgagcgagcacctcagcgagacggtgacggaggctgaccggaaggtggccgccatgctggaggagctcgaccggacggacaagtatatgcaggacatactgtcctcgtccctgcagaagtgaattagccttggtgatggatgcttttttttctgtttcgccggatgtttgcatatttttagctagctagagcttcttttgtgggacattttgccatttggtaaaaaaaaaaaaaaaaaaaaaaaaa

SEQ ID NO: 167000 - DNA, 1289 bp, Zea mays
  unsure (1)..(1289): unsure at all n locations
  Clone ID: MRT4577_83882C.1
aaaaaaaaaaaaaaaaaaaaaaaaaaaaaaaaaaaaaaaaaaaaaaaaaaaaaaaaaaaaaaaaaaaaaaaannaanaaaanaaaaaaaaaaaaaaaaaaaaaaaaaaaaaaaaaaaaaaaaaagaaaaaaaagaaaaaaaanaaaaagaggaaataataatataacatccccaacatatatttanggagcctttcgtatttcttattcttagtgtccatagcacagatatacggccatcgaagcaacgaaacgagaaggaagcaaaccagcccgaccaaggaaccgccaaggaaaccaaaaccccacaccagcccaggagccagaggaccgaaaccacaacgaaagaaaacaaaccaaacaaccgagcagaaccgaagaagcccaagaacagcccccgcccagccacggaaccaacacaacacccacaaacacagaacaccaacagaccagccagcaccagaaccgaacagacccaccaccagaacaaggacaccaagaaaccagacacgccagccccacaggccgaaacccaacatgaaagccagccaaccaagaaaggaaaagacccgaaaaccaaaaacccaagagaaccaaagagcccaaacaaaaaaagaaaaaacccgaccacgacacacaaaaaaccagaagaagccaaaccaaaaaaaaaagccaaaaccaaaaaaaaaaagaaaaaaagcccaaaagaaaaccaaccaccaaaaaaaaaaaaacaaacaagaaagaaaaaaccaagaaacaaaagaaaagaaaaaaagaaaaaagaaaaaccaaaaaacaaatcaaaaaacacaccaccaaaaaaaccaaaaccaaacaaaaaaaacaaaaaaaaacaaaacaaaaaacaaccccccaaaaacaacaacacacaccaaaaaaaaaaaaaaaaaaaaaaaaacacaaaaaaaaaaaaaaacaccaacccaaaaaaaaaaaaaaaaaaacaacccaaaaaacacacacaaaaaaacccaaaaataaaaaaaaaaaaaacacacataagcaaaaacaaaaacaaaaaaaaaaaaacaaaaaaaaaaaaaaaaaaccaaaacacaaatacacaacaacaaaacaaaaccaaaaacaaaaaaaaaaaaaaaccaaaaaagaaccaaaataaaaaaaaacaaacaaaacaaaaaaaagcaataaacacaaaaaaacaccaaaaaaacaaacaaaaaaaaaacaaaaaaacaaaaataaaaaaaaaaaaaaaagcacaaaacacgaaaaaaaaaacaataaaaacaaaaaagaaca

SEQ ID NO: 167001 - DNA, 305 bp, Zea mays
  unsure (1)..(305): unsure at all n locations
  Clone ID: MRT4577_83883C.1
ttgaggttttgttttaactctccccctttgttggcccagaaaggccaacccgggtgggccccgaacaggaaagggcccaaacgttttcgggctcgggttttcgattattggaggaggatatccttttaaagattttacttcttggtggtggtggaacagcgccnaaaattataacgccgcccggtggcggagataaaccaccgccgtcttttctgcttgggggcacgcacccgggaacgagccagtgacgcccactttctcgctcgtgtcgggactcaaccgccccgggtcgaagggtgcgggca

SEQ ID NO: 167002 - DNA, 580 bp, Zea mays
  Clone ID: MRT4577_83884C.1
cctactctgcttgctgctcttggtctacatctcttttctccctatctcggcagcggcgagggctactggccgtactcctacgctcggcttgccctttccaggggaatgcgctgttcgatgcgcaagcaggggctgtacccggtgatctacgaggacgctaaggtgtactgtatcggtgagctggtgctggtgacggggggcaccaagcacggaactcacacgggggacgtgaggtccggcaaaccacacctactacgtgggagagacctcggcgctcgggggcatggacgaggcagcatcgagaagttgccgaaggaagtggagccacatgatggagtactggctcgaggaccacaggagtggtagatgcacccagacaggaacccgcgtgtcgagcccgaagggggacaactgattgatggctacctgtcttactcacccggtgcgtggtcaccggtaccaggatacatttgggctcttgaatggaattgacactctgactgttccaattgctctatcagggggcggttcatgatcggaatggcaaatgttcaattactactggacgagatagggtctt

SEQ ID NO: 167003 - DNA, 511 bp, Zea mays
  Clone ID: MRT4577_83885C.1
gatcattaagggcagggggcaacccccattatttgaaaaagaaagaacaaggaaagggggacaggggccccacttacaagtttcttggggccagggggggacaaaaaagcctgccaacgggaattccacaaaaaaatcacagggggagggcaccgccccccaaataaaagggggaaaaaagggggaaatctacaaaaaatggaaaaaaagtgcctcgggattcccactgatcaatcacaagaaattccaaacctgggggccaggcaaaatggcggcccccggggaaaaaaacgcggagggggcaaacaaagggggaaaaaaacgggccgccatagaagacacccggggaatttgagacggttccggccggcccaaaaattttaaaaaaagggggtggaattaaaacccggggacccccagggaaaaaacgggcccccgggggaaacggataaaaaaggggaacccccccagcttacgaggggggggcccccccagcaaagcctggggggcc

SEQ ID NO: 167004 - DNA, 2281 bp, Zea mays
  Clone ID: MRT4577_83886C.1
ttaggcacgcagatccttgatgacagaatctttgctcgacaccaattgcctaagatgaaggatttcatcatgcgactcttgtagcttgtgacggtgattatccaaatctgccatggtaaaatgatggctcctctccaagatagtcaaagaattgttggcgtcgcgatacaacctatcaaggttatcgtgggaagctgcaagtgcacgtttttcttcttcattagccaccctttcagagtcaagctgagcactgagaggggaattgaacgaattggcatcatctaaagaagcagaaacccgagccaggtccatctgaccttgagaatacttctcctcgagctcagagtaccgccggaccatatcagcatttgtcatttccaaatcagatatctgcctctgaagcagcatcggattccaatgtgccagagacagagctcttcctgggacagaggcaccttgtgatctcagctgaccagccatctcatcgaccaaagcctgaagattggagaagaatgaaggaaaccccaaatcatgagaagccaggtggtggctcgacgaagggatatcgaccggggcaatttgaagagcatcatcagggatcaactcaacatcactagcaggaatcagaactctagcgtcaggtgcgctgacctctaaggcgactttctcgtttaaagcatgcattgttgccatgccatcagaatgtggaggagaagacccaacgtggacatccatggagatatgagaaggggaacccacttggacacccttggggtctgggtcgcagcccgcactgcccatcggagccggatcaccaccggcaacaccctcgggggctgggttgcagcggtaacaccctcggggctgggtaaatgcttgcaccatccttggggaccgggttctctgcaacagccacctctaaggctgaagaattctcagttacctccatgggaattgagcaaccttgaccagcttcttggctccgaggaccgcactccaaggtcgacgaggcacaagacgctacttgggataacgacaatcccacatctagaatgtcagagcaaacgtccatcataccaccatctattggctcggacagcagatcttcaggaaccacatcctcgagagcctgatcaaaatttgttatggacaactctttcagaccaacgagagcagacaaagctggagaaggaatatcactactctccccaccgactaggtagcgccgactgttcttccgaattaaggggatttcctcctcttcttcctcatcctcgtcaacaatacgaacaacacacccattgggatcagcatcgtcaaggtcacacccattggggtcagcatcagcaaggtcacacccattggggtcagcattagcagggtcacacccattggggtcagctccagtaaaaagtttcactggtacttcttcagcagcaggagcagaagggctagcatcctggtccaaacacgacactcgccgaagccgcctctttttcttcttcttcccctcggcagaagcaattggatgattggccgggcgaaggcgctttgggcgagtactatcagatttttgagcattcaaggtttttccaggttctcggatagttgcaacagctatggtttcagcagggaccgagtcagaagaatcctcagccaacatgtccagcatagcacttatctctgcatcacttgggcttataggcatctcaaagtgaacttgcctctcatcattgggaagatttcgaagagagtcaattagagcctcaatgtcctcgggagagggtcgcactctaagacccagaccgccatcactagcaggagggttggacacaaattcagaaaatgacttataaggtgacagattccacgcagaataggcaacaagagcaccaacatttgacactctacccctcgaaatcatatccagccggctcaccaaattttcagtggaaattctcttgtttgtgacccaggtagagtcattaataccactgtacagataagctggatacgctgtgtccttcaaaggctcagcaagcaacacttttgcctctgctatctccaaaggggtcggagattctacccagcttggagtacggacatctggctgtctccccgaccgagggggaagggacttgcagtgattctccacgatgaaccactcgaaacgccaccccttgatgctatcctttagagggatgtcgaggtactctgttttcctcccgcgacgcagttcaagactggcgccaccaacaagttggtgctgtcctccagccat

SEQ ID NO: 167005 - DNA, 349 bp, Zea mays
  Clone ID: MRT4577_83887C.1
ctcttcccctcctttttttttttatctccttcctatttttttttttttttttttttagggccaacttagtttaactgcattttccggccgccattaaaattttccctctgcccggggctcccccccgggatatacagcttttttgtttgcctttgccctaaccgtttttttgacacgcctcgtcactttttttccttcccccctctgcccctatttttttattttcaataaatcccacaataacaccttgtccataatgaaatttttcccatcaaaaaatcaacttcttgatgctggggggggttcccctccccctaaaatatattaacataaaggcgcgcctaaattt

SEQ ID NO: 167006 - DNA, 500 bp, Zea mays
  Clone ID: MRT4577_83888C.1
cactcctatgggcgaattgggactcacaagggcggccgggaccgccacgcctcccccgttcagcgtcaccgcgtgcgctccgtaccccgtccggccctccgacggagtgattttctggcccactaccacagcgttgccgccacgggtgaaaccgggttcggattctcgctgatgatgaacatgaggttcgccgtgatcgtgatatggcgtctcgactgccacttctgcgggaagtgatcttggttgccttcttccaccccggcttctcgtcgatcgttaggatctcttccactgtgatcgtgttcctgctcacaccagtgtagtctatgaggggagagctgacactctgcgactggtcctccgttttcttgatttgctgctgtagtgtgatatagctcacggattgacggctactgaacaagactggcactgcccaggtgagtgatgcacagcgactcgactgactgagctaccgctgctatagcagcactgtcctccag

SEQ ID NO: 167007 - DNA, 247 bp, Zea mays
  Clone ID: MRT4577_83889C.1
cccacgcgtccgtgctgtgattcaatctgggctttgttgtcacctgtcataaaaactaagcattgatgttgtcttatcagatatatctattgttgggaagtgtttgcaatctgaaattatgtgaagtagggattgtgttggggggcaacattttgttttcgggtggacacacatttgtttttgtttgtcagtagccttttctttctatgattgtagtaaaccattaaatctctcatctgctagtcta

SEQ ID NO: 167008 - DNA, 890 bp, Zea mays
  Clone ID: MRT4577_8388C.1
caacaatataaactcaatatcttactaaattaaagagattaaacagtttgggcttaattgggccgtgccggcccaagcccggcccatctatgcgtgccgtgctgggggcccgacgggctcggaatttgaggcccggcccaggcccgccttcgggccgtgctagcccggcccatattatttcgtgccgggccgtgctttgggctcttattttcgggccgtgctcgtgctggcccgaaaagcccggcccagattcgcagcactacacaggtatatatgtctgcgttttcaaaactaattaaccctccagttctagccagcttcctgtgtaaatgacacacattctactgttcttgcctgccgcgcgcgcagcttgaggtcacatacttcaaccatggaggcatccttccctacatggtccgcaacctggcagcacagatgaaataagttaaaaagcaagctagcttattggcgcggtgggaataaattaaaaaggtactcagtgccccacgtatttgacgtatgtctgtaaataagtggcacattcgagcgctcttcgctctgccattgaggtggatcgaagctgccacatattttctccgcaggacatcggcacgaattttgtcttagcaaaccagttaattttgtactctttagattctttaattggttccatgctctctttggtacttttcatgtcagtttgctttgcaaacattatcagcgtgcccttgtagatttcgtaatggttatatgtatatgccctattgaaaaaaaaaaaaaaaaatgcaaaaaacgatcagcgtgccgttgtagattttccaaatgtatatgtctgccgtcaaactctctcgtgaatatgtttggttacaataatggaacaggacggaatg

SEQ ID NO: 167009 - DNA, 1398 bp, Zea mays
  Clone ID: MRT4577_83890C.1
cggacgggtacatcctgagcctgcaaaggatcccgagtggcgggcgtggcgggcacggcggcggtgccggtgccggtgcctcgtcctcgcgcgcggggcagccggtgctcctgcagcacggggtcctcgtggacagcaggacggcatgtcatggttgctggcctcgccggaggagtcgctgccgttcatcctcgccgaccgcggcttcgacgtctggatcgccaacaacaggggcacgcgctggagccgccgccacgtctcgctcgacccctccagccgggggacgctggtggcgctggcggccttctcggagggccgggtggtgagccagctgaaatccgcggcgctgctcacgccggtggcctacctcgcccacatcaccacccccatcggcatcctgctggccaaggcgttcgtcggcgagtcactcacaggtgctctcggacttcctcggcatggccgagttcgacccgctagcgtacgtaacgtaccgcgctctcgtacaccccccactgcagatggatgcaggcatgcagctgagctgagctgacctgacctgacctgacctgacctgctctgctcgccgcgcaggccgccggtgacgaacctcatcagggcgttctgccgccgcccgggcatgagctgctacgacctcgtcggctccatcaccggcaagaactactgcctcaacagctccgccgtcgacgtcttcctcaagtacgagccccagccgacctccaccaaaaccatggtccacttcgctcaaaccgtgcgcgacggcgtgctgaccaagtacgactacgtgctgccggagcggaacatcgccagctacggccaggccgagccgccggtgtaccggatgtccggcatcccgccgagcttcccgctcttcctcagctacggcggccgggactcgctcgccgaccccgccgacgtgcgcctcctcctgcaggacctccggggccacgaccaggacaagctcacggtgcagtacctggacaagttcgcgcacctcgacttcatcatcggcgtctgcgccaaggactacgtctacaaggacatgatcgacttcctaaaccgcttcaactagtactagcatatatatttgcttcaatcggtgtcgtcttcagccccagcaggattagacaaaaaaagggggggacactgcagctcgtaaacgttgtccatacagattatcagaggtgaaaaccatacatgatgtaatttagcattagatagttaaaacatggagctgcctcagtatggaggattgtcaactactctccatcacagcagtaggtgtgatgtagaagagtgattcccgtcacactgtgtgtgttgcaaatttgcaacacagtgattactaatataaaaaatactcttgagttaacctttgac

SEQ ID NO: 167010 - DNA, 558 bp, Zea mays
  Clone ID: MRT4577_83891C.1
cccacgcgtccggccagaagcctcactacgtcggacactccatggggacgctggtggcgctggcggccttctcggagggccgggtggtgagccagctgaaatccgcggcgctgctcacgccggtggcctacctcgcccacatcaccacccccatcggcatcctgctggccaaggcgttcgtcggcgaggtgctctcggacttcctcggcatggccgagttcgacccgctagcgccgccggtgacgaacctcatcagggcgttctgccgccgcccgggcatgagctgctacgacctcgtcggctccatcaccggcaagaactactgcctcaacagctccgccgtcgacgtcttcctcaagtacgagccccagccgacctccaccaaaaccatggtccacttcgctcaaaccgtgcgcgacggcgtgctgaccaagtacgactacgtgctgccggagcggaacatcgccagctacggccaggccgagccgccggtgtaccggatgtccggcatcccgccgagctttccgctcttcctcagctacggggggcgggactcgc

SEQ ID NO: 167011 - DNA, 154 bp, Zea mays
  unsure (1)..(154): unsure at all n locations
  Clone ID: MRT4577_83892C.1
nccacgcgtaccggagaacagttccccttttctggatcggcctggtccttacagcaggggccattgggggcgagcccgagaagcaagcgggccccgggggacaagaaaccggcgggcacatcgggtacgttgaccggcccgagggcgccgaccc

SEQ ID NO: 167012 - DNA, 139 bp, Zea mays
  unsure (1)..(139): unsure at all n locations
  Clone ID: MRT4577_83893C.1
ccgtccccctagagaggagagaggggggtcgtcgcgatctgcagtgangttgctgagtatgtgacgctattgtgtgagactggtgtctgcgatgttgaatcaaggagatgggggcttacgtcgtgtcganncntngana

SEQ ID NO: 167013 - DNA, 1550 bp, Zea mays
  Clone ID: MRT4577_83894C.1
gggcactgctgccgtcgcgctggcgctgctgttcttgtcgtcgtcgacgaccctgcgcctcgccgtcgtcgtcggagcccgcgtcatccaccagccgtacggcggcggcggaggtggtggaccatgcgcgctggccgtggcgccgctcggctacccctgcgaggagcaccaggacggcatgtcatggctgctggcctctccggaggagtcgctgccgttcatcctcgccgaccgcggcttcgacgtctggatcgccaacaaccggggcacccgctggagccgccgccacgtctcgctcgacccctcaagccggctctactggaactggtcctgggatgacctggtggtcaacgacttgccggccatggttgacttcgtcaacacacagaccgggcagaagcctcactacatcggacactccatggggacgctggtggcgctggcggccttctcggagggccgggtggtggaccagctgaaatccgcggcgctgctcacgccggtggcctacctcgcccacatcaccacccccatcggcatcctgctagccaaggccttcgtcggcgaggcgctctcggacctcctcggcgtcgccgagttcgacccggtagcgtacgtacggcgtcctcgggctcgcatctccaggctgcagtccctgcactgcagatcgattcagattattcatctctccgtttttggatcactcgattcgtgtgttgtgatcagctgacctgctgctctgctgactgcgcaggccgccggtgacgaacctgatcagggcgttctgccgccggccaggcatgaactgctacgaccttctcggatccatcaccggcaagaactactgccttaacagctccgccgtcgacgtcttcctcaagtacgagccccagccgacctccaccaaaaccatggtccacttcgctcaaaccgtgcgcgacggcgtgctgaccaagtacgactacgtgctgccggagcgaaacatcgcgagctacggccaggccgagccgccggtgtacgagatgtccggcatcccggcgggcttcccgctcttcctcagctacggcggccgggactcgctcgccgaccccgccgacgtgcgcctcctgctgcaggacctccggggccacgaccgcgacaagctcacggtgcagtacctggaccagttcgcgcacctcgacttcatcatcggcgtctgcgccaaggactacgtctacaaggacatgatcgccttcctcaaccgcttcaactagtagtagctatagctactagttcagtgactgccatcttcagtcttccactcactgcagggcgtgaacattggtcatacatatgtcagaagtgaaaaatatacatgaagtaatttaatactactagattactagatagttatattgatatggatttgtctgagcaaggaagctagctagatagccagctaggtgtcatggagaagggtgatcaccggaacagcggtcagcccagccagtcgtcacactgtatttgcaatttgtaacactgaacaattactaaaggaaaggcagtagctc

SEQ ID NO: 167014 - DNA, 2543 bp, Zea mays
  Clone ID: MRT4577_83895C.1
aggccgtcactcactcgaccaatccaccggccaatacgcggtgcgaacgctctcggcgagcgacggggcgccgcctctcgccgggggcggctcacggctaccggctgctgccacccgcgcccgtctctcttccatagtttcacctcgttcgcctggctataaatacccgcatcccgttgctctcgcggcccctccatccctcccgacggcatccccttcccctgccactcgcctccgctccgcgcagattagtattttaaactcaagatggttaacttcgggaagaaattgatggctgatcaaattccagaatggaaaggatattatatcaattacaagttgatgaagaagaaagttaaacagtatggccagcagctccagcagggcgagaaagatcgtcgccgggttctgaaggatttctcgaagatgcttgatgatcagatagagaagattgtgctgtttctgttggaacagcaaggaatgttggcaagcaggattgaggagttaggaaagcaaagggcaatactacaagaccagccagatatatctggtattgctgagttacgagaagcttatagggaagttggtattgacctcatcaaactccttaaattcgttgatcttaatgcaactggcattcggaaaattttgaagaagtttgacaagcgtttcggctatagatttactgattactatgtgacaagtagatcaaatcacccgtactctcagctgcaacaggtctttaagcatgtgggtgtaggagctgttgtaggagctttgtcacgtaaccttgctgaacttcaagaacgtcaaggaagctacttatctatttatgatcagccatcttctgctcttaaggaccccatcattgatatgataaactcctcagttgataagttgacaaggtcaactaattttcttcgctttttggggcaacatgccttgattgtggatgaggagtctcctagtactgcaggagaggaagaaatagaagatcagaaataccatttcatgtcccttatgctgaacctggtgaacacattcctttacatggtcaacacatacatcattgtgccaactgcagatgactattcagatgggttctgcaagagctgtcaatcgccggtacattagtgattgtgtccctgcaagaatacgcatgcaagcttcggcaggattcgttagcgcaagtgcacttggcatggcctgtgggccagcgctagctggtttacttcaatggaaattcaagatctacatggttactttcaatcaatcgactctacctggttgggtgatggcagttgcgtggctattgtatttgatttggctatgggtctcattcaaagaaccgaaccgtgctactgaggtgaatgaagccccacaaaatcctgcttctggacaaacggttgatattggacaagtagagaacggacttgcacagcctctgctcatggattccgtagataaacaaaatgaagatgaagatgaagaagttgatgaaagtgaagaagctgcagatgattcacgcaagcctgcaacatcaattggctcagcatacagactgcttactccatcagtaaaggtccagttgttgatatacttcatgctgaaatacgcaatggagattttgctttcagagtctagtgttatcactaatcactatttcagttggaacacaagcgcagtggcaatttttctagcaatccttgggttgacggtgcttcctgttaatgctgttgttggaacatacatcagcaatatgtttgaggacaggcaactgctcatggtctctcaaattacgttgctagtaggcattatcttcagcttcaaggttacgagtacatactctgttgtccagtatgttgtctcagcacttgtcacatttgtttctgcagaagttcttgaaggtgtgaacctttccctcctatcaagcgtgatgtcatctcgcctctcccgtggcacatacaacggtggcctcctctcgacggaggccgggaccctggcgagggtggtcgccgactgcaccatcactgcggcggggtacctgggcgtggggaagctcctcaacgtcaccctgctaccatcgctggtgatatgtgttgcgtccatcgcctgcaccttcctgacgtacaactcgcttttctgatggagcttcgcgacgtatttgtgtcgtcatgattcgttccaaatcaaggcagctgggagaccgccgttgccattgcccgaaggggctgttgtgttattatattatatatgtgcgtcgatttgattgctgtaaattgacaaaatgatggcagccactggccttgccctgcaaaattttgatcgcttatgtccgtgacgttgtcaatgctatgttgtgttgacgtgttggtccaaactgtaattatgctactctcgactgatctgatctccgctgcgatgcggttttgagagtggagtcgtacgagagtggatctgcgtttttgtccattgggcttgattggatttatgtgataaatagtttgtcggcaaaaaaaaaaaaaaaaaaggcccctagggcc

SEQ ID NO: 167015 - DNA, 575 bp, Zea mays
  Clone ID: MRT4577_83896C.1
gtctctcttatccccacagctccatcctcccctacttgctcgtcgaccgccagcccgtgcgacccgatggtcatggacccagacgcgccgcagacagccttcatggactagctattaccgacactctccacctcaccgtctcgcgctgacggagatgaatctcgacacctccatgttcaccttcgaatctcgagaagtctatcgcccatccgccattgacgctcacgtcgccatctcttcccttccaggaactgtcgaccaccaggattgtaccccgtgcgacctgccaccgcgtcagggcgccccgagcggaggacatgcgtcggtctatcgctcgtcacgccgtcacatccatcatcgaagcgcacgcacagtagcacgcactatcaaactactcccattgatttcgatttgctgccacacccctgctgccttcttcatgcccaacgacatgatccacctgaactatgacaactacacaacccatgactcttgtgatcgacgaatctctgttaatggtattcatgcatgagaacatccatcacctcactgtcaccgctactctcccctccttt

SEQ ID NO: 167016 - DNA, 2067 bp, Zea mays
  Clone ID: MRT4577_83897C.1
ctgcaaataatgctgactcgaataatttacttgctactcctcacttcatttaattttttgtctaagaatctccccccagccggactcctaccatgacaaaccagaatatgcccccggaaacacctatcatttggcttaattttagtcctgctctgcggcgttttgatcgtcctctactacgacaattaggcaaaagtcaggctattttgcaatgggattatcatcaaactgctgacgaacccaattgtctaacagtgggattagatttaatcggagaatacctggaaaattttcaccaacctgtccatttaattggtcatagcaccagtggattgttagctttattgtacgcccgacaatgtcccgaaaaagtccgttccctctccctactctccgttggtgtatatcctgccctcgactggcaagcccattattacagccaatttgatgccatgcgttacagccgtcatttgctccttggtcaaatggcccaccatctatttaattgtcgttccctacgtcaaacccaaaccattgttaatattttggaaaatgatcgacaattgggggctagtgcagatgtaaattgcccattatgtagtactgataagttatgggggaaaggggatgttgaaccgtttttgggtatggtttaagttggtttcacggcattcaatcatgcggtggtttttggttaagttaggttttcttaaaaagtctgagttaactagtcggatggtgaattttcatcctgcaccagaggagattatgtcgggggaagtggtaattgttggtgacagaaatcacaaaaaatgggcttgttttcgttgtccgagtggttgtggtgaactgattttactgtctcttaataaaaaccagcatccttcatggcgcgttgattgtgattggttaaatcgtccaacattacatccttcggttcgacagttaaaccattgtcaatgtcacttctggattaagcgaggtgtcactcagtggtgtgctgattctcggcataataaataatactcaaattttgaggttaagaaaattgaaatggtgttaccgactttaaatttttccatattaatatttgaattttgaatttctcaccaattgattcaaatgagtttatttcaaaccaactaaatgaatagtttcctgcaatagtaatcctttcaaaatatcaaaccccatgcctacgcctttatcctgcattgtttttataactttattccagactgtaggattcttactggcttcgagaaattcatgcccttcccatgttaaagatttgacaaagtattggggagtttcccccatagtttgaactggtttatttcccatgatttcaataagtccagcttcatgagcaagcttgagatggtaaactaactctgcatcttcatatccttgaataccaagttcggaagaagaaaaaggttcataaaaagtatttttttcttctacagcaagcaaaattttcttgattaattccatatctcttttcatattctagtcctcaagatcgcccggggcaggtaaatcatatttttttggacttgaaaatcaacctggaggaacggcatttacagggagtttgtcgcatcgccctcacgccggtgcgagctggcattgagcaattgacgttggacgcagtggacttgaaaattgcctgggtcttaattaagggggtgagccaaagctttgactatgacggggaaaaattaaccatcaacccattgcaacccctgggaacggaaccggtcaccctggaaattcagtacgaattgaaaaatccccgccggggcatttattttatccagcccgatcgccattaccccgataagccggtgcaagtgtggacccagggggaagatgaagattcccgctattggttcccctgttttgattacccaggacaattggccacatcggaaattcgggtgcaggtagccaaaccccatcgggttatttccaacggcagtttaattgagcaaaaagatttaggcaatgagcaaattttccactggtcccaaagtcaaattcaccctacctatttaatgaccc

SEQ ID NO: 167017 - DNA, 382 bp, Zea mays
  Clone ID: MRT4577_83898C.1
tcatcaaattcatcactctcagcttctggtttaaagcttaggaactctaccccggcatcggtctcctctacaaagctcgctcaaatgctctcaacctattccctcgaacaccataccctgtttttctcaccccccataatacatactccctttactagcctgtactcttaactaaaagcattcactcataatcattgcacaccgctacattagcaccactaacttcttaataccatcactataccctttcataatacaccgacccattctactactctaattaacatcccttctcctttcatcagtagtgcaaaactaacctctctcactacaatataaacccatctcaaacaccctatattgttaccaaccattcaccact

SEQ ID NO: 167018 - DNA, 210 bp, Zea mays
  Clone ID: MRT4577_83899C.1
actattctcgacgtctaagtacgcgtcgccgcttttgtttttcggctgacggaggtgactttgtgcaatgagctacacaggctgacacaggatgcagactggtacttgctaaatgagatttgtggaccgtcaccctgctgattcgatttaaaaaaataaaggattctatatttctagtgtattaaaaaactttctaaggtgttatgtatg

SEQ ID NO: 167019 - DNA, 2257 bp, Zea mays
  Clone ID: MRT4577_8389C.1
ccacgcgtccgaagcaaagttgtatatattgcattaaatgtgattcaggtgtcgatgattgaagcatacctgcgagctaacaaaatgtttgtggacaagcatgagcctgagacggaacgagttttctcttcatatctggagctggaccttagtgaggtggagccttgcgtttcaggccccaaaaggcctcatgatcgtgtccctttgaaggaaatgaagtcagactggcatgcttgcctggacaacgaagttggtttcaagggctatgcggtgccaaaggaacagcaaggcaaagttgtgaaattcgacttccatggaaggccagctgaaatcaagcatggcagtgttgttcttgcagcaatatgtagctccacaaacacatcaaatcccagcgtcatgattggtgctggccttgtggcaaagaaagcctgcgaattaggccttgaggtgaagccatgggtaaagacaagccttacccctggatctgtggttgctaccgagtacttgaaacatagtggccttcaagattatctgaaccagcaagggttccatgtcgctgcgcatggttgcgccacttgtgtgggcaactccggtgacctggatggatctgtatcagctgctatcacagaaaatgatatcgttgctgctgcggtgctgtcggccaaccgaaacttcgaggggcgtgtgaaccctctcactcgggctaactaccttgcctcgccgcctctggttgttgcctatgctcttgccggcactgttgacattggttttgaggaagagcccattggagttggaaagggtggcaaggaaattttcttgagggacatatggccttcaaaccaagagatcgatgaggttgtggagtccagcgtgcagactcacttgttcaagaaagtgtacgactccatcatggaacgtaaccctaggtggaaccagctgccggttccaaaggaggcactgtacccatgggacgacaggtccacctacatccgcaagcccacttacctggagggcatgtccatgacgccgcctggcccgcccacggtgacggaggcctactgcctgctcaaccttggagacagcatcaccacggaccacatctcctactcggggaagatccccgagggcacacctgcggccaagtatctgctcgagtatggtgtggagcccaagaacttcagctcctatggtggccgccgcgggaacaatgaggtggtgatgaggggagcgtttgccaatatgaggatcgtgaataagcttcttaatggcgaggctggtccctggacgatccatgttcctaccggggagaagctctacgtttacgacgcggcaatgaaatacaagtcggaaggtcatgacatggtcatcattgctggctccgagtacggcagtggcagctctcgtgactctgctgccaagggaccaatgctactgggtgtcaagtcggtgattgcaaagagcttcgagcggatccaccggagcaacttggtggggatggggatcattcctctctgctttaaagcaggagaggatgccgattcactcggcctcaccggacgtgagcgctacaccatccacctccctaccagcaccgccgagctcagtccaggccaggacgtgaccgtcacaacccacgacggcagatccttcacttgcactcttcgcttggacacacagcttgaggtcacatacttcaaccatggaggcatccttccctacatggtccgcaacctggcagcacagatgaaataagttaaaaaagcaagctagcttattggtgcggtgggaataaattaaaaaggtactcagtgccccacgtatttgacgtatgtctgtaaataagtggcacattcgagcgctcttcgctctgccattgaggtggatcgaagctgccacatattttctccgcaggacatcggcacgaattttgtcttagcaaaccagttaattttgtactctttagattctttaattggttccatgctctctttggtacttttcatgtcagtttgctttgcaaacattatcagcgtgcccttgtagatttcgtaatggttatatgtatatgccctattgaaattgtcattttgctttgcaaaaaaatatcagcgtgccgttgtagattttcaaatgtatatgtctgccgtcaaactctctcgtgaatatgtttggttacaataatggaacaggacggaatgaaaaaaaaaaaaaaaaaaaaaaactcgagactagctcgtgccgctcgtgccgctcgtgc

SEQ ID NO: 167020 - DNA, 107 bp, Zea mays
  Clone ID: MRT4577_838C.1
ctgttcctgtccctgctcctaaccaatcccacgagcttcctgccgactacctgggctgcccgcattctgcgagtactgcctcgcctcgatctgggcggtcattgggt

SEQ ID NO: 167021 - DNA, 852 bp, Zea mays
  unsure (1)..(852): unsure at all n locations
  Clone ID: MRT4577_83900C.1
cgggcgggagggtcgagtcgggtagcagcagctctacgaatgctgcagcgagctagcttgtctcgacttctctactcccccgatcacgcgtgtaatttttaagaccatggaccgccacagtcttctctaccaatccctgatcttctccgtagtcaccatagcgctgatccgcgtcctgaagctcttcctgacgacaagagcgcctaaggtgaggctcccgccggggccggggaagctgccggtcatcgggagcatgcaccacctcatgaacgcgctcccgcatcgcgcgctacgggacctcgcccgcgtccacggcccgctcatgatgctgcagctaggcgggacgccactggtggtcgtgtcgtccaaggagatggcgcgcaaggtgctcaagacgcacgacgccaacttcgccaaccgcgccaggctcctgggcggcgacatcgtgctctacggctggtcggacatagtcttctcgccgaccggggaatactggcgcaagctccggcagctttgtatcgccgagatcctcggcccaaagcgtgtgctcaccttccgccacataagggaacaagagatggcggctgaggtggcaaggatacgagcggccgggccatccacgccggtggaactcaacgcaatgttcatcaacttggccaacaccatcgtcgcccgtgcatcgttcggcaatgtgcaggggaacgccgaaaacttcctgtcggcaatcagtgctggcgttgtcttgacgagcggttcacggtccccgacctcttcccgacctggagaccgntgctcgccgcagtgaccggcatgcgccatgccctcgagcaggtccacaggacggtggacaca

SEQ ID NO: 167022 - DNA, 154 bp, Zea mays
  Clone ID: MRT4577_83901C.1
gagtatcgagctatgcgacacgggacttaactccgaaccggacaacgctgacttcggagccttctctatatcgggacctattatacgctcgcagggacagcgccataactgctgcctgggtagactggctgtctggtcatagctgcacgcatca

SEQ ID NO: 167023 - DNA, 395 bp, Zea mays
  Clone ID: MRT4577_83902C.1
gaaacaactgcactgtttaacataactaggaggtaccagtatccaaaaaaacaacctgggtacctacctaagttatactcattaaacgactaacaaccaattattgttcaaacacttcaacgtacttgaacccacagccaagtttaaaaacagaaacgttctgcaaatagcacactgatcgtgtggcttacgaactttataatcatgaattgttcatgaactgattgaaactaaccacatactggaggctatgaatttcttacaccatgctttttaaatcctttattttctactaagacataccaaagatatgattccatcttcatattttccaaatacttacaacaaattatgtcgcgattgcttctgatcttcaaggaaatctaaatgatctt

SEQ ID NO: 167024 - DNA, 1068 bp, Zea mays
  Clone ID: MRT4577_83903C.1
ccggccgggtcgcgcgccacgttcgcaattacagagatctagagagagagatagagggcagatctacgctagagcgacagagccacaaccaaccgagagggacagtccagtatggtggtggcgctcgggcccggccggttctacggcagcggcctgccgaggccgcgcttcttcccgggcgaccgcgtggacccgccggcgtccgtcaccgacccgctgctcgagtgggcgcgcgaagcgcactggtccatgggcggcatcagcgtgaagcgcctccgcctgcagggccgcatcgagggctccgtcgacaagctccgccgccgcgcgcaccgcgatgccagggtcaaggccaaggccaaggcccgcgccgctggccacatgccggcttcgctcgccgcgcttgggtccgacgacgacgcctccagcggcgactccgaggacgagcaggaggtggcggcgcgggagcgggccctgaagcgtgagcttgtcgacgacgacgaggactccgacgggtccggcgagtcggaggaggacgagcccctcgcggccatcgtcaccgccgccaagaagaggcgcgcgaggaagctcagcgacgagttcgaccgcatcgccgcggagcagcagcagcagctggtgttggagagcaagcagaagccgggtgccgcgacgccggcgacgacgtcaacaaagaggaaggctaccgtgccgagggcttcgccaaagaggaaggcttctgtacccgctgctggggcgccggcgagggcgtcgccaaagaggaaggctgctgcaacagccgcggcgcccttgtcggcggctgggtcaaggaggacctcgccgaggaataagcactgagtggtggtcgccgtatgtgctgctctagttcctgatctgtttcttggcgatcgtggagtcctgaaaatgtattgtgtggttgggtgtctactgctggattgaaacgatgatgaaatggaatcgaattgatggttatatctgaaatgggagtcgaattgatggatatctttgtgtaatcctttgaattttatgaacatattgcattttgggactgtc

SEQ ID NO: 167025 - DNA, 208 bp, Zea mays
  Clone ID: MRT4577_83904C.1
gtcgctttcagtcctggaccccgcatgccggaatttgatctgacgccgttctttttgcagacacgttgccgttatcagtatgagcgggtgcggcccgaaccgtgacgctctcgattttcaagggtctcgcatgtgcgcaccatacaccgcgcgatgctccgcgctagtccgggctgtgtaccctacatcgggcagaaacaagatcgag

SEQ ID NO: 167026 - DNA, 740 bp, Zea mays
  Clone ID: MRT4577_83905C.1
gggcccaccctaattcttgtcctgcgtccgccactgctagggattatcatcagcacgcttgtacacccctgcatacagttcagacatgcccgcattgccccgtagggtcggtcagccttggtcacgggagacctcagcataggattctcaacagtggctcgcatatcggaaaagacgtgacatcacacctagtaataactttattaatgtgctccagcgtggaaagccacgatgacatccgccttgagcatacccaggctttgacgatttgacacgggtcaaccaagttcgtgacctatttttctgagttcgatgacctaagtgacacagcatgccaagttcgagaacaacagatacattttactctttggtgagtatctctggccccacatatatataagtatatgtatttgaattgccatatatatataatctagtgtttcgatctcctcatataatctagtgtttcgatctcctccaattcgttatgatggatatgcaagtatatactagattagtattaaagtgttgcttgttcgtccggcccttggtgcagcaccaccaactgtgacaagagctgtatgcctgactgctagccatacatagggtacgtacgtactgcgagtgcgggcgtacgttccatctgccataccatctttcagttaggacggacggacgacgaacagctagctgctagcgccatctttcagttgcagttgagttgcagcagctgccaccag

SEQ ID NO: 167027 - DNA, 191 bp, Zea mays
  Clone ID: MRT4577_83906C.1
acggcagtccatttgctgctagaggctccggttaccttctctcggatgcggctcacgtccctgtacaggttcaacgtggcgctgggcgtctgacctcaacaagcaagaaagcacatggcaagcggcaaggttgcacatgccaccctcaagggcccgagtgaggctgaatgagatcttcattggactgaccc

SEQ ID NO: 167028 - DNA, 421 bp, Zea mays
  Clone ID: MRT4577_83907C.1
gccagccaagattcaggttggagtcttctttgctaccatgccccctgatgccctcgaggtgtaggcgcaagttcatgatcgagccagtgagaattcttgtgaagagagatgagctgactctagagggtatgaagcagatctatgtgaatgagtatatggaagactgcaagctgcacacactgtgtgacctgttcgagactcttgtcataacccacagtgtgatgtatgctaacaccaggagtaaggtggactggctcactgacaagatgaagagcagggaccatactgtttctgacagtcatggagacatggaccagaccactacagacatcatcatgagggaattccggtctggcttcctccgagtgctcatcaccaacgaactggttgcttgtggtattgatggtcaacaaggggtccc

SEQ ID NO: 167029 - DNA, 1131 bp, Zea mays
  Clone ID: MRT4577_83908C.1
ccggccgggctgccgcccgccttggccgcgcccgtctgccgctttcccttccactttcgtcgccggttctacgcgtgcgaagtcaccgggtcaacagcggcacctaccccgcgtcccctcctccttctacctccaaaacccaagtaggcttgccctcgcggtcgcagctagcgaaccctaatggagatcgctgaggccctgcaggcctacacgggcctcacacccgcggccgccgccaccatcctcgccctcatggtggccacctacctcctcgtctctcccctcttcgtcgcccccgcccccgcccccgcgcccgcgccgcttcccaagccgccccagcagcagcgcgagggggagaaggcacaggaggaggaggaggaggaggaaccgatgcctttcgtgtatccggaccccgtggaggtgggcgagctcacgctcgagcagctcagtgcgtacgacggcaaggacccagccaagcagatcctcattgccatccggggccaggtctacgacgtctcccgcgggaggctcttttatggccctcagggaccatattccttgtttgccgggagggatgcaacccgggccctggcattgatgtcatttgacccgaacgacctcaccggggatctggacggcctaagcgccgatgagctggaggtgttgcaagattgggaggaaaaattcaaggagaggtatccgagggtgggccaccttgcctgtcaagacgcgacagacagtggtcagaccaccgctgggcttcatcacgaggaaggggacgcctaaaactccactggtttgcctcgtcgtcctctcctctgtgttttttttttttacttgctggatttcaccctgtagatctgatgtgcgcacttgtgggtgacgcagctgtcgtcgtcgtttgctgtatatgtatgtacgtgtgcctactgactaatgcacgcacctgctgtcccatttcttttggatctgtagcggctataaggaaattttgagcctaaaaaaaactggaggctttaggaacagcccatgttcgactcttggttgtatacgcgtgatttgtgtcatgatttgtggctttgctgttcatcaaaaaaatgaaaaaaggtcggccgtcgcgatctaaactag

SEQ ID NO: 167030 - DNA, 352 bp, Zea mays
  Clone ID: MRT4577_83909C.1
ctgaaaccaactaataccaacaacaaccctgcatgctcatcctcacctagctcagacgcggggggggccaccaccaccgtaggctggcttccaacccttcccatcgcttgtagctcccatcccttgctctaaccgacgtcacccctgggaccgagctcctgcttctcctgccatgaacacgctcccttgctctcaaggcttccatgacgcactcttacgtacactcatttaactgaagctgaagctcgccaccgctccattcgatgaagatgttcttgccatgcgaccgcaaccctgagccgacctgcaggcaggcccagaaccccgccaaggctccagccgctcatgccca

SEQ ID NO: 167031 - DNA, 406 bp, Zea mays
  Clone ID: MRT4577_8390C.1
aaaaaatcacattctcttgctattaaagtttttttatggaacactgattccaccaagcgggctaagcaatatggggggagggcacaaaaaacaaaactgacatgccctcaaaagccaaaacctacactatggtatcacatttcaacgcgtcttgcacatgaaccctgcttattagactctgtctgaataccaacggcggaactaaccatgtatgtcaagcacagttgtctggaatgatgaacgtgcacaccaaacctactagaaaggattacaaaaacaaaagcatgttgcatgactccacaagttcgccattcaaagcgtctaacgctaactcagattgctccagcacttaagaatcctgaattagtgataataacaaattgctaggaaactggataaaaaacca

SEQ ID NO: 167032 - DNA, 424 bp, Zea mays
  Clone ID: MRT4577_83910C.1
acaatgaacattctgacatccattgcatgataccgatagaaggctcatcataaatctaaccgtatggcacaaaagactcacgtttctgacatgcgagtgtgggacacgatgcaaccctggctaactcggctaacatgactaggcagatcccgacttggcgtagaaccttacaggaacagtcaggcccaggattgccagggggaccaaaaactggaggagcttgatgacgaactgcggggttttattctggttgtagtgcgggtgcttgcggggcgcgtacttgaccctactggggaatctggccgcatggaatctcaccgacgaggtactcgtccatgattgcacggcccggggagccgtggcccacatgttcgaaatgatccgtagcattcttggcagtggaagacagcatgacatgatcacc

SEQ ID NO: 167033 - DNA, 721 bp, Zea mays
  Clone ID: MRT4577_83911C.1
gccggccgggccgggaccgtatttgttctaggctcttctctatcctctccacacctttcttcttcgtgcacgcctaggagcaagctgctgccctctccctggccagccctctcccatggccgccccctccctcagcttcgtcttcagccgccgtcgaaccagggcgagcaccccacgcccgtcgccactcccatcccctccccctctctgctgatggtcacgcgccctagcatccgctcgcccctgcgcgcactcctcccccatggcgagctcgccctcaactccctaccatggtgctcgcccaggctcgccggcatccatggccgcagttccctagatgctgccagctctggctccctagacgccgccagctctggctcgccggtctccgggctcgttggagatggcatattacctccaagacctacaacctagtgctcctcgacgtcgacagtcacgaccgcttcctcaagtccgtttgctgcaagcacgacgaggtgctgctcatcatcaaggtctacttcaagcgcaccggagcagagtggaggctggagaggattaggaacactttcaagggggatcgagggatcccacatgtggccctttcagatgaggattctatgcttagggcttaccgtcctgattctgattctaggggtggagggtgtagcttcagaaaaaaggatgggcgacatttttccaatgcacaattgcatgttct

SEQ ID NO: 167034 - DNA, 1869 bp, Zea mays
  unsure (1)..(1869): unsure at all n locations
  Clone ID: MRT4577_83912C.1
nnnnnnaantttnnaaaaaaagaaaaaaaaaaaaaaaaaagagacccttgccaattgccagcaacccatccatactttcagctgttgatacaaaaagagaagagagaagggcggagccaaacccagagttgagtgatcttattactcaaacaaagaagaaaaatatagggccaaagttcaccgaaaccttccccggggaggacacggcctacccttacagcgccttcatcacctccgtcgggaaagacgtgatcaaatactgcaccaaccatacaggcatcgtccagcccgtgctgccgctggagaagaatgtccccgagttctggttctacaccgagctcaaaacgaaaaccaggtccatcacgctcgccatacgtatggacaacctctacctggtcggtttcaggacccccggcggggtgtggtgggagttcggcaaggacggcgacacccacctcctcgacgacaacgccaagtggttcggttttgggggccggtaccaggacctcatcggtagtaagggcctcgacaggggctgctactctgcagccgctggaccccaatcaggacgtcctttctcttagagaggcccgaagccagaagaggaaggctgctagtccaacgcctccggaggacgacttggatcaggagatccaaaacctggagatccttcagcaacaggtgcaacgcaagaaggagaagacggctcgtctagccgaccttcagaggcagatagacgaagcttccgaagaggctacaccatggccccagtcttacaagccaccccagctccccatgtttgacggtcatacagacccgaagcaattcttgatgagctacgaggcaaccatatcttcgtatggtggcaacactgcagtcatggcaaagtcctttgtcatggccgtcaagagcgtcgctcagacctggtactcctctctccggccagggacaatcacctcttggcagaagctgatggatatgctgataaccagcttccaagggtttcagacgaagccagtcactgctcaagctttattccagtgtacccaggaccacgaagaatacctccaggcgtacgtccgaaggtttctgcgcctgagggcacaagcgccaacagtgcccaacgaaattgtcattgaggccatgattaaggggcttcggccgggaccttcagcgcagtactttgccaggaagccaccacaaacgttggagaagctgctccagaagatggacgagtacatccgggccgacaatgacttccgccaaagaagggaggaggcattcaggttctctgaaatgaccaggggcttcggaggaagatttcacccgaggcacgtcaggtcaattcacaactccgctcaaactgatgatcgagggagccagcagcaaaggccacaatactcttcgcaagcctcgggccagcagcaaagctctgttcggccgccagcgccaaggggcagaggcgccaggggcttcgggggaaggtttggggaccagccaagaagaatttactgcctattctgtggtgaagacaagggccataccaccaggatgtgccacgtcaccatccagaagcagaaggagatagcagaagctgcagcgcaacagagtcagccgaagcaggtcatgcacactgcttcgtaccactcgccttacatcccagagtacgtaggcaaccactctgcagcttctgttgcttcggcgagccaaccccaagcatcttggcagcagcctccaccgccaccgccgacgcagcgagggcagcagccagaagggagtcagcacactcaccttcagagggacttcagagaggagtccgaagctcgcacagtcaatagcactgtgccagagtcgaagcacatttactga

SEQ ID NO: 167035 - DNA, 1842 bp, Zea mays
  unsure (1)..(1842): unsure at all n locations
  Clone ID: MRT4577_83913C.1
ttctggcctttatttcatccatactttcagctgttgagacggaaagagaagagagaatggcgganccaaacccagagttgagtgatcttattactcaaacaaagaagaaaaatatagtgccaaagttcaccgaaaccttccccgttgaggacacggcctacccttacagcgccttcatcacctccgtccggaaagaatgccgccgaaaaaagcttcagcaacaggggctgccactctgcagccgctggaccccaatcaggacgtcctttcccttagggaggcccgaagccagaagaggaaggccgctagtccaacgcctccggaggatgacttggatcaggagatccaaaacctggagatccttcagcaacaggtgcaacgaaagaaggagaagatggctcgtctagctgatcttcagagacagatagatgaagcttcagaagaggttcgtcatcttgttcaagatgatcagaaccgaaggcctccgcgcagagagcttcatcaagaaggcttttacaatgaggacgactggtatgaagatttccatcatggaaattttgctttcgatgatgcttctcctctctcaacagaattgcaggttacaccatggccccagtcttacaagccaccccagctccccatgtacgacggtcatacagacccgaagcaattcttgatgagctatgaagcaaccatatcttcgtatggtggcaatactgtagtcatggcaaagtcttttgtcatggccgtcaagagtgtcgctcagacctggtactcctctcttcggccagggacaatcacttcgtggcagaagctgaatgatatgttgataaccagcttccaagggtttcagacgaagccagttactgctcaagctctattccagtgtactcaggaccacgaagaatacctccaggcgtatgtccgaaggtttctgcatctgagggcacaagcgccaacagtgcccaatgaaattgtcattgaggccatgattaagggacttcgaccgggaccctcagcacaatactttgccaggaagccaccacaaactttggagaagctgctccaaaagatggacgagtacatccgagctgacaatgacttccgccaaagaagggaggaggcattcagattctctgagatgaccaggggcttcggaggaaaatttcatccgaggcatgtcaggtcaattcataactccactcaaagtgatgatagagggagccaacaacaaaggccacaatactcttcgcaagcttcggggcaacaacaaagctctgctcggccgccagcgccaaggggcagaggcgccaggggcttcgagggaagatttggggatcaaccaagaataatttactgtctattctgtggtgaagacaagggccataccaccaggatgtgccacgtcaccatccagaagcaaaaggagatagcagaagctgcagcacaacagagtcagccgaagcaggtcatgcatactgcttcgtaccattcgccttacattccagaatatgtaggcaatcaccctcagtttctattgcttcggcaagtcaaccccaagcatcttggcaacagcctccaccgccaccaccaacgcagcgaggacaagagccagaagggagtcagcacactcacattcagagggacttcagagaggagcccgaagctcgcacagattgagttcccgaagcatacgaatttatggtggcatgaaggacctttgtattatcaaaaatttgttctaagagacacactgcaatttattcgaagcagtaaaaagtcgttcctaagggagcgcagtggatgtgtatctgcggcacaaatatcattttgcataacata

SEQ ID NO: 167036 - DNA, 596 bp, Zea mays
  Clone ID: MRT4577_83914C.1
cggacgcgtggggttctagatcgcgagcggccgcccgcgatctagaggatggggaactattgaaccaccaaagtaccagtgagtcagaggagtgctttatggcatttgcgagggtcttcagtggcgtccttcatgcagggcagaaggtatttgtgctatcaccattgtatgatccagtgaaaggggatacggttcagaagcatgtgcaggaggtggagctgcaatacttgtatgagatgctaggacaaggcctgaagccagttgccagcgtgggtgcagggaatgtggttgcaatccagggtcttgggcagcatatattgaagagcgccacattgtcgtccaccaagaattgctggcccttctcgagcatgatgttccaggcgtctccgatgcttaaggttgcaattgagccctcaaatccagctgatttaggagctcttgttaaagggcttaggcttcttaaccgggcagacccatttgttgagtatacagtttcgcagaggggcgagcatgtccttgctgctgctggtgagatacatttggagcggtgcataaaggatttggaggagagattctcaaagtcaaattggtggtct

SEQ ID NO: 167037 - DNA, 1725 bp, Zea mays
  Clone ID: MRT4577_83915C.1
ggaaagacgtgatcaaacactgcaccgaccataaagggatcttccagcccgtgctgcgaccggagaagaaggtcccggagctatggttctacacagagctcaaaactaggaccagctccatcacgctcgccatacgcatggacaacctgtacctcgtgggcttcaggaccccgggcggggtgtggtgggagttcggcaaggacggcgacacccatgccgccgaaaaaagcttcagcgacaggggctgctactctgcagccgttggaccccaatcaggacgtcctttctcttagggaggcccgaagccaaaagaggaaggctgctagtccaacgcctccggaggatgacttggatcaggagatccaaaacctggagatccttcagcaacaggtgcaacgaaagaaggagaagatggctcgtttagctgatcttcagagacagatagatgaagctttcgaagaggttcgtcatcttgttcaagattaccagaaccgaaggcctccgcgcagagagcttcatcaggaaggcttctacaatgaggacgactggtatgaagatttccatcatggaaattttgctttcgatgatgcttctcctctatcaacagaattgcaggctacaccatggccccagtcttacaagccaccccagcttcccatgtacgacggtcatacagacctgaagcaattcttgatgagctatgaagcaaccatatcttcgtatggtggcaatactgcagtcatggcaaagtcttttgtcatggccgtcaagagtgtcgctcagacctggtactcctctctccggccagggacaatcacctcttggcagaagctgaaggatatgttgataaccagcttccaagggtttcagacgaagccagttactgctcaagccttattccagtgtacccaggaccacaaagaatacctccaggcgtatgtccaaaggtttctgcgtctgagggcacaagcgccaacagtgcccaatgaaattgtcattgaggccatgattaaggggcttcgaccgggacctgcagcgcaatattttgccaggaagccaccacaaactttggagaagctgctccagaagatggacgagtacattcgggccgacaatgacttccgccaaagaagggaggaggcatttaggttctctgaaatgaccaggggcttcggaggaagatttcatgcgaggcatgtcaggtcaattcataactccactcaaagtgatgatagagggagccaacagcagaggccacaatattcttctcaagcttcgggacaacagcaaggctctgttcgaccaccagcgccaaggggcagaggcgccaggggcttcgggggaagatttggggatcagccaagaaggatttactgtctattctgtggtgaagacaagggccataccaccaggatgtgccacgtcaccatccagaagcaaaaggagatagcagaagcacaacagagtcagccgaagcaagtcttgcacactgcttcgtaccattcgccttacatcccagaatatgtaggcaatcactctgcagcttctgttgcttcagcaagtcaaccccaagcatcttggcaacagcctccaccgccaccaccaacgcagcgaggacaacagccaaaagggagtcagcacactcaccttcagggggatttcagagaggagtccgaagctcacacagtcaatagcactgcgccagagtcgaagcacatttactga

SEQ ID NO: 167038 - DNA, 1787 bp, Zea mays
  unsure (1)..(1787): unsure at all n locations
  Clone ID: MRT4577_83916C.1
atccgggccgataatgacttccgccaaagaagggaggaggcatttaggttctctgaaatgaccaggggcttcggaggaagatttcatacgaggcatgtcaggtcaattcataactccactcaaagtgatgatagagggagccaacagcaaaggccacaatactcttcgcaagcttcgggacaacaacaaagctctgttcggccgtcagcgccaaggggcagaggcgccaggggcttcgggggaagatttgaggatcagccaagaagaatttactgtctattctgtggtgaagacaagggccataccaccnnnnnnnnnnnnnnnnnnnnnnnnnnnnnnnnnnnnnnnnnnnnnnnnncaggatgtgccacgtcaccatccagaagcaaaaggagatagcagaagctgcagcacaacagagtcagccgaagcaggtcatgcacactgcttcgtaccattcgccttacatcccagaatatgtaggcaatcactctgcagcttctgttgcttcggcaagtcaaccccagttggaccctaatcaagacgtcctttctcttagagaggcacgaagccagaagaggaaggctaccagtccaacacctccggaggatgatctagatcaggagattcaaaatctggaaatccttcagcaacaggttcaacgcaagaaggctacaccttggcccccgtcctacaagccgcctcagctccccgtgtttgatggccactcagacccgaagcagtttttgatgagctacgaagcaacagtgtcttcgtatggtggcaatgcttcagtcatggccaaatctttcgttatggctgtcagaagcgttgctcaaacctggtattcctcccttcgaccaggaacaatcacctcatggcagaagctgaaggatttgctattaactagctttcaagggtttcagacgaagccggtcactgctcaggctctcttccaatgcactcaggaccatgaagagtaccttcaggcatatgtccgaaggtttctacgattgagggcacaggcgccaacagtgcccaatgagattgtcattgaggctatgatcaaggggcttcggccagggccgtcagcacagtattttgccaggaagccaccacaaacgctggaaaagctgctccagaagatggatgaatacattcgagctgacaatgattttcgtcaaagaagggaggaggcttttaggttttctgaaatgaccaggggcttcggaggaaggttttacccgaggcatgtcaggtcaattcacaattccactcagaatgatgataaagggagtcagcaacaaaggccacaatactcctcacaggcttcagggcaacaacaaagttccttccgacctccagctccaagaggcagagtagccaggggcttcggaggaagatttggcgatcaaccgagaagaatcttttgtttattctgcggtgaaaacaaaggccatactaccaggatgtgccatgtcactattcagaagcaaaaggaaatagctgaagcagcagcacaacaagctcagccgaagcaggtcattcatacagcttcgtatcattcgccctacatcccagaatatgtgggcaaccatcctgcagtctctgttgcttcggcgagtcagcctcaagcttcctggcaacagcctccgcctccacctccgttgcagcaaggccaacagccagaagggagccaatatgctccgcatcaaagggacttcagagaacagtccgaagctcgcacggtcaacagcactgtgccagaatcaaagcacatctattga

SEQ ID NO: 167039 - DNA, 642 bp, Zea mays
  Clone ID: MRT4577_83917C.1
acctcgaggccggccgggccgggacttcccaccacttcttagctgtactcttacttacgttgcctcctccgccaacacgtcttccccttcctcctcttgccatgacccatcatgcagcccctcctggcctaacctcccacctagtaccatgcaactcgtcactgttcacaaagaacgccctgccgccttcttctcccagaagacgaacctccgtgcaccttagcatttactacgcattctgcaagaccagttatcctgaaagctttccaaaagcagaattcctcgcccatcccgcgaatggactggtacccgtatgacttctaccttcctggccatgacttctatgtcccaaatatatgctggtctgaaaagaacatgaaagggtgctgagcatgtgggatcacttgtgcgacaatcatcaaacagggacattgctactcctgcagtctcagctggcatccaattcataccatatgcacatgaatcacggcatactgctgactgaatcgtgcatgaacgcctataccctctctatctcttggaccacaacactgccgaatgcaaccagagaaagggtgattaccgctccatggctctgatgcactacagatatctcctaatttgttgctatatctcgaatat

SEQ ID NO: 167040 - DNA, 464 bp, Zea mays
  Clone ID: MRT4577_83918C.1
ctctcgcggctgggcagcgggcgtgggctagatcggatgtctatggctgtgcagggacggcagcgctgccaaaggtagcgggacgccgggcggcagccaacgccaagcgaggcgccggtgcaggggaacgccaggcacggaggccgaacacgccacaccgagggaggacgccgtacaacagcggctcatgaagaaggacgactgcatgtggaaggaagagcaaggacatgtgccgggaccatgacggcaggcacaagatgccatctcatggaaaacatagggagtggaaagggccggctcatagcggcaagggggagaattacaaactacaaatatggagcagctcactactagataagcacgaagcgagagtgagataaccatgtgtctggacaaacaccctatgtgatcatgctatcgaactggagtgaaacactaatgatgaaaaatctaatgcgtgagaa

SEQ ID NO: 167041 - DNA, 279 bp, Zea mays
  unsure (1)..(279): unsure at all n locations
  Clone ID: MRT4577_83919C.1
ggggcagcgcaaggcacagcaacnaacgcggagaccggccgcgagcacnancgancagcgcgccccgaggagngagaaccgnggacccaaaccccaaccccacggaccggcncacacaaccggcccngagggaaaggcgcgacgaggcgaggggcggggggaagnacagggagancngggcacaggacagcaagcgcgngccgnggaggagccngccccangngnacggaagagacgggagaaaccaaggcagnncacggnccccggccagcgggaaac

SEQ ID NO: 167042 - DNA, 2169 bp, Zea mays
  Clone ID: MRT4577_8391C.1
atgtctcaagacaagaaagttgttgctgagacaaagctaaccgaagaggagaagctctttgagcagaagaaggctgcgaatccttatatagctggatttttagaatcaatggcaaaatcaaatatggataagattacaaaggaaatattggagggtctttctgaagatactggtgacagtgacaactatgacgctgaaagtgggggtgaagattccgaagatcgaccgtggaggccaagccatgtaattttcgaaaagtcgaccatcaagcaaagtcaccttgagagtatgagtgggaggtactttcgagatatatctattgtgagggctggcggagatgataacactcctgcgcctgaggagaatgaagttgtgatcttccgaagcttctttaaagctgggctttggttcccattgagcaggccggggaaaaagagattgaacagagtttttgatgcaattggttttgtttaccccgactactgctacccgctgcgaggacagggaaaaaagaggaaaattgttgcttcggccaaaactgctgcttcggccactcccgatgagcctacgccgaagagcaaaaaattgaacgttcttacccaccggccatgttatattgaaccggccgtggtgcctgagtttggcggggaaacttcttcagctgctgaaccgaaagaaactgctcctcccacgcagaagattgacgagccgactgtaatgtcgaaggcacctttgactgaactaattgaaacgaaggtagacgaagataaggctgagaggccaaaaaccgaggaagcaataaagatgctcgagattctaagtccttctacagaagtcacagtgctcaaggcagaaaaatgttctgccacaacccctagaagaaaaaggatcgtaaatgtattagatattttggaaacaacggattccaaatgccctgctcccttgaagaaggttgccgaagccgtcaaagcacaaactggaactgatactaagcagatagaagttgaagctgcaacaattgaggctgaagtagatactgggccttcaaagcttgctgaaaaagagtttgccaaagttgaagaagtggcatcagaagaaaaggttacagagcaaatttcgactgaaaaaataacaactcctgctcccgaagctttaaaagagagcattgactatatcatctgccatgcttcgggaaaggtactctctaaagaagaagaacaagaagcttaccattatgcccagaaactgaaatacccgaagggggctctcccggataacaaagagatatccgtcagccgggagataggaagaagcttcggatttccgaagctagaagatggcctctcagttctgtcaaaggatgaattggctgacagtttagcatataatagcataaagggcttgatccttagcaatgccctcagagctcagaaaaacatcgaagatgaagggtgtacaatagctttgaacaaccttcgttcagaggataagatattaattttattggtaaacaaaataaaagaagacgaagctaattccaaagtcaaagctgaggcccaaaagagtgaaattgaagacctttggagacaattagctgaggccaaagaaaaatgcgctgttgctgaagctaatagagatgccaacgaatattggagtaattatttagaaaagacagttgcagagcttcacgcatccaaggaaatatgttttgaaaaatttgtggagtgcgtaaaaaagatgaaaactagcttcgccaacgtgggcgcttattcaaacgaagacaacttcatacgaggcgaccctgagggcgttatcgagtggatcagtggtgaagtcgaagcttttgaggaaattttaagtgatcgtggggacgtctacgcattctctggcgtgagaggagttgcagctgtcctggagagggcgggttgcgatcatgtcaaaattttggcccaagctgaagctgcattttccgtggacaccacgaaggatccctcggccgaagcaagttttatgggcggaatttttttcactgatatatgggaaaatggcggccgagaaatggctcatgaaataataaagaagagtgaaaaagatattcatgaggctcgagaagtggcgaaaaaagctgaagaagctgccgaacgcgagagacggatatgtatcgtttaa

SEQ ID NO: 167043 - DNA, 220 bp, Zea mays
  Clone ID: MRT4577_83920C.1
ccagcccttaacgttgctaccagttgccaccgcctgttacccgtgatgtctcgcggccttgccgttggcgtggagcccatggtcgacgacgattccgtctctaagaaggccaagctcaagcagctcaaggtcgccgccgtcgtcgcggaggcatgaggcagaggccaggttcgtccccaaaccgaaaagacaaccagaaaaagcgccagtggtggagaac

SEQ ID NO: 167044 - DNA, 270 bp, Zea mays
  Clone ID: MRT4577_83921C.1
tgttgggcaagacagcatggaactccaagtggatcctgtctgaatggcggcgacgtttaagcagaaccgggggcaaattgctaattattcacaattatgcgacacaatacagctgcatgtgctcagcttacttaggctttgcgatatcggtagactgtattgaatatacagccactggtcaagttactcgcgccagataacacaaagcttgaccagttcattgttcttaagatgctcaaacatgtccatgacaaagttgaacaccaacat

SEQ ID NO: 167045 - DNA, 206 bp, Zea mays
  unsure (1)..(206): unsure at all n locations
  Clone ID: MRT4577_83922C.1
aaaggaaanangcagaacgccagcgccaaacnaacagaaacaacnnggggcgcagcgacaaacnnaaacaaaaangcangnggcacgacnacagggagcganaaagggcggagcacaaanaccgancgccgcanaagaaagcaccacnncgaagggaccaaaccccacncggcanccncaacgncggcancngcgccgcccgagga

SEQ ID NO: 167046 - DNA, 593 bp, Zea mays
  Clone ID: MRT4577_83923C.1
cattgggtacctcgaggccggccgggagtctcgattcgataatctctctaaccctaggcgcctcctgctcgctccacagctcaccaatctcgcggcactggtgagtgagacggtgactttcctatttcaggttgagatcaaccagatgctctgagctcatcactgcatagcatccttgctacatccaacaagagagatgcttcctcacgcctagctctatcatcgtcacactaccttgccgatattgcgtactgagatcgacagtatacatggcatacgatggagctgctctacctgcacataggagactatagacttcccactcgcgtcaggcgcatggagacgtttctcagtgccacgctatgctccgcatgacataagcacacgcatcatcggctctccatcatcgacagcgggactcacctctgaccaaagccgaccttgtctgcaacctcggatagcatctgaagtgcaggcactaatgattccatggaagcccttcgtgtgcggaaactgatgtgtacgtgatcgctcagaaccgcgacgagatctactctgcctactcgccacatcgatatagttgtcgcgaacac

SEQ ID NO: 167047 - DNA, 481 bp, Zea mays
  Clone ID: MRT4577_83924C.1
cgcggaccggccggaatttttgggtttgacccgcgtcctcggacgcgtgggcggacgcgtgggcggacgcgtgggtgagaggatgactcgggtgcaggaggctactctgccaataattcttcaaggaaaggatgttcttgcaaaagcgaagacaggaacagggaaaacagttgcctttttgggagcttgcaaaccaattggctgctgaggccaggaagcttctcaagtatcatcgctcactgggtgtgcaggttgtaataggtggcacacggttacctcaagagcaacggagcatgcaagctaacccatgtcagattcttgttgctactcctggaaggctaaaggatcatcttgagaacacgcctggattctccacccgaattagaggtgtcaaggttcttgttctaaatgaggctgaccgcctgttggatatgggatttagaagagacattgagaaaataattactttcatccctaaaga

SEQ ID NO: 167048 - DNA, 2394 bp, Zea mays
  Clone ID: MRT4577_83925C.1
ataaacactgtgaatacccctattctcctcgccgcgggctcgccctttctccttccgccgccgcacttgtcccctgaccctaggtcaaagtatcgccgacttcgccagccggatcatgtcgaccagcgccaacccgaaactgaagcggcggcgggggggcttgcggaagcagggccctgggtaccccacggtggccaccacgggggcaatgtttgcccatgaggtgggcgccgaagggccacggagggacacgaggcaaggacccgcgttgcctagggtggttgccacctcgaccaggggaggaggtgccattgagcagggcgctgacggaatggaaggttcggcgtcgaatgctgataggagcgttcacgaggcagttggcgtcgatggcacgtacctcaccgagacacggtttgatcaatgtgccatttctccactgtcactgaaagccatcaaagatgctggatatgagaggatgactcgggtgcaggaggctactctgccaataattcttcaaggaaaggatgttcttgcaaaagcgaagacaggaacagggaaaacagttgcctttttgcttccagccatcgaagttctctctgcattacctcgttcaacttctataaatttgctggtgatgtgccctaccagggagcttgcaaaccaattggctgctgaggccaggaagcttctcaagtatcatcgctcactgggtgtgcaggttgtaataggtggcacacggttacctcaagagcaacggagcatgcaagctaacccatgtcagattcttgttgctactcctggaaggctaaaggatcatcttgagaacacgcctggattctccacccgaattagaggtgtcaaggttcttgttctagatgaggctgaccgcctgttggatatgggatttagaagagacattgagaaaataattactttcatccctaaagataggcaaacactgctgttttctgctactgtttcagaagagatccaccaaatttctcacctcgcaatgagaaaggattatgatttcattaacgctgttcaagagggtgatgaggagacacatgcccaggtaaaccaaacgtacatggttgcacctctaggtctgcacctccccatattgtatgatgtgttgaagaagcatgttgcagaagatgcagaatacaaagttatagtattctgtactactgcaatggttacaagacttgttgctgaggtactctcccagctaaaactgaatataagagagattcattccagaaagacacaatctgcaagaactaaggtctcagatgaattcaggaagtcaaagggtctcatattagtcagctccgacgtatctgcccaagaactaggttatcctgatgtcaccggaaatcagcaggttggatactggtcagttcagacgtatctgcccggggcgttgactatcctgatgtcactcttgtaatacaggttggagttcctgcagatagagagcagtacatacatagactaggccggaccggacggaaaggcaaggaagggcaaggactcctactattggcaccttgggaaaaatattttcttggtgctgttaaggatttgtcaatagcagagtctgctgtaccaccagttgattcaagtgttgagacagaagtcagaaatgcggtcagaaaagtagagatgaagagcaaagaatgtgcctatcaagcatggttagggtactacaactcgaacaagaccattggtcgagataagtccagacttgttcaccttgcagaagagttcagccaaagcatgggtcttgcagttcctccagccataccgagaaacattcttcgcaagatgggccttaacaatgtccctgggcttcgttcatcataatctcgatgtcacgatatcaagcagaagacgtgtgctacagcacagtacatgcatttgaccagccataatgctgttaacttcgtaaacaacacttgttgctggacttaagtaccgcagttaacataagcagattggtttgctgatgacctgaagtttctacaagcatcctcatttccaacccgtacacaagtcctcgggtgtagccagaatatgcattcattttgaagccaaattttgttcggtcgagacatcaacacttcacagagaatgctcaaacagacaaggtgattctacgtatacaaggatttgtcaaaagcatagtgatgtgtatgaagtattaaaagttcgggaagaaaaatgcgctttcctgatttatcgtcatataggggaatgcatgtgttcagtttcaaattctgacgttgtttgtacgcgaatgaaaagaaaggtatagggttgtgtaggggcaacaactactatacaaacaaccgttagatataaacatgcaagcaggtcactcggtctgtt

SEQ ID NO: 167049 - DNA, 828 bp, Zea mays
  Clone ID: MRT4577_83926C.1
gccgctcagccggcgggcgacttccgttcgaaatcaaatcagagagaggcaaagcaaatcgcaccaggcaaatcacacagagagcgccgccgtcccaatattccggcgaaccccaaagcgagcgagcgattcccaggagaggagaggaggcggagatggccaagggcgaggggccggcgatcggcatcgacctcgggacgacctactcctgcgtcggcgtgtggcagcatgaccgcgtcgagatcatcgccaacgaccagggcaaccgcaccacgccctcctacgtcgccttcaccgacaccgagcgcctcatcggcgacgccgctaagaaccaggtcgccatgaaccccaccaacaccgtcttcgatgcgaagcggctgattggcaggaggttctctgacccctccgtacagagtgacatgaagctgtggcccttcaaggtcatccctggcccggctgacaagcctatgatcgtcgtcaactacaagggcgaggagaagcagtttgctgcggaggagatctcctccatggtgctcatcaagatgagggagatcgctgaggccttcctcggcaactccatcaagaacgccgtggtcaccgtcccggcctacttcaacgactcccagcgccaggccaccaaggacgctggtgccatcgctgggctgaacgtgctgcgcataatcaacgagcccactgctgctgccattgcctatggccttgacaagaaggcgaccagcaccggcgagaagaacgtcctcatcttcgaccttggtggtggcaccttcgatgtgtctctcctgaccatcgaggagggcatcttcgaggtca

SEQ ID NO: 167050 - DNA, 350 bp, Zea mays
  Clone ID: MRT4577_83927C.1
cggaaaatcctgtgttcatttagtgcagtgacagcgacgatcaatgtaacaagttttacaaacatgtacgagctgcaactgcccgatcgatctgattcatcattcaatcaaaacagctgatcaattaagccccagaagatacgccggcgatctagggcctggtcgtctaattgattaagcttcttttgcgagatctgagacatctgacgcgaggagctgttcaaactggtttgtcacacagcctgcctgcctgcagttgtttttaaccagagtgcctgttggccagaaacgattgcctcggccggccctggcccctgattcgaggagctcacgacagcgtccacatgaag

SEQ ID NO: 167051 - DNA, 621 bp, Zea mays
  Clone ID: MRT4577_83928C.1
cggccgggaatcacttcccaacatctaggttaggtaccgaacattcctctcatctcctcttcacctcactacataacatcggatatcaattcgattgctctgccctagtgtactgtccgttcgctcctcctcccatgagctggtcgcggcgcctggcctggcagctgctcttctgctgctggcggcgcgggacggcaccgcctccgcggagctgagctgaggcgacgtgacctcggccgccgcgcctcgcctccgctacgcgatgcgcagcgccgcccccccctccgcgctgcgctgcagcgcgctgcgttcgctcaccagccgcgcctccgcggcgccggaccggcacctcaccttgccctgcctccataacatgacggctcggctcggcggccacgatggcctgcgccaccccgccaacctccccgtcaagtgcctccgctccggcggccagcccatccaccccaccgtggactgcgaccagatcaactgatcaatcataccatagtgaactcacttcgctcatgggatggcaccggaccagcccatccataccatgcactcctcatcacagcagacatgtccaagcgacgggcgtgtcttgcatcggactgtcacata

SEQ ID NO: 167052 - DNA, 301 bp, Zea mays
  Clone ID: MRT4577_83929C.1
gaaactatggtccctgcgtcacagggaagcaacctacagagaagcagcagctccccaagagaggagagataagaagccagaagcctcagagtgaacaattgtcctattagggattgctctagagagagaaacctctgggaacgtacccctgtgaggcagcacagcacaatgcttttagaattgtatgagagttgatatatctccatttgttttgcaaaggcaaaaactaagatacagagattatctgttaaagttatgtatttctttggtaataaagatgctgacagtgttgctggaatgc

SEQ ID NO: 167053 - DNA, 128 bp, Zea mays
  Clone ID: MRT4577_8392C.1
gcgcacttgttcattagccacccagcgagcggaggcggccaatcagctcatctttcgtcatgaactactccacaaagaaacaatggccgccaagggcggtcattaccccaccggggcggacaccaact

SEQ ID NO: 167054 - DNA, 180 bp, Zea mays
  Clone ID: MRT4577_83930C.1
gtgggcccgggaaccacccacatgggtcatattatcaccatatattacattgaaccttctcaaatatcctccatgggcaagtgcccaggcggcataaggtacccctcccagttcccctgtgtacatagggttttcggcttacaaatcatatgaaatcggggggggggggggggggggggg

SEQ ID NO: 167055 - DNA, 370 bp, Zea mays
  unsure (1)..(370): unsure at all n locations
  Clone ID: MRT4577_83931C.1
tcaggaactgcggcatcacagctaactacggcgctagtttgatgctctctccctcaaggccatcaacaaccctggctgcggacagcccgtgcccttgaaggaggtctccttgatgtgctcccactccttctcatacgagtgcttcctcaccaggggggggatcttcttntcccccccnatnaantacaccatcccancaactgtggatactattagggccttnccagcagggttaatgttagcctttgcccatggcatcatcctgacgctaaccaggttggaaactgcataggcgactgtcgcaacaactactgccttgaaccctacgaaggcctcctatcactagcatcgcttggacagctcaaacatc

SEQ ID NO: 167056 - DNA, 690 bp, Zea mays
  Clone ID: MRT4577_83932C.1
cgctcccccatttccttcttcctccctgcgtaattcgtccgtccgggcggccggatctggatcctctgcctccggcgctggatccgtgtcgcctcgtcgggctgtctgtctgtctgtctgtcggtggagttctagattgactggtcagaggaatttggtgccgtcatgctgcccaagatgccgtcggtccggtggatctcggcttccctgctggtcattctcctgagcctgcaccccatcgccgacgccttctacctcccgggcactttcatgcacacctacgaagccggtgaagagatcgcggccaaggtcaactcgctcacgtccatcgagaccgagctgcccttcagctactacagccttccctactgcaagcccccggaaggtgtcaagaagagcgccgagaacctcggcgaggttctcatgggtgaccagatcgacaactcgccgtaccacttccacgtcaacgtcaacgagtcgctgtacctttgcaccaccgacccgctcaccaaagagcaggccgagctgttgaagaaccgggcgcggaatctgtaccaggtcaacatgatcctcgacaatctgccggtcatgaggttcactgagcagaatgggatgacaatccagtggaccgggtacccggtcgggtacaacccgatgggtagcagcgaggattatatcattaaccatctc

SEQ ID NO: 167057 - DNA, 572 bp, Zea mays
  unsure (1)..(572): unsure at all n locations
  Clone ID: MRT4577_83933C.1
tccaaatatggaattatttcatctgaggataggttatggcgccgaaatgtgcaatttcgatgtcgtgtgccatggtgctgacctaggatacaaagatgggattagttcctctaggggtctgttatggcgttcggctccatgcgccaatgatgttgaaccttgtatagntcttctacaattttaactttgaaaagctcaatgtcagaactggcttgtgaagagaatgtttttgcgaattcactgcaacatgcttctagttcagtatcatttaacgtcttcaatggtgncgagctcaataaaaacccaaatatactcttgaatgtctggagntacagatgcaattttagttagttagacaattaaaaaatagggctattggaactttaacaggccggacccaacatataaaacctatatacatgtacactacttgggggcccttctaaaatcgggggcccggggcggncgctccacttgcccccctccaggaccggccctggagatcatcatgagacgaaaattaggataaatacatcaatatgggcattggaaaaactaatagcatgacagac

SEQ ID NO: 167058 - DNA, 911 bp, Zea mays
  Clone ID: MRT4577_83934C.1
ctcaggattccctgatgcttcccaaggtcgacaggcccatggaaccaaacaatggtagcttcgttccttctacaaaccaagtttggttcggtgcagcttctcgagagccttcgcacagtggatcttctactgctatgaccacttattcagctgggttcgaaatgtgcgatgagctaccacctgcagggcaagcgatgtctatttgtgagagctccagaaaaaacgctgcaaatggaacaaccatcggcagatcgaaaggcaaagaatacagagagagggtacaacaggataatttgaaagatgagagaaagatgagctcaactaatacttctggagcatcgaaagctgataatggagatcctatgaaaaagcgcagggttgagcgctcccgcaaaatggcagaagcgaaggaaagaagctctacaccagtaataccgtccgacatgcaggccgttcttaagcgctgcgaaaccctagagaaggaggtccggtcgctaaagcttaatctgtccttcatgaacaggaaagattcagagcagaccaagcagatcgaggagcttcaacagaagaacgaggacttggccgaagagaaggagcggttgctggaagagatcgagagaattgtctccgaccccaacacttgagcacccaatctccttttttttgggtaacttatttttgtgtactaatagagttaggcttgaaatggtccttgatgcaaatacgtacagtccagcagggcagcaagaattaagtgctggcctaaatgtatcaccattctttccttgttatcacaagtttaatgtatattaataccaacaagcaaagggatcagggattacagtttacttcctttgacttgtatcttgaactaattacagtatgaaatggagcccaaaaagggtagtagc

SEQ ID NO: 167059 - DNA, 276 bp, Zea mays
  Clone ID: MRT4577_83936C.1
cttctcttgtggctcgtgcgtggtcctctatcgttgatgttggcggttttcatcgctcgcgtggtggccgtgccttcttttctgttgtctgccggcagcctctttttttggggggggggcgaagcttcgcaactcctggttcgcttcctggccgcgtcctagccgcccgtgtccgtgctgctgggcggcccggtcccctcgcctactcccacactctccatgctctcctccggcccgtgtctttcgcttcctccgtcgctttgttgtccctgttgc

SEQ ID NO: 167060 - DNA, 175 bp, Zea mays
  Clone ID: MRT4577_83937C.1
atttagcgacactgggtgacccccgctttcacataccccactcccaggcgccgaacaggtacgatcccacgcggcgatgacgacgcgcttaaagaagaaccgcaagaagcgcgggctcgtgtccgccggccccggccgcataggatgcacaggaagcactcttttttttcggggg

SEQ ID NO: 167061 - DNA, 200 bp, Zea mays
  Clone ID: MRT4577_83938C.1
gaggacatcaacacctgcagcggcgaggtccacgagcgcagggagagcttcctcgccagggctaactgagctgcccgtgcggccggcatccacgcccgttcttgccagcctgcgtgccttatgtatgactgcgattgtgcacggtctgcgtacttggctatcgtacgtacgtgcacgcactcagctgctgtacgaattac

SEQ ID NO: 167062 - DNA, 376 bp, Zea mays
  Clone ID: MRT4577_83939C.1
ctcatcttatcccccgcctcctccggtcctgccgccgctgttgctcacttctgagtcccgacgcacgagctcccaagagctagccatggcgtccaccaccctctcctccgccttcaccctcctatcccgcccctcctccggtcctcccgccgctgttgctcacttctgagtcccgacgcacgagctcccaagaagcagctcgaggaggtcggcgccaaggtgtctatcgcgtgacactaggtatacgaggactcctttttttttctttagtttcttttgtttgcatccccaatctcttgtatccccactatcgttcgtaaggaattgctgtttcatgatatgagatctgtgtatgtgtcgattcactagcttatat

SEQ ID NO: 167063 - DNA, 285 bp, Zea mays
  Clone ID: MRT4577_8393C.1
gttaatactgtgtttgttgctataattatttgtttgggaaaaaaaaaaaaaaaattttaaaaaaaaaataaaaaaaaaaaaaatatgggaaaaaacattgagaaaaaaatcattttttatacagaaaaaaacaaagggagttggggatcggcccatctaaatttactaaattgccatatagggaaaaaccttaaaacttggaaaaatcatagggataacattttaatttgttaaaaagacatcctctaaaaaaacccacaaaaaaaacatcttaagaattttaaa

SEQ ID NO: 167064 - DNA, 256 bp, Zea mays
  Clone ID: MRT4577_83941C.1
ggacgcccccatacacgcaaggatgtttattctggaggatgccgccatatctttcttggtctagtgggaaggaacacctatattcgcagaatatactctgagctgaccggacctgccaatcctgatttatgcatcacctgaacgtacctatatccgagtgaatagcacgggaggcaatgtgcaaaacgggtaccaagagcgcatatactacaaagggtcattgaactggacttaaatctagcaaacattatttgtt

SEQ ID NO: 167065 - DNA, 413 bp, Zea mays
  Clone ID: MRT4577_83942C.1
ccgtcgaaaaagcaaccagtaaaaggagcacccaacaaccaaaaaaaaggggccgggtaaaagaaacaaagggggaccggggggaacaaaccccaggaaacccccggggcccccccatccagggaccagaaagccgggacaaaccccaaaacggacaaggggcccaaccccggcccccccaaaaagcatgaaaaacgccccaaaaggcctgggcgggccccccaacgacccaaaaggggggccgcaaaaaaaccccaccaaaggcccaggagggccacccgagaccaaccaagaaaaacctgccccgggaggggaaaacctcccgcaggggacaccgggcaaaccttattaacaaaaaaccgggggtccccccctccaggaaggcccaggccaaagcggggaagggcccccaa

SEQ ID NO: 167066 - DNA, 170 bp, Zea mays
  Clone ID: MRT4577_83943C.1
gtgcatgctacatcatagctgggctatagcttcatctaaattaaaatcactggccattatttttactacgtgttagaatattaataattgtactttaccacaaggtccttttggtctacaacgtcaccctcatcttttaccgacaacaaaatcacttattcctaggatca

SEQ ID NO: 167067 - DNA, 814 bp, Zea mays
  Clone ID: MRT4577_83944C.1
cggcattgcgtacctcgaggccgggccgggagagcacccagcaggccagggccagccggccaaaacacagaaaagctaaacccgacctccgctcgccggcgcccggcaggatggcttcgtcggcggcgtaccctgatgcggacgagaacctggaggccatcatcacccgcatagagcagaagtcccgaaagatcgagacccttctcaagcagtcgaagccggtggaggccctaaagacggcgctcgaggggtcaccgctcaagacccgcgacgagcgatgcaagtcggcgaactggatcgtggtgcaccgcgcgttgatggcgattagggacgtagacggcatgttcaactccctggatcccgagtactacgacatcctcatgaagtacctttatagaggtttatctacaggggataggccaacatgtgaccagtgcctcaaaattcatgaaaaactgactgagaaggcaggcctaggctgtatattgcgatcccttgctgatactgtaaacactgtatgaactttgtctctgctgctgatggtggatattgcaaagttctctcctgctctttacaatcacatcaggcaaactacctgtagttgttaactagttttgcattgtgtctttctttgccattaggcaattttagttagcgtatcattgtaccttactagaatggccgaacaaaatgtgtattatgttgattttcaagtctttgtattaagggtgacaccggactctaaattttactctataaaatttaaggatgggattatgggctctaaacggaaaaaaaaaaaaaaaagccccta

SEQ ID NO: 167068 - DNA, 684 bp, Zea mays
  unsure (1)..(684): unsure at all n locations
  Clone ID: MRT4577_83945C.1
agagcacccagcaggccaggggccagccggccaaaacacagaaaagctaaacccgacctccgctcgccggcgcccggcaggatggcttcgtcggcggcgtaccctgatgcggacgagaacctggaggccatcatcacccgcatagagcagaagtcccgaaagatcgagacccttctcaagcagtcgaagccggtggaggccctaaagacggcgctcgaggggtcaccgctcaagacccgcgacgagcgatgcaagtcggcgaactggatcgtggtgcaccgcgcgttgatggcgattagggacgtagacggcatgttcaactccctggatcccgagtactacgacatcctcatgaattactattgacaaaatgacaatgagttgtatgactcaatacctcaacaagcaaattggtgaattggatgggtgtatctcttgtttaatattggtcatgacatgatcaaatgaacatgtacctttatagaggtttatctacaggggataggccaacatgtgaccagtgcctcaaaattcatgaaaaactgactgagaaggcaggcctaggctgtatattgcgatcccttgctgatactgtgaacactgtatgaactttgtctctgctgctgatggtgggatatgcaaagntctctcctgctctttacaatcacatcaggcaaactacct

SEQ ID NO: 167069 - DNA, 745 bp, Zea mays
  Clone ID: MRT4577_83946C.1
gctccgtgttggcctcctcctccctgctctctcttccttgtacctgaagcggaggcaaattgaggcgagacgaaaccctcctccctcccctccccactccaatctccatggctcaagacgaggtcccggagtcctcttccccctcttcggcggcggctggtcgcctgaacgccgccgcgccggagttcaccccccgatccgccgccccgcaccaagcccatccccatcgccgcgggccccaccatcaccaccaccaccaccaccagccgcatcaccagcaccagcaccagtaccgccaccagcaccaccaccagggagaggatgagggggatgccgcggcggtggtggataacgctcagctcgtcctgcccgaggagctcgctcgccgggtcgtcaagcaggtggaattttacttcagtgatgtcaatctagccacaactgaccatctgatgaagtatattactaaagatccagatggatttgtgccgatgacagtggttgcatccttcaggaagattcgagaattaattgatagatccttgttgcctggtgcattacgtacatcaacagagctggtagtttcagatgacgggaagatggttaggcgacgagtgcccttctctgatgtggatgctgaagaagttcagtctcgaattattgttgctgaaaaattacctgaggatcatcgctatcagaatcttatgaggattttctcaactgctgggagtgtgaaatcaatacgcac

SEQ ID NO: 167070 - DNA, 525 bp, Zea mays
  Clone ID: MRT4577_83947C.1
ttaatataatgtcccaaagtcgctctggactgctgtcaatgtgtcaaatacatcaatgacaaagtataaaaaaaattgtcaacagaaattgggcaaggccgagattatttcgctggggcagagttgcagagaacaatcttctactaagccactgaattaggtcttgaaaatatatcctcgtgtacaatttggtcaactagtgtgaaaagcctcagctgaacaatgttttacggtaccaacctgaagctaccctcagcatcaggagcaattaatttgtattcactccactttcaggactatcttcatcaactcataaacaaaatagctgatcgatgctgatggtagaacctgtaacatgctggggatcagaccggcatacagtgctggtaccccaccttgatcaacaatcttaaggcatgttgcaaatgcattcattcttgttgcttttacttgcatctgtagctgcctacggaccacttcaaacgggtatgtagctgcttcagcacagcaaccagcaatagcccc

SEQ ID NO: 167071 - DNA, 694 bp, Zea mays
  unsure (1)..(694): unsure at all n locations
  Clone ID: MRT4577_83948C.1
ccggccgggacatacagaatcctagcactacattaggtcctcgcatccatcaatgggatgagaagcttgatcctcctgccatatcttctgaatcatgcatcgaagaaaacgaagagacatgagggaatctgtgctagagagtgcgggcctgtcggtgccttctgcatcaccacaggtgcgcacctccgcatatgggaagacagacatggacgacagttgagaatttagatcatggtgcatcggagtgcggagctgctgcaaaaaacagaatcctcataccctagcggccgcacttacattgccgcaaaaattaccttcacaggctgcttgccagatcacaggtggccatcgcagtgagcatgtcatactcctgctggagaccacgcgacactagagccatgtacaaagaccatggctaattgccatcgactattctacgcggtggcataagcgtggtgcatcatcgtacaaggatgaccttgtacgttgaggcgtccgatccgttgaggaataagaactcctgtgaccgatacataccactgatatgatccttcgccaactcgatgtatgatggatcttcttgaacnagcattagaggtagtaacgatgacacgctgctcaactccaaagatcttccacatgaacctgtaccggtgtaaggacatgctgatcgaggacgagaccgtgacttggc

SEQ ID NO: 167072 - DNA, 472 bp, Zea mays
  Clone ID: MRT4577_83949C.1
ccttgaccgaggtaaatggggttttctccaaaaaggcaggacccagacatccaacacggccgggacaaaaagcgagggggccaaaaggccaaaaaggggcgggcccggccacggaaaaaaaagcggggggaggccaacccgggggggccaggaacccaaacaaaccccccggacggccaaaccggggggaaaaaatggctcaaactggttggccttctaagcatcaaaaacccagagggggcacaaggactgggagcacccccccttgaaccggaaaacaccctaacccccctggatcttaacggagggggcacccctcccccccggggggaggaggaagccctaaaacaaagggaccggctccggaaaatccccgcgggacctgggaaacgccgagctcttctttaagcgggggggggggggaccccacaaaaggatcggacccgggggccaacccgggaaacccggaccg

SEQ ID NO: 167073 - DNA, 1822 bp, Zea mays
  Clone ID: MRT4577_8394C.1
gcgcgatgcgcggttcgacgtcaccggcgcggcggacctgtacggggaggagggcctgggcaacctccagggcgtgaccaagcgcctggacaagaatcccaacccggtgtggcgccagaccttcgccttctcccgagagcacctgcagtccaacctgctggaggtggccgtcaaggacaaggacatgatcaaggacgacttcgtcggccgcgtcctcttcgacatgaccgacatcccgcagcgcgtgccccccgacagcccgctcgcgccgcagtggtaccgcctcgccgaccgctccggcgagaagctgcggcacggcgagatcatgctggcggtgtggatcggcacgcaggccgacgaggcgttcccggaagcctggcactcggacgcacactcgctgcccttcgagggcctctccaacaccaggtccaaggtctactactcgccccagctcgcctacctcaaggtggtggccatcgcggcgcaggacgtggtccccgccggctcagagaagggccgcccgctggcgcccgtcatcgccaagatccagctcggctggcaggtccgccggacgcgtccggggcagccgcagggctccgccaaccccgtgtggaacgaggagttcatgttcgtggcggcagatccgttcgacgagccgctcgtggtgacggtggaggagcgcgtggcggcggggcgcgacgagcccgtgggccgggtgatcatccccgtccagttgccgtcgtacgtgccccgcaacgacgtggccaagtcggtggaggccaagtggttcaacctgtcccgcgcgctgacggcggacgaggccgcggcgggcgtgaccgccgccaaggcgctgtcggagaagacaaccttctccagcaagatccacctgcggctgagcctggagacggcgtaccacgtgctggacgagtcgacgcactacagcagcgacctgcagccgtcggccaagaagctgcgcaagtcccctatcggcatcctggagttgggcatcctgagcgcgcggaacctggtgcccatgaaggccaaggaagggcggctgacggacccctactgcgtggccaagtacgggtccaagtgggtgcgccaccaggacgctgctcaacacgctggcgccgcagtggaacgagcagtacacctgggaggtgttcgacccctgcaccatcgtcaccgtcgccgtgttcgacaacgggtacgtcctcggcggcggcgagggcagcaaggaccagaggatcggcaaggtgcgcgtgcggctatcgacgctggagatcgaccgcgtgtacacccacttctacccgctgatgacgctgacgcccggcgggctgaagaagaccggcgagctgcacctggcggtgcggttcacctgcacggcgtgggccaacatgctgggcatgtacggcaagccgctgctgccgaagatgcactacagccaccccatctccgtgctgcagctggactacctccggttccaggcgatgcagatggtggcggcgcggctggggcgcgctgagccgccgctgcggcgggaggtggtggagtacatgctggacgtggactcgcacatgttcagcctgcggcggagcaaggccaacttctaccggatcacctccctcttctcgggcgccgtggcggtggcgaagtggatggagggcatctgcaagtggaagaacccgctgacgacggtgctggtgcacgtgctgttcctgatcctggtgtgctacccggagctgatcctgcccaccgtgttcctgtacttgttcatgatcgggatgtggaactaccggcggcggccgccaccgcggtggag

SEQ ID NO: 167074 - DNA, 847 bp, Zea mays
  Clone ID: MRT4577_83950C.1
gtttcagatcaggacaaagatggatgctcctggtggtgaagctttaggtggggtcattggtgttgcccgccacatgatccaaactgaaggattcttctcgctgtataagggattggtgccttctcttatcagtatggcatcctctggcgttgtattctatggagtgtatggcatactgaagatggcttatctgcattctctctatggggccattgctggttgctgtgctgaagctgctacatacacatttgaagtggtccttaggcagctacagatgcaagtaaaagcaaccagaatgaatgcgcttgcaacatgccttaagattgtcgaccaaggtggggtaccagcactgtatgccggtctaatccccagtttgttacaggtatgtattctttcagcagagaacctacttccacatatatgtcaatggtgatccaacacacatagcagggacaaacaccgacatcgaagggagaaatggatgaacagctgcacagagccttggaaggaatctagacgtcgagatcgaagttgtcagccttgaagatcttaaggttgtcggcgagctgcaccccgccatcgccattgccgcctcccccatccccgatccccaccgcagtggtgctactcaccaggaacaccctcgagtggatcgccggccgtgaccgcgacgacttggctgtcgcctccttggcaaggagaatcgaggatggccacggggatgcgttgttggtgtcgccagagggattgaaggagacgctatctctgatccggattccaccagctttttagattttgtccaggtgttgggaagtgacagtgaaactcaaaaggaattttcccgggc

SEQ ID NO: 167075 - DNA, 735 bp, Zea mays
  Clone ID: MRT4577_83951C.1
cattcccctgaaggaaagaaaagagtatcgatgatgaagcaacagaaacaagaggcaaatgcattggatcaacttgaattgggtactgtgaggaccttactctatggggctattgctggttgctgtgctgaagcagctacatacccgtttgaagtggtccgtaggcagctacagatgcaagtaaaagcaacaagaatgaatgcatttgcaacatgccttaagattgttgatcaaggtggggtaccagcactgtatgccggtctgatccccagcatgttacaggttctaccatcagcatcgatcagctattttgtttatgagttgatgaagatagtcctgaaagtggagtgaatacaaattaattggtgagcctacgaaccacgttcaaatggtgatcacataccttgataaaattgccaaaaaaaagtatgtaaggggtagtttgggaactctatttttttaagggatttggggaaaatgggatttccaaactagccctaacttgtgaagttttctcgtagacttgtttgacgaaagctcctgatgctgagggtagcttcaggttggtaccgtaaaacattgttcagctgaggcttttcacactagttgaccaaattgtacacgaggatatattcaagacctaattcagtggcttagtagaagattgttctctgcaactctgccccagcgaaataatctcggccttgcccaatttctgttgacaatttttttcaa

SEQ ID NO: 167076 - DNA, 329 bp, Zea mays
  Clone ID: MRT4577_83952C.1
attcggctcgaggggccattcgttccaaggtttctgaagggtggatgcgtacggctggccacaaccctggcggacactggggtggacttctacacaacattcattatggcacacggatgtctgtgctattgaactggtgacggacacgagttgaatgtcaagcacactcaccccatgaatgccttatgtctggagacccatgaaaacttgacattcatgtggtcggtgccaccaaactatgcggacccttacagccctacccgatgacgacatttttgacttttgcgttgacacattaaagttgctgatgacacttcaagacttgtgag

SEQ ID NO: 167077 - DNA, 508 bp, Zea mays
  Clone ID: MRT4577_83953C.1
gaaaacaatcttctactaagccactgaatatgtcctcgtgtacaatttggtcaactagtgtgaaaagcctcagctgaacaatgttttacggtaccaacctgaagctaccctcagcatcaggagctttcgtcaaacaagtttacgagaaaacttcacaagttagggctagtttggaaacctcattttctccttagaaaatagaatttctccttagaaaatagaaatctcttgaaaaagatagagttcctaaactagcccttacatactctttttttcggcaattttatcaaggtatgtgatcaccatttgaacgtggttcgtaggctcaccaattaatttgtattcactccactttcatgactatcttcatcaactcataaacaaaatagctgatcgatgctgatggtagaacctgtaacatgctggggatcagaccggcatacagtgctggtaccccaccttgatcaacaatcttaaggcatgttgcaaatgcattcattcttgttgc

SEQ ID NO: 167078 - DNA, 3622 bp, Zea mays
  Clone ID: MRT4577_83954C.1
ggggttcgttggtctttcctgcccaagggtgcaccggtgcggtgcaggcagggcggcaagatcaaccaccagaaaatcacaagaacaagagaagaatcaatccgacagcacccctctccctcgcatctacttgctcgcccagcagccgccccaaccctcgcgtccgcatcgattcgaggcagctcgctcttatatatcccattccgctcggttggattcagcttcccctcgccctccctcgtcgataaaaccgatgcaccgtgccgcctcgcgaaccctagcggcggcgggacgaggggaagaaggttacaggcacggcgcgtgaagggtcctgtcctgcccagtcccgtctggtccgccgcgatgccgtggcccgagatgtggctgcctcccgcggccggggagggggcggtggcggcggggctgtttctcgacggcgtcgatggggcggcgcacggcgcgctcctcgcggccatgcccgggtgctccctgtcgttcgggcaccagcatcggcgccgacggggggcgccgctggggtttctgtcgctgacaatgtcggtgaaggggggtagggggttcgcgccggccccggttgggttgctccccgacgcggaggagaaggccagggcggaggagtcggacgcgctggtcgcggggaagagggctgtggaagtggccgcggaggcggaggcggaggcggagggagtgattctgctgcaggagaaggagaaaaagaagaagaagccggacgattgtgctggagctggagcgatgaacgtgagcaagcatctcttggctggagcagttgctgccatgatatcgagaacagccgttgctccacttgagagctgaaggttggagtatatagttcatgggaagcagaggaatctatttgagcttatgaatgctattgaaacaacacaaatattgaaagtcttttggaaaggcaactttgtcagaatccaccgcactgctccattcaaggcagttaacttctatgcatatgacagccacagaaagcaactgctcaaatgggctggtattgaagacgcgccgcactttgcttagatttattgctggtgcttttgctggtgttacagcaacgattatgtgcatacctatggatacaatcaggacaaagatggtagctcctggtggtgaagctttaggcggggtcattggtgttgcccgccacatgatccaaactgaaggattcttctcgctgtataagggattggtgccttctcttatcagcatggcaccctctggcgctgtattctatggagtgtatgacatactgaagatggcttatctgcattctcctgaaggaaagaaaagggtatcgatgatgaagcaacaacaacaagagacaaatgcattggatcaacttgaactgggtactgtgagggttggagtatatagttcgtggtgagcagaggaatctatttgagcttatgcatgctattgcaacaacacaagggttgaaaggcttttggaaagggaactttgtcaacatcctccgcactgctccattcaaggcagtcaacttctacgcatatgacagttacagaaagcaactgctcaaatggtctggtaacgaagaatctgcaaactttgagagatttattgctggtgcttttgctggtgttacagcaacgattatgtgcatacctatggatacaatcaggacaaagatggtagctcctggtggtgaagctttaggcggggtcattggtgttgcccgccacatgatccaaactgaaggattcttctcgctgtataagggattggtgccttctcttatcagcatggcaccctctggcgctgtattctatggagtgtatgacatactgaagatggcttatctgcattctcctgaaggaaagaaaagggtatcgatgatgaagcaacaaaaacaagagacaaatgcattggatcaacttgaactgggtactgtgaggactttactctatggggccattgctggttgctgtgctgaagctgctacatacccatttgaagtggtccgtaggcagctacagatgcaagtaaaagcaaccagaatgaatgcgcttgcaacatgccttaagattgttgaccaaggtggggtaccagcactgtatgctggtctaatccccagcttgttacaggttctaccatcagcatcgatcagctattttgtttatgagttaatgaagatagttctgaaagtggagtgaatacaaattcattggtgagcctacaagcaagttcaaatggctaccacgtatcttgatgaaattgccgggcatccccagtaacttatgctgtgagggtagtttcaggttggtaaaatggttgttcagctgaagctttgcacactagttgactaaattgcacacgcggtcctattcgagacccgattcagtggcttaatagaagattgttctcttcgactccgtcctagggaaaacatctcggccctgcccaatttccgttgacaaattttacatactttatcgttgatgtatgtgacacattgacagcaagccagagtgacatttgagtgatttcagttgtgactttctaattcacagttgagatagggattgggccatataaaaaaaaattagatgtgattgtttggcaaggagaatcgaggatggccacggggatgcgttgttggtgtcgccagagggattgaaggagacgctatctctctcctctgcttgtcatcatctcgaaggaacttgaacgcctaaaaaaggggcgattggaaactggcggagtcgttgagatgactcggttggattcggttcgggcttccgctgctcctcctgtgagacatcctggcttgaatcagacacgtcgcgggaggattgtgtggcgcagcggtggttgaggagacggcgagcagcagtggagaagtagtggccgattacactggcaggaagaagccggggtgggggcatggtatcgcccggcgctgtctggcagcgcggaggcatggtgcggagccgtggtagcgccagcgcccacattttagggatggggcggctgcagcccgcgtgctacggatggggcggacgcggatggggtggagggtggtgtggggaacgcgagtgggagttggtgagggccggtggtgagcgcgtgtcggggcgagggcgcgagaatggcggatcggcgcgatctcggggctcggcggcgcggcggacggggttgacgaaggagcacgagggagaggccgtcgacagtagaccaccttccatggagatcatgggcgagcaggtccctgaccttccatggagagcatatcggttgtgtggtgggggcagcgggctcagccgttgatcgcgccgaggagatctaggtgccgaggaggagatctgccacgccggcagcagttctgtggggtagatggattgcgtcgaggagtggatcgcgatggcggatgaggagggcgatggttggggcggccccgtcgagggagcactctgccgcgggagggaaggtgagcgcggcggggcggcgggaatcgcggctgtggctgcgcagaggatggaaggtgcggggagcagggaatcgcagctgtggctgcgcggaggatggaaggtgcgggggagcgttcggccacgggcgt

SEQ ID NO: 167079 - DNA, 182 bp, Zea mays
  Clone ID: MRT4577_83955C.1
gtctgtggtcgggggcggctttgactggtcgcaacatggccgccatggctccagggtacgacttgaccaaggtcacccgtatcgggttcgccatcgagtacgctgtgtgcgctttgatggtggaggtcatcgtggacattggacatatctgatgacgaggcatcaggacgctcctatgcctg

SEQ ID NO: 167080 - DNA, 585 bp, Zea mays
  Clone ID: MRT4577_83956C.1
accatacatagccactttcatagatagccccaatggcagccgagagatatgaggggctatctctaggctcctcgacttatcatgagcagcatgatacaggcgactccttatatccgcaacttgtacgcaagcgtatcatatcgaattaatcttctagccccctgcacgctctcaccagggagaaaatagcgagatgggaaaacccgcatgtggactccttaccaccacagcaggcgccttcatttcaaacactgcctttggcatacattgcgcatcctcacactgtcttggtcaaaactctgccaacatgtggggaatcacttgtgacaatgaaaaaggggtcagggacaaggcttggcagagctcttgggcctacacaaccactttgattggcaggatggtgatgactcatggcgactacaaaagtttaactttaccaccaaaggtggcgcccatccacgtcattgtgattccagtgccttataaggatgctgacacatctgttctatagggagcctgcgaatcaactgattacacacctctatcaatctgggaattagagcggatcaagacacccggcaaaat

SEQ ID NO: 167081 - DNA, 384 bp, Zea mays
  Clone ID: MRT4577_83957C.1
atgtttatatatatagatataggattattccattacaaaataaatccaagacataatctaaaaattaccacatcaaaacacaaaccggaactacattgaaatctaaccgattttagactaaaaaccggcttatcgggatcctaaaacataggtgttagtgtgttacagagaccgaactagccggttcacacatctggcaaggcctgttttcacctactagccttattttcttattgcagactctaaacatcatgatgcattaaccctagatggaggtccttgggcatgcccatacattttttccccatattcatgccgtcggatgccgtagatgccgcatatagcatcaatgcaactattacatagaggaattaactacacgta

SEQ ID NO: 167082 - DNA, 350 bp, Zea mays
  Clone ID: MRT4577_83958C.1
aggctgctattgcaactgggcaaactctcgatgaagctgcaaagctaaagtaggtactatgcacaggacaagttcctgctgaatttgcaatggcaaagaccgatgcacacatggacgaagcttcagatggagccgatcagatggacacagatggtaagaaccaatatggcagtgaggctgatgggcattgacacggcgaaggaagcaccccaattcaggacgatcgaaagcatggagacataggctgggtcatccattgtctgagttatgtttgacagttttcgtgggggtgcatgaaagagctatagccttgatgccgcataactcggactctactgatcgcatgtgga

SEQ ID NO: 167083 - DNA, 1272 bp, Zea mays
  Clone ID: MRT4577_83959C.1
actccctctcctgcgggcaccgtcatctttctttgaatgccattgcctccctccctccctgaccggtggccgcgagatccccaacccccagcctcctcttcctcttctcacgcgcctcttttaaatgcgtgcccacccctacttaccggccgccctaaactcacaaggccatctcggccgggacagaccgacaacgccctatgcaagcagcaagcgtacacgtaaacgtacacctacctcggcgagcaaaaggcaaaacgctgatcggagcaaccaacgaagcccgcagccatgccgacggccacggccacggcggctcctcgccacgccgcgctcttcctgctgctgctgctcggcctccacgccacgttcgccgccgccgcgcgcgcgggcgtcgccgtggacgccgagctcacgtccaccaagccgtccccggtcccgaagaagcccagcgtgaagccgcccggccccggcgccgcgagcccgaccttcccgggcttcggcatccccgggatgggcgggttcggcatccccgggatgggcgccggcgggtggggcggcggctacggcgggcccgccggcgggtacgcccgcggcggcgtggtggcgcccaccgtgacgtgctccgagaaggggccctgctacaggaagaaggtcacctgccccaagaagtgcttctcctcgtacagcggcgccggcaagggatacggcggcggcggcggcggcggcagctgcaccgtcgactgcaaggtcaagtgcacggcctactgttgattcgactcgtccgctgctggcgcgtagcggtttggcagtgggcggtgctagtggctggcggtggcggcctgctagctgctgttggtgtgatggcgcgtgtgcgtgtcggtgagctgagtaccgcgggtggttaacttgtgttatcatccccaatagtatactagcgtacttctggttctggggactatttatatgtagaccacgatatgcgtaggggcggtttatttctaagataagaatataagatgctctgcttatggtgtttattagtattataatcatcaaagttgcgttcctgctttggttaagtgataagacgtgcttgtgaaatccagtatgcataaataaagagctatattgtaagtatcaaacaaaaaaaaaaaaaaaggcgggccgttaagatccaagttaaggaaggggggcttcccttcctctcccgagccaagatgaatgttgaaaagctcaagaagatggcaggtgctgtgcgcaccgggggga

SEQ ID NO: 167084 - DNA, 312 bp, Zea mays
  Clone ID: MRT4577_8395C.1
ggaattacaatatccttattcttgtcccaaaccaaaaacgaaagaatccggcccccacttttccgggaagcccacacccacccgtgtgtaaaaaaacaaaggggaatattccaagctcccccaattggaggggcaaaaaacctaccttcaaattatgccacgggggaaagggcgcaaggccaggaacccggaccccccgggggaccccgttataaatagggatcaaacccccggccccccgaggtaaaaaaaacggccccccctgggggcggtggaaagaaacacccccttcgtgggggggccccgaggaaa

SEQ ID NO: 167085 - DNA, 913 bp, Zea mays
  Clone ID: MRT4577_83960C.1
cccttcctctccacttgcaacctgtccctgagaggcccgcggcgtctccgcttcgcctcaccacccaccaccacctcctcatccagcagctttctcctttgctgcccctcccctttgccgcggtcagggctgtgcagcccccgcgttgcattggggtcccgtgccgatcgccaggccgcgtgatccacccgtgctcgagcaagcgcctcgcgctcctcttcttcatcttcgttgcggccacctttgccttctgggaccgccaggcgctcgtcagcgagtacgagtctgatttgtagctggatctggttaattgaaaacgggtggcatggagccatctcttccgcctggcgcctgctgccgctgaggcgctgactgggagttcgacaccatttcttcgttctgaggagtagtaggtggcaacagtcgccgatctgtggcgtgtattccctccggcgtgcgcagggccaggcaagggcactggacgcgggcgtctgaaagaagccggctaggaggaccacgggtccacggctgggcagtggccgggcgctgcgcctgcgctgggcgtgtgggcggcccgtggtggggctggcctcggcccccggggtcgctagcggccggctgatgagaaccgtgaaccaataatttggcaacaagacgcccctgacccctgtggacggctccgttctttgtgacgtggtcgccagtccagtcggcgctctcagatggcccgcgggttatggctcctctcccgcgaggtggggaggctgcggccgctgcttgttcaggggcaggcgaggggcatctctgcctccgcacaggagcagctccatgtctgcgtcgttggcagcggccccgctgggttctacaccgccgacaggatgttgaagggtcatgatggagcacaggttgatat

SEQ ID NO: 167086 - DNA, 477 bp, Zea mays
  Clone ID: MRT4577_83961C.1
cttgtattctctagagcggcacgccacatcacggttcagatgtaaattaaccgagcagaggcagtgaacatgggggtgattggtcatactctcactgacacccatgcagtggcccgacacggtcatgcttactcctggcggacggacgccaactcatgatggttagccagcagcattactacagctcactgaatcatgggggacggacacccccgatcgccggtggtgagccaggagtcggggtgatggaggccaggacataatcgctgttggctgtgctatccgcatccgccgacaggctcaggcaccggcacaatttgcagatgatgctataggatggactcggggagcaaggctatcatctcacagtaccacagctgatactacacctgagcgtactgctggcaaccttgctggcctaacgactgagcctgctgacagcaattgggcggcgcccactggccgctctgaagcctg

SEQ ID NO: 167087 - DNA, 172 bp, Zea mays
  Clone ID: MRT4577_83962C.1
cccacgcgtccgctcacacgttttcattctccagctcagacacgtgcaccgaggcgcgtatctattagacgaaggccgggccatccaagccaacgtactcactaacagaacagcatagccactacagtatgccgatgattaccaacaccttaagcaccagcctacaaccccg

SEQ ID NO: 167088 - DNA, 677 bp, Zea mays
  Clone ID: MRT4577_83963C.1
ctcgaagccggccgggaaacactcccagacacgacaaaacgctacttcctctactgaactacctcacaaacacttcgaacctcatcccaccaaccaagaatcatcatcatgcgtttcaccagcttcgcaaccgctctcaccactctctctgccgcctcagcgcgcatcatcggcattgaggctccctccacgcttgcaccaaacagcatattcaacctcactctgctcacggagaactacatccagtccgtcgccgacatctccgtagcatggggttactctctcgcacccggctaccctacgaccctgggttccttcacacagagctcgtacctgggccccaacaagagtttcacgctcgagaacatcaccgttgaggcgaccgtaccggctgctcttgacagcgacgtctacaacggaagcttgatcttgagcgctggtgtatacagcctgtacggcgctagctctggccccgtcgtcacgggtttcaacgtcaccgtgcatgttggcgaggagaccagcgaggagactgtcaagagcaacggcacggcttggactatcaacagccagtcctgagcagtgattattgttccccgttttctaccagatgtatatagcttttatgaatgacgaacacgtaaagccgcaaggacaaaaaaaaaaaaaaaaaagcggcc

SEQ ID NO: 167089 - DNA, 662 bp, Zea mays
  Clone ID: MRT4577_83964C.1
ccggggatgccagctacccttcctctcccttgcaacctgtccctgagaggcccgcggcgtctccgcttcgcctcaccacccaccaccacctcctcatccagcagctttctcctttgctgcccctcccctttgccgcggtcagggctgtgcagcccccgcgttgcattggggtcccgtgccgatcgccaggccgcgtgatccacccgtgctcgagcaagcgcctcgcgctcctcttcttcatcttcgttgcggccacctttgccttctgggaccgccaggcgctcgtcagcgagtacgaggtgcgcccctctcaccccacgggaggtcccctgatccgggatggagagtttagtgaccgggatctgattagccctgtcgcgccttgctttgcatttcgatttgtcgccagtctgatttgtagctggatctggttaattgaaaacgggtggcatggagccatctcttccgcctggcgcctgctgccgctgaggcgctgactgggagttcgacaccatttcttcgttctgaggagtagtaggtggcaacagtcgccgatctggtgagcctccactcgcttcccgttgtatactctgatttgtcaaatcttctactggttctggttcagaagtattgactttgaaagctcacaaatcccttttttc

SEQ ID NO: 167090 - DNA, 409 bp, Zea mays
  Clone ID: MRT4577_83965C.1
aggcaaacagcatatggataatgctaaagggtcgacgaatacccatacagacgggcgaagaaaccaccaacccggcaagcataaagttaccaccccggaagcaacctacagccaacttttattcgggtaaaattcttcggggagcagggttccgatctaggggccccaacagccgataggggttaaaaatccttttgggaaggggtgcttcaagaagtttttgccggcttaacgctaattggcagaacattttcatcatgggagaagttctcagccatttgccatatttggggggtgttgttcttagggacccttgcaaccacccaatccttgcaggggttccaggagaaatcaaagatcttggtggtatggcccccctggatgaacatgagccttgggggaccaattt

SEQ ID NO: 167091 - DNA, 287 bp, Zea mays
  Clone ID: MRT4577_83966C.1
ttttcttttttttttttttttttttttttttttttggggttttttttttttttttttgggctttcggccaggaaaaagctgaaccctaccccaagacaatagggggccgaccaaaaaaccggttgggggcggacatgcctcaaaaacggggggggaaaataattaattcgcccaaacccttcaagggggccacaccgggcccggaaaatgggataaacaaccgcgcccccccgtgttgaaggcagaaaaaaagggaaaggcgcccaccccccacggggggccccccc

SEQ ID NO: 167092 - DNA, 418 bp, Zea mays
  Clone ID: MRT4577_83967C.1
ttgctctaccttctactcacactcttaccaaatactccatctaatacatgtcctggatcttttatcaaggggcgagtggataaatcttgatgttaattactcattacttcatactcgtgtcttgcctatcaacactcatcaacccattctcatatataatgcctctcgctctattacagcatacatcatctcactcaaaagttatcactctacataataaactgtcaacatccttcatgatcacgactaacttttcctaatattctcaagaactccatctctacatacataactcaaacacataacaccaatatgaaccttcataggacatacttattatacacctacacactcctcatcccatcaataattactccttctacatataacaactgccactaaaacattcatatgatat

SEQ ID NO: 167093 - DNA, 253 bp, Zea mays
  Clone ID: MRT4577_83968C.1
attcaatcaatttcgtgctgtttctcatgtttggatctgcggtattttgtttaagtagcatgggatcaacataatgtagagtgtcagataaatcttggaggtgtcagaaaactgctcaagtgatctctactgattaatgattaatatgaagcatgtcaggattatgatatcatgtgttaatgggacgggtgctcaaagtactggatctattatcaccgcatactgttgattgcttacctagaacttggcaaac

SEQ ID NO: 167094 - DNA, 424 bp, Zea mays
  Clone ID: MRT4577_83969C.1
aaaaaagggctctaaatatttcaaatcccatgtccattttttttttaaaaaagctttcccctgtcaatcaaattttagcagtccaggggcaaaacattcgtataaaacaggtttttgcagcacagcttacacagtcaaatccaacaaaaggggttctttgttacatcatgtaattgtgcatgggggggggttcctaaaaagccccccaaaatttgcatgctggggcggaaaaattattagggtaaatggcgttcataaacctttgtaaacaatctcaacatgtcttaggttgtcctgggaggaaaaagggggaaggtaaaagggccggaggccttcctctgcaagagtgaaccccacttcgggttaattaactttgcaaagctctggcctggggtgtgaataccccccaaaccgccctggtcct

SEQ ID NO: 167095 - DNA, 485 bp, Zea mays
  unsure (1)..(485): unsure at all n locations
  Clone ID: MRT4577_8396C.1
cggacgcgtgggccaatttcatatcttcttttttttttttcggcggccgccgcggccgcgggtccccaaaaggggggttagtggtattcccaaattcaatcataaatcattcgcgtgctttcatttcaattcacacgggcgccgcgaaacagaccgagaacaagcatctcgtgtcatataactctcccacgcgtccggtcactcgtctgtgatctgctgcactttcatcaacaccagtctctctcctcctggattgcattgcccaggcaagagaacgcacgcacaccaaccggaatagccatgatcttctgatccaatccaagatgggcctcaaggagcagcagctagacgccactgaccaaactcgtgatgccgccaactcnctcgcttctgtttctgacgagcaccacgagggaccccgtgtctcaagctgcagcactgacaaggattctggccttccaagttgctgagtctgccattgcgtg

SEQ ID NO: 167096 - DNA, 266 bp, Zea mays
  Clone ID: MRT4577_83970C.1
accacctcaacttcagctgctcctagcatcgtcgagcgcgagctatacaccgagctagccggcggagggcagcaaatgcgggcggccgcggggtcctggcactcgtcgtgctcaatctgacggtcgtcgcattggaggacgacccgaccattgtgcattcgaaccatacgatttggctatacggtgtccagctcggcagcgcgcgcttttgcttctgccttgagctggacgaccagcaatgcgggactgaatatgatcggtccatt

SEQ ID NO: 167097 - DNA, 290 bp, Zea mays
  Clone ID: MRT4577_83971C.1
aacaaccagagaacaagacaaggacgaaaacccaggaaggaacacgagagaacaaccagaacacggacacgagcaagaagggcgccaccgagcgaggcggcacagacggcccaacagcgaacaagaacaaaaaaagaaacgccgaagcccacgggaacaaaaagaaacaacccgacacaaagcaacacggaccggacgaagacaccacggaccgtagtgcgagaaggacaggcataccaccccaaaacggagggagggagagacagcaaccgcaaacgcggagagagaaa

SEQ ID NO: 167098 - DNA, 359 bp, Zea mays
  unsure (1)..(359): unsure at all n locations
  Clone ID: MRT4577_83972C.1
cacactcacacacccacacttaagaaaaaccattgcgagccccacagaangaccagganaccatggacacttaaaacaaccatgggggatnaacccccaccacacacacacacacacacacacacacaccaacagagaagcgaagaagcacaacaaacagcacacgcagcaacaaacaccacacacagaaaaaccatcaacacaacgggggaaagaagaacacacgcacacaaacaagcgtgcgcccagaaaccgccaaccaaaatcagccagagaatcccaaggaagcaagggaagaagcacaaaaaaaacagataacgacgaggaaaacccacgaagcaaaatgagcgccaacccac

SEQ ID NO: 167099 - DNA, 595 bp, Zea mays
  unsure (1)..(595): unsure at all n locations
  Clone ID: MRT4577_83973C.1
aattcggcacgaggggctgatgcgctaggtactccaatgttcggggcaagtggtgcttcgagacgcgaagggaccctagggttgtatcgtgagagggtgtcatcattctctttcccttcttgcatttgagtcatcctcgactcaagctcatcctcattaatgataaatggccgcaaatataatacgttaaatgtgaggtcgatcctgaaatccgcaggcaccaagcaactcaagtgcctttggagtttctatcctgtcccaatatcatcgtggattgatctccactctgtccatgatcatgtagccatcagggatgttcgacttctccacgcttcgatgacttcataattcgccaatatcttcattgaaggcctcccctcctcagtgttttcagagtttctatccggtctcaatacattctggctagagtttcgactacgaggaaggacattagactctctattgtatctatggggtctagaacctggcccatgtgtcctattagggataggctgaggggatgtacccttangttttntagcatatatatattngnactattccctannacattaatcatccaattattctcttt

SEQ ID NO: 167100 - DNA, 2045 bp, Zea mays
  unsure (1)..(2045): unsure at all n locations
  Clone ID: MRT4577_83974C.1
gatgtcctcgattttgggaggggaccaggaaggaccaaagctaaaccccacgtccccctcacgcgctccccgctcccatctcccaccccccggcacgcgccgaaacccaagctcgcgcgaaatccaaggtaagaatccatggggggcggcggcgccctcacccccaccagcaccccctcctcaccgtcgagcccgtcggagtcctttcctcccgagttcgtcgagtgcgtagccgtctcgccggtctccgatgacgacgaatcagatgattgctgcgtttgcgacggcgacgatgtggactccatccgctacttcaaccgccaactgcgtgaggcgaaagagttcatcaggaggtataagcctggggactggattgagggagtcggaagtgcaaaggctggacattttgtcttgcctgaggtcaccacattgctcttggtgggccctagaggttctggcaagagcacacttgtaaaccgaattactagggtctttgacaaggatgatgatccttttgcaccagatcgagcacaggtgtcatgcaattcaaaatcaaatggtacaatgtttcttcgcgagtatccaattccaaggaattcaagtgccgtatgtatttacgatacacgtggctggtcaaacgacctagagaaaaatttcaaaatgctgcatcagtggatgacaaaaggaataagccatggggagacaacaatgtgggatgatgatgaaggcaataagatagggaacatgaaaccattggggaggcaatacagttttcttcgttacaaaatccggaaggtcaatttcgtgttatttgttgttgatggtgttgctgtcctcgagtcaatggatgacagcaataaaggatacactgagatacttcgtcaaacttttatgtatccgttcttgtcgattggagatgataaacctgttgttgttgtcacacatggtgatagactgtcgatacagcaacgtgttcacgttcaagctgagttagcagagctactagatattcctgcccagcaaatttatgatataccaggtgcttgggcatgaaactctcaataaaatggcagagcaattgatgggcttagatgcagtcattgaagtcgccattattttcctatgcatcctggtcctgctgcttcgattttccgataaattggtgcagccgtagctacgttctgcacttggggttgtaactaagaaaacatcatggtgactacttgtcctcctcagctagtagagtaccctaactactttttnttctngactttcataaatggtncaccnttctnctttttnctngggttnactaagaactcttgtgnnnctgnctattactanaatccttactccttntnggcangnttttnngacnctnntgtatanaaatattttttnnnnnttnaaaaatggcggncnaatctttgaaacctgtactgttggaattggtgggctcgtggcttatcgtaagactcctcgtgggctccgcacactcatctctgtttgggcccaacatcttagcgaagaagtgaggagaaggttctacaagaactggtgcaagagcaagaagaaggctttcacaaagtatgctctcaaatatgaaaatgatgctggcaagaaggaaattcagctgcagcttgagaagatgaagaaatatgcttctgttatccgtgtcattgctcatacccagattaggaagatgaagggtttgaagcagaagaaggctcacctgatggagattcaggtcaatggtggtaccattgctgacaaggtggactatggctacaaattctttgagaaagaggtccctgttgatgctgtcttccagaaggatgagatgattgacatcattggtgtgaccaaggggtaaggttatgagggtgtatccactagtcgtggtttaacagggcttacgtgagagtccctctatgggctacgtatagtctggtgtacatgcgcatgtgtttctacgagctcctggactctagtctgcagtgcaagtttgcttgagttgagacgcatatcatggaggaactggttcg

SEQ ID NO: 167101 - DNA, 192 bp, Zea mays
  Clone ID: MRT4577_83975C.1
ggcgtgtgatctatcctcccgctaccaagccactttttattatggcagcgtctctccaagccgctggggcgctgatgccgggcaagatcggcagccgggccttctcctcgcgaccgtcttctcacgtcgcccgggcgtacggcgtcgacgctggcgcctggatcacctgctccctgcagtactacatcaagg

SEQ ID NO: 167102 - DNA, 383 bp, Zea mays
  unsure (1)..(383): unsure at all n locations
  Clone ID: MRT4577_83976C.1
ntccgattctgacggtccaagtcgcttttcagtatgtcgccaacccggctgttcctgggggattgttcaattgttaatctttaaactgccagtgcctcgcgcctggtggattcattatccatacggagctcaagatcttgtcaggtgtacattgtgtggttccaagaacatgtcgtatgacagtgccaatctgactactcctgacatcaagtggctcggtgtccggccgagcgacctgtacaatgtcagattgccggagcattgccgtctccccatgaccgatcactatatcaaggtggggaaagagctgctctatgaagactatctttaagcacaatgaggttctgtgttaaataactttagactattcttctcaccaatca

SEQ ID NO: 167103 - DNA, 1102 bp, Zea mays
  Clone ID: MRT4577_83977C.1
ctctggatagtgcactttgtcatccaaaagatatcttaagccgtttaactcttcctcatcgacaagatctagacaattctttagcacccggaagggagagcacagctgcagttaagccttatatgccttccatgacagttcatggagctagtttgccaccatttccttggtcacattcacaggctgggggctgtcgacaaggtgttgactgtggtaaacatggatcaagtaggagtaactcccagtggcaatgggtgcgggttggctccaacctcacttctctagatcatgaagacacgtctgtccatagaattgatgatctccttcaagagatggatgcagcaaaattatgtatattggatccatgtgatggacaacataatttgtgtggcacagaatcaacttctggatcacttgtacaaaacattcactccagaaaaattgggggtgagcatggttctcagcaactgcagccccaggatcatcttgactctttagatggtttccagaagcatgacattgattattctcttttaaaaacatctcaagtatcgccaaagatacagtgcgccgctgagatcttatgtgatatgagaaggagcactgaatcatggattggccaaggatacagcaatgggacaattaagtggccaaaatcaccacctgaaaaggcgatgaaagcccggaagccctcatcccagtttggtacaactgagagctcgtcaggttctcgtaacaatgaggcaacttggaatgggagcagtcactctaccaagaaaattgttgacaggaacaatgattctgcacgcttgaataaccctggtaagggaactataagatggcctgtccctgttaaagcccactgcttctcctgtcaggtccgagcggggtcttatggtcgacatgaggcagccccatggaaatggcggaaggcatctggtccaggtgtcatcacagaacattggcagatgtcataatttaggtggctggtcacgcacctattgggccatttgttgttctctagaaactgctggagattggaatagggagaagaacgggagaatgtgaagcgtacattattcatgtcaaaatcatagggtac

SEQ ID NO: 167104 - DNA, 274 bp, Zea mays
  Clone ID: MRT4577_83978C.1
cgccgacgccgtcatcgttctttttgaacaagagcagcgcccggcggcgggggccctgaagtacgaggccgccgaaagctccggatccgacgcgctcccggacttatcatgtcaaggcgtgtcagcggcctacgacaagccccccgcgccgcgcccggccttttacttatatgcgcggtcggagagcgccacgcacttaggcgtcgccccgggccttcgactcctagtcggtctcgcttttcgactcgcttcttttttgtgaccaattttactt

SEQ ID NO: 167105 - DNA, 227 bp, Zea mays
  Clone ID: MRT4577_83979C.1
tcgacttcacgcgtacgccgacgcgtgagctcctcccgctccagttctttttcgggttcgtattgttctccgtcgttacgctttctttccaaaggcggatctagacggctacctcgcacagactagtaccgctacctcgtcatccacctcgcctggaccacgtacgaccactccctaacaactcctacatcacctacggcgagtgcctctactccaagatcattcca

SEQ ID NO: 167106 - DNA, 423 bp, Zea mays
  Clone ID: MRT4577_8397C.1
ccgcctcaccttccccgcctgcggcgcccaagggacggacaacacctttgacgtggtaatggtggaccaggctaaccaccccactgccctacataaactaggcgggcagctcaaccagaggtccaacttctcatgaaggtgcacggtccgtgacatctgcccttctgtctcacctaaggacaggatatttgtcacgaggaactacatgaccgacagcctttgggggccttccatgcccgataccgaggccagcaatgttgacacgatgccaactccgatttttgccaatgctccagccgagaaaggtggcaaaaacttcatgatcgacttcatgatggacggtgatacacctgctgctgccaataatgcaaccgctcccattgaacacgcgaagctgcttactcataatcttgatgagatgat

SEQ ID NO: 167107 - DNA, 169 bp, Zea mays
  Clone ID: MRT4577_83980C.1
tgttcacacactgagttgtgtgcgtgttaactctggtagttgttggattagatgatgatacctgttctgggtgaagccgtttatgctattcatttactcttgaattagtcggctacacttatgtgaagtggaaggtagtagttcctgtgtagttttagagggcgagtat

SEQ ID NO: 167108 - DNA, 490 bp, Zea mays
  unsure (1)..(490): unsure at all n locations
  Clone ID: MRT4577_83981C.1
cttctataaccagggaatcattntttacatttnttttttttgggagaaaggggtcgcctttgtttaaaaaaaacacagcgcctttcgatatgtggatcctcaagtcccgcagaaatcggcagccctttttttaacaggtttttatacaagaaaatgtttccacctgtccagaaattgattggacaagcgaccagtttccatttcagttgacagtgtattcccagtccaccaaacggtttaggatctcctgccagttgggccgattttaaggttttgcccagcaatctgcatttaacctgccgaaaggcccttaagaaatttaaacccggaaaccttatttaccaactgcgtaaacaatttgaactgggaaaatgccttccattggccaattaattgggcacagcttccaacttgaaaccaccaaggtgaataattcaaatttttttgaaaaaggttctttccgtataacttaagggccattcctttccgg

SEQ ID NO: 167109 - DNA, 346 bp, Zea mays
  Clone ID: MRT4577_83982C.1
aggtaccaggcattacttcctctgtccagctacccgtgaaactgagtgaccaagggccattctgcacgtgagttcactgtgattcacatactatcgatgatgctgttggctgaagatgatgagttcgtgtgcgcacaactggtgtattgaaggtgctgggggcccacttgtttctctggggaggagttcatgaccaaggtatgaactcattgcccgcctgcaatcgctgtgtgaccaactgaacccagacgccagccttaccgggacgaaagactaactgtcgctacaagtggtatagctcaaagaggagcttagtgatccgaggcctaaacttgagcctggccgt

SEQ ID NO: 167110 - DNA, 816 bp, Zea mays
  Clone ID: MRT4577_83983C.1
aaaggaccggggggcaaccccggaaattcgggccgggacccgggggggggaccatttttcctaaaagggagggaaaaaaaaacggggggaaaaaggggaaaaaggtgttccgggggaaaaaaggtttcccgggaaaaatacaaaaaaaatatgggcgggaaaaaaaaaaatgaaaacccgggtgtgttaaatgaggggcctccccccagattaattggggggggccccccccgtcttttttttaaaaaaaaaaaaaaagggggggcgcccgggattttttaaaataaaaaagggggccaaaacaccggggggaaaaaagagggccctttcccgcaaaaaatgggggcgccccacagggggagggggttttttttttttttattccacccaagggaaaaaaaggggtacaacacacctttggatattccccttttacaccccgggtggggtccccacaagaaaagaagtgtccataatatggggggggccacacgaggggttttttcccccccaccgggggggaaaaaaaattctttttttgggggggggggggaaaaaacgggggaaaaaaaaaaaaaaaaaacgtttttttcctaggggggggggggtatttcctccttttgcgaaaattattgggaaaaaaaaatgtgtgggggggaaaattgggaaggggggcaaaaaggccccccgggggaaatttttttttgggaaaaaaaaaatgtggggggggaaaaaagccccctataaaaaattttgggggggtgtggaaaaaaccggaaaggggcctttcggggccccttcccgtcgagtgggggg

SEQ ID NO: 167111 - DNA, 1196 bp, Zea mays
  Clone ID: MRT4577_83984C.1
ttgcaatgcgcacgagcacgccgcctccatgtgggtggggaggcaaacgcgttcgtccatctctgaaactcaaacgccttgtattggagcatactacaggagtacttctgtacaaatataaatacccctggcgagttggggtgggtctatctcgcaatcgaggcgttttttttctgcttcgtaagttcgtggtcgatccagcgagcgagcgagcagaccggcggctaaccgcggagggagagatggcgcaggggacgctggaggtgcttctcgtcggagccaggggcctcgagaacaccgattacctgagcaacatggacccctacgcgcttctgcaatgtcgctcccacgagcagaagagcagcgtcgcatctggcaaaggctgtgaacctgagtggaacgagaccttcgtgttcaccgtctccgatggcgcagcagagctgttcatcaagctcctggacagtgacggtggcactgatgacgattttgttggtgaggcaacgtaagtagttagttaggctatcttcatcagcttatctttccacgtcactatatttaaactctattctgcatggtctatatcaacttttgattttggttttgtctcaaattcctctggaagcagtttacacggaaggaaacatccctccgactgtttacaatgttgtgaaagacgaagaataccgcggagaaatcaaagttggcctcacgttcactccagaggaccagggcttctgaggaataacttggcgtgtggccgctggaactggaggcagcaggcagtcgtcttatgattcagaagcaaacgacggatcgattcccttgatgtactgcagtccagtgagcgtgcatctacaacttgtagaagaagcctgcaacatgatcacgggatcctgtactgcatcactctaaagcctagctaaaaccaccagctcctgtacttgatgccgggcgggcttgtcatgtactgaaacctacaataacggtcgccgaaccccactctttgatgttcagtaaacttgtcgcggtttacaagaggccgtgtgactgctgcaagatatcgcttgtctgctcgcgggcccccctgtaccctccgcctcgccccgggtttggtgggattggagtggattgtagtgttttaaagggattgagagaaaaattagttcatattacacttcaaaaaaaaaaaaaaaaaa

SEQ ID NO: 167112 - DNA, 577 bp, Zea mays
  Clone ID: MRT4577_83985C.1
aaaaaattttaaaaaaaaaaaaaaaaaaagggaaaggaaaaaaaaaaaaaaaaaaaaaaaaaaaaaaaaaaaaaaaaaaaaaaaaaaaaaaaaaaaaaaaaagggggggggcctttttgggggctccattttttcgtcctccttcttgcttcctaattgtttttttttggcgtcccctacgtgggggttgttggccgtttttctacaacttccttgggtggaaccccctttggcttcccccaatttactccgcctggcggcccttccttttttcgccgggtggggtattaaccgagggggccccccctgttgcgtttttcccaatagttgcgcttgtttcgtgccttttggccccccccttttcgcggttcattaagcgcgggcgcttggtttgttccctgcatgttgccttttctttttgccggctctcctagccccccttccttttgttttcccccctttctttttcgcttcggtgggcggttttcccgggggtgttttttttgggggtcttttttgggggttcctatttggtgtttgccggcaccttcccccaaaaatactttttgggggtggt

SEQ ID NO: 167113 - DNA, 282 bp, Zea mays
  Clone ID: MRT4577_83986C.1
atgggcagggtcaccgcggaggtgacggcggagccgaagatctgctcctggatgtcctcgaaaccgtggccgaggtcagagtcaacgcagctggccgaggatgtggccgaaactgcggttcaccatcaccacgaccaccaccgccttgatcagagagtggatctcgtgcttccgccggcgacgcttcagcccgaggtggattttgatggattaaccagcgagtccgtggttggcatggaggagaaagagatggcgagtgtgccccacctatttccaaactaa

SEQ ID NO: 167114 - DNA, 677 bp, Zea mays
  Clone ID: MRT4577_83987C.1
tcctcctcttctctgctatcccaagaacagaaccagccacccacctctctctctctccccaagaacagagcatggccgccgccgccttgatctgccccgtccgggcatctccggcgacacggtggacacctacagattctcctcgtctccctctaccatttccccctatttattttatccgccgccgccaaaaacgccgccaccactcaatcctagcgcggcctgattcaggtccggtgggcttgccaccggctgcagcggcaacgacgtctccatgcctacatcctcccccagcgcagccacacacacgaggcgtgcagccacgggcgtcgggcgtgtgcggcttcaccggcgctactcggtcgcatggctctgctgctaacggtgtggactagccacatcctactgctactactgcaagataaatagatcaaggtgaatagatgctcatggactgattcaaaccgaggtggagatagacaagaagtcaagcaagaagggctaacacaacaaggtacttgattagtacctgatggcgcatgcaacccaaagggcttcaccgcagtgaaggacagcagtgtggcagaaggtgaaaaggcaagtggtggtggtactccagtgtatgtgtgtgtgtgaggtggaatggaccacagtgaaaggaatggctcctatttata

SEQ ID NO: 167115 - DNA, 411 bp, Zea mays
  unsure (1)..(411): unsure at all n locations
  Clone ID: MRT4577_83988C.1
ttccactctaccgcgcgctcggaaaactcctctttcttctaaggaggtgaaccaaggacgaggtatgtgtctcctgataaggggggggtctttccncctnttcctacaattcttttgtcttgctccaggcggctatgcattcattgtagttcgtcctcgcggatcctccttcatttctttctgttcccacccaaaattaaaatccttttgtaaattagagacgcgaatccttgtccctaagccccaaaacctcctatttctttcgccaattttttccgcctaactctttccttccttccaccggtcggccttgactgatccttctcacttgttttttcttagtttcgaattttccttttgcttacaaattcctatataacactaattcctgttctttccacttttaatttt

SEQ ID NO: 167116 - DNA, 341 bp, Zea mays
  Clone ID: MRT4577_83989C.1
catacaatacacactactcacccatccgttatcatccaaatatttggcttccttaggcgcgttggttttcctgcaagggcgtggtacagcaaccattttcccacaatgctcacaagctcctatagcttcctttcttccaccatacctctcaccagcggtgtcttcagaatgtgaaaacccaattcttcaaccctacaggatccaacaggcaatagcatcatgcatcttacctttatcacccttgtatccttcaacaaccgtcagccctattacaatcagctacctattgtgcattttgttggcacaaaaacatcaatggcacatcaactactaacaacttg

SEQ ID NO: 167117 - DNA, 456 bp, Zea mays
  unsure (1)..(456): unsure at all n locations
  Clone ID: MRT4577_8398C.1
ttttttttttnnnnnnnnnnnnnnnnnnnnnnnnnnnnnnggcgcaccaaaaaaaaaaatccctcaagctctaaacctaggaattgttgtcaagacgcgtccatttcaccaacaaagtccatcctggacgagccaaaaggctgcaagaagctaatgtcagcagccaggccttggaaaaccccttcgccctcctccttttttctcaaaaaccctcctcccgtgctgaggtccatccacaggttgctacggccgagctcataaccaccgaagcctccttcctccaccttcacctcgcacttgatcttccttttcttggtcgccgtctttttttgcacttgcaccgtaaaaccgctcttctcgtcgttggccaccggagccagtgccggcctcggcctttttttggacgtctccgtctcatcgtcctcacctaccgggggcgtcgatgtgacgacgtcg

SEQ ID NO: 167118 - DNA, 184 bp, Zea mays
  unsure (1)..(184): unsure at all n locations
  Clone ID: MRT4577_83990C.1
ggggtcaccccccaccctccggctcggaccggggccccacccaaatcacacagatctggacgccggaggaggagcaacgccgtcccgcatcacctgagcaacgcgggctcagagaggccatccagcgcangcgcaggtcaagcttcggattcccggatcccacaccaccggtctctctcgggga

SEQ ID NO: 167119 - DNA, 173 bp, Zea mays
  Clone ID: MRT4577_83991C.1
cccacgcgtccgaggcggagtggtagcgtagggtacatgtgaggttgaggtcggcagtgcgagggtgaggtcggtggttcgattcctaacaaccgtgtagcgcgtgaaaaatgccgcgatttgcgacttctgtggggtgggctgagtccacatcttaaataaatatttaaaaa

SEQ ID NO: 167120 - DNA, 464 bp, Zea mays
  Clone ID: MRT4577_83992C.1
gaaccaaacaagcagctttcatatacacttcataattatttccaacaacaacatacacgtgcataaacttcgagtttattttcaacaacagctttcgtatgcaacattcttgcaccaaacatgaacacaaaaacatgccaaattcaaactactagatatatgtcccagagattcgtggcccacccccgtcatgcctttaagagctgtttgcatcccttcattttaaaggaattgaaacatatttagagtagtaggctatttgtcttaaaatttaataattcaccacttttcaaaatttagatataagtttatcgtaaatttatagggtgaccaacattactatacaaatatatctcacataaaactatattattctaattaatctgtgtttgaattataattattagaatgtaattcaattcaaaagatccaaatagagcctaacagtaattctttccctccgt

SEQ ID NO: 167121 - DNA, 1514 bp, Zea mays
  Clone ID: MRT4577_83993C.1
gagactattactctgaacgatcaatgtccaacttcgacgtttaccaatcaacgaacatggattataataacaactaacgcaggacactgatcccatcatataaacacctttcatcaaaagcagcactaacaacctatcaactaaacgttcgagacccgaaacctaaactttactagcgaaacaaatacgatgccacaagcgaagagttattttcacaaacatctaacaccaccacaatgcaccagtgctatcaacaagagaaacgatgtaactaacgtgtctaaccaaatccatccgaccaatagcggaagtaacgaatcggcttaccacatcacaattcgtctcgatatcagcgagaacgatgacgacgaactttggtttcaggtgttttgttgagcacctggcgagcaccaatgttactgttgccaaagctgtcgctacctcctagcagcaaggtaccaccaccaggtgtgccatcaaagaacccatcagcgccactccaacctcccaatacaccaaagcagagctcgacgccggagccggaggtcgagcgcacaggggaaagacgcaagaaccgagcggcaagggagaagaaaccgagctggagctcgcaggggagtttgccgaggagggaaatgggcagggacgatgcggcgatgggagcaggagtcagggcgccgagcgggatccgagccagggccagggagatgggcgccaccaccttggcgggcggcagaggacgcgctggggaagaagcactacggcaagcgaacgtcagagcgctcggtccgagctggttgacgcgagcagggaggagcagagccgagcggagggctgctcgcgcggccccaggcgccaggagagagccgcggacgagggaggaagaaagctccctgccgagcttgaggggcgcggctatggagatcgggagcagggagggctctgagctcgcgtggccagggaagagcgaactgagggggaaagctgggagttgggcatcatcggagctgggcgagctgggcgccatgggagcttggagtggggaagaccacagcgcgcaggggaactccgcgagcgagggagctgcgcggtaggggaagaggagcagaggaacacgagcttggggaaagggaaccggtgagcggcggagaggagcaagcgaccgagctgccgaactcctgggagggacatagtggagcagggtcatgaggaagatgcagcccggcgaggttgaagaagaggggcacgatctggagcggctgggaagattgcggtgtgctccattgaatggaattcaggccgagcgctgatatttgaagactcccagggacggcgcgtagaagacgagctcggctgagaaaaatccggcgagggcggctgcggggataagcaccggcgacaggatttttacccagggtggccgagcggatgagagcgagggaaacggcggcggctacgaaaaatcagaggaagggtgagaacgatgacgctcccaccagtcatagacacagacg

SEQ ID NO: 167122 - DNA, 426 bp, Zea mays
  Clone ID: MRT4577_83994C.1
cttctctctatatgatgggaactgaaaaaagggcactaacttaggaagcagaattggggggggttcaacaggtgggtcctacgggtcttttggggataactgcagttactagggcaaatactttagcgggcgaaaaaacagggcataaacttgcctggctgttgctgatttttctgggagcaagttatatccttttgtttgccttaggaaaagggggccatagccatgcccataattatccaagggaaaaaatggcagtcgccggtcttgcacttgtacctgcattataacctggggaaaaaactcttccagttttttttggtgtaggaaacttttcataaaggatgaatctggcaaaaatggggctccttttcagcaccatcaaagtgataaaatccctggggggccctttaatttcacggggct

SEQ ID NO: 167123 - DNA, 352 bp, Zea mays
  Clone ID: MRT4577_83995C.1
attcggctcgaggggtgggcaagcacttcctttgcccccatggaactcgatgactactgacgggcagcacccagaggagcgagagggaatacgatacctgacacagactttccggcccgatgaaggcaacgcctctcgacaaggtgaacatggacggcgcgccttacctgagcaaggtggacctgatggcgtacagcacatacaaggacctctcacttgcactcaagagaatcagcggcacctgcaccctatgtgggaacaaccacaaccaggggagattgttggacccagcctccgacactgttgatatagacactactcacgatgacgttgatcgtgacgggacgctgaa

SEQ ID NO: 167124 - DNA, 361 bp, Zea mays
  unsure (1)..(361): unsure at all n locations
  Clone ID: MRT4577_83996C.1
gaagcatagaaaatttacaatcacacgtaccacgatatgtatatgaaacctcaagggaacatgcttaaaaataagagggtactcatgcanaacatccacaagtcaaaggcccacaacgccatatagaagactctttccgatcaatttgatgcctagcgagccaacagcaaagctatccgtgagagaaacatttcaaggatggttgagagattggctcatggcccaatggaacctgctgcatctccagtaacaactactgatccccttgcagctgcaccaaagaaggcgaaaaattgaaacacgtggtcttctacatctaggacctacttttggttctcccccactctcttgctggtacata

SEQ ID NO: 167125 - DNA, 308 bp, Zea mays
  Clone ID: MRT4577_83997C.1
acggtaccatcaatcatcattcatcttagtagtataggcaccaaatcaaatctgcaacatcagttatgtaacttcaaaaaccatgaagctggtgcttgtggttctagctatcatagctttaatgttaagtgatgcttggacacacacagtcggcttcatcatgatgcaccatcatgaccatgcacagcagtatcaatcacctaacatgtgacacattaataactaccatggctatcacaactgcaattctacctgtagcaccatacgcaatatgaggactatatgcattcacatacacattagcttca

SEQ ID NO: 167126 - DNA, 672 bp, Zea mays
  Clone ID: MRT4577_83998C.1
ccggccgggatcttccctgccggctgggagaaaacacccttctcagttctctcttcccagctcccttccctctcccttcttcacccttctctctccctccaaggctccaacacccttctctctacaccagctggaagaaaacacaaggactggagatgagccccttatctgaagattgaagatgttgggatgtaattcctggacttggaggcacatcctgtcccaaaagtagtctcatttgcgtttctcaactgtgccgttgctgcctgcagcgtgctggtagcatggagttgaggactcgaggcttccccgaggcaccacagaaggtcacaaggttttaatcgcataggtgtcgaggtgtaccgctagtgccagaggacactaacaacgcctcaaagaccatgagttaaactaatttgatattgtagatgttgattcattttctataaacttggtcatagttagagaagtttgacctagaggaaaagtgaactatatgttggaacagagagagtatgtatatacatatatgcaatgaagtggcaagattgctttgaaaatttcagtgatacaacattagcaacatgtaagagtgcacctgtaaaatttcctatgttatatgaccgaatggtagttattgtcatgccacatcagttatatcttttgtcttag

SEQ ID NO: 167127 - DNA, 492 bp, Zea mays
  Clone ID: MRT4577_83999C.1
ggggaccactatcaaggctcaaaactaaaatatctagttaccccattcatcagccgaacaaacacaaacaaaaattttttttaccaagaccaaggcgacccgatatcacaagaagggcaagggatttcggggtcaagcgttatataaagccctgggggagggacacatggggactccgttttcatccccccacaaaaatcacacccatgagcaatcggggggcagcagcaaggggcagggggttaacgacaacgggaaaacaagcaagagagcccaccacaaaaaaccgggctaaaaattcgcaagaaggccaaaaattctgggattgggtttttcgccacgagcggcgaacggggattcactctttactccggccataggtccattttcaccaaaccaccacacacacaggcaatggccgactctgggtatatggcgatgttgaagtcatgggctgccatcgacaacacaaggggtacggaagggctggag

SEQ ID NO: 167128 - DNA, 135 bp, Zea mays
  Clone ID: MRT4577_8399C.1
gggtggggcacatctcaccccaacttgttttttctaggaataaataagccattacacaccctgggccgttacgggggcaaaaaagcttattgggagggagataccggccaatttggaaacttgccggacgcgtgg

SEQ ID NO: 167129 - DNA, 890 bp, Zea mays
  Clone ID: MRT4577_839C.1
gccggccgggccgtgatccagctatcccacgagtgcaagtctagatatttacgcgtacgactgtggtgtggggcggagtactcctccttagcttgcatttcaaacttcaacccggaccaaacgccctgctccaacccaaaaccatcatcccttttttcgcagcaggacgcatttattaagcgcgcctccgccaaccgcactctgcccgccgaaagcggcgtcgggccacctcgcactcgcgcgcgcctcaaagatgcacaggcagctcagcctctccgccagcccgaagcagcagcagccgcctcctgacggcaccagcaccggcggcggcgacgcggcggcgaaggcgatggcggcggcggaggacgagtcgtcggcctcgcactccagctccaaggccagcagggggtggtcggcgagggacgagagggccatccacctcgtcccgctgctcaccttcctctgcttcctcctgctcttcctctgctcccacgacccgtcccccgccgatatgtcgagcttcgctggaggcggcggcggaggaggaggagcgagatctgggaaccggaggttaaggatgctttagtgtgcgtattacctacccattggagtattattatccgcgatgcggatgttgtacttgtccagcagtaaccaagtatgggaccaaagtatgtcaccatacaaaacactcttgctgtggtaatactaccaacctacatcagcatgttcctgattaccatttgagctggattcgaaataccaggcacgtccaacaggcagcagtacatgtccagcagtaaccaagtatgggaccaaagtatgtcagcatacaaagcgttccggctgatcttcaaaatcgaaaaaaaaaaaacctacagcagcatgag

SEQ ID NO: 167130 - DNA, 430 bp, Zea mays
  Clone ID: MRT4577_83C.1
aaaaaaaaaaaggcccatattcgtttgctgcatgcatatgtcagggaagcggatcaaaatcaaaagccggttggtgtgggaccaatccaatggccttttattacattattacaatagagggcccccctcttgataaaaaaaagccccgaaaaatggggggcttttttttcatccgcaggcgattcggaccactccccccggttggccagcgctttttgggttcctggacgaacttggagtttttggggtcttcctcggggaaggtggccccccttttggggatgaaaaacccggggagggcgacccccgtgagaaagggccagttgcccttcccctcccgggggaaaaaaaccggccccgggtaaaacgtttttattctttcggcctccggttccgggtggtcgcgatctccttcctccctcctccgggt

SEQ ID NO: 167131 - DNA, 222 bp, Zea mays
  Clone ID: MRT4577_84000C.1
tcgagcgacggctgccgatgatggctcgttgtttctacaattctagaaccacaaaataaaacttcactcgcgcctaccgttggagtgcacagtgcatccgggcatcggagagcatgacacacatccgggtacctcttctctctcatgttcgagcactcagtatcgggcgccattggagacgaaaatatgccatagtacctcgaatgcgtgtcgttcgggcac

SEQ ID NO: 167132 - DNA, 309 bp, Zea mays
  Clone ID: MRT4577_84001C.1
ttccctttcgacccacgcgtgcgcggacgcttgggcttcgggcaaggtggcctttcatatctgttttcaccttgacatggttgcaaagcacggaatgtattggactgacctacgagaaatggctgctctgcgctgttggttcacatagggtctctgtatagacgcttgtccatatcaagtaacctgtttagaccaccataccaatatcaaatataggctgctcgctgtatcatgtccacggttacctacgcttgcatacgaacatatgctgcttctatactgtcgtcaacatctgtttagcatgacaca

SEQ ID NO: 167133 - DNA, 515 bp, Zea mays
  Clone ID: MRT4577_84002C.1
gagacctgaagaagtcaacgctggtatgaacaaggcggcgtccagcggcacatccctcaacaccaagcgcctcgacgacgacacagagaacctcgcccatgagcgagttccaagtgacccggagaaaaatctcatggcagcaagggttggttagaaggtggcccaagccccggttggtcgggtggaccatgggaagccccagggggtcccagaggttggggcaaggaagggaattcccaacccgccgaacattggccagcccgagaggggcctggggaccaaaccgcgtggccaggaataacccggagccgcctaggggagacaagggaaaccggctggttattatttgcgctgtgtggggtctcaaggcatgcggaccggttgtgttggttcaagagagaattaaccgtgtgctcctgaaagcccgctgcctgtcatatgagtatatgagctagctctcaaaaaaatggggtgaagatgtcgaccgttatgacaacctcctaaccaccgtgagc

SEQ ID NO: 167134 - DNA, 324 bp, Zea mays
  unsure (1)..(324): unsure at all n locations
  Clone ID: MRT4577_84003C.1
acgccgcggcactcaacataaactcgtaattcgtctctagaaaaatcataacacacaaactcctacgaactgtcaaaattaaaaggtgcctggtctccaacaaccaccccnacaccnatccaatcactatgactcccatcaactgtccgaccaccagtacgcccccttctttcctacatcccttcacctatcgccccactacaaactcatcttctcaaccatgcacctaaacaccatcaatattcaccaccactaccaccacacccatgtccaaaccaccccagatcacacacatccctgcttacactcaatacaccccaaaaa

SEQ ID NO: 167135 - DNA, 698 bp, Zea mays
  Clone ID: MRT4577_84004C.1
tgggaccctcgaggccggccgggccgtcatcacaaactcactacacgatcggctatagcgagctaacagaagctctatcaagtactgtgtaggccatggccggagccctcgtcttcgtcgctgttctcctcgccgcaagcgtcggcgctacgacggctaccacgctgaccatccacaacctctgcccccacccggtgtggccgctggtgaccccgagctcgggcttcccctccatctccaccaacaccgcgcggctgggccccaacgcgctgctctccctctccttcccgcccaccttctgggccggccgcgtcgccgcgcgcacgggctgcgacgccgccgcgtccggctgctggacggggaccacgccgcccgccaccgtcgtgcaggtcaccgtccacgacggcgggaacctggaccaggccacctacagcgtgtctctcgtcgacggcttcaacgtgcccatggtggtcagcccgcaggccgtcggcggcgggcagtgcccggcgctcgggtgccccatcaacctcaactgcgactgccctccccagaaccgcaccgccgagggcgccgcgtgccgcggcccgccggagtacttcaagaaccggtgcccgctcaccaggaaccacgtccaccgacttcgagcccgtgccgcaaaaatgccgcgccccgggggagctctagggcatcctctgcca

SEQ ID NO: 167136 - DNA, 448 bp, Zea mays
  Clone ID: MRT4577_84005C.1
gttgattttgtacacgagtttgcactgcataggcagataggctggaggatacgctaactgtgatatttgtgtcacagctcaaagcaaacatgatgctacataggctggaggatacatcaaagttggacctgttgtgaattatacttctttttgctcttgtgcgtgcgaggtttccattttcattatttgtatttcacagcagacagtttattaactaaatactgtaacgtcacagtaagttcagtttaacttcaaacattgtagttttgaggagattgcaaatatttcgggtcaatgcaattagtgcttttgatagccatgcaaaatgcctcttctcgtcatgatcgtgtttgctttatgctgatgttcagccatcattcaggttaaactggcatgtaaatgtaaaccgtgcaatcagctgggtttgatattataaattttaattggc

SEQ ID NO: 167137 - DNA, 398 bp, Zea mays
  Clone ID: MRT4577_84006C.1
ggcgctcctcctcaagctggcctgcgccgagctggtcgtgtcgctggacacagccgccgccgccgtcgcgcgcctcggcctgcggtgcggcctcgacttcggcggcgtgtacgcctgcctcaaggccggcacccccgacgcgcgcctggacccgctcctggccaaggggctcagggtgaaggccaagaagatggagcgcctcgtcgccgccaccgccaagctctgctccgagatggagacgctcgacgagctggaatccgccgaccggaagttgaacgtccggggctggagtcgactcagcggcccgatcccgcagcagccacaggcggcggcccagcagcagcagcaacaattggccggggattcacctggcgcggagtcgctccagcaagagctca

SEQ ID NO: 167138 - DNA, 2688 bp, Zea mays
  Clone ID: MRT4577_84007C.1
acacttttatgtattaataaaagtcagggatggggtcatcccacaaatctttgtttgattcctcaaacccaatacatatatggtttcttcagaaaagtaattgccaacaatgaactgtttggatttactttggcctatgttcaaatgctgataattactagaaataatgtgttggtttttaattggatttgcaaaaaaaaaaaaaaaaaaaaaaaaaaaaaaaaaaaaaaaaaaaaaaaaaaaaaaaaaaaaaaaaaaaaaaacggccggtcgaggaaccacaccacccgagaacggtgacgggggaggcggcaaaggccagacgggcggccggccgggattcctccgcgccgccactagctgtcctaaaccctaccaccacttgagcctccaccttctccgcgtctcaccttcttctccgttctccttccgctcccctcttcacaacgaagccctagtgtcccgcgacatggcatctggtctggaggagaaactcgcggggctctcaacgggcggcgacgggcaaaatcctccgccggcgggtgagggcggagaggagccgcagctctcgaagaatgcgaagaagagagaggagaagaggaagaagctggaagaggagcggaggctcaaggaggaagagaagaagaacaaggctgcggctgccagtggaaaacctcagaaggcatctgctgctgacgatgatgacatggatcccactcaatactatgagaataggctcaaggctcttgattcactgaaggccacaggtgtaaacccctatccccataagttcccggttggcatttctgtacccgaatacattgagaagtacaggaccttgagcgagggggagaagcttacagatgtggcagagtgtttagctgggaggatcatgaacaagagaacatcgtcgtcgaagctattcttttatgatctttatggtggtggcatgaaggttcaagtgatggctgatgccaggacctcagagttggatgaagctgaattttctaagtaccactcaggtgtgaagcgaggtgatattgttggcatatgtggatatccaggaaaaagcaaccgaggggagcttagtgtatttccaaagagatttgtcgtcctctctccatgtcttcatatgatgcctcgacagaagggtgaaggaagtgcagtgcctgtaccgtggactccaggaatgggtaggaacatcgaaaattatgttttgagggaccaggaaactcggtatcgtcaaaggtatcttgatcttatggtaaaccatgaagtgaggcacatcttcaagacacgatctaaaattgtctcatttatccgaaagtttcttgatgaccgtgaatttttggaggtggagactccgatgatgaacatgattgctggtggagcagctgcaaggccttttgttacacatcacaatgaattaaacatgcggctttttatgcgcattgctcctgaattatatctgaaggaactggttgttggtggattggaccgtgtttatgaaattggaaagcaattcaggaatgaaggaattgatttaacacacaatcctgaattcacaacttgtgaattttatatggcgtatgcagattataatgatttgatggagcttactgaaaccatgttgtcaggcatggttaaggacctgacaggtggctataagataaaatatcatgcaaatggagttactaaccccccaatagaaattgatttcacgcctcccttcagaaggatagatatgattaaagatttggaggctatggccaatctcagtataccaaaagatctatcaagtgatgaagcgaatcgttatttgatagaagcatgtgtgaagtatgatgtgaaatgtccacctccccaaacgacatcgcggttgcttgacaagttggttggccatttcttggaggagacatgtgtgaatccaacatttatcatcaatcatccagagataatgagtccattagcaaagtggcataggtcccgacctggattgactgagaggttcgagttgtttgttaacaaacatgaggtgtgcaacgcatacacagagttgaacgatcctgttgtgcagaggcaacggtttgaggaacaactaaaggaccgtcaatctggtgatgacgaagctatggctttggacgaaacattctgtactgcccttgagtatggtttggcaccaacaggtggttggggcttgggaattgatcgcctcacgatgttgctaacagattctcagaacattaaggaagtacttctattcccggctatgaagcctcaagagtagtaatccacagccaaaagccacaaaaggctcaaagcaaacatgatgctacataggctggaggatacatcaaagttggacctgttgtgaattatacttatttttgctcttgtgcgtgcgaggtttccatttttcattatttgtatttcccagcagacagttattaactaaatactgtaacgtcacagtaagttcagtttaacttcaaacattgtagttttgaggagattgcaaatatttcgggtcaatgcaattggtgcttttgatagccatgcaaaatgcctcttctcgtcaaaaataaaaaaaaaaaaaaaaaagcggcagccatcattcaggttaaactggcatgtaaatgtaaaccgtgcaatcagctgggtttgatattataaattttaattggcaat

SEQ ID NO: 167139 - DNA, 424 bp, Zea mays
  Clone ID: MRT4577_84008C.1
gcgcgcacgcgtccgcacacgcgtccgctcacgcgtgcggaagcaagaagagcgagagcgagcgcgttacgctgcggtagaagcacaaggtgctgcgcaaggtgaaggagcaccaccgcaagacgcgcaaggaggtcaagacggagggcaaggccggccagctgaagaaggtcgagaaggaccccggcatccccaacgagtgggccttcaaggagcaagagctgatggcgctcaacgcccgacgcgcgcaagcgctccaggagctcgagctcatgatggaagctcgcacggagagggctcggaagacgaagctaggatagctcgaggatgaggaaatagctaatttggcatctgcagcttccgcgcatggcagtgagtttgcagcagatgatgcagcatacgataaagctgctttaacagtggc

SEQ ID NO: 167140 - DNA, 385 bp, Zea mays
  unsure (1)..(385): unsure at all n locations
  Clone ID: MRT4577_84009C.1
acctgtttgtgttttttataacaatttacaaatggacttgattatttctgggaagccacaaacatcaaacaaaaaactttattatagaactataactcataagaaatctaatagagggcaccacctatgatgggtttgctgacaaacgctgctggggggggggcaaancaaggtngttcaatggcaacaattgtttcanttttaaaaaggtgccagctttaggctcatcgtacaagtagaacagcaataactgttattgtatcaagaaggcaccagggctcacaccaactatctggcttaatggaagtagttcttgctggtggaaataagcaagagagttcaatgatgccagttggttgaatggaagaaattgttgggggtaggc

SEQ ID NO: 167141 - DNA, 279 bp, Zea mays
  unsure (1)..(279): unsure at all n locations
  Clone ID: MRT4577_8400C.1
ctaaatttgggggtccatataatgacttcttaatctaatatatataataaggcgctgaatttaaatctaatgatcaatgcccatatatatcccacaaaatatggactctctatcactatcgtgcctaaaatatactgtagatacacaaatatattgaagcacagaccattatattaattgcctgatggtctgcttatatttatgctggactactnatcataatgcttaaattgctaagagatatggtttctatttagagtggggtacaatnggaaagat

SEQ ID NO: 167142 - DNA, 340 bp, Zea mays
  Clone ID: MRT4577_84010C.1
gaaacgtgaacaaacagctttattattaaacaaaagggtgcacacattttaccatccttgatcgcatacagcgctgcacacaaacgctcaaccaagactgaatactaaccaaggaacccagatccatggaaaccaagcactacataagctcccatgcactactaacaacgcaaattgatagacaaaacacatggtaggctggttaagataatacgcaaccgagctccaccaaattgttattttctaaaactaacaactggacagcgaaacctgcctagaaaccctacttacttataaagcactccaacactttctattcatgggcatgcgcttgcctcct

SEQ ID NO: 167143 - DNA, 2040 bp, Zea mays
  Clone ID: MRT4577_84011C.1
ctttacatttccgtactctaggtttccaataatgtatacatactccctccttttttttgtcacaatacatttgacttcgcaaggtaatccccaattaatagcctttgaccactagtctaattctcatggggtcgcattaacaacaaaaactcaaagactctagagaaaagataaaacctaccttgtcttcgtgtacaagatagcttagaaactaaaaagaggtgagtacctgtgcgccatagatcatttgcagatcatcaatgaatcacttccatcacacaggttaatagtcacaggagatactgcctgatgatggcggtgaccgactgaacttaaatccagtgtgatttccgtatttctctactggccttttgaatttcaactcgatgggccatatctgagttgaagctgggcactgtggtatgctatacttgagtaccagaacaatggagataaaaccctcagtaaatcagttattttttgtttctccgttatcggtgtcacctgatccctctggaaggagacctaaaagaggtaagggcagcaatgaactaagattgcagacgacaatcaacagaggtaggttcccaaaggtatccctagtgaccccaaatatccgagttagaccagcaccaaccagaccaccagtaacacttccagcattagaaatggacatcaaagttgcaaataaagtggcttccattcctggagggcacaactttgcagctaacaccaagactggcataaacgatgcctgaccaaggactgtgatgattaatgaatcaccaatagaaaaccactcatcgctgatcccaagctgccgatttagcccagttacaagaagcacctgtgtcatcccaagagctgaacctataatggttgtcacaagaaaaatcttcctcagagcaacttccttcagaaaatagttgtagagcccaacaccaagcagggatgcaaaagaggttacaagcttcacgcgccctagaaactccggagtgaatccaagcttatttgtgatgaagaaaaacatagcagaatctgactgcggtgttgcttgccaaagaaatataaacaaggtcggcaacaaaatgttaggttgctttactgaagtccaaagctgcctgacatgctgcttagagctctcaataaatccggaaccagagagaaaggtattgtgttctccagaaggaatgccatgttcatttacaagaactgcaacagcagatgtcatcaggggtaaaaacgctgtaacaccaaagacaaatcttactccataagtatccacaagtgaaccactgaaataagcactcacaattcctccaaaggcagaagatccccaacagagtgactggagtgatccagatgtactttgagattctccacgggctctctcaacaaccatagaatccactacctacagtgttcccacatgtggctgagacaaaccttgaagcaatatacatgcaaaagttcttgttctacagtcccagcaggaggtggaaatgatatgatgataatttttatacaataaaaaataaacatggataaaagtttatcacattggcacatttggccagatacatccagttttagggctagacagcccccaataaggcctagtttgggtactctagtaatgagtgggattagagtggattgagatgtattgagagagagtatttgatctattggggatttacaccctctccaatccctccaaaacactctaatcccaaagtatccaaactagccctaaattgattaatttgaatagcataaataactaaaaattggttcaagtggccagccttaccgtgtaaaacttgaactagaaatataattatgttgggattgaccaacattttcttgagagcagtgttggtttgccagaaaggtgcattattataatgcaaactagaaagctagtaagaacaagagccttgaagtggaaatagtgtatgaagtagctgttttagtcatatataatagaataaaaagctcaatatagaaggaaaccaatttctcacgttcattgagaat

SEQ ID NO: 167144 - DNA, 369 bp, Zea mays
  unsure (1)..(369): unsure at all n locations
  Clone ID: MRT4577_84012C.1
aacatcgctccacttgggggggggaaactcgcggcaggtntgaacccatctccgcatgctatcatatctataggtcacgggcacaacacaaatccttggtctcacaaacaacacaaaacatcaaacctaccaaaggaacttctttcactggacaaaccagatccaaataccttaatcagttcgcacataaaatattcaaatactcaacccctgaaagggtgggcaaaccacaaatgcaggaacgggtggtcttaccatgttaaccactaaataaaaacgcaacacttttgtcctcattcccagggagcaactaaagctttgagctaaccgacgccctggaaaaacctacctacacaatctccggaactt

SEQ ID NO: 167145 - DNA, 699 bp, Zea mays
  Clone ID: MRT4577_84013C.1
tcggcgtcatgcaacatcggtcaacaaagatcttgaatctaagctaaaaaatgcctctacacttttggtgaagttgcaagatgagttttctagttatttgaaaggggaatgcacacaagaggttagtatagatggagatgcagagagacaaccattggtgtttatcaagatgaagctagcaaatgccaggaaggagcttgaggacatgagagcagacattaaaaaattcaaggatgatgttaggaaactttggaatgtcgcagctacatttcgggctgatatagatagggaggaggcaggtctactagcattagagcacaaagagcaccttgcttcgatttctgtatcatctcaccaggaagagctaagcaacattacatatgagctcaacatcatccatgaaagaacaaaagcaactaagatgcctatagagctacaacaagcaactgaagttgtggaacaagcaaaagctaaggctttgatggcccattatgaggtggcaaaagctagggaagatgcggatcaagttaagtcacaattaaatgtcattaaattgagactagaagcggcatcaagggagatacttgcagtgaatgcatctaaagaaattgcaaccacctcagcaaatgcattgcaagaatacaaagatgaagcacatatagagccccaagatgagcagataagaaataactatatgac

SEQ ID NO: 167146 - DNA, 755 bp, Zea mays
  Clone ID: MRT4577_84014C.1
gttcccactgcgcagtccgcgctcctcttccctcactggtgctcgccttggctgctccactcccagctccaaaaccctaaccccgcgagacatccagcagctaggagcgggtccaggagctcaccgtcgagcgaccgctacactcgacctcaccggtttctaatgctgatcaaagcatgagcttcactcctgttccaaggttcaggggggcagcctattcgcagttgtgtcctcagtctagcagttgtgctgaacatttggtaaatgtggatggggcgagtgcaaaagacttgtcagttgacccaagcacattttgtattccgcaagatgctaatcagggattttgtagccgagctttacagtacactagttctgtttcaaagcagggatttgcagctcaaggtcttcctgtaaatgctgcagagtttggtctgaataatgattcttctttggtgggaggatatcaacaatttgactaccttctggggcctcctcaaactgaagtgtgtgaaggaatgtggatgaaaaatatcaacacaagtatcatccaccggcgtagaccttctaatgcatcctgccttgatcatacagaagaactaacttcctatgaaaatgatgagggagctatctcatttggaagtagttgtagcacaggaattgcgagttatccatatagtactcctttgcaaagaaatagccacatttccggatacgggcgatggaaactgggatgctctcgtgcaaatgcaaaaggc

SEQ ID NO: 167147 - DNA, 267 bp, Zea mays
  Clone ID: MRT4577_84015C.1
acccagcgtcgtaactataccgtcacttgtcctacactgacctgcccatcgaccgaagcaaccaccgatccagccgtggctttgcaatgggcaaccagaccggggcggatcgggagccgggcggcgacgtggaccctccctaggtcgggcggtcagacggggaccgcggcgactggagtggccggcgccggtaaacgaacagtgcttttcgtgtttcgcagtgtcggaaactggagcatacacgcacactcggtggcagcgacgccg

SEQ ID NO: 167148 - DNA, 996 bp, Zea mays
  Clone ID: MRT4577_84016C.1
tcccacgcgtccgccttcttcttctcaggagtaggaggaggaggcggagccagcagcaacaacaccttttaccatcgtcgtcagctcatcataacgacgacgacgacctcttcctcactgacgaccagattctcgataatatcttgacgctcatcattgccgggcaggtgacgacagcgagcgcaattacatggatggtcaagtacctggctgacaacaaagtcttccaagaaaccttgaggtcagttcagctggagctgaagcagcagcagcagcagggaggaggcagatcatgatctcctccaacatctcaacagcatggagcttgcatacatgacggttaaagaatcattgaggatggcgagcatagtttcctggtttccaagggtagcactggaggactgccaggtcgcggggttccacatccacaaggggtggattgtgaacattgatgcgagggccctacactacgatgcgacgctctaccacaaaaccacgcaatgtttgatccttcaagattcaaaggcgagcatagcatgcacacgaagcagccgtacagcttcctggtgtttggagcaggcgggagaacctgcctggggatgaacctcgccaaaatcatgatgctcatttttctgcaccaccttgttacaacatggagatgggagatggccgacgacgaccccagccttgagaagtgggcaatgtttcccaggctcagaaacggatgccccattcacctcgcacgcatatgatgattaagcatgccctagctaccaaaggaaactagtatatatatgatatatcttctgtaatcctaaaccacaatgcaaccacaaagcaccgatgtgatgtgtactttattttcaccaccttatgtatgtaattgtctcgcatgttatatcaagagaagtactctattcctatctctctctctcttatggagctcttgtcggtttaggctattaaagagcttaagtgatagatttctctatttat

SEQ ID NO: 167149 - DNA, 378 bp, Zea mays
  Clone ID: MRT4577_84017C.1
gacactatagaagagctatgacgtcgcatgcacgcgtacgtaagctcggaattcggctcgagctcacctcccgtggcagcagccgtccaacactcgtactgcagtccacagtaagaaccaagccacagcgaataaaagattctatggtgatggcgccggttgcggcgcaacagcagcggcgccgtgacgcggttgcggagctgaacctgtccccgggcttgcggttccacccgacggacgaggagctggtggcgcactacctgtgcgcgcgcgcctcgggtcagtcgccctctgtgtccatgattgccgaggtcgacctgtaccgctttgacctctgggacctgtctgagcgcgccctctttggtcgacgtgagtggt

SEQ ID NO: 167150 - DNA, 338 bp, Zea mays
  Clone ID: MRT4577_84018C.1
gtggcttggcttctactcccacttcggttcggattcatattcgtgaggctctgcggggcttggtctcgcgggtgagctgatcgagatggccgagctagatgacgtgtaccaatgcttctgcatcagcctcgcctggaccacggacgaccactcaatgcacaacaccttcaccacctacggcgaggtcctcgagtgcaagattatcctcgatcgggagacgcagaggtgccgccgttgcggttacatcaccttctgcacggaggacgcgaagcagaacgccatcgatggcatgaacggtaaggagctggacggccgcaacatcaccgtctacgaggccc

SEQ ID NO: 167151 - DNA, 406 bp, Zea mays
  Clone ID: MRT4577_84019C.1
ttgttatcaagaaccatttagagctgactcggtggccttcgtcaggaatggagtccagtgctaataagcttatcagcctaccgatcacctaactggatggcgatgatgacgaaaccgtggacccgcatcagccccctccagcaggaccctccgccgctgcagtagattctgatgacgacgatgaagaggaagaggcggaagtgactcttggtgtccttagcataccgaaacacccaggccttcttctccgccacttgttccccagcaaggccggcggtatcccggcgtggctagaccccgagaacttgtcgtcggggaagtccagttgctgcggttttttgtggccagcctttgcagtctgctcttcacatttatgcagcagttgaagaccaagtagcagccttcc

SEQ ID NO: 167152 - DNA, 604 bp, Zea mays
  Clone ID: MRT4577_8401C.1
cttaattttgatctgttgttcattgactacccctgttcgccctgatcttagggcccgactcaccctacgaggactaaccttgcggaggaaaccttggaatttcgaagccttgaagactaaccaaagattgccatgataaagcagtcgttctcgctaccgctgcgaggactccccgctttagcggatgttttactctaacgcgaggcgctcccctaccgatgcattttgacatcccacagattatttatattggttagcccccttcatcttcagccaaagggagctttatttgtgggctataacccactctatatagggtgcatgtgggtacttatatctcatgcttgtgattactcccacagctactttatgactgatgggacgttcaggggccttacctggagaagcatactgataaactgtctacaacacaatgtgattaccgtgaaccatctgcaccatcctgacccccggttcttgagaaaatagggatcattcaccagctccttgccggatggcactatcagtcttgacaacgatgctggcaaacttgacagatatgcgtgaggtgtgccagcccacaactgtggcataaccattgcca

SEQ ID NO: 167153 - DNA, 154 bp, Zea mays
  Clone ID: MRT4577_84020C.1
caccaacaacatccgtgggtctatattgggttgggcgggccaaaataacccataattccgtgaaagtatatcaggatgcaggccttctatttacttacccactttacttctaaactcatctatttaggatccatcccacccccccatgaatgct

SEQ ID NO: 167154 - DNA, 283 bp, Zea mays
  Clone ID: MRT4577_84021C.1
gccgataccatgtgatagaagactgttctcgtacggaaataaggaatgagtccagaaatgagtctcgaagtgaaattagaaatgaccgaatgggccgaagtagggggagggttcctgagttacctgaaaagggaagtcgaggctcaagaggttctcaaattgatagtcacagtagtaatagcaactatcatgacagctgggaaactcgaagtagctatcctgaaagagatagatatcctgaaagagacaacagagatcaagcaagcgattcttcctttgagag

SEQ ID NO: 167155 - DNA, 911 bp, Zea mays
  Clone ID: MRT4577_84022C.1
ccacctgatgctggaccatcaatgcggaatgttgctgcaatggtacctatgaaaaactcagcttggggttctggtggtggtgcggttgcacatggtggttggaggggagatggtagtaatgatagggatcgacctttctctggcagatcaggagggaggtttgattcaaggaatagctctggtggtcgtggacgaggacgggggcgtggccggggtaactttggtgatgacgataatgctggtggaggttggagtggaggaggtggtggtggcaacagtggaaggtggaccgataacattggcacaggtggcagtggtggttcttcctggggtggtggtggcggtggtgatgacagcaaccgtggcggtggaggagggggttggggatcagctggtggtggtgctgacaatgctggtggcggaaatggagcctggggagcagctgctggtggctctgatgacccagggttgggtagcgccaaaaaggtcgtcccagcacaggatggtggaaccggctgggggtcagaaggtggcggcggcggtggtggcggaggctggtaactgggctgtgccctgcgttgtagtccagacaacagctactagatgaaaacagtttcctcgttttaactcctgtcctatcgtactgtggacgggagaaatctggcacttataagtcttgcagctgctgcacgtctgcagatgttgcattgcggacagcgttatgtttcagtgcatgtacataaatccaatatgtctggtcacactttcctgctacgaatttgatcctggtgcttcattgttgaggctatccgcaattaggccagtactctaccccatgttggtaagcttttgtgttgaaagtgtaacacgctacattttgtttccctagcttcacataaccccgcttacaa

SEQ ID NO: 167156 - DNA, 659 bp, Zea mays
  Clone ID: MRT4577_84023C.1
accctagttagctgagtgacctgcagccatgaaaagatgcattgctgccgtcctgctggtactttctctcgccgccgggcgtctcgccgccgacgaccatgtggacaccattcgtcttccgagcaacggtcttgccgatgaagtagcgaccgcggcaacggagatcggcgccgagaagaagaggccgtggaagtgctgcgacagcccgttgtgcagcaggtccatcccgccgcggtgccgctgcatggacgcggtggagcagtgcgacgaggcctgcacccgctgcgaggcgtccaagtccgacccttccaagcgcatctgcaacgaccggtaccacggctggcccgggcccaactgcaccgagcccgacgccgacgacgtcccaagtggtgcaggtccggtggtcgttgctcatcaagaaacggtggcggaggagacgaggcgggggggggaggtgttgcgaccggcccctgtgcaccacgtccgtcccgccggcctgccgctgcctggacaacgtagaccggtgcgcccccacctgcaagagatgcgtggtgtctatctttgacccgaccgaccactcctgtgacgacatctaccacggtgaacccgggccaaggtgcactaaggccgaccgcaacggcgacatctccagtggagat

SEQ ID NO: 167157 - DNA, 401 bp, Zea mays
  unsure (1)..(401): unsure at all n locations
  Clone ID: MRT4577_84024C.1
ngaccagcagcagccggagcgtcgtcgctgtagccgcagataggaggggtagtagtggtagacgaagaaacatcgtcatcggtggcaggaaatggaccggaggccgtagtcgccgcttcgaagaggtcgtcaccaaggccgccatcgtagaagttgagaatatgagcagctatggggcttgaaatttcctcctgtagaatttcagagcgcgtgaccaaatatgtgagtcgttttcttttgttaaatgactgtttattctaataactgaaataactgcaaactcgtcgtgagagtagtgaatattagacctttcttctttcttctttagtatatatatgtatataccttttgttgtaaagaacacaactattctttcttcttctttagtgcagctactactc

SEQ ID NO: 167158 - DNA, 325 bp, Zea mays
  Clone ID: MRT4577_84025C.1
tcggcgccacgctgggagttgcctctgttgaaactgttgataggagagagggaaagggaaagggagaggccagaggattggatcagccgtcgaagtgcgaggtgtgcgcgggaagccaagggcggagtcaagcaggggtgctccgcggcgtttcccgtacggcggtggttgtatggggcgtcactgtgtcggagagccgatgcaccgccattggcgaaccagggcgctccgttgcactgacctcccgtgggcggctctgcccacgctactatcaccggagaagaacaggtggtcgaggaggagccctacaataaggagtacgagc

SEQ ID NO: 167159 - DNA, 250 bp, Zea mays
  Clone ID: MRT4577_84026C.1
aaattagggctaactaaacatattgaaaaccggcagaataaaacgggttgtgcaacggatgcaaatgcaacccttacaaccgaggcacaacataaaagtgcgtttacgaaacggtaaacgacccctattgcagaaagttggccacaccaatagcgtacgtgttcgggtatgtcgggtgcagaaatcgcgtagccagcggatacatacgacagtgattccaaaccgaaataacagacgcagattgaagaac

SEQ ID NO: 167160 - DNA, 291 bp, Zea mays
  unsure (1)..(291): unsure at all n locations
  Clone ID: MRT4577_84027C.1
ccggggcgacccacgcggccgaccaaancngggcggcggcgcaggcgcaggcgagcggccgaccagncgcgcgggcagcagggggcggccggccgaccaggcgcaggcgagcgaccgncngaccagcgcaggcgagcggccanccgaccagcgaacggcgagcaggcgnccgnccaggcnaccaaccagacgagcggcagaaccggncgacgcacaacacangccaagaaccgaaaacggagagggaaggagccggcgagcaccaaggggaacaagccgaagggagaggcc

SEQ ID NO: 167161 - DNA, 592 bp, Zea mays
  Clone ID: MRT4577_84028C.1
tgatggaagagagagaggagaggatgacactgcatttgagagcaagttcgttattggctcttgcaatttcagacatagttctaattaacatgtggtgccatgatattggccgtgaacaagctgccaataaaccacttctaaagactgtatttcaggtcatgatgcgtttgtttagtcctcggaagacaacactactatttgttatacgtgataaaaccaggactccacttgaacatctagaaccagttctaagggaggatattcaaaagatatggaattctgttgccaagccagaggcacacaaagacacccctatcagtgaatttttcaatgtacaagttactgcattgtccagttttgaagaaaaagaggagcagtttagagaacaggttcaacaacttaggcagagattttcaaattcaattgcaccaggaggtcttgcaggtgatagaagaggagtagttcctgcttcaggttttctgtttagttcacaacagatttggaaagttatccgagagaacaaggatcttgatcttcctgctcacaaggtaatggttgctacggttaggtgtgatgaaattgcaaacgagaa

SEQ ID NO: 167162 - DNA, 410 bp, Zea mays
  Clone ID: MRT4577_84029C.1
ttgaactgcctgtgttgaggctactgttacgcaaacagataggtcggatcagtggtcttccatacacaagcatgacgtgccatctggtgtatcggcacggattcttaatgagacatggggcaaacattggttcccgaaagaagagcgagtttgctgtgcctacaaatatgaactactaccgctcgaggacaccctgtgctacctgaaaatacacaacaagatccatatgagaccagcgtgcactcactgctaaaccattctattctatatgacaagacctgtgaatagggatgcatggcttcttgaccaactaataggcctgaactgagcaagtaatagactcactggatgatgagtgtgatacattctggggttgagcatgatatgcacttgtagccgaagctactgcg

SEQ ID NO: 167163 - DNA, 213 bp, Zea mays
  Clone ID: MRT4577_8402C.1
ctttttgtgggggggcccgagggaggagacactgtaagtgttgatcccgtaggctcttgagaggctgcggctgagggaagcatagtgaaattgcgttagtacatagatcttggattagtgctgtggacgattgctgcgggaattaaccagttgttttggatcgaatgacactgcagtcttgtgacgcttctttgtcaacgggtacactcggat

SEQ ID NO: 167164 - DNA, 380 bp, Zea mays
  unsure (1)..(380): unsure at all n locations
  Clone ID: MRT4577_84030C.1
aaaacaaaaacaaagcccacccctgcaccccacgttctcctcgattcccagccgctcccatccccgtcgccgtgcgcctcccagcgcgccgccaccgacccgcacctcctctcctcctagcgtgccaccaccggcccatacctctcccctcccagcgtgccgccgccgaaccgcacctcctcccctccgaacgcgccaccgctgaaccacacctccccctcccagcgcgctgcctccggcccgcacctgcccccggtcctccggtgatgcaccggctgtccccaccctgaaccccgcctctcccgncgcgccgccacgcaatttttggatccggccgacgccccgactcctgcccccggatccgtccaagacagatccca

SEQ ID NO: 167165 - DNA, 480 bp, Zea mays
  unsure (1)..(480): unsure at all n locations
  Clone ID: MRT4577_84031C.1
gctggnactgaacagggtgccgcagccaccaccgctgccagagccgcagccaccagacttggcgtggttggccttggagccttcgatagccatgccgctaccacagccgccgccgccgccgcacccggagccgcacccgccgccgccgcacccagcctcgatagccatgccgctaccacagccgccgccaccgccgcacccggagccgcacccggcggcgccgcacccagcctcgatagccatgccgctaccacagccgccgccaccgccgcacccggagccgcacccgccgccgccgcacccagccttgatagccatgccgctaccacagccgccgcctccgccgcacccggagccgcacccgccgccgtcgtacccagcctctatagccatgccgctaccacaggcgncgccaccgacgcacctggagtcgcacccgccgtcgccgtacccaggctggatagccatgccgntaccaca

SEQ ID NO: 167166 - DNA, 396 bp, Zea mays
  unsure (1)..(396): unsure at all n locations
  Clone ID: MRT4577_84032C.1
tgatgttctatggccggatgaagaatctcacaggtgctgctctaacacaggcagtggaggactccctgaagagcgtgaacctattccacagcggcttcggcgacaaatctgtgagcaagtacagcggcgggatgaagaggaggctcagcgtcgccgtcgctctcataggcagccctaaggttgtgtacatggacgagccaagcactgggctggactcgaggtccaggagcgatctatggagcatcatcaggcgagcaaagaaagactgcaccatcattcttaccacacattccatggaggaagctgagcagctgtgcgatcgcatcggcatcttcatcaacggcagcttccactgcattggaatcccaaggagcttgaaggcgangtattgcggca

SEQ ID NO: 167167 - DNA, 475 bp, Zea mays
  unsure (1)..(475): unsure at all n locations
  Clone ID: MRT4577_84033C.1
aaaaaaaaaaaaaatttaaaaaaaaaaaaaaaaaaaaaaaaaaaaaaaaaaaaaaaaaaaaaaaaaaaaaaaaaaaaaaaaaaaaaaaaaaaggnggggggcggccgttataaaggaccaaactttacttccccgtgattgcaaagtcataatttttttaaagggaaacaaaattcaattccacgggccgttgttttacaaggccgtgactggaaaaaccgtggcgaaaccaaaataaatggcctagaaaaacatccccttttcgcgaggtggaaaaaaaaagaaaaggcccacaccaattgcctttacaaacaattgcacaccctaaatggcaaatggcacgccccctgtaccggacaattaagcgcggggggggtggggtttacccgcagcgtaacctttacatttgccagggccctagcccccgctctttaagttttatccctttcctttctggccaggttcggaggttttc

SEQ ID NO: 167168 - DNA, 385 bp, Zea mays
  Clone ID: MRT4577_84034C.1
ctcgagccgcttctgcggcaggcatctgatgaaaccctgcatcttgttctagaaaccctataatcagcaatcaaatctggtggagaacaatcaactttaattgagcctgtcatttcccccatcatactggatgtttgggcacagcacattgctgacccgttcatcagcattgatgctgatcgaagtgttagaggctatcaagaatgcttgaatgcttacagccacttgtgtctcaaatccttccaacaattggatccattttagagaaacccaagtccagccggatggactggctgcaggttcactggaccttttgacgatggtactcaaaaatgctccagtcgctgtggctaaagcagtcttcgacacatgcttagactctact

SEQ ID NO: 167169 - DNA, 2408 bp, Zea mays
  Clone ID: MRT4577_84035C.1
aattcggcacgaggggtcactccacactaatcttgcgagagcgagcaactagagcgagctcccctcccttcccctcgggcctcggctgcactcgcattccgtttcacctagctgcggtttacctctccctttctctcaccttcctcgcccacctcgatcgcctcctccttaagcaacgacgcggacgagcgacccgcgaccctagggagagagagagagagaccagtagttgggccgaccgcacgctcgcaggcgcacccactcagcggcggcaatggcggggcgccccctcccccctcgctcgtcgtcggcggccggccgggatgcgtgagatctcggcggcggatggggaaggacgccggcgaggcgcagcagcagccggacggggcgggcggtggcgcaggcggcggcgcaggaggaaataggggcggccgcttctgctgctggtgcggaagaggaggaggagcggcgagggtgattcggctgcaatgcgttgcggcactcgtgctcggggtggccgtgctgctgtcggcgctcttctggctcccgcccttcgcggggcggggtggcggcaaggagggcccggatccgggcgacgagttcggagctgctatagcggcaagctttaggctacacaagacagttcctgagctaagtggaaataaatcccagctcgtattggatatatgaggaagttggcattcctaattccacggtggttgtgaatatgatacatccattagatggatcaaactggacaaacatcatcttcaacattgtccctttcccagagaacgtgactatatcatcaacatggttgagcattcttagatcaaagttcatgtccttggttgtacggcagtcatcaatccacttgactgagcctctattcgggaatgcgtcagcctttgaagtaattaaatttccaggaggaataacaattatccctccacaaactgcttttcttcttcagaagccccatgcaacttttaattttactctgaactatccgatctacaaattacaagacagaactaacgagttaaaggatcaaatgaaggcaggattactgctcaatccatacgagaatctgtatatcaagttgacaaattcgcaaggttcaacgattctcccgccaacaatcgttgagacctccatcgtcctcgaagttggaaaccaccagccatctgtaccaaggatgaaacagttggcgcggacgatcaccaattcatcttcatcctcaggaaacctgggcctgaatcacactgtatttggcagggtgaagcagattagcctttcatcctatcttaggcattccttacacagtggacgtggttctgatgcaccgagtcctgcacccatgcatcatcatggtcaccacagccaccaccaccgccaccaccaccacagtcacgatgacaacaggcatcctgcagctcccgctcctgctccagtacattttcctgcgccacagcccagatacggtgctccacctccatccggtgggtgtccgtacagcaaaaacaagccaaagaaaagcgggcgtgctgcaccagctgccgagcctgcagctaatgaccaccgatctgcttccatcgccttaccaccgcatccatcatcgccttcgcctgctagttggtctcagcatgctcccagtacgccggctgttcctccccctcctgctctaccagagccacctctgcccaccatctcgtttgctcatccacgtcctccaagtgaacgtggaactgggacgagtcctgctccaagtgaagaggcgacacgagcgggtccttctgggatgtcacaagtggcaccggcgcctcattcatcttatgccaccaggatgcagggcgatgttccctgctgctgggtcctttttgtcctcgcgctatgcgtcctaacgagcctgctacgatgagaaggaagtgcacggccggccaacgagatgtacatcagcgaccgctggcgtacgtgctaaagaagagaaagaggacccacggggctccaccggcgcggcgcatctggttccggcccggccacgccaccatccagcagctcccgggggcggggggtggccaccaaaggcacaaggaagctgagagcctcatcccttgtcaacccctcggcgggctgtgtcatactcttgtcgttcgttgctagttgtcagctgtcatgtaaatatgaagggatgggtataaaaggcaaggcaaagccgcaagacgggcggccgcgcgtggtggtcacgggtcaaagccacaggggggtggcaggcccttgtgcactgctgctcgcgcgcctctggtctgctggctgccgtgtgtgttcgtgtagtgtactgttgctccttctccggctccgacgctcctcaaatgtacagacctccagtttcatggaggttcgtttac

SEQ ID NO: 167170 - DNA, 454 bp, Zea mays
  Clone ID: MRT4577_84036C.1
ggacagataattcgagacgattgttttcgactggcgaaaattgtattccacccaagcacagctctttattttatgccttaccatcatatatggcggatccaaactcactggttcaaaaaaaaaacgggcatgtgaccaatccctcggattttcaactacagctcctgccctaatggtcttggggatgaataccaacgacacagaccctaatctttcatgcgcgcaagctttaacacacatatgtggcatacatcttgctgtatgtatattgctagctagaccttcggagggggcaccgtacatctactagtggctgagattcgggtaatccacaaaccgcgcatgcatgtagacaacgtctggctacaccttcacaagcaccggtgtatgatcacgcttgatgatgatcacggcttgcacacgtgctcaatgacggaaccggtggagggcaacc

SEQ ID NO: 167171 - DNA, 698 bp, Zea mays
  Clone ID: MRT4577_84037C.1
agctgaatatggttctcagttgtaacatgtatctaccggttcgttttggtcgactccttttgaatgcatacatgcccggattgcgttgagctggagcccgacaaacatgccaccgaacaagctgcaatttatactgaacaagctgtaagatcagaggcgtggtccggcatcgcgctggcggtggcgtcttgtctcgctgtctcatcccaccgctacgactataaagatcccgacgccggccgaagattagggtgttgtgggcgatgacgtccgccgtggcgtcaacacgcacggctgaggtgcgggcggccccgctgcccgggtcgttgcgccgacgtccggcctccggtgagcctcctcctcaggataatcggtcgcgacgataagataaggctccgcagcggaactggtcaagttggctggggccggcagggcagcgtcgcgtcgcagtgagccagccggtgatgagacaaatcggctccgatcctctcgatgatgattgatggataagatcagagtattatttatacagcccaactttgccttgggacgtacggcatctcactagtaaaataaatcttcagcaatgtgaaatcttcagaagcgatccagaaaataccttgttttggactttggagtgattttcgctcatataccagtaacaataataaaatactacatctatcttttttattttg

SEQ ID NO: 167172 - DNA, 604 bp, Zea mays
  Clone ID: MRT4577_84038C.1
tttgtcagatctagatcggcggcgactacgctagttccggccacacccgcgccaccggagacgcatcggtggtgccacagacgaaccagtctgcacaccttctctccgcaggagacgatccttcccggtcgcatatgctatttgcccgagataatcccgtcccagccatgcgaatctgtcgcgggggggggcggctttgtgtggaggcaaagggatcgatatatattcagcagatgcgaaagttgggcatttttaggccagattgacgactactccagtaacgggattttccagtttccacaaagtcacatcctctggccgccggcggactcattgtttcgccaaaagtaaatcagccggacacctgatctgcgcacaaaggagcacctccagatgcacgagaaggggccccagttttggttaaagctgcacttctacatgcttttgccatccactgaacaactaagaaacttctagccggacctgaggctcacatggcatgatcttgatcgttcaagagtcctttaaaatgagtggggacctagtatcattctgatggaaaaatgggatcgagttattctttttattttttacaagttttttt

SEQ ID NO: 167173 - DNA, 326 bp, Zea mays
  Clone ID: MRT4577_84039C.1
tccgagccgccggggctggctcgtgagctcctgctcctgcggctgctcctgtgcttcgcgaggtgtttgcagcgccttggagttctatctcgccgacaccttcgttatgctggccgtgggccctcacaagacgacgggggcgttggtctacctggactcattccgtatcgggggggattacttggtgcgcgttggtgggcgtcggagcgcgattatctcctggacccgccggggagggccggtcaggcaccttggtctacagccacgggacatcacctatcctacctctcgttcgccttcaggctcaggtactgccgctccaacac

SEQ ID NO: 167174 - DNA, 377 bp, Zea mays
  Clone ID: MRT4577_8403C.1
cgatgaggatgatcaaggcacggcttacatatcgaacctaacatgcaaaggagaatattagtctaacgacgagtatgatggggacgttagtacaagaagcaatgtaaatgacaaagataccactgaaggcgaaacctcatgcagaaattacaaggaagacaactgttgcaacattgaagatagtagcaaaacatacgagcagaatagtggagaagatgacaccagtagtctagtagatggaaatgagaagtatgagtctatgaatactaaagacgatgatagcagccctggaggtgaggacacatgcaatagatatgagccaaaggttgaaggcgatgaaaattgtgttctttgagctgagtgcattatcaacaatt

SEQ ID NO: 167175 - DNA, 1008 bp, Zea mays
  Clone ID: MRT4577_84040C.1
ccacgcgtccgggatcaacaaattgaagctactgtcaatgctatacgacaggaacttttagaaaggagtgttgtaatgcgaacattggaagcagacaaggatcaattgagccgcagtgttcaacaatacgataagttactcaagaagtctttagctaaatttcaggagtatatgaatatggtaacacgtggggaaggtgttgactcgtatttggagaatcttggtttaactggtgggcagaatctcacttgggtgtgccaaatgcgttatcagtgccagatgactaggattcaggaaacatgcgattcaaattctttgaagcttctcgagaatattacagaaatggacaggagcattgcaagcctcaatcgtgaagtggaagggctaaagaattgtagatcaattccagacctcaacaatggtgtggaagacgatggtgagggcaaagcatccctagccatgacattgggtgcatcttggacaggtgaaggagatcatgttagcaacaccacacaaggaggaaaacagcttgttggtttggtaggaaagcctgataaaaggaacgacatcagggagagcatggatctcgatggagttcggtcaggggcgaagctccgcaaatgaagcatgccatgacggtgcagcctcgcagggcccaagatatttggttaatggttgatcttgtgccagtatcatgcaaaagtgctgataaggctgcaccagtgttttgtcatgtggacctaacgtagtggtattattatacaaggttatcctaacttagtagcgtgtgtaaccagtggcagtgatggtgctatggttggacatgaataagaagtttctgcaacatgctatctacctctctttagctctgtttagtattgacaagcaatgcgtcctaggcacctggcattgccatctatattggtgaaatatactttatcatatgagtggaagccggaatgcactagctttgttcttttggcttaaaaaaaaaaaaaaaaaactcga

SEQ ID NO: 167176 - DNA, 834 bp, Zea mays
  Clone ID: MRT4577_84041C.1
ccgtgaaggcgacgccgggctcgggcgggcgcatccccgaccacaccggcggcaacgacccctacgtccccggccccaactcttctcagatctagatcggcggcgaccgcctcttccggccacacccgcgccaccggagacgcatcggtggtgccagagacgaaccagtctgcacaccttctctctgcaggagacgatccttcccggtcgcatctgctatttgcccgagataatcccgtcccagccatgtgaatctgtccagcgataggcggctttgtgtggaggcaaaggatcgatgtatattcagtagatgcgaaagttgggcatttttaggccagattaacgactagtgctccagtaacgggattttccagtttccacaaagtcacatcctctggccgccggcggactcattgtttggccaaaagtaaatcagccggacacctgatctgcgcacaaaggagcacctccagattgaaatcaatttgatctagaaaaccagaactgaactaacagaattaattccggtggttacttaggccaagatgcacgagaaggggccccagttttggttaaagctgcacttctacatgcttttgccatccactgaacaactaagaaacttctagccggacctgaggctcacatggcatgatcttgatcgttcaagagtccttcaaaatgagtggagacctagtatcattctgatggaaaaatggatcgatgtactctttctattttttactagttttttgagaaatatgtaatcactttcatgccaatcttatgtaacaccacagcctaatcatcatttgcaatattctgaaatgttgt

SEQ ID NO: 167177 - DNA, 667 bp, Zea mays
  Clone ID: MRT4577_84042C.1
ccgggtcgatcgtggtcataatgcgcctgtgcgcagtaccaccgtcatccgcgcttgcagccctggcgttcgcgctgttcctgctcaactcgggcgtcgccacgcgccgcgctctaggccgcggcgacgcctgggtggttgcgttcgtcgcggccgccacggtgcttgtgaccgctctcgtcgccacggtccgcgctcacgaccgcgcgcgcgaggaggggcgccggggcctgttcagggcagtggcgtgggctcagtccgccgcgctcacggctatgttcgcgcaccgtgtcgccgcgctcccgcaggccccggccatggcttgcctggtctggacgatggccggcggcacgatagccggagggttctactgcatctttctgcgtggtcgggatggcgctgtcgtcggcgctggtggccgggatgcacgacaggcgtagtgcgcgtcgttactgtcgtacggctgaactgtatatactggttaaattagccacttaaaacacatatatacttgagtccttgttattagttattaccacatatacatagtactagtaataataaattggccaccgtcctcaggtacggtgtgcgattggttggtgttgttctggctggccacgagagtgctgtggcctttgaaaatagtatatatgcagtgttgtgc

SEQ ID NO: 167178 - DNA, 1290 bp, Zea mays
  unsure (1)..(1290): unsure at all n locations
  Clone ID: MRT4577_84043C.1
aattcggcacgaggattaaagccggcgcctttggtttctctctccacctctctctatccgcccccgccccggctctctctctagctgcagattggtgcctcacccctagcggtcggtggttggggccgggttccgacgcctgctcgcgagctcgactggggcttggaagtccaaagccgccgcctcctcgtggcgcgccgcttcggaattcttgccttcttgggctccgaatatcgccgcccggtgtttgatttgcggcgttcctagcgaattcggggctgatttgccccccctatggcgaggatttgagtggattcgagaggaacaagtggaggtggagtcctgatttgggcccctgccgtggtatgtgccatgaggaagctcttcttctccgagtcggcctgcaaggagaccaagctccactgcgcgccccactcatggctgcccctcgagagggggaagctctccaagttctctggccatgccgccgacggctcctccatagaggcattgatgaagatgccagagccggcagtgcttccgtacttcaagcccgcgaactatgtcgacatactggctcagatacacgaggagctggagtcctgcccccctgacgacaagtcctccctgtacctcctccagtatcaggtcttccgtggcctcggcgaggccaagctgtctcggaggagcctccagtctgcgtgggagaaggggagcaccatacacgagaagctcatcttcggggcatggctcaggtacgagaagaaaggggaggaggccatctccgacctgctcagctcgtgcagcaagtgcttgcaggagttcaggctgctggatttcgtgttgcaggtctccactgggtcacatgtgataaactacgatggtgatgatgatgagtttcggggttctgcggtggttcatttccggataagagatgatatggttgcgtgcgatcgtcggaagctcgcggcgctgtcaactccactgtatgcaatgcttaacggtggatttagggaatcatatctagaggtcattgacatgtctagaaatggtatctcccctattggcatgagggcaatcagtaaattcagcctatcaggaagactaccgtatttgacagctgatgctatcttggagattcttgattntgccaataagttntgctgcaagggcctcaaggatgcctgtgagcgaaagcttgcttctttcgtctcttcagggcagatgctatagacttcatggagtgcgctcttgagctgggctgttccatccttgctgcttcatgcttgc

SEQ ID NO: 167179 - DNA, 279 bp, Zea mays
  Clone ID: MRT4577_84044C.1
cttgctctaatcaatgcactgattgagttacagcatgcattacgccaagcagctggtactgtgtctggatctatgccggttcctatgcgccatcgtaacagtatcgtgaacagtatcatgaagaagaggcatgaggacagtcatgatgcgaccttgtacgtctccttgcacctgatcttgtcgtagtaccatgcttaccaccatgatggagttcataccggtgatctcatcgttgatgtcgaatgtggcgccgattgtggtagtatcggtggtggactt

SEQ ID NO: 167180 - DNA, 231 bp, Zea mays
  Clone ID: MRT4577_84045C.1
ccgtccgggtcaacaaacctcttctctcctgtcttctttatactcactaacacaactggcgctcagctctcactgaactctgggaacatgaccatgcaggagcaggctaagtgacgtactgctggctacaacttgcattctgcgccatgactaatagcacactgcagtgaagcctttaacaagctgaccgtcttccgcagcaacatcaacaccactgttctctccatgcca

SEQ ID NO: 167181 - DNA, 323 bp, Zea mays
  Clone ID: MRT4577_84046C.1
atgatgatgcttttttttttggtttttttttttgtttctgagtggttcttttgataaaaaaagggactttggcgcttggcaaccacaacagagggacattttgtccgggaagacatttttggcccggggaaacaaagctgtccttgggaaaacccaccacgggtgggttaaaccacccagtgttccttggacgtcactcttttaaagggggggaggaatgtgttaaattgggccgaatttattggctagcccttatttaatccggtgggggctaaacaaaggggatcactttgttttgtgggggccaaaatccctgggggggg

SEQ ID NO: 167182 - DNA, 821 bp, Zea mays
  Clone ID: MRT4577_84047C.1
gcctcccgcccaaatcccctgttctgttcaacgccggaggcccagctcgtctccgaggcgaattcgcgcagcggacgccgcgattccgatcaccgccgacgccgccgcgctcgccggagagccatgtctcggtccatgagcctcaacatgaggtcggcctcgcgccgcgacctgccgcctccccagaagacaatcgaaaggtttgagaagatggtggaagggggaagttactacgaggcccaacaaatgtacaaatctaccagtgcaagatacattacttgtcaaaggtattcggaaggcttggacatccttcagtcaggagctacaatccagttgaagcatggacagataacttgcggtgctgaactcgctgtgctgttcgtggacactcttgtcaaagggcaatgtccttataatgaagaaacttttgatcgtgtcagaaagatatacgaggcgttccccaggataaatatgccccatttccttggagatgattatgacgatgatgggcagaaattatccgaagctatttctgctgcaaaagtgcgttctgaaggttgttcatcatttctaagagcagctctcaggtggtctgcggagtttgggacatcaagaaacggatctcctgatctgcatgttatgttgggtgaatacatttattccgaatctccagaaacggacatgactaaagtatcaagtcattttgtgcgcggtaacgatcctaaaaaatttgcttctatgctggtaaactttatgggcagtgctacccctggtgaagatgatactgcaattgcacgcagtgtcctaatgtatctatcact

SEQ ID NO: 167183 - DNA, 345 bp, Zea mays
  Clone ID: MRT4577_84048C.1
ggcacccaccacagaaaacagcaccgataaagacatggcagactacactagaccaagacacacatcacgaccactaccgttcaccgccaccacgtaattggccaccgagagatgggccgacctagccgacgaaaccgtacagggtgcggccctggtgcttgggcgcgtagacagcgtgcatggtggtgacagtgttgcggcggccgtgctaggtgtaggtgacggcgtcgcggatgacgttctcgaggaagatcttgagcacgccgctgatgtcctcttacatgagaccggagatgcgcttgacgccgtccctgctcgccaacctgcggatcgccggcttggtga

SEQ ID NO: 167184 - DNA, 4515 bp, Zea mays
  Clone ID: MRT4577_84049C.1
atggagcctcaccgcctcttgagcgatcatacatcgagctgcttaaagcgtaggcttgtgtacaacctttgttgcagaggaggaaagattgttttggagccttacaaatgtccaccggcacccttatgtgacctgctgcgattcgatggtgatagtcgtgccagaaggttccttaggcaaattcgctcatacaattcccttttcgcgtttacctcactaggcgccgtcgttggtagatcgataaataacggtactgcaccttatgttttcaaaatcaatggtgtcgtacaccatcgcattggctcgctactacccagtcatggattgcgaccacagtttgcgcagctttacatatatgacactgaacacgaagtgcaaaataggctgggcatgtttgagaacgaggctgatgtccatgatcgcccggatccagaggtggcccgtttattacttaacatgctagatgagcataacaagttggtcacggcatttcgctttgctaaagaacgtttagatgaagaaggcaaccaaaaggtgacgttgcgattattaggctgtaacacacgtcatgacgcacaatacaacttaccggccaatggtgagctcgctgctgtaatagtgggtgattgcttaccttcacaatacaagtacgatgtccttgtgcacgctagagagggtggactcaaacacgtttcgtgcttgcacccatcctacatggccctgcagtacccgctgcttttcccttacggtgatcgtggatatcaccttggaataaaatacactgacgtgggagaaggcgatgccacatgccgcaagtatgttacgatgcttgaatttgttagacatcgttcacactataggctcaacgaaccgaacccattcacttgctatggtaggctgagcaaccagctagctgtcgatgcgtattctacgatcgaggcatctcgattgcaattcatagcggaccaccaaaaagaattatgttgtgaatccgtacaggggataaccgacgccattggcaggggtctcaccagtgcagattcagttggtggaagagtaattgtgcctgcatcttttacgggcggcagaaggtaccatgtaatgaactaccaagacgcaatggccatatgcagagtgtatggcccaccagatctcttcgtcaccttcacgtgcaaccctaaatggaaggagatagtcgatgcgcttggcttcgagcctggtcagctggcatgcgatcgttccgatatcgttgtaagggtcttccatatgaaggtcgatgaattcatagcagacattagagaaaataaattttttggtcctatccgtgctgagacagaggcctgtgccattgacgctttcatatgtgctgagatacctgatgttgccatagaccccttgggttatgctctcgttgatgaattcatgatacatggtccatgcgatgattacaacaggcggtgtccatgcatgaaaaacgatagatgctctaagaaattccctaagacgtaccaagacgagactgtcattgacgcttttggctataccctttatagaagacgaaacaactgtctgttcgtagtaaaaggtgccacgagcttcgttgatataaggaccttccaaaatactgtgtacgaaacattcagagaggcgtgcgaagcccgtggtttgctcgaaggtgacaatgagtggaaccttctatttgatgaggcaatagtctctgcctcagcgtttcaacttcgacaaatgttcgttaccattgtcgttcattgtcctgtttgcaatgttcgtgctttgtttgacaaatattggatctacttccccgatgacatacaacgtggtcttagagaagcccttggcaacccgcactacacagctccacatgaacaacttcttacgttgcttttgaggaagctagcagacacgttcgctaacagtggtgccaacatagctgattatgaccttccaatcttatcgtcctattgtgacttgaatgctgaccaacggctcattttcgaaaagctgactaaatctgcgctctcctgcttgccgggcgtatttttcgtatgtggacatggtgggacaggtaaaactttcctgtggaatgctatactcatgcatttgaggtcccaacaaaaaattgtgctggctgtagcgtcctccggcgtggcttcattactattaccaaaaggccgtactgctcattcgcgtttcaaaatacccttcgatcttgatgaaggtggtgtttgtggtgtcaagagaggtaccatgctgtctgaacttatacagcgaacttttcttatcatatgggacgaggcgccgatgacccatagacattgctttgaggccctagacaggactatgcgtgatattctttccgaacatagagcggaaaatgcgaacatcccatttggtggcaaacctattgtgcttggaggagactttcgccagattttacctgtggtgcgcagaggttcacgatctgcaatagtgaacgcatcaattactagctcaccgttgtggcagcacgctactgttttgaaaccgcgaacaaatatgaggctctccaacccgtctttacatggtaaggaacgtgcggacttggaacagtttagcaaatgggtcttagatatcggcgatggtgctctgccagcgatgacacgaggagacgagtccgaacctacatggattacgattcctgaagatttgttgatacatacggatggtgatgctactgcagcactcgtatccgaggtctacccagaattgttagagaaatatatgaaccctacatacttagctacacgtgccattgtatgtcctaataaccttacaaccgataaaataaacgactacattgtctcaatgctccctggacatggtgtccaatgccttagctgcgacacgatctcaaaggcgtctgaacgcatacctgattttgacatgctatatcctactgaattcctaaactctattaatgcagcaaatttcccttgccacaaactcgtgctaaaaagaggcgtcacagtcatgctgttacgtaacttgaaccagaccgcggggctttgtaatggaacaaggatgcttgtaactgaggtcggacagcgtgttcttaaatgcgtagtactaacgccctccggagtcgacgaagaggttttcataccgaggattgcgcttaacactaccgatgtcaaatgtcccttcacattgcaaagaagacaatttccgatacgaatatgctatgccatgacgattaataagagccagggtcagaccctctcaacggttggactctaccttgacaggcctgtgtttacgcatggtcagctttacgtcgctgtttcaagggttacatctagaagtggtcttagaattttgattgaaaatcctgatggttcctgtggatcacagactcgaaacgttgtttaccgagaaatgggggacatactcattcctagccttatggttggagactgctctcgcaccttgtgtttgcgtgtctctaggctttgggaattccttgatcctcaggatgacagtaggctcttgcatactgatcttgttttgcttgatgaagagggaaacaacatacatgcccagatctatcctcctttgtgccaacagttcagtgcgctgctcgatgagggagggatatacaacttgaagtatttcttagtcaggaaagctaacagattctacaaactggtagaaaactgcaacatgatcagctttacaaagtggactacggttgaggttgtcctccaaatcccccctgctttcccggtttgcacatataacctcactcccatagaccagctccaaccgcgcgtggactacaaagaatatttcactgatgtgctcggtgttgtcagcgtgatctcccgtgtttcatcactacgcacaaggggacgacaggctgaggttatgaagagaacaatcactataagcaatgcaagggataccgggccaaccgttgatgttgtgctttggggcgagcgggccacagctttcccagctgaacaggtccacagggacagtgaatcctcaccacagatcataatatttgttggcactctcatgaggagctacgctgataatgtgtctttatcgggaggatcatcatgcaagtggtacataaatgcaccggtcccggaagtaaacgctctcagagctagtgctgaaaccaaccacctccctgtcatttgggatcagggcaaagtagttgctgagagtacagtcattgcagttcctgaacataagaagctcaaggatattaagtacctccatccttttgaaaataagaagaaggaatggcttgtcatcgtaaaggtgctcaagattgatagctcatggtggtacaacgcatgcaaaaaatgccttaggacaaccaaaccgcatggtgacacatacaagtgcaccaataattcctgtgacaacataggatcgcctaccccaaggtgctgcatgaatgctgccgtagcagagaaagccaaatatgagaagcctggtaaagcataa

SEQ ID NO: 167185 - DNA, 363 bp, Zea mays
  Clone ID: MRT4577_8404C.1
aattcggcacgaggcgcttaacagctctgccgcctccggatccaggaccgccgccaccaacgcctgctgctgcccctcctgctgcaccaccaccatcaagaggtccagcagggcggcagcgccagcgcccgccgcggggacatgcagcgcgacagcggtggcggtgtcgccggcggcatgtctgactcagtgctccggaaggggctcctctcctacttctacctggaggagtggaacttcctctgcttctccggcatcgggtacaacaaggacatcctggacccaaagatggacaactggcccttccccatgtcgctcaccatgggacacatggggttgctgctcatccctcgccggcgggct

SEQ ID NO: 167186 - DNA, 572 bp, Zea mays
  Clone ID: MRT4577_84050C.1
tttcgggaaaggggaaaaggggagcggtctgctcatgtttctctccaccacactgcttggccgactagacggagcggatctccctcccaatccaccgtcaatggccaccgacctccggagaacgcggacgacgatggagtggaggacgaacgtgccgccgtgccctctccagagcggtgcgaggtgctggtttctgcgatcgcgggggtgctggccagcacgctgagggagcacgacgagcgggtggccatcatcgttcggctccacgatggggacgtcgctgcaaccgaccgtcttaatggaggtagatgcttctccccaccccaacatcgtaccattctgtgcagacaactagagtatgcgtactgtatcgtggagtccattcaaaccaagataagtgtgatttagatgacatactaacaactgagttactcttttctaattctatcaccatgtcatggaaatgcagcgacatcccaaaaatgtacttggcctctttgggattgaaacatatatgttgtttcttgcgagtgttgaggtgcatatggacctgatctcaactttgctttgcc

SEQ ID NO: 167187 - DNA, 581 bp, Zea mays
  Clone ID: MRT4577_84051C.1
ccggccgggatttcgatatcctcactctgtaccccggacgagttgcagttggatctcacatcggtgatcacataaacaatggcgaaagctgctgctcgtgcttagataacaccgatggtgtcgagggcaccatcttcttctcccaacaggaagatggtcctaccacatggctccggtaagtgtctcatggtctcgagcctgaagctccatggattccatgtgaatgcacttgatcgacaccaccaatgtgtgcatgtcaactggaccacactacaatcttgtcatgaaggaacatggagcaccataagaagataatcgacatgccgacgatcttggaaatgttacagttgcagaacatgttgctattaacattaatgataccgacagtccgatcccaatgactgggccaaactcaatcattggcacagttggtgctgtccgcgatgatttcgatgatcttgctgagggtgatatcgatgtcaggaagagcaccgaaaacgctggcgatcgcgttgcgagtgttactctcagactctatcgctgaactgaaacagatgtgcattgaacttctcttacgcctg

SEQ ID NO: 167188 - DNA, 159 bp, Zea mays
  Clone ID: MRT4577_84052C.1
acgtacgctcggaattcggctcgagccagaggcacctgttttctctccctccaccgcgctgagaagagtagggcgctccccccctccagtgagcatacgacggacgagacccgccagattaaagactcactcctgaactgacgggggcttgttgcctcc

SEQ ID NO: 167189 - DNA, 387 bp, Zea mays
  Clone ID: MRT4577_84053C.1
ccctcgcgtccgggggcggagagttccccgcgctcagacaggcgccagcccatttccatcccccaaagcctaacataggggtctttattccgtgagtcaccgtacctgatggcccacaagcgacactaaagcgcatcaaggcgtcgacggtgcctagcccagctaactactttgggagacgcaaaacttcagacacatgtcattttacaggacggggccattaccggttcctgctacgactggatggaacattgaaagacgacggtggaagacccattatacgccgaacccagggcgacctgtggctaccaatatgtgtacggagggtagcacacgtcccctccatagagacagaatcttggccatcaccaccggggcatgtcgaat

SEQ ID NO: 167190 - DNA, 308 bp, Zea mays
  Clone ID: MRT4577_84054C.1
ggacctttgggctgatttatgtgcttgacgacgaggcgccgaccgtcggacccggcctgcagggctacgtcgcgggagataccgtcggcgctaggcctaaggccgccaaggcgctcggcgcgctgtcgtccgtatctcctaaggagaagaaggagaagttaaggctccagactatccctggcagctaagaacggcgcaaatcgtttaaggtcacaccgctaaagccaaagcctcgtcagtaatagagtcgccaaactcgagtcgcattcccccgccaataccgccgtagcaccatagagcctcgccct

SEQ ID NO: 167191 - DNA, 715 bp, Zea mays
  Clone ID: MRT4577_84055C.1
gccggccgggttgggccgccaccactcctacataccggtccctgtccctgtcgatccctcgcaaggatcccacgatggtgaagttctcgcgggagtacgaggccagcatcatccccgagtggaaggccgccttcgtcgactacaagggcctcaagaagctcgtcaagaggatcaagatcgcccgccgcgaccgcgacgcccgtagtaccagcaacgaccacgacgacgccaccaccaccagctatggcttctccgtcctcgaccccgtccgcgccctcgcctcccacttcaacaacgccacgcccccggcctcgccagagggcggcagcgacgacgacgccttgaggaccttggaatcggattcaggggagctcgtgagagccacggacaagcatgagcaagagtttgtggagagggcggacgaggagctggagaaggtgaacaagttctacgcggcgcaggaggcggacatgctggcgcgcggcgacgcgctcatcgagcagctccgcatcctggcggacgtcaagcggatcctcgccgaccacgcggcggcgtcgtcccggcgcggccgcgcgaggctcgcccggaccggcgggaactcgtcgccgccgtccgtggacggctccaacagcggccggcacctcctctcttctcccttcgtggcttcgtcgccgcagtccatatcagaacgggagcgtggagctgcagcaggcgc

SEQ ID NO: 167192 - DNA, 277 bp, Zea mays
  Clone ID: MRT4577_84056C.1
gggtggttattttattttttgtcatttattttttatatataaacaattttctctttttccattattactccatttttacttactcggaccataaaccaaaggcaccaacatattccttctcactgaatcatgacaaactaacgcgccctattttcccaaaaaaacactttttagggtaacaaccaaaggcccaaatcccttaattctcccctttcaaatgcctgctgggctcattcctccaaacaattcgaaatctccgcatagctgaagcaaaata

SEQ ID NO: 167193 - DNA, 514 bp, Zea mays
  Clone ID: MRT4577_84057C.1
cttctcctttttattcaccaaccaccatttgcctgacaaacagatcctttgtattcagcttttgggtttctaatagctaagagtgaaacttttcctgctcgctttgtttgccttgtagacaaagatttattgacctcatcatggttgagatttacaagctctcttttttcccttttttctttatttttttatttctacaccttacacataccatattttttattactttctttatttcttctctttttttgatctttttaagatgttttattcttatattttcctttttcttacttcattttttatatttaaatctttttttttctttatttttattttattctttttttttatttttcattattttctttcttttttttctttttttttatttcacttttatcattttattcttttctttttgcttatttttcttatttttttattatattatctacctttttttctttactattttttcttttcttttttttattttttcctctttttattt

SEQ ID NO: 167194 - DNA, 746 bp, Zea mays
  Clone ID: MRT4577_84058C.1
ggtccctgtccctgtcgatccctcgcaaggatcccacgatggtgaagttctcgcgggagtacgaggccagcatcatccccgagtggaaggccgccttcgtcgactacaagggcctcaagaagctcgtcaagaggatcaagatcgcccgccgcgaccgcgacgcccgtagtaccagcaacgaccacgacgacgccaccaccaccagctatggcttctccgtcctcgaccccgtccgcgccctcgcctcccacttcaacaacgccacgcccccggcctcgccagagggcggcagcgacgacgacgccttgaggaccttggaatcggattcaggggagctcgtgagagccacggacaagcatgtatgcagtgctcgcccttgatccatggatcgatcgatcgatcatctagctactacagtcgtaatattcattattagtactatcattctatattaaattagctgttatgaattgaacaaagtaggaaaaagaaagaaagttacagtaactacacacggctagctagcttgttaattgtttacccatgtcatgtcgtacatatacttatgcgcatgcaggagcaagagtttgtggagagggcggacgaggagctggagaaggtgaacaagttctacgcggcgcaggaggcggacatgctggcgcgcggcgacgcgctcatcgagcagctccgcatcctggcggacgtcaagcggatcctcgccgaccacgcggcggcgtcgtcccggc

SEQ ID NO: 167195 - DNA, 2342 bp, Zea mays
  Clone ID: MRT4577_84059C.1
gaagaggttatctagttcttacccctggatcctttttatgataaattagttaacgaccatatgtttccttccatgcaatattttttcagtcaccaattcccagatacattttcacaacttaaacgatcgacaaaattaagatcttgttagtcgattgacatgcaacaattctttctcaatcgaccagtagctagttaaatgcacatcatctctcctgaccagaacgcctcatgttgtaccctggcgcacccgcctgagcttattccatcctaaaatctgcagcgtctcggtcttgtgcagttacgctctccgattcgttttattaccacttaaacaccagttcttgcaggggacagtgtatccattcctggaattcttccccctaaattcctgctgttcaacttggagctccgtcttcatcagtcagtttcaagctcacggaatggtaacgggacagtcttcactgctctgaactttccagcgttgttcaagtgttcattctccagcctgtagaagttccagtgccctcgtcggatgatttccagcgaagcgagcgagaaatccagcaggcgagactccaccataccaagccggagtttcatcacgctctcggcccaggctaggcgcagcacgaggttgagcatcatggaagcatagtagatcgacttgttcttgaggatgagctgatcccggagccaaaagttcttggattttgggttcaggaagccccagtccatgacgaaatcccagtagagctggtagatggtggcgccggtagatgatgcaatgaccatccacatccagaacggcgtaggcgtcgcggcgtacttgaacctaaccgcagctgccaccatcgctgatacgtacttgccggcgttagcaagctggttcatgtcgtggccttcttccaggtaccttctcagacactgcattgctcgccagtagtatggcaggaaagagagcacgtatgccaggttcttgtattgggagctgctggtacagcttccatacgcgtgagttctgaatgtttcagccatgaagtagcaccccgtgaactcgaggtgtcttagcagtgggatctggctggttagctggtcagccatgaagaaatccgccatcagaaccttgtagaatggcgacagcacgatgttgcgcatgacgcgcatgaagcagaagcgcgtggagcggtagaaaatgttgaatgggcagaacagaacccctgctgacagcagcagaagtgccccgggcagcgcgttggcgtaggtcgccccggcgttcctgaggaacaggttgacgaccagcgccgcgacgacggtgcacatgatggacgccgacatgaggaaggcgtcccggtgcgtcagggcggtgctggagaagtcgaagatgaagttgtggttgatcctggtgcccttccacatggagaggttgcacccgtacaggaagacgtgcaggctgatgagcgcaaacatgctgaggacatggtaaacgatctccatgtaggctgtgtttccggtcgaagagaaaatgccggcgacatgggctaggaccgagtatatgatgaacagggacacaaatggacctgtggacaggcttacgaggcagctgtccatgttcgtgttcttgcgctgttgctgcatgaggtatttcctggccagcatcctttcgttggccgcgaaatgcctcaagaagatgcactccacctcatccgcaagctgaagcaccttgtcagagctgctgaacggcgacctcttcaccttctctgaaaacaggtctactttccgatgctgctccgacaccttgacgaatttcttcagtattttgccgaaagccttctcgttgagcgagatgaacttcgtttttaggtcgaggccgccgtagagcgcgaggaaggcctcgcggatcttcttctcggtgtcctcgacagatttggcaatgaccatccacacccagaagtgggtgggcgtcgcggcgtacttgaacctaaccgcagctgccaccttgagcgcggcccggccggggctggtgggcgggatgtcgatgcgcaccgtggccggcagctgcagcagcgcggcgcgccccatgagctgcttcccgctgccgtccttcttggccttgcccagcccgccgcccacgaagctcacgccgttgcgctccagcgccgccatcacctcctccgccacagccgcgccctccgccacgcgcgcctgctgcagctgcacgctcccgtctgacatggactgcggcgacgaggccacgaagggagaagagaggaggtgccggccgctgttggagccgtccacggacggcggcgacgagttcccgccggtccgggcgagccgcgc

SEQ ID NO: 167196 - DNA, 1574 bp, Zea mays
  Clone ID: MRT4577_8405C.1
tggttctttgccacctgagctgcaggttagagtatttgctccagcacctccaaactgccgacgcttcattgttgcaacaaatgttgctgaaacttcgctgactgtagatggtgtcgtgtaagaagcaaacacaatcagttcgtgattgattgtggttatgtaaagcagcgccaatacaatccatcaagtggaatgtattcacttgatgttgtccaaatcagcagagtgcaggctgatcagcgagcagggcgagctggtagaactcggcccggcaagtgctataggctatacccaatttccatatatcagaatgagtttcttgaggcaacagtccctgaaattcaacgctcttctcttgctggaagtgttctgtatctgaaatcgttaaatcttccagacatcaacatactgaagtttgattttctagatccaccatcacgtgagtcattagaagatgctttgaggcaattatacctcattgatgcaattgatgaaaacggacaaataacggatgttggacgagttatggcagagcttcctcttgagccgtctctttcaaggactttgattgaagcaaatgaattgggatgcctatctcaggcgttaactgttgcatcgattttgtcagcagaaataacattgcgatcagttagcaaggacgtggtggatggaaagaggaaaaggcaggagctccctgatgggtctggctggggtgaccatatacaattgcttcagatatttgaaagctgggaccaaactggctatgacacaaaatggtgctctcatcatgatttgcaggtgcggggtatgaaattgagcaaagatgtgaggaaccaactatgtcagattattcaaaaaattgcaaaaggttcaactgatgtggatgcaaggaaaagccggaagaatgaccctgattatagaaagctgaggagagctctctgcgtaggatatggtaaccagctagctgagtagatgctgcatcacaatggctaccatactgttggctataggagtaaacttgtacagtagcagagaaacttctgtactgtcgagcaagcctgggttcagcctatattaaagaagctcgacaaattagacataaacagattaagtggtggttcgagtgcaccgggagattttgaacttttgggagacaataagcaagtgaactcgtcaaagaatgacgtgggtgtaaaacaatcagaggtggacagtaaaatccaggcagttcgagagcggtaccttgcacgaaaaggcaagaaatgacaatcgacacgtttaactgatcgctcagcatccttttggtcagcctgaagtttttttgaagatcataccgaggaaccattcgtgttattgtgggtggtgtatgcttcaacgtgcacaaacaaaagaattttttatgtaattttttgtttgaggactttaacctttttttttatttggcattactgtgatgtgacttttccttgggccgaaatatttacagcttttctgcatggctagatttttttcccccatttccaaaaaaaaaaaaaaaaaaaaaaaaaaaaactcgagggaggggcccggtaacc

SEQ ID NO: 167197 - DNA, 540 bp, Zea mays
  unsure (1)..(540): unsure at all n locations
  Clone ID: MRT4577_84060C.1
tgcgcggcggtcggantgcatggtctggccgagcccgacgccgtcgcccatcacggttccatcggctggagcagcccgagtgtcgtcgtccccgcggccagcagcggcggcgggatgcaaggcttggacttggagtgggcacgcgcttcggttacaggggcagcagcagcggcattcgccgccggtggcaaccgcttcatcggggcgccgagcttgagcggcaccagcatagactgggctggcggcggtggcggcggcggcggcagcgcaagtgaagcgtcggcgatgggcgtcgtggaggaccaacagcagatcgagctcccgttgtcacccgaggacatgccgtttgcgcatgtgtacaggttcgtcggcgacatgttcgacgcggacgcgccggtcccggtggaagcccacctgcagaagctgaaggagatggacgacatcacagccaagacagtcctgctggtgctgctgaacctcgagaacaacctgttggcgccccagttcgagcctgtgagaagctgctgtcgacgtatgatc

SEQ ID NO: 167198 - DNA, 531 bp, Zea mays
  Clone ID: MRT4577_84061C.1
taaaaaaaaaaaaaaaaaaaaaaaaaaaaaaaaaaaaaaaaaaaaaaaaaaaaaaaaaaaacctaaaaaaaaaaaaaaattaaaaagcattttttttaatattttcatcacccttaggggcaagtttttagcatatttctttcacacctcctgtgccgccttttccttgcttcttatatgacctttattggccctttttttacccccttttaggattttttttacccttttttttacccagtttagtctgggtaaaaccctttctttacttccccttattcccctttttgcatatcacttttttcccaattggcgttttttcaaataggccccccttaatggcccttgtccccccctttttttcctgcttttagaacgtacgcccttttttttgcccccttaatgaccgttgttctggccagttccctcctccccactcctttacttttcttcccttcttttccccccctttttgctggttttcttccctttgttgtaagtttggccctctttttcgggcacctttttatt

SEQ ID NO: 167199 - DNA, 1018 bp, Zea mays
  unsure (1)..(1018): unsure at all n locations
  Clone ID: MRT4577_84062C.1
aacagaacgaaacgactacgagtttgaaatattaactcatctatcgcgtcaccaacacaccacacttggtatacacgtctaccaaatgccttcatcacacaaaccgcaattctaacataaccttcgcctcacacatacatacacaacatcaaccatattgcaggaagagtaaaccataactgaacaacctggtggaatcacacccgagtcgggcatgctatctacgggttgggcattttgtcgaacaagtagagcgcgaggcgcggagtcgagtagtcgacaaagggctgcaaacaacgacacactggttcaaacattttatcgagcatgcttagcacgagacgatgaggacatcgaggtgtttaccgggttcgacgatgtcacagctgaggctgcacagatcgaggacgctgctgcacgcgacgacacacggcgaagtcccagctcagacgtttctccgaacaccatcacaaattcccaaacgtggccgcgaaggagctcggcgtggaacaaagacggcgaccgtggatcggcgagcaacacgaccgcaggcgaagccgtgcgcgcacgcgcagagggaggccgagcgcacgcagaagagtccggcagtctgcagcctgggcgcgatggcgtccgcggccaacgtcagggcgaggcaggcggctggcggacctcacatgggtggcagacggtacttgaagctggaccgacggcgagcaccagagaaaagcggggacgacgaccagggagccgcggccggacctgagggagatgagggaggtcgagcgcagaagacggccgacgcggtgcaggacgctcggcgctagagatgaacagcggccggatggtgtaggaagggatggcgtgagggggtcccacagctagggaaactcgcctgagcgcggctcgcacggngagaagacagggtcatcactcggcggcttgaaagaggataggacgacggcgagacctggntggtgcgatgagggaggagcanaggggccgcagcaggcgaata

SEQ ID NO: 167200 - DNA, 135 bp, Zea mays
  Clone ID: MRT4577_84063C.1
ataggatcgactctgtctgacgctttcctgtttggagatacctgctcctgccgactaccgagagttatcctactcagtctgcgtgctggcacggccaactaggatatcaactaggatgagtcgaggaggaatggc

SEQ ID NO: 167201 - DNA, 400 bp, Zea mays
  Clone ID: MRT4577_84064C.1
tcattcaatatttaccactggctatccattttacccttattgggggcgagggttaacattttagggcctggacattccaacatctcctacattatccctaatcccttcttcgcaggcttggtatatctaaaaacatacttgtccactaagacattcttcttgcctcctctgaagcactaactgctcaagccacacaataaaacttctacaatggatcaatcttcccccccttcactaacattaaaaagagttctgctcacatttcctcatcctttgcttcaaaatcttataaactccgttttgctacccatcttcctcccccaatttaccttgtgaaatattcacatagctgcatgtacactcctatctactcttaactaccaattgtgctgttgggatc

SEQ ID NO: 167202 - DNA, 324 bp, Zea mays
  Clone ID: MRT4577_84065C.1
atcaccggaagatctgccccaaccctccctaattcacagggtaacatatggggccaactaattaaaaacttgttttgggaacaaaaaaactcccgggctgctgttgttttggcctttggggggggagagggttaaaagaaaaacagggaaaaaggggtatcccccgttttggttggttgaccgaccgggggtcattttttggttccctgattaaagggatgggttagtaactgggcccggggtcaaaatttaaggcccggttcctttttgccctttttgtttttttttctggaccccctgggggggcccccaaaaaaggctttt

SEQ ID NO: 167203 - DNA, 346 bp, Zea mays
  Clone ID: MRT4577_84066C.1
gctccttagaaatgcttaattcttatttcttaatccttaattcttatttccataaggcttagaaggaactctacaaattctaagtaactggctattattaataagagtaaaaaatctactatacttcaataaaatattttaagacaaaaaataggaagttgcatggtatagccgagttgactcactaaaattttatttacataatttttctaatatgaaaattacttgttttcagccccccttcacaattgtattttaaattaaggttattaatgttttaacctagatcatataatggtaaattaattttttaaatttgatatccgtactgaacttggaaaaactg

SEQ ID NO: 167204 - DNA, 704 bp, Zea mays
  Clone ID: MRT4577_84067C.1
tgatgctatgaaagaatttagaacacttgagatcttacacgcgctggagccgctcgcatataggagaatggctccagcgcgtgaaagaatctagaacacttgagatcttacacgcgctggagccgctcgcatataggagaatggactttgaggagttccgcgcagcttcatcgcctacaagcccccgggcagcgactagaccgcgcccgccggccgccccccgccggctagctatagctcctgcgtgagctagtagctagctagtgccatgcgtcgtctctgtcgttcggttttgcttcggggtcaccgtaccctttgcttgcttggtttcttctttcctttttccttttttttttcttttccccggccatggttcctttgctttccagttttctctgctggatgtgatgtatccattgttgcaagcatggccttgcattggctacctctatacctgctgctacaaaactactgcaacgcctatatatacttggggtgaggaacatgtgaatgcaagctccggctatcatatacatgtaatatggatacaaactatatatataaatccgccgaggcgccgacaatactataaaaaaaaaaaaaaaaaaaaaaaaaaaaaaaaaaaaaaaaaaaaaaaaaaaaaaaaaaaaaaaaaaaaaagggaaaaaaaaaaaaaaaaaggcccctagggccaaaggccccta

SEQ ID NO: 167205 - DNA, 265 bp, Zea mays
  unsure (1)..(265): unsure at all n locations
  Clone ID: MRT4577_84068C.1
ccacgnnctctgactcacccctgcatctgccgtgtanccttcttggaagcttggactgcactagactggaggtggagtgnagcttttccttctccaaaatccaaaccaccacatccccccattaatataaggggattatatgtccaccgccgcacgcaagaagccaaataaaaaccgcgacgacggtcgaccatggccgccctcgctgctctcctcccccgcctaacccaccattacccccaccacccaaacgaccccggcccca

SEQ ID NO: 167206 - DNA, 275 bp, Zea mays
  Clone ID: MRT4577_84069C.1
acaggcgtgcgaaccatgccacaagcacgcgagctagcgagcgcgcttcagcgaatatggacaccgagactacatagccgacgccgcgtagctatcagtcctcagggcggccgcagtcggtgcccagactgaggaagccaatcggtgagttttttctacaagagctgcagacaagggcggaaatgatgactaatacgggccggcgggcagatgcgtaagcatcgtacagcttcatcaaggagaaggctgtgggcgctgcaaccacagaggcacag

SEQ ID NO: 167207 - DNA, 284 bp, Zea mays
  Clone ID: MRT4577_8406C.1
cccattcttccgcccacgcgtccggtgaaggatatgggatcttgtaatgccatgatcactggttattcacagcacggaatgggaaaacaagccatagagatctttgatgacatacttaaaagaggtgcaaagccagactacataagctatgttgcagttctgtcaggctgcagccactctggactcgtgcaggaggggaaattttattttgatatgatgaagagggcccataacatatctccatggtttggagcatttttcatgcatggtcgacctttttgccc

SEQ ID NO: 167208 - DNA, 769 bp, Zea mays
  Clone ID: MRT4577_84070C.1
cttaacaaggattacagaaaagaatgactgctgcacaagcactttctcacccctggctgcgagatgagcaacaacaaatacctctggatatgctagtattcaagttggttaaagcataccttgtttctacgcctctcaaacgggcggcattgaaggccttgtcaagagcaataacagaagatgagcttatctacattcgggcacaatacaacttgttagaaccaaacagtgcagatggtcgaatatgtatcgataacttcaggatggctcttttacagaactgtactgatgctatgaaagaatctagaacacttgagatcttacacgcgctggagccgctcgcatataggagaatggctccagcgcgtgaaagaatctagaacacttgagatcttacacgcgctggagccgctcgcatataggagaatggactttgaggagttccgcgcagcttcatcgcctacaagcccccgggcagcgactagaccgcgcccgccggccgccccccgccggctagctagctagctagctcctgcgtgagctagtagctagtgccatgcgtcgtctctgtcgttcggttttgcttcgggtcaccgtgtaccctttgcttgcttggtttcttctttccttttttccttttttttttcttcttttccccggccatggttcctttgctttccagcagttctctgctggatgtgatgtatccattgttgcaatcatggccttgcattggagaaaaaaaaaaaaaaaaaaggcccctagggcc

SEQ ID NO: 167209 - DNA, 454 bp, Zea mays
  Clone ID: MRT4577_84071C.1
tttttttttttttttttttttttttttttttttttttttttttggggggttttttttttactgggggggggttttaaaaaaaaagaacaaaggaacaacaaaaagaaaacggggaacggaccggccgaaacaaaacgggtggagagaaccaagaccagagcgaagggagaggtgggagccaatttcccgcaaaaaacacgaagcacggggtaagcccacaccagcaggaagaagggggggggggaaaaagaaaaaaaaaacgcgagggggggaacaggcttctccccccctaaaaaaaggggggcggggaaaaaaaaaaaaaacttggtaggggagaaggggaaaactgaaggggcccaaaggatagggggcagagggctcccaccccaaggggcggcgccagcggaaaacaaaacccgcaaggggggggagggtcctgcataacccgggggcg

SEQ ID NO: 167210 - DNA, 257 bp, Zea mays
  Clone ID: MRT4577_84072C.1
ggacgattcgccccttcatataaacaactgaaatcgtcacacgagacacgaagatataaaaaagataataaacctttgtcaccatacgagacaagaagatcaacctgctaatttttttcgcaactggataagtaaaatctttattataatattttttttaaaaaaagtaccacatgttttaaaaattgtcatgaatatagctccactgtatctatgacactagaggaagaagaccatgaataatgaatttcactcgc

SEQ ID NO: 167211 - DNA, 358 bp, Zea mays
  unsure (1)..(358): unsure at all n locations
  Clone ID: MRT4577_84073C.1
tttatttttaaaaaattacttctccgtccaatttaaaaatgttttttgtaaaaccaaccnnnccattccttgaccatcatcatcaaaatatctacatccaatatcaaactgcccaacacatccattttcaaactccaatcctgaaaaaacctaaaccttttttctccactcggctactgcaactaaacccaacaactaggtgataccaccccttacaagttcaacaaaactgccacacaatacaagcaaaacaaaaaaggatgaagtccaccatatgggtaaactgaaacttctctataacatatatctaatgctctcccccgccaaaaataaactacccatccatcttccattcttc

SEQ ID NO: 167212 - DNA, 402 bp, Zea mays
  unsure (1)..(402): unsure at all n locations
  Clone ID: MRT4577_84074C.1
gggcnggagaaggggggggggaggggcaggcaaaccgcacgcgggggggcacggcgccgggcccgggccagaacaacaccggcgccaaccacaacaaggagacgcngaaccagaccgccgacgacggccgcaagaacgaggacaaccngacggagcagggcagggggggggggancaangnggacaagggccnngacccgcacgccggcaccaacaacgagacgnggngccagggccaggacggaccgacgaaccgcgaggccgacaacaaccagcagggcacgcggaacaacaagaggcacaccgaaaaaagaaacccaaacggacccaccgagcaaaccaaaaaggaggacaaaaggggacacaaacgcaacaccgacaaaaaacaggacaacggaacag

SEQ ID NO: 167213 - DNA, 496 bp, Zea mays
  Clone ID: MRT4577_84075C.1
gaaaaaaaataaaaaaaattttttttttaacctgggcccaaaaccttgcaaattttttacccaaacgacgcacccaataaagggggggggccatttttgcaataaaaaaggaccaatacaaacaatttttgtttttgatcggattgcccgcccgcccatgtaaatccccccccccccccttggggggggactggaaaaccaaaatccccccccgggaaaggttaaaaaaccccgtccaattccagggccgccgctttttggggcaaaatgtaggccctgagaacccaaaaaccgtcccctcaaggccggcctccaagggaaaggtaccccaaaaaaagcctcccatattccaaaaggggcagggcaagcgcggggtccccaaacccaaattttggggggaggggaaacaacccaaaaccggtttggttaaacgggggggaccccagcccgaggagccctttttcaaaaaggggctccgttttgggcccctcccccc

SEQ ID NO: 167214 - DNA, 726 bp, Zea mays
  Clone ID: MRT4577_84076C.1
cattgggtacctcgggggcaaaaatcgaaaaccggcaaaaaaacgcgaccaactcacgctgcgtgcttcccttcagaaactcgatggcctgccacctcgccatcgccggcgccaccgctgccgccgcccgcgctcctcgtctctccgtgctcgccgccgcctctgcttcctccgcaggggaacccgcgcgccgcatcatccgccgccgcgcgccgccgggtcagcagggctctgccacagcggcccccgcgcctcccgcccagccgtccgtggcggaggtgcgccgcgccatcggcgtctccgacgacgctgcgtcggccgccgcatccatggagaagaagaacaccgcgttcatggacctcatctctaccacgcccatcggccagccggagagcgagcccgagcgccgcctccgcgaggccgccgagtgggtagtcgacaccactgagacgcgcgcttgcgaaggacagaagtctttcttagtgctatgcatgatgacatttcctgcttggttcttgctcctgtttcttgcccttggactctttaagttaccatttgatattccggttctggataatctcctaatgtaaggtgttagctattatcatttttcccttttcttttccaaatatacgagcttcacacactgaatatgaaaagaaatatatgtcactactgaagtcacttcctccccttttttctaaaaaaaaaaaaaaaaaagcggcc

SEQ ID NO: 167215 - DNA, 347 bp, Zea mays
  Clone ID: MRT4577_84077C.1
gggggaaacaaaaatccccttttattttgattattgaaagaaaaacttgtttgtttgtttaaactttagaggtgcctaaaaattgaaacccaagggaaacatttggccggttttttcggaccacctccccaaaacgggggaatttaaccgaaggggggtcatttgggggggaatcccaaacccctggggggggggggagggttacaaagggcttttacaaagcaacctttaactttcactggttggcccaaatttaagcgggggcgaccaccctttgggggaagccccacttgttggctccccaggagaagaccttgaccatgtccttgcccaagaccatggggggg

SEQ ID NO: 167216 - DNA, 1545 bp, Zea mays
  unsure (1)..(1545): unsure at all n locations
  Clone ID: MRT4577_84078C.1
cccggngctcacatcattgnaagcgtctctcagctgcagcttggcagaaattattttcaaaatatggaggggggccaacattgagcggtgatgatttttgcatggtgtgtcttaaagatggggcgataaatgcagtatctgctgatgtctatcgtgaccgcaaagaatcatttaaaaaccttgcagaagcagctcttgctggtagttgttcagatagtccttcttacttcatctcaaaggcatggttgactcattggctccgcagaaaaaatgctggtatcctttctgatgctgataatggaccaacgagtgctttaagatgtcgccatgggtatctcctgccggagcatgctccaggagcaaagcgggtatccgtaccagagagcctgtggttatttctctatcaaaccatcagcgagaaggttgatgatgttgttacttttccatcagactgtcaaccatgcaaaatctgtagtcaggaattgtctgatgttgcttctgttgagggtaatcttagagcagtaaaacttgagcaacgacacaaacatgaaaagttaatatctgggaagaactttgcacttcgtcctggtgaaaaatattatttggttccttcatcttggttgtcagagtggagagcttatattacaacgacgggaaaaaatatttcttcactaccagaacctcagagtcttgaagctgttgtcagttcacttatatgtgaaaagcattcgagattgctgcaaaagcctttggatcttgtttgtaagcgcggaagcatcactcagaaaacatcaaataacgatggtttaacaatcatcccagagtatgattggaagttattctctgaggagtggagtgcgacgcctggaaaaggtatatctgctgaaatcgcttttagcaaggacgctcaagataaaatgcacggttcctctgaagcaatgccgattacggatggaaatttggaccagtctctttatggtgcaaatgacgattttggggccagagagccctatgtcagaactgatcctgaggtttgtgaagaatgtgttggagaaagggagagctgtgcattggtgcagaagctcaactaccagaatgaagatatccacgtttattttgtccatggaaaagcaccaccaaagtctatcaaagaagcatctaaagatgttcctgtatcagatcgtcggatatcaaagcgactgcagctaaccctgctctgggtcatctgctcttgggagagccatgctcttaccagtgacttgcttcagtcggttgtatgtgatgaatagtggtttgggggtttacttggcaaaaacaaacagtagctatggcgcctgttgtgcccttaaccgcgtcgagacgtgactgaattactcaggtcatcggcttgtgggacgtgattgcgaacgagattattcatgtaagatgtttgtcataaaaggttgtcgttggctgattgttctgcttgtattgttgagcttgtaaagaatatccaacatttgtttggacctaaaaaaaaaaaaaaaaaaaaaaaaaagtatctgc

SEQ ID NO: 167217 - DNA, 334 bp, Zea mays
  Clone ID: MRT4577_84079C.1
gtacaaaagttgtcaatgcataaatggaatttgtcaatggtagtgagttcctacatcaatagaaaatgagaagaaaacagaacaggtgttcttcctttacattgatgtccaagcctttacatcattgctttcaaatatctagtaataaaatttttacgttagatcagcaacagatggcaccgacacatctgacgacattggagctgctcccatctgtgcccctggggattgatgtggtagacgcataagttgtgtagcagcaaagacgccacttccgggcagaagaaaaatccttggaaaatggacatgtttgcccaagccaataggaagcagc

SEQ ID NO: 167218 - DNA, 311 bp, Zea mays
  Clone ID: MRT4577_8407C.1
agaaggaaagaaaacacacctgccgacaccttccctactttcccgcgtccacccaccttttctctttctctccctccctttttctcttctgttctggttatattaacaaatgcgcgcggtccccacttacttacacattttcatcaataaataatcctatgcatccataattatacatcacgatctgaccctatctttttacttaccatatatatctccataatctactatctttccatctataatgagtaatctaattacacttcttttaccattcttaccaacccattccctaccttcatccaaattta

SEQ ID NO: 167219 - DNA, 385 bp, Zea mays
  Clone ID: MRT4577_84080C.1
attcggctcgagctcgatcagagcatgagttttctgctgagtaagcggacttttagggggcacgtgacaactggtggcactggcgtcatatatgaacggtcctagtgaataggatacgaggcctcgaggtctagcaatcgactccggacagatgaaggcatgaacacctaccatgaggacgttatgcagggtagagagagaagctgccaaagatggagatggtgtagaacagcgagaggaaggacatggtggtggtgcccatcatgagccccaatattccatggccattagaggtggcctggctgcgcaatccaactggggagatttaataacggaagacccaggcaacgggccacaacctgaacgccagctaggacagcaacaa

SEQ ID NO: 167220 - DNA, 936 bp, Zea mays
  Clone ID: MRT4577_84081C.1
gaaataacaaacatcaatatgatatgtaaaatctgtgtgacaaaatattagttatgtccaagcctttacatcattctggtagaagaatattaattatgtccaatgctaacctgaaaaggatgtgctgcaaatatctcaatactcaacttctattgttggggttatcgttctggtagaagaatatctgctttgttttctgctcattttagcttctgcttcaccttggagttctttttggcgcatcatcaactatgtttctatgactttatgttcttcctgcaatatgttatacataagctacaataagtgtagattgtagtctaaagattgtacaaaagttgtcaatgcataaatggaatttgtcaatggtagtgagttcctacatcaatagaaaatgagaagaaaacagaacaggtgttcttcctttacattgatgtccaagcctttacatcattgctttcaaatatctagtaataaaatttttacgttagatcagcaacagatggcaccgacacatctgacgacattggagctgctcccatctgtaggactcttaacaaaagccacacaataaagatcatgtaagtaaccaactcaaaatacagacgcatcacaccttgtcacaggtattgaaccagcatcactgaccccgtgcccctggggattgatgtggtagacacataagttgtgtagcagcaaagacgccacttccgggcagaagaaaaatccttggaaataggacatgtctgcccaagccaataggaagcagcgagatataaacaatgttaagtcttggcagtgaatcagaaaaaaatcttcgatcgacagcacttacagttcagagctacatccgggtacgttataagcgccggcttgtcctcgtctccgtacacggcaacggtcagagaaccacatctcatcctcacaagatgttcc

SEQ ID NO: 167221 - DNA, 141 bp, Zea mays
  Clone ID: MRT4577_84082C.1
ccgaaacgcttcgccgcaaagagaaaccaaaccaggaggggaagcccagcaagaaaaccacatgccgaagctggtagccagtcccagcattttctgcgccagcagaagtgcacgacgaaggccgcatagaggccaggggta

SEQ ID NO: 167222 - DNA, 583 bp, Zea mays
  Clone ID: MRT4577_84083C.1
agtgcaatatcgggtcgtgggatcggtggctgccctcctcttgctactcgccgtcgtcgtgccgtttactcagacccagacgcagagcgcacgggacaaagctgccatggcggaagacgcggggccgttggtgggaggcatcagtgactcgccgatggggcaagagaacgacctcgacgtcatcgcgctcgcccgcttcgccgtctccgagcacaacaacaaggccaatgccctgctggagttcgagaacgtggtgaaggtgaagaagcaaactgttgctggcacgatgcactacattacaatccgggtcactgaaggtggggccaagaagctctatgaagctaaggtgtgggagaaaccatgggagaactttaagaagctcgaggagttcaagctggtggaggacgttccaagcgcataactcataaggcgcgtcccagctttgcaaggatctgcagctatggtgttgatgtagctatctatcggacatggtttagcgtgttctcgtgtaatatcaagaataagtccgcttcttgcaagttgttttaaccacatctctaaataaaattctcagtattattgc

SEQ ID NO: 167223 - DNA, 266 bp, Zea mays
  Clone ID: MRT4577_84084C.1
ccagatattgacctccccttaaagtttgatctgaattacccgcaattgccattggacaacaacataacgagccaatttatggattaaacatttgagaccatgttatgcactactatgatgggaatattttatatgttattgtttcataatttatccgtatatgcatgctacttagtggtttgtagccaagttgagctgcaaagggtaaaacagacaatcgccacagaccaccaactctcagatattggacaatcagtttacttgcc

SEQ ID NO: 167224 - DNA, 451 bp, Zea mays
  Clone ID: MRT4577_84085C.1
gcccagcggaggggtgagctcgggctgtagcctgtagcccccgatctggggtgggggagggtggatctgacatgtacgagcgtggatctggccagagacaggcggtggtgagtcccacgcggtgacggcagcgaagagtccacaaccggcggggacaactcagccttacctgcaaagtcgtcccgggcagcagcgacttgatccttgggcgggctccccggcggcggcgacgacggcggtgggatcctcggacggctccacgggcagattccttgagagcagcaggctccctagcggcggcggcaccgagataccgggcaacggcggcccaccaacaagacgcgacagtgggctctccccgcaccttctcggttggatctcccgcgatggtggcagggccggccctcggagcttgcgctctcgcgacggcggtagcccctgatctggggcg

SEQ ID NO: 167225 - DNA, 530 bp, Zea mays
  Clone ID: MRT4577_84086C.1
aaaaaaaaaaaaaaaaaaaaaaaaaaaaaaaaaaaaaaaaaaaaaaaaaaaaaaaaaaaaaaaaaaaaaaaaaaaggaaaaaaaaaaaaaaaaaaaaaaaaaaaaaaaaaaaagttttttcccttggccgcaccccccttaggggggatttttgcaattttccttccccctgggggcctttcgaccttccttttaggggccccatttccccttttagggggtcgttttccatttccttggccgggtttttccaccgtggggcctggaaaacccttggctttccccactttattccctttgcggcacttcccctttttcccagttgggttattagcaaagaggccccccccgttcgcctttcccaccatttgcccaccctaattggcaattggcccccccctttaccggccctttaaccgcggggggtgggggggttccccccagggtgccctttccttttgccagccccttagcccccgttcttttggtttttttcctttcttttttccccccgttcgccgggttttccc

SEQ ID NO: 167226 - DNA, 297 bp, Zea mays
  Clone ID: MRT4577_84087C.1
caaggccaaaccccttttttttaacagaaaaaaagggcttggggcagtttgttcccaagatcggccttccccggggaaaaccaaagctcttttgggggggcaaaaaacatgtcaaccctttttgggggccctaaacccctaactgggggccccgcggaaatttaggaaaaaatatttggctttgttaccgacccaagaaaaaaactaatgccaaaaatgttttttaggttccaaaaatggccggcctcgggggttccaattatttttagccccctgtcctttggggctggggtgggg

SEQ ID NO: 167227 - DNA, 324 bp, Zea mays
  Clone ID: MRT4577_84088C.1
atgattccccgtgaggatgaacgcaagagggggaattacacagaagacgctagtgtacatccaatgctccacggtcgggtaaccgtcggcgccgatcagacgcgtgggagcggcatcgccggagatgaacaccatgaggcgctaggtgcacgcaacacggtggggtacaggggcgacccggaacctgatatgacgctgctggactactcctacgcacacgctggctcgagaccagggaggccaggttcgacgccgtctggagagcaacagacagggcacccttctgcgctgccaagaggtggccaaacggctgatgcctgacgg

SEQ ID NO: 167228 - DNA, 236 bp, Zea mays
  unsure (1)..(236): unsure at all n locations
  Clone ID: MRT4577_84089C.1
cctcgnagccggccgggatcgccctcgatcatagctgccgcaactgccgccgtcactcccacgcccgcagccatgccgcccaagctcgacccgtcgcaggtggtggaggtgttcgtccgtgtgaccggcggcgaggtcggngcagcgtcttcgctggcccccaagattggtccgctcggtctttcccgcataaagatcggagaggacatcgtcaaggagacggttaaagactgaaa

SEQ ID NO: 167229 - DNA, 808 bp, Zea mays
  unsure (1)..(808): unsure at all n locations
  Clone ID: MRT4577_8408C.1
acttgatgttgtccaaatcagcagagtgcaggctgatcagcgagcagggcgagctggtagaactcggcccggcaagtgctataggctatacccaatttccatatatcagaatgagtttcttgaggcaacagtccctngaaattcaacgctcttctcttgctggaagtgttctgtatctgaaatcgttaaatcttccagacatcaacatactgaagtttgattttctagatccaccatcacgagagctacgtatcattatattaaaagaagaaataaacaaggtctaaaatagaccggggtacaattgacgccttacggcagcctgaacgacactaacatagactgacttatctatataactctaggctacatgagagagggaagcaacaagggaggtcaaccccttggccccggcagtctcccacagacggcgctcatccccaacatggattaggaaattagcaatattaggggaaaggccatcaaagatgcatctgttccggtgattccacaaaatttcaactgactgttttctgaagcattgcaaaattatgttattactatgaagtccagtgaagaaactacttttgtgatgactactcatgtcacttttgaattgttacacgtggttaggggaggaaacctcttggaggttgtagttctgatgggtggtatggtagggtgatgggctttgttgctggcaactcgtgatggtttttccagccttggtgaacattggcagtggctacagcttgggcaggggcttgtggcagcgcaaaggataatgaaaaggaacttttaagcaaaa

SEQ ID NO: 167230 - DNA, 1284 bp, Zea mays
  Clone ID: MRT4577_84090C.1
cctcgaggccggccgtgtgccgcggtcggccgggccgggccgcgaaaccatcacgagctctagttttccagctctgcagcacacaagctagttaagctcctgcaacctccaagaaactaggcaatcgtttcctcctctgcttcagtatctccccttccagcagtagctaagctgccatatggcgacaagcaggcttgcgctcgtgtccgtgtttgccgcagccgtcctgctgggcatggcgtcggcggcgacctacaacgtcggcgagccggccgggtcctgggacctgcgtaccaactacggcacctgggtctcctccaagaggttccacccgggtgaccagaccgtgttcaagtactcgccccaggcgcacgacgtggtggaggtgaacaaggcggactacgactcctgctcaatcgccagccccgtcgccacccacaactccggcaacgacgccatcgccctggcctcccccggcacccgctacttcatctgcggcttccctggccactgcgacgcgggcatgaagatccagatcaacgtcgtgcccagcgccaactccctcggccccgccagcgctcctgccgccaactctcccgtctctcccccgcccatgtccgcgccctcttccgccgctaccaaggccaccggtttcggcgcccttgccgccgtcatgatcgccgcaggcctcatggcttactagatactctgtcgcttgctgcgtacatttagttttccttagatattatatatacgttgtattgtattcttttgagagatcagagttcagacgaatgacatggcatacatgtatctacgtaaagacagatgactagtttatacattattcatattgtatatcatacagatatcgctcttaaaagtaaaaaaaaaaatcaacacaaacagagtgtgatacataaaagcacgggccgctccgggatttttggtcgatggtgtcaccgagaaactagagtatataaggttcttgtttctagctagtgtaacgacatatattttaatggtacattaaaataaaaggttataagatacaaaccaaaaaaaaaaaaaaaacggtgtatgtatcgatattcattcagatagatagagatagagatgactagtaatttcctggtgtagttttctctttgttgctccgattatagatatgaatgtaatgaatgattagtatttattggtctctaaaaaagcgtgtaacctttcgataccgacctattgaccaatgatccctatgattttatgattcaaagggttgggccgcct

SEQ ID NO: 167231 - DNA, 171 bp, Zea mays
  Clone ID: MRT4577_84091C.1
actatgaaggaaagtgggcgcgccacgtaagctcggatcctgaataccgggcgccctccacgcgtccgtccatttagaaatcgaataggttccgacgggccagaggtaacccagcgtgcgtgagttgtgcagcgaatgaagtgaaccccagctgctagacaaaacccacaa

SEQ ID NO: 167232 - DNA, 575 bp, Zea mays
  Clone ID: MRT4577_84092C.1
ccggccgggctgcaaatccgatctccccgagaccatgcgcaactccgccgccgcccagccctcttctcccgccgccacgtacgtctcaggcgccgcctacgtcgcgcccgcctcctccgccgccatgtacggctcaggcgcctcctacgtcgcgcccgccgcttccgcccccggcggcggcgggtacatctatcctgcgcccgcctcctccggcggcacccgctacttcatctgcggcttccctggccactgcgccgcgggcatgaagatccagatcgacgtcgtgcccagcgccaactccctcggccccgccagcgctcccgccgccaactctcccgtctctcccccgcccatgtccgcgccctcttccgccgctaccaaggccacaggtttcgccgcgctggccgccgtcatgatcgccgcaggcctcgtggcttactagatactctgtcgcttgctgcgtatatttagtttccattggattattatacacgttgtattgtattcttttgagagatcagaatatatatacattattcacttcagttctaaaaaaaaaaaaaaaaaaagcggcc

SEQ ID NO: 167233 - DNA, 396 bp, Zea mays
  Clone ID: MRT4577_84093C.1
gaggggaaccaaaaaccatgctagcattacgggtccagggttaaagggaaccacagacgttaagttaacaaggggggggtggggcttggttaattcggtacaggatccactcatagggggaacgaaaacttgtaactacgggaaagacccactggaccaaaaaccctttccatgccaaggaaatccgggtttttagttttaaccaacctggggtttccaggagtcctccaaaaggaggtgggttactccccaggctttataggttccattagggaaataccgtttgatcgggaaggggattttgggcgctttaaggtcctttattggaatttaaagagggggagttttacccttaaggtgaaccaagacgggagcattaaagcttatttggaaggg

SEQ ID NO: 167234 - DNA, 268 bp, Zea mays
  Clone ID: MRT4577_84094C.1
ccacggtccctcacgcgtccgcgaccgtggctgaaataagtgttattaaatgttttaaattttatccaaatacatataataacatattaatatactatgtaagtagtattactttataccttaaatttatttttataatatatttatttagagatataaatgttattatttttaaaataaatttaactagtttttagaaatgttgatggatagaatattatagcaatatttattttagtacccgctcgtctgcagttgtgcaatgcta

SEQ ID NO: 167235 - DNA, 242 bp, Zea mays
  Clone ID: MRT4577_84095C.1
gttagtcaaaattgtgctcgaccgaaagaagacaggcagaaacacagccgcacaggttctcgggctatggtatttgcaggggcactcaccagaacaggccggggcacgggcccctcacacaggaggatgagcttcaacacatctgcccccaaaacttgttcggcggccagagctgactgcctagggacgagaacgagcggccgtcattttggagacacacacgggtacacgtcagaccgctg

SEQ ID NO: 167236 - DNA, 277 bp, Zea mays
  unsure (1)..(277): unsure at all n locations
  Clone ID: MRT4577_84096C.1
aacgctctttcccccacttaccctatctcggcgccatggctaaacacgcgctgacagctcctactcctgcaaaccaacacggcttacaattcatacaacaacattttccgggggggagataaactggggctagggggggggggggggaacgccccannaaccacccaccaacantatacccaattcctccccaaaaacacaaaataacaaaacacttacctgactaaaacccaccaaacctctctctactaacaaatttacatcatctactgctcac

SEQ ID NO: 167237 - DNA, 417 bp, Zea mays
  unsure (1)..(417): unsure at all n locations
  Clone ID: MRT4577_84097C.1
ccggccggggctctagctcctccggcactcaggcacggcgatttactcatctgccaaactacaaacatccttctctatgttgcacccaaagttggattggcgcccaaggagggcaatgggttataccacctgaaccagattgctctgactatcatggatggtcttgtgaatgaactccatgatactcaccaccccatcgacattancgcgtactatgacgaccnaaaggaggaggccanaaagagatctagcttctttacnnnanancggattcncnagtactttaagtacatgcagcgactggtcgatgncaagaccatngtagtaggaccatgcctacacggcgatagtcttacgtacgcanacctcgaactggtccaggctgttgatggtaccaagtttgctttccccaaatct

SEQ ID NO: 167238 - DNA, 523 bp, Zea mays
  Clone ID: MRT4577_84098C.1
gaacacagcaatttttggttgccggttgaaccgtgtcccggaaagtatttgacataatggcacaaactggaaccagcgcactgtaaggtgcgtccaagcacctacatatgcgctgcgggggtcgtcgggcggtaggcgcgtggaccccctcacttgccgggcacgaaattcgggggcataagaccatgcttggttttagaccgggtcggcaaggtggtcagggaggctcttgttcggaccctggtcctgaacgatgggctgtacgataaactcccactttgagaatatggcaaggcggccttttttgagctgcttcaccttgagttacaggatggcctgaggctacttgacaaggtcctattgggtgaagctgccgtctgtgtagagcggggagacaaccttctggagtgggccgtacttcaaatcgggacccgtgaatggatgcctatgagacactagcttatatgcccagatgcaatggatgctttgatcctgaataaggttagtactgcctgggtggtcc

SEQ ID NO: 167239 - DNA, 389 bp, Zea mays
  Clone ID: MRT4577_84099C.1
cccacgcgttcgagaaggcttcatcacatgctcgggccatgagctatacgtgctggagctgggacaactggtggtggacgtgctcacctgcgtgacagtccatcgcagaacgagcagcaagcggccactgatgcaggcgccccggagcacgtggtcatcatggatctatcggtagtgcttctgaacgtgtgctacgatgcagtgaccattgctgtgtacatctcccagggcaagctgcctagtgttcaacaccggaatgcttgagttacgcctgtgccttggcaattgcactgtgaccatgcgcagactgatacataagctctacggcgcgacatccactctgtacttcgacgagacgcaagtggccaatacgctgacgatgcgctctg

SEQ ID NO: 167240 - DNA, 2409 bp, Zea mays
  Clone ID: MRT4577_8409C.1
aattcggccccagggttcgagtgcaccgggagattctgaacttctgggagacaataagcaagtgaactcgtcaaagaatgacgtgggtgtaaaacaatctgaggtggacagtaaaatccaggcagctcgagagcggtaccttgcacgaaaaggcaagaaatgacaatcgacacgtttaactgatcgctcagtttgtccgcgctcatccccaacatggattaggaaattagcccacgcgtccgcccacgcgtccgcggacgcgtgggtccggtgattccacaaaatttcaactgactgttttctgaagcattgcaaaattatgttattactatgaagtccagtgaagaaactacttttgtgatgactactcatgtcacttttgaattgttacacgtggttaggggaggaaacctcttggaggttgtagttctgatgggtggtatggtagggtgatgggctttgttgctggcaactcgtgatggtttttccagccttggtgaacattggcagtggctacagcttgggcaggggctggtggcagcgcaaaggagagtgagagggaactttaaggcaaaaacacttttctggttaatccatatggatacatccaaaagatgttatatatatgatccacccttcttaattcaattcaagctttcgccacaaagctctcttattctctaatactgataactttttggcggccccgaattggaggggtatggaggttgcagcatgctagccgtaccctctggttgctgcaacatgtagatgtaggtggtggctactgcctcttgggttcagctgggctgcttggcccatgggcattatgccaaaaacataaatgtgtaaaagtgtacttacagaagacataaatggccaaaagggggagctatttggtgccttgaaataaataaaataaaaaatatgttctttggcttctgcctactatttaaaatttacaaatgatttgcaggtgagtcattagaagatgctttgaggcaattatacctcattgatgcaattgatgaaaacggacaaataacggatgttggacgagttatggcagagcttcctcttgagccgtctctttcaaggactttgattgaagcaaatgaattgggatgcctatctcaggcgttaactgttgcatcgattttgtcagcagaaataacattgcgatcagttagcaaggacgtggtggatggaaagaggaaaaggcaggagctccctgatgggtctggctggggtgaccatatacaattgcttcagatatttgaaagctgggaccaaactggctatgacacaaaatggtgctctcatcatgatttgcaggtgcggggtatgaaattgagcaaagatgtgaggaaccaactatgtcagattattcaaaaaattgcaaaaggttcaactgatgtggatgcaaggaaaagccggaagaatgaccctgattatagaaagctgaggagagctctctgcgtaggatatggtaaccagctagctgagaggatgctgcatcacaatggctaccatactgttggctataggacccaacttgtacaggtgcatccatcttctgtactggaaggcgatgagtatggaaagtttccaatgtacgttatttatcatgagctgataagtacaactcgtccatacatgagaaatgtctgcgccgtcgagcaagcctgggttcagcctatattaaagaagctcgacaaattagacataaacagattaagtggtggttcgagtgcaccgggagattctgaacttctgggagacaataagcaagtgaactcgtcaaagaatgacgtgggtgtaaaacaatcagaggtggacagtaaaatccaggcagctcgagagcggtaccttgcacgaaaaggcaagaaatgacaatcgacacgtttaactgatcgctcagcatccttctggtcagcctgaagcttctctgaagatcataccgaggaaccattcgtgttattgtgggtggtgtatgcttcaacgtgcacaaacaagagaatttcttatgtaatcttttgtttgaggactctaaccttttcttttatttggcattactgtgatgtgaccttttccttgggccgaaatattttacaggcttttctgcatgggctagattcttttcccccatattcctatatggtgttgtctgttgaggtcttgtccctcctgcctagcatatgttgagtcccaagcaaggcaacaccgcaatatgatgcgttcttggaagtgataaaaaagggaaaaaaaaaaaagagaatttcttatgtaatcttttgtttgaggactctaaccttttctcttatttggcattactgtgatgtgaccttttccttgggccgaaatattttacaggcttttctgcatgggctaaaaaaaaaaaaaaaaaaa

SEQ ID NO: 167241 - DNA, 634 bp, Zea mays
  Clone ID: MRT4577_840C.1
gtccctgcccacccatcgcgaccctactcccaatcccatacccagtctgctcctcgcacccacgctgccccaatggagacagccgccgccgtgtccctgcccagatccgccggccgtgccgcgctccccttcccggctcccctcaagctccagggccgcgttgcgctcccccgccgtgcgctctccggggcgccagggccgaggcagcgcctcgtcgcgcgctgcgcggctgccgacaacagtgcggcggcggagctccccatcgagaaaagattcgccgccttccccaccatcatggacatcaaccagatccgcgagatcctgccccacaggttccccttccttctggtagatagggtgatcgagtacaaggcaggagagtatgctgttgcgatcaagaatgtcactataaatgacaacttcttccccggccacttcccggagcgcccgataatgcccggcgttctcatggttgaggccatggcccaggttggcggtatcgtgatgctgcagcctgaagtcggtggatcccaagacaatttctattttgcaggggttgataaggtgagattcaggaaaccagtcattgctggtgacactttggtcatgaggatgaccctcaccaagtatcaga

SEQ ID NO: 167242 - DNA, 430 bp, Zea mays
  Clone ID: MRT4577_84100C.1
ttcttttcatttcccatctctctctgagccgtcccgtgctccctccgctatttctcccaattccttccccacctcctcggatcgtcgactcccccacagagcaggatccgactcgtgactggcggtcccgatccccacgccgtccgagtccaacgacatgaatctccattacgactacctcttctaggtgctcctcaaccgcgactccagtgttgaggaggcttgtctgctgctgcagtttgccgacggttcatatctggagagctatatcaggactattggagctgtttttatcatccgcaccgatgatctagatggggaaacaattgagctacaggattgggatactggtggtcaagaacgctttatgaacatcaccagctgccactaacgtggagctcatggcggtattgctgggaatgatgctact

SEQ ID NO: 167243 - DNA, 186 bp, Zea mays
  unsure (1)..(186): unsure at all n locations
  Clone ID: MRT4577_84101C.1
ggacactcgaggcttgccggaaactgttctatagtgataataatgttaacgtgctattgagtatttttgcacatgttggtagtatatgcttatactatcctacaaaataattatccatcttttgtatttatgccgatcgaagctactgctggggcagttgaggcanntccaaaaatttggggttaa

SEQ ID NO: 167244 - DNA, 1346 bp, Zea mays
  Clone ID: MRT4577_84102C.1
gaagtttaccatgttcgaggcccaggtcttggcgttgcgtgcggaccctgccacgttcaccgaggagcctgaagattctgagggctttggtaaatggaatgccttgttctcaattgacgagatggaggaacagatagagacggtgctccatgaaagccctggattggagagctttgtggagaggcttgtgccgtcagttgtggattacgagacattctggtcaaggtatttctttgctgtcgataagctcaagcaagcagaggatgtccgcaccaaacttgtgagcagggccatgtcaaaggaggaggatgaagaactcagctgggatgtcgatgatgatgatgttgaagatgccaatactagtgatcacaaagacagcacaaactcgttggtagataagaaagaggagcaagcagtggagcctgttaactgtgaaacagagggcagtatggaacaagaagcagcagttgaaaatgatttggcagacgataaggaggttgctttggctgcagccaaggatggtaacggtgaatcaagttttgaagcatcgactccaaaggcaagcaatgggaccagacaagaagagaagattgaggctgctgactcatctaaggggggtgatttctcagtggtgcctcaaccattagtgcaggaggaagatcttagctgggaggagattgaggatgttggcgatgaagatcagaagaatggggttagcaaacggtcaagctctgtcagcaaagtggaggatctccggagacgtcttaattctgtggaagatgatgatgaggacctaagttgggatgtcgatgagtagaaagaacgtgtggagccctgcactgagttgtctgaaggacttctaaattagagagactgccatcctaagcataaattgaatttgtatggtgccgatgaagaagctttgtggatggattgccacaatgtgaatattgtgatggacactggtgattcaaattcagtgggggctcattagtttccttgcaagaactcgctgcactgagttgtctgaaggacttctaaattagagagactgccatcctaagcataaattgaatctgtatggtgccgatgaagaagctttgtggttggattgccacaatgtgaatattgtgatggacactggtgattcaaattcagtgggggctcattagtttccttgcaagaactcgatagaatggtagtgttttttctgttagtgttggtaatttgtttccagttagcatatgtttgttgtaagtccaacatgtaccaccttcctgtttgaatatgacacagctcatttcagattcacaaagtaaacatcgaaattgtgaaactattgatcc

SEQ ID NO: 167245 - DNA, 276 bp, Zea mays
  Clone ID: MRT4577_84103C.1
cccacgcgtccgcggacgcgtgggccttgcccatttctcctcctacgtgactggcatctctgggtgttggcatggggctatcgttctatggttccagatgttcactgcactggtgttagcgtttagctacttcagtgcatcaatggttttgtgtgcaagtccttaatatgtaatacatttttgaggttttcatcatgcagaattaaataaatattataaagtaactatgaaaaaaaagaatttattgcatttcatttataaagaaagaagttaaaa

SEQ ID NO: 167246 - DNA, 578 bp, Zea mays
  Clone ID: MRT4577_84104C.1
caaggcactccactccaccctagcactggcgcccctgcccgtcccagctctcgcctcctctcgcacccatcattccggcactccccttcccggagccagctcttccgatggcgtgcagcggcctccgcctcgcgctcctcgccgccgtcctcgccctcctcctcctcctcctcccctgcgcgctcgcttccgagcccctcaaccccgaagtgcaggcgttgatcgccatcaggcaggggctggtcgacccgcacggcgtgctcaggagctgggaccaggactccgtcgacccctgcagctgggccatgatcacctgctccccgcagaacctcgtcatcggcctgggagtgccgagccagggcttgtcggggactctgtccgggaggatcgccaacctcacccacctcgagcaagtgctgctgcagaacaacaacatcacggggcggctgccgccggagctgggcgcgctgccgaggctgcagacgctggacctctccaacaaccgcttctccggccgcgtgcccaacacgctgggccgcatcaccaccctccgatacctgaggctgaacaacaacagc

SEQ ID NO: 167247 - DNA, 408 bp, Zea mays
  Clone ID: MRT4577_84105C.1
ggacacgggggaacagaaatggaataaaaagggactaaaaagaggattccgaacacaagaaaaaaaaagaggggcagaagcaaaacaaaaacaaccaagtttttttaaaaagggggggggaaaaaaaacgacactatgcgggtctgctacggcctgggtttccgggatccaccaaaccatataacccactatgggggggggtcgaaaaactcggggccaaaaaaaaggagggagggggctgaaagctcttcgcccttggggcaggcaaaaaaaacttttaacaaaagcccacgggggaagcccattccctaaagccgggggagggcctttcgttccttgggggaaactggcaccgatgggggaaaaacaactgccagttgaccaaatatgtttcctccagaaccaccc

SEQ ID NO: 167248 - DNA, 276 bp, Zea mays
  Clone ID: MRT4577_84106C.1
accaatcatagcagtggctgatgaagggtggcacattttaatgaataagtcagatgtacttctgttaggcaaccacggttacgataatgcgttacagatatgcatccaatatttttagcccatggtcctgccttcagatagaatttctcaaaagaagccatgaactccacagatttgtacccactactatgccacctcctcaatatcactgccatgccacacaatggatcatcctggaatgtccaggatctgctcaattcagcaatgccaagggtg

SEQ ID NO: 167249 - DNA, 492 bp, Zea mays
  Clone ID: MRT4577_84107C.1
aaaaccagaaaagttggccaaaaattggctgccccaccagtccaaatcccccgggagggttgttttttgccccaaaaaataaaaaggggttgtcccttcgcccccaaaggctttccaccaccgggggggcccaacctccggggtttctaaactaaaagtttcctcctcctcctccggaaacttgaaaaaaactgggtgggggggccttttgttttttccaaacaacacccgttgaacaacggtaagggcccccggaacaacaacaacaaccacggggggctcccattcccaggttgttgggggtccggcctaacaaaggtcctcctccaccacacttaaaacccccgttgaaggtgggggcacccgtcgcttccggccttgaggaacctgcccaccccccccagaagaacggcttgttgttcttccaggggaaggttaagcacggcctgcccaatgccgtcctccaccgggggggggtaaaaccaggggccc

SEQ ID NO: 167250 - DNA, 437 bp, Zea mays
  Clone ID: MRT4577_84108C.1
gaaagggaaaacaatttcccgttccagggggtccggttttgcatttttacaaaaaggccgggggcctgtacaagcagccattggaaattcaccccccctccctttttatcctaaggccgggtttcccctgagggaaaaattgaaaataaaccaaaagttgggaccccctttatcccgtttcccttaaatttaaaaaccaaaaaacatgcggggtaaaaaagagggtttctggctttaaccatctgaacaaagggttttttggaacccaactcccaaacccaggcaaagggaacaaaggtttggccccctagggggttaggccaccttttcccccctgggggccttatgttttttgtagttacagaagggccctttccccgttgacagtttttccaaaaggaacaatttttgcctggggaactggtagggccccaaaa

SEQ ID NO: 167251 - DNA, 1216 bp, Zea mays
  Clone ID: MRT4577_84109C.1
gtttgggtgttttttttgggggcaacatgccttgtttgttcgcttgcccctgtatatatacagacctccccaccacctcccctaccactaccagcctcaaattaagcagccaacaagacctgtctatagctgcctcgctagccaagcctgactgctacctagcaacgaccagctgggactgggagggggagtccatcgagctcgccccaggctgacgatccgctcgatctcggggacccaagagtttcgatagacgacgcatggcgaaggtccaccccaacgtgctgctgtcgtcgtcgtcgccggctgagggagccgccgcagcggcggcgggcggcgagggcgaggagacgtcgctgacggtgtggcgcaagtcgctgctgttcaactgccgggggtacacggtgttcgacgccaggggcgacctggcgtaccgcgccgacagctacgacgccgaggccgaggtcgtgctcatggaccccgccggccgcccggccttcaccgtgcgccgcaggcgcctcagcctgtccggcgagcagtggctcatctacgcgggcgaggagacgcggcgcccgcgtacgccgtcaagcgcggcggcggcggcgggaagtcggtggcgcgcgtcacgccgtgcgccgccgtgcccgccgcagctggggccgccgcgttgcccgcgtacgaggtggaggggtcctacgcgcgccgccgctgcgtggtgtacgacgcccaccagcgccgcgccgtcgcggaggtgcagcccaaggaggcggtcggctcggacgtgttccgcctcgtggtgcagccgggggtcgacgtgtcgctcgccatggccgtggtcgtggcgctcgaccagctgtttgggaggccgtcgctcctcaggagctggtcctcgccatagattcatgttttctttcttgtgttcaaattcagtttagataggtttttttgcccctggacttggggttgtgaattatcactggagatgctgatgattcgatctgcctgggcatcgtttgttggcatgaaagcaattcctgttcttgcgtgcttgctcccaaaacaccctgctcgtcgggccgattgagattttttttaaaaaaagaaattatgaattccctctcgattctcttcgtttggcacaagagggacagagttgtaaatacatcgacgaacgttatgtactaccgtcctatcttatgaaggcgaaattttgtcc

SEQ ID NO: 167252 - DNA, 1687 bp, Zea mays
  Clone ID: MRT4577_8410C.1
gcagaagcttatagcattttcaggagccccactattgattccgtagatgaatctgtacagctcgatgacacattaagcgcaaagccagcatgttctggcactggatctggttttgagatattgtgccaaggatttaactgggaatctcataaatcagggaaatggtatgttgagcttggcacaaaggccaaggagttgtcgtccttgggtttcaccattgtctggtcaccaccaccaactgattctgtgtcacctgaaggatacatgccaagggatctatataatctaaactcacgatatgggtccatggatgagctgaaggaacttgtgaagattttccatgaagctggtatcaaggttcttggcgatgctgttctaaatcataggtgtgctcagtttcagaacaacaatggtgtctggaatatatttggtggtcgtatgaactgggatgatcgagcagttgttgctgatgatccacatttccagggaagaggaaacaagagcagtggagataatttccatgcagcaccaaacattgatcactcccaagagtttgtgaggaatgatcttaaagaatggctttgctggatgagaaaggaagtcggctacgatggatggagacttgactttgttcgtggctgctggggtggatatgtcaaggactatttggaagcaagtgaaccatactttgcagtaggagagtactgggactccctcagttatacttatggtgaaatggactacaatcaggatgcccacaggcagagaattgttgattggataaatgctacaaatggaactgctggcgcatttgatgttaccactaaaggaatacttcatgcggcgcttgaaagatcagagtattggcgcctgtccgatgaaaaagggaaaccccctggagtattgggttggtggccttcaagagcagtcacatttatagagaatcatgatactggttctactcagggccattggaggttcccctatggtatggaactgcaaggatacgcctacatcctgacacaccctggcactcccgcagtcttctatgaccacatattttcacacttacaaccagagatcgctaaatttatttccattcgacaccgtcaaaagattcattgccgcagcaagatcaagatactaaaggcagagaggagtttatatgcggctgaaattgatgagaaggtaacaatgaaaatcggatcagaacattttgagccaagcggtccccagaactggattgttgctgctgagggtcaagattacaaaatctgggaagcgtcttcatagacttggcgggctgcgagtgccatataactgctcaaagactaaaaaggaagctacaagaaagcataatgctaggagatggcgcctcagaatggtcagctggcgggagctgctgccgctgccgccatggagcagcaaaattcaacaacataagctatggaagcacttgccacggcgataggattatctaataggactactgttgaacattcgatatatccagaaccacccatcatttgcaggcacattggccattaaaatttagcttcgtcctctattttggagctatgtaaaagcatgcacaactctatttatgtgtgaaataaaatttgaatcttcatcatgggtcaaaaaaaaaaagcggccacccacaacatgacttcggtgattctacatt

SEQ ID NO: 167253 - DNA, 257 bp, Zea mays
  Clone ID: MRT4577_84110C.1
cggccctcacagccacagcaccagcacgaccccgacgggcggcgcggcggcggcggcggcatcgccgcgcaacttccggcgcagcttctcctccgcgtcctccgcgggccacagccacggcggcggcggcggcggtgccaagtgcgtgtgcgcgcccgcgacccacgccagattgcttaagtgccagctgcaccgtaccaacgtccaagggcttatgcacattcacggaatgccgtacttagactttgagagactac

SEQ ID NO: 167254 - DNA, 418 bp, Zea mays
  unsure (1)..(418): unsure at all n locations
  Clone ID: MRT4577_84111C.1
gcacacacacacattctggagcncccccaaanccacccgggggcgccgccgcnncaagaagcagancggggggaaaacccngacnggcaagacnaacacccncgagggggagngcgcngacaccanngacaacgngaaggccaagagccaggacaaggagggcanccccccagaccagcagcgacncagggggggggggggggagcnagangacggccgcacgcnngcngaccacaacaaccagaaggagagcacccaccaccnngggccccggcncaagggaggcangcagganccnggagaaaacccngcccgggaagaccagcacccngaggggggagcccacngacaccanggacaacgcgaaggccaaaaaccaggacaaggagggggggccccccgaccagggggggccaaa

SEQ ID NO: 167255 - DNA, 374 bp, Zea mays
  Clone ID: MRT4577_84112C.1
aaaaaaaaaaaaaaaaaaaaaaaaaaaaaaaaaaaaaaaaaaaaaaaaaaaaaggggggggggcctattttaagaataacaaccataaaaacccttaccatgataattcttacctccattttcctcaaaacccaatttcaatcgaatgcacctaattgtaacccatctcctttaacacaaccccccccatatcatttctatttacattggcaggttgtttaaaataccttgttttttagcctcttccgaatttcggtgaatcatttaattttttgagaataatttttcctgctacaagtgctggcataaaattttttttttgtttttatgccctctcactttcttactttccctcaaaattatactgtttcttt

SEQ ID NO: 167256 - DNA, 407 bp, Zea mays
  Clone ID: MRT4577_84113C.1
gagagaagtcttcatttactggctgatatgaaggaataaaaggcttcagctgagatacatggaccacagggtgaatctgtgctgctgatattgctccagtttgtgaaggagctgttcaacacatagcttctaagagattacagattgggggagttgacttgacaaacctcttttcacaagaactgaatatactaatccatgggcataccttgatgtttctgatgttgagaggctgaaagagcagtatgcatgttgcacagaatatcagctggctttcgaagctatagagagctcttgccgaccaaaaagggacactcttcctgatgggcaggctttgaggacaggttccagagagaagcaaatctgtctgcttcagcaatctgggcatcacttgtgaaggcacgggc

SEQ ID NO: 167257 - DNA, 1087 bp, Zea mays
  Clone ID: MRT4577_84114C.1
accctcgaggcctgccgggacgctcggcctctctctccagtcgggacccaccgcgcatgccatgcgccgtagctgcgcatctcgcccactaggctgcccaatctcctattcatcttctccaaactgcctctccccacccatctcgcccatgttcgcgaaacccagagccgaaccgcccccagtcgacctcggctctccggcgagctgccctccatgtcgtggccacacagtcgttcgtcgcgccgatcgcccaggaagatctgcgatgcgctcgtcgttgccgagatcgcgattcgtttatgagcttcgaggaatcgatgatcaagcatggcgacaaagtgatcgaactcttcgagttctacgagatcgaagaccctgagcatctgtttggtgaaggttctctggaggacatggttggtggagtgacttggtcgtccatcttgccaccgggttggacagtcgagtggggccctacctcggctgaggaggagcatgaggaatgatgggacaggcttccccatccctccatttatttttagttttattccgctgcattccgaacaatgatcactacttttgctaaaactttgatgatgatgtaataaatttgatactccttaatgtatggttttatgcttttagatggataatctgaacgagtgccaagccaaaggatactcgccaagtcgtcacctaacaaacactaacctagtgttattcagactgtaaccttgctgacggagagtacgtcctcgtgccggagcaaggagctgctcaggaggtagccccggatccagccccaaagtctgcatcagaggatctgcctgccactgctttggaaggttctctggaggacatggttgctggagtgacttggccgtccatcttgccaccgggttggactgtcgagtgggaccctacctcagctgaggaggagcatgaggagtgatgggacaggcttccccatctctctgtttatttatcattagtttatttccgctacacttcgaacaatgatgactccttttgcaaaactccgatgatgatgtaataatttaatactctttaatgcatggttttatgcttt

SEQ ID NO: 167258 - DNA, 257 bp, Zea mays
  Clone ID: MRT4577_84115C.1
gggcaagaaaataaaccttttttggagataagagaaaatagggaatcccataataatttcagcaaacaaaaacattggtggaacatttccaaatgccttttgtaaaacaattgtttggaagcaattaatggagttccgattttagactaattttgccctttgggtttttatttcaaaagattaacattgggatcatgatggcataaagggaggcccattaaccccttgagggtcatattccattggggaacatatgg

SEQ ID NO: 167259 - DNA, 282 bp, Zea mays
  Clone ID: MRT4577_84116C.1
gtctggctgtgtggccaaggtgaatagcacaggttagggtgtgtgccgcaccccgtgcacctcagggccaagcgggggcgtggctggcctttcaggtccaggccagtgggcctggtagcacatgtctgtcctcagagcaggggccagatgattttcctccctggtttgcagctgttttcaaagcccccgataatcgctctgttccactccaagatgccctcatagaccaatgtggcaagactactggacttctatcaatggtactctaatcagtccttatta

SEQ ID NO: 167260 - DNA, 454 bp, Zea mays
  Clone ID: MRT4577_84117C.1
cacgagccgaagttagcaaacgcagcactcgccagtcgccaccccgatgctactggtgcgcgccccgccgtctcccgcgccgctctcggcggcggccaatttcccggctgatctggagcgcccccttcgccttcgcggtctgtcctcttcccgtgccggcgttactacggccactgccacggcgaagccggcggcttcctccctgggcgggcaaaagcgcaagcaggtgacgagcgtggcgaacccgctggtgaagcactgcgtcaagctccggctctccgccgcgtaccgacgctcctgccgccgcctcctcctcgtcggcctcgcgcctatcctggaggtgtgtagttttgagctcgaagccatcgattacttgcttctcctggacggcgtagaggccccagaggcgctgcgcgagttctctggtgatatatttgatgtcagcgccgcggtg

SEQ ID NO: 167261 - DNA, 476 bp, Zea mays
  Clone ID: MRT4577_84118C.1
tcgagcggccgcccgggcaggtacaagcttttttttttttttttttttttttttgttttttttttttttttttttttttcttttttatttttttgttttttttttttgttttttttttttttttttttttttttttttttttttttttttttaattgggaacaaaggggggccttttttttttttcatttcaattgttcattcagggcattgctcaccctgcccctgccccccatggggatgcgggacccatttttacccaatcatcccccctaaatgactcaactagctagctagcccgcggttttcctcccgcccatagttttttcagggggggaccccccccgcaccaccgtaggggcatggagtcggtttttgcaggccccacatcgccgtaagttgctgcgctttttgcgcccccaacagccccggaacctggcccttttggggtttctgctgcaggatggactggaggac

SEQ ID NO: 167262 - DNA, 727 bp, Zea mays
  Clone ID: MRT4577_84119C.1
ggacacggacaaggtaccaagtttctccgaaggattagtgtttcacttcaaagcttagtctgaatttacagaagaccatcctcgggtccatacaatatgtacagctagttacatagccataacccagcatcaattatctggaatgcgtactggaattcagctgggcatcatctttatttacaccatccagacatgcaacgctgtcaggcccagttcttccgcttagacctcagccgcatcagtttgtccttccatgatgcagcatccttgtatctctcttctacggctgcaatgagcatgttcttcaccaatccaaactcttgagcctcaacagatgcctgtccatcgggtctaacaaaaatgcaagtgtaacaaaaattaacatacagattcatatattggagttctggatcttaaatgcacagaatatactcgaatgtacgaaaccagtttgttggatatatcagtgaaaggtctaagaaacatatcgattcatcagtccctccatgccctcagaaataacacggtagaagcaataagttgcagggcagataatcaacaacaacaaagcttcttataccacaagcaaagttgggggcagatcgcgaaaatattaaaaacaaatcctacagctactgtaaaattcttattcgccttctagaatacctgtcaagctctgtaaataacaacccatctgataggccagctgctactgccattcttgctg

SEQ ID NO: 167263 - DNA, 252 bp, Zea mays
  unsure (1)..(252): unsure at all n locations
  Clone ID: MRT4577_8411C.1
ancgagacgcgagggcggacgcaccgggggggggcattaagagcaagaccgcgcgagccaccccaggaagggggaacccaagggggacaccaaaaggacacacgaccagaacaccgcccgggagggccaggccgcacgcgcgcaacgacgccccgacacgcacagcgcaacagacggacagcaaggcccagaagccagcaggcccccgaccacggagaagcagccaacgccaccggcaggacccaagaagaa

SEQ ID NO: 167264 - DNA, 368 bp, Zea mays
  Clone ID: MRT4577_84120C.1
accagaaggaattcaacacttttgcgactcgcaagttctgtcggatagacaccatctaatatttcaaatcccatgcgagagaggcacataacaccatcctcaaaatcaaattaaccgtgccagattaaaggaccttcttctaaaacagatctatgacataacaccttgttgaccatgcttttctagcaactgcttatacgtgagggaaacatcttaacctggctgcgagaaatcaataagctctggaatctgctgacgtcacagacaagatagctgaatacactcacatctttgttctggccaattcggtaagcaccatctacgctctgatggtctagactcaggttacaagcaggatcatctactat

SEQ ID NO: 167265 - DNA, 609 bp, Zea mays
  Clone ID: MRT4577_84121C.1
cgcgttcgtgggcgacagagtccgcgaagcccgcccgccccgcccgctcgcgcaaacgagagagagagaggcgagatccggctccgggccgggcggccggcggcgagaggagagagagagggataggtgacggactaccagggaccatcctccttcggccgctcgctgcttagggaccccgccgccatgccgtcgggcgaggaggccgacctcgaggcgttccagcgccacgtggcgtcggctctcgcggagctgctgcccgcggctgaggccggggccggggccggtggcgacgccgcggcggagggggcgggcgaggagttcctctgcgccgcgtggacccgccgcctgctcgaggcgttcgtgctgtgccaggaggagttccgcgtcgtggtcgcccaggcgcggcgccgcgccggtgccctgccgcccgccgccgagaggctggtcgccgagttccacgagcgcgccgtcaaggtcctcgacgtctgcaacgcggcgcgcgacggcgtggaccaggtgcgccgctgggagcgtctcgccgacgtcgccgcgtccgcgctgcgcgcgccggggggaggtccacgagggccagctccgccgcgcgcg

SEQ ID NO: 167266 - DNA, 359 bp, Zea mays
  Clone ID: MRT4577_84122C.1
tatcgatcatcctaaaacctatactctaactctactactaactccaacctcttcccacacagtgtcggacacacatcacaggtagaatatatactactaactcactcaatcactcattcttacttctacacatcatacttatatccaacatcatttacatatatttcaaaaatctcatcctactcattcattacttaatcctcactcaaaatcatactacttaaagaatcatcatcccaatattcatatacatatcaacaactctccactatagcaaaaccaccttactaacatcacacataactactgcatatctacttcaattctacctacatcctcttaaacgcaaatacatataa

SEQ ID NO: 167267 - DNA, 328 bp, Zea mays
  Clone ID: MRT4577_84123C.1
gcacaactatcagatgtaaatataaccatctaaaacatatctggtatgaaaaatatagggggaccccccccactgggtatgggcctacagaatatctgaaaggatttaaaacaaggggttggctttagaaaaaaaacacccccaagaaccattttctcacccggagctagaacggctttcccgggaacaaaaacttaggggccccaccgaggggggccaactttgattgcgtaagaaggggggggttggaaacaaccaacttgaaaccgggagggggcgggggcccatcccaaaagggaatccccttggccggttttatgggaaccaa

SEQ ID NO: 167268 - DNA, 146 bp, Zea mays
  Clone ID: MRT4577_84124C.1
tctgaaataacaggtatatcggggaagtttgatggaggagtcaactcttgtttgggggccttttctgaagtcatcaatgtgcctacgctattgcctcacatcttcgtgacgtggatgtttttctccccttgtttcatcttcctttc

SEQ ID NO: 167269 - DNA, 548 bp, Zea mays
  Clone ID: MRT4577_84125C.1
ccatttcttttttttttatttttttaaaaaaaaaaaaaaaaaaaaaaaaaaaaaaaaaaaaaaaaaaaaaaaaaaaaataaaaaaaaaaaaaaataaaaaccacccccaaaaaaaaaaaaaaaaataaaaatatttttttccttcccgggggggcctttttaagggggaatttttgcatttttccttccctttggggggggtttggctttttttttagggggcccttttccccttttgggggggctttttccatttcctggcccgtgtttttccaagggggtattggggaaacccctggggttccccatttttttcgctttgaggccttccccttttccccttttgggtttttacgaaaggggcctggcccattcccctttccaaacatttgcccccctttattgggaattggccccccctttttccgggcctttagccgcgggggtggggggggttccccccagggtgcccttttttttttctcggcccttagccccggttcttttggtttttttcctttcttttttcgccattttggccggttttc

SEQ ID NO: 167270 - DNA, 1210 bp, Zea mays
  unsure (1)..(1210): unsure at all n locations
  Clone ID: MRT4577_84126C.1
gggattgccaattggctgctccatcttggcagaaatcctcctccaagatggtcgttttgggccaacaacgtacgactcctcccacaggggggctgctgccggagaaatccgtgcaggagcagaactcagtctcatcatcttcctccacccgacagatgattggaagaggtatccagtggtggagcaggtcgctgtgggtcaagtccagggcgtggatccggaaccccatgaacatggccctgtccgtctggatcctggccgtcggcgtctcgggcgccatcctcttcatggtgatgacggggatgctcaaccgcgtgctgccaagcaagccgcggagggacacgtggttcaaggtgaacaaccagatcctgaacgcgctcttcaccctcatgtgcctgtaccagcacccggggaggttctaccacctggccctcgtgtgccgctggaaggccggcgacatgcaccagctccgccaagcgtactgcaaggacggggcctgcaagcccaacgagaggaagcacatgacggctgtcatcctgctgctccacctcaactgctttgctcagtacgcgctctgtggcctcaaccttggctaccggaggccccggcgtccggtggtcggtgtcgccctcaccgtagcggtcgccatctgcgcgccggccgtcgctgggatgtacaacaacctcagtcctctcgggagagactacgaggcgccggcgccggcggaggggatgataataagtgaggaagagtcgcagctccagcgcaaaacgcccgacaccgagaggcgctactcgttggtgccacggcaaggacaaggagaagaaccgcagtgggtcggcgggctgtgggaggacctgtgggacgacatgtcgctggcgtacctgtcgctgttctgcagctgctgcgtgttcgggtggaacgcgagcaggctcggcttgggcaacatgtacgtccacgtcgccaccttcgtgctcctgtgcctggcgcccttcttcatcttggacctggcggccatcaacgtggacgacgaggcggtcagggacgcgctggggctggccggcatcttcctctgcgtgttcggcctgctctacggcggattctggaggatccagatgcgcaggcggntcggcctccccgagaacgcgnctgctgcggcagncggacctcaccgactggctactgtggctctgctgctaccgtgctcgct

SEQ ID NO: 167271 - DNA, 132 bp, Zea mays
  Clone ID: MRT4577_84127C.1
gtgcctgcctatcactctaccgaacggagcctgtcgcgggctcttccccctagcaggagttttggggtgtttagttcctaccttagatacttgaaggtgtatgacggcgcctaacccggagttcttgagaca

SEQ ID NO: 167272 - DNA, 1843 bp, Zea mays
  Clone ID: MRT4577_84128C.1
taaaacgatgagcaccggaaggcaggtatacgcgcacgctcgtccttgctttctccgtgctcggcttccaggtcctcccagcgctcagatctcatagcctcctccatcagcctgttctccacgcggcaccagacgcacgattcgtctctgcttccctcgtcggccaagctctctctcccgctgccttctctgtgccgcctcctcgccatgctgtgcgctgccagccgcgccggtgagctcgcccaggtccggcgacctgctccggctcgactttgtccacgtctgcatcttgcccaactctgctactcctgactcgccggcgacctgcagctcggacttcagcatcggccttttgtgtgctccgctgcgccagatcgccgtgttaccgtggagctacatgccttgcccttcgctgtcgttgtagcggagtcgtcatcgcccaagtgctgagcgccctgaactcgctaccgttctgcagccccgccgtcgactccctgctcgtctcgctactttgtcatcattcactatccccgtcctcgacgtctacctcgccgctcctcgtgtctagcaagccgtcacgtttggcgggtttcctctatgcggcctcacgcgttcctctcgcttcattcacatgtcgtgtggtagagcaggtatggttatttgattcgatgtatgtgtggatgcggaataaatttcaagagaaataggttcttgtgtgattgtggtcggctgttgttagcgccatcgttcgatattttatgtttgtgtatggtagatcggcgaagaaagaaactagtttgtgtaaaaaaaatgaagtttctggcgattttcgcctgatgcttggtgtgttaccggagtcggtttcgtcactagctatcttggcgaactttcactcaacttcggaattacgtaggcttagatacgctcactgaagcgtattcatttggtcatcaaatatttgcttacttataaatacttttaccgtaggaaaaaaaaaaaaaggaaagttttattaatatatatgatacacaggttaaccggtaaattagtttagaaagttaatgaaagttcttttattaaattttataagtgttaggtgcccaagaattttgaagttaaagttataagtcgtttagtgtgttctctaaactaggtatgatattctatgtgtgttggtcgatttcatgatgtgaataattgttgattgctacttcgaatacttaggatcaagtaacatcgatatatttgtttcaatcaaaatctagggtctgtctaataagtaatgagtataaacattttaggtcttttagttttaaagttgtaattggtatactatataaaatatgcttggttataggctataagtgtttcgtcctttttagcgtaaattatctatcttgtactatttatactcgtgctcatacatgtgcaccgtgcatctcatgaggtacgataaataatcgcgtgatgtggaagacgagccaagtcgaccccaagcacgggctaatccgcaggatgatgctgatggacgaacatgcctgatcaagtgcaaggacaaagatgatcgtcaagtggacatcgcctaacaaatactaacctagtgttattcaggttatagttttgtgctgctgctgatggtgttaagtagccagtgggctcggccttcttataagtctaagtaacccttctatacttcttattgaggatggtcacttgagctagcatatatttcaaacttatacttttgcaatcactccgataaaataatgtaaaatttttgtaacttgtaaaatttagtaataatatttccgctgcaaaaatattggtgtgtgtgatttgtgtt

SEQ ID NO: 167273 - DNA, 129 bp, Zea mays
  Clone ID: MRT4577_84129C.1
gatctcttgggatggacctggtgaatacagaacggtgcctgcggggggccaagattaccctatagggacgggcactaaagcatgacggacagatggcaaaagcagtggcctgggcggaatcatggtcaa

SEQ ID NO: 167274 - DNA, 949 bp, Zea mays
  Clone ID: MRT4577_8412C.1
tggaactgctggcgcatttgatgttaccactaaaggaatacttcatgcggcgcttgaaagatcagagtattggcgcctgtccgatgaaaaagggaaaccccctggagtattgggttggtggccttcaagagcagtcacatttatagagaatcatgatactggttctactcagggccattggaggttcccctatggtatggaactgcaaggatacgcctacatcctgacacaccctggcactcccgcagtcttctatgaccacatattttcacacttacaaccagagatcgctaaatttatttccattcgacaccgtcaaaagattcattgccgcagcaagatcaagatactaaaggcagagaggagtttatatgcggctgaaattgatgagaaggtaacaatgaaaatcggatcagaacattttgagccaagcggtccccagaactggattgttgctgctgagggtcaagattacaaaatctgggaagcgtcttcatagacttggcgggctgcgagtgccatataactgctcaaagactaaaaaggtacccagtatagctcttaaagaaacgtgtttgtattgtgcaggttgagatccagatcccttcacatttgattaaatctgaaattccttgagcaaactgccttttccaaaggaagctacaagaaagcataatgctaggagatggcgcctcagaatggtcagctggcgggagctgctgccgctgccgccatggagcagcaaaattcaacaacataagctatggaagcacttgccacggcgataggattatctaataggactactgttgaacattcgatatatccagaaccacccatcatttgcaggcacattggccattaaaatttagcttcgtcctctattttggagctatgtaaaagcatgcacaactctatttatgtgtgaaataaaatttgaatcttcatc

SEQ ID NO: 167275 - DNA, 303 bp, Zea mays
  Clone ID: MRT4577_84130C.1
cctccttttttttttttctttttttttttttttttttttttttatttttatttgcggggaaaccaacaaccgctagtatacgcgatccaccattcaaagtgccaaatcacggtgcaaaagctacaacactttacgttacctttcaaggacaacctcgacattaaacttcgaagggttgttgggttggtaaccaaaagggacccgctttgggcaagggcaaaccgtccaatgaaggccctctcggtagggacaaaagtcaagaaaagggggggaaggtaggcaaaaaataaaacaaggcccaaa

SEQ ID NO: 167276 - DNA, 324 bp, Zea mays
  Clone ID: MRT4577_84131C.1
acacccacgcatccacccactcgtccgcatctctctaactctctgctcacacgactaccttcatgtacttgtttattctcccactgccctagtgcttacccttacacttccctaacccaatccctctatgatcaaactcacccattcataaacaccctcccatatcacctattcctcttcccatgtatatctctcccaaccaatcttatccatcacatgtactgtgttccccttacctctctctcaaatataatcctcagctcccaagcttatatgtacctacatcacacacgtcatttcccctaccctcatcatctgccaacc

SEQ ID NO: 167277 - DNA, 612 bp, Zea mays
  Clone ID: MRT4577_84132C.1
agtcccccattcctttctcccctctccctccgtctccccgcctcgtctccgcccgccgctcactgccgcacaacctcctactattgggtcggctctcctacccccacggcatccagctcgcgctgcgctgggatttaccgggccggcggagactcgcccggctggccgcgaagatggacgcgcgtcagactgcgcaggtgaatcaggtcgtcggcgccgtcgggatgccgccgccgcaaagccagacgcaggacgcgtgggtcgatccccagttcgttatgatgcgcagcagcatccgagacaagatattcgagtatataggaaggaagcaaacctcggctgattggcggaggaggttacccgagctcgcgaggaggcttgaggaaatcttgtttagaaaatacccaagcaaggcggagtactacaatatgatgaagcagcaaattgagccgcacttgcagtttgctatcaagcagttgagtgctcagaaccaacaacgacaacagaaccaacaattgtcaagacagatagcatcttcccctggctatgggacgatgattctgacacatggtatcacacaaggcgcaagtgaaacttctagaatgtcttatg

SEQ ID NO: 167278 - DNA, 317 bp, Zea mays
  Clone ID: MRT4577_84133C.1
attcttcggcggctgtcgctctgaatccagaaaggaacagagcggcagccgccgacgaataaacaaacgcgagctcgtctgctaactacaacggtcaaacaaccactggtacgcttacgtgcctccggttcgcaattacacatcacacacaaagcatgtggtcctgttccgaacgtaacacgaactacaccaaccaaatacccattcgttatgaccaagcaataattatgaatgtgtttctgtttattttcgtgtaaggtcaaagtatactgggattgttaagtagttaaataaattctgtctctttttttgcctgc

SEQ ID NO: 167279 - DNA, 384 bp, Zea mays
  Clone ID: MRT4577_84134C.1
tttaaagtaaataaaaggtgcactaatgcagtgtgcataatgactaactcattgttattttagtattgtactatcaattagtaatttttaaaatcattgtttacctaaaaaaaaaaaaaaaaaaaaaaaaaaaaaaaaaaaaaaaaaaaaaaaaaaaaggggcggccgttttaaaggtccaaggtttacttacccttccttccaacttcttaccttttttatagggcaccttaatataatttaagtggcctggtttttacaactttgactctgaaaaaaccttggcttcacaaatctatatcgttttaaaacatatccctttttccaaatgtcgcattatagcaaagagccccacacatatcgcttttcaaaacatttgcacac

SEQ ID NO: 167280 - DNA, 325 bp, Zea mays
  Clone ID: MRT4577_84135C.1
gggtacccccgggctcgccggggccaagccatagtgcctgtagcccggagtaatccaaacctggacgcgacataccgcaggcagttgttctgtccgggcggccctatgcagagcaacagagcggtcggacgcactcacctggtccgcccatcatcatagatcgacacagtccgccgcagggcctgcaatgctgttggagaggcgcgtacaagggagtcgagaccggacacggccgcacgatcctcgctgatttatctgccaaggtgatcacgatagacagcatgcgagctcaagactgcatattacgtacacgggtgatctatag

SEQ ID NO: 167281 - DNA, 327 bp, Zea mays
  Clone ID: MRT4577_84136C.1
catgccaacaacaagagtagatgcttatttgtttatttatttatttagtatacgtaacaagtccaagctagtcttatcatgcatgcatgataggctgcatgcgagcgtacacatcaatcaatcatagattcacaggtacagggacaaggaggagcttctccgtacggggcactgtgaccccaaacgattcagtcatgtcgatgcctttgctggccgattccgcaggcagctcccagtcgaagtggtagacaaggttggcgagcatgaggtggatagctgcggtcgcaaagctggtgccggggcacatccttttccctgccccgaacg

SEQ ID NO: 167282 - DNA, 839 bp, Zea mays
  unsure (1)..(839): unsure at all n locations
  Clone ID: MRT4577_84137C.1
ccggccggaccttagaccggctggagcaccggcggaacatagaacatttcaagacaacggccatccaggtgctcaaatcagcataccgagcttgtgtcccagcaggtgaggaaattgcagccctggcagctgctgacttccatgcctcccagactgtgtaccaagaagagctacagtgcctggagagctgggtgaaagagctgaggctgcaggagctggagttcgctagaataatgccgctgatctgcttcttccctcctgctgccaccctgttcccctgcgaacaacatgaggctcgcatggcaatgagcaagcacaacatcctgttgaccgtggtggatgacctgttcgatgtcggggggtccagggaagagatggagaacctcgtcaagctggttgaaatgtgggacgcccataaccgagttggcttctgctctgagcgcgtggagattgttttccgagctatctacgacacgagcaaccatctggcagccaaggctgctgcagtacagaagcgcaacatcatccatcatctcgccgagctgtgggcgaacacggtgagggccatgatggctgaggcgaactgggcgatgacagggcacctgcccaccttcgaggagtacatggcggccggcgagccgtcgtttggtcttggacccatcgtcctcgcgtcgctctacctcgtcgggccggagcttccggaggacgtggtcacctcccaggagtacaacgagatgttccggcacatgaacgtctgcggccgtcntcttacgacctccagtcgtacgagagggagaagggacagggcaagtcaacagtgtgctgctgctgctagcact

SEQ ID NO: 167283 - DNA, 460 bp, Zea mays
  Clone ID: MRT4577_84138C.1
atgctcccggccgccatggccgtgggattagcgtggtcgcggccgatgttggctcacggccaaggcatgacggcgagagaggttggtgccatgcatgactgtgtggaggaactaagtgacgcagtcgttgaattgagaaagtctttgggggaaatgaagcaactaaggggcaaagattttgatcttaaaatgaatgatattcaaacttgggtaagtgctgccttgactgacgaggacacttgcaccgaggggtttgccggaaaagtgatgaacgggaaagttaagacagtagtaaggggaaggattctggaagttgcacatatgacgagcaatgccttggctttgatcaacagccttgccgctcttcacggctaaatcaaaaaatcaattacacactcctatatagtgttatttctcgtctttcttaaagtatacttaagttctccttttgttgatccct

SEQ ID NO: 167284 - DNA, 205 bp, Zea mays
  Clone ID: MRT4577_84139C.1
tgggtgaccaccggtgatccgccgctggagttcaccatgacttattctccatcgttgcagctcctggatgcacctgatgagttgttgtacctactattggcactctcatagccattcgggaccattgtgcctctggccgggagctcatgatttaagatcacctcattgaactgctcggctcaatgggggaacaactgctccgtga

SEQ ID NO: 167285 - DNA, 314 bp, Zea mays
  Clone ID: MRT4577_8413C.1
tcagtaacacattctattttatctacctagcaacaacttaacaagaaaggctaccaagatattaaccctgcttgcgcttattgccctttatgagatcgcaacaaatgcgttcattattccacaatgctcacttgctcctagtgccattataccacagttcctccgaccagttacttcaatgagcttcgaacaccttactgagcaagcctacaggctacaacaagcgcttgcggctaacgtcttacaacaaccaattaaccaattgcaacaacaattcttggcacatttaaccatacaaaccattgcaactcaac

SEQ ID NO: 167286 - DNA, 147 bp, Zea mays
  Clone ID: MRT4577_84140C.1
aaaaaagaaagctgaaatctaaagtttaacccatagacgtcgctgcgcagggggagggaccaacccccaatcgctggctggggaaaatgcaccttaacaaagggagagagcccagggcttttgattctgctaggccacctgagatcc

SEQ ID NO: 167287 - DNA, 603 bp, Zea mays
  Clone ID: MRT4577_84141C.1
tagaagactctcgagtttttttttttttttttttgagtcatcacagcacacatttgatttcgcgtccgaaaatccggatgtgacatgcacgcactcttggatcaattatgcagcaacaatacacttgcttaatcccaacaatataaattgcaagaaattgcagacgttcaaaagagagaaaaaaaaactattacccttctggaacatcagcaggatccatacaacttaattctggattgattcttgatcactagaagagagatgaactataaccatgaaactaacaaaggaagaagagaaaagatggagatacataggggtcgccgatagagaacgtgtgtggatgagggctctgggcggcgctgagggcggaggcagccgccactgccagagagatgtgcaggcggcggggaacgctcctacggagaggctgccaggagaagcctcgatcctggagaaactgagaaggacagaacgggtagaggaattgactgcttgacaaaagaatgctcttgtccgacggaagcaaacaaaatgctatgtatcggtaacgttgcatttttgaatggtaaatatctagagttattccttttgatagtaaat

SEQ ID NO: 167288 - DNA, 599 bp, Zea mays
  Clone ID: MRT4577_84142C.1
gagtcaacacaaagcaagacacaacgggtaggtgagaaagagagagagagagtagaagggctatggggcagtgttcgtcctcccagcacccagaagcagagcatcagaagcagcatcaggctgctgcctgtgttgacatccagaaaagttttcttcttcttcttccaatctgcaggctggagcggctgcggaagaaggcggctgcgcacatgaaccagccataccatgcatttatcattgaccagctggtcctcctggtgtcgctggtttctatcatccatttttcgtgtttccttcttctgctctttttcctctttcgcttgctgtttgtccactttccctttttcctcctctgtctttttcctttccccgtttccctctccttactctctttcccgtttccccctttttttcccccttttttttttcttttcctttttcccccttttttcccccccttttccccccccgctcgcccgcatttttttccccttttttttcccccttttcatgctttttccccgcctttttttttccccacttccttttttttttcctccacttccccgtcgcccccttttttttttttttctcttttt

SEQ ID NO: 167289 - DNA, 281 bp, Zea mays
  Clone ID: MRT4577_84143C.1
ttaaacacacctttagtttgtttctgttattaatcagcacgtacacgatggcgcggcactgataccaactggggctctgaattctatctggctagcacgaaggacagccacgcactactcatcgggcggcaaaaagatggtctaaaaactgaggctataaagtcatctcgagggataaaaatggtgactacacgaagaatctccattcaccaaaatgatcaaggatccaagtcgggaggaacatggtgcgctgttccatggagaaggcgaaaggatgccac

SEQ ID NO: 167290 - DNA, 340 bp, Zea mays
  Clone ID: MRT4577_84144C.1
ataattgacccgggtgtttcttagaatgtgaaatgtgtacatgtgacgttgtctcttggctatgcacagaagtggacttatataaattgcagcatgacttgtttaatctgaaaggcaaataattttgcatggataaccacacattttatcagtatttaattcacaagattgtaatgccgactggactttggacttgtcttcacatatcattttgtgagcaaaaatctgatgtatgctttcaaatgttttatgtgtgtctgcacttgctcaagtatttttaaattatcaaggtctactttgctttttaagacgagtatatttcacctggtgcatgtcttaa

SEQ ID NO: 167291 - DNA, 1160 bp, Zea mays
  Clone ID: MRT4577_84145C.1
aggacgcgtgggcggacgcgtgggataaaatctcttcgttcacaaatagacaacatggagtcgtcgttctcgtcgtccttgggtaataacagcagcaggatactggtcattggtggtacggggatgatggggcagcacctcgtcaaggccagcctcgccgccggccaccccacggccgtgctcgtccgcccagccagcagcagcaagctagagcttctcgagaccatcaaggccagcggagcaaccgttattggaggtgacatctacgaccacgagagcttggtggcggcgttccaccaggttgacgtggtcatctccgccgtcggccaccacggaccgcatgacctagaagacggccagctcaggattgtggcagccatcaaggaagcaggcggcagcgtcaagcggttcgtgccgtccgagtacgggtgcgacgtggagcaggccgcgcgatcagcggcggtgctggagccggcgcggagcatcgtgctggccaaggtccgggtccgccaggccatcagagccgccgggatcccgcacaccttcgtctgcagttactgggcgcacggcttcgtgctgccgcgcctcggtgacccccacgccgacgggcttccggccaccagggccaccgtcttcggggacgacgccacgcgcgccatcttcgtgcacgaggcggacatggccgcggtcacggtgagggccgtggacgacccgcgggcgctcgacaagaccctctacctgcggccgccgaccaacacctgctcgctcgcccacctggtgcgcctctgggaggacaagacggggagggcgctggacaagtactacatgcccgacgaggagctcgtcaacaggatcagggactcgccgctgccgctcaacttccagctggccatggtgcacgccaccgtcgtcgccggcgtctgcgaccagaccgtcgacgccgaggccggcggcgtcgaggccacggagctctacccggacgtcaactacgtcaccgtccacgactaccttgacggtctcaaggagagcctcacgcgcaacgtcaattcatgaccgcagctcgaacgattatatatacgtactactgtattatctatttgtgtcgtcttacgttgctatacgtgcgtgaataaaattccctacggctacagccggaaaaa

SEQ ID NO: 167292 - DNA, 760 bp, Zea mays
  Clone ID: MRT4577_84146C.1
cctcgaggccggccgggccggggctccacggctagtttgtccatcctgccgagtgccggccctccacccgcgatctcaaattcatcaatcgcccgcgccaccacccaccaggcatcatctcaacccaagcatcggcacctcgccaccgcccgccgccgcggcagcgagctcagctgccagctcgatcgccagccagcggaaccctccagaaaactccatggggatcccgccgaggctcccggaccacgaggaggaggaggaatacgacgatgccttgttctacgaggacatccaggcgccgaagttcgtggacctcactgcgcccgacgccggcctccccgacgacgaccccgcctggttctgcctccgagtcggttgcgaccagagccatgagcaggttgacccggaggccttggacaggagcctcttcgtgcgggtcatggcggcgagaagccccaacgtgcggctacagaaggttatcagcaggaaaaaccagagctcgatgctgaaatgcccgcactctgcgccgccgaagcctccgagggctcgcttcgcgaggctgagcgcgaccacggaggccgcggagaaggcaccggcgaagcccaagccaaggctccagcggatctgcgccctgcgagcatccccgatccgtatcaaggctgcgagggtcgaacgtcccagcgagaggaagaagggactgacgacgccgcggagcaagggcgtccgggcgaggcaggaactgtttcacagcgtgaagcac

SEQ ID NO: 167293 - DNA, 335 bp, Zea mays
  Clone ID: MRT4577_84147C.1
acccacccgctgattaaacagacctactacatctttatcggatggacattcattattctgcgagagaaaagactgcctcttttctgaaaatggccgcttaatcttgaacgtcagcgggcactggtaaaactgtttcctatatgccatagtacaatggaagagattgttcccaacagatctcctgtcaatcttgttgcattcaacttgggctaccgtccaggaggagataaaactgtaatcacagtgcctagggcatcttaactaacattgcaagcttgcagcagaaatcttagttcgggggactaataaggggtcttggatacattgggcatcca

SEQ ID NO: 167294 - DNA, 288 bp, Zea mays
  Clone ID: MRT4577_84148C.1
ctttaaggagtttgacaacgacaatatctgtggcactgtctacgttgtcatgtagatgttcgtcgtgctcaccttcggcatccaaatgcccatggatcgtggtcaagttaccccatctacaccataatcagagacaacatgcaaaacaagattgttttacctttcaattagacattacgctagatgacattcagcgcgtaacgcaatggaaccttgatgtcaacgagcatagtgagtagggtgacatgtgaaataaaatcttccatgcacttagttgatttattttaa

SEQ ID NO: 167295 - DNA, 886 bp, Zea mays
  Clone ID: MRT4577_84149C.1
ctcgaggccggccgggccggatcggccgggaaaaaaaatgatcctttcctttcctgcagcagaaagcaggtgatgacagcctgacactctgctcatcacacagaaaattctcagctcacctcccaagcttggaacatatatgttgagaggaagtgggattggcatatgttgcaggttggctagggattgccgccccagctggctggttatatattaggctgtcgccgccaaagaaagaaaggcctgcttcttcacctcgcgctccaggttcatgttttgagcgtgtactacagtgcatgtggtttcagaaatggggacgctggcgtgcccatggagatctggccacctctttgctttcatcaccttcgccgtgctgttcttctcgacttcatttgccgggagacagtacagtttcttgatggatcaagatgccctacgtcaacaagaaggagagggagcacgaactgagcagaaggaagcggtagtgccactggtgcaagctcggcggctcagcgtcaagacgaacgattacagcagctatgacccttccccgtccatggacaagccacactccaagctcataccgaactgatcaatcatgtacgcgtccaggttgcagcagtggagttgccgatgagaaatttaacagcttaaatgtgtgcctgatttatatatacagaagcattatattactaggcttgcttaaactgttctcatgacatctaatatcatattattatagatgtgacatatagatgtttacttcttctttgtaaaaaaaaaaaaaaaaaggcttcttctctagactagatcaagtagttagtttaataagagtagcaactactttgtcaaacttaaaaaaaaaaaaaaaaaggcccctagggcc

SEQ ID NO: 167296 - DNA, 380 bp, Zea mays
  Clone ID: MRT4577_8414C.1
acggtccctacgctacacgtaccctacgctgatctcttacgtctggtgtaccgctctgatgtgcgcgtgacatagaggatctattcttccgtgaccctcaagcagctattcctgagcaagagcaagctccgcggctgtgtcgatgccgctgactgcctatgattatggaggagaaggacgaccctatacaagtgtaccatcgagcagccctgaatgaaggtgacaccgctcaggtagactgtgaccattcggaccatgagcaccatcgttgactgggagtgactcagcttagaccaactctgtgctctgtgccgcatttgccctaagctgacatatgctgaggggccctaggaccactcggtaattagacaggctcttag

SEQ ID NO: 167297 - DNA, 284 bp, Zea mays
  Clone ID: MRT4577_84150C.1
gggacatacagcccgcccacattgaggactaggtcattcatgcagtgtcatttcatcaatcatatattggtcaagatcccacgcgcaagatattagattgctttgagctctcggcgaggcctccattttgctatgagacttgatgtaggcgcacttgctcaagaacaccggcaacagagaagatgaccttcattaagacctcaagtggatgtcctcgacgatttgacgtgcaagcaggactcgatagccagctagtaggccttatgcataggactacgcctgct

SEQ ID NO: 167298 - DNA, 326 bp, Zea mays
  Clone ID: MRT4577_84151C.1
gcgattcggccccgggaccctccaagggtgaacatcacgcggcgtgactctgctggccctggaccacggtcattcagcattcggcagctctatgggcggtacataggactgagaacgggacgtcatcggaccatctaacgtctaaggatttgcacttcttaatgaagtaacgatgtttcggctgtcccgcattcataggtcgtaccgatggaccgctcgctcttccgtgccttcactcgtctccaagaatccacttacgagaatatcatagaatgggaggacttcagtccataccccatttcttcatcgatctatgatagtactgc

SEQ ID NO: 167299 - DNA, 844 bp, Zea mays
  unsure (1)..(844): unsure at all n locations
  Clone ID: MRT4577_84152C.1
agcaaccgtactggacaccaaaaggaaaaccataggcaagggaccccaatggggaggctgcaacgccgttcgactttggctcgggtttcatggatcccatcaaagctctcagcccagggatcatcttcgatacacatcctgaagactacaagtcattcttatgtgccataagccgcgatgaccactccgtgcatctaattagcggagacaatagtagctgcacccacagagcgtcctcttctgccactgctctgaactacccatcgatcaccattccgtatctgaagcagagctattcggtgatgcgaacaatgactaatgtgggcaatccaaggagtacttaccatgctgtggtgtcagctccgccaggaatcagcgtgagagtgacacctgaagttataaatttcaagaactatggtgaaaagaggacgttcacagttagcttacacgtggatgtgcctcctcgaggttacgtttttggctctttatcttggcatggaaatggaagtgatgctcgcgtgacgatgccgctggtagtgaaactacagacttctggcaaggcctgaccgagttgatcccctggaaagatgcttggaagaggttgctagaatgctagatcaggctacaaatctaggtggtagaactgaaatactgaacatatcagaagctaaccgcgatcaatctgtgaaaatatcatattaactatggtatttcatttgtaaatgtcttggctagaaggcaagcactcccagaacaagattttttttttctcctgatgattgttgtaaaattatttcgtgcctaaatgcaaatcttaagaatgcaggttnnnnnnaaaaaaaaa

SEQ ID NO: 167300 - DNA, 1167 bp, Zea mays
  unsure (1)..(1167): unsure at all n locations
  Clone ID: MRT4577_84153C.1
cctcgaggccggccgggcgtcggcctcagcggcgccatcttcacccagctgtaccgcgccatctacggcaccgacaacgacggcaccgacctggtgctgctcatggcgtggctccccgctgccatatcgctcgtcttcatccccaccatccgcatcatgccgcggaacaccgccgcgcgcggggagcgcaaagccttctacctcttcctctacgcctccatcgtgctggcagtgtacctgctcgtcatgaacgtcgttgagctggaggtgatccacttcccgaagccggcgtactacgtcacggccgtggtgcttctccttctcatcttcttcccgatcgtcatcgtcgtgaagcaagaactgaagacgtaccttgcgccgccggagccggcgacagcagcagcaacctccgccgccatcgtgacgatcaccgtaaacgagaagacgcgggcgtcgagcaataacgtggcaccggagtcgaccgatcatcgtcatcaggccacggccgccgccgccgccaacgacgacgcagacagctcgccgtcctgcttccaggacgtgttccggccgcccgcgcggggccaagactacaccatcctgcaggccctgttcagcgtggacatgctggtcctgttcgtggccaccatctgcggcatcggcggcacgctgacggcggtggacaacatggggcagatcgggcagtcgctggggtacccgcagcggtccatcacaacgtttgtgtccctggtgagcatctggaactacgccgggcgcgtggtggccgggttcgcctccgagtacgtgctggcccggtacaaggtgcctcggccgctggcgctcacggtggtgctcctcctggcgtgcgtgggccacgcgctgatcgccttcggcgtcaacaatgggttgtacgcggcgtccgtgatcctgggcttctgcttcggcgcgcagtggccactgctgttcgccatcatctccgaggtgttcgggctcaagtactactccacgctctacaacttcggcgccgtggccagccccgtgggctcctacatcctcaacgtccgcatcgccggccgcatgtacgaccgcgaggnactccggcaggccgggcagcggggaaaggacctccctgcatcggcgtgcgctgcttcagggagtcgttcttcatca

SEQ ID NO: 167301 - DNA, 500 bp, Zea mays
  Clone ID: MRT4577_84154C.1
gcagcggaatttctttattacaaaaagttacaagttacaacaaatttacattatatttatcagagtgatttcaaaagtgaatcaaagaaataaactctgaaattttatagattattgataaggttgaaatataagctagctcattgacaatcctcaataagaagggaagagctactttaacctataagaagggcgagcccaccggcacttagcaccatcaacagcagcacaaaactagtacctggaataacactaggttagtgtttgttaggtggcgaccacttgacgaccagcctttgttttggcaattgttcagattatccatcttcaggttcgtccatcagcatcacctttcggagcaggtcgtgctttacgacatcttggggtcgactcggctcgtcttccacatcacgtgatcaattaacgtacctcatgggatgcatgatgcacatgtttgaatatcaagacaaatatcgcaagataatattacaattttacac

SEQ ID NO: 167302 - DNA, 503 bp, Zea mays
  Clone ID: MRT4577_84155C.1
gctgggttacatccttttatatttaattttaaatagaaagagattaacttcggtcggattcctccgtgtagccacattaccgccacaaccagcaaatcacaacccactggtacacttatccccacaatctaatgaatacaacagccgctgcctagataaaatccacaggttctttgaccgaaactttcaaagttcacggcaactggtgggtagctctgacttgggtgccttacacggcgcaaaagagaaggggggaaaaatcttaccgcctttgtgatacctgagcaggggttcctgtgacccgtgtgtctgtcttcttaccgcttccttttatgctttcgccggcaatttttgtccaagggaggcagctacagccgtcggcataccttgggtgccaaaaagctttggtcctaataaaccagttacacatgcttgaggttcacatccaccacggaaaatcccccgggaggaagtcagcttgtgcccaggactgatcttgtgga

SEQ ID NO: 167303 - DNA, 476 bp, Zea mays
  unsure (1)..(476): unsure at all n locations
  Clone ID: MRT4577_84156C.1
ctaaaacacaacagtttataatctactgatgataaatgtacacccctgggagaggggaggagcacatgcacggcataaaccataatcatggcacacaaccggattatatatcagatcataaaaacccattcctggcctgaatatggggtgatataaccgatgataaaaaaaaagaagcctacacgaacgctaccaaggagtacaacgccctggctggcaggcgcgacagaacttccatgctcttcctctgtttgccgtgcgcgaggaagaggatgacctccttctccggcagcgagactgggcccgacatgacnnnctnnncncaccnnnannnnnnnnnnnnnnnnnnnngcgtggncccntggtgatgagaagcgnggacgccagcgacggccgggcccgcgtcgcctcgaagtagtccaccgtcgaccgggtgtagtngtcagtcaccatccgcacgggcttctgccccagcc

SEQ ID NO: 167304 - DNA, 375 bp, Zea mays
  Clone ID: MRT4577_84157C.1
acccccggggcgacgccacgcgttctgccattattctacagatctcttctttagttactacaatgggctaagagcggcgggtcttgcaagcctacaggctacaactagcgctagcggcgagcgtcttacaacaaccaattgcccaattgcaacaactatccttggcacatctaaacctacaaaccatcttaacgcaacagcaacaacagtttctgccatcactgagccacctagccgtggtgaaccctgtcgcctacttgcaacatcagctacttgcatccaacccacttgctctggcgaacgtagctgtataccagcaacaacaacgtctgcaacatgttatgcctgcgctcattcaactagccatggtgaacc

SEQ ID NO: 167305 - DNA, 370 bp, Zea mays
  Clone ID: MRT4577_84158C.1
atagaggacaacactaactatgtcttattctggagcatcaacacactacagagggcaggctataactactatagcagcaacccaaatctaaaaaaattggcaggactccctaaagcagcagtgcagtccttagaaaatgccttgtctccaatcacgcatgatacaaccaagtaactaccaggtattgcatcaacaatgttgtcatgaacttaggtctaatgagccacaatacattcaccaagcaatctacaacatggatcaatccataatccatgaggagcaacaacaacaaccatgtgagttatgtgcatctcaacaagctacttaaagtgcggcggccatcttgacagcagctcaatacctaccatca

SEQ ID NO: 167306 - DNA, 450 bp, Zea mays
  Clone ID: MRT4577_84159C.1
ggattgggattgtgtgtggtgttcattttgatggtgaaacaggcacctggggccggccggaatgtgatcctgcaaaactccgggcaaagaaacccaaatttgctgaacagtttttatccataacacagtcgatgaaggccaccgtttattgttttgacccccttgtaaataacagaaccccccccctccatcaaattggaccaacattgggcacagttgtgttatgaacaagggcccaatagaattttgcattcacaaggtacagcataagccgggttggtgtaatttggaaccgagtaaactcatactagccacttattgaagtttgggcttgggctgtccccaaggatgagatctttgataaactttatgactgaaatgagccttttttagaacgcacttgttgaacttaaatccgcactaaaaaccaaagtctttccaaggatcatt

SEQ ID NO: 167307 - DNA, 1188 bp, Zea mays
  Clone ID: MRT4577_8415C.1
aattcggcacgaggcaggtgcgaaggggcccaaggagaggcagccatcatctgctcctcgtgatgcgcgccgctcattgctgcagagcgctgccgctttcgccccacttgaagcttcaactccacttccccagtcccgccgccgtttcggcctaaaactcccgcaaatcctcgcccgccgcacccagattctccaggtgggagcagcgcgcgccgccgccgccgccgacgacgaccgaacgcgggccgtaccgtctcctcgccaccgcccgcccgcagcccccgctgccgccgccgtccgggctccgtgatgccggcggctctcgacccaggaaagcggcttctctgtccgcccaagtgcacgcgactgactgccggtcctggtgccttgaaatgcggcagccgttctacggccggcctcccgtccagatgaaggtgcagctggtggaacaggaaggctccaaggggatgggttcttccgggtgctcggagatagtcgagctggcggacgacccgaaaggtgctcgtcctgctccgcatctgagagtgagggtcaagcccgtggggcacgaggatggggcgcggtcgtgctcgctggaggatgaccttgaccagctcataaggtcggtcaacgtgcgcacgtcggcgagggcttctggacagagaagcaccgataggtggcttattgggctcgggaagtcgccggtgtcgggctcagagattgtggagtccgtgagcctgaagcaggcccttaggaagatgtgcatctcccaggcgtcggaaatggcagccatgaagaggctgtcaaaaccgacaggggcgtccaccccttctgattctggggcgatcaagaagctatatggctctgttgcagttcaagccaacgaggagcaaggtgacaagagtaaggtgggcaaagtttacatgctgcctgacaaactggcaggaagttcggtgggtgaggcaagtgaaatcagcaaggggcagagcaagagctcagccaagaagaatttgagatcagcatctcctacggcagtcaaggttcgcaaaaccagaatccaagatgtgatcagtaacaagtcatcagaggcagttgaagatgtttctgtaggagcaagactgccaaggcaaaggaaggggaaatctgtgaaaacatctagcccccgggctgttcctgtcggcggctcac

SEQ ID NO: 167308 - DNA, 1327 bp, Zea mays
  Clone ID: MRT4577_84160C.1
gtcctttgaatcagttccacggttcctcctcctccctctatttccctgtccagactggtggccacagcagggcacgccggcgacgcgcacccgccggcaaccagacggtggcgcgtcaagactccccacccggctgtccggcgaggacctcggctcctcgcccctccgccgctaaagagccgccatccagccgcccagccccaggccccaccgccccagctccacctcggtcccctcgcctcacctcgacccggattccgcccctcgcctcacctcgacctacatctgcctcgtccccatggaggcggcggcgagccgcaagcgcgcgtacagcatcatcgtgcctacctacaacgaacgcctcaacgtcgccctcatcgtctacctcatcttcaagcacctcccggatgtgaactttgagatcattattgtggatgatggtagtccagatggaactcaggacattgtaaaacagctgcagcaagtatatggtgaagattttgttgtaagtagcttaaaaaaatatgttcctggtccacttgaagtttttgtacatatgatgtcagtctgtttattcagtaccatggcttaatgcattgtctttaacctgatatgatgctagttactgcgagctaggccaaggaagctagggcttggtaccgcatatttacatggactaaagcatgcctcaggggaatttgtcattatcatggacgcggacctatctcaccatccaaaatacttgccaagctttattaggaagcaaaaggaaactggagctgacattgtaactggcacacgttatgttaagaatggtggtgtccatggttggaatctcatgcgcaagctgactagcagaggtgcaaatgttcttgcacaaacgttactgcagcctggagcttcagatttaaccggatcatttaggctatataagcgagatgtcctggaagacttaatctcctcatgtgtcagcaagggctacgtgttccagatggagatgattgttagggctacaaggaaaggttatcacattgaagaggttccaataacgtttgtggacagagtatttggaatttcaaaacttggcgggtccgagatagttgaatatttgaaaggccttgtttatcttctgctcacaacatgattgaagatatatagtaggcttctggtttgtgggtacaaccgtgttacattacagagaattttactgatgtgttattaatgcagcttgaattgtaacagtaccaccattacgcatgtttccagtggatggattattgtactcaattcttggttttctctgtacactttatcagtctctaaaaaa

SEQ ID NO: 167309 - DNA, 402 bp, Zea mays
  Clone ID: MRT4577_84161C.1
ccttccaatgacttaatgataagcctgattgcacttgcaaaagaacccatttgggttgtttttgccaccaggttaccgccctaataatgacaaagcacggcaatgtgaacttacataccctaacgcggaacatacccttctctagctataggcacgttctcctagcactggagccatttctgcagatgttgtccgcagaggaaccccctgaagaggccaaccaagcgctcggacttgaagaagggcacctagggggaggcgctcgccaccacgacgaaggagggcgcgccgccgtcgaacacctgcatgaccccctccacgtgcttcccctggagccagacacggcacggcgccgagacgatcatccggaacctgggcgccaatcaccgcaccacggtattg

SEQ ID NO: 167310 - DNA, 368 bp, Zea mays
  Clone ID: MRT4577_84162C.1
gttatgctagatctggagcatgcttaccaaattttagctgaaaatccatgctggccattatatgcgggcattgtagacgctatacgacgaaacagtgtgctagtcttttacgcggatccttcatgtcagggtgcataagtgcttaatgcctcgcatattaaaacaatactaatcactgtgttctatcccatctctactacaccttgtcacttcgagcatgtgaccctataacctttgtatcaaggaccatacccttcatggaattcatttttgttggaccaccttgtaggaggtgccgcttgtataataaacactaatcagccgtttcgcggcagcataaacccatgtgtatttgttttgaacaataa

SEQ ID NO: 167311 - DNA, 677 bp, Zea mays
  unsure (1)..(677): unsure at all n locations
  Clone ID: MRT4577_84163C.1
ccggccaannnnnaannnttnnaaaaaaaaaaaaaaaaaaaaaaaaaaaaaaaaaaaaaaaaaaaaaaaaaaaaaaaaaaaaaaaaaaaaaaaaaaaaaaaaaaaaaaaaaaaaaaaaaaaaaaaaaaaaaaaaaaaaaaaaaaaagggggggcccccgtttttgttgtggggggggcaccggcccttgaagggggggttcccaaattggccttaaggggcccgggtttaagggtttttttagggccccccccccccaaaaaaggtttttcccaggggggaaaaaaccccccctttttggggtttcccccccaaacccgaaaagggcccgatttttgccccttggggtgaatggggaaaaaaaattcccccccctccggggtttttattttggcctttccaagggggggacttttttggccctttttaagggaaaaattaaacccttcccctttccccaaaattggaaacttaaagaaaattttttttcggggattggggttggaaacccccctgccccgaagaagggcatttttcttgggggttttgaaaaaaaccattttttttcggaaaaatttggggggggggccatccgggccccccaaccttgaaatgttcccccccctgaccccccaagtaatattgggggcccggtttttttttttctccccccttccc

SEQ ID NO: 167312 - DNA, 306 bp, Zea mays
  unsure (1)..(306): unsure at all n locations
  Clone ID: MRT4577_84164C.1
tttttatttttttttttttttnnnnntttttttttttttttttttttttttttttggggaaaaaactttttttttggacctttacccctaagaaatataaaagaggggcccccccatgttgtggttggtcattgaactctgcttttttttgggggcaacancggcttccgttcagccaggtgcctgctgccttcccctcccaatttctttcgttctccccccttgccgccttcaactttcctgcttgtttcccgggggtcggctcctcccacttccgcagcttgttggggtgggccctgctccctt

SEQ ID NO: 167313 - DNA, 383 bp, Zea mays
  Clone ID: MRT4577_84165C.1
ttttggactaaaactaatgatggtcattgccgataggcgttatgttatgcaagaagccagcaagggaacactgccacccttaaaagagactcggttataaaattacacaaggatcatcttgcacatccaaaataatgccaccaccgtgccagcagatacattacaatatactgctattaatagaagaagaagttctttaatttggatcccggctggggcgtgcggcgcacgccaagcgagattagccgaacgtggccttgccgttgtacttgacgtccatggggttgacattcttgccgacgctgttgaagatattgccgactccctgcctgccggggttgaccttcttcatgtagacacacgtctttgtgcggaggtactgc

SEQ ID NO: 167314 - DNA, 280 bp, Zea mays
  Clone ID: MRT4577_84166C.1
ctatcaaattgcccccatctgtgttcagaagcatgtcaccctggagaatgcccatcggatgatcacgtgcatgaaaaaggacaacaacccatagtgcatgcagcacatctataaacaatgagtaggcgaatgataaaaatggcctcaacgaataccgtaagcatggccgggatccaaaaaaagtacctaaaagtcagtttggagatggcttacattgccagcggagaaaatcgcaagaagaatcttaaggctccacattcaaagctgcatccccgaaaag

SEQ ID NO: 167315 - DNA, 424 bp, Zea mays
  unsure (1)..(424): unsure at all n locations
  Clone ID: MRT4577_84167C.1
gagggcgccaaacttttggggctttcttaaaacaaaagggacggtttgagctaaaagtttcattcccccaaccttttgacaaccctgaaaaaaattgcctggggtcttgacaacacgtccattcgttttcctcgatgcaatatcgggcaatacaaacaatcccttacacaaaaaggggcttggcagtttattaaatacaaggggcccccctgaacaaggggtaaaccattcaacccctcagcagtgctgcctactaaacttttatccaacataaccaccggtgcctttttttttttcctccttcctttaggctttatcagatctcggacggggagatgacgtcntggatctttaggatcattttcaccacctgaggggccaacaagatctgctgctgcttgccaatcagggtctaaaagacgtt

SEQ ID NO: 167316 - DNA, 387 bp, Zea mays
  Clone ID: MRT4577_84168C.1
aaccgcagagacagcgaatgggagtgtttcaaaccatggcgcccgacctgccctttccaatggagagggtctccgtccactccgcgaggaacggggcggcgtctatcggaggcggaagccccactcgtagggcggccccggagggcgtatgcacatggccgttcctacgaagctcctacgactggtccttcgccacggggatcggaggactgtccatcatcacaggttcgctcgcggcgggtgacgagcagtatgtggcacattacgtactccttcgcgtgtgcgggcaagtatcgggaatcgcgctcatctacaggaaacctgacaacacggggaccccgtgggatgcagaacagggctggaaaggctgacctatggatgaccacg

SEQ ID NO: 167317 - DNA, 349 bp, Zea mays
  Clone ID: MRT4577_84169C.1
actctttccaaaaaggtgcctacggccatcggcatggcgactaccactactaccatcctcctcctcctcatcgtcgcagccacagccgtctcggcggacgacctctccgggtaccacaacgagcacccggcggcccagtccccgctcgagtccatcatcgggctcggccgcgccgacgacgggcggctccgcttcgtctcatccaaggaggagcatcgtccggcgtgggtaacatcggctcgcgtcgcctccggccagactccgagcctcgtaggtggtgcgggaggcgcttcagcagcccggtcgaggaactgctccacgggctcaacacaagaggcgacgctacctg

SEQ ID NO: 167318 - DNA, 479 bp, Zea mays
  Clone ID: MRT4577_8416C.1
acccgccccggcgggcgccgaaaagggccaaaacgggcacactggcgggcggtaccaggggaccccacccgggccccaaaccgggccaaaaaaggggcaaaggggggacctgggggaaacggggaaacccccaaaaacccacaaaacaaaccaaccagaagcaaaaaggggaaaaccgggggggcccaaggagggaaaaaaacgacattaactgccgtgcccccactgcccccttaaaaccggggaaacccggggaaccaacggaataaaaaaaccccccaaaacccgggaaaaggcggggagagtattggggccttttccgccccctcccccaatgacccggagggcccgggggggcgggggggggaagcggtatcaagccactaaaagggggtaaaacggggatccacggaaaccgggggaaaccccggaaaaaacaagggaccaaaagggccccaaaaggccaaaaacccccaaaa

SEQ ID NO: 167319 - DNA, 197 bp, Zea mays
  Clone ID: MRT4577_84170C.1
aaacaaaaacgggtggttaaatggacctctggaggggcttaaatatatagaggggacaccccagggggaggcaggggcttcccagcatcgattaaagtatcaaacccttattggagcatgcatgcatgcatttgccggttttggaaaaaggtttttcctcacatggacggccccacacatgccgggcaaaaacaagt

SEQ ID NO: 167320 - DNA, 189 bp, Zea mays
  Clone ID: MRT4577_84171C.1
cgctcgcccccacagcgaccgagctccaaaacaacgccgccgccagatccgcccgccaccggccgtccccagctcatgccggctgcaccaagccagatccaacccgaccccctcagaccacagctgcctctggtccatcacgcagcccgccaacagcgcgctaacatgagcgccgccgcacaagggtgt

SEQ ID NO: 167321 - DNA, 434 bp, Zea mays
  Clone ID: MRT4577_84172C.1
cggaccggaaggcccgggacgacccacgcgagctcgttcgcgagggcggacgcgagggcgcggggcgggtcgaaacggcgaacgccccacgccaccggcgccaccagcaccagggccccgaagaaggagaaggccccgccgccaacggccaagccggccaagaccggaggcgggaagcagaagaagaagaagcggagcaagggcaagcagaaggagaaggtcaacaacgccgagcggcgcgaccaggccacctacgataagcagcactccgaggtgcccaagaacaagcagaacaccccaaccagcctatccgagcgccacagggagaaaggatccatggcacggagggccaccaaggatccgacggcaaaggggcccacaaggacggcctctgaacaaactagccagcagatacacaccagggcaaccaacac

SEQ ID NO: 167322 - DNA, 1193 bp, Zea mays
  Clone ID: MRT4577_84173C.1
cccacgcgtccgcgaaggctcagtactatctttaggaataaaagatgaactaactgactgtgagttacctggcttatgtgagaatgtttctttcagttcccgacaacgcagaaaaaggaaaacaagttattcaactgaaaaaacacttaaagaagatgcttacactgttgatgagggtgttgcataccgttctcgtcgaaagaggaagaaaacagccacggattcaattgaaaaggcacttgatgaagatgctccagggcttctaaagattcttttggacagaggaataggagttgaagaaatcaaactttacggtgctgaagaagataatgaaatgattgcagattctacagaaagtaactttgaagatcttgaaaacgtgattgcaaatatatttccgaagaggggaaaatgtcatttactgtcagcagctagatacgaaaggggggaaaagtctatttactgcttatcctgtttaatttctcttattgagcagtcacgataccttcgattccgtgactgtcctgtggaatggggatggtgcagggatctgcaatcctttatttttatatttagaagccataataggatagttcttgagcgtcctgaatatggttatgcaacatacttctttgaggtggtccaatcaaggccaatagaatggcagatccgtaggctggttgttgcaatgaagcttagtggctgtggaaggacagctcttattgaaaacaggccgttactggttggtacagatttaacagaaggcgaggcacatgttttggaaggatatggctggctaagaaacactgggcttggcacaatggtcaactaccgtgatcgtgtggtccatgacaggtggactgagaaatctgtttctgattggaggtcgaagatagggaaacttctaatggttggttatgctgagggccaatcaatcacaactcttggcccgaagaaaatactggacatgctggaagctactggggatgctgaatttgaagtgaagttggaggatccttattgagagatccgacgtgtataggtacaatatgtacgtgtagttctgaatgcgtccagataaacttagggtaggagctctctgatgaaataacgtggcacttgtattctaaattctaaatcacaaattcgttcgtgatcattttaatttcacggaagttagcattaaaaaaaaa

SEQ ID NO: 167323 - DNA, 230 bp, Zea mays
  Clone ID: MRT4577_84174C.1
acttgtgtagagtaggcagagggatttggctgagaggtgctgaaactcccatgggggtggaatgggaggataggagcattgaggttcgagaaggatcatgggcatacattggtagtacaagctctggtggttatgctcctggtaacttcagtttgggcaataattggctttcttggagatcaccattattatgataatgggggctttttggtccccttattgggccaaaa

SEQ ID NO: 167324 - DNA, 334 bp, Zea mays
  Clone ID: MRT4577_84175C.1
cgccctctctttttttttttttttttttttggttttttttttttttttttttttattggatttttgttttttgtgtttgttgacaggaaggaggggggacggacactcgctggcccactggctttgtttcggccggagggagcacaatctgtgggggggggtggcacacatgttgttttcggccctcccgcgatggcgccgctttcgagtgccgtccgggtggaggggccccccgccactacgtcctgctgccggcggaccgcgcgtccctcaactgtctgtgcttacaaaggcaagccgtgtgggggagacgtggcggcctgttcgtggggat

SEQ ID NO: 167325 - DNA, 416 bp, Zea mays
  unsure (1)..(416): unsure at all n locations
  Clone ID: MRT4577_84176C.1
gagccagcagcaggcggagccgaccgacccgagccgagcgagcggcggcggagaggccaacaacaacaaacgcacccagggcgagccaggggaagaagagcagcccggggcacgcgaggccgaggggccaggcaggcgcagcgcgcacgcggacccggccccggaacagcgacgccaaggccgacacccagcccaaaaaggggggggggggggcanagcaaacacaaaacggagacacgcacaaagagagccaggagacgcgcggcaccagcagcccgcacagcgcgcggaacccggacaacccgccagccaagcgaaccagcacgagcccaccgacgcgaagaggaagaggagcagcaagaacaggaacaacagcccgcccgaccacagccgcgaaacaagagagcagcaagaac

SEQ ID NO: 167326 - DNA, 191 bp, Zea mays
  Clone ID: MRT4577_84177C.1
cctatgcgtccgccgacgcttgcggtggacagattgcgtcacgccggaatgccgttggactcgctcgattgcgacgacaccatatacctttccacagtgcggactgcgacgaccacggatgactggtaccacagaagcgacctccgccaacagatgaagcactgtcgactagagcacccgctcctggacga

SEQ ID NO: 167327 - DNA, 285 bp, Zea mays
  Clone ID: MRT4577_84178C.1
gcgggtgaaaaaggatgtttggaaaaaaaaaaaaaaaagaaaaaaaaaaaaatcaataaaaaaccatctataaacttaatatcatacaatccaaatacatcactctaccattcaactataaaaaccttacacaatttattcatccatacaaccccaccttcttttgagggggtacaaaatcatttctaccccccctcctcccccccttgtaccaactttttctccaatgggaagcgggggttcccctgcccgtttctttgcggtgtctctatccctcttttcgtt

SEQ ID NO: 167328 - DNA, 592 bp, Zea mays
  Clone ID: MRT4577_84179C.1
agtcgagcgcgtccgatccgagtcctcctcgatcgtctccgacgtccccgactacctcttcagcctcgacagcccgtccgacgaccccagccccggcccctcggcggctcgcgccaagtccgacgccacggagactccgcaccaccacggcgacgacgtgccgccttccgctcgacagataccgcacgtcgcaggaggagcgtcatcgtggcccgccccgccgccgccgtacatggcgcagcctatgtactacttccccgtgccgccaccggtccactatctcgaccagtctgcgcagagtggctacatgcctcgcccgatctaccacattgtcggtggcggaggaagcgaggcgcctggcggagatcttcacgcggccggcggagtctacggcgtctcgcaccacatgcaggggttcccgccgatgatgtacgcgccgccgcgcgcggtcatctacaactacaagtcggaggggatgccatcgctgcctccggaagatggaggggttgatggtgatggatagatattaatgcagctttcgtctagtggaaatatattcgtgaaatgtatatcatactaaatagtatagtat

SEQ ID NO: 167329 - DNA, 537 bp, Zea mays
  Clone ID: MRT4577_8417C.1
atgtgtgatgatgtccaattatgtaatcactgtgtacgtgacaataagaccccgcccctagcctcggtggaaaaaaatattgtgcctattaatgctgaaaataataccgatgccgaagctgacgaggctacgcctgaagctaaaaacctcgggaccacaatgtcagagattgacagaattatagctgatgtggctcttgagaaggaaatagctgaagtgacctttggatatagatttgacctacgacacctaggcggccaagaactctccgaagaagatatctctgagttaaaagaattttccattgttggcggttacaagtccagatccgggctctttggcagcgtcgacgaagagattagcctcctgctgagtaaggttttgaggcttcaacaagaagatgaagataggaaaaatgagcttgttatcaataacttggaaaagagagtgaaagaacttgaaaaattctctgatagaaaaagattcaaagatcaagactgccgaagcagacttggtcgaagcccgtattcggattaa

SEQ ID NO: 167330 - DNA, 1409 bp, Zea mays
  Clone ID: MRT4577_84180C.1
cgcagcgctagggttcgggggttgcgatggcggcggcggcgaggcagcgggggacggtgaagtggttcaacgacaccaagggcttcgggttcatctcccccgaggacggcagcgaggatctcttcgtgcaccagtcgtcgatcaagtcggagggcttccgctcgctcgcggagggcgaggaggtggagttttccgtctcggagggtgacgacggccgcactaaggccgtcgacgtgaccggccccgacggatccttcgtcaggggcggcggaggcggaggaggcggcggcggcggcggctacggctcccgcggcggtggcggatctggcggcggcggtcgcagctacggtggtagctggggcggcggccggagatccgcgcccgacgccgctttcggctccgtcctctccggcaccgccggcgacgccgcccccagcgaccagtggttcgtcgacgcgctcaacgcccccgcgccgcaccccatcgagcgcgtccgatccgagtcctcctcgatcgtctccgacgtccccgactacctcttcagcctcgacagcccgtccgacgaccccagccccggcccctcggcggctcgcgccaagtccgacgccacggagactccgcaccaccacggcgacgacgtgccgccttccgctcgacagataccgcacgtcgcaggaggagcgtcatcgtggcccgccccgccgccgccgtacatggcgcagcctatgtactacttccccgtgccgccaccggtccactatctcgaccagtctgcgcagagtggctacatgcctcgcccgatctaccacattgtcggtggcggaggaagcgaggcgcctggcggagatcttcacgcggccggcggagtctacggcgtctcgcaccacatgcaggggttcccgccgatgatgtacgcgccgccgcgcgcggtcatctacaactacaagtcggaggggatgccatcgctgcctccggaaggtggggcacactcttcctaggtgcatcggctacttcacatctctgaatcctgattattgttgcagatgcctaagctaaggagttttgcgtggtaatttttttatcgattcgtctagagtcttgttcgttgttttgtatagatggaggggttgatggtgatggatagatattaatgcagttttcgtctagtggaaatatattcgtgaaatgtatatcatactaaatagtatagtatttggtgtgattaattaatattctagttaatgtaatgtgggattcatataatctaggtggttctggtcttatagaaaccatttttgggcattttatatttacataaactggatgttgggtgaatgttctaagcagtatgtgctgtgttgaacctcaatcacttatgagtggttactaaatttgaatttgatgtcttc

SEQ ID NO: 167331 - DNA, 276 bp, Zea mays
  Clone ID: MRT4577_84181C.1
acgcactgacattgcctgacttgatatacagattcaagagcttgcagaagcaatagggctaccggtgacacacaatgaccgattgcaaaaattgggcattcgtcccctcaaaggggttcttttgtatggaccctctgtgaccgggaaaaccctcatggctcgatcattcgctgcacagactaatgcatcatttctgaaattgtctggtccacaatttgtccagatgttcattggtgatggagctaaccttgttaaaaattcttttcagctaactat

SEQ ID NO: 167332 - DNA, 321 bp, Zea mays
  unsure (1)..(321): unsure at all n locations
  Clone ID: MRT4577_84182C.1
gcgagcaggnnanccaggggcaaggaanncaagggggngaacgcnggggggaacacaaaagggccanggnngaaaaccngggagagaaanaggggcaacnncnccagaaagacgggagagcnggccagnngaagnngcaaacaacagggagacaggggggggggggcacnncnannagagaacagaaccggcagncagggaagggagngagaaaggaaannncaccgaacccnanncnnngcncgaagaaagaaancagagcagggggccaaggcnggngnaccaccaacnggngngncngcaacangggccncgangaag

SEQ ID NO: 167333 - DNA, 267 bp, Zea mays
  Clone ID: MRT4577_84183C.1
ttcttgttctagatcgcgggcggacgttcgcgccgactcgtgcgcccacacgttcgcctagccgctcgcggccgcgctactacggttaccacgctgaccattcacaacgtctgcccccaccctgtgtggtcaatggtgacccgcagctcgggctttccctccatctgaaccaacaccgcacggttgggccccaacgggctgctcatggtatacttaccgcccagcttatggggccagaccttgtgatcgtgcgcacgagctgataca

SEQ ID NO: 167334 - DNA, 712 bp, Zea mays
  Clone ID: MRT4577_84184C.1
ctcgaggccggccggagtttgctccaggacgtatgcacgtacgtaaatcgatccatcgaatgctaggtagctgacgaccatgacgctcatctcctctgccgccatcaccgccccttccttcaaggccgcgaccgctcgcgcacggggcaccaggaggtccttcaccgtgcgagactctctccgcaaggccactgccaccgccgacgtgggcggtgacgtcacgggcctggttgcctgcgccgccgacatggcccaggaggggatgttgggcgcaggagacggaaggctcgtcttctagaccagacagatcaccgccaaggccggcgaaaccatcaccttcaagaacaacgccaggttcacgcacgacgtcctgttcgacaaagacgacgtgtcgagtggcgaacgacgactccatgatctcgcaggatgagtacctcaacgcgccaagagagagctactccgtcaccctcacagtgacgggcacctacgtgttctactgagagtcgcaccaatgagcaggaatgatcgcaaatatcacagtcaactaaagctagctatccatgccatgcaactcgatctgaatgtactccgtccgtcgatgaatgaagcattcatctctacttggaatgctcagatgtacaacaatctaatgcaacaaatgtagtacatacttgtcacagagaaaaatgttaacgaactactgaaagcgatc

SEQ ID NO: 167335 - DNA, 283 bp, Zea mays
  Clone ID: MRT4577_84185C.1
gggcagcttgagatgccgcttgtagtgttcccgtacgcactaatagaacctcctcttgcaaaaacaaggcggggagacgaaaccaattgtgcgatcacgcagcggtttcacaagacgaacgaaatgcggtcccttacatacagtaattacacacagctgaggcaggagctagcctctgtcgatttagatttactactggtacctaaagcgcagtcaccgggggctcggcctcctcggaattaagtcgagagcggttgcggtcctgccgcttcctattgtactt

SEQ ID NO: 167336 - DNA, 519 bp, Zea mays
  Clone ID: MRT4577_84186C.1
gcccccttcataatcgacacaaccaccaccacaacttcttgtcctgttggtgatacgagtgagctagctagccatggcggacgctaaccctaccctgatgctcctgaccatctttctcctggtgacaagcgccacagcaggttgtattagaattaacctcagccacagcggcatgcggtgcacccctggcgacgcgtgcccggtgatatgcgccaaaatcaagggcatagacggcaagtgcgaggatggagcatgcatgtgcacgatctgcgacccttcgtaccacccaagagcagcaacggattaatctaatccgtcgctaaatccgtttcgtttcatcgcatgcatatgtatcatgcatgttcactgtaatgataagagcacgtgaccctatctttggtgatatggatcacccaccacaaaacggcctattggtttttatcccaatccatatatagattggatgagattaagagagtttaaattcttaacaaatcagaatatctcttaatgtctcct

SEQ ID NO: 167337 - DNA, 403 bp, Zea mays
  Clone ID: MRT4577_84187C.1
aggcgccgccgattgttcatcccgcatcacggctggggaacagtggaagacgccggtttcagatctgccgtcgtcatccatggcgtgggcgctccgtggtctcattggcgcccgtatccgtggtggcctcggtgcgctgccccgcccatctacgccgccctgaaacaatggtgctgatctgtgtcgctcagcccatatgtgccgccctgctatttaatctgcacattatccttcaccacttgccaaaggaatctcatccacgaagtgctactgtgatattgttgcccgtgtttttttttctttctgcctggaatcctctcggacggcatacccacgtaaacgaagtgtaacttgcctcgaagaatatctcaagtgtcaaaggattgattattattctttgttt

SEQ ID NO: 167338 - DNA, 327 bp, Zea mays
  Clone ID: MRT4577_84188C.1
tttgggctgatttatgtgcttgatcccggggaatagacacacacataaaccacctagactccgcggtcgcgtcaacgtacatcggtcaccgtctgttcatgcttcttttctttttactcgttacttaagagtcctacgtaatcgcctaagcctcattattataagagagccacatcctaataccgaggaataatgcatgtctatgcgtccggggcgtcgggaccggccgcagtccttgtacagaatgtcgtcgtacagccaagaaaggcggcggtattaccgactccgaattatgttccagctatatactagtcgcggagttcatat

SEQ ID NO: 167339 - DNA, 353 bp, Zea mays
  Clone ID: MRT4577_84189C.1
ccgacgcgtccggcacttacaactactgttccgactcctacacgctcttcgacttcaggatcgcgctcatgggcttcggcgcgcaccggtgactacagtactggttcaacccgggctccatgggcacgctagactctcttggagcttctaagatgctcaccagctccttaatctcatgctacaactgtggtcctctgatgtatatttatgactttcgccagacctaatatgttatataagtgcaatggcgccgtgcgctagataactactgataagattgattattgcaaatggattgcattgatcgtgcatgaataatcatgcaggacgatctttctataagatccaagctt

SEQ ID NO: 167340 - DNA, 494 bp, Zea mays
  Clone ID: MRT4577_8418C.1
gtcttccctttccgcgatagcttcttctgaccaccaacgcatctcgcccgccgcgcccatggtttcctcctccgcctccctcggggaggaggagggcggcggcggccctcgtttgcgctcgctcctcggcgagaaaaggagaatgcgaggcagaacggcctcgctggagccggcttccacggcccggccaccgcaggaatacaatttgtgcagtctttgtgccgattggacatatggaaagtggcatcctgatgaatcgtacggacctgaaattgatgatgctcctgtttttaccccaactgaggaggaattcaaagatgcaattgggtacattaccagcattcgtcctcaagtagaaaaatatggaatttgtcgtattgttccaccatcttcttggagaccaccatgtcctctaaaggagaagagcttttggaactgtacagagttcaacacccgagttcaacaagttgacaagcttcaaaatcgggaacctg

SEQ ID NO: 167341 - DNA, 230 bp, Zea mays
  Clone ID: MRT4577_84190C.1
aaaaaaaacacaaggggttacttaaataaggcccacacaaaatttttaaaactttggatcggtgaaactccaatggttggggtatgtacagttgggtcacaaaaaagccttattgtgttttttgcaaaaacaacagggccaaaaagtgggccaggttaaacttctaaaaaaatcaaccttccgaaagcagtttaaaaggaaatactttttttgggcccttatttttaaaa

SEQ ID NO: 167342 - DNA, 363 bp, Zea mays
  unsure (1)..(363): unsure at all n locations
  Clone ID: MRT4577_84191C.1
agttgatgttggaccttccaaacatgtngaanannnnnnnnttnaactcanncacnccnccnncgcccgcncgnnncnnntttcnnncnnnnnncccntcnnnnaaanccatcnnccttcattggacctttcctcttgtctggtttaggtgactattacgacgtgagaatgccttgtcatttgattctatgaaagctagcagacaagtgcccttccagcgttcttgctgttctggactccatagttgagccattctagaaaactatgtgtccccaaacccctcggggatgctgtgaaacttgtgggttgatcggaacgaggacttgatccggtgcttttttaggggtatgtcttttttttagc

SEQ ID NO: 167343 - DNA, 255 bp, Zea mays
  Clone ID: MRT4577_84192C.1
acacgcaagggcaatattatatttcctggtttaccataacaacgtaaatacaatgaatgaaataagagggtggggagaagtgatttcttacgtttaaactaatataaacaaagacaggcttggggtaatttacaaaatacagaaaaaggtttttacaaattcaaagattttacccagaccgggccattttggacctgagaggggcgggaaaaattgcccacagggcaaacgggagaaattgcgggcaagggggaa

SEQ ID NO: 167344 - DNA, 141 bp, Zea mays
  Clone ID: MRT4577_84193C.1
acgtagagcttctagctataatcctaggattgattttagctttatgattgttcatgagaggaccatggcaagagggataccacaaccgtgtcgtgtgcaacatgacaaaccattcatagaagataccaatagggacatgct

SEQ ID NO: 167345 - DNA, 1205 bp, Zea mays
  unsure (1)..(1205): unsure at all n locations
  Clone ID: MRT4577_84194C.1
cgggtcgactccacgcgtccgcaccttgcctgtatttcaagaaatagtaaaagggatggaagaaaagggtgatatgtttaattaccttgctggttgctgctgctgcctgtaaagccattccattggtagaggagtgccgaagtcaagtcagggtgcaaagttggatgaatgaactcttgaacctttttgtttgtgccattctttattaatatgggctttatcccatgtaataagacaagtaactcttacatgaaacttatgttctgccatggagtttccaagtaggttagttgctcctggtgtcataatctccaaataaccccatgagaatatctttgtttgccctgtccaccaggtatttcaagtttcaactgaaaaattatacatcctatagtttgcaaatgagcatgaattcgtggcgcatgaaaaaaaaagtatattctgcttgtgtatttcatttaatagactgtgaaccaggtattatcagcctggaaagaacagtcacattagcaacatgtttgtgttctgacaacctgaggcggtgtcgctattacaaatctatcgttggttccgtaatcaccttgtatgctgtttggttgacgatggtccaacaaaaagaaaataattctagtcgtcttcttttgatcttgttcttgtgactagcagaggccgcggcgcaacatggcgaagatcaagccgaaggccttgctcgcgcaaagcaaggtgaagaaggtccccggccaaatcagcgtggccacgatcgtcacctacatgatcctcggcgtcctggtcgtgtcctccgtttacgctgcctacaggtactgctgggcagtcacaggagcagcggaggcagtgggcgcccaggggaactgatcccccttccgactgcgtggctgatctcgctgttgttgtatcatccggttggggtaaaatttttggttgttgctgtctagcaaatggggttcatgggacatggataggttgtatgttgatacggttacaccgtagccgatgatatgtatgttgaatttcttcccttttattatcatttgacgatccgattgcctctgctcctggaactgctttcaaagtctgtgcctgtgacgttagcccagaagtcagaaccgcacaacacaggcatctttttgtttatacttgaacctgaaaggcctttctttccatncagagggggtagagtttgtctg

SEQ ID NO: 167346 - DNA, 263 bp, Zea mays
  Clone ID: MRT4577_84195C.1
accatcttcactgcacatttcaagacggtgcgttaaagcacgctccactacagacttattcggcgtcgtactcgttcctaagagcttggattccacatccgggaacatcctcctcgttataactctcatacgggtacgctcgcttacgatcatgcgagctaccacggtcacacttgcgtactcggatgtaaagctcgatcaacttgaacgggtattcgcatctgccaaccttgtggttcaacctaggcactctgtgatgtatg

SEQ ID NO: 167347 - DNA, 324 bp, Zea mays
  Clone ID: MRT4577_84196C.1
gtccaagattcctgtaaaaaatcaaaaactcaaaaaaacaatgaggcatagcaacttcgtctgtttccccccttgaaaacagcgaaggataaaagcccgcagtccactaaaccagcatgaaaagggttcgatcctataaagctaccatgaagttgcaggaatgaacatttctgtgatctaaaagcctctggaatgaaacaaaaaccctccattatcaaaatgacgaaatgcctgatgcttggcgcacttctcgtaggaaacccagaacacaaactgccacgggccaagccttgcccatgttggcaaaaaacccttccacagtgc

SEQ ID NO: 167348 - DNA, 330 bp, Zea mays
  Clone ID: MRT4577_84197C.1
atggcccatcgcaacggtacggtgttccagccattcgtcgagcctgtgccctccttccttgaccgcaacatactgtacacgcttaaagtcctaggctctacaaccatctggcttggcagagcagcaaagccaaaggatctgcagcaatttcaggcacaagaactgtacacagtcgctcactaccggtaccgtgagcataagacccagggcaggcgaagtggccgcttccatcagcagaagcctacgtgcagactcactcccaatatcatccaacctgcagcccagggcacggaccaactcccactccccgcgcaggcgcactatgcatag

SEQ ID NO: 167349 - DNA, 359 bp, Zea mays
  Clone ID: MRT4577_84198C.1
caataatgtgtgtggtaatttctccttccatattttatagttagagccacttgatgtacccatcttctcgttagatacatcaagcggcacatttctcctattctgtctgtcatgtctcatcttaatctccatgctctcagtcgtcctcattttcttctctttaacagcaggtgtgattggtgcagtctccttctcactactggtattgtcaggcattttccttttcttttctttatcacaaaatgctgtgggcaccttccccttcttcactccactgtaacaactccgcatcttgctgtcagcagcctgcatcttcttctctcggtagggtttgtttagcttttccttattcttctcct

SEQ ID NO: 167350 - DNA, 184 bp, Zea mays
  Clone ID: MRT4577_84199C.1
cccacttttacatacaggggcagttaaagaacgcccgttggttgtcataaaccgtgtcttcccaaaccacccctgacaaagtgtaaacatagagaccttaaagcatccccactgttttcaatatcaaggttgagactgaaaaatgacgaggtctgggcagatgcaggcggtagctttctgaagc

SEQ ID NO: 167351 - DNA, 375 bp, Zea mays
  Clone ID: MRT4577_8419C.1
aatgggatgatagaatggactcatcataaatggatattctaataaaaatatcaatttactatcaaaattaaactttttgagagttaagcttgaaagcagagaatccggtgacacccaagataacaatgtccaagaccaaaaccaagatccagagaagtcttgagcatgaagatgaacagcctggttcaccattgcagcttccagcaccttcacatgggctagttccagtgaagttcaagatcataagaacagcttcaacgagtaaaatgacagcgcatccagcagtgatgataaatttcttggattcaagattcttcatgaattcaacagcagcaagaccaccagcaacagcaatggcagcaacatatccgacaa

SEQ ID NO: 167352 - DNA, 301 bp, Zea mays
  Clone ID: MRT4577_841C.1
attcggctcgagcacatacttcactggttttgtggagacaatggagaactgtgtttgtgtgcatgatgaggatcatgggatcctctggaaacatcaagactggagaactggtttaggtgaagtaatggtcgacaatgaggctcacagtctatattatctttacagttgcaaactatgagtctggatgtccctgtcggatgtagcacgatgggaaaattgttgcagagcgaactgatcgtcttatacgaccgtttatgggacttgatgcctgaggccttacaccagatacgggttatctttt

SEQ ID NO: 167353 - DNA, 369 bp, Zea mays
  Clone ID: MRT4577_84200C.1
cccaattggacccacgcgtcacgctacactggaactccggctaatcttaaataccatggcgacacattcaaatctcctgcgtgtgcggtaacttccacgattagtgatcaacatcattctacacaaaccctggatcaatccctatatggacccctaccatacacccttctacaatatacctgaacggcaacgctaatcagttgctgcaagagaaggcttaaagcttacttcttgactacttgtacaggactccagtacgcattcacatcaaacactctgtatcagatgcaaagcccatcacgcttaccattaagaaccatgactacatatgtgacattaacatactgaaagagtaccttggcaaagata

SEQ ID NO: 167354 - DNA, 275 bp, Zea mays
  Clone ID: MRT4577_84201C.1
gggggagattcaaaccttttattgcatttttagaattataacagggttggtctacattacaaaaagcccccggcttccatgtaaacagaggaggttgtcgcccttttatactttagggcctggaaggcatcccccccccggtagggttgggcccatttttaggggccccaacccaggtaagccagtaccctaggttcccactggagttaagagggccgataaaaacgggacaaccgggtaatcctgtcggggaattcaaacgacatgttgcgggg

SEQ ID NO: 167355 - DNA, 312 bp, Zea mays
  Clone ID: MRT4577_84202C.1
aaaagacacggtcttgtcacgagagaaccctccgatgcagatccgcttcccctccgcccggggggcgagcacgaacggggtggagcgtttcttaccgcatggtcgtcctaatcccacgtaccactagggtcgccgagggcacatcccgcctcgcgcgcctgatcctcgagcacgcgctgcacctactggccagaggcttgcttctattgctgtcgcataccaagggggccgagcggaacaaactcgccctgctatccatggccccagcattcctggctatagcagtggcgggatcaaggtcaaggcggacca

SEQ ID NO: 167356 - DNA, 569 bp, Zea mays
  unsure (1)..(569): unsure at all n locations
  Clone ID: MRT4577_84203C.1
nttgcacccacggtaagtgtgtaaggttaggagccagtgtaccatcacatcagatcagatcgatcgcagcttataggggatggtaggcggcgtgaggaggtgcggcctgggcctggccatggcggtggtcctgctgctcgctgcgctggttgtcgttgcaagcggcggcgcggagacgaggcagaagctgcctgctggcagtggtaacgacgacgaccacgcagccgttctcagccgcctgtccaacgtcattgatccgccggggagctggcctccgcgtgcggatgctgtcgtggcgaagaggtgccggaggcgtcgctgctccgccgccttgctacaccagcatccaggcagccctggaagccgcaccagcaccacaggaagccgaggaggtggaggacaagtacgtcgtgcatgtgcttgctggcgtctacgacgagaccgtcaacataacaagaaggaacgtgatgctgatcggcgatggggtcggtgccaccgtcatcacggtgaacatgagcaatgcaacaggcgttcacatggacatgacggcgacagtgaatgccttgggt

SEQ ID NO: 167357 - DNA, 155 bp, Zea mays
  Clone ID: MRT4577_84204C.1
ggaatggcgtacgcggcggtgcggaagaagcgggtgggccgctacgatgtgagccgtaccatcggccagggcaccttcgccaaggtcaagttcgccgtcgacgccgacaccggcgctcccgtcgccatgaaggtactcgacaaggagaccatctt

SEQ ID NO: 167358 - DNA, 209 bp, Zea mays
  Clone ID: MRT4577_84206C.1
agtgagtcgtattaaacggtcatcgcagcaccgttatggaagcagccacgccggcggcgccatggggacgggggcactgttagctggacgtgccgcgggcggcgcagctggttacggcgcagacaggcttgctcagggggagagcggacgtggtagatatggggactttggacgccgaggccgtcgccgccgtgcatatgggcgtggtc

SEQ ID NO: 167359 - DNA, 693 bp, Zea mays
  Clone ID: MRT4577_84207C.1
atctcacaaccgatctgtcattccacgaaatacctttatatgaagatacggcgacgccggagcacgatccaataccgaacagcacgatgcatcgttgacagtaccgcgatgactacctgctgtgccacatcgaatgccatcacatgcaacctctcgccatcatctgctccacggcacgtctgctgacagtatataaaacttccccgattaaagactgaggatcttactatttatgataaaggagtctccatgagctctggaactacgtgcacctccgtgatcgtatctgctcagatacgaaaacatcgctagcatccacagactgaccatggatatcttcttggatcaacgactggatcgtgaacgcattactatgaagatgactgccatgaccattagtatgctaagctatgatgagccggtgcactcacactgcaatgcaatatggtgctagcatacgcacgattactacatgaccgaacattgcctctctatctgtcataaagctattatggtcgtcggtcactgaattctgcgccttcttcggtgctgcccaaggtggaatcgagcttgctattgaggaattgattagccttcctactgtatctgcctcatttaatgaggataatgatatggaacggataagaatatcaccaccatgaattgccatcatcctcatataatcaaactcaa

SEQ ID NO: 167360 - DNA, 587 bp, Zea mays
  unsure (1)..(587): unsure at all n locations
  Clone ID: MRT4577_84208C.1
gagaagaagctagcggtgcgcgagatcgccatggatcgtcgcgtccgcagtccgaatgtccgatacatatttcaatgaacgatacatatttcaatctctgacgcttgcttttcggcttttcagcagccgaaacagttactacaactgataggtagtcctgatcaactaacgacaccggacttgtctttttattattgacgacgacaagacgaccactggcagttggaacacgggaaggaaaaggacgacgatttcaccagcgccaaacattctttgcggcgtcttttcgttccatggggatgtagaaggcatggatctcaaggccaattctggccatgccatcgaccacacacagctcttctttgtagatgacgcctcgagccatcgtcagctttcctgtacccccgacgatggaccactctcccttgtagacgttaggccccatncacctgaagtgtcgacccttccagtccgcttccttgctggaagatgatgtcgaacgaagcgtgccagctttcgtctgagacctctcctctgctggactggacatgcaggcccttggcatgcgcaacgattntcccgttctg

SEQ ID NO: 167361 - DNA, 382 bp, Zea mays
  Clone ID: MRT4577_84209C.1
ctaatcccccaaattttgaaaaaaccttggaaaccttttttgggcccttggtttttcttaagcccaaggggggaaattaaaaagggtccgttccaacccattccaccccttaatttgggggggggctaaaaggggggttaaagttcttttcttttttttggtccccagggaaagccttaccctcttttttcaccccccttgggggggggggcccaaaaaaatttttacggggtattgtaaacctccgaaactttggagggggggggttttttaaactccactggtgactggggggttttttggtaacggggttaaattttaaatatcccccccggtttaatattcccacaggtttctggggctttcccttgggaaaggggtt

SEQ ID NO: 167362 - DNA, 329 bp, Zea mays
  Clone ID: MRT4577_8420C.1
cattcaaaattagtctcacgaatatatcaaaagattctaatatcatgttgtatggggcaataaatctcaacacaagcaattaattccagttgaaatattagaaaggggatgattttgctcgagaaaaggagcctctacagtgatgcatatggcatgcagtcattgaaaatgtcaacacgaactttctttaacaatgtagatccgacatgcacccgagctgacatttacaaagcagtcctcgtgatgtaggatcagttgcaaataaaacctggagcgataaaatgtcccatagctcctctagtattggtccagccttttgtttttttttt

SEQ ID NO: 167363 - DNA, 221 bp, Zea mays
  Clone ID: MRT4577_84210C.1
ggttttggggttttttttttttttttttttttttttgtgttttttttttttttttttttttttttttttttcctcaccaaccctaaactgctgttactagaaaactgaacacccggaacacaacctccattattcacacccagcctaaatgggtgttgggggcataaagccctatgttacaatcttacccagttcattgattattcgaaaattaaggggat

SEQ ID NO: 167364 - DNA, 1928 bp, Zea mays
  Clone ID: MRT4577_84211C.1
cgggctggagctgatgggcacgcagcagcggcagcagcagtaaggccacttccactttcggcctcctacgaaccgaggcagtttttcagccgccgccgccggccacgaccatgcctttccacgacggtgccgacataaagcccgctcaccttggagtcccgtcggcaagtctactcctcaatcaacaccaagcgttgtcagcagcctccttcatgccgctcccctccttccctgaccatcagcaccagccacatctcccgcccccgccgaagcgccaccactctatgcccgaaaacctgttcctcctccaaaaccaactccagccgccgccgccgccgccgcagggtctacgattcccaccactgcataccaccgcgcccttccagctccaaccatcgctgcaaccaccgcgaggttcgatgaaaacaaccccggcggcgcagcaacatcaacagcttctggatgagcttgcggcggcggcaaaagcggctgaggtcggcaactccatcggcgggcgcgagatattggcgcggctcaatcagcagcttccccctatcgggaagcctttcctccgctccgcttcctacctcaaggaggccctcctcctcgcgctcaccgacggccaccaaggctccactcacctatcctcccctctcgacgtcgccctcaagctcggtgcatacaagtccttctccgacctctcgcctgtgctccagttcgccaatttcacggccactcaggcgctcctcgacgagatcgcctcaacaacttcatcttgtatccacattattgatttcgaccttggtgttggcggccagtgggcttccttcttgcaggagtttgcacaccgccgtggaactgggaacgcccccctgccaatgttgaagctcacagccttcgtctcaagtgcttcccaccatccccttgagctgcatcttactcgggagaacctcacgcaatttgctgtggaccttggcattccatttgagttcactgacatcaatcttgatgcgtttgatccggcagaattcattgctcctagccccaatgaggttgtggctgtttgcatccctgttggttgctctgcacgcacgccaccgctccctatgttgcttcagttggtgaaacagcttgcgcctaagattgctgtggctattgaccatggcagtgaccggggtgacctcccattttcacagcacttcatgaactgcttccagtcttgtatgttccttctcgactcacttgatgctgctggcactaacgcggatgctgccagtaagattgagaggtttctgattcaaccgagagtagaggatgcagtacttggccggcggaaagctgaaaacgcaatggcttggcgggcagtgtttacatcggccgggtttgctccggtaccgctcagcaacctcgcagaagcacaagctgactgcctgttgaagcgcgtgcaggtccgaggattccatgtggagaagtgtggaatgggtctagcactctactggcagagcggcgagctcgtgtctgtctcggcatggcggtgctgatcatacggaccccatccatcaaccatcatgacacctacaccaatttgcaggcatgtttaaccctggtaatgtgcattttgtcttgcaatttcaaacatcgtgaagaaaactattgtatttgttgttacacgcctctgattgctttgctgatgttggagtaccgcctctctaaaatgtaacatgttggtctagggtctcataactctgttcttgctctcttcttggttagccagaggataatttggcaaatctgtggcaatgatgttgttattttactaggtaattcagatgaaaactgacatggactgaaatggttgggtatattaactttcttggcctcatattccaagattgatgtatagatttctaaagcgtggatcatggttt

SEQ ID NO: 167365 - DNA, 1959 bp, Zea mays
  Clone ID: MRT4577_84212C.1
gcgccgtcccttctctgcatcccgccccgtcctcccaaccgctccaccgacagcctgccatccccgcgagccccgcatccctggatcaccgcgcccgcgcctttgatggaaggcgattcctcaatgcgcgtccgtaaaccccgccccgctccgccattcctgcgccgatcgcaggcgagggcgtgcccccaccccagtcgtgcgttacccggcgcccagcccccgcctcccgagcccccagatcacgtcgatccaccattcttgcgccctcacctccctagacctcgccccgtcctcggcgcctgttctccactgaatcgcatctgccaacgaggatttgcgccgccatgtcgtagatcccccaccccttctgaccccccatcttacaacgtggtggacgaggaggacgagccgacggcggtggcggaagtcggtcttgggccgcgatggcgtcgagcgccggcggcgcgtcgtcgtcgttggggaagaacttactataaattcaggatgagcttgcggcagaggcaaaagcggctgaggtcggcaactccatcagcgggcgcgagatattggtgcggctcaatcagcagcttcccccaatctggaagcctttcctccgctccgcttcctacctcaaggaggccctcctcctcgcgctcaccgacggccaccgaggctccactcacctatcctcccctctcgacgtcgccctcaagctcggtgcatacaagtccttctccgacctctcgcctgtgctccagttcgccaatttcacgaccacccaggcgctcctcgatgagatcacctcaacaacttcatcttgtatccacattattgatttcgaccttggtgttggcggccagtggacttccttcttgcaggatcttgcacactgccgtggaactgggaacgccccctgccaatgttgaagctcacagtcttcgtctcaagtgcttcccacaatccccttgagctgcatcttactcgggagaacctcacgcaatttgttgtggaccttggcattccatttgagttcactaacatcaatcttgatgtgtttgatcccacagaactcattgctcctagcccaatgaggttgtggttgtttgcctccctgttggttgctctgcacgcacgccaccgctccctatgttgcttcagttggtgaaacagcttgcgcctaagattgttgtggctattgaccatggcagttaccggggtgacctcccattttcacaacacttcatgaattgcttccagtcttgtatgttccttctcgactcacttgatgctgctggcaccaacgtggatgctgccagtaggattgagaggtttctgatccaaccgagagtagaggatgcagtacttggccgatggaaagctgaaaaagcaatggcttggtgggcagtgtttacatcggccgggtttgctccggtaccgctcaacaacctcgcagaagcacaagctgactgcctgttgaagcgcgtgcaggtctgaggattccatgtggagaagtgtggaatgggtctagcactctactggcagagtagcgagctcgtgtctgtctcggtatggtggtcctgatcatacggactccatccatcaaccatcatgacacctacaccaatttgcaggcatgtttagccctggtaatgtgcattttgtcttgcaatttcaaacatcgcgaagaaaactattgtattggttgttccacgcctctgattgctttgctgatgttggagtactgcataggcctaatgaatttagccagtatggtgtgggaatctctacaatgtaacatgttggtctcttaactctgttcttgctctcttcttggttagccagaggacaatttggcaaatctgtggcaatgatgttgttattttactaggtaattcagatgaaaactgaaatggactgaaatggttgggtatattaactttcttggcttcatattcc

SEQ ID NO: 167366 - DNA, 414 bp, Zea mays
  Clone ID: MRT4577_84213C.1
aacacatatttcaaacttaaacctagggggtgtacatgaccaactatcaaccacaaaaaaggaactgctgcgcgtgcatgggacaggcatcataggcactacggcgcgtgtcaagacctgtcagatgtgctggggcacgtccatctaggggaaacacaagccagtgataaaagtcgtaccctactatcaaacacttgctcacgcaagaggtaaaatacataaccgaatgtttgcccttttgctgttgcaactgcttacatcgacgatgaattccattgtttcctggggaaaactggttgccattgcagtgtgaccacccaatgtctttgtccccccctgctccaacctattcggctacagttggacagaacggccttaacgaacactcaggactatgctgaccagccaaatcaa

SEQ ID NO: 167367 - DNA, 229 bp, Zea mays
  Clone ID: MRT4577_84214C.1
ctaacaaagaaaaattgatgttttattccaagatgtacgaacttttacatttttcaaaggtgtaagggttgcaaattccatttactttggcagaaggcccatcacatccgacaagtcatttgagcttcttaaaaagctttgatgctacaccatttgccgatccctgaccaggaattaaaagtttgccccaggccgtgtttgtgacccctactatcattttcaacttttt

SEQ ID NO: 167368 - DNA, 271 bp, Zea mays
  Clone ID: MRT4577_84215C.1
agaaagcttatttttgtttgtttccacacataatttagtaaacataaaaatgaataaatccattttcttatttgccatctttggcttattaatcgttttggcatctgctgctggtcgtcgtggttacggtggtcgaggtggctatggcggtggtagtctaggaggcggctatggcggcggtcaccgaggtggattcggtggtggctatggaggtggtcatcgtggaggttatggaggtggacgaggcggctatggtggaggccatggtggc

SEQ ID NO: 167369 - DNA, 177 bp, Zea mays
  Clone ID: MRT4577_84216C.1
aaaccagagcgcgtcggggccgggcggcatagaatttatattgaagcgcaaaatagcatcatacattacatatcgacgaaatcggcaaccctatacagcaaaggctacgaatgcaggcgagcacgcacgcaacgcagcgcagggcagaaccagggatgatggataggatctaaaccg

SEQ ID NO: 167370 - DNA, 197 bp, Zea mays
  unsure (1)..(197): unsure at all n locations
  Clone ID: MRT4577_84217C.1
ggcggaccacaggcgtccaccaaaaatatccggccaaccccaacctcctttatcttattcaggcaagaacccataacccagaaggcttgggaatacccgggggggttcccaacccaacggccaattnttcctcttcctccttagccgggcaaccaagggccgcctcctcctttgtaaggcccccaagccttccccac

SEQ ID NO: 167371 - DNA, 334 bp, Zea mays
  Clone ID: MRT4577_84218C.1
aaacgtccggaccgacgcatccacggtccagctacctgaccaacccctgtggtgtttgcgttttctttttttcctactactgatttatgatatttgttaaatttcctttatccatttctttttatttatatatgtaataatgctgtttgactacacacattattatgtgtggtatgaccaataatatatgcttggtcataataaagattcggttttaatggatcaccccaaaaaaaaaagagggaaaaacaaaaaaaaaaagaggggggccccccccattattgaacaaaaagaaaaagaaaagaaggctaagaagcaattttccggcagagag

SEQ ID NO: 167372 - DNA, 357 bp, Zea mays
  Clone ID: MRT4577_84219C.1
gggacctaatcctactttcttacattcattcaaacaaatggactgtacaatagaggttcgatgcatggacaagatcgggcaatatctgatgaacacatgtgatcaatcaccctgaggacaggtgtactggaattgcagcttgcatctataccctcacttcaactatatccccatcctttagctctgtttggggcagctctagttggccattaacctatatcatgctaccttacacgcccattcttatagcagtgtcagcagctggctaccagagcttattctataatcttgccattaggccagaatatcatggtcagctcacgcatgattgcctctgagcagatgcttgcactgaaa

SEQ ID NO: 167373 - DNA, 808 bp, Zea mays
  unsure (1)..(808): unsure at all n locations
  Clone ID: MRT4577_8421C.1
gggtacctcgaggccggccggngaaccagtctccaatctctaccatcgtccattacattcatcatgttcgctgctaggcaagctttcttccaggcccagcgccgctgcttctccgcctcggcccgccagaactcaaaggtcaccgtcctcggtgccgctggtggcattggccagccattgtcgctgctgctgaagctcaaccccagggttagcaagctcgccctctacgatatccgccttgctcccggtgtcgctgccgacattggccacatcaacaccaagagcgaggtcactggacacgatgccaccccctccggcctcgccgaggccctcaagggcgctgagattgttctcatccccgctggtgttccccgcaagcccggcatgacccgtgatgacttgttcaacaccaacgcctccattgtccgtgacctcgccaaggccgccgctgaccacgctcccgatgccaacatccttatcatctccaaccccgtcaactccaccgtccccatcactgccgaggccttcaaggccaagggcgtctacaaccccaagcgcctctttggtgtcacccaccctcgacgttgtccgtgcctcgcgcttcatctcgcagctgaagaacaccgaccccgccaccgagaacatcaccgtcattggaggccactctggtgctaccatcgttcccctcctgtcgcagtccggctacaacctcgagggccagaagctcgacgattacgtcaggcgcgtcccagttcgntgggtgacgaggtcgtccagccaaaggacggtgctggctctgccactctct

SEQ ID NO: 167374 - DNA, 353 bp, Zea mays
  Clone ID: MRT4577_84220C.1
cggactctttggatcgcgagcgtacgcacaaaaatcatttggtttctttgacacagtggtctaattatatacacgatgtataaaggtatactggtagacatagtatgtcaatgaaaggattaaagatttggactcagtttacagaggcatgggtgtgaggatgcacaaaagattctaaatgtgccggttcgagcagctttattagggtctacaacaacatctggctccaagtttgtcacgaaaggtctacaaagtctgaagatcgtaaagtccacaatcccgactgagaagattgttgtctgacctgatggctaccgggttttcatgtgggccggcttcagtatggtcccgat

SEQ ID NO: 167375 - DNA, 806 bp, Zea mays
  Clone ID: MRT4577_84222C.1
ttgggtacccctccgaggggccggccgggacacttcccttgtataccgtgagaatggcatccacgctaccccgcctacccgtcttcgaagccatcaagaaacacgatgcgcagagcaccgctgtagtccactctttgtctgggcgatccttcacgtacggggagcttgtaaacgatgtcgctgctgcaaaggacaagctgcaacggaattgcggtgggcagagcgcagagggccaacggatatcctttctggtggaaaacggatacgactatgtagtgacgctgctgtccatcctggccgcacacgccatcgccgtaccgctatcgccaaccttcccagctcacgagttgcgctacatcatcgaccagagcgagtcgctcatgcttctctcgtctgagaagttccaaagccaagccgacgatgtgctcaaagagggcatggagaccaagcccatcaactacaagcaggagaagataatgatgggcaagaccgacgactatgtcacgttcgaggaacccacaagtgacaagggcggcatgatgctctacacgtctggcacaacaaacagaccgaaaggcgttctgctgcctcaggacgtcttgacggctcagtcgcgatcgctgctggaagcgtggaactacagcaaagaggacgtgctgttacatgtacttcccttgcatcacatccacggcaccgttaacgcgctgcttacgcctctcttcgctggtagcactatcgagttccagtttccctttacgcaaccgctgtctgggatcgcctggcagctcccttcctgccgaatcccg

SEQ ID NO: 167376 - DNA, 230 bp, Zea mays
  Clone ID: MRT4577_84223C.1
tttttgttttttttaagtttctttcttttttttcaaatgcatattctttatttttttttttcgtgagaattggaagaagggtttaacctttcaccgcggggaacggatctgaaactaaggttttttggcaccacaaattgcttggacgcgcaaattgacccaaactagcaacaaatggtttttatttacataggcaagcggcggcctcaacctatcccgaaactgacttt

SEQ ID NO: 167377 - DNA, 310 bp, Zea mays
  Clone ID: MRT4577_84225C.1
attaatcaattatggtaccttatggtattagtcaagtgtaccataaaaattgggccaacacaatttataagttggccagaaatgggtgcgcaaacagcaatcagaaagtttggaacaagtttgacatgatgttcaaattagaagggatccctgttatttggcggaaaacgggggattcgtggaaaaaaaaagggaggtctggccttagctaaccggacacttagatgttgccagtgggaactacgaaggaggagcaacagaggcagatgcctaaacctgaagcgacttgtgatccttgagcttaaccatg

SEQ ID NO: 167378 - DNA, 732 bp, Zea mays
  unsure (1)..(732): unsure at all n locations
  Clone ID: MRT4577_84226C.1
anaatacagtcagatccaagtaagcgagcaccaagtccaagcgagccatgcgcgactagcggcggcgcgccggagggggatcgaagaggaggaggaggaggaggtgggagtcgggccgatcgagcttggcgctccccgtcccctccagacccaggagccgcggctgagggcgcatctcagccatcgattctagggtttcagtcgatcaatcggcctccggatcccgaccatggggccgccgccgctcaagctcaacgtcggccgagatggggacagaatcggcgcgctccacgacgacctcctcctcgggatcctcgagcgcctcgacctgcgcgacgcggtccgcgccggcgcgctctcggcgcggtggcagcacctcccctaccgtctctcgcgcctgcacctcaacgccggccacttccaccgcgccacgctgttcgagggcatggacgcgttcgaggacgcggcgtgcaggctgctgtccgtgtgtccttctccggccgccggcaagagccctcgtgtcatcgagaccctcgccctcaccttctgcgtgtcggcccctcacctgagctccatcggccgcgccgttgaggacgtcgtcagccgcggccacaccaaatgcttccagtttgacatatgctcccgatgcagggacggcactatacgcacaaccccgctgctcccagaagtagggaaacagttcatggccattctccagcggccaccctgtcg

SEQ ID NO: 167379 - DNA, 600 bp, Zea mays
  Clone ID: MRT4577_84227C.1
cgctctagaatactctcgagtttttttttttttttttttggttcaaaagagacggaatgactatttttttatttggttttaagacaacaaaattaataatgagatcaaccatatgacatacggggccccacctctctaagcgacgaggagggccgctgggggcttgcctgccagagttccccgcgctcgccttgggcgatggccgatggtaggccagaggttgcccgcgcggcagcaaggccgaagctcccccacgttcgccccgcgtggcggccagccggagatcacccgcacggcgggggggctgaagctcccccgtgcggccactcaacctcgccgacggccaccttttctcctctttcctccctactgcggttgctgtctcctcatagtctcaagcgaatatttattcgacttgagacgtccgtgaccgtgactcttggtgtctcttgtccaagtccaaacatcaacaacagcaaaaaaaattccatcctatgctgttcctgtaaccaaacactggctaattggctagtcagtactcgcggctggaatagcctcactgctcctcacttagcttctaggttgtcgctcccacatcgg

SEQ ID NO: 167380 - DNA, 173 bp, Zea mays
  Clone ID: MRT4577_84228C.1
cggactatgagactggacgggccatacccaataaccaggtgcttggcataatctagcgggacatttgcctcaagctccggggataggacattggaaagcccatctagaagggttctagggcgacatgaacacaaagcctcgaaatcagtgtatcccagctgatctcgttccgc

SEQ ID NO: 167381 - DNA, 376 bp, Zea mays
  Clone ID: MRT4577_84229C.1
gcgcgcgaacaagccggtcaggttatgtatcagacgtgcaacctattatccatacgaaaccgccccatacagcaaaaccaaggcttgtccgttttaacttctttccggaaccctaacagccaccactcttaaccagaggtaagaaaccactcagctccctagctagcatgcatcgaggacaagccctaaaccgcggtgagacacttttttgcgaccacttctgaacaaggtgccgacactaccgcctgaacgtgtcaccaggtggctcctttgcgcatcaaggtggctaagggccatatagattcgcatactgtgcgttttcgggtcagtctctatgctcctcacctccgatcgatagagacctatggccgaattc

SEQ ID NO: 167382 - DNA, 754 bp, Zea mays
  Clone ID: MRT4577_8422C.1
cgctaaatggatggacacgctacgccgcattcctccccgcagccacttccttcgcccacacgcccgcgcgctcggaatactctgaggatggtgctcgaaccaagggcgatggttcgtctcgctttcgtctcgctgcgtgcgctctctgtcactccccctctctctcctcatcagatccggccatggacaccaaggagcgtctggtcggggtcgagctgctgcacgaggcgcttgacgccgcggcgcgggctgacggcggccgaggtcaccgcgctggtggacacctgcatggatctgacgcgggacgccaacttctgcatcgcccagggcggcctccaggcgctctccgtcgccgccgtcgtcgcgggcgaccacttcaagatccacctcaacgccctcgtccccgccgccgtcgagcgcctcggcgacggcaagcagcccgtccgcgacgccgcgcgccagctcctcatcacgctcatgcaggtgagctcctttcgtcggcgctctcagtggcctgtcgtctctcctgggaaatgcatgtagctggggagctagattaagttgcgagttcgaactaagagatcgagcaggagcagattggggatttgaggcttgtttttttaggtaggtcgggtggagcacgatacattgcatagttgtgctgaagtgaggaatccaaaggtctattcggctgaccattatagattgacagacattacatttaaatggatcaatggtctaacatttttgtagg

SEQ ID NO: 167383 - DNA, 415 bp, Zea mays
  Clone ID: MRT4577_84230C.1
cctgttgtccttttttaagggggccttcccgccccctggcgggcgggaccccaggcccccggccggccccccaagggggggcaaccgggggcccaagcgggccccgagggaaaccgtaacccccccccaaggccacacaaaataccgaacccaaagcccaaaaaaaaaagacccgggggcccaaaaagggaacccccccacccccaagggggggggcccccaaccccctttgccagggggaaaccgggccccccccccgccaaaaaaaaaggcccccccccccgggaaaggagggaggcacactggggcccaggccgcttgctcaataaccgacccccggggcccgggggttcagccccggggagcgcggtcagcccgctccagagaggggatgcggttctcccaagaccggggg

SEQ ID NO: 167384 - DNA, 206 bp, Zea mays
  unsure (1)..(206): unsure at all n locations
  Clone ID: MRT4577_84231C.1
ttttccggccgctcgtggtcggncgggccgggtatacgcaaaaagcttaaagcaaggagatctatgctccaggtagcgtcgcgacagagtgagtgagtagcacgacaacaacaatggcttcccccaaggccgcgaagcccagcggccccgccccgcccccccccccgcccccccccgccccccccccccccccccccccccccccc

SEQ ID NO: 167385 - DNA, 550 bp, Zea mays
  Clone ID: MRT4577_84232C.1
ggggggggggggggtgttttttaattttttttttttttttttttttttttttttttttttttttttttttttgccaaaggggcttccatgggcctcctcttttaataaacagctaaatatatcatatatgggttgggtatataccaacaaagagggggggggggggtttttttgcatctaaaaaacactgggtgggttattttttaacctctccagctacatgaactcaaacttgcacttgcaccatgccactgccagggttttgctgctataaaaccccaagcaaccggggggactgttaacccaaatacaaaaatgaacatcaaaggggcatgaagtcaatctttgggggtggtgggggactcctcctgctccccaaacttttggaactcgggctggaagaccccaaccaactttccgttgtctgggtcccgcttggggatgcttacatgcaaccaacccatcttgaagaactccctgcgcgaaccttggttttttatgggaccctacaattctttttggaaaggatgggcaaaggaaaaacaatttt

SEQ ID NO: 167386 - DNA, 236 bp, Zea mays
  unsure (1)..(236): unsure at all n locations
  Clone ID: MRT4577_84233C.1
cgctcctcctcctcgccacgccgcgcgcccggcagcgggaggcggggcccttcgcgcgcgcgcaatggcgccggacccgtgcgccgacctcgcggtgacgcccaagacgtcggccaaggacgaggcgtcctgctccgtggccccgcccacgccgccaagtacccccgacgaggtccggcggtnggcgcgcaagttcgcggccagcctatccaggagaggaacccgagtctggccgt

SEQ ID NO: 167387 - DNA, 346 bp, Zea mays
  Clone ID: MRT4577_84234C.1
caaaatctaaaaatggaacttcctatttcgggggggccacctacatcatccaaaaaactttattattgaattccaaccaaaaaccaatctaaaagggggcccccccactgttgcgttgttggcaggaggctgctgggttttccaaaacaaggcggccaaagggcaacaattgttggacctgaaagaggggtgcggggttagccccaaaccgctggtaaaaaggcagcaaccgttgctgtgtcaaaaaggaaacccggcttgctgacactagctcgctaaatgggcgtaatacctgctgctgcaaataaacaccggggtccagtgcggccacttggttaaatggaaa

SEQ ID NO: 167388 - DNA, 336 bp, Zea mays
  Clone ID: MRT4577_84235C.1
cttaattgggagacaagaaaatgctgggtacatacgtggatattataggtatcatatttatgacccttgtaataattcaaaagcttaaatgaaacaattcatctacagaatcataatcacaccaacatttacaaacatgacaactagcccaggaagagttacaggaaaagggatctataacaggaccaccataagaagatgcctaaaactctttcaaaatcttgtcgttatttaataaaaaaatgcatcaacaacatttctgtagaaccttattgtttacactcctaaaggaacaccttttcccacaaaaaaaggtttgagacaacctataatccc

SEQ ID NO: 167389 - DNA, 768 bp, Zea mays
  Clone ID: MRT4577_84236C.1
atggcactgctggtcaagagccaccaccaaatgttggtctcctcctccacctcctcgtcgtccccttccgcgtcccagcagcggcagccaccgccaccacctccctcctcctcctgcctcaccgagcagcagccgtcccccgccaagcgcaagaggcgccctcccggcactccggaccccgatgcggaggtggtggcgctgtcgccgcggacgctgctggagtcggacaggtacgtgtgcgagatctgcgggcaggggttccagcgcgagcagaacctgcagatgcaccggcggcgccacaaggtgccgtggcggctcgtgaagcgggcgccgccgcctcctgctgctgctgctggcggcggcggcggcgccgccgacgctaataacagcagcggcacaggaggtggtgcaggcggcggcgcgccccggaagcgcgtgttcgtgtgccccgagccgagctgcctccaccacgaccccgcccacgcgctgggcgacctggtgggcatcaagaagcacttccggcgcaagcacggcgggcggcggcagtgggtgtgcgcccgctgcgccaagggctacgccgtgcagtccgactacaaggcccacctcaagacctgcggcacccgcggccactcctgcgactgcggccgcgtcttctcacgggtggagagcttcatcgagcaccaggacgcgtgcaactccagccggatgcgcggcgaggcggtggtggtggccgtgcccgtgcccgtgccgccgccgtcggcgctcccg

SEQ ID NO: 167390 - DNA, 229 bp, Zea mays
  unsure (1)..(229): unsure at all n locations
  Clone ID: MRT4577_84237C.1
cttcttttttttatcttttttgcaagtttgatagaaattttaccattgtcttctatttggcctctgngcgagaggaacaaaacacctcctttgatttaacatgcgggacaattccctccctaagggggggaaaatcaagccccccccacattggggccttgggggtgccttgggggtcacgggccccaaaaattttttcttgtgtcccttggatgagggggcgggctta

SEQ ID NO: 167391 - DNA, 727 bp, Zea mays
  unsure (1)..(727): unsure at all n locations
  Clone ID: MRT4577_84238C.1
cattgggtacctcggggcgggtcgggtctcaatctcctctccttgtccactggcttgggcgtgcctttgcgtgcgacgggagctaggaatccacggcatcggaaaagtggccgcctgaagaaccgatttctccaagatttttttgtccgtcctatcgcttgcaggatcggattcgccgtctctggccatggttctcgccggcctccgccggcacgtcggccagttcttgaccagcagtaatgagcttatggcggcgtcgctctcggccgtgagctgcgcggacgaggtgcagaaggcggagggggcggggtgccgtgacgacgccgcggcgctgcggctcaagaaggtggccatggcggcgatactggtggccggggtgctcggggtggtcctgccgctcgcggggcggaagcggcgcgcgctgcgcacggacagcgccgcgttcctggcggccaaggcgttcgccgccggggtcatcctggccacggggttcgtccacatgcttcacgacgccgagcacgcgctgtccagcccgtgcctccccgccgcgccgtggcgacggttcccagtccccgggttcgtcgccatggccgctgcgctagccacgctggtgctcgacttccttgccaccaggttctacgaggccaagcatcgcgacgaggccgcgcgcgtcaaggcggccgcggccgctcaggctcgntcccttttatggagggtaattgcgcgc

SEQ ID NO: 167392 - DNA, 335 bp, Zea mays
  Clone ID: MRT4577_84239C.1
ctggcgtcaactcgctgagataccctctgtattctttcttcttcttggactttttatgtgggtcaacttttcgtgggttgactccatgtttttatattacccggtggttttagtgttcatcactgtcgtgatgctctttgttcctcttaaagtattctatcaccacagtcggctttggtgggctgtctcgaactggcggctcttgcttgccggcttataccctgtcgaattccgggatttcttcctaggcgatatgtattgttcccagacatacgctatgggtaatattgaactcttcttttgtctttatgccaattcctggagtaatccaccga

SEQ ID NO: 167393 - DNA, 850 bp, Zea mays
  Clone ID: MRT4577_8423C.1
gaggccggccgagacgaaccgtcgcccacacgctcgcgcgctcggaatactccgaggagggtgctcgaggagggcgacggttcgtctcgctttcgtctcgctgcgtgcgctctctatcactcaccctctctctcctcatcagatccggccacttcctgctcgcctcgccgccggtcccgcgccccggagccctagagctctccccgcggcgggaccgccagagtcctcgggcgcgtggagaaaatggaggcggcgctggaggcggcgcgcgccaaggacaccaaggagcgtctggccggggtcgagcggctgcacgaggtgcttgacgtcgcgacgcgtcgcgggctgacggcggccgaggtcaccgcgctggtggacccctgcatggatctgacgcgggatgccaacttccgcatcgcccagggcggcctccaggcgctctccgtcgccgctgtcgtcgccggcgaccacttcaagatccacctcaactccctcgtctccgccgctgtcgagcgcctcggcgacagcaagcagcccgtccgcaacgccgcgcgccagctcctcatcacgctcatggaggtgagctcctttcgtcggcgctctcagtggcctgtcgtctctcccgggaaatgcatgtagctggggagctagattaagttgcgagttcgaactaagagatcgagcaggagcagattggggatttgaggcttgttttttttaggtaggtcgggtggggcacgatacattgcatagttgtgctgaagtgaggaatccaaggtgtattcggctgaccattatagattgacagacattacatttaaatgggtcaatggtctaacatttttgtaag

SEQ ID NO: 167394 - DNA, 282 bp, Zea mays
  Clone ID: MRT4577_84240C.1
tgtgattcggacggccacgcggccagggacggggggggaagcactcgcagcaccggggcctcagaaagcaacgggaacaacaaacaccaggctggcgtgcgagctgctaacacgagagtcgcagaccgaagtgacgagcccgactagccaatgatgaggctccggaggcaactagaagagccccagatagccaagaccgataataagaaggccgcctccagcgctaccagagccggcagcacaacagcacttgcaaccaagcgcatgcacacgagcaacgga

SEQ ID NO: 167395 - DNA, 733 bp, Zea mays
  Clone ID: MRT4577_84241C.1
cattgggtacctcgaggccggccggggcaagcctccggacgcccgtgagtgaacaccagacgtcttggcccgctccttccctgctgcggctctggcgacctccgcggtgctctcgaccggcgccaaccccacccatgtctgccgggcccgtgctgggtggtgcaagccatggaaggggcttggcctgcggatggggagggtagtgcgcaagccagcgtaccatcacgtgccaggaggcgagcaacatccccgccgaccgcgtcccgcgacatgtagaagcgcaagctgatgaacctcctcctcctgtgcgccatatcgctggccacgcgacggcatggtgcgtccccatacggagacttcttcggccccgccggctccgggaactgcggagacgggacctacgccaaggacaagctgtgcaacgacatcacggaggaggagtggctcaacacgcacggttccaacgaccgaacgctcgcgcaggggatcatagcgtgcgaccccacgtacctgtgggtggagcatgacgagacgctggccacctactgcatcaacgacgagagcacccacctccgctgcatcgagccggggaacggcgccgagaaccagatcgtctgcccctgccatggatcccagtacaacaaccacggcaatgcggtccgcggtacgcgccctctgtcactggacctgagtcacgcctacgtacacgacgggaatggtcctcttcgtcccg

SEQ ID NO: 167396 - DNA, 317 bp, Zea mays
  Clone ID: MRT4577_84242C.1
atttaacatttttacttctctagcgcagtttcatgggggttttttctttttttttgactactactagtagtcttttttttttggcgcaaccgaacaaaaaatcaatcgccaccaaaaaccaacaagcgatatgcccccaaaattacaaaatcagctcgattcaaatattgaataatcattatcatgccagtccaggcccggtgctcaccaatatgtattgtacctcctgcttgcacagagcacaccacatatccactgggcgagcgacggcccgaacatggcctgtagataccatttcatatgtaaaccactgctac

SEQ ID NO: 167397 - DNA, 308 bp, Zea mays
  Clone ID: MRT4577_84243C.1
agctgacctcttacacgcgcagttatgcgagtcctgacggtacctgaaattcgtgcactggatcgcgaaccaggccatactagaggtctttgccggctgtcggcgcgtgcacatcatctacttgagaatctaacaggggatgcagtggccggctcttctgcaggcgctcgcgctgcagcctggctgcccaatgtcgttccggctcacccgcgtcagaccaccgtagcccgacgagaccgacgccttgcagctagtgggctgtaaactggcccagttggagcacaccatgctcgtggacttgcagtacc

SEQ ID NO: 167398 - DNA, 754 bp, Zea mays
  Clone ID: MRT4577_84244C.1
ggatcagggtaaatctgagttgtaacatatttctgatgataacaagaggtgctatgatacaactcagatttaccctgatctcaagacaggacggcgagagagagagggagagggggagggcggccggggcctatcttcctgcttcggacagttgtgagagagaggggaagggatcgagagcgcggcggaggcgatggcgagcggagggaagggactcaacgcgactggggagttcttccggcggagggacgagtggaggaggcaccctatggcggggaaccagctgcgccacgccacacccgggctcggcatcgccatcgtcgccttcgggatctacctcgtcggcgaggccgcctacaaccgcctctaccgcccctccggcgacaaccaccactagatcgccggcaggatccgtgactcggtcaagaagctggagccaactttaccaagcactggtgctgttgatgtttttacagttttgagctcataaggtcagccatgaccatattgtaatctgtgaccaggtagacttgcccactggtccgtccaactattgtcttgggaccctgtgttaatccttgctatatggatctgacagtgctcatgtaattcaagaatcctggactatcttttatgtgcttatttgagtttgcaagtgcgtttccgtaaaaaaaaaaaaaaaaaaaaaaaaaagcaaaaaaaaaaaaacaagaaactcgagactagtgcggcccctagggccccttgagcgcgg

SEQ ID NO: 167399 - DNA, 392 bp, Zea mays
  Clone ID: MRT4577_84245C.1
gttcgatgtgcttgcccgcccggagcctgaatccctgagctgtaagcgcgagcagcccgaagactaccttgatcttggtgcaacaatcgcgaacaagaccggtcaggacctcaacgcggaggacgctgacgtcacggagactgcgaccttatcagaccttgtgctatcgcagtggctggcggatgcttgcgacgacgtgctcatgtgtttccacacggtggtgcagaacagggacattgcgttcgctctcatttttgcagacgtactctggatctacctgacggtgagctgaacgacaggcgcattggagcggatcatcctgcaccgactgggcgaggaccgctatggcatgagagtgctcgctctcgcccctatactcgagctcggagggc

SEQ ID NO: 167400 - DNA, 790 bp, Zea mays
  unsure (1)..(790): unsure at all n locations
  Clone ID: MRT4577_84246C.1
ataaaaaaatgagttcatcacatatatcctagacctttctgtgatctcataaaacgatgcggattaggagatctagggttcttaggtggcgctttgataccattgttagattttctggtgcttaggatcgtttcctaagtccctagaataccaatccgtgtctaaaatacctcgatgatgagtagatctattctactgaggggtataggttaacataccgtcgttgttgttcctagccatcattgcggcggcgtcttgcagcgaagacccgcctcctccttcttgtcgatctccctgctggtgtcgaggagattggttcccgtcgttgatcggcggtggatcagctcctccaatgttgcctgcagggggaatctcagatcccgatgggataacggggatctgagacatagtcacagcgattccagtcactccgagcgcctaggggatcggttcctctcaaagtgtcgattagggtnttgtggtcgagcgattagcgttggctaaacccgtcggcccccttaatctattntatatggcgtcgtgtgaccgggggctgcaaccaacggttaggatagcccccccgatcagggggcgcggttagacggttaggattaaccctaccccggttactgttaaccggctagtgtagaggacacatcctaacaagataagagtacgtacgggccaagctagacacctgttcgcttcgattactacgtgtgcaaggttttcaattcggcaagggaattgaactggacgtgcccagagtccaacggcatttcagctgatc

SEQ ID NO: 167401 - DNA, 799 bp, Zea mays
  Clone ID: MRT4577_84247C.1
ataggaagagttacatttattacaagtcctgatatactcaaagtgcataacttattacaaaagcaggaaggtaggaaccctcaaaatcttatacataagcctaactaatcttcctccagaactggaaacgccctccagcctcgggaacaattatagtactcctcatcaccttattgcagtgaagaggttctagatcttctacccaataaccagttagatagctccatccacttgatgaacaggcactggagcaaacttctcttccacgaccacttcatctttaatttacactccttctgctgggagctctgacagtccaagttctcggtgggtgcatgaaactgcttggggaagacgcacgttggctggtcgacgatgaaactaaacacggcgatgatttgcggtggcgcgactacattctggctactgtgaggtgaaggggctggtggccaaggtcactacacaggaggacgatgtcgagcatctgtcttgaacaaagcaactgggcgacatgagtggctgaagaagttaacacaggtatagaagaagtggtaaggcacagtgagcaggtcatggaagctacgagagcaccacaaggttcagttctaggcttcaactgtcatggcaagcaatgggctatttgtggctttactaggacttatcgcaggggaaaacaaaactaatatactccacctctgacctccccactgcatgaccaccacgcaagggcaaggcacagtggaacagcagtggtggccaaaactcccagggacaacacaccaccaagcagacagacagc

SEQ ID NO: 167402 - DNA, 598 bp, Zea mays
  Clone ID: MRT4577_84248C.1
gcaaacattctttaccttttcaaaactcaagttttacatgttccgaaagagtaatatttattacaagtcctgatatactcaaagtgcataacttattacaaaagcaggaaggtagaaaccctccaaagcttatacataaaccttgctagtcctcctccagaactggaaacgctctccagcctcacggacacatagagtactcctcatcaccttattgcaatgaagaggttctagatcttctacccaataaccagttagatggctccatccacttgatgaacatgcactggagcaaactcctcttccacgaccacttcatctttaatttacactccttctgctgggagctctgagatgattacggaacaagcttcatacaggccagcaactccctagaatgttctggctatggtgtggtgaacttggtggctgtggtcatcacaaacacaggaagacagcgcacacagctctggacagtgccaacttggtggcagtgggagaggagctttggcttgcaatacacatgaatcccccacaccattgcaagctttggctagaacactagggcccccgcgtacctgcccgggcggccgctcga

SEQ ID NO: 167403 - DNA, 621 bp, Zea mays
  Clone ID: MRT4577_84249C.1
cattgggaccctcgaggccggccgggactctgagaaccgcattagacacgattcttcccactcacctatctccgatactcaaagctcttccgccatatcatcccactttcgcccattctatctgcaccaagcaccgctcatcgaccgtcatcacagaatgatgactacatcgataccccatgccacatggtatccttgttgctgatgagtcaactgccaccgttggcaactgccttgcctccatcattgtctacaacgtgaaggacaaacggccggctctccgagcactcctggactgctgcactgttgccctccattacatcatgagagtgatcctcttaaaggagaccctctagctgaataccaaggacgtgaagcctctggcctatgtcatcagagaagtaggacctatccctggctcctacgtccacaacggctccactgaggctggtaggacccatacagaaaccaccatccgaggccacactgacctcggaaagagatggtctacctactacgatgaccgcagcccgctttttccagagaattgctgtgctctacattgctccctacgacttcgacactgcttgccatagacctgaatgctcaggttgtgtctct

SEQ ID NO: 167404 - DNA, 770 bp, Zea mays
  unsure (1)..(770): unsure at all n locations
  Clone ID: MRT4577_8424C.1
ccggccgggatctgcaacctctcatccggcattgagtgaattgtcacaggcagtgtatctttcattttaagcgcttatatacagacatatacccataatggcttctcaattccctaccaggaagtgcggtgtcctcggtgccactggctctgtcggccagcgcttcatccttcttctcgctcagcacccttacctcaccctccacgccattggcgcctcatctcgatctgctggcaagaagtacaaggatgctgttcgatggaagcaagcctctcccatgggcgaaatcgccgacatggttgtcagagagtgcaaggccgaggagttccaggactgcgatgttgtattcagtggtcttgattcggacgtcgctggcgatattgagatggctttcatcaaggccgacatccccgtcttctccaacgcaaagaactaccgccgcgaccctctagtacctctcgtcgtccctaccgtcaacctccctcatctcgacctcatcccccaccagcgttccgtccacaagcttaacaagggcttcctcgtttgcaactccaactgcgccgtcattggtcttgtcggacccttcgccgccctccaggctgcctttggacccatctctaccgtttccatcgtcactctccaggccgtctccggtgccggttaccctggtgtttcagcatggatgtgatcgacaacatcgtccctttcatctcaggtgaagaggataaactcgagacagaagcccgnncagatctcggncgtctcgatga

SEQ ID NO: 167405 - DNA, 457 bp, Zea mays
  unsure (1)..(457): unsure at all n locations
  Clone ID: MRT4577_84250C.1
gcgtccgccttttctttcaacnacccatgcgcgtggcaggccagaccgccgnagagagagggaggtgaccgggatagagaaagaaagtagaaacccaaacccccggcgaggacgccaccgtggcgacggcggatgcggcggggctggtccccgcggacctggagagtcgggtgatggaggcggggaaggcgtcggaggcgcgccgcgacccgccgctgctgcgggcggtggagctgtcccgcgtcgtcgccgaagagggcgcgggcgccgagctggccgggatccttgtcttcaacctgtgttgtgggcttttgttgtggttgttttttttattttttgtgtggtgggcttttttttttggtgttttttttttttttgtttttttttttttttgtttttttgtgttgttttttttttttttttgtttttttntttgtgttttttttgtttatttttt

SEQ ID NO: 167406 - DNA, 145 bp, Zea mays
  Clone ID: MRT4577_84252C.1
cacagcccacagcaacttttttcacaggggcccaaccccaaacagaccctaactcttattctctacaaactatggaaaaattacagcattcctctgcagctcaagacctcggatctcagaggcacaactcgctcctcgactactc

SEQ ID NO: 167407 - DNA, 692 bp, Zea mays
  Clone ID: MRT4577_84253C.1
aattcggcacgaggttcaggatggattacggcgagtggacaccggacaggaggagtgagtacaacaagtgggatgccatctctcgctgcacgactcaggtcttccccgggggctggacggcggtcctagtctcgctcgacaacgttggtgtctggaatctgcgcgccgaaaggctggatgactggtacagagggcaggaggtctatgtgaaggttgccgatccactgggctacaacatcaccgagatggtcgtcccggacaatgccctctactgtggtctactgaaggagaggcaaaagccacaggttcatgagtcgaacagcaagtcgtcggcgcaaggcgatgctggatggagcaaccgactcctcgcaaccatgatcctggtcgtcgcagctgtgatcttcagttgatcctctctctttttttttctccaaagttttttggtagatttttgcctagaggaaatagaacattgaaacgtctagcctacaagttcagcatagggtagttcgtggagataggatctggccgagctgtttgatagtgtagggcagcttggaatgatgtctgtggagaaggcaagaaacgtgatactggaatgagatttatcagttaaaaaaaaaaaaagaaagggcgtccgacaacaagtgagctcgtcgagccggaaattgattccggcccgggaccagcag

SEQ ID NO: 167408 - DNA, 730 bp, Zea mays
  Clone ID: MRT4577_84254C.1
taggggcctttttttttttttttttatagtaagttgggtgatcgttattagacacaaggtaaaaaaataccctgtgcagcctctggtcacatatacctatttccaccacacaaaactggacctttttagccaatgagcacaaaaggaacaaaatcacagtagtagaatggagatatcctcaccccacgctaaggccagtggggtaggtctcggatgtcgaacacatcatgactggaagccattgctaatgctccttgctaggctgctagctgagcatgtcgaacccttgtaggaataaaatggaggagcaggaacgcggctcactttgcttctgctcgatgtggagttaggacttgtcgcagtactcggaggcggtgtacagctgtgggcgcaggttcttgagctcctgaagcagaaatccaaccggatccctggagggccttgatgaagctcttgttgcgttccatgaatgcctcgtcgacggtggtggggttggccttgtcccctacgacccgccctaggcgccacgcagtggcggctgcattggtcgtctctagctccggcgtccggcgtccggcgaggggttgacagaacgggcaccgacaagcggaggggactctcgagcttcggcagcgggtgtgcggtgtgaggaggaaagagcacgcgccggcagtgggagagggaagagtcgtgggcggagtggggtggaagcctccgcagcccggccggc

SEQ ID NO: 167409 - DNA, 669 bp, Zea mays
  unsure (1)..(669): unsure at all n locations
  Clone ID: MRT4577_84255C.1
ttgtnccggataagctgacactcgcatgaaacgtaacacttgttcatttttgggaacctttgttgaaatgatttgccaacatgttgaaaggtccgtgtttcaaagaagaaagtaattgaaggattggggtagattttgagtgtttgattgcatatcttattggtttttcatagttgtcaacttaaagccatatcctaatgacttataagtaattatgatatttttggacttctatactacttctatactttaaaataagacataaaaacaacattagaaaaatattgcaccttcgtgagaaaatgttctacttacaaactaaatgtgcttaccaagaaaagtatagaatatgttttagttctatgaataaaatcttttagatccactatgaaaaacgttgtagcctcatgagaaaaaaaacctagtttcctaaccaaatgttccatatttaggagaaatttaatctagcacatcgaagagatttgttctaatatcaccagaaaaatgctaccgatttggtaaaaaaatgcttatgacatttatgtgaaataaaaaaagattattaaacatgaaccangacataaagttaaaaagaccaataccaaaatttaccctacggtaatgattaaaaatgaaaaaattcactactgggatctgggaaaaatagag

SEQ ID NO: 167410 - DNA, 258 bp, Zea mays
  Clone ID: MRT4577_84256C.1
aatagttgttctatagatgtctttgaagaaagcttgcttggattgcgatatgtgcaaaaggacctagggttcaccagctgtccttcctattaaaacaaataatgatattagagtccaaatcaagccagttctttgagcttgactacgctttgcatgtcaagacattgactttctggcagttatttgcagttgcaccagtgatgaccttattactgttttcaaaccacagtaacctgtgttatgtttctcacagattac

SEQ ID NO: 167411 - DNA, 195 bp, Zea mays
  Clone ID: MRT4577_84257C.1
cggacgcgtggcgcgtgtaatttgctccttcttcttcaaatataattccgcctcaattgtatgtatgtatgtattaagtctgtctgcctgtaaaaactaaagctttttgtttctttacgcacaccgcgcgcgcctgtagcaagcaattcacagacgacgatgaacgaaaggaagctccttgatttggcactgagt

SEQ ID NO: 167412 - DNA, 720 bp, Zea mays
  unsure (1)..(720): unsure at all n locations
  Clone ID: MRT4577_84258C.1
taccaccagtactggtctgtctcgtctcctcgccttcctctcttcctcctgtgctcctccgcggcgctgctgcttactcgccacgccagagctgagcgaaccccacccaatctaatcccccacgtcttagtttccttctcctagccgcaccctgtctctcgccgtaggatggaagaagagccgagtctgctcgctgcccacgctgggagttagggccggaggcctggccgatcggcgggggcggagggagggtaatgagggctccgcaggagcgtagcatgagggatctctacgatcgcacgcggcacaaagatatggcagctccagagtggaagggtgcggtggaggatgcgcggagggatgggagcaacgggcactggcctctaagatggaggacaagactgtggtaaggaaaagattgatatcaagcaacaacanctcgtgtcaaggcagagtctggcacctgtaatgtctgttatgctccctgctcctcttgtttacacccacgtagtcgatttgaggattcaaatgttgaatgtgcatcctctcagacatgctccacaaggtccggaagtaaagaacaatgtacttgttcatagggagaaagggctctgtagtaaaggagataacgatgatgaggtttagtgcaacctcagatcatgctttgtactctgtaattggtagaaacanacttggtgcaacatcatccattgccgatga

SEQ ID NO: 167413 - DNA, 359 bp, Zea mays
  Clone ID: MRT4577_84259C.1
gtcagacgaggccaggcgcggtcccgcgggcgccgtgcaggtggtgcttcggtactggtatcaatgaccctggtcctgctgggctgcagctcctgggactcagcacctggtggtgctgtctgggttggtgctgatttgaaaaacacggcgaaggggattatttttacttgttggggcaagggcggttgatctgaactgcccctgtctagcaaattttcttcttggagccctgggcacatgattctgtacacgaatactccgttagaatttcgagttcacgggtcttgactcttttacccatttgctggcgcaaactcagggatctatcacggctaattgtaactactatagtaagagtg

SEQ ID NO: 167414 - DNA, 1995 bp, Zea mays
  Clone ID: MRT4577_8425C.1
cggaatactccgaggagggtgctcgaggcgaaccaagggcgatggttcatctcgctttcgtctcgctgcgtgcgctctctgtcactccccctctctctcctcatcagatccggccacttcctgctcgcctcgccaccggtcccgcgccccggaaccctagagctctccccgcggcagggccgccggagtccccgggcgcgtggagaaaatggaggcggcgctagaggcggcgtgtcaaggacaccaaggagcgtctggccggggtcaagcggctgcacgaggcgcttgacgccgcggcgcggcgcgcggcggccgaggtcaccacgctggtggacacctgcatggatctgacgcgggatgccaacttccgcatcgcccagggcggcctccaggcgctctccgtcgccgccgtcgtcgccgacgaccacttcaagatccacctcaacgccctcgtccccgccgccgtcgagcgcctcgacgacggcaagcaacccgtccgcgacgccgcgcgacagctcctcatcacgctcatggaggtttcttcaccaacaatcatagttgaaagagctggtagttatgcatggactcataagatttggagggtgagggacgagtttgtacgtacggtggcatctgcagttgggctatttgcttctacggagatttccttgcaacgagttttgctttcacctgtcctgcaactaatgaatgattcgaaccaaagtgttcgagatgctgctatctcttgtattgaggttagttgattccatattcgatactgtatagacctgtttcagccgacatttttcttttttcccttacacccatgatgactggtatgatctctatttctattgatcttgttcaatttcccattagttccatcccacatttacaagctggagagactgaatcattttgtatgacaacattcattgtagctccaagcccctttgcttctagttgaattgttttagtcccttgtgctcagattcatcttttctttcatctaaactattcagtgttcacagttattggctgggacacacacctgctatctaggcagcataaagtttttctagtaagccttcatttgtttttcactacaggagatgtacaagcacatgggatcacaatttcatgaagagttgcagcgccataatctgccttcatatatgctaaaagaaataaattcaaggttggataaaatagaaccaaaggttcgatcatctgatacagcaatgcagtataaggctgtagagtctagaggcaatgctgggatgtagcctgttggtagtgggacaccttcaggttctgttattgatctggaaaatgaggaatcaggttcaaaaggtaaaaggccattaggatgggactccatgaaagcatcaaggaagaaggcaatgtccagttcctcccagtctactgactaccttttaagaattcatgacattcaaatagcaagactgaagcaaagtgaagaaaaatcaggtaagaaacaacagaatattgagttcttgaaggaagttgaactgaaaaagttggaggtccaaaccaaggaactagaaatgcagcaaaccaaaatgatgattgaagaaaggatccgaaaggacgcagagctgaaggaactcctagctatggaatgttttaccagaggatgtgagacctgtatacatcgcgaggagaaaaggtttaatcgagtttttcatcaacaatcctgtctgaagagtactattgtatttcataatttgttgcgaacctagtgtcggcgtaacgtggtccggtgtgttcggacatatgtcatttcgagatttttgaacatttgcttaattgtttgagaacagtagcttggtttgtgaactcgtgtcgtgtactagaagattgcgaaatttttattattaaaaaacatataattccaactatttatgactaacgtatttatattaattacgaagtttgctaattaattgtatactaagtgacggtcgcgcactg

SEQ ID NO: 167415 - DNA, 695 bp, Zea mays
  unsure (1)..(695): unsure at all n locations
  Clone ID: MRT4577_84260C.1
cattgggaccctcgaggccggccgggcacttattactcttccctctttttttcctcccgctttcgacactcctcgtctcctccgctcacactccacatgccgacggtggtggtggcggcagcggcggcggagtcgtaggcgcccgagtaagcggtcttgtagtgacgccggaaccgggggcgtgcggggggacacgatggcggcgccggcttccgcggcggccgggcgcgccgggggcatgtcgtcggacaacgtcaagggcctggtcctcgcggtgtcgtcgagcgccttcatcggggccagcttcatcgtcaagaagatggggctcaggagggccgccgattccggcgtccgcgcggtgattgtaggtgaaattgctaattttgctgcttatgcattcgctccagctattcttgtcactcctcttggtgcactaagtataatcataagcgctgcactcgcacatgccattctacaggagaaactgcacacatttggtatactcggttgtgttctctgtgttgtcggatccatcacaattgtgctccatgctccacaagagcgtgacattgattctgtaaaggaaagttgggatcttgccactgaaccagctttcccttgctatgcggctatagtagntgcgtcagccttagtgcttatatattttgttgtccctcatcatggacaaacaaaca

SEQ ID NO: 167416 - DNA, 1883 bp, Zea mays
  Clone ID: MRT4577_84261C.1
catcggctcctctgcttctacccgcacccacgcttccgaccaatcctcgtctcctccgctcacactccacatgccgacggtggtggtggcggcagcggcggcggagacgtaggcgcccgattaagcggtcttgtagtgacgccggaaccgggggcgtgcggggggacacgatggcggcgccggcttccgcggcggccgggcgcgccgggggcatgtcgtcggacaacgtcaagggcctggtcctcgcggtgtcgtcgagcgccttcatcggggccagcttcatcgtcaagaagatggggctcaggagggccgccgattccggcgtccgcgcgggatatggagggttttcttacttagtggagcctctttggtggataggcatggtttctatgattgtaggtgaaattgctaattttgctgcttatgcattcgctccagctattcttgtcactcctcttggtgcactaagtataatcataagcgctgcactcgcacatgccattctacaggagaaactgcacacatttggtatactcggttgtgttctctgtgttgtcggatccatcacaattgtgctccatgctccacaagagcgtgacattgattctgtaaaggaagtttgggatcttgcaactgaaccagctttcctttgctatgcggctatagtagttgcatcagccttagtgcttatatattttgttgtccctcatcatggacaaacaaacataatggtgtacattggagtatgttctcttctgggatcactcacggttatgagtgtaagagctcttggaattgccttgaagctaacattgtcaggaacaaaccaattattctatcctcagacttgggcctttgcactgattgtagctacctgtgtgagcacccagattaactatctaaataaggcattggatacatttaatacagcagtagtctcaccaatatattatgtgatgtttacatcactaacaattatagccagtgtgataatgttcaaggattgggaccatcaaaatccaacacaaattgttacagagatgtgtggcttcatgactatcctatctgggacgtttcttcttcacaagacaaaagatatgactgatagtcctggacaatctttgttgacacgacggccaaagcatgctagtcagaatgcgtttgcaattgaagtgatgccactaaaatgtcaagattatatagatgacgagaccttgacgttatcacttcccaaggttgaaaatggttacctaaaggaagagtatcttcttagatacaaggactcgagtattgtctgatagataattcttcgccaacatttgacgggaagctcttgagaatcattctgcttccagacatgattgattgatgtagaactggagttggcagttttacctcaacctggccttggatagattgatattacagattgtaagttgtcaactgtggtttgtctatatctggatttggatgatgttttgagggaaggagcatgcaagaaggatgccacattgaggccaattaagtgctagtcatctaggaattgtggttccggaaaagaatttgaagtgtacttagatacaattgtgtcaccaactatactcttttccccctcttttctctctcattttaggacgccatgtgatagctgcaatgtgatcttatctgattcataggacgacgccatatagaaatgtcaagcatcgttttttcctgtaattacatcaaattggccagttgtcattgtgtatacttagtctatgtaaagtatatcaattcatactttatgacaagggacccttaggataaaaaaaaaaaaaaagggcaaacgccaccacggtggactcttgatcattctaattcatatttctcacattgctaat

SEQ ID NO: 167417 - DNA, 330 bp, Zea mays
  unsure (1)..(330): unsure at all n locations
  Clone ID: MRT4577_84262C.1
aatccccgggccgacccactcgggcggatgcgtatcattctcataagtttcaagctttacgccaaacgaccaccacctcagcncccgttcaaatttaaaaagcccctagcccctccaaaaaaaccaaaacaataaacaccactaaaacacaaaatcactctcaaacatcaacctctaaccccataacccctccaaaccaccactctcaccacctacaaaacctccacctctccacaaaccatcttctacaaacactcatacaaccaacctccattctcctttactcaccaaccaaaccaacaactaccacatcactctatccacacaaca

SEQ ID NO: 167418 - DNA, 332 bp, Zea mays
  Clone ID: MRT4577_84263C.1
tttttatcgtatcaccaaacagatacaaaactttttttttttttttttttttttttttttttttttttttttttttttttttttttttttttttttttttttttttttttttttttttttttttttttttttttcaatttggtgggggggtctcatcatccttctaccttcaacaatcattatttggccgcctcttttaaacttcttattagatgtaattcaataataatagccctttgaatgatatatacccgccaaccaaaaataaaaatttcatttccctaaataccatataaaaaaaaagcccatttttcaaaatattcttatttttt

SEQ ID NO: 167419 - DNA, 344 bp, Zea mays
  Clone ID: MRT4577_84264C.1
gactccaagaaccaccgaatgggctccgtaggccaaaccgccaccggccaccgccgccgcgtgctcttcttctcgctcccgtaccagggccacatcaaccccatgttccagctcgccggcctgctccacgcgcgcggcttcgccgtcaccgtcttccacacccacttcaacgcgccggacgcgtcccagcacccggcctacgacttcgtccccgtccagttcgacgggacgccggcggacagcgcggacacggtgcgggtgaccgtggagcacgtcctcgccgtgaaccgcgcgtgcgaggccccgttccgggagcgcctggccgcgctgctgggaggaggagg

SEQ ID NO: 167420 - DNA, 644 bp, Zea mays
  Clone ID: MRT4577_84265C.1
aggccggccgggccgggaataaccctccatgatcctaattccaaggcgtaatcgacggcactggcaaatgccctcccatcttttccctcctcctgttcctgttcctgtgtctgtatgactgtatataacaaagcgaggcttctcattgttgcccttgtgttgtgccagcctaccaccccactcactgccagggagagagaggaagaacaagagcaccgcgagcagctcggtctgggcggctgggctgcggcatcgccgtcgcggtcgatctgccgtcttgcaagcatcccgatggaggtggagtcggccaagtgcgagtgctgcggcctgcgcgaggactgcacccgggagtacatcgccgccgtcaaggcgggcttcggcggccgctggctctgcgggctgtgcacggaggccgtgcgcgacgaggtggccgccaagaagcggggcgacctggagggcgccctcagggaccacatgtccttctgcgccaagttcggcaagaagggccccgcgttccgcgttgccgacggcatgcgccagatgctgcgcaggcgatccagcgacatctgcgcatccgccgccgccgccgatgcctcctcctccgcagccgcctcatgacgatgattgccatatagacgtgcgat

SEQ ID NO: 167421 - DNA, 455 bp, Zea mays
  Clone ID: MRT4577_84266C.1
cttggaacctttgggctgatttatgtgcttggctcggcatattcttagtcctaagccggaggtggatgatacgttgacttgctgtgatactaagatggcgtctgaggctaatagttatgggtatgttagtgcggtgcccgcgaatattaaacctgcaggacgcgggtatgggattaagacgaataaggtgcctatgtctgagaagtttacggattcgaaaaagggtgcgaattatgctgttgctccggtgctgatgacgggaacgacggatagcggtgtccattcggagtattgctcggttggtgctgatagggcgtagactaagggttctaatgtgggtatgtcggattcgatgaacaatggtcggggttatactgctggttctgctcgtcagtagaagtagactcatattgaccagggtacgggtaaggctatacggaagttagctgcgaatg

SEQ ID NO: 167422 - DNA, 143 bp, Zea mays
  Clone ID: MRT4577_84267C.1
ggccaaaccaatggctttttaaactagcagtttttttattcacgtcaacatacattatttcaacccgtcgcccgtaaatcacgtaatggaacgggtgcggcccgggggcccaaacctaattcaatccagggccccaatttttt

SEQ ID NO: 167423 - DNA, 582 bp, Zea mays
  Clone ID: MRT4577_84268C.1
tgaggagtgcttcaacgcggtgctcaacatgtcggactgcctgacgtacgtgacggccgggagcacgacgcggcagccggacaagccctgctgcccggagttcgccgggctgctcgagtcccacccggtctgcctctgccagctgctggccggcggcgccgagtcctacggcgtcagcgtcgactacaagcgcgcgctcgcgctcccgggtatctgccgcctcaccgcgccgcccgtctccgcctgcgcagttttcggggtccctatccccgcgggattggtgcctactgccgcgcccgtgtcaggcctctctccatcttctggcggcccagaagtgcctgccaacacgccggccggctcagccaaatcctcaagccacgtgccgggacgcgtcaacgccggcggcctcatcatcgccctcgccgtgacggccgccgccgggattatgttctagaccatctctcagagtttgttgccagtcgtcgtcttaatcagacttgtgattccttcctcattattcttacaacacatatatgtttgtgcattatgaatttattattatgatacttattaccacataca

SEQ ID NO: 167424 - DNA, 1141 bp, Zea mays
  Clone ID: MRT4577_84269C.1
ctactactcgctgatgcagagcaagggcgtgatcccgctggacaacgcgctgttccggccgctgccgccgtcgatggagatggtggacccgaacacgctgctccggtacacgaacgtgttcgacgcgatgctggacgcggtgcgagtggccgtgcggaacctgaacgcgacgggcggcgcgggcgtgccgatcctggtgacggagacggggtggccgtcgtacggggaccggcgcgcggagccgtacgcgggcagggacaacgcggacgcgtacaactcgaacctgatcaagcacgtgctggaggagaaggccggcacgcccatggcgcccggcgccggcgcgcagtccagcgcctacatctacgagctcttcaacgaggaactccgggcgggccccgtgtcggaggcgaactggggcctgttctacgggaacggcaccccggtgtacctcctgcacgtgtccggtgcggacgggttcctggggaacgacacgacggaccggaccttctgcgtggccgccgacgacgcggaccagaaggcggtgcaagcggccatggactgggcgtgcgggcccgggcgcgccgactgcacggcgatacagcccgggcaggcgtgctaccagcccgacgacgtgcgcagccacgcgtcgttcgcgttcgacgcctactaccagtcccagggccgcgccgccggctcgtgctacttccagggcgccggcatggtcaccaccgtggatccgagtcatgacagctgtttatttcctggaagtaagctgctgaacaacgccactggatccggcaacacgaacacatcttcgacgcctacaagtgacgctgagggatctgcgatatggagactaagaactgggagggacaaagggctgttgctcttccttcggttggtacttagcattgcggtggctatcgtggtggattcgaacttttggacatgacaagaggttgctagctgtataacaaactaaagccagaaattttgggtggtatgttagaggaggaaggaaggaggtgggcgggggattgggttatgcttagtgattctttattgttagataagcattaataaattgctcatttttcttcatctgatgaaatgtgtctataatctgttgaaatgtcccgat

SEQ ID NO: 167425 - DNA, 942 bp, Zea mays
  unsure (1)..(942): unsure at all n locations
  Clone ID: MRT4577_8426C.1
cattgggtacctcgagggccggcgggccgggactggcctcctcctcctcctcctctcccttccctattctttctctctcacgctaaatggatgggcacgctacgccgcattcctcccccgcagccgcttcttcgcccacacgcccgcgcgctcggaatactccgaggagggtgctcgaggagggcgacgatccggccacttcctgctcgcctcgctgccggtcccgcgccccggagccctagagctctccccgcggcgggaccgccggagtcctcgggcgcgcggagagaatggaggcggcgcgcgccaaggacaccaaggagcgtctggccggggtcgagcggctgcacgaggtgcttgacgtcgcggcgcgtcgcgggctgacggcggccgaggtcaccgcgctggtggaccactgcatggatctgacgcgggatgccaacttccgcatcgcccagggcggcctccaggcgctctccgtcgtcgctgtcgtcgccggcgaccacttcaagatccacctcaactccctcgtccccgccgccgtcgagcgcctcggcgacagcaagcagcccgtccgcaacgccgcgcgccagctcctcatcacgctcatggaggaaatgtacaagcacatgggatcacaatttcatgaagcattgcagcgccataatctgccttcatacatgctaaaaaaattcaaggttggataaaatagaaccaaaggttcgatcatctgatacaacaattaggacgggactccacgaaagcatcaaggaagaaggcaattgtttgagaacagtagcttggtttttcaacattgtttattttcagaatattgattttcagaataaggttgtttcatacatgacaacacgattggcaacatgactaacgtatttatactnagaactagntgggaacgcatcgaaagataacaaagaaaac

SEQ ID NO: 167426 - DNA, 456 bp, Zea mays
  Clone ID: MRT4577_84270C.1
cccttcctcttaaaaaaaaaaaaaaaacccctattttttttttttcccccccagtgcccaatttggagggaaaggaaacaaaacccttggaaaaccatgggtcgtcccgccaacccccccaaactggctaccaaaaaacccatcccaacccccaaattttccccctaaaaaaacccccccctatccctccccttaaattgatttttgctttaaaacccccctttcttccccttgcaaaatggaccattgcatccaaactgaaacccccccaaaaatcctaaaaacccccatttttgctattttgggaaaaacaaccgtcccccctataatttaaaaagacccccaaaaactttaacttgttaaacccccccatccccaaaaacaaaatttcttcaaggagttttgaaagaaaaaaaaaaaaaaaaatattcctttttcccccgccccgcccccctt

SEQ ID NO: 167427 - DNA, 1944 bp, Zea mays
  Clone ID: MRT4577_84271C.1
cattgggaccctcgaggccggccgggaaatcgcctcgagtctccgtggaacaagccttccttttccggcccgcctccttgctcgcccagttcccctcaccgccgtggacgcgcgaagccgcgaaccaacacccaaaccgtctgttcccaacagataacaccctcggctgcggcagctgcagcgccctcgctgccggcgcaggtccggcgaggcggccagccaagttctaggcctccgcctccggggccaaccctagccaccactcgcaacgccagaggcggggggcgccatgctgttccaagtgggagggcagggcgcgcgacccaccttcttcgagatgtccgccgcgcagcagctgcccgccagcctccgcgccgccctcacctattcgctcggggtttttgcgctaagaagaccattactacacacagttttggattatgaagacgaattttttgctttgttaatgggtgtccttgagtcccatagcctacggacaacagatggttccttttcagagtcattatatggtctcaggaggagacctgttaaggttgcagtgaagagaaagagtcctggtacagaatccaatgacaaagtctatggttctgctctaaggaagcgccagaaaatcctttcagttgtttttttggttgttttgccatattttaagtcaaagttgcagtctatatataacaaagaaagggaagccaggttgcaggcaaccctttggggtcaggatgatgttagatttgatgaagttggctttgtattagatcaggagcagacttctcaagcacagactgaacctacaactggagaaatgtcaaacttgacacgttttaaaaagaattttgcctcacttataggtgtttgctatccatggattcatgcaactaatgaaggtctctcgtttgcataccagctcttgtatctgttggatgcaactgcattttatagtccagcactacatgtacttgggattcatgtttgtcgtgctactggacaagagctgatggattcatcttctaggatatcaaggattagaagtcgtgaacttgagaggcttcgcggtcctccatggttcaaggctgtgcaacgagtgttccttagttgtgtgtacacaactctagattatgcacaaaccggtttaattgctgcagtcttctttttcaagatgatggagtggtggtatcaatctgctgaagaaagaatgtcagctccgactgtatatccaccaccccctcctcctccaactcctaaggttgccaaagacgggatttcgttgccacctgacaggacgctctgccccctgtgctgccagaagcgtgctaacccttccgttctttctgtttctggttttgttttttgctacagctgcatattcaaatctgtctcacagcataaaaggtgccctgtcacgctaatgcctgccggcgttgagcaaatcaggcgtctcttccacgatttgtagccatggaagacccgaaaacttcttttctaaagaccagggacgtcagcaactcagcatacagaaacatatatcagaaccaccattttgtaaactataagaaactcagcatacttttttaagcaagctggagtttgagcttgacagtcttaggttgggggtgtataatctgttgttaggtgatactagcatatccattgagataggcattaactgtatacctgcatgactgtgtacccactctcttcatttgtttgtaaaaaaaaactgtctgtaattttggattggtcctgctcgacgtcacttatattggctgtttggagtaatctctcagattatgtgttgtaaggccgtctgcagcagtctaactaaagtttacttaaaagcattgtcctgcactgtactgaagtttaaatatgggtatgatgatggttaagctgttgaagatagcctaatacctagttttgtacttc

SEQ ID NO: 167428 - DNA, 1183 bp, Zea mays
  unsure (1)..(1183): unsure at all n locations
  Clone ID: MRT4577_84272C.1
caacatcttatcttcagctcctctatcggtagctgttgcagagtgaagtacatgtgatgagttagcttggttagggcattttcaggatcattatccttcacagagtgaccaaatacagtattttcagttaaccaaatagtgagctacaattgattggaagctaatggtatctgagttgatgagttgctccatatcttgttatacaattgattggaagctacaagcaagataggtctctcgtttgcataccagctcttgtatctgttggatgcaactgcattttatagtccagcgctacatgtacttgggattcatgtttgtcgtgctactggacaagagctgatggattcatcttctaggatatcaaggattagaagtcgtgaacttgagaggcttcgcggtcctccatggttcaaggctgtgcaacgagtgttccttagttgtgtgtacacaactctagattatgcacaaaccggtttaattgctgcagtcttctttttcaagatgatggagtggtggtatcaatctgctgaagaaagatgtcagctcccactgtatatccaccaccccctcctcctccaactcctaaggttgccaaagacgggattccgttgccacctgacaggacgctctgccccctgtgctgccagaagcgtgctaacccctccgttctttctgtttctggttttgttttttgctacagctgcatattcaaatctgtctcacagcataaaaggtgccctgtcacgctaatgcctgccggcgttgagcaaatcaggcgtctcttccacgatttgtagccatggaagacccgaaaacttcttttctaaagaccagggacgtcagcaactcagcatacagaaacatatatcagaaccaccattttgtaaactataagaaactcagcatactttttaaagcaaatgcatggatggcactttcttcccgatttcctttgtacggttattcttcgggcattggaaattgcacagcaaaagcaagctggagtttgagcttgacaaacttagtngaagtgtataatctgttgttaggtgatactagcatatccattgagataggctgttgttaggtgatactagcatatccattgagataggcgttaactgtgtacctgcatgactgtatccactctcttcatttgtttgtaaaaaaaactgtctgt

SEQ ID NO: 167429 - DNA, 600 bp, Zea mays
  Clone ID: MRT4577_84273C.1
gggggggtgtggggtttttttattttttttttttttttttttttttttttatacatttatcacaaactctatttccaaataattaatgaaacactaccaaacaagcgaaacacaaaggatccaacaaccaaacaaaaaaacaaaaaccaacggaacaacaggggggggaaaaagaacccccagtaacccagataaacaaaaagaagcacatcccctaatcttcactccttggatgaccagccaatcagggacttgagaatgggcgggatgacacccccccctgccatggggcccagggggagagtgcccagctcctcgaataacataaatagctagcggcaaagggcgaggggggaaacccaacaccttcagaaccttgataacattcccacccagctccagaacctagggagaaaaggactccaggaaggcagatgagtagaggggtgccaaccccccaacacgaccatgtgcctgaaaactatggtccaccccgccggggataccgccaacagggaaccgaaagcacatgagggaatatttggccctctacactgggaaggaccccagcaggccccccagaacctaggatgcaaggct

SEQ ID NO: 167430 - DNA, 855 bp, Zea mays
  Clone ID: MRT4577_84274C.1
cggccgctcagccgccgcccggtctcgccaaaactctacccgaacgggcgcgctcccggcattttctccacagccctcgtcgcggacgaaggcagtagatccggcggacggcggcccggcgcatctcctcgcctgcgaaggtgcataatttgctggcttgtgttagttcgggggaccaacaaagttactgaaaatggtggttcttgctgcttccatcatctcaaaatctggaaaagcacttgtttcaagacagtatgttgacatgtctcgaattaggatcgaaggattacttgcagcattcccaaaacttgttggaactgggaagcagcacacttatcttgagactgaaagtgtccgttatgtttatcaacctattgaaggcctatatctgctgcttattacaaacaagcagagtaacattctcgaagatctggacacactgaggctactatccaagcttgtgcctgagtactcttctctggatgaggatagtatctgtaaaacagcatttgagcttatatttgcatttgatgaggcaatctctctcggaaacaaggaaaatgtgacggtgcaacaagtcaagcaatactgtgagatggaaagccatgaagagaaggcgcataagctgatgatgcagagcaaaatcaatgaaactaaagatgtcatgaagaagagagctagtgagcttgacaaaatcaggatggagaaaggcaaacttgacaaaggaggatactcatcaatatctggtccccgtgttattgaaaaaactttcagtgacatgaacatcagtggtactggctttgggagtgggtctggattaagtggataggcgctgatatggactcgtttgcgaga

SEQ ID NO: 167431 - DNA, 319 bp, Zea mays
  Clone ID: MRT4577_84275C.1
gacacgcaaattctattgatcctttgaagccatacttatcgcgctgggatacttataggcgtgccaccattctgaaacatatgagcgccaggactgaatctaggctcgcccagagagatatccttaacaagagttttgtttaattaaatctcgctgacagaacctagtagatttgacaaaagagcatacttagaacaccctgtatggcttacccatggtgctatggacgtacaggcatatcacattctggcagttcttcttgataagggaaacaaggaagtggacgctaatttggatgttctgctggatttgattctcc

SEQ ID NO: 167432 - DNA, 1194 bp, Zea mays
  Clone ID: MRT4577_84276C.1
ctcgaggccgggaaaaaaaaaaaaaaaaaaaaattcggcagggcggagcggaggggtgccggtgtccggactccggagagaatggcggccactcttctcccgaccttatcgccgcccgtttcgcgcgccgccgccgctttcctcctccgacgagccccactgaagccctcccattatgtgcacccaccttctactctccgccgcttactcatctcctcctatccagcaatccctgccatgtgccccctctccaccatgtcgtccaccactgccgctcgcgccgtcccggtccgccgtgacctcctcatgctcggcatcgagaccagctgcgacgacactgcggctgctgtggtgagaggtgatggcgagatccttagtcaagtagtatcttcccaagcggatttgctcgcgaggtatggtggtgttgcccctaagatggccgaggaagcacacgcccttgtgattgaccaggttgttcaaaaggctcttgacgatgcaaaattgtcagaaagtgatctttctgcagtcgctgtgaccattggaccaggacttagtctatgccttagagttggtgttcataaagctagacaggtagcaaaagcatttggcttgcctattgttggagttcatcatatggaagcacacgcattagtttccaggctagcgaataaggaccttgatttcccatttctggctcttctaatttccggaggacacaaccttcttgttctcgctcatgatcttgggcattacattcaactggggactactatagatgatgcgattggtgaggcatatgacaaatcagcaagatggttgggccttgatatgcggaaaggtggtggtcctgctcttgaagagcttgctctagaaggtgatccaaatgctgttaagttcagagttccaatgcgacagcataaagattgcaatttttcttatgctggactgaagactcaagttcgattggcaattgaatctatgaacttatgtacagaggatattcccgtttcggctgcatcggaggaggacagacaatcaagggcgaacattgctgcctcttttcagcgagttgctgtgttacatttggaagaaaggtgtgagcgagcagtcgaatgggcattgaatatggaaccttccatcaaatactgtgcaactcagatatcttgacgatgggtaatctcaaatcggtttact

SEQ ID NO: 167433 - DNA, 1079 bp, Zea mays
  Clone ID: MRT4577_84277C.1
cgagcccgcgtccggagagagcaagggacggggcgactattagctagtactagtagcgaaaaattaaggccaaacgacaacgacgcacggcggcatggcggccggccaccacgggcagccgccggacggggacgacgggcgcatcccccagtcggtcgtcggggggtgagccagaccggctgctgcccatcgctgaacgtcgggccggatcaatgaaggaaatcgctaccgcccaacgccaagatctccaaggaggccaaggagacgatgcaggagtgcgtgtccgagttcatctgcttcgtcaccggcgaggcctccgacaagtgccacaacgagaagcgcaagaccatcaacggcgacgacctctgctgggccttcggcgccctgggcttcgacgactacgtcgaccccatgcgcggctacctccacaagtaccgggaggtcgagggggaccgcgctgccgcagccgcgtcctcctcccgcggcggcggagaccaccaccccgcgtccgcgtccacgtccacctcgccccccgccgcagccccacccgccggtcatttcatgttcggcgccgcagccatcgaccgccccgacaacaacacctcatccgccaggcccttttgatccaacttctacttcgccagctgctctttaatttgcttgttattcgtcagatcaacaacaaaagctacgcgcttatcttattattttttactactgctcattttttgagaggtgaatcgtcataccaaatccaaattactagctatctctatctatctatctatgttccacagttccacacacataaatagcttatttgccttattccttattagtgctagctagccacaacaaaagctatgagcatgcatgtacccagtagtagctagctagaggaggtggactagagttcttgctgctaccgattcatctctggggtacgtatcatcggtgaataaggacttggggttgggacgatggtggatgaagacgaagaccctgccgcctactataccgcgagtcgatgtaactacttcgagtgcccatcatcgatgaatttgattcgattttttatt

SEQ ID NO: 167434 - DNA, 232 bp, Zea mays
  Clone ID: MRT4577_84278C.1
gtgatttcatgctcgatgccatgtgtaattaatatttctcaatgtacataatgcagacagtagaacggtattgataaaaaatgcaaaaagggcctttattgtaaaggatccaagcatacttacgcatacgtacaaggtgatagttcttctatggggtcacctaaacccaatgcactggccggtgttttacaaggtctttactgtttaaaaccctttacgtcacttaacttaa

SEQ ID NO: 167435 - DNA, 345 bp, Zea mays
  Clone ID: MRT4577_84279C.1
actgcaaggctccctgatattccatgtgcctccgctctcccaagggtacccagttgaaaggctccctttacctacagacatgcattgtctaaacaagaggcgctgagccatctgaatattcaaattctacaactggtgtactgagacaagcagtcgcctgactaggtgacagggcatcacccgaccctcataaggaataacacccatgacaccgatgacatacaaatatgttgctttgatgcacccttcctactgcgaatgtcaaaggcatgcatccacttggattggcaacagaaaccctccctggttagaactatcagcagcttgggttcaaagggactgaag

SEQ ID NO: 167436 - DNA, 415 bp, Zea mays
  Clone ID: MRT4577_8427C.1
caaggttacaacattatattcagggggggtttagcactgtatgcgggggtggacaaaaaaggagacaaaagccacacaccagcagtagaggagtagaagcacattttcttatgcctctgcgtctagcctagtaccagtagtactagataggaaccatgtcatacgacggcattgggtagattgattgatagacagacagccaggacgattaatcatacaatgaaaggcaagcaccatcccactcgatccataaaaagatgtgaaatagtacatctgacacagcaacaaaaaaaaggccacccacctccttgctggcccatgatcccaccactggacacagcatgttagatgattgacagcgagattatcggcttccctccatcaaccacgacccagaacatcatgtggttttgtg

SEQ ID NO: 167437 - DNA, 215 bp, Zea mays
  unsure (1)..(215): unsure at all n locations
  Clone ID: MRT4577_84280C.1
cttcacccgggcctcttgggagaacagttgtttaccatggtgcnaccgaaacatagaccaagggactcagggcttcactctcagaataccatagtaaacaactgcttcacccgggcctcttggagaaagagcgatataataaagaatactaggtgaattgacacggtgaaatttctcttaaaatttgcgccatgtattggtataaggttaatcgt

SEQ ID NO: 167438 - DNA, 387 bp, Zea mays
  Clone ID: MRT4577_84281C.1
cacggcccgcgtgcagtgagctgggactgaatatattgccgggtcgacgttcttattagtcggcggacgccctttgttactccgggttttctaagagaacatgcggggagaaaccatggccagtgagcacgcaagcgtggggcgaggttaatcatgaccagaagcggagcctgatggacaaggctaatgggttcgttgtggagaagatctcgcacatcacaaagccggtggcgaccctggacgaacagacgttaaaggacctgatactggagtacatcacgctctacagggtcgtgagcttgtacaacccctacgaccaccagctgcatatttacgatgtcacctacacgctccggtacgccggctaggacgtggcgttcggaacca

SEQ ID NO: 167439 - DNA, 373 bp, Zea mays
  Clone ID: MRT4577_84282C.1
cccacgcgtgcgattcgacctagagactcgggacgagccgtaaagactacgattaacggtgccaccagcgacgcctggccgccttgacggctaggcagcgcccgaaccgaaccatcttgcgcaggagggccactacagcgtgcgacacggacacgcccccgctaggcgccatgaagctgacgggggagaccgttatagaagcgccactttgagatacgcgtgcatgccaacgactcgattttgtatggggagaagaatattgaatagactcacggaagagacacatctccatggctgcaacaaccgttgagttacaaagctaaggtgtcgtgcgacgaatgcacatttgaagagatgacagtctatgaggaag

SEQ ID NO: 167440 - DNA, 460 bp, Zea mays
  Clone ID: MRT4577_84283C.1
tgtgggatattcccagatgcagtgtcattgattgggtggatattagagacataataacagcggtttgctatcgacctgacggaaagggagcagtggtcggaaccattactggaaattgtcgattttatgatgcatcaggtacaaaaaaaaaagtgaaatctctactagcttttcgttaccatttcagtacctctctgcttttacttgaatgatactccataaatactgactataactacatcttgatggatcagataatctcctgaggtttgaaacacaagttgcactcagtggcaagaaaaagtcttctcttaaaagaatcactgctttcgagttctcaccaagcaacccaagtacattaatggttacctctgctgactcgaagatcaaaaattttgaaggaaccactgtgactcaaattattgtggactccgactgggtcttgccagtcattgcaaca

SEQ ID NO: 167441 - DNA, 472 bp, Zea mays
  unsure (1)..(472): unsure at all n locations
  Clone ID: MRT4577_84284C.1
cggacgcgtgggcggacgcgtgggcggacgcgtgggttgccgtctcccttgtgcgtgagcaaagaaagagagcgagacgcactcgccatgtctggcatgatgcacaagatcgaggagaagctccacatggggggcgaccacaagaagtcgggggaggagcaccacaagaaggccgaggagcaccacaggaaggaggaggcggagcaccacaagacggaccggggtgcgcacagggcaggcaccgtggcaactatcagagccactatcaccggcgagcacggcaaacagtccggcaaccactaggggacgaaggacaagatgaanaaggattagaagaagcacggcgagggccacgaccacgacggcggcgacagtggcagcatccgctacagcgactgagatctggtggagcnacacanatgcaacacatgtatgcttgctggatggaggatccataccagctgatgctgat

SEQ ID NO: 167442 - DNA, 817 bp, Zea mays
  Clone ID: MRT4577_84285C.1
ttttttgtgtacgtttttctctacgtttatcccttgtttcatttcttgttgcctttttgtattggctatttttttgtgttcgtatatcttattattatttctaatttagaaactatacgtgaatcagttataaccaacataattaaaattatgaaaacatgtacttatgaggctagcaagacaaaaacacaattatttgaactctatttaatcctttttataaaatgaaaaatatcacaatactaaaacacgattaatcatagacgattggaggtagggtgtaaaaattggacctttttctatctttgtaatggcagcagtgcagtgggctgagcatcagcgatagggctatggcgcctgactgcacggaggggaaacgatggcgaaggtggacacgatgctgacgagcaggggcaactccgggtgcgggcggtttgtgcgaatcaccggcacaatcgtcgtcgccctccagcgaagggactcagcgagaagcagcacgacaacaacatgatctccgacgatgatgacgctggcagcatggcacaagctacagcttcggggcttcgggcgtggatacaatggaccggtgcaaggacgacgacacgacaagggacatcgaggcgagcttcagctcgatgtcgcggcttcatcaacgacacggcaagacagcggggtgggcgcgcctagaatgcgcatagctgcatagcagcataggagagagcgagctagcaaacagggaagagacgatcccaaagcatggcttatataggcgacgaaggggatggttgaagggcgtcggtgggaaagcagtagcgtc

SEQ ID NO: 167443 - DNA, 1141 bp, Zea mays
  Clone ID: MRT4577_84286C.1
aatacatacaggagagatataaaaccttacttttgaggtaaaacacatccatcgcataaacgcacaaatccaagatcatcactccatcagattgttccaaccccaaacacttctgtagtaaataggcctgtgaggcatacacgattcgtcatcatctttagcaactatagtcgttgcttgtcatgcacatggtacaagaaataggtttgttcactcaaactaacactgattgatttacaacacaacactgactacaaagaacttaaaaacaccagctccgtgaacagcagctgcacagagatgcctctgcttctaaacctgaccaagaatggtgccacgattgcactaggcaaagcaagaaccagcatcgtcatcatgccacctcagctcaacccggcaaccatcccatgggcaacggggcttaaggccacatccctgtcgcctgttcacatactggaccatcccaatctttccccttgccaatcacccgctcactgcacaatcccattttttttaccaacactatcagtccttcaacaacagagcccattcaacgagggcaagatgtgctcctccagcatctcaatctgtgagaggaagcaaaagcaccgagaatgaagctgaaagaggggcatgcagggccaccaaccccccccccccccccagcccacgcatcacctctcagcttcttgtggatcttcttgtggattagtggggttgtccaataaacctagagctgcttctgtttaaaggagaacagtgcccctcctgcatctcagtatgcagggagcaactacaccgagagtgcatacaggctgacaacatcaaacagatggctggtatggccttacgactcacggtttttttatgcctgctaccatctgccagtaacaaaggataatgtgtttgttgcacactggcaggtgcaggcatgcccgggcccctcaccggggccgggcaaagcgtagactagcatcaggttgttgttggtgagtctgtgcaaatggtcccattgattcctgtggatgtgcaaatgggactccagggcgagaaggtatagcatattgctgtgaagcatgcatgaaaacagacgatctcacaggtgcaccagggctgtaaggtcccatgacaccatctggcc

SEQ ID NO: 167444 - DNA, 246 bp, Zea mays
  Clone ID: MRT4577_84287C.1
gggagaaaaaaccgggggggggcaatagcggggggccattacaggccaacagtttggtttttctttccaatccccggggaagggactggcccggggaggggatattttttgttccaaaacaatccccacccttctgggtttaaacccttatctggggagacctttggaaaaaaaaattttttcgggatgaataaatcccccccgcagggtatccaatggggccccttttacctcacccccccttgg

SEQ ID NO: 167445 - DNA, 2081 bp, Zea mays
  Clone ID: MRT4577_84288C.1
tcgaggccggccgggccggggtcggtactcgacgacggccgggaatttctccttatatagccgagagtcgggccgtgctgtgctcgaggacgcacgtaatccccaatcgcccaccacttcgatctactcgagcgagccctagccccgaatctccccggtgcatcaacaggctccgtctgcttctgctgattcccggatcgtctcccccgacgcggctgcgctcacggcttccgccacagccatggagccgcgcatcggcaacaggttccgcgtcggccgcaagctggggagcggctcctttggggagatctacctcggcacgaacgtgcagacaaacgaggaggtcgcaattaaactggaaaacgttaagacgaagcatcctcaattgctttacgagtcgaagttatatagaatacttcaaggaggaactgggattccaaatgttaagtggtttggtgttgagggtgattacaatgttttggttatggacttactggggccaagccttgaagatctttttagctgttgtaacaggaagctgtctctcaaaactgttttgatgattgctgatcaaatgatcaatcgagttgaatttgttcattccaagtcattcttgcatagagatatcaagccggacaattttctcatgggtctcgggaaaagggcaaaccaggtttacattatcgattttggacttgcaaagaagtacagagatacatcaacacaccagcacattccatacagagagaacaagaacttgactggaacagcaagatatgcaagcgtaaatacccaccttggaattgaacaaagccggagggatgacatggaatctcttggatatgtactgatgtacttcttgcgaggaagccttccatggcagggcctgaaagctgggaacaaaaaacaaaagtatgaaaagatcagcgaaaggaaaattgctacttcaactgaggctctctgccgtggatatcctaccgaatttgcttcttacttccattactgtcgctcactgcgttttgaagatccaccagactatcaatacctgaagagattgttcagagacctttttattcgggaaggttttcagtttgattatgtttttgactggacaattctaaagtaccaacatgcacagatgaccacggctccgccacgtgcaattgctccagcagtaggacaaagctctgggatggctcctgtggcaaacaacaatagacattcaggcactgaagagggaaggagaagcgggtggtcaggtgtggacccaacgcgacgccaggctccaccaccagttataaatgcaggcagcctagccaagcagaaatcccctgttcggcctgaggcatcgacatccagagatgctgtgttctccagttcgactcttttgggacgctcaagcggatcgtcaaggcggcctgctgtctctagtagccgagagccaagcattgaggcggagcaaacacgtagccgtacgactgacgcaagcccaggtgcaacattccagaggtctggagctccgcggtggagcctgcagatgcctgactcctcggacggcaggcgctcgtcttccggcaggcgccactcatctaacccgaagaactacgagtctaccataaggggaatgcagggcctaaactttgacggcgatgacagggttcactattagcatctcatctctttgggaccttggcagggagggtgcattgcgtcaaggcccctcgccgacatggcctatgtaccacgggcggctagacaataaagatgtctgggtgagtgagcctgagcatagacaatggctatgctgctttagcctcccttcccttgtacaggtttgccatttgtttggttgcgcggcgtcctgtgtattttgagttgagattcacatttgctgcgatgtgcgtatgctgctttggttgattcaacgattgggcttttttttttactctctctctctctctctctctctctctctctgataatgttatgttgcccgtgacagatctgagaatgttatgtcatgtgtaactccggaatgctcaactgttatgtttgaaaaaaaacccccccccagcgcggcc

SEQ ID NO: 167446 - DNA, 232 bp, Zea mays
  Clone ID: MRT4577_84289C.1
cccacgcgtgcgcaagcgctaggagagcccagcccccacaagacgaggcaccattggcgctaggaagcagtcaccgtccccagcgcactcttcgccgcgtggcctcggctgctgggcctctgatgcggcaccggcccatactgagtgatgcgcggctgccagggcgcaagccggaagacagagcctgaagcaagtgaaccgcttcctggagtgccccccgtacctggtgccc

SEQ ID NO: 167447 - DNA, 183 bp, Zea mays
  Clone ID: MRT4577_8428C.1
ggagggaaaggggcccacaccccttttcaatcattatcgaacgggcaacatcccgtggggggaacaaagggtgcgttatttcccaacagattacacacatgattggcattgtacaccctaaccctcggtatggcaattttcctcctatttattagccccctatatgtatatcccgccttattt

SEQ ID NO: 167448 - DNA, 709 bp, Zea mays
  Clone ID: MRT4577_84290C.1
agggggaaaaaaggagagcagaaatccccaatccctcctcacttcgacccttgctcggaatctccccgcagcgtccggctgaatccattcgattcactcatggtaggcttcgtcttcttctgctgattcgctggatcgtctccaccgacgcggctgcgcccacacctgccgtcacagccatggagccgcgcatcggcaacaggttccgcgtcggccgcaagctggggagcggctcctttggggagatctacctcggcaccaacgtgcagaccaacgaggaggtcgcaattaaactggaaaatgttaagacgaagcatcctcaattgctttatgagtcaaaatgttaagtggtttggcgttgagggtgattacaatgttttggttatggacttactgggaccgagtcttgaagatctttttagcttttgcaacaggaagttgtccctcaaaactgttttgatgcttgctgatcaaatgatcaatcgagttgagttttttcattccaagtcattcttgcatagagatatcaagcctgacaattttctcatgggtctcgggaaaagagcaaaccaggtttatgttatcgattttggacttgcaaagaagtacagagatacatcaacacaccagcacattccatacagagagaaacagaacttgactggaacagcaagatatgcaagtgtaaatacccaccttggaattgaac

SEQ ID NO: 167449 - DNA, 423 bp, Zea mays
  unsure (1)..(423): unsure at all n locations
  Clone ID: MRT4577_84291C.1
gcgttcggatagaagcgtggagcctgtattccggcatctngcagtaaaactgctacactacggatcttccaatatttgtgagacaatgtggatgtagcatatcgcctcctgaagatgctcggacggtaagttcttggtgtcggccggcagcacgcaatgtgatggacataaagatagtacacagtgtgctaagcaagccacacaaaaatccagaatctgcgctgtagaagcaatnactccatgtgcaacgatatacttagtgagcttacatgaagccaatagactggaaggattcataatgcgaagctcaattaaacgtttgacatcttcatggggctccagaaaataccactgatgacatgaccagggccgatgctctgtttacatgcttatcgattagaaccatgggtaaacccagacaac

SEQ ID NO: 167450 - DNA, 975 bp, Zea mays
  Clone ID: MRT4577_84292C.1
cgaacgcgcggctttctccccacaaggcgccctttccaaagcctcgacccgctgctctcgccgagatcccgcgcgtagcacgcgcggcttccttcccaggctggcgagatgcctccttctacgctcgcgcatgcactatgcccctgtcgttgtccacctcccacgcccacgcatgcacccatcccctcgtcacgcaaaccatagtctcctccgcccccgtgctcgccaccgcgtcgacttcggtggagtccagcgatagggcgaggtcgtaccccgacgactcccccccccccgacgtgtcgtcctagcccgcacgctccgcctctggcaccgttgcacaccacgccatcctcacccttcaactcctaaactgtccagtgggagacgatgccgccctcggttcgcgatgccgcccactcccacacgtcgtcgcgcgaagccggcgctcacttcgggccagatctacctgcccgtgtggtgttgtgcgtacgaccacctcgtgaagatgctgcaacaggcgtacgcgcaggtcgaggagctctccgtcgagcgcgagcacctcgtcaatgagctctagcttctacagagccgcttccacaagcgcaagatctgccaggcctgcctccagaaggtttttccttttcccccttcttttcgccccttctgatctgtaaggacgaggagatcaggaagagagtcgtaaaggctgagacggcgatgcgtcttggcggcaaggagcttcagattcactgctgcgaggctgttccttagccccagcttcaattgttcctcatttagtttattgaaatctgaattatttggagctaatttgtacagtttatacatagagcacccttgaaagccacattcacatgaaagcagtatacacagagcacttcaattgaaagctgctgcattgtacagggaatatggaattctggattcctatatatcgtaactcctttgctgttgcat

SEQ ID NO: 167451 - DNA, 787 bp, Zea mays
  Clone ID: MRT4577_84293C.1
acgcacgcacgcacgcggagcggggggctgtccaaagcgcgtgatccatttcctcctcctctctcggtgcgtgcgccactccgtcggcccgcccgtccccctcaccggcgacttctcgcctcgcggccgctcccagggcagcgtgggcgcgtgtgttgcgagccatggccggcgagaagaagatgttcggcttcgaggaggtcgccaagcacaacgtcgccaaggactgctggctcgtcatcgccggcaaggtgtatgatgttacccctttcatggatgagcatcctggtggagatgaggtactgctggcagtaaccgggaaagatgcaaccagcgatttcgaagatatcggacacagtgattccgcaagggagatgatggagaagtaccacatcggggaaattgatgcttcaaccatcccagcaaagcgtacatttgtacctcctcagcaagggtcccatgtccaggccaaggatagcgacctcctcatcaagatcctgcagtttcttgttcccattttaatcttggggcttgcatttggtatccggcactacagcaaatctgagtaggctgttgttggcgagttgcttcggagaaatagctttcaagtaatatggtttgagttagaacaacataataatggtattggttggctggtttgagttagaacaacataatgatggtactcgttgggtggcagtgtgttgcctcattgatcctacaaggcactctccattttgaacctccctatgtatgcccagattactcgggttatgtttacattctc

SEQ ID NO: 167452 - DNA, 646 bp, Zea mays
  Clone ID: MRT4577_84294C.1
tataaaatacttatttttttttcatttaatctttatttatctttttattttttatatctcccccccccctttttttttttttttttttttttttttgttccaaccccaaacacttctgtagtaaataggcctgtgaggcatacacgattcgtcatcatctttagcaactatagtcgttgcttgtcatgcacatggtacaagaaataggtttgttcactcaaactaacactgattgatttacaacacaacactgactacaaagaacttaaaaacaccagctccgtgaacagcagctgcacagagatgcctctgcttctaaacctgaccaagaatggtgccacgattgcactaggcaaagcaagaaccagcatcgtcatcatgccacctcagctcaacccggcaaccatcccatgggcaacggggcttaaggctgcatgagattcatctccattactaagtgccaagaggaccaagttttaagcaaaaagaaaagtgagagttgcactaacccacatccctgtcgcctgttcacatactggaccatcccaatctttccccttgccaatcacccgctcactgcacaatcccatttttttaccaacactatcagtccttcaacaacagagcccattcaacgaggggcaag

SEQ ID NO: 167453 - DNA, 639 bp, Zea mays
  Clone ID: MRT4577_84295C.1
gccaattcactctgcccaaacctttgagcatgccgcactgcctttctttcactttttttgttggcagggtcgtctggctttccatgcgctgttcagtagagaaaagcttccgcaaagcttttctcccccacaagcagaaggctcgaaggaagttggcaaggaggaggaagatgaagtcaccacagtggcagttgacctcaacaagagtaccacaagcattgatcatgacctcgacacaattggtgagccaagggcttcctttcccaatgaactgtcgcccctgaagctgaaattgcgccgaacaggcttcaaaccatacaagagatgttctgtggaagcgaaggagaatagggtgccggctagcgacgaggttggtaccaagaggattcgtcttgatagtgaagcatcaacatgagcgatttctacatggttaccgctcggacttcctctgccgccatgaagtttatgacaaagttgtatttacatctaaactagtataggacttaaagaccttgcaatgcaatgcttcatgaaactgttgtgtgctgtattttagtacttgtgaagcagcccggtagactgcttttaaacctttatctcgtagactctgatttaagcatcaagcaactattgaacttt

SEQ ID NO: 167454 - DNA, 338 bp, Zea mays
  Clone ID: MRT4577_84296C.1
tcgtgcggtccacattccgtcctccagctactcgaggatgggggccgagaccggccgcgccccgggcgcggcccttgggccggggcatgccttccttgggcactctaggcgcctcggacgcgaccgggaggccacgaggcgcagccttaaggcggaggtgaagggctagtggctgacgaccttctccccctccgacctgacggtagcctggcggggtgacaatggactggacccgttgggcctggtgtacgaccccgaagaacatagcagttggtttcgtggcaagcgagaggcctggtgatacgtgtcgtgtgggccatgcattggcagtggcgcgg

SEQ ID NO: 167455 - DNA, 318 bp, Zea mays
  Clone ID: MRT4577_84297C.1
ggtgatgctagtctacgctttgcccggccccggtgaggggcccgggcatgcctgcacctgccagtgtgcaacaaacacattatcctttgttactggcagatggtggcaggcataaaaaaccgagaggcgtaaggcagagtcagccatctgtttgatgttgtcagcctgtatgcactctcggtgtagttgctccctgcatactgagatgcaggaggggcactgttctcctttaaacagaagcagctctaggtttattggacaaccccactaatccacaagaagctgagaggtgatgcgtgggctggggggggggggggg

SEQ ID NO: 167456 - DNA, 3818 bp, Zea mays
  unsure (1)..(3818): unsure at all n locations
  Clone ID: MRT4577_84298C.1
ctagttcagaacttcaggttaaatattaaatgatgtttttttgtgttcttgttcaatgtggtagacatacttgatcagtagaaattatttactggccatgagtgacttgtacaggtatatgcaaagatttgatcctggatttggatttagtggaggcccatacacaattcaacccctctatgcccctgctgttaactacaacaccgaattcccccagcttgggtcagcacaccgatcacctgttgctgtcgaacagcaacctcgtccaatagctcagcacatgcctgcatcatggtcagtggctcaagcatctaatgcaattggctatgggccagatggtgtcatgggaccttacagccctggtgcacctgtgagatcgtctgttttcatgcatgcttcacagcaatatgctataccttctcgccctggagtcccatttgcacatccacaggaatcaatgggaccattcgcacagactcaccaacaacaacctgatgctagtctacgctttgcccggccccggtgaggggcccgggcatgcctgcacctcagtgtgcaacaaacacattatttgactgcagatggtagcaggcataaggacggcgacacctcagccctcaggtagccccgtagccgcctagcagggccgtgctcgagaaaattaggagaccaacagcacgaagggggaaaaaaggagagcagaaatccccaatccctcctcacttcgacccttgctcggaatctccccgcagcgtccggctgaatccattcgattcactcatggtaggcttcgtcttcttctgctgattcgctggatcgtctccaccgacgcggctgcgcccacacctgccgtcacagccatggagccgcgcatcggcaacaggttccgcgtcggccgcaagctggggagcggctcctttggggagatctacctcggcaccaacgtgcagaccaacgaggaggtcgcaattaaactggaaaatgttaagacgaagcatcctcaattgctttatgagtcaaaattatacagaatacttcaaggaggaactgggattccaaatgttaagtggtttggcgttgagggtgattacaatgttttggttatggacttactgggaccgagtcttgaagatctttttagcttttgcaacaggaagttgtccctcaaaactgttttgatgcttgctgatcaaatgatcaatcgagttgagttttttcattccaagtcattcttgcatagagatatcaagcctgacaattttctcatgggtctcgggaaaagagcaaaccaggtttatgttatcgattttggacttgcaaagaagtacagagatacatcaacacaccagcacattccatacagagagaacaagaacttgactggaacagcaagatatgcaagtgtaaatacccaccttggaattgaacaaagccggagggatgacatggaatctcttggatatgtactgatgtacttcttgcgaggaagcctttttcgctcatgtggtagggtttccaggcagttatacatggtcttataccagcccgcgtgccgggtgcctccaacctgcgcttacgctccgtacgatgggtgttaaaactcgagtgcgcatcccccacccgtcctcgcttccacccttgctcggaatcccccattagctcctgacgcaatccattctattcactcaggctaggctgagtgatggactaccggttagtcaggtatagacccaccgcgccgcatggcttccacctgcagttagggaaatcaggcagccaagccaatctgaacgcccctgtacttgcaagagagaacagcgacaagagatgacgtgttctccattcagactcatttgggccgctaaagcgaatcgtcaaagcagactgatgtatctagtagcggagagtcaataatctaggaggagcaaacgggaagccatggaagctgggaacaaaaaacaaaagtatgaaaagatcagcgaaaggaaaattgctacttcaactgaggctctctgccgtggatatcctaccgaatttgcttcttacttccattactgtcgctcactacgtttcgaagatccaccagactatcagtacctcaagagattgttcagagacctttttattcgggaaggttttcagtttgattatgtttttgactggacaattctaaagtaccaacaggcacagatgaccactgctccacctcgtgcaattgctccagcagtaggacaaagctctgggatggctcctgtggcaaacaacaatagacattcaggcactgaagagggaaggagaagcgggtggtctgacatggacccaatgcgacgccaggctccaccaccagttataaatgcaggcagcctagccaagcagaagtcgcctgttcggcctgagacatcaacatcgaaagatgctgtgttctccagttcgacttttttgggacgttcaagcggatcgtcaaggcggcctgctgtatctagtagccgagagctaagcactgaagcggagcaaacacgtagccgcacaactgacgcgagcccaggtgcaacattccagaggtctggagctccacggtggagcccgcagatgcctgattcctcggacggcaggcgttcgtcttccagcaggcgccactcatctaaccccaagaactacgagtctaccattaggggcatgcagggcctaaactttgatggcgatgacagggtgcactattagcatctcatctgtctgggagggtgcatcgcctcccctccccatagatggatgtaccaaggacggccagataataagaggtttgggtgagtgagcccgagcagtccgggtgacgtctcgtaggaactgtgtatgctgcttagcctctgttgttgtacaggcttgtcatttgtttggtctgcgcttaccggtagggcgcgccttgtccggtgaacgatgatggtgtattatgagagggatttcttaaggggttcacgtttggtgtgcttgggttgctttgatagaaacatttgggagaggtttatcgcgcctgctctgctctctcatgtaactccagattgctgagctggcacctgctctgctctctcatgtaatgtaactccagattcctgagctgctatgtttttttttaaaaaaaaaaaaaaaaaaaaaaaaaaaaaaaaaaaaacacaaaccataaaaaaaaaaaaaaaaaaacaaaaccgagaggcgtaagccagagtcagccatctgtttgatgttgtcagcctgtatgcactctcggtgtagttgctccctgcatactgagatgcaggaggggcactgttctcctttaaacagaagcagctctaggtttattggacaaccccactaatccacaagaagctgagaggtgatgcgtgggctgggggggggggggggatgttgttttaattctgtatgctggaagtagatccatcaattgcttctcatttcagtaactattcatgctacaacaacgactttgaggaacatgagacccctgagctctgtgaatgaaggacgtcgtcttgggaagtcagacatcccctagagctagggtgtccattcttgacatgtttcttttagtgataggtggatactgtctaggtaggaacaaagtcttgagggattgatgggcgcatgcatcttcaattcctgtgtgttgtattactactggtacaatctccaatgcttgtgaacttatgtgtttggactgtgaatttgtgatatgaacatatatcactgtgtttgaaatctgtattgtttgtgataatttgtgctgcccgtggnannaaannnnnnnggnaaaatataataaa

SEQ ID NO: 167457 - DNA, 269 bp, Zea mays
  Clone ID: MRT4577_84299C.1
acgagctggtgtgagccctgctaccttcttgacacatccacagttgtcgacgagtggagagcacgtcgcgtctaacgcaaacaccctcttacaactacaacaattgctgccatttaaacaacttggtttgacaaacccagttgtgcactaccaacaacacataataggtggtgccctattatagatttctaaagagttatatcctaataataaagttttttatctgctgtttgggggctttaaaaaataagaaagtgcatttttagatc

SEQ ID NO: 167458 - DNA, 2014 bp, Zea mays
  Clone ID: MRT4577_8429C.1
cccacccgccgctagcactgtaccagcgctagggggcaacgttgtagtgggaagcggaggcctgtagccgccaaatacaggggagggggacgcgttgaagagagtctgaggcgaacaagggcgacggttcgtctcgctgcgtgcactctctgtcactccccctctctctcctcatcagatccggccacttcctgctcgcctcgccgccggtcccgcgccccggagccctagagctctccccgcgacggggccgccggagtccccgggcgcgcggagagaatggaggcggcgctggaggcggcgcgcgccaaggacaccaaggagcgtctggccggggtcgagcggctgcacgaggcgcttgacgccgcggcgcggcgcgggctgacggcggccgaggtcaccgcgctggtggacacctgcatggatctgacgcgggacgccaacttccgcatcgcccagggcggcctccaggcgctctccgtcgccgccgtcgtcgccggcgaccacttcaagatccacctcaacgccctcgtccccgccgccgtcgagcgcctcggcgacgacaagcagcccgtccacgacgccgcgcgccagctcctcatcacgctcatggaggtttcttcaccaacaatcatagttgaaagagctggtagttatgcatggactcataagagttggagggtgagggacgagtttgtacgtacggtggcatctgcagttgggctatttgcttctacggagatttccttgcaacgagttttgctttcacctgtcctgcaactaatgaatgattcgaaccaaagtgttcgagatgctgctatctcttgtattgaggagatgtacaagcacatgggatcacaatttcatgaagagttgcagcgccataatctgccttcatacatgctaaaagaaataaattcaaggttggataaaatagaaccaaaggttcgatcatctgatacaacaatgcagtataaggctgtagagtctagaggcaatgctgggatggagcctgttggcagtgggacaccttcaggttctgttaatgatatggaaaatgaggaatcaggttcaaaaggtaaaaggccattaggacgggactccacgaaagcatcaaggaagaaggcaatgtctagttcctcccagtctactaactacctttcaagaattcatgacattcaaatagcaagactgaagcaaagtgaagaaaaatcagagctgaaacaacagaatattgagttcatgaaggaagttgaactcaaaaagttggagtttcaatccaagaaaatagaaatgcagcaaactaaattgatgatggaagacaggatccgaaaggacgaagagctgaataaaatgtatgctatggatatggatgctttaccagaagagttgagagctgtatacatcgcgaggagaaaaggtttaatcgactatttcatcaagaatccagtgtgatgagtattattgtatttcataatatgttgcgaaccaattttcggcgtatcgtggtcgggtgtgttcggccatctgtgatttcagtttgttgaacatttgcttcattgtttgacaagacttgcttcgtattgtgaacattgtttattttccgaatattattttccgcctaatattattctgttttaccagaggatgtaagacctgtatacatcgcgaggagaaaaggtttaatcgagtttttcatcaacaatcctgtctgaagagtactattgtatttcataatttgttgcgaacctagtgtcggcgtaacgtggtccggtgtgttcggacatatgtcatttcgagatttttgaacatttgcttaattgtttgagaacagtagcttggtttttgaactcgtgtcgtgtactagaagattgcgaaatttttattattaaaaaacatataattccaactatttatgactaacgtatttatattaattacgaagtttgctaattaattgtatactaagtgacggtcgcgcactgttcatagagcaaaaaaaaaaaaaaaaaaa

SEQ ID NO: 167459 - DNA, 567 bp, Zea mays
  unsure (1)..(567): unsure at all n locations
  Clone ID: MRT4577_842C.1
cggccgcgtgggcggcactagattgaaaacagtattaatcttttattattattattattttgttgtgaataaattaataccactgccgttcgccggtaaaaattagacaggcttagagcttttcaaacaaaatttatcatgtaattcgtacctgcgagagggcttccgcacaaaggtgctcgcggttctttctgtcagattctctgtctccgccttccacggcgaccgtctacgcgacgggggattccttgcagctgccctccgtcgtctccatcgtagcttctagccatggatggagggatgtggaggccgccgcctgcgctgagcccttcatgccgacgccgctctccgccgcatcaaggaggtgcgctgagcccttctcgccagcgctgctctccgcctcgtcaaggaggtgcgctgagctagcccttcttgcaaacggtggaaggagagagaagatcagaatattgcgaggaaggaaatgcccagactagagattttgcaccgactccatgtaggctgctgcattatatactggaaatttaagtcggttggcaataatanaat

SEQ ID NO: 167460 - DNA, 162 bp, Zea mays
  Clone ID: MRT4577_84300C.1
cgaactctcacgccctgacaaaaccgtccttcatttatacgcacccaccagatgaaaagggccaaagccaaaaggcattaccgccgcgacaactatggcagcctcgctccaagccgtggccaccctgatgcaagcggcctagatcggcggtcgggcgccctt

SEQ ID NO: 167461 - DNA, 322 bp, Zea mays
  Clone ID: MRT4577_84301C.1
atgtggccatgcgggacacccaccgccgaataaaatgctgttgagttctgaaaaaaaaaaaaaggaaaaaaaaaaaaaaaaaaaaaaaaaaaaaaaaaataaaaaaaaaaaaaataaaaaaaaattacatgaaataaaaattaatttaatataaattcaacctaaattaatttttctttgatgtagttttacaacatttctgtctgtttacattcctgaattttttccggtttttttttcctttcaatactttcttcctttgtcccgttttggccatttccattttgtctgcacccctttttcttaccattttttgcgcttt

SEQ ID NO: 167462 - DNA, 478 bp, Zea mays
  unsure (1)..(478): unsure at all n locations
  Clone ID: MRT4577_84302C.1
ccggccgggaagcagncagcagcacagcagctagatagcgcgcgctcatcaccaaagccgagagccaagcagccagctaattaagcagccaaattcagtgcgatggcgtcgtccgtcaccagaaccgcatgtctcctcgtgctcacactgttcgtcgtctccgcggcggtgatcttgcccagctccctgtgccatggagcccgcggcgtcgcagggttacgtatcggtttggaccctaaccatcctgcgtgcatccgggcatgctcagctcctgggggctcctacactcgccttcccccctatcgcggtggcggccctgtggaaccgcttcccccaccgaacggagggaacccctgacgccgcctgcctacgatggaacgatgcgccacgcacaactgtatcttagctgtgcttatatagtatatgtgatcaataaaactggagtagtgctcggaaaaaaaaaaaaaaaaaagcggcc

SEQ ID NO: 167463 - DNA, 878 bp, Zea mays
  unsure (1)..(878): unsure at all n locations
  Clone ID: MRT4577_84303C.1
gtgcggcgctcgagcgggccgagcgcaacacgactctccgcgcgggatatctcggctctcgcatcgatgaagaaagtgctgctagagcaaacctaagagccaagcggcagcagccagctaataattaagcagccaaattaagtgcgacggtggcgtcgtccatcggcagcgccgcccggggcgggacgcgagcaagcagcacagcagctagatagcgcgcgctcatcaccaaagccgagagccaagcagccagctaattaagcagccaaattcagtgcgatggcgtcgtccgtcaccagaaccgcatgtctcctcgtgctcacactgttcgtcgtctccgcggcggtgatcttgcccagctccctgtgccatggagcccgcggcgtcgctgggttacgtatcggtttggaccctaaccatcctgcgtgcatcggggcatgcccagctcctgggggctcctacactcaccttcccccctatcgcggtggcggccctgtgaaaccgcttcccccaccgaacggagggaacccctgacgccgcctgcctcccatcacgcgcgctctacgatggaacgatgcaccacgcacaactgtatcttagctgtgcttatatagtatatgatgatcaataaaactggagtagtactggaaaaaaaaaaaaaaaaaagggccctaaaaaaaaaaaaaaaaaaaaaaaaaaaaaaaaaaaaaaaaaaaaaaaaaaaaaaaaaaaaaannanaaaaaaannaaaaaaaaaaaaaaaaaannnnaaaaaaaaaaaaaannggggccccccaaccccccctttttttcccctttagggggggttatttggcccttgggggaaaaccgggaaaaagtggtttccgggggaaaat

SEQ ID NO: 167464 - DNA, 503 bp, Zea mays
  Clone ID: MRT4577_84304C.1
gccgggcccgggaagcagcacagcagctatagatagcgcgcgctcatcaccatagcaaagagccgatcagccagccaagcagccaaagtgcaatggcgtcgtccgtcaccagaaccgcatgtctcctcgtgctcacactgttcgtcgtctccgcggcggtgatcttgcccagctccttgtgccatggagcccgcggcgtcgcagggttacgtatcggtttggaccctaaccatcctgcgtgcatcggggcatgctcagttcctgggggctcctacactcaccttcccccctatcgcggtggcggccctatgaaaccgcttcccccaccgaacggagggaacccctgacgccgcctgcctcccatcacgcgcgctctacgatggaacgatgcaccacgcacaactgtatcttagctgtgcttatatagtatatgatgatcaataaaactggagtagtactggaatggtgagaaaaaaaaaaaaaaaaaaaaggcccctagggcc

SEQ ID NO: 167465 - DNA, 687 bp, Zea mays
  Clone ID: MRT4577_84305C.1
atttccttctgttaaaaacagtatatggcccctgtttgtttaatcgataccgtccccacaagtgcagcaatttctcatccctcgtgtgccgtaaagccgatatccttcctatggcatgctccatctctggccccgtgctggttagctctgcatagggtccttgctgcgccccttctagggtttgcttgaaagtttggtgtggcctccgccctgctgccaccaccaccaggagagatgccacgaggctcgtcgagcaggggcgcaagagggggcgtcggaaggaatcagggaagcggtgctaggggaaaggattctggtggccacacaaccaaagatacccatggtaatcgtgctgaaggaaaacatggtaacaagcatggcaattctctgtctcctgaccttgtttgcaagagcaaaaggattcctaagaaaagaacacttgacgaagattctgatgatggagatggtgaaatacgctatctacaaaaactcaaaggggcaaaagttgcaccagatcctgtgaacactggccataaagcttatgatttcgttgatgacgcactcaagaaaaaagagcttaccaagctttctaaaaataaaaccttcccatatgaagtggacaagaactcaaaatggcttgggcttgccaggattgtaagaagaatttaagggattaccatgaagtta

SEQ ID NO: 167466 - DNA, 737 bp, Zea mays
  Clone ID: MRT4577_84306C.1
actcctatgggcgattggtaccctcgaggccggccgggaagcaagcagcacagcagctatagatagcgcgcgctcatcaccatagccgagagccgatcagccagccaagcagccaaagtgcaatggcgtcgtccgtcaccagaaccgcatgtctcctcgtgctcacactgttcgtcgtctccgcggcggtcatcttgcccacctccctgtgccatggagcccgcggcgtcgcagggttacgtatcggtttggaccctaaccatcctgcgtgcatcggggcatgcccagctcctgggggctcctacactcaccttcccccctatcgcggtggcggccctgtggaaccgcttcccccaccgaacggagggaacccctgacgccgcctgcctacgatggaacgatgcaccacgcacaactgtatcttagctgtgcttatatagtatatgatgatcaataaaactggagtagtactcgaaaaaaaaaaaaaaaaaagaaacaaaaaaaaaaaaaaaaaaaaaaaaaaaaaaaaaaaaaaaaaaaaaaaaaaaaaaaaaaaaaaaaaaaaaaaaaaaaaaaaattgggggaaaaagggaagggaaaaagggggtaaggcccaaaaaaaaatttccaattccaattcccccctttataaaaccttatagtttggttccaaaaaaaaagggaaattgatgggccaccggtaagggaaaaagggaaggtttgggaaatttgtttc

SEQ ID NO: 167467 - DNA, 639 bp, Zea mays
  Clone ID: MRT4577_84307C.1
ccttccctctcttgccctgcctggaaaatcggcctgatccacgatgcatgtgtccggaaaggattttcaggctgggaactggcgagtgtcaccttcattgctcctgtttgaatgagctatggggatggtcttgggccaacgttgtgatctgaagtgaaaagcaaggtggtcgacaattcgggttggttaactgcctgcccctttcgaagaaagggggaaaattatccatgtgaggaaaaggctagggaaaatttgtggatagctgtacagtgcaacacttagatttgtatttaaccaactgaaatgttttgttccagttataaacgtttaaatcatataatgttgtttatataggtggaattttcctaaaaaaaaaaactaaaattgtcttaaaatacaaaaattaaaaaaaaaaaaataaaaaaaataaaaaaaaaaaaaaaaaaaaaataccaaaaaaaaaaaacatacaaaaaaaaaacgggagaccctttaaaaggatccattttctctacaccttaatatgaaatcaaaacatttttttaggaaccaaattaaattatgtgaatgctttaaaacttgatgccatgtaaaaacctttgatataccaatttaatacccattatactaattcccctt

SEQ ID NO: 167468 - DNA, 205 bp, Zea mays
  Clone ID: MRT4577_84308C.1
aaccagcccacgacgcacgcctctcctgatccatctgatacgtccaggatgacgttcacccctgtcgtaacagttcccacacggatcgaccacgatcactttcgcaacacgcgacgaaagggaagggtggatcgaacttgcatccaacatcgatcccaaatggtgcttcgcacgtacatgccatatcaatacctatcttcgaccg

SEQ ID NO: 167469 - DNA, 635 bp, Zea mays
  Clone ID: MRT4577_84309C.1
gccggccgggttgggaccgtcgctgccgccagctgcccagctgcgcctcgtcgtcagagggttccctttcctgttcgatgtgacgcagccccccgctgcgccccgacggcggcggcctcaccggctggcgatgggcacgacaaactgagacctccctttccacccaagttctctttcctccttctctctctctctccctctctctgcggaaggtggcggtgctgcactctgttggtacaagagtctggagtgcagtgcagatccacccggccggacctggatcgatatctccgtttgttggttctttccatcgtgcaggttcaataaaaccaataaattctggggttcaactgaacccccaatccgagtataacggccactctgtgctgcaaggtttgtctaagattttcgtgcaataacggccatgtggaggctcaagcagttcatccccaaggagcagcccagccccagcggcctcgagggtcggacggtcgatgttggcaatgtcaaggtgcacgtccgagaggccattgctgagggtgggttctcatctgtctatgctactcgagacctggtaaacccagcgaagcagtacgccctcaagcgcgtgattgtccagggacgagagtcgctga

SEQ ID NO: 167470 - DNA, 156 bp, Zea mays
  Clone ID: MRT4577_8430C.1
ctttattactgtgtatttgcatatctactgtgatgctttaaaaaaaaaaaataagcaaaaaacaaaggaaaaacctatgaaagcggtgctcgaggcttgagctggctacccctagacctggcctggtatcggcgccgtctgtcccatacaagacgg

SEQ ID NO: 167471 - DNA, 695 bp, Zea mays
  Clone ID: MRT4577_84310C.1
ggccctaggggccttttttttttttttttttcttttttttttttttttttttttttttttttttttttttttttttttttttttttttttttttttttttttttttttttttttttttttttttttaaaaaaccaaaacccggggggaaaccctccggaaaaaaacgggggggggaaacccccccccccaagggagccaacccaaaaaaaaaaaaagggggcacccaaaaccggggggggcccaaaaaaaaaaaaggccccccttttacccccccccggggggcccgttttttgaaagggccaactaaaaccgggggggccgttggcccctcccccagggggggttggcttaaaaaaaaccgggggggggcccccccccaaaacgaattaaccccaataaaaatggggggaccccccgcaaccgggaaaaggaaacccaagggtcccgacggaaggccgggttttccccccggggaaattttcccgaaatctaaaaaaaggttttggttagggggaaaaaggttcttggggccccaacccccgggttggaaattttcgaaacaccccttaaaaattcccaaaaagggggtccggaacccgaccccctttaaaaattgccggccccccccaaaaggggggcgggaggggggaatttggcccctttttgcccttttaaaaaatggaaaaggctcccc

SEQ ID NO: 167472 - DNA, 1115 bp, Zea mays
  Clone ID: MRT4577_84311C.1
cattgggtacctccgggccggccgggaagtccaggttcagggaactgaagaactctacataaaaccccaccacaagggcgcagattccacacggttcctctctgaccactcctctcctctcctctcgccggcgcatcgcccgactgtcagtcagcctcagccatggccgcggaggaggagcagggcttccgcccgctggacgagtcgtccctgctcgcctacatcaaggccacgccggcgctcgcctcccgcctcggcggcggtggcagtctagactccatcgagatcaaggaggtcggcgacggcaacctcaacttcgtctacatcgtgcagtccgaggccggcgccatcgtcgtcaagcaggcgctcccgtacgtgcgctgcgtgggggactcgtggcccatgacgcgggagcgcgcctacttcgaggcctccacgctgcgggagcacggccgcctgtgcccggagcacacccccgaggtgtaccacttcgaccggaccttgtcgctgatggggatgcgctacatcgagcccccgcacatcatcctccgcaagggcctcatcgccggtgtcgagtacccgctgcttgccgaccacatgtccgattacatgaagacgctcttattcacctccctcctctataacaataccacggatcataagagcggagttgctaagtactctgcgaacgtgagattctcacggagcaagcaattcataagcttacaagaaatggatcttgaagacaattgaagagtcgtggaatttgttccagaaaaagtttgttgaactatggaataaacacaaagaaagcaatggggaggcatacctgcctgatatatacaacaagccaaagcttttgagcgttgttcagaagaagtacatgacaaacctatttcatgatagccttgggtttggttcagccaaaatgatcaggtaactgactaactgcagatcagatttgtgaatgatgttttttcttttcttaaagagaatatttgtagttaaaatcactttcttttactaactcgtcttttggactgatatgacaaaaagatactcataatgaataataaaaaaagttttggataatgttttgatgtagcatcttttct

SEQ ID NO: 167473 - DNA, 2077 bp, Zea mays
  Clone ID: MRT4577_84312C.1
gaatgcaggcaagaatccggcctgcccaaagcaagtccaggttcagggaactgaagaactctacataaaaccccaccacaagggcgcagattccggccgggatggtcgcggccgggtaaaccggagccccgggcggggggggcacacggttcctctctgaccactcctctcctctcctctcgccggcgcatcgcccgactgtcagtcagcctcagccatggccgcggaggaggagcagggcttccgcccgctggacgaggcgtccctgctcgcctacatcaaggccacgccggcgctcgcctcccgcctcggcggcggtggcagtctagactccatcgagatcaaggaggtcggcgacggcaacctcaacttcgtctacatcgtgcagtccgaggccggcgccatcgtcgtcaagcaggcgctcccgtacgtgcgctgcgtgggggattcgtggcccatgacgcgggagcgcgcctacttcgaggcctccacgctgcgggagcacggccgcctgtgcccggagcacacccccgaggtgtaccacttcgaccggaccttgtcgctgatggggatgcgctacatcgagcccccgcacatcatcctccgcaagggcctcgtcgccggtgtcgagtacccgctgctcgccgaccacatgtccgattacatggccaagacgctcttcttcacctccctcctctataacaataccacggatcataagagcggagttgctaagtactctgcgaacgtggagatgtgtaggctcacggagcaagttgtgttctcggacccataccgtgtttccaaatttaatcggtggacctcgccttatctcgacaaagatgctgaggcagttcgcgaggatgatgagctcaagttggaagtagctgggctgaaatcgatgtttatcgagagagctcaagctctgattcatggagatctccacactggttctatcatggtgaccgaaggttcaactcaagtcattgatccagaatttgggttctatgggccaatgggttttgatattggagccttccttggaaacctgattttggcatactatgcacagaatgggcatgctgatcaagcgaatgatcgtaggcaggcttacaagaaatggatcttgaagacaattgaagagtcgtggaatttgttccagaaaaagtttgttgaactatggaataaacacaaagaaagcaatggggaggcatacctgcctgatatatacaacaagccaaagcttttgagcgttgttcagaagaagtacatgacaaacctatttcatgatagccttgggtttggttcagccaaaatgatcaggagaatagtcggaatcgctcacgtagaggatctcgagtcaatcaaggatgccagcaagagagcagagtgcgagcgtgctgccctcaactgtgcgaagacgatcctcaagggaagacaccagtttgagacgatcgagcaagtcgtcgagcatattcagtcattcgatcaggactgagaagacgacagtctatttgtgcgctgaagcctgaaggagccatactctcgtcaattaacccacgcatgcccgagtatcgatgaatcgtctgttttgtagtgatgaagcgcccggttgtttgtgatctctgtattggttgctaggtgagaaaagtatgtggtctcctggcttgaactgtgtgtacactattattccgggccggcatagcgagcagctgaataatgaaatgtacgggtcctcagtgaccatctcagtgcatataaacacgtgtgttaccaataaattttgttatggtgctggtggttctagggcgaactattagatactgcttctgtgtggatacacacctgtgttatatgaaaattttgttagattcagattttgttgtgtgtagacttacttgcatcattcctcattgtttcataactaacgggttaaccccaatcaagttgtaactattctttactacaggttgctgatgttaatttggatggagctaatgcttctgtatgatctctagccttttgttcattaagcatgacttttagctgttgggacaacaaggggtctggttagatc

SEQ ID NO: 167474 - DNA, 1341 bp, Zea mays
  Clone ID: MRT4577_84313C.1
gactcctatagggcaattcggcacgagggtcgcttttgacctatcggggggcgccgggcgggcgtaacggaaccaaggcggccaggtagctgctgtgctgctacgagtagtaagcactatatatataacgggcaacggcaaagccatcgtcgtcgtcgtggaactcgtacttgcgtgcgtgcgcacaagaacgcgggtcagagctgctggcggttggaggagcagaggagatcgctgtgcgggcggcgatggagaagccccggcaggtggcgcggaaattcctggcccggccgcagcacgagggcgccggcgccgtcgtccgccgcagcatcggcaggttcgagctgaggtacttcgacccgttccttgtcctcgacgagttcacagtttctgctccggccggcttccccgaccacccgcaccgaggcttcgagaccgtcacctacatgcttgagggcgccgtgacgcacgaggacttcgagggccaccgtggcaccatcaaggccggcgacgtgcagtggatgacggccggccgcggcatcgtgcactccgagatgcccgccggccccggcacgtccaggggcctgcagctctgggtcaacctctcctccgccaacaaaatggtcgagcccgggtaccaggagatccagagcaaggacatcgcgtgcacgtccgacggcgacggcggcgtcacggtgcgcgtgatcgccggccacgccatgggcgtgcgctcgccggtgcgcacgcgcacgccgaccatgtacctggacttcacggtgcgcccgcgcggcgcggtgcggcagcccgtgcgcgcgtcctggaacgccttcgcctacgtgctggagggcgagggcgtgttcggcgccgagcggtgcgcgcccgtcggcgcccaccacctgctgctgctcggccacggcgacggcctcgaggtctggaacaagtcgcccgaccgcccgctccgcttcctgctcgtcgccggcgagcccatcggggagcccgtcgcgcagctcggccccttcgtcatgaacaccgaggaggagatcgacatgaccgtcaacgacttcgagtgctacgccaatgggttcgagaaggcccgccactggaagtcgcaggcgatgctggcgcttggcgtagagtagggcgagacatgagcacaggatcaccaaagaaaacgaatagatttttttttgcttcttttttccccattattatcgttccggtttgttgcgttcaattttaacccccaacattggatcgctttgtgtacatatctgccgtaaattatttttttatcaataacgaaattaccagctgttcataaaaaaaaaaaaaaaagcggcc

SEQ ID NO: 167475 - DNA, 434 bp, Zea mays
  unsure (1)..(434): unsure at all n locations
  Clone ID: MRT4577_84314C.1
atccacgcgcgcgcgacacgacgcccggtggtttgaaggatggggncaacggcccggaccacacgaccagcagggaagacggaaggcccaacacggacgagtccagcagggacccagccaagcacgcatggggggagcgcggacaagacaacgacagcgagggcaccggaggctccgtcgacgggcccggcgccggcaagcacaaccaggccggcgcgaagaaggcgaccatcacggcacccgccaagggcgccgacaacccgaccaaaggacggggcgacaacgagggcgaccacgaccacagaggggccgacaacaacagcaacgcgacccgcacgaccaacagccgcgcgccaaccggcaagaccgtggacgaggagcccggaaaagccaaggggaccacgacggacacgcacccgtacaccgggcaccag

SEQ ID NO: 167476 - DNA, 521 bp, Zea mays
  Clone ID: MRT4577_84315C.1
tatgaagaacaacagtaaccacttggggtttttttttggtttgtaataatacacatgcatgcatggtcttcatgcatgggaaaaccttatataacgatagaataatgcatggtgacaaccttcatcatgggaaaacctcgatgatagaatggaaacctaacgtgggcgtgatcttgtagtcactgaacccagctctcgaaaatatttctctccattcgtgctcctcccgctcggacccatcgtaccgcatcatgtacatatcaaacagcacctgcgtctccttcacaagcttgtccggtgatccatagccgaccaccacgtttataatgatcactttgcctccagcttctctgccgggaattgctcgcttgcactgtcccagtatcttcacacagtgttcgtcatcccagcagtccaaaacatgcctcaaaagaacagcgtctgcaggtggaatagactcaaacatgtcaccggcgacgaactgcaccgccgtcgccgccgtgctattgatgatacgatca

SEQ ID NO: 167477 - DNA, 603 bp, Zea mays
  unsure (1)..(603): unsure at all n locations
  Clone ID: MRT4577_84316C.1
ctcgagccggccggctcgcgccatgtctccgtgtccctgctagctccctgagtcgtcgtcgccgtcgtgccccgagcgctccgcagcgtcctgccagggcgcgcgtgcggttgcggcgacatgaatagttacgccaaggcaagacagaagcagcaggggaagaaccgaagaagcattgcggcatggacagctaggaatcgcagccgcgcggagatcgaccagggtagatggacaggctcgaccgggcgggaagaacagaagaagacacccagccgacgacagcggctgcgatgacgcatcggccatcgccggcaacgtacgtgggctcgggcttaagattcttcctgtagatctgtctcggtttgcagcccatatcgcattgatggatcatttcattcaattcaaatccgttcaggaactatccctgtttgcggatcatctctgatcttatccggttgccgcatgcctcagtcgcaggacggacttagctagttatggacacatgatcgatccatccatgatccgngtaccaggtgcatatgagcctttagtccgccatgaatcaaaaaaatcaaaaatatattctaaaaaaaaaaaaaaaaa

SEQ ID NO: 167478 - DNA, 597 bp, Zea mays
  unsure (1)..(597): unsure at all n locations
  Clone ID: MRT4577_84317C.1
taggggccttttttttttttttttttctttttttttttttttttttttttttttttttttttttttttttttttttttttttttttttttttttttttcccccggggaaaaaaaaaaccctttggtaaaaaaagagttcccaacccaccccaaagggggggggggaccctaccaaagccctttttggcccccggggggaaaccgaccgaattcccccccccccaaacggcaatcgggggggggacccccccccccgccccccctgggttgggcccttttttttttcttttggccggggaaagccccccaccgcccgggcccccccttgggccgtggcgccccgggtaaggggaccccttccccccccacggggggccgtcccaaaggcccccaggggaaaggggaccccccccccccccccccaaaggttgaaaaaaaaacccggccctgtctgactgtttgtctgaaaaacaaaaggggggggcagttgaactaccccccgggggaaaggaccccccggccccggggccccccgggagggctggacaaacgggcaggcanttagttgtcactcgttcaccccccaccccgggggcc

SEQ ID NO: 167479 - DNA, 351 bp, Zea mays
  Clone ID: MRT4577_84318C.1
cacgcgtccagggtaagaccgcgtccttcgggtaaatgaagtcttggcttgaaccgcacccgtcagttggtctgagggtgttaaccagccatgattaggagcgttgggggtacccctaattatggtactcgacaagaatcatcataccactgttaactgactagttgcattccattgtacttgctttcaaatagattcatgcattgatatcctttctttgggtactatgttattacactcaaataccattgtctgtgatctttggtgcatcttggcattttaatttgattcaatccatgtctctaggttgtttattaatcccttacaaactctctcctatctgtggactaa

SEQ ID NO: 167480 - DNA, 358 bp, Zea mays
  Clone ID: MRT4577_84319C.1
gacaccctctacgcccatgcccaccgccaattctaccgtgattgcaccacttagcggcaccattgacttcgtctttggcaactcagctactgtgttgcaaaactgcaccatgattgtgaggaagccaatggataaccaacaatgcattgtcacagcacaaggcaggacagataggcgtgagccctcagcacttatcctccaaggttgcaccattgcagctgaaccaacttacttagcagcgaaagatgtcaacagggcttaccttggtagaccatggaaggaattctcaaggaccgtcgtcatgcaatcaacaatcggtgcgtttattcagcctgaagggtggttgccatggatgggt

SEQ ID NO: 167481 - DNA, 421 bp, Zea mays
  unsure (1)..(421): unsure at all n locations
  Clone ID: MRT4577_8431C.1
atcaagaagaaagaaagtcctcgagagtcgagacccagagccgcggtccagagcgggcggcggccggcaacaacgaaacgggccaacgccaccacctccacctngtcctcctcggcacctcccccgtcgcgtccagccgtccagcgttccaggtccagctccccccgcgacccctacgaccccgtccgcctcggccagcgcctccccgctacaagggtccgcccgcgggcgccgcggtaccagcgagcccctcctcctccacactctgcgncgcgggagatcctgtccctgtgccccggaccgagaggagccaggcgccggcgtctggaattcggacatggaagcggcggcggcgggtcgtaggcttcggcgctggcgcgggcctgaccaggtggcaggcggcgcgcctgtcggcggtggc

SEQ ID NO: 167482 - DNA, 852 bp, Zea mays
  unsure (1)..(852): unsure at all n locations
  Clone ID: MRT4577_84320C.1
ttgggtccctcgaggccggccgggactgctgcttccagtttcgcgtccgactgctcgcttcctgcccttccctctgcctctctccctagggtttctacctcgcgcccgcttccgactagcagcgctagcgtcgcctaactccgaccgaggggacaacgagggttttgggacggacggtgggagatttggaggaggcagcggagggccggagaccagaccatgaggccggtgttctgcggcaacttcgaccacgagacccgccagtacgacctcgagcgcctcttctccaagtacgggcccatcagccggatcgacatgaagctaggctatgctttcatttactttgaagatgagcgtgatgcagaggatgctataaggcgtctcgacaatgtgtcttttggttacaaccggcgcaggctctctgtggaatggtctaggcaagttgaaccggtgccaaagagccgtgataggcctactggggatgtaaagccaacgagaaccctctttgttatcaattttgaccccatacgcactaaggttcaagatattgagaagcatttcgaaccgtatggcaagattgccaacattcgcattcgaaggaactttgcgtttgtacaatatgagacgcaagaggaagctagtgccgctgttaagaacactgacaagagtccggtcgattctgaggaacccagtaaagaagtagtttccaaggaagaggtggcgagcaacaacatgatttttgccacgccaagtatacctggaggagccgtggtggtcccagtatgtctgagtgtagtcatggtaacgcgatgctggnttccttggttgttgattggaacgaaacctaagcgt

SEQ ID NO: 167483 - DNA, 1343 bp, Zea mays
  Clone ID: MRT4577_84321C.1
gatactagagggcggccgggactgctgcttccagtttcgcgtccgactgctcgctccctgcccttccctctacctctctccctagggtttctacctcgcgcccgcttccgactagcagcgctagcgtcgcctaactccgaccgaggggacaacgagggttttgggacggacggtgggagatttggaggaggcagcggagggccggagaccagaccatgaggccggtgttctgcggcaacttcgaccacgacacccgccagtacgacctcgagcgcctcttctccaagtacgggcccatcagccggatcgacatgaagctaggctatgctttcatttactttgaagatgagcgtgacgcagaggatgctataaggcgtctcgacaatgtgtcttttggttacaaccggcgcaggctctctgtggaatggtctaggcaagttgaaccggtgccaaagagccgtgataggcctactggggatgtaaagccaacgagaaccctctttgttatcaattttgaccccatacgcactaaggttcaagatattgagaagcatttcgaaccgtatggcaagattgccaacattcgcattcgaaggaactttgcgtttgtacaatatgagacgcaagaggaagctagtgccgctgttaagaacactgacaagagcaccatattggacagggtagtgaccgttgaatatgccttccgggatgatgacggcgatagagatgaccgatacgacatccccaaacaaggtgcttatgacaggcgtggtggtagcccctacatgcgctcacctagcccaaggtaccgaagggactacggtccagattatggtcggcgtggacgttatcctggctatggtcgccgtgatggagcaatgtatgaaaggcgaagccctgtatatgatcgctacggcgggggcagaagccccgcttatgatcgctatgacaggaggagaagccccggttatgatcaatactagtccggtcgattctgaggaacccagtaaggaagtagtttccaaggaagaggtggcgagcaacaacatgatttttgccacgccaagtatacctggaggagccgtggtgtcccaagtatgtctgagtgtagtcatggtaacgcgatgctggttccctggttgttgattggaacgaaacctaagcgtctgaaagagattggtttgcatggattgcttgccattgccaccttgcctgttttgaagtgtaacctttgctggtgaatgtaatggcagtcgactaacttgtacaccgtatctttgcgtgcccattttttaggcgggtgaaattttactcgttgcctgttttgatgcgcaaactgccag

SEQ ID NO: 167484 - DNA, 636 bp, Zea mays
  unsure (1)..(636): unsure at all n locations
  Clone ID: MRT4577_84322C.1
aatttcggcacgagggctgccgctactgtggtttcgaccgaggccctgtcggaaccgccgcgggcttgtacctcttcgtcttctccatggatgcatcagctccggcgggcgccgcgggggcagatgcaggggcaaggccactggacaccgaaatcgcgccgccgccgttggcttggaggatggggtccatgacgaccgggtagtacgccgcgggggcaggtaccgcgggtcccgccgcggcgcgcgtcggctggagcttgcgccggcgcttgggggccggttcctgctgctcgccgctggcgtcctcggatgccggctcggcggatatgcggaggacgccgtcggtgcccgtgatggcgatcgcggggaccgtgctcgtgcccatggcagcgatgatggatggctccgactgctgcagctgcctgccttgttgattgagcaagatgaagacatgtgtaggcatgaagaaaagtagcaggattcatgtacagttgtttcaatgaaactcccagtgagcgctacatgtccaaacacttgtttcaatgaaactcccangattcctgtacagttgtttcacatgattgcagcgcancaagaagaagctgatctgaatgctgctatagctgctancttgat

SEQ ID NO: 167485 - DNA, 294 bp, Zea mays
  unsure (1)..(294): unsure at all n locations
  Clone ID: MRT4577_84323C.1
atcctctcctcaaggacgccgcatgcggtttagacaaaaaaaaccaccctgaagtctataccatgataccaagagcagcataggctcaaacaatgctggcgagaggccgatgctccagatgtggcatcnaaatggcaggtgccccttagncacccttccaatcgggggttcgttgggggcgacctncttcnacctacctccctcaggcggggtgggagaaaacaacacactgctccgaacccactntctgttgatcccaacatgctcngngagggtggcccccaacccgccgtt

SEQ ID NO: 167486 - DNA, 866 bp, Zea mays
  Clone ID: MRT4577_84324C.1
gtgcaagcgcaacaacttgagggcagagtgttggcggcagctcgctcggctcgactcagtttgacggctgggaaggctttctgggcctgtgctgctcggcttccacgcgcaattgaggcccattgggccgccgcctcagacccctttcgccaaccccctcctcctcgagccgccgtcgcctggcggtgccgggagatctcccccagggacgcgctcatccttttgcctcccaactgtgctgtgcaggaacctgcggggaaggcggtcgctcgctcgctgagaggatgcctctggggctgacgctgggctcgctggggcggtcgatgcgccggaagcggctgtcctcgctcgacatcctctcctccaagcgggcgccgcgggattactacaagggcaagaactgcaagcccaccgggttccacacccgcaaaggtggatatgtgattgttgatgaaaagttgccaagatttgtggtccctgacttgactgatttcaagctgaaggcatacgtgtcacaatgcgccagggacctcacagcgtcgacagcatcctctacttcagcagaaagtactgaaagcaagagctgatctgatctttgcttgcggggaggcagcccaactctgaagttatgtttccctagactgcccatgttccgaggattagcatcagcattctagctacaaacatttcagatatctttcttgtaagggcaaacattatggcatacctagattcacttttcctgcttgtaattttgatcttcattttgaagtaataagtacttgagttaaggggacatttcttgtggaaaaaatgacgggaaatagctggacgttcctcttgaaaaaaaaaaaaaaaaagcggcc

SEQ ID NO: 167487 - DNA, 1018 bp, Zea mays
  Clone ID: MRT4577_84325C.1
atcctcacaggaaaccacacatcaaatacattcttaccgaaaggcaacttttttttttttttttttctaactcgttttctttcgccacaaacttcaatccataccaatacattttttacacatatacatacacatgcacaacatcgaccaaagcttaaatagattaatccacaaaataccaagtgaacaacctggacgaatcgagattagtcacatgggttgtccacacgactcggcgtttcgttgaacgggcaaagcgcgaagcgcgacgtcgaccactagcacgggtttcaacggcgtcgcggatgggctgcgcacacccggttggagcccaacgacgagtgcgacgaggaaaccccgcaacagtgatgctgcactagagaaagggcacgaaatctggatgggaataggcgcgacgggcatgaggagagctcgaccaagaaggagctcggctggcgaggcgagggaggatgtcggcgagggatgctcgctgcacgcgaccagcgaggacaggcagcgagtttggatgaggagatttccggccatgtggaagacgccaaccatttcaaggcaccatgggggctcctgcgccgaacagagagcagggaggaggggtgcttgcggtagagagaagaggagcaggggcgtcggcatggagcaggggccagcgccatggctgccagtggcagagagcagagagaaaaaggaaaaaaatggagcagggaggggcaccgagctagaggaacatctgcgcgcccccaccatggctggggaaaggagcttagggaggcgctgccagggaggagacaacctgtaccagcgttgagggagtagggcgccatggctgggcttggcggccaaggaagatgagagagcagagaggggcttcagctgctggttcccctgggcgacatcctgtgctccacgagtctgccagagtggagggaggcaacgcccaggagcagtcctactgccgagcgccatgtagcaggaggagagatggtgggagaaaaaggga

SEQ ID NO: 167488 - DNA, 244 bp, Zea mays
  Clone ID: MRT4577_84326C.1
ggcgtgctcccaggcaggtcggacgtggacggccccgacggcgagatggcgtacatgcgcgggagcttcgagcacaccgtcgggtcccgggactcggagtcgctctacatggtcggaccgcccggcggcgactgcccggagctcgccatcttcttcgttaggctatgaatgaaccatagtaccaaacgaacatgctacagtgtacacgtcgcgctcgtggtgtctaatctctctcgtctggtct

SEQ ID NO: 167489 - DNA, 439 bp, Zea mays
  unsure (1)..(439): unsure at all n locations
  Clone ID: MRT4577_84327C.1
tgcaggtnggcagctgggtttgcctcagcttgctgagtctggcctggtcccttctgttgcagcttttgttgttgctggtgtgtcggtgccttccccncggcgggtgggcttgatgaaagctgttgttgctgttgtgggtgggcggctgggttctccctggctcgttgcctgagcgctggcgggggctgttgcttttgttgttgttgttggtttgctgcttcgtttgcccgtgcgtgtgggttggttgcctgctcctgctgttgcgggtcggcggctagggttctcctcttcttgttggctctgtgctggttggaactgttgttgctgttgtgttgcgttggtttgtttggtttgctgtgccttggtttgttgttgcctttggttaattggtttgtgtncgacgctcgcctcttgcgcttgttgttgcctgtttgcttgc

SEQ ID NO: 167490 - DNA, 695 bp, Zea mays
  Clone ID: MRT4577_84328C.1
ccggccgggatgtgaacagcccccaggcctcccacaggcttcagactatgttgctcctactgcgagcgttggtgcccttgctggtgcctacgctagccagcgtaaccagactgagcctgaagcggaccatgacttgatgcaacgcatcagaattgtcgagcaggctattcaagagggccgttaccaggatgccatgattcagtggattcagagtggtcgcgaggaagagattttccgtcgctgcctcagccgcttcccccccaagaagtttgagaacatgcctctcctgattctgcttgttgtgattgccaccatctccaagaatctgaagccaaacgctcgtctcaaggaggaagttgaatggatcgaaatggcactgaacgcgtttgcggaggcccttcccacctttgaatgggaccaatccggcgctcgcgacattatcaagagcacgacttcggctatgcagctgctcattggacgtattcagcctctcatcggcggcatccaggacggtttccttacggatcccttcctcgccaacctcgagagagccaagctcgactggattgtccgaacatccgaacgtgtgcttgacatctgtggcgccccgggacgctacgagtaatcgaacgcccgttgtctggcattaaaaaatgagaggaagtcctgctgacgaccaattcttgtctgacgag

SEQ ID NO: 167491 - DNA, 572 bp, Zea mays
  Clone ID: MRT4577_84329C.1
gccggccgggccgggagcataagctcaatcggaaataaaaaagcatccccgtctcccctgattctctccgcccaggtcagctcagctccccgccgttcctctccgcgccccttcatcccgaatctcggaatgggaaccgccaccaccaacggttcggcggagcaggcggccgcgcccgtgccgacgctcaagttcctcatctacgaccgcacgggctgtatcggacgactgctgggcgggctatgcgcccggcgcgggacgacccttcctaccggcgaggagtgacagacagcgatctctcgagacaactggattgctctttggcattgcagctgtgcaacacaaaattggaggataggatcgcaaaaagctgctggtgggggacttctcccttttagaccatgcgcgtcgacgtgctgctgtgtctgcgtactccacctgatattgctgctgcgattagctgagtgaagcatgaactgcagtgggtgcacagtattatgcaagttctgtcagccgatacgttacaacccatcattgaatcatgactgaatctacacagctctatgtaaagt

SEQ ID NO: 167492 - DNA, 617 bp, Zea mays
  Clone ID: MRT4577_8432C.1
tttcgcatcgcttttttcattcgccgccgccgcctgctctctgttgctgtcggcatgagccagacggactgctatatgctatcgatctatcaagagccagacataccccaagaccaggtactgccgaggtggccctgaccctaggaccacgatctacgatgttggcatgaagactcagtgtgttgctaacttcctctactgtgtgcaccttgtctcttggaacaaggagaatgtctccagtgaggctctcgaagctgcccttattggctgcaacgagtacatgaccaagtctgtaagaaactatgtcttgatgcttcgggtcccagatcaccccaatccatgtccttgccatcatcaacatgcttatcctggctatcattcataggctcccgactgcaatgacgtgcgcctttgccaagactcaagtctcctgtgctaacctcgacattgtgccagccctcctttctcctctatgcaaggacaacaatgatgcacatggcagtgaagctctgacgttgggcaagttctagttccctggccgccaaaagattattgagagcataaagtggggcttcaccaagatcagccgtgccgactacctgaattacaaaagtgag

SEQ ID NO: 167493 - DNA, 782 bp, Zea mays
  unsure (1)..(782): unsure at all n locations
  Clone ID: MRT4577_84330C.1
gccgtgacagtggggtcacgaagcttggactcgggtcttggagcgaccggtccaaccctagcatggcggcggcggcggcttcagatccggcctgtgcgctggccgccggcgatcttctggcgacgtgctcagctcccacctccggttctcctcctccgtacagtactcgagtgagtccctgcactccagtctcctccgtcgttcctgctctccccggcttctcctcctcctccagccgaccgacgtgttctccccaggtacttctatcctatccgagttgcctggccgatcgccagactcagccatgcatggaggtggcaactagctagtgacggtcgccagaatgacataggctgatagacaaggacatgagaacctgctgatacatcgcagctactgacgggggaaacatgcatgcaacccattttttttccttcttttctagtagcatagtttatttctcgtgaatgtttatagtggaaatgagccattggatcatcgggattactattgagagtgacgttccatgcatcacctcactcttaacagtgcggcagaaggagaccattaagttgactttttaagtgaacatctccaaaaatggctgatttttttcttaacaaatacatgacataattaatttgatgagtaatggtgccttgtcactttgatttggatgtgatgcctagctatctcctacctaagactgcccaccagagccattggttgcagagagtttanacaaatgggcagcatgcatgacaaccagctccctctcctcg

SEQ ID NO: 167494 - DNA, 356 bp, Zea mays
  unsure (1)..(356): unsure at all n locations
  Clone ID: MRT4577_84331C.1
cccnnnnnnnnnnnnnnnnnnnnnnnnggggggggaaagcaacaaaccaaaggggccanagccaggaagagcaacaaacggggcccggccgcccggcggggacacaacncaacnaaanaaaaaccaaaggcaaaaaaaccaggaaacgagcaggaaannnaagggggggcccgggccaangcaaannccggggcnnaaccaaggggccggcacgcacgagggcgaggacgggnaacgacnaacagcnaccgcgacagagncacggggaggggggggcgccggncaacccccgngacaaggcggggaggaccgncnccgcggngagcngcncggggccgggcgaccgcaacacgagc

SEQ ID NO: 167495 - DNA, 426 bp, Zea mays
  Clone ID: MRT4577_84332C.1
ccgggggtgccagcctcgcgtcccgtccgcgtacgtgccgtcttttcgtccccgcgtccgggtggcggttgcctggatagctgccgtcaacgaggggcagagcgaggacaagagacggtggagggcaaggaaaagaccccctaaaaggagcaaccgttccttgactaggcgcacaggaaagctcacgacaccgtgtaatggggttaacagctggcaagtgggtagagataagtctatgcaaaaaaggtcagttgaaggaaaataaatgacaaaagtgcccaaattgagacttacgctgagaggatgattgtagagaacaacattaagtctgagacacaatagaagcagatagaggtaagaaaagggtcagaaaatagagaaagtcaccaaaaaagcagcaagcatcagccaggatgcaattcatat

SEQ ID NO: 167496 - DNA, 173 bp, Zea mays
  Clone ID: MRT4577_84333C.1
gggttattgtctccttttcatttaaggaaacaacaacaatttacttgcttaaaacagtcaaaccaacccgatcaaatactatacatccaagaggttccaccaaactggcttctccattgttttctgactccccgcttcgacacaaaacacccaaaatttctccccccggacac

SEQ ID NO: 167497 - DNA, 317 bp, Zea mays
  Clone ID: MRT4577_84334C.1
caactacaaaggttgctgtaggagataagatattgaagtagtgctaagtgcctaacacctgcagtgaacaatggcctctgcatcagcatctctgcccaagtctgcacttgttcttgacaagtctgattgggtgaagggacaaacacttcgtcaaccttctgctgcatcagttgtgagatgcaaccccaccaccccatcaggcctcaccatcagagctggttcctatgctgatcgactcgttaagaccgcgataacagtggcttcatcagggagtggtatgttggcatggatgagtccaatgtacctgtgggaagcgt

SEQ ID NO: 167498 - DNA, 682 bp, Zea mays
  unsure (1)..(682): unsure at all n locations
  Clone ID: MRT4577_84335C.1
gggtacctcgaggccggccgggccgggtactgacggaagggctctttagttctttcagctttttttggagcgaacattacatgtttgcatgttccaaagcaaacgtcagaaatcaagttttatctgtagaggtttgctggcgagggttttcatccttgaggccatcctccatttgaaatggtctcatattccattgccttgggtagtggcatcgctgcattgagaactttgggactggccatgagacatatatttcattaaaacttattatttcgttgttatgtggtggcttccattgctagatatgtgctttccagaatccttgtaactgaaccagtttgctggtatctgtctgatctgttccagtgttggcgctcagaaagtgaagtttacttgcatgcagttccgtcagttatgtcaggataagaacagagacgggtgcatcatggcattggctgttgtgagaaatgagttctatgatctgcgcaataaattccagactatgcttcagcttgagcagcaaatccaggctcaacaataaatcgaagcagaaagcgtagctgcatgtggcctcacatgataagtgtatcttttaagatgtagaccatggtctctgtngtccctacattgtgancaaatcatcgtcnggtgagtcggctcacatgcatgtaactgttagcta

SEQ ID NO: 167499 - DNA, 268 bp, Zea mays
  Clone ID: MRT4577_84336C.1
cttctaccttcttttgtttaaacatatcatttgatcatattggacaacgcaacgcacatgttgtgtaaatgatcatcaggaacaggtgaattaacacttaataaacaagccagaacagaaatacgtagtgggagcttaagcaaagctgctaataaccgggtacattttggttaggaatggcgatgaagacaggtttccacgcttagcgtcataaccatataaaagggtgtgcttccaagcgctcgccatttggaggatttaataaaac

SEQ ID NO: 167500 - DNA, 224 bp, Zea mays
  Clone ID: MRT4577_84337C.1
cttatcaaaccaaacagatttatataacaaacgggtttccaacggaggcccgttttttttacaccatattttaaacctgattaatatgcctacgatggcaaaaaacaagtggttaattacagatcgaccaattattcactctcccattttttaataaaggcatggccgttttttttattcatgccagaggtaccgatgttgggtacctcggacatttggagttc

SEQ ID NO: 167501 - DNA, 300 bp, Zea mays
  Clone ID: MRT4577_84338C.1
caattcaagcgcaaatcacgttgagaagcattgctagctcgacgcagatgcatgacctgatcaagggcacactggaaaatcagaggaatttcgtctgacatgtgcacggtgcaatcgttcacccatcctacagctgggcagtttacatcaagcgaattacttatctagtccacttaggcattacattagatattaataaaggtcagtctagatgtaccgaaatagaccaagataagtaattcgcttgatgtaaactgcccagctgtaggatccagttttaaagtcctgttccacgcactt

SEQ ID NO: 167502 - DNA, 320 bp, Zea mays
  Clone ID: MRT4577_84339C.1
gtcgtgcatttgaattcaatgtgtagacgcatattgtcccattgacgatctcgcagtaaatgtgacgctggatatcccttacgctggaaatgaggcacactgatgatggtctcctacactccgatgctgtgactactgaaacgagcttatctatgaccgtaaagctgcaaccaggagctcaagagcgacctctaggacctttacatcaacggtgctatccagctggatgttgccgggagcaggaaggctgttgtgatgcccgtcccataccgattgcccaagggcttcatgaagatccatgtcttgatcgatagggagct

SEQ ID NO: 167503 - DNA, 337 bp, Zea mays
  Clone ID: MRT4577_8433C.1
agttatcgatgtctcactggctcgccacaaccgttcgaactaagggcgagggggtggattagagattctattgcaacaacgccaaaacacacccctgtcggcaaggtgcagagtccacattcgatggttttccataccaggctcttacattcagacgacatcgctaaaaccacagctgcagtgggacatgctaatggcggtgctcgcgcacatgagacatatatccaaccgagcagtggtccacgggacatccatgttgtcgtaagtggaaatatggtcatttcaatacaagttttccgcagtgtgaccaacaacttcagcgaggacaacatccttg

SEQ ID NO: 167504 - DNA, 190 bp, Zea mays
  Clone ID: MRT4577_84340C.1
caggcagccaaaatggagtccaaatgctaagcccctcggaaatcccacaaagggactggattcccctactgaacatcaccttcggtcacgccacatacaacgtaccaaattgaaaggtgctatgacctgaagatggcaaagggggaaagccactgggcatcactactgccacaatacatccgaaaaggat

SEQ ID NO: 167505 - DNA, 202 bp, Zea mays
  Clone ID: MRT4577_84341C.1
ggaaggaaacacccaaacattacccaggacacaaacaaaggttttttaacaccaaaaccttgtttgacaggcaaacagatttatgcaagcagatcagttttcctcctcctcggggccggcatcactggcgccctttggggggaccttcttgtagacctttttcagggcgggcaagtccttgggtgccttggagaaattcccc

SEQ ID NO: 167506 - DNA, 1256 bp, Zea mays
  Clone ID: MRT4577_84342C.1
gcggaacacgaaagcggggaggggcgcgagcagccatcagaagaaagctccaatctttctcgccctctcgcggttcggaggagggacccgggcgcaaagactctaaagcgcaggtgagctccgggcggggaagatgttccccagcctgatccaccacgctagccacggccgacccgacgtcgccgtcgccgaggacgcaccacgcagtggctgcgggttagggctgcccgggcacggcggcgggcccagcgtggtgctcacggccgatcccaagcctaggctccgctggacggccgacctccacgaccgcttcgtcgatgccgtcgcccagctcggcgggcctgataaagcaacaccgaaagctatcatgaggacaatgggagtgaagggcctcaccctttttcacttgaaaagccatcttcagaaatacagattgggaagacagtctggaaaagagttaacggagcaatcaaaagatgcttcttaccttatggaagctcaaagtggaacaactttgtctcctagaggttctactccagatgtgaaagagagtcaagaagttaaagaagcactcagagcacaaatggaagtgcaacgaagattgcacgaacaagtggaggtccagaagcatatgcagatccgaatggaggcgaaccagaagtacatcgacacgatactagataaggcgttcaagatagtatctgagcaactgagtggcttcagcatatctgaccaagacctaccgattctcacctctgctagggccatgcttagccctgcagatcacttgagttcgtctgtcttcccccagctctccgtcagctccgttagccttcacaatcctggtcctggaggagggaaaggccttccgcatgttgccgacagccacgtgttctcccagaggccacctgaacaattcaagcgcaaatcacgttgagaagcattgctagctcgacgcagatgcatgacctgatcaagggcacactggaaaatcagaggaatttcgtctgacatgtgcacggtgcaatcgttcacccatcctcccgtagcacatctgtgaaaatcaaggttatcttggtctatttcggtacatctagactgacctttattaatatctaatgtaatgcctaagtggactagataagtaattcgcttgatgtataaactgcccagctgtaggatccagttttaaagtcctgttccacgcactttgaatcaggttcccctcagtgccaacgtttgttggacgaaacgga

SEQ ID NO: 167507 - DNA, 341 bp, Zea mays
  Clone ID: MRT4577_84343C.1
aggcaccacccgaagcccctagaactacttctaccgccgtacctcgccacgacaccgacccctctcaacttgcgagtcgtgatctggaaacgtcagcacaacaagcccaatcaacagcagctcacggcaagaagtacgtcgcagtcgtgtgcagacccctttcacgttaccctgcactaggtgtgtaagtcgcgggacaggaccggacggacgctcgccattttcgatagaagacaggttaacgacgtcaaggtcatccagaagatgctggtcgagttaatgataatgaccacgattaagacattcgacgagatgatcaagaagatgactgactaggagat

SEQ ID NO: 167508 - DNA, 867 bp, Zea mays
  Clone ID: MRT4577_84344C.1
accaagtcaacgcgccacatggttcatcacattaatcaataataacctctcatgtatgctcgcatctttgagtgcaataatgctcagtggcatccgtacataggtagccattccctcgctcgtctcagaagccagctgctcctccgggttgactgggaactcaactgacctcgccggcggtgagcacgccgcgctgcctcgctccccctcctcgttctagctactacagtaggaggcttcccacctgaggcacttgagttgcgcggtcgtcgcgttcctcgtttcgctgaacctccctctgtgcatgcagatctgtgcaggctcgggtggcgttgaatgactcggatcctgggcaatgcagccatggtgagccaccgacccatcatccatttcttgcacaggcccattcctacacccatatatagggagctaccttgatctctcccccaaatagggggcgcaatgggcagagtcgttggagcgcgaacatggggtggaggtgtggttcgaggtggcctaagccaccaaatgtaaatccatagcttcctgtttaaataagactaaagcaataggcactagttaaatgtcaaaacaaagaaaatattagggtaactattagaccaaaacatttactagtacacaatattatatatgctatccacaaaagaacattacactttaactaataagtgttatggaaatatatattaaaaagggatcaagtccagaacgtcataggctaagagatccatgcatccattgaataaaagtttattcatcattggttgagatggtttggaaatgtacaatagagacctctaaagactccaatgtgtattggatcggacgcgtggacggacgcgtggg

SEQ ID NO: 167509 - DNA, 528 bp, Zea mays
  Clone ID: MRT4577_84345C.1
cattgggacctcgagccggcgggatccttgacgtccacacccgcacctgaatcttcacaatggctctcggacccgaatcccaggcaaagaccaagaccacatggcacatcggcgcatggggtaacccctacgagggcggtggccgacccggaaagggcatcgtcacctaccagctgagccccaaccgacagcgccccatggccaacttcctcagcaagggcttctggaacgttgtgcgccgatccaagaatcaggttctctacatcgttcctccgctagttctcggatacggagttatgcagtgggcaatcgagaggaacgaattcctcaactcgaagcctggccgtgctctgtacgccgatgaggaggagtaaatgcgctgagcagaagtgacgagaggctggcttgatggaatgtagtgcatgtcgttgaaagaatcaagtggaggatacacgcagcatgctagtcattgtagcgagacgacaaatagactgtacaaccacgaaaaaaaaaaaaaaaaaagcggcc

SEQ ID NO: 167510 - DNA, 774 bp, Zea mays
  Clone ID: MRT4577_84346C.1
tcttccgggaaacgtctcacttctattgtatttaatttttttgtctgttttatcgatcttatgttgtagaaacgtatttacttctgtatttattggtacactatatttatagacactaaattgtataataaagtttattaattctcttgtggtgtcgcgctttgaccgccgctgggtgtgcgcttggctcttgctacgtggtagccgccttaccaggttaaggcgagatgtatgctaggatggttacgggctacgactacgacgattgcagtgcgaatgtagccatcaacaagcaactggcgccccgacccccgacgacgactgttctcggatcatgtgctgactcgtcggcatttcttaaactcggagagtcggaggccaccgagtttcaaaccaccacgatctctatcgtggacggagaaattggatcggcattgaacgtagctcgggttgaaaaaaaacgtatggtgttggcctaaattaaaatatctgtggatgcatgcgtggaagacagccctacatgtccacaatgtacctccaacgatcactacaggagagacaaactttacctagcgctaaatattttgccgagtgcgaattcacggacactagacaaagatcttctttgcccgagtgttacactcggcaaagcaagacactaggcaaatcaatcgtttgccgagtatccgtcactaggcaaagtaaatacgtgggtgtccgaagtttgcctagtgccaaggaaaacgctcggtaatcggaagtttgcctatggcc

SEQ ID NO: 167511 - DNA, 1280 bp, Zea mays
  unsure (1)..(1280): unsure at all n locations
  Clone ID: MRT4577_84347C.1
ccggccgggaaaaaacggcaaacagcgaattcacagcagcaaacagtgtgaatcctgcaatctccaaacccaagcccggcggcgagatccgcgcggcaggcggacggggccgctcgaccgccttcgtgccgtgcgcgcctccccacctcttccgttctccgctccccgcgcccgcgaaggcgaattgctgaattgagggtggtggctcgtgcttgattttgattttgggggtcggtttcagttccaattcatgacggtgcggccggggtgggtgggtgagggtgcgcatggcctcggcggngnnnngnnannncgtggcgtgcaacccggagacgctcccggccgggccgcactcgccgcccccatctgcatctacctcctcgtcatgtttggtttcagagatccgccactttcctctgcgtttttttttcgggatccttttgtctttccatggtagggtgcgatgacgaggtacacacaaccctgatcaatcgcctccgatggcgatctgatgttcaccttttacctttggttcgtattcgctgagcatccgatcttcttcatctatcgaggccagcattttttgtttctttttttttcttgctcggtttgctttggatcgagggacctggggatccgccgcccttcttcgtgcggcgtcatccagtttttacccctcgaatacggcttgcaggcgcgtcctagccatctcgctctctgcataatcctctgcgagacccgggctcgtatgccacattcgtcgttgtcaaactaaacaaaaaaaataggcttttgtcgcgaagatcccagcagagaggtgcgctgatgcctccctaacaatcataatcttcgcagagaaacgctcatgatccgtggtttcgtggatgtgtgatttggatttttgttccattacatctgtttccacggcgacattttcatgattactgcagcgaactgaacgagggacctatggatggactgctctttgtccgtgttgtgccgtccaagtttgccttcggatagtaaaaccagcaatctggtcacgagatctcgcaagccttttcatgtttgtgggaatggtgtgccaatttgccaaattttgggtttctatcgttatcttcataggtcgtaattttgccaggatatagcgccggaaccccatactgaggtcgtcgttattgcagtcataagcgacgatgaaactttgaacagaccagaatgttcttgcagtcacaagtggttgtctaaatttggatattgaacagaattacttccagttg

SEQ ID NO: 167512 - DNA, 257 bp, Zea mays
  Clone ID: MRT4577_84348C.1
ctcacgcgtccggacccacgcgttcgcgaatggcgttactttacctagaccatgacatgggggttattgcgataaacatccgagagacgcactggtatcttgctgtgatccatgcaagaaatatgcagatactagtgctcgagacacttgatacttcacaagaccgtaaagacctcactgactctattaaaggtctgcaatggcaaattgatatgatatctcaacgtacggagttataagactacacgtggtcagac

SEQ ID NO: 167513 - DNA, 117 bp, Zea mays
  Clone ID: MRT4577_84349C.1
ccaataaaactggctctcttattaaattaaaggcgtattatcatattttctcatgtggcaacacatttaatcgtgatcgaaactcggacgaattccccgttggaaatagcctaacat

SEQ ID NO: 167514 - DNA, 481 bp, Zea mays
  Clone ID: MRT4577_8434C.1
gggggcgggaatgtcgcccaaatatttttccctgctgagttttcttgactaccataaatatgggacagctataaacagagaggagtaaaaaaccggccgggaccccccccttatcgtcctccttccgggtcgtttcgggtttggcatctatctgtgggggggggggtttacacttttactacaagcaaccaatccaatttgcaggtcggaaataaggacccacatacgacggcccccaaagccggaggagtattctgtactgggcgggcggggccggctttggaaaaaacgggggatggacaactttaccccaggggcttggcgtcaaggaggggcgggtcggcaaagggcccctaaagccaccccctggcaatgtggccctaggcggcctccctgagggggatgccgccccacctccagggggtggaggggtccgggcacccgtacccccccgggttgccgcacttggacgtcaggttga

SEQ ID NO: 167515 - DNA, 144 bp, Zea mays
  Clone ID: MRT4577_84350C.1
catgcccgcggcgcgcttaattcgactgaggagctccattggatcggatccggagaaggaagaggaactggatgaccgcacttaattacagatgtgcggtagttgcaggatgactaaaaagtaaggacggtagctgcttagtat

SEQ ID NO: 167516 - DNA, 775 bp, Zea mays
  unsure (1)..(775): unsure at all n locations
  Clone ID: MRT4577_84351C.1
ccggccaggactctgtccctcaagcactcgacagcttgggctcctgcaggacacgagatcgcttggtcgcaacaccaactccaggctcctcagacttctgccaaggctacctctgtcgcaagcaacactctttcctccaagctagacgtttcccagaagacatccacggtgacaatctctggcaaggactttgagttcgccttcaaccgtgcgtacggtacattgaagagctggatctccaacggcaagacagtgcttgactttgaccccaagactaaggccgccatcatcccatcgttctggcgacccaagaccgataatgatgttcctggcgctgttccctactgggagcgattcggcgttgaccaactcgagtctcaacttcgatccttcactgtggatgccagctcagacaagattgttctgaaatcgaagacgtttattactcccccggtactcttctggggatgggattgcgaaattgagtacacagtgtccctgaatggctcactatctgtcaatgtgacccgtctctctccacaaggctccgttccagatcacattcccagaatcggtctcaaccttgtggggaagtaagacacttgagcatgtcaagtggctcggccccggacccggagaaagtatcccgacaagaagacttctcaacgcgtaggcatctgggagcgtcgagtccatctccgacctccagntcccatacgacgttccccaagagaacggtaacagagaagacaccagaagggtctcactgcgagac

SEQ ID NO: 167517 - DNA, 373 bp, Zea mays
  Clone ID: MRT4577_84352C.1
ccttgcggccacgcttttctgattgatcagcgactcttgcattggacctgggtatgagctgggtattcctatctgaattttctcgctttatttgtactacactcgtgctaattatgtgagaaagatttgcgcccccctggcggccatccggtattttatcctattatacggattcacctgccctgttggtgaactcctgctatcaatggcagaaggaaattcccgcttgagccaattaccaaaggccctgatattaggcaaactgatggctgtcctgtttaattggcactccagaggaggccactccaatatggtttgtgtgaccgcacgctactaacttactctactatatctgcatgaaaaaggatgaacc

SEQ ID NO: 167518 - DNA, 171 bp, Zea mays
  Clone ID: MRT4577_84353C.1
tcgtctctattaatatattctataatatattaatcgtttcctccactaacaaatcttaacagcctgtgatcagttctcaattctattgattcttctatagcgatgtttataacaaaactttcttctgcttacaaaatactactacattatcatccatgctctttttatttt

SEQ ID NO: 167519 - DNA, 273 bp, Zea mays
  unsure (1)..(273): unsure at all n locations
  Clone ID: MRT4577_84354C.1
cttgtttcagtcttagaatggttcacggcactcatctcgatagctaagataaggttacgggtacttacttaggcgtacaatcacggaaactatagtaatccgtccctgggagaagcagacataaatggggatcttttgggtcaattaaataaattgatgcgaatcttagaaactcccatatgatacagnnagcggttacaggttttcgagactggaaaacacacttgggttctgaaaactctttacgggctcctgatgcttttgcctcagaaa

SEQ ID NO: 167520 - DNA, 1836 bp, Zea mays
  Clone ID: MRT4577_84355C.1
cggacgcgtgggcactaaccgttcagcggcagagcccgttatttcgccacttcagcgccccacacttgcgccgcagcagtagaaggtagaacaccttcttgacccgaattcaatccgtgcgcacgcaccctccgccggcgacggctcacgcatcgctcggcgcccgccccgcgtccccgagacgacgaccggcagagcgcgccctcgcggcgctacccgacacctgcgacgaaacgccccgagtccactagtcgaggagtgcgtcgacgcaggggctcgggaacgcggtgtcgccatcgcggagccctagcgagatcgtcgggaaggtccgaaggcgagcacgtgtttgtgtaacctttctccccttcttccctttgccggccggcccttcagcggcgacaagtgcccaccaggcggtggtttacgttgagctgaggagtgaggaagatgtctggaaatccagtcggcgtcgacaacacttctaggaggaaatttgacaaggaagagtacttggagagagctcgacagagggagcagagggagaaggatgaagctcggaaaggcaaggaaaggggtcctcctgtgcaaagacagcctttgaaacacagggactatgaagttgatcttgattctcgtcttggcaagactcaggtggtgaccccgattgcaccattgaatcagcaggtttgtgcataaattccatagggcatgttgtagcgtttaaattgatttagatttattttcatcatatcttaattcttgacaagaaattgctagagtgtagttgctttgctccgtccatattaaacacagatcttagtcgaagatgtttctgtgtattacctcttattcttttctcatgctgtaggcttaatttcatctttttgcagttcattattattaatttcagtctacttgttcctacatgcatttcataccagtgctatttacaacttaagtgtttctacaaaaatgaacctcttactttgatgatcaattcaacacaaaagtttcctcccaactttatgtactttctgacaggctggatactactgttctgtatgtgaatgtgttgtcaaagattcagccaactatttggatcatataaatggcaagaagcatcagagagcactgggcatgtctatgcgtgttgaaagggcatcacttgaacaggtccagaaaaggtttgaggcacttaagaaaaggaaggatccaagtgcctttactgaagaagatttggatgagagaataatgaaacaacagcaagaggaggaggaacggaagcgtcagcgcaaagaaaagaagaaagagaagaaaagagaacaggcaacccaacatgaacctgaggacgttgatcctgacatcgctgccatgatgggttttggtgggtttggttcctcgaagaagtgacagctctgtgttggccgcatccctttggtgaccttctgccctgaagatattgctcaaccccataaacacctgtgccatgaaaaatcgtttttgccagaatcctgataagatttgaacgaagtgcactggatgcaaggatactacgttttggcactgggatactgaactgcgtgtatgggagttgattatcaaaaggaatatctaagggtgttttggataaacctgtttatttgctacttcgggtgttcctgccatagaaacagctgatggtcgtgattatttgttgtggcaatgcagatgtgcgaagtggaacaaaccaaaagaattgccgtgtcattttctagaggaataaacttgtgtattgcagttaacagctcacttgattctgaatcttaatttccaggaaaaaaaaaaaaaaaaaaaaaa

SEQ ID NO: 167521 - DNA, 349 bp, Zea mays
  Clone ID: MRT4577_84356C.1
acctaggcgggggcactgccactgcccatggcaagaggacgaaaacctaacttggggtggacgctcgtagttaccgggcaacaccaggataagcagcgtgtacaggaccagccggaccaaaaaattacgcagcataaactgggcgatggtgctaagcagggaacaacacaaccgctaccggaggccgggggccaaacccagcccggccagggccaatcaacacaaggggttgtgaagaggcctcatatgcaagaaccaggcggaaagacagcgaaccccagctactgatccaggaatgacagatcatgcgtgtgagccttgatcagggaagcgacgagaccatcaaaaa

SEQ ID NO: 167522 - DNA, 301 bp, Zea mays
  Clone ID: MRT4577_84357C.1
aaaaaaaaaaaacaaaataaaaaaaaaaaaaaaggaagaagaacaagaatgctctacactgaagtaaacatacataaaaacgtcaaagcgcatctatataatcaacgggagcgacttcacaggccgatcatttttacaatgtgctgcgccgggacaccactcgggttatgcaacgttggcggcctctgccacatacgcctttgtcaagttggagtaacacctaagagccgtggacgggtcgtccatcgcgctagttgcgaaacctccgtcgttactctgagtcgccctcgtgccggtccat

SEQ ID NO: 167523 - DNA, 394 bp, Zea mays
  Clone ID: MRT4577_84358C.1
gccctgcggatttttaaggttttcggacacatactgcataggcccacaggggcatggggggtaaaaacagaacaggggcaccggttcaactcccaagccctaaaaccataagcgcacaaagcatagccaactagctacaaaacatggcgtctgacttcgggcattcatacttgggaatactcccgcccaacacgtcccaaagtgatgccttaccgcctatgcccacccttggccaccgttctggggagaagatcccgaaccaacacgagcgaccagtggaggaacagcgccatccacagcaacaggggcaacaggatgaacccaaccctcaccgcgcggaaccggagctggcgcaacaccccaatcagcaccactatggagcaacacggggggc

SEQ ID NO: 167524 - DNA, 455 bp, Zea mays
  Clone ID: MRT4577_84359C.1
ccggaaccaaaacaaggaaaaaccgggggcccccgtgcggggggggggcccggggcccaggggggggggggggggggggcccgagggaggtgctttttccagggcaacaagcccaaaaaccaaaaaaacccgccgggggggccgggggcgggacaccggaaccattggtcaaggcgccggacccggggctggcccccggaatgcccgaccgggccccgccgggggccccccttgccctatggggggcccggttaaaacctggcgtcaccatggccatagccggtccctgggggaaatcgttatcccgtcccgcccgcccccacaagcgagccggaaacaaaaagggaaaagcccggggcgcccaacgagggacccaacccacaataatgggggcgggctcactgccccctttcccgccggaaaaccggaggggccactggccttaaggaagccgc

SEQ ID NO: 167525 - DNA, 181 bp, Zea mays
  unsure (1)..(181): unsure at all n locations
  Clone ID: MRT4577_8435C.1
aaatanatttttttttttttttttttttttgggggggttttatttaagtttatggggttaccacaacggaccacgaaaagcatcattgaaacaggtaaacagtcctgcccatatgatgttgaaccattttcagacttggtccattgcacaggaatcatctatccggatgaagactttggga

SEQ ID NO: 167526 - DNA, 203 bp, Zea mays
  Clone ID: MRT4577_84360C.1
tgattcaagcgcgaccacgagggccaacgcgtggtctgacacaagggcgggcacgacaccaaacgcacaccacgcaggcatgtgaaaaccacggagccagcaagctccaaggctaaccaacagcgaacagggagataacccaacagaagatggagaccagggagaccccgaccactgggctgaagacgatccatgcgcaaaac

SEQ ID NO: 167527 - DNA, 418 bp, Zea mays
  Clone ID: MRT4577_84361C.1
gagtcgattatcttttcagtttaccccaaaccccaattctcccagtgtgggagatgcatcgtattactcgtcgtgccacagataatgtcgcgtcgcatcgagcgcatagcccgccctgcgggcagctccagagaagatcgctgccccatgaactttacatcgctcatctcgcgctagaccttggacgtcaatctgatgtcccacgtgcaaaccactgatgaatcggaaagccggcttggtgctgcacatgcgtttggtgcacctcatcgccgctggggtcctaagcgcagatcactaggctccaggacatcatggtgggcgctatactggtgctcgcgaggaagctcaaggaggccgagtccgacaagtacaaggcggaccactggcatggggtgctgtacaaccttatgatcatagt

SEQ ID NO: 167528 - DNA, 298 bp, Zea mays
  Clone ID: MRT4577_84362C.1
ggccaacggaccaaattaattgttggcaaatattgtggtttaaaatgtccaagtaccattaggaccatctttttataagccgcacattatattatcgtatttaaagcagcataacgattaatttggtgcaaaaacacacttagttcttatggtataacacacaagatggctcttcggaggggaataaacagggcggcattggcccttgaactccaaaacgctttttcatgctcaagacctgaacacttatggcgaaaactttcttcactatactagacctattttcccattcaaagac

SEQ ID NO: 167529 - DNA, 171 bp, Zea mays
  Clone ID: MRT4577_84363C.1
taaaaataaaaataaaaataaaaaaaaaaaaaaaataaaagaaaaacactttaaaacaagaccgggacacgggcgcagggtttccaagtttcggccctccttctgccggcgcccatttttatttccttggtcgggcggtccaatttcgtgtgccggggcccccatctttca

SEQ ID NO: 167530 - DNA, 256 bp, Zea mays
  Clone ID: MRT4577_84364C.1
ttttttttttttttttttttttttttttttttttttttttttttttttttttttttttttttttttttttttttttttaaaaaaggggggggggggggccccccacctaaaatttttttaccagcaaacgcatacaaacaaaagtctaatacttggactaacaaggcattgggccctaaaactatcattggcccgagttgccgagccagccaaggggcccgggctccgaccctgattttacaaccgaaaagatagt

SEQ ID NO: 167531 - DNA, 492 bp, Zea mays
  Clone ID: MRT4577_84365C.1
ggccgcttttttttttttttttttgcacagattggggcattgaacatccaaaattgcacaaaacataaccactacagctctggagcatggtacgatccatagaagaccggaccatgctcctaaaccattcggctacaaaactcggtacaagaaggctacaaacaaaagtttgacaggacagatgattttgagaaaagggacttccttgcacgcggagaaacttacgccttgagcttgtcaaagaacctatgatgctcattgagagcttgaaagcgaccgtgcccaaacctggacaaggggtcgatgaacttgagctagatctactacagcgccatgacgagaagtatgcttgaggagggactggcggagaggtaccaccctgttatttggtgcacacagccacccttgatcatcatgtgaaaagccttcacggtaccatattgggggaagccacccatgggagcgatggccttctaagaactgacaaactgt

SEQ ID NO: 167532 - DNA, 163 bp, Zea mays
  unsure (1)..(163): unsure at all n locations
  Clone ID: MRT4577_84366C.1
cgtccgcccacgcttccgcgcagaattgcagcttaacgatcggatctagcagatttctctcagggtgatctgcggcggcgattagcgtgcggatcggagatggcnacaagcgcgtggaggaggatagcggcggcccggtcctcctggagccccgccacggtgt

SEQ ID NO: 167533 - DNA, 1368 bp, Zea mays
  Clone ID: MRT4577_84367C.1
atcagatcattgccgcgagaggggagaaaggctagctatcaggagagatccatcgctcaggaacaggaagaagtgaggcgacagctctgcaggatggcatcggagaaggtggagacgatcgtggcagggaactacatggagatggagcacgagcccggcggcggcggagaccatgaccagcaacccagcggcggcgcggcgtcgtccacttcatccagctccaggggcggcggcaagaagaaggccctgtcgagcctgttctggcacggcgggtcggtgtacgacgcgtggttcagctgcgcgtcgaaccaggtggcgcaggtgctgctgacgctgccctactccttctcgcagctgggcatggcatccggggtggtgttccagctcttctacggcctcatgggcagctggaccgcctacctcatcagcatcctctacgtcgagtaccgcaccaggaaggagcgcgagaaggtcgacttcaggaaccatgtcatccagtggtttgaggttctggatgggctactggggaagcactggaggaacgtcggcctcttcttcaactgcactttcctcctcttcggctccgtcatccagctcatcgcatgtgcaagcaacatctactacatcaacgacaagtatgacaagcggacgtggacgtacatcttcggcgcctgctgcgccaccaccgtgttcatcccctccttccacaactaccggatctggtccttcctcggcctcctcatgaccacctacaccgcatggtacctcaccattgccgccatcgcacacggtcaggtggaaggtgtgacgcactcgggcccaagcaagatggtgctctacttcaccggtgccaccaacatcctctacacctttggaggccatgctgtcactgtggagatcatgcacgcgatgtggaaaccgcacaagttcaagctcatctacctggtggcgacgctgtacgtgctgacgctgacgctgccgtccgcctccgccgtctactgggccttcggcgacatgctcctggaccactccaacgccttcgccctcctcccgcgctccggcttccgcgacgccgcagtcatcttcatgctcatccaccagttcatcacgttcgggttcgcgtgcacgccactctacttcgtgtgggagaagctgatcggcgtgcacgagacggggagcgtggccctgcgcgccgccgcgcggctgcccatcgtggcgcccatctggttcctggccgtcgtcttcccgtttttcggccccatcaactccaccgtgggctcgctgctggtcagcttcaccgtctacatcatcccggcgctggcgcacatggccaccttcttgccgccggccgccagggagaacgccgtg

SEQ ID NO: 167534 - DNA, 581 bp, Zea mays
  unsure (1)..(581): unsure at all n locations
  Clone ID: MRT4577_84368C.1
cttgnattggnaggnaacagcttgaaacctgtgcttcaagtatctttacccagaaaatttgatgaactgtcaacaaaacttatcgagatctataacatagatatgattgcagctacaacaagacgacttgaacaagcccttcaggtgagaggactatcctattatgccatatatgggaggcacaagagcatgtacagcatctacagaaaaaggcaaggaagaagctggtcatggataaaatttatgatatacatggggtgcgtgttattctcgagaacaaggctgattgttttgccacattagagattatccatcacctatggcctagaattcctggcaagttcaaagattatatcaacagccccaaacccaacaggtatcagtccctgcacacggttgttctcactgaacaaacgctgccactcgagatccaaattcgtacgagggacatgcatttgcaggcggagttcggaattgctgctcattggagatataaggaaggctatccttcatcacttgcatgtgatgcttcatcgaaggaaacgcacactatcccatctcactctgaagcctgtctgttg

SEQ ID NO: 167535 - DNA, 967 bp, Zea mays
  Clone ID: MRT4577_84369C.1
attcggctcgaggctgattgttttgccacattagagattatccatcacctatggcctagaattcctggcaagttcaaagattatatcaacagccccaaacccaacaggtatcagtccctgcacacggttgttctcactgaacaaacgctgccactcgagatccaaattcgtacgagggacatgcatttgcaggcggagttcggaattgctgctcattggagatataaggaaggtgaacggagttgctgcacctctgtttctgaaattgttgagtgggtcagatgggttacatggcactgtcaaactctgaacacaggctatccttcatcacttgcatgtgatgcttcatcgaaggaaacgcacactatcccatctcactctgaagcctgtctgttgtcctactcaaaacaatgtgatcacaaagggcccgtactagtaatacttctggagaatgaaaagatgtcagtgcaagaaatcccccaaaattggacgatactggacctactgaaaaggtcttcaaactatgggatgccgttgaggctgaggctgaactgccatgccgtccacaactggaaccaggagctaaaaatgggcgacgtgcttgaactgatcccttcgaccccatgcaaatccagaggtcgcacgagggagctccaccagaagtttgatcaccgtctcgccgtttcccagtcctgacagccttagaacaccgtaccttgtaaatacatgacgtgaacccatataaatcatctgaagtttagatttcccctgtgcagacaaaatagagatgaggagtcatcaaaactctgtaaccgtcgtatactcattcaagccaaaacaagacagcatgtaatgtaaatcagtatatacatgatacacagggttttagctcaggaaatgacaatgtataccgacgacggtgcgcttacggtttttagtagcaaaaggaccttttgtcttgtgctta

SEQ ID NO: 167536 - DNA, 269 bp, Zea mays
  Clone ID: MRT4577_8436C.1
actagttctagatcgcgagcggtttctcttgatctagaactactagtacgggatggttagcaatttttttcgataaaaaacaaaactgacacttaggtcaacatgaacataatgacactatccttaatacgtaccagctatgaataaagttttgtatgtttacccaactatacactgttgttatctaaaagccatttagaaaataacaaaaaactcataaaactttattaacaaatgcaaacggtccattaacagtgtaaaaacttttt

SEQ ID NO: 167537 - DNA, 428 bp, Zea mays
  Clone ID: MRT4577_84371C.1
cattgggtacctcgaggccggccggggacagatagtgtcttcagcgaacttcctggtcatatcggtgctctccgtcggcggtggagctgatgtgatctctcattggacgccggagacaccggcctcccgatagtcgtgcgggactacccagatgacgtttgcgcatgggcaggcttatgttcatcgaacgaagcctgccattcccgctgacagtaccctatgggtacgtgcatccggacggctgttggttcggtaatgatctacggctgcaaaagttgctctggaagggctactggatcttatctcattgatgatatgaggaggtccggggtccgatcagggaacacagacgagattcactcagacataatagctactgcggagcatgttcgatggatattgaccgtgggactgaatgattgcatgca

SEQ ID NO: 167538 - DNA, 643 bp, Zea mays
  Clone ID: MRT4577_84372C.1
gaccccttccatcggtccctcacgatcttgccaagaatccaagatccgcctgcggtagctagcggtcctatcttgatccgatggtgtcaccgactccgggagggaaggatgcaagggagggtggcggcaaggcggagtggatgatctacgccttcgtggcgcgcggcaccgcggtgctggcggagtacacggagttcaccggcaacttccccgccatcgccgcgcaatgcctgcagcggctacccgccgggtcgtcctccgccggcaccggccctgacggccgtggcgatgcgccggcacggttcagctacgcctgtgaccgacacacattcaacttcctcttgtaccgcggctacgacactgggccgtggagagaaattgagtgaactccaagacaagacttctgagctacatattcaggcccagcagttcaagaaacagggagtgaagattcgcaggaagacatggctacagaacatgaaaattaagttggtgattcttggaatccttttgctccttgtaatcatagtatgggtatctatttgtcagggctttgactgcaccaagcatgaaacataatagaaatggtacaacgctgctccatccattttaaattataacatgttttggctctttttagatc

SEQ ID NO: 167539 - DNA, 414 bp, Zea mays
  Clone ID: MRT4577_84373C.1
aacagtgctaagaatgcaacgaatgtagaacagtctttcatgacgatggcagctgagattaaaaagcgaatgggtcccggagcaacagctggtggtgctgagaagtccaatgttaaaattcagagcactccagtcaagcagtcaggtggaggttgctgctaaaatttgcctccatccttttctcacagcaatgaatttgcaatctgaacccaagtgaaaaaacaaaattgcctgaattgtactgtatgtagctgcactacaacagattcttaccgtctccacaaaggtcagagattgtaaatggtcaatactgactttttttttattcccttgactcaagacagctaacttcattttcagaactgttttaaacctttgtgtgctggtttataaaataatgtgtgtaatccttgt

SEQ ID NO: 167540 - DNA, 204 bp, Zea mays
  Clone ID: MRT4577_84374C.1
cctccttcgtctttgggggggcatacaaagggactgccggccacacaccccggggacaacgaacacagcaaggcccgacagaacggcagccacaaaaccagacaggaagcgccacaagaaaaacaaaccggcggccgaaggagcaacgacacccaggctacgaggaaaagaccaagacccagagcccgggcaagggccgccggg

SEQ ID NO: 167541 - DNA, 267 bp, Zea mays
  Clone ID: MRT4577_84375C.1
ggggagagagtggaggaccagcccggagactgcgctaacgttcctggggctgacgaagcggcgtgcctgagtttgactgtcgattcacgatgtaggagcacagctttgtgaccgccctggaggcccacattagcatggtcttctatatgctatggggctgatcactccgtcacggggaccagctagacgctttcatgcgagctcaaacccaacattcaagaggggactgaatggcattcaagctgtacttcagaccacagaggctag

SEQ ID NO: 167542 - DNA, 246 bp, Zea mays
  Clone ID: MRT4577_84376C.1
aagcacaagttaaagcatttattttatataggaaacaaacggcgcacggcatatggtggggcatcagaacaaaggccaattcacctttacaagggttacacaaaggacccggcaaacccgggaagaaactaataagggatgtttaaaaacaacaagccggccgcgtgggaaaaaccgagaattctataccaagacaactggggggacgaggtatacctatagagggacccataaaaggcgggcgca

SEQ ID NO: 167543 - DNA, 446 bp, Zea mays
  Clone ID: MRT4577_84377C.1
tatattgagcattgctagacacactgagacaatcgcacttgcaacaatctaacaacagcggctacctagagattagcctttcttgagcgcttcgccctttgtgagaacgcagcataagcggacataaaaacagactgctgactagctgctagagacgatattacacggtgactacgaccaagaaactatagtgggcttaggacaccgtgcttggcaagtctacatgcggcactgagagcgagccgtaagcggattacaacgcccgattggccgattgcaacgacaatacgagacacatctggcaagacaagccatagcatcgcggccggtataactgatactagcagcactgtgcgaccgtagcttgtggaaccgtaccgtctactatgcaaaatcatgtgcttgcagtcaacccactcgctattgctaacgggggagctatacca

SEQ ID NO: 167544 - DNA, 612 bp, Zea mays
  Clone ID: MRT4577_84378C.1
ggcagcgaccctttttttaggggggaaaagctttaaaaaatataaccgggcacatatcttttttctaaattaacgggaaggcaaggaaacatgttggactcaggcaggtcttcctatttttgggcaggcccaaacggggggggggggcccacccaacagccgggtttgacaagggggggcaggggcccccccaaactatttttatatatagacccccccccgaaggggttgaagggctaggaaacacatcctagccaccatcgcctttatccctagcccaggactcctaatatccctatatatatatatccccccccccccgaaggggctgaagggctaggaaacacatcatagcccccatcgcctttgtccctaaagttcaccaccccggccctttttttcgtggggggaatggggctaacagcctaacacaccgggggggggacttctcgtccccgcacgaagggaaaaatttggggtttttggggcgagggggatcgacaacgaacgtaaaaagcagggaacgtgttgctactccgggaatacaaaaacatacgttgggctcttcttcggccgtttttgcacaaactgaggaggggagtttctccaaca

SEQ ID NO: 167545 - DNA, 245 bp, Zea mays
  Clone ID: MRT4577_84379C.1
aaaaatgttgttggactacggcggataacaaacatatagcagaggcctagaccgcacgctgcatctaggccagagcgaacaaccaacctccatgcaccgaataaaacagcataagctgatcatcccagcattgcaaaccaaccacacacgcatacatgccgggatcggaacgagacgcacacgcgggttaaagacccatacggcatgggcagggccaccagggaaaaaacccggaacctgaactg

SEQ ID NO: 167546 - DNA, 532 bp, Zea mays
  Clone ID: MRT4577_8437C.1
ggccggccgggtaccgcaccacaacaagcatagagacacctaagcgttaaacttgataagcagctagcagccaacccaagagagacaccatacccatggcgtcgcgctagcgcattcttggccgttgttgctttactgttcgccgccatgggtgaggcacagatggccgaggcaaagctcgctgatgacctctgggtcgatgcagaagtgctggctgctgacgcacatgccgatggacctacacggaccggcaggtgcactctggcaccaagggcgtctagggactatcgggcaatgaggacgacaaccatgacttcaacaactaatgccaatcacgtcgatgcgattgcattctggaacaagatatgaaagaaaagtgagagcactgtggtgtaaaaccaacaatccatagtaaagtgcggccatgctggatatgttgtagctctacctgctattctttctgttggatttggaggtgctatcatgatcttagtctataatagtatcaatccttgatatcaaggactccaaa

SEQ ID NO: 167547 - DNA, 2070 bp, Zea mays
  Clone ID: MRT4577_84380C.1
ccgtcaatcaaagcctttagtaagtaaaaaaaaaaaaactagatagtttagaggaagtgaggaactacagcaggcttaatgccaacctgaacaatttattgatgatatacaagtccaagcatgggagatttgtgaaaatcagtacagcatggaactattacacgcaataacatatcacaagttgtcatccataaagttcagaaatcatactcctctgatttcagtactgcgctttcccatcgttgttaaacagatactgtgtcacaaggccatgctaggaacagtaagggcttgtttgggagcagaaactcaatcccctcgagatcctggacttttctcaggccaagcaatccatgtgtatgccattttaattagccatttagttcttcatagggctttgttcagttattcccatcccacgattgggagggatcaggagaaattttgacttgctatggatttaaacccactcaatcccctctagtccacatggattgagattaaaacgaacaaaccctagggtgtttttcatcctgggtttgcctcccttacttccaaatcaggcctacagtaaacgaaaggctacagtaaaggaaaggggaggccctcccgttcagcaatgcgccaactagtttaaaaaacgcatgccccaccaaaagatgacttctttaattagttggcggtcgaggtccttttccatgagttgtttttaggaaacgtccttttctgagtgatgaacagacaaggataaagctacaaattcatactttccatactagaagaggtcgacgaagtctaggttttgttgagccatccacaaacatgaaggggacaaaagcagccaaatgaatgaaactgcaaaattctagatatttcaccaatccgcaatgaatctgacctcggaaacacacacaggaattaagcacaagcaggaaataaacgcctaaatatttcgccaattcgatgcattgcaatcagagtcaggcaagaatcgatctcccgtccctcccaagctagctctttctcttcagcatcctcatttccttttactggagtatctatatttgcctcctctgtaatactatcagatgaaaatactagagttgagatgttatgtactatgcttgaactgataatgttatttggttcgtttacaaagtgaaagtaattatctggtgatttaaaatttgcaggtgctgctcatgatatgcaggataataactgcatggaaaggaataattttaatagacaaaacaatgtattttcctctttttgctaaccagttattgactccatgcattgttgattgcttcaagtcatattggtattgttttcttaatacatgattaatctagctcctgtcattctgttcactatattgaattagttttgaccaaaaaccatgctaagctggaatcacattgttttgtagatgtttttcttcactataaatgcttaaacttaacctggtaaattcatctacaggctctttcaaatggcaaacccactgttgttgagttttatgcaaactgatgtgaagtctgcagggaactagctccagatatctacaaagttgaacaacaatacaattgggatccaagttgctgcacgacagacagaaccagcgaacaccacggacaacgacgacaagcaggtccgcttatcgctcttgggcggcaagaactgcagcaacgttggtgtcacgaccgccattaggcccatgaacaacgccaggctgaggtccagggatggaggcaacgccacgaccatcacccacagtgactctgtatcggggagcatgaggacgatttgtacgccatcacaatatatgagcattgtactagtagttcttcatagggctttgttcggttattcccatcccacgattgggagggattagaagaaattttgacttgctatggatttaaactcacttaatccccttcaatccacatgtattgagattaaaacaaataaacctatcgcaagctaataatgggtttgcctcccttaaaaacaaattaggcctacagtaaaggaaaggggacaccctccgttcagcggcgggtg

SEQ ID NO: 167548 - DNA, 767 bp, Zea mays
  Clone ID: MRT4577_84381C.1
caaggacaggaatacgtatcaaatgatgagacttccagcaatacggagcaaacagatagttaagcgtgctaccttttacttgggaaaatctgagaaaggagtatattgtgcgttgttttattgggcccaggatgacagcgacccccagtttcgagtctggtctcttatggaggaagagatgaatggacgtgatggacaaattcatatgaagtggttgataaagactagcatcagccttaaacccctgctggcacaacttcatcattgtggtcacgacttgactccagatgaatggaggatcatctataaccgccatgaccgtgaccttgttagttcgtctgcacaagatgatattgatgatgaatgggactttgaaaatgctcatgagattgtccttgaagcacctaacaatgttaatgactggtaccctatagattttctcgtatttcatccttacaaggagattgtcttcttttccttatcatggaagacaatatcttataatttgaataccacaaaggttcgacagctgggctgcgcagctcatataccggtgggcataaaaacttgttttccatacacaccctgctacctgacgatggagaaattaactaacagttgatcgtcctccgcccaccacttttgatgatgattagtgcttataatgacttacttaactagagagtgcacatctttcttccactttacattatatttgtcagattatctttaattttggcaatacatattttacttccgtttttttt

SEQ ID NO: 167549 - DNA, 400 bp, Zea mays
  Clone ID: MRT4577_84382C.1
ataaaaaaaaaaaaaaaaaaaaaaaaaaaaaaaaaaaaaaaaaaaaaaaaaaaaaaagaaaaaaaaaaaaaaaaaaaaaaaaaaaagtttgtaccttgggccggaaacacaccttaaggggagaattttggaaaatatccataaaactgagggggggttcaagaatgcatttagagggccaaattggccttatagggaggggaataaaaattaagggggggtgttttaaaaacgtggaaaagaaaaaaaccttgggttaacaaaataaaatggcttggagaaaatccttttttcacaagggggggtaaaaaaaaaaaggccccaacaaatcgtttttaaaaaaatttgcccactttaaaggaaaaaaaaaccccccttgaaggggaaaaaaaagagcggg

SEQ ID NO: 167550 - DNA, 503 bp, Zea mays
  Clone ID: MRT4577_84383C.1
cttggcttggaacctttgggctgatttatgtgcttgcggatgtgcgggtggatgtgcgggtggatgtgcgggtgaggagtataagctcacgcgtcatagttcctgcgcttacgcgtcatttcctcctaggcctcatagaggagtatagggatgatctcgtagtcctagtcgcataaatgtaatcaccaagaagcctaaggacgtatccgtgaagtataagttagacagacgcagtcccggtttaatttgggggtcagatgaactggagccaccagttccggtagtaaataaggaatcgtagcctattcatattagggagttagaatcgatctttaggggagacatttttggggaggctaccgtctttgagtttgtaaagtccttcgttgtcataaagttcccggctaagtcggggctggaggaaaggctaccggctctcttaggaagacgagatggcttgacgtccttgcctcgcacagccttacggcctcggacgcgcatag

SEQ ID NO: 167551 - DNA, 582 bp, Zea mays
  Clone ID: MRT4577_84384C.1
taccgggccccccctcgagtttttttttttttttttttacatcatatgagaaacttatcaccaagctacaagtcacgcaaacaacaacaactgaaaagagaagaaaacccagcaagaacaaaccagatcaagaggtacaaatcacagcctactagactgcaactgataagaatattccctgactccagtccattaccatgtattcattgtgtatgcagtcggtttataactgatgtgatgttgctgctctcccgggaagctagaacagcttcactccataaaagcgccgctgcaggctgcagccttttcacattccataaaagaagcagaatcaactctcctgatccttacggagcatctgcaccaacaatttgcgtttgtaggagtatgccgttggagtcccagtgatgtctgaaagtaagagcttcctcgccatgttcttgaattcacaattggtagtctcatctgggccgactgtaaaacaccccttccttaaggtcaaaggcaggaggtgatagcagctccgttctggtgctggtgccggcatggctgttgtcctcggcgggggcaaccttcctcgtg

SEQ ID NO: 167552 - DNA, 224 bp, Zea mays
  unsure (1)..(224): unsure at all n locations
  Clone ID: MRT4577_84385C.1
aaaaagaacgcatggctattatattattatctgcagtcagattcattaaatatttgagacgccncccatcgntacgtgtgctatctttcatatacgcagccgcagacctcttcctcccaccatgccccatcttttctcacccgtgatcctgccctaactacgccaacaaccgcccccttagcataaatatcataccccccaatcccactccacataccacccat

SEQ ID NO: 167553 - DNA, 371 bp, Zea mays
  Clone ID: MRT4577_84386C.1
ggaaaacaggcggacccagcgtccactgtctcacacccctttcaccaaactttaagcatcgccacctccccagacctactagactattttcccgctctgccgacccccaccggcaacaacgacaaccccccttcactcgacgcatacttctacatggccgacctagcttccctagacgccacggccgttacatccgccaccaccggctgatctccttccacccgctcccgtcccaaagccaatgcaaatcccaacccgaatgctgatcctcccacacccgcaccagttgccgtacccatacctgaccctgaaccatatccataccttattccattgccggagcccgatgccaaccccttgccgccaccata

SEQ ID NO: 167554 - DNA, 144 bp, Zea mays
  Clone ID: MRT4577_84387C.1
tttccttgcgccgacggcccgagcagccagggccggccatcatgcgagccgggccggctccgcgcctatatccgccgtccgctcgtcccgaggccgcgagccgctccgcggctactaccctccgtccgccgtctgcccgtccag

SEQ ID NO: 167555 - DNA, 683 bp, Zea mays
  Clone ID: MRT4577_84388C.1
tgtcagtcgcaacctggcgaccaatctccttcactagttggctagctttcttcagtgagaagtggacagtatctagctcattaccaattctcttcatttgctctgtttgctgtgttaatgtcgcagcagtttgagctccagtctcaacagtttgtgctacgaccatttttgaacgttcaatagcttgatctgtttggtccatttggttccttcccgtatcaatgagttgttgatttgtcatggctgatgccatttgaatattgtcctcagcagcaggctcactacttccagcacccatatcaaagagctcaaccctcttattgttgttaccaaggctactttggtatgttttcctcaaggtgacataggaatcggacgcgtgggcggacgcgtgggcggacgcgtgggcggacgcgtgggcggacgcgtgggcggaccgtgggcggaccgtgggtgcttgtctgtctaatgttgcaggtctactcatgggttttactctgcatacgacaatacaactctactatatgagatcctgaagtctattaaatgggcaagaaaaacatatgtaaatcgacctgtaaatgttgttggacactccattggaggggatctagcttcattttgtgcccttgatctatttatggttggcctcattgatatctctacattttttacatgttaaa

SEQ ID NO: 167556 - DNA, 599 bp, Zea mays
  unsure (1)..(599): unsure at all n locations
  Clone ID: MRT4577_84389C.1
ttcgnaaaaaaaaaaaaaaaaaaaaaaaaaaaaaaaaaaaaaaaaaaaaaaaaaaaaaaaaaaaaaaaaaaaaaaaaaaaaaaaaaaaaaaaaaaaaaaaaaaaaaaaaaaaaaaaaaaaaaaaaaaaaaaaaaaaaaaaggggggggccgtttttaggggtcccaattttctttccccgtgcttccaaggttttagtttttttttggggcccccaaatttaatttcctgggccgcgtttttaaaccgtgggtttgggaaaacccttgggttcccccattttattggttttgaaaaaattccctttttccccggtggggttattaccaaaagggccccccccgttggcctttccaaaaattggcccaccttgatgggaaatgggacccccccttgtaggggccttttaagcgggggggttggggggtttccccccagggggccctttacttttgcaaggcccttagcccccgttctttgggtttttttcctttcttttttggccagtttcgcgggtttcccccgaaaggttttaattgggggtctccttttggggtcccatttaaggtttttagggcccttggccccaaaaaatttttt

SEQ ID NO: 167557 - DNA, 829 bp, Zea mays
  unsure (1)..(829): unsure at all n locations
  Clone ID: MRT4577_8438C.1
gatcttaggcacatatcacccattgggagttaagagcaactctagaactgctgaaggaatggagagcagacatctttacaaagttggttctgctaaccttggtggtcattcttctggtcataccgaagcacccgggttttcaagaactggaagctgcccccttcatggccaccaagtagcgtggaacaattcaaataactcccatcatcatacctcttctcctatgctatggccgaactcaggatcatttatcaataatataccatctcgacctcccacacaagcgcatggaatttcaagatcatctcgcatgcttgaaaatgtccttccagtgaatcatcatgttggatctgcaccagctgtcaatccatcaattctggataggagaactggttatgcaggggagctgatggaagcgccaagtttccatcctgggagtgctggaagcatgggtttctctggtagtccgcatctgcatcagttggagctcactagcatgtttcctcagagtggagggaaccaagccatgtcccctgcacacattggtgctcgatctcctcagcagaggggggcatatgtttcatggaaggggtcatataggcccccctccatcttcatttgattcaccaggtgaacatgcaaggagccgaagaaacgagtcatgtgctaatcaatcggataataanaggcagtatgagctagacattgagcgtatagtctgcggcgaggattcccggactacattaatgataaagacatcccaaacaagtacacctctaagatgcttttgaccgctattgatgaaatcacaagggacttatgatttatc

SEQ ID NO: 167558 - DNA, 1028 bp, Zea mays
  Clone ID: MRT4577_84390C.1
atcaaagagttgaattcctatgtcaccttgaggaaaacgtaagttgaagtccttgaaacggaaagttctctgcttttcttaatatcaattacaaagatgcatactactaaaattaataaacttctaatttgaactgttatacctcctccatatttgttccacttggtacctattgtaagtttgaaggctgattcaaaaagttttttgcagataccaaagtagccttggtaacaacaataagagggttgagctctttgatatgggtgctggaagtagtgagcctgctgctgaggacaatattcaaatggcatcagccatgacaaatcaacaactcattgatacgggaaggaaccaaatggaccaaacagatcaagctattgaacgttcaaaaatggttacttcccttactatacacccttgtcctgtttgccatggcaaaatttacaagacattcttgtaggtcgtagcacaaactgttgagactggagctcaaactgctgcgacattaacacagcaaacagagcaaatgaagagaattggtaatgagctagatactgtccacttctcactgaagaaagctagccaactagtgaaggagattggtcgccaggttgcgactgacaaatgtatcatggcattcctcttcctgatcgttttgggtgtgattgctatcattgttgtcaagatcgtccatccgaataacaaaaacattcgagacattccagggctggccccgcctgctcaaaactatcagattcacaacaggagattgttgtgggcagaagcttccataggcatgtgatggctctgaatgtaggcttcatgtggacgcactgcctgcgaagcagcagctatccatagggcgaaagatacatagtaacaattctttgtgcctgtatatctattttgtcttgttaactccgagccctaggtctgtattcctgcgtctggtgtttgtacaccgctggccgtttggctgtgtatatggtacagagatgagatcttaaaaccaaaccagtaattatgac

SEQ ID NO: 167559 - DNA, 547 bp, Zea mays
  Clone ID: MRT4577_84391C.1
ggttgaattgaaaatatagaattacaccttacctacgctagcacagcatcattacattaactgaggacagactagcagaagcgtggtttctcactgactagcaaaccggataacccatgcacacataggtcttgattgaaaaattggacacaatttgcaaataagacgattcataccttcttaaatgtatcatgactactctaagctccaattgagggacaattaaacaatcatcacgccagattgggcggggctggaaggtcatatttcatcacaagatatatcatctaaacatgtgaatactctggtctgcttactgatcaaatttaccctttactgtgatactcgctgcgttgatcaggcccctttttcttgacattatgatgaacatgccaataacaatgatgactgctacgatgatagctatgcttgatgtctggcatgggcaaatagtgcctttcattagggttactgtcctgcacatcactgcttataatacgggacgaaaaagccttgcttctctgagaatgctccaaatgtgtgtagc

SEQ ID NO: 167560 - DNA, 1186 bp, Zea mays
  Clone ID: MRT4577_84392C.1
actcattgggtccctcgaggccggccgggctcttcggtaagcgtagacctaccacagggctgggccaaccagtcccgatcgatcagccagcatggcgtcctcctccaaacggtcgctgccatgcgtgctcctcctcctcgctgtcttccaccacggctgctcgtcggcgagggcccacagacgtgccggcgacatggaggggagcatgagcaccgacgacagctcgatgatagagcggttccagcggtggaaggcggcgtacaacaagtcctacgccacggtcgccgaggagcggcggcggttccgggtgtacgcgcgcaacatggcgtacatcgaggccaccaacgccgaggccgaggcggcggggctcacgtacgagctcggcgagacggcctacaccgacctcaccaaccaggagttcatggccatgtacacggcgcccgcgccggcgcagctgcccgcggacgagtcggtgatcaccacgcgcgcggggccggttgacgccgtcgggggcgcgccgggccagctgccggtgtacgtgaacctgtccacctccgcgccggcgagcgtggactggcgagccagcggcgccgtgacgccggtgaagaaccaaggccgatgtgggtcatgctgggccttctcgacggtggcggtggtcgaaggcatctaccagatccggacggggaagctggtgtccctgtcggagcaggagctggtggactgcgacacgctggacgacggctgcgacggcggcatcagctaccgcgctctgcggtggatcgcctccaacggcggcatcaccacggagaccgactacccgtacacgggcaccacggacgcttgcaacagggccaagctctccggcggccggcggtacatcaaggatgagaaagacggtcgccggcaagccggaggggctcgcggcatcgccatccgcccgtcctatccactaatgtgacatggtgtggtgtacatctgttttcgttttaattatcattttattttattaaacaataaataagtagtcaacatatggatcgactcaaacttttgcagttacgtgtaccagtacacttgttgtaaataataatccatggcatctcgcgtgtcgtgtaaactttattctggtgcgaaaacgacttctgcaaatgaaggtttgtacgtgtacaattttgtcgaaaaaaaa

SEQ ID NO: 167561 - DNA, 334 bp, Zea mays
  Clone ID: MRT4577_84393C.1
gccggccgggtcccgaatgatgaaatgtctgagacacaggtttctcgcgacgctcccatctcacgggcgctccgcgttaccgctactgccaatgccatcggcagcgcgtcggtccatgtagcaggaccagaccctgacggaatgcattttcatgcaaattccccacgcccacagctcggtctaaaacaggcgcaggtacgtcaacttgccatcagaattcgattaacgaagataccgcagatgaccagctgcacgaccacctctacaagcgataatgcattcaataccataattcaagcaactggcgctggggatcccggaggccgtgctgggc

SEQ ID NO: 167562 - DNA, 1077 bp, Zea mays
  Clone ID: MRT4577_84394C.1
atcattctgtctttcctggcacctgtcatttgccaccagttgttgctcttgcctgtcccacatgcatgcatgcttgtcactgcgcaaaacacacatgcttttgtcctggatggacgggttcacccggagcgaggcgtcgctggccaacgcccacgcgtccgagcggcgccgtgacgccggtgaagaaccaaggccgagcagggtcgtgctgggccttctcgacggtggcggtggtcgaaggcatctaccagatccggacggggaagctggtgtccctgtcggagcaggagctggtggactgcgacacgctggacgacggctgcgacggcggcatcagctaccgcgctctgcggtggatcgcctccaacggcggcatcaccacggagaccgactacccgtacacgggcaccacggacgcctgcaacagggccaagctctcccacaacgcggtcagcatcgccgggctccggcgcgttgccacccggagcgaggcgtcgctggccaacgccgtggcggggcagcccgtggccgtgtccatcgaggccggcggcgacaacttccagcactacaagaagggagtgtacaacgggccctgcgggaccaacctcaaccacggcgtcaccgtcgtcggctacggccaggaggcggccggcggcgacaggtactggatcgtcaagaactcgtgggggcaggggtggggcgacgacggatacatcaggatgaagaaagacgtcgccggcaagccggaggggctctgcggcatcgccatccgcccgtcctatccactaatgtgacatggtgtggtgtacatctgttttcgttttaattatcattttattttattaattaaacaataaataagtagtcaacatatggatcgactcaaacatttgcagttacgtgtaccagtacacttgttgtaaataataatccatggcatctcgcgtgtaaactttattctggtgcgaaaacgacttcttcaaatgaaggtttgtacgtgtaaaattttgtggtcactatcaagcaaaacaatcgtcatttactcaaaaaaataatacaatgtatggtccccgcgaa

SEQ ID NO: 167563 - DNA, 146 bp, Zea mays
  Clone ID: MRT4577_84395C.1
acacggtccggaactgaagtttcgactcaagcgacgcgtccgaccacgcgtacggaagaaggcgaaagtgtatgtttcaaatcaggaagaccactacaggtgggggatagaaggatacgaaagaaggcgaaaacaaagggtgggtg

SEQ ID NO: 167564 - DNA, 258 bp, Zea mays
  Clone ID: MRT4577_84396C.1
tgacgctcatcccacatcagttgtcgacctagcacatgctgtggagtcgtccggagtatgtggacgatcatgaaggtggcgacgccgcaggtggccgtcctcctgctgctcctcatcgtcgatgcgcaggaggcggcgcagttggcggaggcgcgcgtgtgccggcgccggagcgcgggcttcaagggggtctgcatgtccgaccacaactgcgcgcaggtgtgcttgcaggatagctacggcggcggcaactgctac

SEQ ID NO: 167565 - DNA, 617 bp, Zea mays
  unsure (1)..(617): unsure at all n locations
  Clone ID: MRT4577_84397C.1
gggagggccttagcgcaaagcatagcaacggcggctgcttagcaagcagttcagctcagcaccccgccggacgccggctcacccatccggccatcccctgccggccgactctccctggtccccagcgcagcaagcagttcaccggagccggcgcagcaagtagtcaggcaagtctccatttccagatctcaacacagttggaggcatttgagaaatgtgctaaagaatgtggtctagaccctaaaaagaccctttccttggatgttgctactagatggaactctacatatatcatgattagagatgccatttactataaggatgcttttgatcgtctggctaaaaaagataaggacaaatatggtcacatcaatccttcaagcactgattggttgaatgcaacaaatattagcaagtgtttgaaaaaattctatgatgtcacattgcttttttccggtacttcatatcctactgcaaatcatttctttcggaagttttctgagattaagatggctattgcaagatggtgtgatagtagtgatctggtaatttgcacaatggtatttttctatgagacacaangttgataaatattgggaaatgaacaatttagcttt

SEQ ID NO: 167566 - DNA, 334 bp, Zea mays
  Clone ID: MRT4577_84398C.1
caactagcaacatagaaagcacaattttgttccaacaatggcagaccaaatatgggggggacttatgctcggcggacgctccgcaagtgttgttaccgcaaccattatcccacaatgctcacaagatgctatcaatttcctacttcccccatacctctcaccaaccttgcatcaaatgtgtgaaaaccctattgataaacccttctggatccatctggccttcaacacaccaatgaccattgcgacatatagttactacctaccctcaaacatttgttacatttaaccaactagcagcattgaactctgatgattatttacacaaagaacaact

SEQ ID NO: 167567 - DNA, 426 bp, Zea mays
  Clone ID: MRT4577_84399C.1
ttaaaaaatcctccatgattaagtttgcttggcttggagaaacctgggatgggttaccgaccagaaagttttctcgggtgcgcgtgagtgaggacaaagtgtgcataaaagacttgtgttggtctatggggacaatatatgatcctagagagctgccaggagtaacatagacattgatttgtgtcaactaattattgcggtatgaatgtactttatgcgacgaataaagtatagcaaaaaacctcaccgcgggattaaaaagcacacatgagtgaccttacccttagctgtgatggatggactagatcttgtggttgagcacacgatgacttatttgtattaccatcctttctccttcagtttaatctactatttgttttagacaatttcactttttcctaatagagcttttcttatatctctttc

SEQ ID NO: 167568 - DNA, 399 bp, Zea mays
  Clone ID: MRT4577_8439C.1
gggggccatacgagggaacccggaactacccccaaacaattggggttttggacaaggcattcccaaattcccttttggggtccattttttggagagagaaagccattccaagattcccttttttttggggcccattccatgcaaaaaacgggttcgatgatcttaagtttcaaaaaaaaaaaagcaaagggtttttggtaaattttacccaacttttttggataagggttttaaaaggccttttttgggagctttacttttaaacctttttaaaattttggaggggaagaaaactaccacgtcccaaggggaagccccttggtccatttgggatcctcgggccaaaaatagggttgtttaatgactcggaaccacaactgccttggttggttgcatttt

SEQ ID NO: 167569 - DNA, 720 bp, Zea mays
  Clone ID: MRT4577_843C.1
ggccgcgggttttttttttttttttttggctttcaaataaaaatggtattcgtttggctgccagcctgatatcaacttttggatcaatccagatccccagagcccaggaattttttaaaaaagtacaaaaagttcgtggttcataataagaaaaaagccgttcccagacatatcctttcccgctcacaaattcatcatttcaacatcattaactggtttacttctggttctcgggtcggaggctgcggacagccttgccggcgcgccagatctcgagctcgcggatctccttcatctcggcctcgtacttctcacggtagtcaggctggctgttgtactcgagagatcgcttggtctcggaaccatccttgacggcgtcgtagagggagttgaagacgggcttcagagcatccttgaacttggggctccagtcgatggcaccacgacgggcagtggtggagcaagcctcgtacatccagtccatgccgttggcaccgatgagagggtagagggactgggtagcctcctcgacggtctcgttgaaggcctcgctgggggagtggccacgctcacggagaacctcgtactgggcaaggaacataccgtggataccacccatgaggcagccacgctcaccgtagaggtcggagtagacctccttctcaaaggtggtcttgtagaggtagccggagccgatgccgacaccaagagcgatgggct

SEQ ID NO: 167570 - DNA, 327 bp, Zea mays
  Clone ID: MRT4577_84400C.1
ccgggctgcaggaattcggcacgaggggggaagagactaaatgcattcttgggcaaacttgaaagaggttctctacccaaaactattttgatccctaaagcgtcttcatttcagtcatatggtcttatcctctccttttggtaaaagcaaattattatggtaagcatatctcaacctcaggcgaacgaaatccaacacctgagaatcctgcctggtcaggcaagtttgtctggggacataaccaaacatgccctttctggtcaggcaagtttgtctggggacataaccaaacatgccctttctgtctacacaacacacaattattta

SEQ ID NO: 167571 - DNA, 352 bp, Zea mays
  Clone ID: MRT4577_84401C.1
cacctgtaatggtcgacatgtgcttacaatgactagaaatcttgagcgcgcaggggggggctcacttttgcagagcatgtgcggggtttcacccacacatctgtcatggagtcctgagcatcatgccacagatgttgattacacttggagcactgtacatacaccatttggtcctttttcatagaccaaatcactgtcttttgtgcagaatgatgcatctcgtaagaatgtgcttctgacaaccctgaactacacaattaccaacacaatagatgttttggagtccatggtagcacatggcggacagaattatcttataaagaatatgcatgttgaattcattcaaaggttg

SEQ ID NO: 167572 - DNA, 257 bp, Zea mays
  Clone ID: MRT4577_84402C.1
ccaactaatgctgctgctccagcattgaggcgcatctagcgagctgggatagctgctgctactcctatctcctactactcatgggaactgatcgacttgatacatgaacatcttcttgggactggtttcactgccactgctgccatgctgcagaacgaggctggccttgcgcctttaccaatgatagcagcggcgcttcctgctcagcaagttgctgccctggaagcatcatctgttcagcaacagtcggcctctgg

SEQ ID NO: 167573 - DNA, 379 bp, Zea mays
  Clone ID: MRT4577_84403C.1
caagatcgaggctgaactgagcaatatcttgccacgatattccgtgatgagggactgcaaattatgaaaactgaactgtaagacggcatcaacagagctttaccgagaggaaaatgtgtacatggcagaagctcgccgaacaagcgaagaggtacgaggagatggatgagttcatgtaaaaggtaaccaatactgtatactggtaggaactaactgtggaggagcgaaacctcctgtactgagcatacaagaacgtgattggagcccgacgcgcctcatggcgcataatatactccatagagcagaaagaagaaggccgaagcaatgaggaccgagtaacactcatcaaggattatcgtggcaagactgagactgagct

SEQ ID NO: 167574 - DNA, 403 bp, Zea mays
  Clone ID: MRT4577_84404C.1
agcgaacaacatgttggatatttgcattgatcccaaggccggggtgtttttgtagagtaaacatgattcgggggtcaagatcataatcctagctaactctattccgggggtgatatattattctaagctccccctgcattcgtggcagggctgcggtaacattgtggacaattagattcttgtgggtgacatgaactgataagtagttcattgaagatagtagctttttgtaccgatgtcgaggtggacgagcatgagattgtggccctggtagaaaaatgtcatgttgattgttgaaaatagcccttgaaaactaacggttggggagagagaaaatatttttgtttgaaacaaactgtgaaagagcatgattgcccatgggtaacaggaatcctaaaaataa

SEQ ID NO: 167575 - DNA, 264 bp, Zea mays
  Clone ID: MRT4577_84405C.1
gtttttatggcaggggggacactggtgtggttggaaggaggaccgatctcgcaagttcacaccttccagcgatgttagaacatgtatttttatgtgaactgatatatgcccgtgcctgaggagctgtaacgcacatgcctccaaatgttaggatcatgtacatggagcagaggacaagtgctgtgaaaacgaacattggctggcacttctgggcgccttatcaacttgattcaggggaatggggggatgtgcctagagagaacc

SEQ ID NO: 167576 - DNA, 239 bp, Zea mays
  Clone ID: MRT4577_84408C.1
cacaaaagcaaaaagcatcatcacaataatggccagtgcgtgagtgtgcatcatggcgccattcgcggccctcttcgtggtagcccttgctctagtggcggccaccagcccacaggtagcggtggcgaaaaataaaagagcggtgaacagcgtgctggacgacttggcgaagaacatccaggacaacatttgctcgacgctgttcgagggcaataaagggacggacctggtcgtgtgca

SEQ ID NO: 167577 - DNA, 470 bp, Zea mays
  Clone ID: MRT4577_8440C.1
agcaggggtaacaacgcagagtacttttttttttttttttttttttttttttttgctttttttttttttttttttttttttttttttttttttttttttttttttttttttaaaaaaagggggacactaaaaaaaaaaagggaaaaattccaggagggtcaaaaaaacaaaaaggggagtttaacattgaaaaaaaaagccaaccatgatcttaaaaaatttttgacacaaaaaaacaacacaaaccaaaaggaaaacttaaaaaggtgggaaaaaaaaactaatttaagggccaccctcctgccgttccattccaaaaaaaaaaaggggggaactgactatggggggcccagagaaaacattgattaaaaagggggggactaaggggcaaaagggaaaccccgggaactttggggtgttaccactggttaggggggaatttcggggaattgggtgcccctggggggggg

SEQ ID NO: 167578 - DNA, 317 bp, Zea mays
  Clone ID: MRT4577_84410C.1
ccaatataccgtttgcatggccatacaatccgagaaaaggacaaaacactcaacgttgggtggcgcaatcagacaccaatcctcgtaaaattaaaaaatctacggttaaaaaaaacctcaaaaagaatcacaccatctattggttgttgcacacataatttggacccccacccatccacatataaggggccgaccgtaaacacttaaacaaaccccacccgtggctacacggggttttgatttctcacccccaaatgccggagaatccgaaattaagaaagatttaacgaagcccaagctttagaaccacaccccac

SEQ ID NO: 167579 - DNA, 365 bp, Zea mays
  Clone ID: MRT4577_84411C.1
aaaaagaataaccgggccggaatttagcaccccaggtgatcggttaaaagggaagggacccccgggggggggagggaagaacagtaaaggtgttttttcctgggaccgaatccaaaataacgaatgcgggaaaacggcgcttatacgggctatttggtggggaaatagacatttataaaatccttggggaggaggggtacggggggttgccacggatgcggggggcgaaatggatgttcttgggcataaaggggaaacccttggggggggtggggcaaaggggggggtttttaaaaagggcgaagagggagggtcttgggggttttttggagagcgaaaaaggggggggttatggaaaagggggg

SEQ ID NO: 167580 - DNA, 1470 bp, Zea mays
  Clone ID: MRT4577_84412C.1
ccggccgggagcgctcatcaccgctttaaatccgcctcctcccagcgtctccctcctcccggcctgtcccctcacctccctccccctatctctccaccgccgcagctagctgcgacgtcatgcactcgccggcgccaccgccaccgcatactatctacaattagccagccgtaggcttacctatcctgtgtcaagcaagcctctcgcaagcaacaaggaaggaagctagctagttttatagctgctgtcggcggcggcggctgaagcgacgtgcctgagctaggatttaggttgagatcaggagagggagaaggcggcggcgatggggcgcgggaaggtgcagctgaagcggatcgagaacaagatcaaccgccaggtgacattctccaagcgccgctcggggctactcaagaaggcgcacgagatctccgtgctctgcgacgccgaggtcgcgctcatcatcttctccaccaagggcaagctctacgagtactctaccgattcatgtatggacaaaattcttgaacggtatgagcgctactcctatgcagaaaaggttctcatttccgcagaatatgaaacgcaaaaaaaaaaaaaacatgaatatagaaaactaaaggcgaaggtcgagacaatacagaaatgtcaaaagcacctcatgggagaggatcttgaaactttgaatctcaaagagcttcagcaactagagcagcagctggagagttcactgaaacatatcagaacaaggaagagccagcttatggtcgagtcaatttcagcgctccaacggaaggtaaattgttgagcttgctaaagttggctgttcgaacttcctcttttaagaattgtatgatttctttagctggccattagatgggcatggtttattgcaagtgttaactactttggttgccttgttacatccacaaaatatctctgctcttgcgctgtgctgcgatgcattgttaccgcaggagaagtcactgcaggaggagaacaaggttctgcagaaggagaaagcgttactcctgcatgcagctcgcggagaagcagaaagaccagcggcagcaagtgcaacgggaccaaactcaacagcagaccagttcgtcttccacgtccttcatgttaagggaagctgccccaacaacaaatgtcagcatcttccctgtggcagcaggcgggagggtggtggaaggggcagcagcgcagccgcaggctcgcgttggactgccaccatggatgcttagccatctgagctgctgaaggtttgccctcaccgtcgcgatgtgatagcccaaaatccagcaagtcttccccggaccccggactgtccccgcttctccgcctggtgcagtatcgtcgtgatcgcgagaagcagcagcagcggtttgccgtattttttaccactgtgtataagtagcatatctgcaatgtgtatattttgttcaccgttcctgctggggcggccgc

SEQ ID NO: 167581 - DNA, 1490 bp, Zea mays
  Clone ID: MRT4577_84413C.1
cctcgaggccggccgggcggggcctgtcccctcacctccctccccctatctctccaccgccgcagctagctgcgacgtcatgcactcgccggcgccaccgccaccgcatactatctacaattagccagccgtaggcttacctatcctgtgtcaagcaagcctctcgcaagcaacaaggaaggaagctagctagttttatagctgctgtcggcggcggcggctgaagcgacgtgcctgagctaggatttaggttgagatcaggagagggagaaggcggcggcgatggggcgcgggaaggtgcagctgaagcggatcgagaacaagatcaaccgccaggtgacattctccaagcgccgctcggggctactcaagaaggcgcacgagatctccgtgctctgcgacgccgaggtcgcgctcatcatcttctccaccaagggcaagctctacgagtactctaccgattcatgttttatctacacagactagtatatatgtggggaacttccacataccagaactgattgaaagagctagatacaatataatgcagtcagaaagtatggacaaaattcttgaacggtatgagcgctactcctatgcagaaaaggttctcatttccgcagaatatgaaactcagggcaattggtgccatgaatatagaaaactaaaggcgaaggtcgagacaatacagaaatgtcaaaagcacctcatgggagaggatcttgaaactttgaatctcaaagagcttcagcaactagagcagcagctggagagttcactgaaacatatcagaacaaggaagagccagcttatggtcgagtcaatttcagcgctccaacggaaggtaaattgttgagcttgctaaagttggctgttcgaacttcctcttttaagaattgtatgatttctttagctggccattagatgggcatggtttattgcaagtgttaactactttggttgccttgttacatccacaaaatatctctgctcttgcgctgtgctgcgatgcattgttaccgcaggagaagtcactgcaggaggagaacaaggttctgcagaaggagctcgcggagaagcagaaagaccagcggcagcaagtgcaacgggaccaaactcaacagcagaccagttcgtcttccacgtccttcatgttaagggaagctgccccaacaacaaatgtcagcatcttccctgtggcagcaggcgggagggtggtggaaggggcagcagcgcagccgcaggctcgcgttggactgccaccatggatgcttagccatctgagctgctgaaggtttgccctcaccgtcgcgatgtgatagcccaaaatccagcaagtcttccccggaccccggactgtccccgcttctccgcctggtgcagtatcgtcgtgatcgcgagaagcagcagcagcggtttgccgtattttttaccactgtgtataagtagcatatctgcaatgtgtatattttgttcaccgttcctgctgg

SEQ ID NO: 167582 - DNA, 1856 bp, Zea mays
  Clone ID: MRT4577_84414C.1
tagagcgtcctagattcgcgattttgggcgagcggctcaccctgcgcgcacgggagaagatgctctcggcgatgctgcggaacagagatcggctggttcgatgataccagcgacacgagcgccatgctgtcgtcgcagctcgaggctgacgcgactcttgttggcacgattgtggacgaccgctccaccatcctgctccataacgtcgagtatgatcgtgacgtcgctcatcatagctttcatactcaactggagaatcacgctggtcgtccttgccacctatccactcatggtcagcggccacatcagcgagaaaatgttcatgaaaggctacggcggcaacctcggcaagtcctatctgaaggccaacatgctcgccgcggaggcagtgagcaacatccggacggtggctgccttctgctccgaggagaaggtgataaagctctacgcggacgagctcagggagccttctaagaggtccttccggcgaggccagggcgccggcctcttttacggagtctcccagttcttcctcttctcatcctacgcactggcgttatggtatggttcagtgctgatgagcaaggaattggccagcttcaagtccgtgatgaagtccttcatggtgctcatagtgacggcgctggccatgggggagacactggcaatggcacctgatatcatcaaagggaaccagatggcgtcctcggtgttcgagatcctggaccgtaagaccgacgtccggatcgacacaggtgaggacatcaagagggtcgaggggctgatcgagctgcgcggcatcgagttccggtacccgtcgaggcccgacgtgaccgtgttcaagggacttgacctgctgatgaaggctggcaagagcatggcgcttgtcggcatgagcggctccggcaagagtaccgtgctgtcgctcatcctccgcttctacgacccgatcgccggaagagtcttgatcgatgggaaggacatcaagaagcttaagctcaagtgtctcaggaaacacatcggcctggtccagcaagagccggcgctgttcgcgacgacgatctacgacaacatcctgtatggcaaggacggggccacggaggccgaggtcgtcgaggcggccaagctggcgaacgcgcactcgttcatcagctcgctgccggaggggtacaagaccaaggtcggggagcgcggcgtgcagctgtcgggcgggcagaagcagcgcatcgcgatcgcgcgcgccatcgtgaaggacccggccatcctgctgctggacgaggcgacgagcgcgctggacgtggagtcggagcgcgtcgtgcagcaggcgctgaaccgggtgatgaggaaccggaccaccgtgatggtggcgcaccggctgtccacggtcaagaacgccgacgtcatctcggtgctgcaggacggcaagatcatagagcagggggcgcaccagcacctgatcgaggacaagaacggcgcctaccacaagctcgtcagcttgcagcagcagcaacagatgcagacgcagcagagctcatcagaagacatttgaataagatcgtgcgtttctgtatcttgctgtggctttgtctttcttgggcttttgtaaaagatctgcgctggttatcttttcaatgaaagggagtgttcagaattacaggatgaagcattattgggttgttattcctgactcccgtaaaaaaatatatatattgtacatagaatcttgcaatgtaattctgctccatggaaaaaaaaaaaaaaaaaaaaaaaaaaaaaaaaaaaaaaaaagggggcggccgttttaaaggaccaaagttaacgtccccgggcttgcaacgtaatagtttttttttggg

SEQ ID NO: 167583 - DNA, 301 bp, Zea mays
  Clone ID: MRT4577_84418C.1
cccggctcctccaaccctgcccacaccgcggccggagatgcggcggctgtcgtcgacggcggcgacttccgccaggccggcaagttcaggtccctggacaaggcgtgcatcagggacgccgcggacacggtgcctgagagcgagtggcggctgtgcacggcgggcgaagtgcggcagaccaagaccctgctggccgagctgcccatcgtggcgtgcaccgtcgtcaccaacaccgtgctggcgcagctgcagacgttctcggggcaaaagggcaaggccaaggacacgaggctggcgccgt

SEQ ID NO: 167584 - DNA, 224 bp, Zea mays
  Clone ID: MRT4577_84419C.1
ataagtacagtaaatctatttatagcaacgactcccttgttttgaacccccctgcacctttgatctgagagtgcatgcacctacctgtgccaaggaagaaagtttctaaccgctactggccatgtagacacatagttcataacgacccagccttggcctctgaccaacctatcctaggatcatgctgcgcattagattggccatagacatggtaaagaacttgg

SEQ ID NO: 167585 - DNA, 473 bp, Zea mays
  Clone ID: MRT4577_8441C.1
gggggtgttggttttttgggggaaaaaaaaaaggacttttttttttcccaaacaaagccccttaaaaaacattggtaaaacttttggggtttaccaagggggcaaaaaacccccccaaaacccccccccgggatcggaaccgggccccaaaaaaaagggggggggggggggcaacttttatattcccaccaatgcctttgacctaaaattggcccaaaatttcagggggcctttcgggggggggaaaaaaagggggggcagtttttgcacccgccccgggggtcccccccatttggcgggggccaaaaaaccccacccccccaaaagggggcgcaaaaggctttttaaatcggggccaaaaagaacggattttaccaaaaacccccaaaggggggggcgcccccaaattcaattttttaaggggccgggcccccccttttacccatggttaaggggaaaccccccgggaaacc

SEQ ID NO: 167586 - DNA, 269 bp, Zea mays
  Clone ID: MRT4577_84420C.1
ccaccgtcggtccagctgcagtccgcgagatggtgggggcacaagccgtgggggaaagcgtatccggccacgcgtcccagagcggcggtatagctctccgcgcgcggtcccctcatcggcaagacctactcactgggagcgacgcgcaaacatagatgggcatccgatgtggggaccgctcatggccgttcggcctgagttatacaatggcattgatggccatattggtaacttctggatgagacacgtttgggacctataactttaac

SEQ ID NO: 167587 - DNA, 599 bp, Zea mays
  Clone ID: MRT4577_84421C.1
attgggtacctcgaggccggccgggctcttctccttttccctaatccctcgccaggcgccactagagaggaagcgaaaccaggctgtgccgccgccgcttgtggtcaactgtgctgactcttcttcaccagtagtcgaccaggggaaaagccgtggagtcttcgccgttcgggggagtcgcattgccgagcagaatcggtatcgggtagtcggtgatttctcaccgtcgtgggacatctgctcggggctgcaatccgccgtgggtcaccttcgttgcggtaaaattccagacctttggaagacgaaggctaccaacatgtacctctgtagcatggttcgtcgcttcgttgactagctctgtgcgtgtgttcggttacccgtatggagttggttcggcctgtactgtatgcacagatgtaactcgcgtatttgcggctacatgcgtggatacgggagaaagttatgtatccgctagttcagactcaagcgagcccgcctttatagacacatgtatcaatcacacgatatgtgaccatgtcgtgtccgcgctaacatccacacacacgcagtttactaaaaaaaaaaaaaaaaaagcggcc

SEQ ID NO: 167588 - DNA, 345 bp, Zea mays
  Clone ID: MRT4577_84422C.1
caaaccgacaacagggagggttgcagcatttaaataaacaacttgatttggggatccatgaaggatgattgcaacgatttgctactttcactgaaattacaagttccttttgaatgccaggcccagctcccccgttttcctcgttttgggtttaaaatgatctgggccacaaaaagcgatggatggttgccaggactgtaaaaatgagtgcctgagtccccatttaaagcaagcccaagttcattcctcgctttatatatagattatcagggccacaaagagagcgatgagtgccaggactggaaaaatgagggcccaaacagttgattcatctagcccagggcg

SEQ ID NO: 167589 - DNA, 206 bp, Zea mays
  Clone ID: MRT4577_84423C.1
tcggaaccaaagtgggatgctcatctcgggccgacagaagaagagatgctccaaagaccaccgacagacagggcgctgtcacacaggccaagatgtgatgggagaactcgcgggagcgaacgactggccacgggagctgcatcagcgcgcatgaccgaaaccgatacgttcacctcaaagcctaattcaaaactaacgagcgattt

SEQ ID NO: 167590 - DNA, 569 bp, Zea mays
  unsure (1)..(569): unsure at all n locations
  Clone ID: MRT4577_84424C.1
ccacgcgggcgaaataactctgttaatattgaacaatttacttgactagataagaaggattgcgagtgacattcatgtgaaaatagatctcagtttatactttatagtgcctttgagagaaacactgggttcttactgaagtttttaatagccttgcggagcctattggggagttgcacaaagcacatgaacaggttcgtgtccgcgtgggttcatacaagaagaaagataaagtacaactctcatttcatttgtgacttaaggtcagatcatgggcagtgttaggtgttgggacgtccctttctctattcatgtgtgttagctgcgggaaagaatgcctangaaagtggggtctagtgctacatctatgaaccaaggcaaaggtgaaagcggacactataaagaactgaaatccaatataaagcgaacatcagaaagcgaggctaatccttcattangggcaactaaagtgtgggtgctctccantgggaactcgggagcgaacaataatttgccccgtggtaatagtgatgatactgtgcgttgtacggggtataggctctgctttg

SEQ ID NO: 167591 - DNA, 526 bp, Zea mays
  Clone ID: MRT4577_84425C.1
gggggggaacatttcaaacattcgattcaaagggggacaagttttgacaacgtaacaacagtcaaacaacacggggacgagggagagcctttttacgagctttacaaaagaaatacgaaaaaaagaagagaaacgacccccaacagctttgcctcagcaggggggcatccaaaaggttgcagaaaagcacctgacctgacctaaaaacgggcgcagtccccggggggggggggccaagcagtcatacacaggcagctcagtttggggaaaatctaaattttcatcaggtcctggtccttttgcttcgggagggaaacgatctttttcatggactcgcccgggactttttggagggcagctgacaaatttttcacattggcttcaaaaagctttttttccttttggagtttatcgaaagctttgatggcatctctttttaaggtccttatagaaaccttgccattttcagccaatttagccacgggctttgctaattcctttctgggaacaaatgtcaacgggggga

SEQ ID NO: 167592 - DNA, 575 bp, Zea mays
  unsure (1)..(575): unsure at all n locations
  Clone ID: MRT4577_84426C.1
cccagcgtccgaaaggaatagctcagnacttcatatatgttttgtcttcacgaggtaaaaaaanatatgaaaacatacacgttttcaggtgcaaatgatgtatccatgattcaaatggctgacgttggcatcggcatcagtgggcaagagggaaggcaagctgttatggcctcagattttgccatgggtcaattcagatttttggttcctctgttgttggttcatggccattggaactaccagaggatggcctacatgatcctgtataacttctacagaaatgctacttttgtctttgtgctattctggtaagcacgttgccataattgatacttcttggttcagtctgcataagaaatacgtacatattaattcgctgaacatttcaggtatgtactttacactggtttcaccctaacaacagcgataactgagtggagcagcgtgctatactctgtgatatatactgctgtccctactattgtcgtcgccattctcgacagggatctcagcaggcggacattgctgaagtatcctcaactctatggccccanggcagcgtgatgagaactaca

SEQ ID NO: 167593 - DNA, 548 bp, Zea mays
  Clone ID: MRT4577_84427C.1
ctgccgccggcgattgtgagagcttgagactgaggaatccggcgccgaggaggagttctattcagcttcagccagcagcgcggcatcaatcgagatcgagcgccatgacggacagcctgggctttgggctggccaagtccatggtggacggcgcgctgaccaacgtcaagtcggcgatccaggaggaggccaagctgcggcggagcgccaagcgtgacctggtgctcatcaccgacgagttcgagatgatgcgctccttcttcgtggacgccactgcagagcgcgtggacagccaggtggccatgacctgggtgaggcaggtgcgggacctggcctatgacgtggaggactgtatcggcttcgttgtccacctcgaccaggggacgaggtggtggtggcgcatggtgccctcgtgcatggcgcccgccattcccctcaacgaggcggtcgaggagatcgaccagctcaaggccaggatggagtgcgtgtgcatcaggaatacgcgctacaatctcaacggcggcaacgtcggatccaatcctcccgcc

SEQ ID NO: 167594 - DNA, 225 bp, Zea mays
  Clone ID: MRT4577_84428C.1
gtggcgcgccgactcgacgtgcatcgggtggctggacgcgcatcgcgcccggtcggtggtgtacgtctggtgtcggcagctgggtggggtcgatcgggccgggcaaggtgcgcgagctggcgctaggactcgaggccacgggccgcccgttcctctgggcgctcaagcgagacccctcctggcgcgcggggctccccgacgggttcgcgggccgcgtggcgggac

SEQ ID NO: 167595 - DNA, 371 bp, Zea mays
  unsure (1)..(371): unsure at all n locations
  Clone ID: MRT4577_84429C.1
cccacccgtcacgcatagggacttggtatacaaccacctactttcacgcttctccaacatcaacactgacgactcgaanactgtcaaaatccaacaattgcttcactctcctcaatgtccactgatatcaaccccatccagtccgactcattcttcaacccggtcctaactagcactcctcatcccaaccttattatcctacaccacagtgtcaaaagaaatgcatacagcacaaccaagtttttcagtaaaacaagcatctcagcattcatgcgtacacaataaatccacatccacatcacataatgccatacatctacaaacatcgacctgtctaattttcttacacactttactacgattttcaacac

SEQ ID NO: 167596 - DNA, 494 bp, Zea mays
  Clone ID: MRT4577_8442C.1
agcagtggtaacaacgcagagtactctttttgtttgttttttgtttattgattacattttccgttattagttttcttatccgatctgtttgtcttttgaaatttaaatcaccagattaccgctaaaaaccaccggtaaaccgcatattaatcctcgatcggtttttatgtcagaaggacaggataaacttttataccgattagaattgacaaacacaaataaagcagggcaagaagattttaagtccacggcaaacagatattttttgacgagtatttttgtgcggaccatgctttataatttggagtcggaccttatttaaaaaacaaggcacccgcggggcaacgagagccgccaggccttatctactttgggcctggaggggcaaccctaattgcagggggggcccaccaacccacttgaggggacgaaaaaggtttttgccagtcgatttcgagcggtagcactagaaaaagcactatcgtaagctccca

SEQ ID NO: 167597 - DNA, 458 bp, Zea mays
  Clone ID: MRT4577_84430C.1
aagaaacacactttttttaccctttttcagagatcacatacatccattgcctcctctccttttccttacttgccatgactctaccttagttacactgcaaatccgatcctacaggggaatgggttcgtctccttatcgttttaccttcgacattttaacctactacaactacaagtgacagaattaatcaaaaggatagctagcagcacaaaccattacagatcctttttagggcgcccgcaaccttactgtaattttgcacctgccaaacatatcatagtcatcatcgatcaacatcgaagaagctcttgagctccagcttcctttgcctcttgaccctcgcaatgaagtcctccactctcgggtgcagctcctcctcgtttccttcctcctactcctccttctgctccttctattttttcacctgcacctgcacctgcaccttcttcccaacaact

SEQ ID NO: 167598 - DNA, 163 bp, Zea mays
  Clone ID: MRT4577_84431C.1
ggcaagggtggtagagaaaggaacagaggcttatgaagatattcagatactcttcatgccaggaagcacaaagactttgttgagatttgcctcagttcagtagatcttccttggcagccaccataggttgtttctttgtcttccgggtcctaaagagcacaga

SEQ ID NO: 167599 - DNA, 285 bp, Zea mays
  Clone ID: MRT4577_84432C.1
ggtaccctcggggctggccgggcttccccggcgccggcagtcgcatcgcatcccctccgcctcgttccttgctcgggtgcgccccaacttcgctgccggccgccgccgccgcattcccctcggctactcgctcctagtcggtccccggtgatggctggcgggaacgcatggtcggcactgtctttgcacggatttggaaccgagtctatcggaatggcgaatcgcgccgaccaggctgtggggaggaccaacagagatggcaggggagggggaaaaaagggactg

SEQ ID NO: 167600 - DNA, 578 bp, Zea mays
  Clone ID: MRT4577_84433C.1
cccccctcgagtttttttttttttttttttttttttttttttttttttttttttttttttttttttttttgttttttgttttttttttttttttttttttttttttgttttttttttggttttggtttcttgttggtgctctggggcggggcacggaccccgaaaaggagaggagaagggcccctggcaccggggaatgaggaggaaggggaagggcataaaccaaaacccaaacaccagcaatctttaaaccaaaagaacagaaacatgaaaagaaaaaacaaagacaaaaccaaccccatccccattccaataaacatcaacagaatgcgcatagaaaaaaaaagcaggaccctgtgacatatgactcaaaatccatatcctaagccagaaggaagagggaaaccaaaaacaccaaatgcttaatagtcatggcaacagcctaaaacaatagagaaacgaaaaaagccacagggccccttgaattggaaatggaacaagaaccccggcccctggcacccggaaccgggcaagggcgagtactgcattcgacatccaccatttggccaagggcaact

SEQ ID NO: 167601 - DNA, 152 bp, Zea mays
  Clone ID: MRT4577_84434C.1
catggtttttttcatcgcctttctcaacgacatcacgggggggaccatatatcaagacagagtgcatccctttcccttgcccgtctgctggaacctgacagaaatcatttcaaaccgtatcgttcttgtaagctacctcgctctgatgactg

SEQ ID NO: 167602 - DNA, 1419 bp, Zea mays
  Clone ID: MRT4577_84435C.1
gagccacattccctgaatccctgttcgctaccttcggttccactcaaaaaaccaaataaaaaacgcacctttccttcccttctcctccccttcgctttcccccgtcctcccttccctcgatcccctcgccggaaaagatcccattccatccacctccacgtcccggcgcaatcagagtttccggcggcaaagcaggaaggcggaagcgaaaggaatgttgcacctttaagtagcgcggcgacctggtgtttcttcctggccggcgatgggctgcttcccgtgcttcgactccccggcagatgagcagcttaaccccaaattcggtggcgccggtgggtacggcggcacgtcctctgccgtcgcggcgtacggaaacggcacaggcgccggcgtcagcatcggccggcacggggacagggggtacccggacctgcagcaggcgcccatggcggctccgcgcgtcgagaagctctcagcagcggctgagaaagcaagagtaaagagcaatgggctcaccaaagaggctttggtgccaaaggatgccaatggcaatgccatctcagcgcaaactttcaccttccgtgagcttgctaccgccaccaggaacttcaggcccgagtgcttcctgggagagggaggttttggacgtgtttacaagggccgccttgagagcacaggccaggttgttgctataaagcagcttaacagggatgggcttcaaggaaacagagaatttctagtagaagttctcatgctcagcttactacatcatcaaaacctggttaatttgattggttattgtgctgatggagaccagagacttcttgtttatgaatatatgccttctggatcacttgaagatcatttgcacgatctacctcttgataaagaggccttggactggaacaccaggatgaaaattgcagcaggtgctgccaaaggactggagtaccttcatgacaaagctaatccaccagttatttatagggatttcaagtcatcgaacattctgttggatgaaagtttccacccgaagctgtctgattttggacttgctaagttgggtccagttggcgacaaatcacatgtctcaacacgtgtaatgggtacatatggttattgtgcaccagaatatgctatgacagggcagctgacagtgaagtctgacgtgtatagttttggggttgtcttgctagagttgattactggccgtagggctattgacagcaccagaccacatggagaacaaaatcttgtctcatgggtaagtgatgatctgtttacttgtaaatgatcgcgtgtttccctttttccaatatcttcacatcgttgtatgtctgttggcatcagacactaactacttgtagatgctgtagccttatagatcactttgttgctagaaacattggatcactggtt

SEQ ID NO: 167603 - DNA, 2096 bp, Zea mays
  Clone ID: MRT4577_84436C.1
ttgggtacctcgaggccggccgggtcgggactgtccaccaccactcgagagaccgctgctcgcttccttcgcttccgctccgaaaacccaataaaaaaacgcacctttccttccttcccctcgctttccccctccttcctcccctcgatcccctcgccgggaaagatccgatcccatccacgtcgcggcgcaaccagagttccccgtcggcgaagcaggaaggcggaagcgaaaggaatgttgcacctttgaagcggcgcggcgacccggtgtttcttcctggccggcgatgggctgcttctcgtgcttcgactccccggcagatgagcagctcaaccccaaattcggtggcgactgtgggtacggcggcacctctgcggccgcggcgtatggagccggcttcggccggcacggggacagggggtacccggacctgcagcaggcgcccatggcggcgccgcgcgtcgagaagctctccgcagcggctgagaaagcaagagctaagagcaatgggctcaccaaagaggcttcagtgccaaaggatgccaacggcaatgccatctcagcgcagactttcaccttccgtgagctcgccaccgccaccaggaacttcaggcctgaatgcttcctgggagaaggaggttttggacgtgtttacaagggccgcctcgagagcacaggccaggttgttgctataaagcagcttaacagggatgggcttcaaggaaacagagaatttctagtagaagttctcatgctcagcttactacatcatcaaaacttggttaatttgattggctattgtgctgatggagaccagcgacttcttgtttatgaatatatgccctctggatcacttgaagatcatttgcacgatatacctcttgataaagaggccttggactggaacaccaggatgaaaattgcagcaggtgctgccaaaggactggagtacctacacgacaaagctaatccaccagttatttatagggatttcaagtcgtcgaacattctgttggatgaaagtttccacccgaagctgtctgactttggacttgccaagttgggtccagttggcgacaaatcacacgtctcaacacgtgtaatgggtacatatggttattgtgccccagaatatgctatgacagggcagctgacagtgaagtccgatgtgtatagctttggggtcgtcttgctagagttgattactggtcgtagggctatcgacagcaccagaccacatggagaacaaaatcttgtctcatgggcacgtcctcttttcaacgacagaaggaagctccccaagatggccgacccaaggctggaagggcggtaccccatgcgcgggctgtaccaagccctggcggtggcttccatgtgcactcagtcggaggccgcttcgcggccactgatcgcggacgtcgtgaccgctctgtcctacctggcgtcccagccgtatgaccccagcacagctttcgcttcaaggaggcttggtggaagcaagcctggcgagaacggcggcaggcgtggtttccaggaacgacgagaccggaacctcaaggtcgccggggaaggaccgggaggactcgcccagggacctcccggctatcctcctgaacaaggacctcgaacgcgagcgcatggtggcggaggccaagatgtggggcgacagggagcgcatggtggcagaggccaagatgtggggcgaccgggagcgcatggtggccgaggccaagatgtggggcgagaattggcgcgacaagcggcgcgctgagaatgggcagggcagcctggactcgccgcctactaggaacagctaggggactggggagagcctttcacacattccatccatgcttatcggttgtttatttccaggtcgattttcgttgccgcggcggcgacgggcagggccaggggcagggtcagggagggttagatgtacatttctagggcagcgtcgtactggatagtgaatgcatttggttgtacttgtaaattctcagaaaatttttgtgagaatgaaaggacgcattttgagttccactcgttgtatgtactcgcatgacaatggtaaaaaaacaaaaaaaaaccaa

SEQ ID NO: 167604 - DNA, 250 bp, Zea mays
  Clone ID: MRT4577_84437C.1
gtaagctcggaattcggctcgaggaaaaacgttccaagcgccatgatccacccctggaggcccagcgcgaccggggggagtcttaactggggctgaccggtatcctaaccatcccgagcaactgatcgtacacacggaagatgcggagaacaacttcgcccgtggacattacacagttggacgagaagtactacatctttgcccttgatcggggacgaaaattggcagacaactgaactcggcttcaagg

SEQ ID NO: 167605 - DNA, 368 bp, Zea mays
  Clone ID: MRT4577_84438C.1
accctttttactgaggaaaaaaaacggtattaaatttcaagtgaatgccggtatatatatatactagaggtatagctgggggtacgtgatttgtctctcatctaggactaccccaatggagtaatttcgaactgggtattatatataatcaattgggaatgatataaaaaagaaatggagatgacccccctctgcttctttacactgaaaaaatgaggcccataaaacatcctaaacaagctgagcatgttcttgcttttgatgtttactaatagggggcataccttagcgtggtttcctctacgtataggtactggtgttgtttattgaggttaaaaattgttttaagatttaaaagggggcccctt

SEQ ID NO: 167606 - DNA, 245 bp, Zea mays
  Clone ID: MRT4577_84439C.1
ctactgaacatttttggtggttgggcagtctttcaggatttgcataacacctgccacactagattgatagaatgctgtagcttgattttgttgttcactacgataaccacctactaagccttacaaggaaggctatgcatctctcatctatgtattagactactctagcatgcgactttctagacgtagagctagctgacgttttgttggaattaaacacacaccatgtccaattccaatacgca

SEQ ID NO: 167607 - DNA, 436 bp, Zea mays
  unsure (1)..(436): unsure at all n locations
  Clone ID: MRT4577_8443C.1
gatggatatnnctgcagnnaattcgcgcctcttccgagacggaccgcgccgtgggcaggtatcctaaggtaaggcacttttttgagaacatacatatctatgagaagatgttgctataagatgatctgagatggacagcaagaaaggtccacttacgtgtatgttacctggatttcggatatgctaaggcgataaggttcttaatgagagaaaggtttataagcactgttacgttgttttatctcgtcgcatggacgctcttgcagtcatatcactcctatggtgtcctggctgcttgctatgtgtggatccacgcgcgctagcgagaagcgaccttgccgtcatgagtaccgctgttctaacttcctcgcgtggttcgggtccgtggctctgcggtgagcgcgggcgtggggggggggggtggaggtgggggggg

SEQ ID NO: 167608 - DNA, 617 bp, Zea mays
  Clone ID: MRT4577_84440C.1
aatttctcagactgcgatcttccctgatccccctccaccttctccgactcgctgccccacccttctcccgcaacccggctagtctccccggcgtgctggcgccgccccggacctcgccggcaccccgcgcgcctccttcgctgccaccatccagtgagtagccgccacaactaccgcccccgagagcgccggcacgcatggatccagccggacccgaccggagtgggccaggggtgcccttcgcgggcgctgtgtcgccgccgttgaccgccatgccactgccgcccccaattccccaccacacattgccacgcgcggcggccctctgcctcttgtgcgtcaccgcgagccagccccgcgcgaaccacggtgttctgctgctagctctagaagcgccctcaggcactgatcccgttcttccacacgaccgctgctggtcacccgccccaaacgccgtcgagccagcatctcctccaaaaaatctgatggcggagggcccctgctcctcaatgccatggccgccctatccgctcggccccctggcaatccttgccgccgccctgccacagacgtccaccctatggagctccctcctccactggtgtccggccgcctcc

SEQ ID NO: 167609 - DNA, 732 bp, Zea mays
  unsure (1)..(732): unsure at all n locations
  Clone ID: MRT4577_84441C.1
ctagtctctcagctattgcccaaanaagccttcattttatggacgcatattgccagttttactttccttggatccagcaagttctattattaaattgagagtcccgggcgcattccatgccttgaagagtgccttctctgcatgcctgaaatgcacacattcaagtgctgagccgtggcgagcacgcctattggaagctcaaaatattatcaaccaagggggttcaatagaagatgcagcaaatgctgctaagaatttcggggacacttcaaacagggaagaatcgtggcctctgatggagagaagcactgacggtagtaacaagcgtagtctggctgaagacatgaatcatgtgacagaggatgatgtccactccactaaaagagccaggcaatcaattgatgctaatgaacatagtgaagaggcaaacaagacaaattttgagtcgatgtctgttgatatctcatctagccagcccagctctataagaactgggaattcagaagctgtgtatcaattaattggtatgtttgctgcactagctgcacaaggtgacagagcagctggatcactgcatatcctttcatacagtatcgctagtgacttactagcggtggtggtaatggttaacatgcaacatcttccaatcttttgttctgaagttgtccaacagtagtttccttctacgtgctcttgagatggacttccactttccatggttctcctttttgc

SEQ ID NO: 167610 - DNA, 383 bp, Zea mays
  unsure (1)..(383): unsure at all n locations
  Clone ID: MRT4577_84442C.1
cccagcgtccgtggtttataggcgtgaccttaggtctgatggtgcgtctcggtcttttctgggacaaaggcaattttattgtttgattatttaaccagcagcttgatgcatcttatctgtcaatcactactcctttgaaaactgacggaacctgttgcttcttttaggttaaggttgcaggcttttagggggggattctgaaagaggggacctcttctggcgcgaatttccatcagcaacctcctccgacccaggggatgttgcctccaaggcatggtccacgcccctnagggttgcagacctngctctngctggccttttnggagcaggttggtttgnctgacatgcaggagcctggtttaaactnngaggcagggcatgat

SEQ ID NO: 167611 - DNA, 650 bp, Zea mays
  Clone ID: MRT4577_84443C.1
gggcaagagggcctgcaatttttttgcatgacacgttaattagacagcaacattcacatttcgaaacataaaaaaaaaaacatcactgcactgaacaagttggcaagctcactttcaacacggagaggtacgaatctgataagacagtgtacttcccaaccatagcaatcctcacctaagataatcaccgttagttgcatggaactaacagtgccatgaagggtgtcaaatatagcagctcttgcaacccattcgtctaactttggctcggcaatcctggaaatcctaaaaccgcatgaagtatatatctgtcatcggctagcaccctagcaagaaatatcgttgccctctgtgcgtcagtggagtgattagcctgcaaaggccggccgtggacgagctccagcgagatacttgcttgctgccttaggaaaggagcttcctctgcttccccaccaaccatgtatctgctcccttgccatccacccgagcacgtcgaagctcaggtgctcaaagtgggcatgccgcaaccacggctcctcgttgtaccacgccaccaagcacactagcttcgtccatctgcccgatgctaacaatgcttgggcaaagcctcaggataatacacatctgttagcgcctgatgctcgttgttc

SEQ ID NO: 167612 - DNA, 539 bp, Zea mays
  Clone ID: MRT4577_84444C.1
accaaataatgagttgacatgccatcgcgtgtgactcattattattaacaataaaacaagtttccttttatcatcttaaaaaaaaaaaaaaaaaaaaaaaaaaaaaaaaaaaaaaaaaaaaaaaaaaaaaaaaaaaaaaaaaaaaaaaaaaaaaaaaaaaaaaaaaaaaaaaaaaaaaaaaaaaagggtttgccaaaaaaaaaaagtttgcccctgggccgaaccccccttagggggaattcccaccccctggggggcggttattgggggacccagcctgggcccaaacttggggaaaaaaagggcaaaagttgttcccggggaaaaattgtttcccgttaaaattcccaaaaaaaatacaacccgaaacaaaaaagggaaaacccggggggcccaaagggggggccaaccccaattaattggggtggccccaacggcccctttccaagggggaaaccctgtcggcccatttgattaaaaaaatcccccaccccccggggaggggggtttggcttttggggcctttttccctttcctgg

SEQ ID NO: 167613 - DNA, 654 bp, Zea mays
  Clone ID: MRT4577_84445C.1
gtggactttttttttttttttttttgccaactaaaccacaccatgatccacttttcttctttagttttttttcacttcttttgttggttcatcatctaccccgctcctctcttcagtggcctttttttttgttttgcatttgtgtaaagaaaagagatgcagagtgccaaccatacctaaaaaaaagagcaaaaagaacaggatgcaaagatgttcttctgatcaggaaagaagaagaactgcttgagggtcggttgatgcatcaagctctgtacgtactggtcagggctgactaccgatgctagaactactactagaatgggacatcagatgctctcttctcctcccttgattttgctccatctgcaaggacagacggcacgtctctctctagaagaagtcagctcccagcgccggctgcccctgtggctggctcgccggcgctgctggcggctgtcacccatggggggcttaggaagggctcgccgacgacgtcgaagagcgaggacgtcggtgccccggcgtcggcatcagcgtcggtgctgaggaacaggagctcgtcctcgccggccatctccatgtcctccaccagcagctcgtcctcctcctcctcctcctcgtcgacctcctccatggacggcgtgcgcagcggcg

SEQ ID NO: 167614 - DNA, 535 bp, Zea mays
  Clone ID: MRT4577_84446C.1
gaagtgagaacctctgtgcgggcctcgtccctgtccctcatctaggcgaccagagctgtatccgttacccgatcctcctctttgtcgacgcgatcggcttcgctacaacctggccagagcagctcgggcagggagcgcaaggcaagtacttgcactctcccacctcggtctcaaagatctggtgctaactgaaatgcccgcagtgtgcccggcgctccgacggaaacaggggcgcagacgagatcatcgcgggaggggatgcacgcctcgaacagcttcatctggaaatgctgcgggtgtcacagcgacgctagccagctcgcgccgctgagatcgcgtccactgcgaacaaggaggcgacgagtgggagctatcgccagatcttatatcgtgaatggatgatcatcgcgacgcaggatgcggcaagaagctgctccgctaccacatacaggattgccgaggagcatgatgagctgtgccataacggcatgactgacttcgcagatatctagaatgtgctacaggagtacctcga

SEQ ID NO: 167615 - DNA, 284 bp, Zea mays
  Clone ID: MRT4577_84447C.1
tcagagtctcatacacacttctaatctggccgggaaaactgacattggaacgtatcagtatcacggtcacgtcagttgactaatgtgtgactgtgagcgcgtgtgacagcttttacgtacacgggatcgctgaaaaggatacgtatatagctcgctatacggtcggcccccgttaagaaggaaaatatgctcggctcacgagcgctcttgcttcttgcttaagcctgtcttcgcttggtagccgtagcagtatagttttaccggacacacggcttatggatgtc

SEQ ID NO: 167616 - DNA, 603 bp, Zea mays
  Clone ID: MRT4577_84448C.1
agttctcctctgccagaatggcttcggcagtctgcacaaatggttccctgcaagctctgcaaacgggtccctcttctctctcgggctcccacgaggccacaagtccataacgcctgcacggagcggagccggagccggcgacgacgacgaacggcggcgcctcggtttctccgcggagcattcggccgcagccgctgcaacggcttgcagctactctgttgtggccgatttgggtccccaagcagcaatgcagcagcacgatagacttgtctacttgtcgttccatcttcatcagctgttctgttgaccaagatgtggcgctcacgtctgcacgaaccggatccaattcttttgccctcggtctccctcctgctttagttgacctcagatgtcggctgccactttgcagtgtactgtaacctgtatatctacctattgtatttcaaaaaggaataccgcagatcgaagccatgtatttcaaaagtttcttttgtggcatgtatttcaaaagtttataacttgcatatgtgaactccagattgcatatgttaataatttcagttgttaccggacaaaaaaaaaaaaaaaaaaactcgagactag

SEQ ID NO: 167617 - DNA, 120 bp, Zea mays
  Clone ID: MRT4577_84449C.1
gtgctacaaacatatatggagtaatataaattagcacacagcgtgaatacagaatgctcattatgcccatggtgctacaaacatatatggagtaatataaattagcagtattttctttcg

SEQ ID NO: 167618 - DNA, 1281 bp, Zea mays
  Clone ID: MRT4577_8444C.1
gcacgggcctcgaggccggccgggatcaggcaaacgatacagcccttccctcttcaatcctctcgtcatttcctctcgcttctgctcagctgcaacccagcgcgtagatcttattcttggacgagaacgatgaggagctcttctccatgttccttgacgtcgacaagctgaactcatcgtgcggggcgtcgtcggaggccgaggctgagtcctcctcggccgcgggtggcggcggtgagggggctgagctggccgacgcgcccaggccaaggcatcagcacagccagtccatggatgggtccatgtcgatcaaggcggaacagctggtgggtgcgccggggatggaggggatgtcgtctgcagaggccaagaaagcagtgtctgcggcgaaactggctgagcttgctcttgttgacccaaagagggctaaaaggatttgggctaatagacaatctgctgcaagatcaaaggaaaggaagatgcaatatattggcgaactcgagctcaaggtgcaaaccctgcaaacagaagccacaacattgtcagctcagctagcattgctgcagagagacaccactgggctaacaaccgagaatagtgagctgaagattcgcctgcagaccatggaacaacaagtccacttacaagatgctttgaatgacaccctgaaaacagaggtccagcggctgaaggtggcaacaggacaggtgggcaatggtggtggagggatgatgctgaactttggggccatgccacgcctggtcggaggcaaccagcagatgttccacagcagccaagcgatgcaatccgtgctggcgacgcaccagctgcagcagctccagctccactcccagcctcagcagcagcaactgcactcgctgcagctccagcaggtggcgagagacctcaagatgaaagggcatctgggcggccaaggccagtggggcgatgggaagtctgggagtgggagcaggagcagcggcagctgagcctactggcaccgtggcacgggagttttggtgtatgtggtgagcaggaatggtgatcccttgttttgggggatgttgctgtgcaggtgtaattatcgttaactcagttgtctatctataggcccagttcagcttgagttttatggttaactcggcgatctttataggctcagctcacctgcaacgcacttcagttcagaaactcggatggtggcagatgtttgtctgttggatgttgtttgtatctcttttgctagtttaagggtaaaaatggttggcatttcagtgtttc

SEQ ID NO: 167619 - DNA, 186 bp, Zea mays
  Clone ID: MRT4577_84450C.1
tttttttttttttttttttttggggggttttttcaaggggaggggaaacaaatatgttttaaaaacatataagcatgtggtttttctacaagccattacagaacttggcacatgaacaagtacattgaatagggtaacaaaattgccctccttttcaatacgcatgggaaaaccaataattgggat

SEQ ID NO: 167620 - DNA, 432 bp, Zea mays
  Clone ID: MRT4577_84451C.1
ccctgcgagttttttttatccccttttttttttttttttttttttttttttttttttttttttttttttttaaacacaaaaaaaaacgtaacttaaaaaacgaatatgacctgaaacttctttcccaaagtttttcctcaataccgaccgaccatttgcagtcactcgagcagaaaaaagactcaggggggggaccaacggggacgaaaaaacaggctaagttagttttataaaaacaaaaggggccgactcactcgctccttattataaaacaaaaaagtcagggaagttaggggtttgcccccaactcaacactcccaggaggaagcccctgggcacccccaccatgggtgggggaaaaaaaagtgcccccgccggggggaccaccccggcccttgggggagttccccgggggggagaaaccaaaatcgg

SEQ ID NO: 167621 - DNA, 268 bp, Zea mays
  Clone ID: MRT4577_84452C.1
aggaaatgaaccgaaagttagaggtgtatgataagcagatgaaggcagccaggatgtctgggagcaagggcgcacatgataaggttaatggtcaggctctgtcaaaggctgctaaagaggccgccaagaacaaggggaaggggaagagtgctgcatatgatgacgattaccagaaacatgtggctgttccacagaactggcgagactacatcggtttagttctcattttccatatccgatcaatctcacatccacctcttcttcatct

SEQ ID NO: 167622 - DNA, 1214 bp, Zea mays
  Clone ID: MRT4577_84453C.1
cccctgccgggctcgaggccggccgggatcgccatcgccgggcatcgcgggcatcgcacacaaacgcaacctgcagccatggcacagaagctcgcgccaccgacggcggcggtcgtcgtcgtcctgctggcgctcgccttgtcggccgccgcgcagaactgcgggtgcgcgtcgggcctgtgctgcagccggttcgggtactgcgggacgggcgaggactactgcggcgccgggtgccagtcgggcccctgcgacgtgccggagaccaacaacgcgtccgtggccagcatcgtgacgccggccttcttcgacgcgctcctcgcgcaggccgccgcctcgtgcgaggccaacggcttctacacccgcgacgccttcctcgccgccgccggctactacccggcgttcggccgcaccggcaccgtcgacgactccaagcgcgagatcgccgccttcttcggcaacgccaaccacgagaccataaagttctgctacatcaacgagatcgacgggccgagcaagaactactgcgaccggaacaacacgcagtggccgtgccaggcggggaaggggtactacggccgcggcccgctgcagatctcctggaacttcaactacgggcccgcggggcagagcatcggcttcgacgggctgggcgaccccgacgcggtggcgcgcagcgccgtgctcgcgttccgctccgcgctctggtactggatgaacaacgtgcacggggccatcgtctccggccagggcttcggcgccaccatccgggccatcaacggcgcgctcgagtgcgacggcaagaaccccaactccgtcaacaaccgcgtcgcctactacaagcagttctgccaggatttcggcgtcgacccgggcaacaacctcacctgctgaatgatctctctctcattgggttgttgtcctgtacttacacatgtgttggttgatggatagatggcgattgcgtggtgcggatgtttcggtttggcggtgtcaattctgatatgcgcgtcggtgctgttctgatactgactatatacggaaataaaaatctgatttgcattaaaaaaaaaaaaaaaaaaggcccctagggccaaaaaaaaaaaaaaaaaaaaaaaaaaaaaaaaaaaaaaaaaaaaaaagtttaaaaaaaaaaaataaaaacaaaaaaaaagtccctttgcgtttttaccccccccttaagggacaatttt

SEQ ID NO: 167623 - DNA, 394 bp, Zea mays
  Clone ID: MRT4577_84454C.1
aaaaacaacaatataaatttatatagcaaatcatatatgttatttgtttacaatcaaagaaagaagatatacatctgaatgaataaagatccggatccatccttactctcagcctcccaagcctccagcttacaagtaacctgtaggcctggtgtcttagattatcggctcacccagaagtatttcatcgacataagtaccgctgttcctttattgtacatacgatacaagcgtatctacatgggcatgcagtgtgttctgttccatatagaccgacgactgcatgcgagccaaatattggccacgacggagagcagtgtcgccacctccagcaagagcaggcggccggccggggaacgatcacttgatgaggatgcatctggtcggcgcaccc

SEQ ID NO: 167624 - DNA, 1116 bp, Zea mays
  Clone ID: MRT4577_84455C.1
ccgggcatcgcgggcatcgcacacaaacgcaacctgcagccatggcacagaagctcgcgccaccgacggcggcggtcgtcgtcgtcctgctggcgctcgccttgtcggccgccgcgcagaactgcgggtgcgcgtcgggcctgtgctgcagccggttcgggtactgcgggacgggcgaggactactgcggcgccgggtgccagtcgggcccctgcgacgtgccggagaccaacaacgcgtccgtggccagcatcgtgacgccggccttcttcgacgcgctcctcgcgcaggccgccgcctcgtgcgaggccaacggcttctacacccgcgacgccttcctcgccgccgccggctactacccggcgttcggccgcaccggcaccgtcgacgactccaagcgcgagatcgccgccttcttcggcaacgccaaccacgagaccataagtacgtgcgaacaaaccgaagctcgtccaagctctagctgctactaatcaagtttcgactgctcgcagagttctgctacatcaacgagatcgacgggccgagcaagaactactgcgaccggaacaacacgcagtggccgtgccaggcggggaaggggtactacggccgcggcccgctgcagatctcctggaacttcaactacgggcccgcggggcagagcatcggcttcgacgggctgggcgaccccgacgcggtggcgcgcagcgccgtgctcgcgttccgctccgcgctctggtactggatgaacaacgtgcacggggccatcgtctccggccagggcttcggcgccaccatccgggccatcaacggcgcgctcgagtgcgacggcaagaaccccaactccgtcaacaaccgcgtcgcctactacaagcagttctgccaggatttcggcgtcgacccgggcaacaacctcacctgctgaatgatctctctctcattgggttgttgtcctgtacttacacatgtgttggttgatggatagatggcgattgcgtggtgcggatgtttcggtttggcggtgtcaattctgatatgcgcgtcggtgctgttctgatactgactatatacggaaataaaaatctgatttgcattaaaaaaaaaaaaaaaaaaaaa

SEQ ID NO: 167625 - DNA, 342 bp, Zea mays
  Clone ID: MRT4577_84456C.1
acaaaaaaatcaaaaaaaaagataaaaaaaaaaaaagaaaaaaaaaaaaaaaaaaaaaaaacaaacaaaaaagaagacacgtcaaacgtggggaggattcacatggggcttcaagttcccgtgcgcgcaagtgctgctggacgagttcaccatgacgtcagctggctgcacttacaaggtcatctcttaagcgggcaacttctggtacaccgtggtggtggccaaagttttccaccatgtgttaaacaccccttgcggcatgagtcatcttcgcaacggggccaactcgcattacctttccaacattttgttcctgctggtggtgtacggggacctgctgct

SEQ ID NO: 167626 - DNA, 558 bp, Zea mays
  Clone ID: MRT4577_84457C.1
gttaaggcatcgggtggatttgcccccacacgtagtcttctttggaagggtgtctcacatcagctcccactcccatgatcccatcccaacagcatgcatgcgcaatgccaccgtacaaagtacgacgacccctacggtaatacaacacacaaggaggcatcgcagacggagctggtaggtgcctaacacagttccatgcacacgtgtattattttggatccacgctcgcacgcactaacgcatgtatgcatgcaaatggtggcgggagtgattgaccaatacataacacggtcagaacgactacgacgttgacgttcctagcacagcgcactggtggtccttgagcgccgaccgtagtaactgctggaacctcttcaggaaggacgaccactccgggaggctcatgtctccgaacgacacgaattttcgccctccggagacgatagtactcttgtcaacgccgtcaccgttggcgtagggcgaagggtgtgggaggacggcctcgagcgcttgcttgcatagccccctcagtgtgctcagacaatcctgctgagccgt

SEQ ID NO: 167627 - DNA, 1551 bp, Zea mays
  Clone ID: MRT4577_84458C.1
cattgggtacctcgaggccggccggggaaatccttcactcgtccctctctcggtctgtccctttggagcgaaggcgaaccgcgtcgcgaacccaggatcccatcgagggcaggcgggcagatcccggcgtccgacggcgatgggcgaggaggacgcgagcgccgggggagatccgcagcggctgaagcggatcgccgctgcggcgtacgactacgagaacgatgcgcggtgggccgggtattggtccaacgtcctcgtgccgccccacctcgcctcccgccccgacgtcgtcgaccacttcaagcgcaagttctaccagcgatacatcgatcctggtttggttgttgaaccgatgtcctccatgacttcaactcagtctagcagaccagcagcgaagtcttcagctacaccatctagtgagaatgtcagagctcgggactcaggctctagcacgagatcaactgggacctcccaacatccacccgcagagaggactgcaaattcattacagctagacggacggacaataaacttttctatcaatgcctgggtactggttgtagctagtctcggaatactcccagttctacccaaccatatctcgagtaaagcataccgtctttcattgctaggaacaatatgctcgtctgcatattctttatatggcacttatgggaaaccaagagcatggaatatgcctgcaattcagtcctggttgcagtctattattgtagctaaggactttgttcacttgatgttctctcttatgatgttcacatctaatgtgcactttaagattgctctacttcctgtgctttgctgggcgcttgatcatgttgctcgattcctaaggcgtaattttacacactcttctttatacaggaagtacttagaggacccttgcctatgggtagagacaaacaacactacactcagcctactttgttcgaatgctgaaatcaccctggggtttctcatgatcatctcgcttttctcgtcgagacgcaatataattcagacatttatgtactttcatctgttgaagttgatgtaccattctcctgtgacatctggttaccaccagagcgtgtgggcaagaataggccgggctgtaaacccgtacatttaccgctatgcgccattcctgaacacacctatttcggcagtccagagatggtggctgaggtaggaaagcatggaccgcagcacagtgaaaatatgcctaaacagctactctgatctcagcgcctcgatcttttagaaggcgtgcttgcacagcgtgttctgttcttgtaaaggttgtattctcagttcatgtcttactgagctactgaaggcataacgctagagaatttcttacgatgagcagtagagcttgagcaaactgtcgatttgatgggatacagttacaggcataaagtgattgcacagaattttcataaggatgcttgctgcagtcaataggatggaacatgcgagtggcactattgattcttgaagtaataaatgatgttcttgtctatttttaaaaaaaaaaaaaaaaaagcggcc

SEQ ID NO: 167628 - DNA, 835 bp, Zea mays
  unsure (1)..(835): unsure at all n locations
  Clone ID: MRT4577_84459C.1
cactgtatccaccacatcccacgccgagcgcgacgccagcagcaggctagctccgctgtccgctccgccgctcactagctagctgctggaccgcgcctccctctctcatcgcgccggcgcgcgcgcctagggctagctcccggagccgccttttcatggtccccgccgtggtcgggacgagatgcctccgctcgcattcctccgccgctccctccccgcgaggcttctcgcgcgagcgtgtggtggtggtggtggagtccgggggagcccgggcgtggcgcgggacgaggaggccggaggcagcggcggactgagcggccggtcggcgggggcgccgtccggcgggagtgctacgcgtgcacgcagcccggggtgccggcgttccactccacggcctgcgaccaggtgcactcgccggactgggacgccgacgcggggtcctcgctggtgccggtccaggcgcagcagcaggcccagccggcggcggcggcggcggcgcagcacgcggcgcggtggctgttcgggcccgtgctggacccgcgcagcaagcgcgtgcagcgctggaaccgctggatcctgctcggccgcgccgccgcgctggcgctggacccgctcttcttctacgcgctctccatcggccgcgccggccggccctgcctctacttggacgccggcctcgccgccgcggtcaccgcgctccggacctgcgccgacgtcgcgcacctcgcgcacgtgctcctgcagttccgnctcgcctacgtctcccgcgagtccctcgtcntcnggtgcggcnggctcgtctgggacgcccgcgccctcgnccngcccttcgccc

SEQ ID NO: 167629 - DNA, 250 bp, Zea mays
  Clone ID: MRT4577_8445C.1
gtaaccaaggtgacccaagaacgtgggaacccaaaggtatggctagccgaagcccaggcccaagcacccaagatcgcacggcagcgtgctaggagtgctgtataaacccaacagtatacggcgccagaggcctaataataataggactttccaaccgggatagttgcgacttcacggttgtaaaaccataaacgttggatacgccggtacgtgtgatagcaatcagaggacgcagcacccactgccaaac

SEQ ID NO: 167630 - DNA, 394 bp, Zea mays
  Clone ID: MRT4577_84460C.1
ctttctcgttcggccgctccctcgagcaaatccaccagccgttcgctttcctctactatcctctccatcatgccggccggctcgccagtcgccaccctccctttcctattttcagctacagatgagcttgggcagtagtaggtgggttccgctacccttaccatcccccgagcccttgaccttgctggggatcgggaggcctgcatgcttcaacctatctacctccctgtccacatctggctccttgtctgaggaagagccggctgctggtgccagtactgctagccgggaacccaaactctagataggactggacaactgcagcgtgccaaccacgagagtttgctgttcgctctgctctcggggctcagctactgcagctctgctaggacca

SEQ ID NO: 167631 - DNA, 783 bp, Zea mays
  Clone ID: MRT4577_84461C.1
cattgggacctcgaggcggcgggatctcttctatggaccaagctccggaagcgaagatgacacgcatgcaataaccaaacaatggtgcctggtttcgcagagtcccgtgcttcttctccctcataaaacctcgctgaagccttcacttgttttcttcatctgattgatgtgaaaaaagaaagctgtctttgactcggccgttttatttatttcttgctacccactaactctacatcacgcaaattgagcaaagttgcccaacatggctgaaaatgtgatggccgcctactgggacctcccagccatctctcggaatcttattactgctctagtgttgacgtccgtcacctgcaagcttaacattgtgtcggtctactcggtgctttatcatccgacctatctgtggatgttccctcctcagatttggcgccttgtaacatgcttcttcgtcgagctgaaccccatcaatttgctcatgaattcgttctttctgtatcgctactgcactcagctggagatgggaaacgctcgtttcccgcgcaaggtcgatcttgtcttttacattctcttcgtctgctcagtaatcctgatgatcgactacgttacaggcttgaacagcatgctgtacttgaacggcatcatccttgctatggcgtacaccgtgactcaggatcagcgaggccagaagacgcaattcctggttctttacatcccagcccagactctgccgctctgcatgattgtcgttactgcgctcatggcaggacccagtgcagccctggt

SEQ ID NO: 167632 - DNA, 190 bp, Zea mays
  Clone ID: MRT4577_84462C.1
aatccgattcaaaccgccctttccccgtgtccgggccaagcaagagcgagcccaaccgccaacagccagctggtcggtgctccacgcgatggcgcggaaggagactaatggcagcaacggcgatcacatctccactcggccgacccccacccccccgaccgtccgcttctccaagagtcgttcaggataa

SEQ ID NO: 167633 - DNA, 359 bp, Zea mays
  Clone ID: MRT4577_84463C.1
ttatctttttcggttcggggggcttaatagatcaacataatcccgacccattaaactaatggcattttacgaacaagaaatacatctgcccttagtaaaaaaaacacaacacacaaaaaaaacgagaaaatccatagtgcttcatctcgcggggcgcgtgcaaaaaacactcattgatttctaggacctgaggggcctgcacacgatggtggcatgcttggcgatctggttgatgaacctgccgggcttgtccgtgggctacatcttgtccagccccacccgcgggctcagcttgaaggtgctcaccacccagcccatggtgatgcccttcataagccgcgccaggatgatcccaaggc

SEQ ID NO: 167634 - DNA, 289 bp, Zea mays
  Clone ID: MRT4577_84464C.1
caagtcttgagcagttcttctcttgaaggcggggcgcaaagaaagggggcttctgaactccaaacaaatgtgctgatttagcagcacagttgtgagttgtcacgcccccaaccaaggcatggacagaacagccaccctactcttataggagttggcttgcgatcatgcaagatgtatattaaatatagacgatgataataagttgataaaaaaacattcttatttatttgtttgttatttctagtaaaaattgcatggaaaaaaatatgaatatagaagctactcctat

SEQ ID NO: 167635 - DNA, 169 bp, Zea mays
  Clone ID: MRT4577_84465C.1
ctcatgctcaagttcgtagtcaggtcgatttaaaccatcaccaccatttctagcaagagggtacctatcatagatactctttcgactcacgacaaccacatgtacaaggacgttattcaacaacatgccatcaatgccagaagagttcatggacaccctgtccatctta

SEQ ID NO: 167636 - DNA, 2771 bp, Zea mays
  Clone ID: MRT4577_84466C.1
ccacgcgtccggcgaggacctgccgaggctcgggcgccgcgcgcccgctcctccgccggccgcccccgcgcgcccgggtgcggtgctggtgcgggccgcgctcacggtgcgccgcaagcacaaggaggacctcaaggaggcgctggccggccacctcgacgcgctatgggacatggttggccggagcgtcgcgctcgagctcattagcaccaagctccaccccaggaccaagaagccgttgcagagcggtcaggcatcgatcaaagactggtgccagaagaggggcgtcaagggagagcacgtcgtgtacacggctgagttcatggtggattcagacttcggcgagcctggcgccatcaccgtggccaaccggcaccatcgggagttctttctggaaaggtcaacatcgaagggtgggctgccgtgtggtccggtgcacttcgcctgcaactcctgggtgcagtccaccagggaactgccgggaaagagggtgttcttcagtaacaagccgtacttaccatctgaaacaccacccgggcttagagaactacgggataaggaattgaaggaccttagaggagatggcacaggagtacggaagctatctgacagaatctatgattatgcaacatacaatgatttggggaatccagatcgcgcgaaagagttcatcaggccaatccttggaggtgacaacatcccttatccacggcgatgccgaactggtcgcccaccaactgatacaaacatgctagctgagagcagagtagagaaacctcacaggatatatgtacctcgggatgaggcgtttgaggagctgaagcaaggtgccttctcatcagggaggctgcgggcagtacttcatacgcttatcccatcgatgattgcaaccatctcagctgagacccacatcttcaagctgctcaagcctcacatgcgtctatacaaggaaggcctcaggctgaagttgggtctccaggagcacctgttccagaaaataccccttgttcagaagattcaggaatcaagtgaggggatgcttcgctacgcgtcccgtaagctctggcggcttgaccaggaggcatggctccgtgacgatgagtttgctcgacagactgtggcaggaataaacccagttagcatcaccaggctcacggttttcccaccagtaagcaagatggatcctgcaatctatggcccgccagaatcatcgatcgcagaagctcacatcactggacagctcaatggactcacggtacaacaggcggtggacgaggcaaagctgttcatattggactaccatgatgtatatctgccattcctggaccggatcgatgcaatagaggggcggaaggcgtatgcaacccggacaatcttgtttcttaccaaagctggcacattgaaaccgattgctattgaacttagccttcctccgagcaaggcaggcgagccccggccaagcaaggtccttactcctcccgctgatgctacctccaattggctatggatgcttgccaaagctcatgtcagctccaacgacgccggtgttcaccagctcgttaatcactggctgaggacacatgctgtaatggagccgttcatattggcagcgcatcggcgtatgagcgcaatgcacccagtcttcaagctcctgcacccccacatgcggtacacgctggagatcaatgcgctagcacggcagagcctgatcagcgcggacggtgtcatcgagtcgtgcttcacccctggtcccgtctccttcgagatcagcgctgcatactaccgcgaccactggcggttcgacctagagggcctcccttctgacctcgtccgcaggagagtggccgtggaggatgcgtcgcagcctcatggcatcagactcctcatcgaggactacccttacgcaaacgacgggctcctgctgtggtcggccattcgcagctgggtggagtcgtatgtgcagctctactacccggacgccggcaccgttcagtccgacgacgagctccaagggtggtaccaggaaacggtgcacgtcgggcacgccgacatccgcgacgcgccgtggtggccgcgcctgtcgacgcccgcggacctggcgtcgctgctgacgacgctgctgtggctcacctcggcgcagcacgcggcgctcaacttcgggcagtacccgctgggcggctacatcccgaaccggccgccgctgatgcggcggctggtgcccgccgagggcgacccggagtacgcgcacctggtggccgacccgcaccgcttcttcctgtcggcgctgcccagcctgacgcagaccaccacgttcatgaccgtcatggacacgctgtccacgcactccgccgacgagcagtacctcggggagcggcccgacgaggcgtggacggccgacgctgccgcgtggcggcgcacgacatgttcacggccgacgtgcgccgcgccgaggaagccatcgatagtcgaaacgcggaccagcgcaggaagaaccggtgcggcgccggggtgctgccgtacgagctgctggcgcccagctcgccgccgggggtcacgtgccgcggcgtgcctaacagcatctccatatgaatgagtgcatcgttcgttgtttttccacattttttttctacgggtactattatgtattggttttcaagcaaattcgtgcctacgccagcacttgtagagaatacactacgaacatatatcgaaaataccaaatctgccaagaatgaggattgaacgccgacggcgttggcgaccgccgacta

SEQ ID NO: 167637 - DNA, 235 bp, Zea mays
  Clone ID: MRT4577_84467C.1
gtggcggaggcgaggcggcggctatcaaggaggaggacgcgcgcggcgcgctgcggctgaagctcgtcgcggtggcatccatcctggcgtcagccgcggcggaggtgctggtcccgctgctgggccggtccgcctaggcgctgcgccccgacggggacgtcttcttagacgtcaaggcgttcgacgagaaggtcatcctcgccaccggcatggtgcacatactgaccgcggcctt

SEQ ID NO: 167638 - DNA, 1666 bp, Zea mays
  Clone ID: MRT4577_84468C.1
cagtaatacattgccttcttacacagtactactttactgagtggttatttgaaaacaggttttcccaccagtaagcaagatggatcctgcaatctatggcccgccagaatcatcgatcacagaagcgcacatcactggacagctcaatgggctcacagtacaacaggcggtggacgaggcaaagctgttcatattggactaccatgatgtatatctgccattcctggaccggatcaatgcaatagaggggcggaaggcgtatgcaacccggacaatcttgtttcttaccaaagctggcacattgaaaccgattgctattgaacttagccttcctccgagcaaggcaggcgagccccggccaagcaaggtccttacccctcccgctgatgctacctccaattggctatggatgcttgccaaagctcatgtcagctccaacgacgccggtgttcaccagctcgttaatcactggctgaggacacatgctgtaatggagccgttcatattggcagcgcatcggcgtatgagcgcaatgcacccagtcttcaagctcctgcatccccacatgcggtacacgctggagatcaatgcgcttgcacggcagagcctgatcagcgcggacggtgtcatcgagtcgtgcttcacccctggtcctgtctccttcgagatcagcgctgcatactaccgcgaccactggcggttcgacctagagggcctcccttctgacctcgtccgcaggagagtggccgtggaggatgcgtcgcagcctcatggcatcagactcctcatcgaggactacccttacgcaaacgacgggctcctgctgtggtcggccattcgcagctgggtggagtcgtatgtgcagctctactacccggacgccggcaccgttcagtctgacgacgagctccaagggtggtaccacgagacggtccacgtcgggcacgccgacatccggcacgcgacctggtggccctcgctctccacgccgggggacctcgcgtccatcctgaccacgctcatctggctcgcgtcggcgcagcacgcggcgctcaacttcgggcagtacccgctgggcgggtacgtcccgaaccgcccgccgctgatgcgccggctgctaccggacccggagcgcgacgccgccgagtacgcgacgttcatggcggacccgcaccggttcttcctgaacgcgatgcccggggtgctggaggccaccaagttcatggctgtggtggacacgctgtcgacgcactcccccgacgaggagtacctcggcgaggagcgcgacgagccgtggacgggcgacgctgccgccgtggcggcgcacgacatgttcacggccgacgtgcgccgcgccgaggaggccatcgatagtcgaaacgcggaccagctcaggaagaaccggtgcggcgctggggtgctgccgtacgagctgctggcgcccagctcgccgccgggggtcacgtgccgcggcgtgcctaacagcatctccatatgaatgagtgcatcgttcgttgtttttccacatttttttctacgggtattatgtattggttttcaagcaaattcgtgcctacgccagcacttgtagagaatacactacctatatatatcgaaaataccaaatctgccaagaatgaggattgaacattcttggcctcaaaac

SEQ ID NO: 167639 - DNA, 469 bp, Zea mays
  Clone ID: MRT4577_84469C.1
gggggggccgggtttttttttttttttggaagcaacgggggaaacagccaaaattattctaaaaaacccgggagcaaggcgggggaaaaaacgactttaacaacatcagggggggaaaaccacacaattttttataacaaacccccaaaacccgaaggggcgagggcccccccccaaatgagtgaaaaggggcaacacacgggccggaggccgggaatttttaaaaattttttaggccccggaaccctgggggccatcccccccctaataaaaccaagggccgcccccctagaaatccttttggagcgccgccaggtcctaacgggcctaaaaaaaataacttttttaaaaaccctaaccgacgaaccagggcacaaaggcccccttggggaacaaaagggaaaacttgggggcaagggggaaaaacccccccacaacactgggggagttggaaataatgcacagggga

SEQ ID NO: 167640 - DNA, 493 bp, Zea mays
  Clone ID: MRT4577_8446C.1
cggatatgttcttgttaagcaagaggacatagtcgatggtattgcatgcttcatggctgcatacttgctgtcgctgaaacaaactaaggacctgacacccaaccaacttcaacaagctcttagcaagacattttcagctaaaaagaggaaaagcaaactgcagaaggcatgggatggaacgaaagttgtttataatatagcatcatggagcgcgacggctattggtatctaccagaatcctgcgattgtgcaagttcgttgattgatttaacagcgacatcagttactggtgatgagcaatatggggctgttcgacagtatctcacccatataatctaaaggtatgaatggacacaccaccatctatttgccaataccagctgtatccgacaatcaagaaccgatgtacataagccctcccgcgcaacattggtatatcagtgtgattgtaaatatttcgattcatttgaataaattcgctcgcatgtgtttc

SEQ ID NO: 167641 - DNA, 395 bp, Zea mays
  Clone ID: MRT4577_84470C.1
acccacgcgtccgacggcagtaggggccaggtgcacgtcttatctaagcggctgactcatcctctcgggcgcgatcctatgatcggtgataactcgacggatctgacgcccttagttccagcgacgcattattcacatatcggccctatcaagtttcaagggaaagctctgaacctcccatctcggcgtctggctacctagaattacactccgattaccaagcggatgcctgccaaacttctaatacattcaatgtaggcacttagttcgcatattaacctatattcactcgtacaggtagtgacgataattaactaagaggacgtcgctcgagattactcagcctacatagcgctgcacgcaacttcagtagcatattcatagtgttacctaaa

SEQ ID NO: 167642 - DNA, 370 bp, Zea mays
  Clone ID: MRT4577_84471C.1
gaaagctggtcgcgcctgcacgtagccggtcccggaattcccagtggtcgagcccacgaccctaccgcgttgcaatggtgtgtgagcgcgcttcgagtcgcaaggcaaatagacttctgagtggtggaggctctcgtcagccaagcaggaggtaagaggacgccgccggatggatagtgacatgcgcagtggatgctaccacgtggtgctcggcggactttatcgagcacatcgacatcatcattttgctcgtgctctgcccagacctcatgtgtggcctcaccctgcgactcatgtacttcagactggtttatctaaaggtcctgaccaagtgccgcatctagcactatcgcaagcacgcagctaatat

SEQ ID NO: 167643 - DNA, 629 bp, Zea mays
  unsure (1)..(629): unsure at all n locations
  Clone ID: MRT4577_84472C.1
tctcctatctttctgtacagctctntctntcccggaggggaagtggnttggtggtcgtcggggtcctggngcgnncctaacgntngcngacgttccccagcagntaatntngctttattaactaatgcctccttcnnctctgcgttgggcntgggagcttttgccgnaccacctcangacagctctgccgncggtgtgatcttgatcaagctatggcggagtggcnnaagccctgggaccagactgctccctacancangctgctggtgtctgacttctaccaaaagaattcctcgctgtgccnggccctgggcnnnnccgttccnnaagctcnccaccccnnncanangcccggcccccttctnncagctggccctggccccctttnnncttttcncncccnttttcccnnccccacgcccccttccccccttccncctactcccnccntccccccccccccccccccgccccttccccttcccgttgcccccccccccccctctccctccccccggccctcntcctcctcttcctcccccccccctctcngcgccccccccccccctccctctcnncncctctcccttccccccccccccncccctcctcccccctcttccccccct

SEQ ID NO: 167644 - DNA, 415 bp, Zea mays
  Clone ID: MRT4577_84473C.1
tgtccgggccccgcccgcccgaccgaccgctgtctcgctcgcctcgtctcgtctcgcctcgcttcgtctccgtttcctccgcacaccaccacagccgcgtcaagccgtcaaccaaccaaaccctagaaggctctcgcccccgtccccaatccttcgccgctccccgatcctcgccgcccgcaggccaaaaccccacgcctctccctcgacgccgggtatatccaggggaatcactttgtctttttttccttctgcatccaagtccaagtcaaaagatagatcagctgcaaaagttgcaaaagagcaacccaagggttctgcaaagccactgggaaatgggacgcttgcaagttcttataacaacccctttggaaaggtccatggtctggaaccatcaacttctttggtggggagc

SEQ ID NO: 167645 - DNA, 504 bp, Zea mays
  unsure (1)..(504): unsure at all n locations
  Clone ID: MRT4577_84474C.1
aaccacgaaaccactcatagccgtgccaaggcatcatggnagtacgtgtcatgcagggggcatgcgcgtgccactggcgtccacggggccattgtcgaccagtacggncaaccccagtcttgcggcgttcaagcactgtggcggttgtatgggggcacggcacgggaaccaccggcggcatgggccagctgggtgagcacggcggcgctggcatgggtggcgggcagttccagcctgcgagggaggagcacaagaccggcggcatcctgcatcgctccggcagctccagctccagctcgtcngaggacgactgcatgggcggaaggaggaagaagggaatcaaggagaagatcaaagagaagctgtccgtgagccacaaggacgaccagtacgccacggttgacgaccggtggcgcctatgggcagtatggacacaccggnagcgccttacgggcagtagggacacaccggtggtgcctacgccaccggcaccgaaggcaccgg

SEQ ID NO: 167646 - DNA, 344 bp, Zea mays
  unsure (1)..(344): unsure at all n locations
  Clone ID: MRT4577_84475C.1
cacgcgtncggattcatcaataagactgcaatcatttctgcgtctggtatgattcacagagcagacaagggcataggggctgttcttgaagactttcctctcctacagacaaaagtcacactagcatcctattaggtacttgctccactcaacaatttctactaaaggatggctgacgccaactatagtgcctgcgaccaaagcgtaattattgtgaccacacacaggagaaattttccacattaccttatcgatgacaagatatacttctctagcgggcactcaaaaatcctttacccacacaaaaaaaagcttgccttactttttgataatccacgtatagg

SEQ ID NO: 167647 - DNA, 265 bp, Zea mays
  Clone ID: MRT4577_84476C.1
ggcccagacaaatcggaaaaaacagggaattttatttcccggggggttgaataccatggggattttacaaaaaaacccccacccccatttaaaccatttttcccgggccccccctaatttcccatgtaaaaaggggcctgggttcctggaaaaacccgctaatgtctgaaactttgaattcaaaaaagggaaagggggtatttttcccctttaaacggaataaaccctgaggccggcaaattcctttttatataaaaataaacca

SEQ ID NO: 167648 - DNA, 179 bp, Zea mays
  Clone ID: MRT4577_84477C.1
tcagcctcatcgaactctacctgcctttctctcttccctggctgcatctgcaggatctcggattatacttccaggactggttaaccatatgaacccagcacagaccatgcacgtctacatcatctatctgacacactcatgtacgacgtacctctcacatttgattgtcatactaacga

SEQ ID NO: 167649 - DNA, 405 bp, Zea mays
  unsure (1)..(405): unsure at all n locations
  Clone ID: MRT4577_84478C.1
ttttatanttttttttttttttttttttttttttttgtttttttttttttttttttttttttttttttttttttttgagaggggccaaacagggcccgaaaaactcccgttaattccccatagttttggggcctatacaaaaatgcggggggaaaaggccgcttcctaaaaaccctatacaaacattttttggaccatgggggaaaaaattggctttttgaaccccgaggagaacaaaagggggtgcccccaggcccccgttgttccgggctaattttccttgggtggaaaaacaaggggggtccttacgaatgaaaagggggaaacccacttaggggtgacctttgcttccgggacattggggtgggcggaccacccaaccgttaaccggaagctttttttttt

SEQ ID NO: 167650 - DNA, 425 bp, Zea mays
  Clone ID: MRT4577_84479C.1
ccccctcccttttttttttttttttttaacatactttaaagagggtttttttaactataaacataaacatctgccccattcactataaaataaacccatttccgccctttcttaacacaaaaccttaaattttccaaatttccaattttacccaacccactgaaaaatacaaacctacccttccaaacaacccccatttttcactttttcaaacaaacaaacaccaaaaccgcgattcacataaatagatatatccgcttcattcgagctagatctaatacaggttccttatctgaaactcttcccatatctcacgctccaacttgttcgcgcaacttgcttcaaccctccaatgggaccaagctcttataaaaacaatacacttttttcaggcaaaccatatcatccaaaataacccaacccaa

SEQ ID NO: 167651 - DNA, 532 bp, Zea mays
  unsure (1)..(532): unsure at all n locations
  Clone ID: MRT4577_8447C.1
ccgacagtggacagttatacccttactacatcgaccctagtcgggttcgacttttttctacccgtcaaaccagtacgtcaccccgttcggttaggtacccgtcacaccagtacgtcaccccgccaaggagacgagacaccacgtagcactaaccgaatttgcctggacacgaacttccggcaccccaggacaggcagtagtctgtattccaccccaagccacatcaacgccggcgtcacggtaccagcccatcaacaaaccctggacttcactgccgcacccccgcgcccgtcagttggcagggggaggttacgacaaccaaggttgagggggtcacaacattcgaggaggttaaagtggaggaatagagggacgggtaggtatttcaggagaccaaggcccctaccccaacggaagtcctcttattncgggtttagatccaggaggttacccagatcttggcgatncccgtcttaatcccaacttttcaggtaagaacaatcctttttttattccaggtccccaaccccct

SEQ ID NO: 167652 - DNA, 558 bp, Zea mays
  unsure (1)..(558): unsure at all n locations
  Clone ID: MRT4577_84480C.1
cggacgcgtggngaaaaaaaaaaaaaaaaaaaaaaaaaaaaaaaaaaaaaaaaaaaaaaaaaaaaaaaaaaaaaaaaaaaaaaaaaaaaaccctacctacacctttttttcccatacctaatacttttattctaacttttaaaggggaggcccaacccggtccggcaaaatgtgatcggcccaaggtcggggggtcggggggcattgcccttgttgaactttttttccggaatttgggggcctttctgacgatgggggaggcttctcctgtcgctgaaaacacggggaccaaaattttgccccaccatcaggtggaaccaaaggtaccagggctgctcctgctagtggggctggtgaaggggttaggccaaggatgtgactttggaggattttgttaaattaagtggggggagaaggaaggctctcctttgtttggaggctttggcagggattgttgaacttgacagggattttaagtcttttttctccctttttatccgagaaggaaaatgttgaatttttcattgagctgcgttctgccagggttaataagaagga

SEQ ID NO: 167653 - DNA, 218 bp, Zea mays
  unsure (1)..(218): unsure at all n locations
  Clone ID: MRT4577_84481C.1
ccggtttcgtgaattacccggggctcgacgccacgtcgtctcgtcccacgtcgtctcgggctcgtccctttttttgttttttttttacaagaatgtcaaaagtcgctgcgtaatgtgtaacgtgaaactatttgtgggcatcggaggaatcgtttactagtactatatngcagttggaacactatctcaaacgtcagggaagattatagtctgtccca

SEQ ID NO: 167654 - DNA, 713 bp, Zea mays
  unsure (1)..(713): unsure at all n locations
  Clone ID: MRT4577_84482C.1
cctcgaggccggccgggaaaaaccaatcccattccgtcggccatggcgaccgccacgctgctgggctcctccttcgccatgcccgccgcagcccgtagggcgtcctcctctgcctccacctccttgggcttcgccacgtcgcagctcgccggcctctccctctccgcgggcgccgcaactccaaccgccgtcgccttcctcccaaagaggcagcagctccagcccattgtcgcgcggcgggtgtgccctttcacgggcaagaagacgaaccgggcgaacaaggtgtccttctccaaccacaagacgaagaagcagcagttcgtgaacctgcagtacaagaagctgtggtgggaggccggcaagcgcttcgtcaagctgcgcctctccaccaaggcgctcaagaccatcgagaagcacggcctcgatgctgtcgcgcgcaaggccggcatcgacctcaacaagaagtgagagcagccaaactaatggtgtggtggcacactggcatcgaccctagtttgatttgtgtaacataccaatcagtgtaggcagatcgaggttgcacatactatatgtttttggtctcgtgttgcgagctaagtgtgtgcttggtttgagggaattaagntgtctggcttcttatttcttatttttatttagnttatagaataagatggagttaatccatcaccaaaaaaaaaaaaaaaaagcggccc

SEQ ID NO: 167655 - DNA, 542 bp, Zea mays
  Clone ID: MRT4577_84483C.1
gttttatattttttttattagtttattattttcttttttttttactcaccatggtttgtactttattgtttcattctttttaggaccaaccaatatttacttaatataatacacggtcacaaatagtacgttctatagccggccaagagggccaggacaggtaactggttgaaacccatacatctctcacaaacgcagatagcttgattcatcccctgagtcaccaaatatctaatgtaaacaaactctgcacggaagaggatcccattcattgactccgcaaaggacatggactgactgctacagatagaaactgttctgtctgaagaaatatttgcttgagatcgacccgataaaacccatttccttcatctccctgagaaagagctccttatagagaacattgaggtttgacagattatgtaccacaacactaacaggtagaggtgcaccaacaaaccctgatgcatgctcatgggcaaggggaggagcccatactgtggctgcaaaatgtatatttgcaggcaggacaggcgtgaaag

SEQ ID NO: 167656 - DNA, 1169 bp, Zea mays
  Clone ID: MRT4577_84484C.1
ataaactaaataaaaataagaaacaagaagacagataacttaattcctcagaccaaacacacacttagctcgcaacacgagaccaaaaacatataggccctgtttgtttcggcttctggcagcttctggccaccaaaaactgctgcggactgccaaacgctcagcttttcagctagcttctataaaattcgttgggacaaaaaccatccaaaatcaatataaatacataatcggttgagttgttgtaatagtaggaatccgtcaatttctagatcttgagccctatgaacaactttatccttcttcacacgtaatcgtaatgatactcaggttctccccacagctagattctcctcgtatccagattttcagaaaagttggtcagaaaaaagccagaaaaaagctgaactaaacagacccacagcatgtgcaacctcgatctgcctacactgattggtatggtacacaaatcaaactggggtcgatgccagtgtgccacggtgccaccacaccatagtttggctgttctcacttcttgttgaggtcgatgccggccttgcgcgcgacagcatcgagaccgtgcttctcgatggtcttgagcgccttggtggagaggcgcagcttgacgaagcgcttgccagcctcccaccacagcttcttgtactgcaggttcacgaactgctgcttcttcgtcttgtggttggagaaggacaccttgttcgcccggttcgtcttcttgcccgtgaaagggcacacccgccctgaacacaccccgtcatctcgtcaatcatacggcgaccgatctgcagagagattaactgattctactatactactagaagagaatggaacatccgggacagctgaagaccagagcaaccactaaacctgaaggaccccgttcgggagggaagcaacagcaaggggaaacggaaggcttacgcgcgacaatgggctggagctgctgcctctttgggaggaaggcgacggcggttggagttgcggcgcccgcggagagggagaggccggcgagctgcgacgtggcgaagcccaaggaggtggaggcagaggaggaggccctacgggctgcggcgggcatggcgaaggaggagcccagcagcgtggcggtcgccatggccgacggaatgggattcgcaagcccggccggc

SEQ ID NO: 167657 - DNA, 662 bp, Zea mays
  unsure (1)..(662): unsure at all n locations
  Clone ID: MRT4577_84485C.1
aaatatgatgaataacagctagataaagcgtgcctattaataacaaatttctaccttccaaaatacaataaaaggggaattacattgagtatcaaaatagcgaatataataatcctagagtggactaaagggagtgtgcacacttttaccatgaaatatcaaagaggtagccgaagagcagggtacacagccacgcgcgttcagataataaagtcatactgaaactaccatgaggtcccaccttcactagtgacaactccactggccgaaacaattattgcggtggcttccgtggcaattgtgttgtaacctctctgggccttcgtggctacctccgcattggtggcgtcgcccgacacacgctcgtccctttattccccctcatagttggcaaagtcatcgtcacccgcgactcccgccctagcaccgcacgcaacggcatcactggcagcaactatggcatctctcatggtggtctacgtggtggcctccacgttggctccagtattggtgggcccgatggcctcaccttgctcatcacctacnccttagacccctccgtctccccctttgtggtcaatatctctatcagaatgcctggttgcttcctcaactcctttgccaccaccagatccttgcttccctggcacaatggattagtg

SEQ ID NO: 167658 - DNA, 199 bp, Zea mays
  Clone ID: MRT4577_84486C.1
tggatgagttaaggcaacagcatattctcccaagcgatttcgttttagggtttggaacattgagattgaggtaatgcgtcttggccagcgttgttttggtctggactgtgaatcagaatagaaacgttgcatgatcgaaaaaaaaaaaaaaaaaaaaaaaaaaaaaaaaaaaaaaaaaaaaaaaaaaaaatgggggggg

SEQ ID NO: 167659 - DNA, 139 bp, Zea mays
  Clone ID: MRT4577_84487C.1
ggaatgtttgttgaggcaaaggcgtaacggaatggtggtggtgtgagtggagccaaccccgcagcgattagtctaaagtctgcaaccgacaaggcgctgctgggcaccggggtggcagcggaaaccaatttctactacc

SEQ ID NO: 167660 - DNA, 254 bp, Zea mays
  Clone ID: MRT4577_84488C.1
atgccaacgtctcttcttaggataacgcaccacatgaaccaggacgaaggacagtcaaagcatgcagacgcacttgcattctagcaggagacatgcacgcaaggagcgtcgtcacgaaggtgccattcctgcgcatgtacggcaccatcatgatcacctggagcgggatccaggaatcccagcggactactttggagcccagcccgtggacaccgctgctcacatcccgaaggagggcccgcaagcgtcgccat

SEQ ID NO: 167661 - DNA, 635 bp, Zea mays
  Clone ID: MRT4577_84489C.1
ccggccgggcgctgccctgcctgcctgcctgcgtccgctcgcaactgcaacgacagggaggcgcacgcgcggggagggagagagacaaaccgagaataggcacggcacagctgcctgcctcggcacgcgctcgcgccctggtgactggtgaacactgaggactggaggcggtgggcgcggcggttccagccaccgcgcggttcacggcgcgggcgaatgccgatcgtttcaatggcggacggattgtactgttcccctggcgctgctggccctatttgggcggagattgtgaggccttatcctgagtgtgtcgattatttcgagagggctgctggatgtttttcttgcctagtgacagtgaagctatatcgtctatcagactccaatcgaatgcttcacactaatacatactgttgatccggaggctatactgcgcaacctaaccttctttgagctgatgattaatcaggtcaaagatattgcgcagactatgagtaatccaaagaaccaagtagctggcggctccagtgagcctagccgcaaagcagcatgtggtaactgctgatctcactagcatgataatccaggtgatatctactgctggttccctgcttccttgaatgaagaatgcactt

SEQ ID NO: 167662 - DNA, 1514 bp, Zea mays
  Clone ID: MRT4577_8448C.1
ttgggaccctcgaggccggccgggacggacactgcgacacgcacgtctccctcccctagtcccctcttcgccgtccgggtcgggtgtttgcgaagcgagacaagccaccggtcgccgcgcgactagggtttggttgcgatggagccggcctcctcgtccgcgcttccttctcctcctccggccgaggcgaggcggacgccgccggaggagctgaagctgcggcggaggacgcttgagacggtgctggagcagtgccagcgcgcgctcgagatgatgcatgaggacggtctggggacggctgcggagggggcaagcttcaaggaggtggaggtggaggaggaggaggaggaggaggagggcagcggcgacagcggcggggtcgagagggcgccgcccccaccgccctcggaggccgactacgaggcggacgagctatgcaatcttctgaaatcaagggttcaatcgcctgaatttctcgagaagctagatactcttcagaagtcagtatatcaacatggtgcagtggatgaaacagtatcatgggatattataagtgcggcagatatatgggatgataagagtatgaacgttagtgatgattcagaggacggatatgttcttgttaagcaagaggacatagtcgatggtattgcatgcttcatggctgcatacttgctgtcgctgaaacaaactaaggacctgacacccaaccaacttcaacaagctcttagcaagacattttcagctaaaaagaggaaaagcaaactgcagaaggcatgggatggaacgaaagttgtttataatatagcatcatggagcgcgacggctattggtatctaccagaatcctgcgattgtgcaagcagcaactgcagccttctggacatcctgtcgtgtaatatccaagtttctgtgactagtcatggctggacctggacggtgcaaatatgcaaacattgtgtggctgtggcctctccgtttctaaagatcaaccgaagatgaaaaaagttgccaaactccgtggcgtgcttagattatgatgtaaataggctgcaagttcgttgattgatttaacagcgacatcagttactggtgatgagcaatatggggctgttcgacagtatctcacccatataatctaaaggtatgaatggacacaccaccatctatttgccaataccagctgtatccgacaatcaagaaccgatgtacataagccctcccgcgcaacattggtatatcagtgtgattgtaaatatttcgattcatttgaataaattcgctcgcatgtgtttcaccccttcgaaagaatatacaatgctctaattgctatcaagaaaaaaaaaaaaaacgccgccaatcctgccgttgtgcaagcagcaactgcagccttctggacatcctgtcgtgtaatatccaagtttctgtgactagtcatggctggacctggacggtgcaaatatgcaaacattgtgtggctgtggcatcttcggttgatctttagaaacggagagc

SEQ ID NO: 167663 - DNA, 731 bp, Zea mays
  unsure (1)..(731): unsure at all n locations
  Clone ID: MRT4577_84490C.1
cgcggtgatgacggngaactcgggcggggccgttgcgcacgatgcaagcgcgtatgcgccatctgtacctctgctaactaggataaaaggacaccggtgctaacccttcgggacctaacaacttcgcccacccaagccgcgccacgcagacaaaagtcgccgccgtgaggaagagagattacgacgttagtctttcctcggttcctcggcgaatcagctctgttgaagcgtggttggtcgttgccaggagtcgttggagtcaatttgagtaccgcgggtggctgccttcgcctcgtgtgcagctaattgctcaccggagcccatctccaccacgggatctgccgcttcgtgaaccggccacgccacgacccgagtgcagacgagcaggctactgaggatccaggggttcagcaggtggagactgccgagcagaagctcgttgaagctgagctatcaccgctgccggagccgtacaatcccctggccgatctggagatgaaggaagcactggacgttatgagccttgccaattctattatcaacgaagttgtcgacaaattattaaacgaagccgcagaaaagatccttagagaagagtagactttgttgtaataatactttgtaactttattgtaaaagtactttgtaacatttgatgtatggaacaattgacaagacatgtaaattactgtaatatatttctttacgatgtgtgaaatttgcacacatac

SEQ ID NO: 167664 - DNA, 358 bp, Zea mays
  unsure (1)..(358): unsure at all n locations
  Clone ID: MRT4577_84491C.1
ccccaacccacgcgcccgncttttttgatcaggncccgcacctaggaccgacctgctcgatcatcagtgtagagcgtcggctggtgcctgtctctcttggtggctggctggacggtcatggcgacgtcgtctcggcgggtgcccttgctgctgctgtgcctgggcgtgctgttgtcctgctccttcgcggggggcggcggggacgcggatctggtctctccgtggggcgacgggcggcgccaggtcctttgcaccggccgggtgctgacgctgtcgctggaccggccgtccggctccggggtccaggaccggtgcgggtccctgcccggtccgatcggcgtgcggctgctgctggtgc

SEQ ID NO: 167665 - DNA, 270 bp, Zea mays
  Clone ID: MRT4577_84492C.1
gaaccagcagctcttcaataagagccagccagagaaactagtaaaactctcgacgccggcatccgagcgaacatgccaaccgaccgcgtccccaaggcaatccgtcgccgacgtaccaccaccaccgcaagagcgagatggagatgaagaggatcctcttcgccgtcctcgtcgtcatcgccgcctcggccaccgcagtgctggccttcaccgaggccgtcgtcgcgggcgccccaactgcctccgagtcgtccgcctaggctcccgctg

SEQ ID NO: 167666 - DNA, 249 bp, Zea mays
  Clone ID: MRT4577_84493C.1
ttcttcgcgtgcgtccacgacgggccctacagggtcgccttttagcggtcgtgcctgatgtactactttcacacggccgacaactggatcatgttgtttaggcccctcaccaaggtcttgcccctctccatctatcccgttgacaaggtgcacctgcccttccagctgatcggcatcaagccgctcaccgcggcacctggaacgagcacggctcatggcaagtgcatgactcaataagaaaatgaaggc

SEQ ID NO: 167667 - DNA, 202 bp, Zea mays
  Clone ID: MRT4577_84494C.1
ttttattacttctttaaccctttttcttatttttctattgtcttttatggcaccacaccaaatgccctcccccaccttaattaactctcgtacccccgctctttccccactcgcatcaaaaaacagaaagcaaaagcttgggtgcaccccattaagcccccccacagaaaaggcagaacccccacaacgggcgtacagggaa

SEQ ID NO: 167668 - DNA, 732 bp, Zea mays
  unsure (1)..(732): unsure at all n locations
  Clone ID: MRT4577_84495C.1
ggggggggccaaaaaaaagaacacccctaaaaaaacccccccaaaacaaaaaaaaaaaggggggggaaaaaacaaaggggcaaaaaaaaaaaacccaagggggggggggggccgggggggggggttctttaaacccccaaaaaaaagggcccccaaattttttttaaggggcccaaaaaaaacccggggccaaaaaaaccaaccaaaaaaaaggctaggccacggggggtaaaaaaaaaaggatttgggaccccaacaataagggggcccaccactcttttttgggaaaacgttgaaggccaattttttgccccgggggcccaaccccccccctggaaggggccgggccccccccgggggggagccccacaaagggggggggggcccccggcccccaacgggccagaaaagcgggtaaaaacggggaaaaaaaaaaaggggggaaaaaccccccctggggcgggaaaaaccgggtaaagacctggaccggggggccaccccgggggggcccaaaaaaaataagcccgggggggtaaaagaaccccccccccaaagggggggcccccccccccggggggggaggagccccccggggaaaccaaaaaaccccccccccacggggacttcccaaggggccccccccccccccgaaaaaaaaaagaacgcctacgggacatataaaaaaaaaaaaaaaannccaacgttattataaaatctatacactttactttt

SEQ ID NO: 167669 - DNA, 402 bp, Zea mays
  Clone ID: MRT4577_84496C.1
caattcccgaatcgaccgacgcaaacagctcgctccacctccgccgtcagctctcctcttccgccctcaccgccgccgcctatcaacggcttattttcaacttctcgacggcccttacacctacccctaccacctcccatcataacgccgccaccactacgatcgaccattcctccgactagagccgtcatcgtcttctcaatacgattatgtaccggatcaagcatcgaagctttctataactggacctcttgctagctacctttgtctatcatcacttgcactccatttactatgccaacatactctcccttctgcaagtactcgacctctataactcaaattttttgaaatcgtttactagcctctagcattcaccatatgatctcaattctaatccta

SEQ ID NO: 167670 - DNA, 552 bp, Zea mays
  Clone ID: MRT4577_84497C.1
ggccctgttaaagggagttcgggtccaagggttttttgtaaacaaacaggagaggttcaaaacctggttgagttacaacaagttttatttttggggtccaacatcaaaccgatgaccctgttacaggggggacaaaaggcaaaaatgaattaacctttttggactttggcattttatgaggggggggcctaaaagccccaaactggccaggggaaactaaaccccggccccccccaaaaaatcattacccattttcataaaaatttttatctccaaacgaaaaccccgggggatttggggaaatccccttgaattccctcatgctggaaaagtcaccacctggaggagggggggcttggggggacctggccttgctggtgacttaagttttgaaagaggccccctcaggggcctttgggggtccctgttcgctgtttatacccactttgtccaatttgttaacaaaaaaaaatgcccccccctcctccatgttgcctgtctgggagggttaaacaacatttacactgttttgaccaccgccgggagtttttt

SEQ ID NO: 167671 - DNA, 585 bp, Zea mays
  Clone ID: MRT4577_84498C.1
aaaccggcccacctttaggggggggtcaggaaccaccccacgggtttattctttaagggacaaaatttcctttccaagcccaattggggggggtcttatttaaaagctaaaagttacaaggcaaaccctgtcctttcaaaaaagggggaacaaactccccccggcttccagggttcgttttatttggctaaaaaaaaaaaggggtggccaaactaaacaaaggggtgggtttcccccccgggggtccccacaaatggcaaacaaaaaaaaaacgcgggaattcccccacaaaaccttaaaaacccctgggaacaaaaaaaaaaaaccccccgaggcaaaaaagggccccccccttaattggcttcccaggttattcgggggaggcaaattcgggggccccaaacggggaaaactttggaaccagggaattggaaaaaccccgccaaaaagcccccatgggggggtttccaaaaatttttttgctatgggggccccccgggggggcccaaccccggaaaaaatccttgggcaactgccaagcgggtcctgacccggggggttaaaaaccaactaccccggcccaaa

SEQ ID NO: 167672 - DNA, 545 bp, Zea mays
  Clone ID: MRT4577_84499C.1
atggcgttcatcggcgactcgctcgcgcgcaaccagatggactccctgctctgcctcctctcgcaggccgagacgcccacggacgtgtaccgcgacgccttcgacaagttccggacatggcacttcccggcgcacgacttcacgctcatggcgatgtggacggagttcggggcgcgaacgccagcccgggtggacgccggcggcaagcccaccgcctccttcgacatccacctggacaggctcaacgccaactggaccagccgcctgccgaggctggactacgcggtcatctccggcggcaactggttcttccgggtcaactacctgtgggaggacggccgccggatcggctgcgtcaactgccgcttgcccggcctcgcggacctgggcatcgcctacgccgtccgccgcgtcgtccgcgcggcgctcgacgccgtcgcccggtgccgggactgcaaggacagcctcgtcaccttcgtgcgcacctacacgcccgaccacttcgagcacgggtcctggttcagcggcggctactgcaacaggac

SEQ ID NO: 167673 - DNA, 324 bp, Zea mays
  unsure (1)..(324): unsure at all n locations
  Clone ID: MRT4577_8449C.1
cccacgcttaggccgcagctacctacccctatctatttagcctttaaaancctgcatcgcggcagagatgcacgggtacaccacgacactcgcgtcagccaatgcgctgctaatgcatatactacagaagctcgccacggcgtcctacagcatgtagatcacatcctactgaaagcggatcaacgaggatacgcacccgatctacaccgagaacatagcagcacacggccggacctacaactcacagctgccatcagtaacacatgtaccagaatgccagggacaacctacgatacatctacgcccacaacacaaactccgaca

SEQ ID NO: 167674 - DNA, 2802 bp, Zea mays
  Clone ID: MRT4577_844C.1
atggaggccggggcaccgccccgcggctggcgctgtggggtgctctggctcgtcagcgtcgagattgtgttggttctagtctgcactcgcggagctggtgcggattctggtgaaagcaaaggatcgtttctgcaagactctgaagctggagaaaaggatgtctaccttagccactcctgcatccacgacgagatactacatcaacggcgacgagctgggaggaaggagtactctgtcatgccacaagtgtaccatgagtctcgggaggatgcggagcgtgtaagaggacgacacttgttgggcatgtcatcttggcgtgctccgcacgagaatgccaggaagccaatacgaatatacctcaattatgatgccgtcgggcattcgcccgaccgtgattgtaaaaatgttggcgacatcgtgaagcttggcgaacctcctgtatcatcagcaccaggaacacctatatgcgatcctcatggtgatccaccactggtgggagactgctggtacaattgcacccttgaggacatagctgggaaagacaagaggcaacgtctccgtaaggcactggggcaaacagtagagtggtttagaaaagctctagctgttgaacctgtcaaggggaacctacggctcagtgggtactcagcttgtggtcaggatggaggtgtacaactacctcatgcgtatgttgaagatggtgttgctaatgctgatttagtcctcttagtaacaactagaccaacaacaggtaacacccttgcatgggctgtggcctgtgaacgtgaccagtggggtcgggccattgcaggacatgttaatgtggcccctcgtcatttgacagctgaagctgaaacattactttcagctactctaatacacgaggttatgcatgttctagggtttgatcctcatgccttcacacattttcgtgatgaaaggaaaaggagacgtggtcaggttactgctcaaagtttggataaaaagcttggaagaatggttactcgtgttgtcctaccacgagttgtcatgcacgcgagacatcattatggagcattttcccaaaacttcactgggttagaattggaagacgggggaggccggggcacctcaggttcacattgggagaagaggctcttaatgaatgagatcatgactgggtcagtggatacgagatctgtggtttcaagaatgactttagcattactggaggacagtggatggtatcaagctaattacagcatggctgaacatttagattggggtcagaatcagggaacagagtttgttatatctccttgcaactcatggaaaggggcataccattgcaatacaactcaattatcaggatgcacatataatagggaggcagaaggttactgccctatagtaaactatagtggggacttgcccaagtgggctcaatattttccccaagccaataaaggtggtcaatcttcattagcagactactgcacatactacgttgcttattctgatggttcatgcactgatgtaaatagtgcacgggcgcctgacagaatgttaggtgaagtgcgaggaagtaattcgaggtgcatggcctcaacactagtgcgaactgggtttgtacggggatctatgacccaaggaaatggctgttatcagcaccgctgcacgaacaactcactagagcttctcctacgatgtagcgtcgatgaggagaaaaacatgggagagaagccggtagaagctccattttctggctcctggctcctgctggttgctgttgatgggatctggaagtcatgtccacaatctggtgggcctgttcagtttccaggattcaacgttccaatgattggccaatgtccaaagtcatgcagttttaacggtgactgcattgatggaacctgtcactgctttcctggttttcatggccatgactgcagcagaagatcttgcccagacaagtgcagtaaccatggtacatgcaaagctaatgggatctgtgaatgtcaaagtggatggacagggattgactgctctacagattatgcaggctacacatgtcagaagggttctgcaatactgccaagtctgtcaatgtgtcatgatgtacttgttagagattcagatgggcagcattgtgcgccaagtgaactcagtatactacagcagcttgaaactgtagttctcgtgccaaattacaatagattgatgccaagtgggcggaccttccttaacttcttcaacaatgccaactgtgcagcagctgcaaagcggctagcctgctggatctcaattcaacggtgtgacgaggatggggacaacaggctcaggcttgtggagcgggtctggattgttcagaccagaccctttttagcaaaagggaagaagaagagaagggtgttccgtgcacaggatatggcgagaagaagtctttctggctataacatctctgaagcttcttccgttatggctctggatacgggaagtaagcgtccgtttcacctaggcacccgaagatgggctgccctggtgtacaagctatgttggagtgggctctttgttagaagtcggctcgcggttgcgaccgtggccgagggcaacaggttgggaaggaagaacagggcgaaggctggaaagacgaacgggacatcccacgatgggcgaaaacgatggtgcgcgcatgatgtgaaacgttctcgtggacgtgcaatagccactgcgcgagtcggtgtcgggctggtgtcggacgaatacggagaggaggcgtatgctcctatgccctctgctgagaatgggatggtgcagaggtag

SEQ ID NO: 167675 - DNA, 748 bp, Zea mays
  Clone ID: MRT4577_84500C.1
gaaaaccctttgcagtcggggaactctcgcattccactattccagtcatcgagagcgcggctgcggcggcgagggaacacatcctttctcgcatcatggccacctctacggagccggagggcgcgccgcccgcggctaaggggcctaaaggagaggccaacacgaaggggagcaacgaacatggagaggtcggcgcaggcagcggcggcggctcgcagaagcggaagaggaaggaggtcttcatctacggcaactacaggaactactatggctaccggattgatcgcaatgttggtgaagatcctcgccttgaggcgttcaagaaacagtggtttgaaagaaggattgtctcgatattggatgcaaccagggtttggtaacgattggcttagccatgaaatttaaatgtcaaagcattcttggcgttgatattgattcaggtttaattgagactgctaagtggaatctgcgaaggataatgcggcaggataaggtggctacaaacaacgtcaaagctcagaaatcatcggattctcctcagagctctccagaagaattggcatctgagttatcgaatgggaacaagcaccaagatctttttaaaattgtctcttttcgacgtgaaaattttgtagcgagtatggatggatgttcagaacagtatgacaccatactatgtttgagtgtgacaaaatggatccacctgaactggggcgacgatgggctagttacgttatatgtgaagatc

SEQ ID NO: 167676 - DNA, 530 bp, Zea mays
  Clone ID: MRT4577_84501C.1
gaaaaaaaaattacctgcgagggctgatcgcctgccgacgactacatggaacactccctctggtgcaactctaacgacaagaactacgcttcctgtaatctagcagcatggcgagtgagtgctaacccccacgtttgatccgaaagaccctgtcgtgggctgcatagagcgcttcctgagcagcgacctggacattgcctacatcaaccacccctgaaacttggacacctacaaagcatgccaataatgaaagcatgcatgacgacctaaaacagagcctgtactcttattcttatgataaaaccatggaatgaattgtttggctttccgcggaccaaggttgcgcattctagatggtactcttgaatcttgatgcttccctgctatgctacctcagcatgtcgaaacactatgaatcaaacaatatagaatcgatggtaccactcagtcttgttatcaaacaatgaaaaaaaagcccctacacccctctagatcgactttatgttacccttaaggatgcgtaaatgcac

SEQ ID NO: 167677 - DNA, 428 bp, Zea mays
  Clone ID: MRT4577_84502C.1
atggactttcaaaaaagtatccgatagccactaatccaccgcacgatttaccgtagtggccccttgtcggggctcccatacgcgacaccgtcaccaacctggagctgtactccacccacgacaagatccgcatccacgactacgtcggcgacggatacgcgatcctcttcgtctcgccaaacaagattcagcccgtgtgcattaccgagatgggggcaatatcggggcaccccgatgagaccaagaggtgcgctgcgaacacttgctgcaaatatcgtgcgacgtatcgcggagatcgcacatacaataggaccaacgacatggtaagcaaacagtgtgaatactctgtaacaccaagcacccacggacgcgacggtgcctatcctggggaacccggatgggaaagccatcctgcgactgatgctgat

SEQ ID NO: 167678 - DNA, 1268 bp, Zea mays
  Clone ID: MRT4577_84503C.1
ggcgaggcgctgcgctgctcctggtggccgtcttcgccgtggtcgccgtagcgagggtcgtgctgatactccaccagctgaaacaaatagtgatagctctactgcacagccaggccttgggaaattggagcagcatgagcaggcaaatcctaataaggagcatgcaacccaccaggaaggaggagtcagcaatgatattggtgacaacaacaagaaggataactcaacagaagtaaccaacatcagaagagatgactccatacagcagccaaagcacaaagatagcatcatgacaaagtcttcacaaccactagatttcttggaagattctcttatcaaggagtgtgatccatcacatagatgtatcattgaaaacaagaaattcatcgcctgcttaaaagtttctggagaagactcattggctctgtcacttctgatggacaacagaggcataaacccactagatgttagcatcatggctccagattatgtcactttagctgaagattccatccatgttgaagcaaatggtcacaatgagacacaagtgagagtttctgtcaatgatgatgcaaatagcacgacaatagtcatcaaagttgcagaaaaatcctgcaacatcagcattcacagtgcaatcacaagggagacggctggcagtggcagagtcataaggatgccacttacgccaacatacacgctactgccagtcttccttctcctcgttgcggtggcagtgtgcatcgtggtccggaggtggcgcaaccaggacggcgaccctgcgtatcagaagctagacatgtcagacttgccggtttcggttggaggcaagaaagaacatgacgatcggtctgacaagtgggacgacaactggggagatgactgggacgacgaggaagctccggtgacgccatccaagcctctgcccaacccttcgtccaaaggtctcgccccgaggcgatcggcgaaagatggttggaaagattagttagccacatgacgccacttaaaaggagcattgcggaaatagttccagtgcatgcagtatatttttaccttcatctttgttgttaaatatttctggaggatgctaatgtcagagagtgcaatacattgataccaagcagaaaattttgtgatcttcctctgccaaactgagtaactggcagctattgaatatagttattggacttccgacaaaaaaaaaaaaaaaaaaaaaaaaaaaaaaaaaaaaaaaaaaaaaagaaaaaaaaaaaaaaaaagcggcc

SEQ ID NO: 167679 - DNA, 434 bp, Zea mays
  Clone ID: MRT4577_84504C.1
cccacgcgtccgcccacgcgtccgcaggcttaacatccatacaactggggttacgaaccccgaacaacttgattcgtagaccacacaactatggggacacaaatcatccccacttaattttggacctgtacaactagggtacacacctgacacgtcctgtccaaagaccaaaggctgttaatccaatctcttggcaccacaactcacctagaagagcatcactgataatgacttacaactatctctacaaaaaaaaaacagccaagcatgcctggacaaccatgctagtccaaaatccaaatgtcagggcaactactcaaagctgcctgtacaaaaccaaaaactaataaggaaaaagagtggcatcaaactagatggaaagtgccaagctacagagctggaatagcctagtgaaaccttcaagaaggtaatga

SEQ ID NO: 167680 - DNA, 170 bp, Zea mays
  Clone ID: MRT4577_84505C.1
cgggtctacccagcgtttttccagcgtccgaccttttaactttgaaactttacctgcatttgtgcgatcagatcatgaaatagcagaagcttctttggtcatcccctgccttctgctcgacatgtgccttctggttggtgcgacaatatatcaactctgttatgctgtag

SEQ ID NO: 167681 - DNA, 410 bp, Zea mays
  Clone ID: MRT4577_84506C.1
ttttggtttttttttttttttttcgtgctaaaagagaaaagggggtcaaaaacaggacgggagtgaagtaaattaagccggaattcaccccctctttataagctagctacaaacatccttattggttttttcaccaaaaactcttcttaattcaacaaataaaattcaactacaaagcaagggaaaaccaacaggaacaccaatccccaccacggaccaaagggggcaacacatgcgtgcaactttgcactctagaattactccattaggcggagaaagacgcctttttttcacccaaagcccctttggatgatgaaagctaactaagctagtcagctttatccatgcatgaactcactaatgcgacttagtagataacttgcattgattgctactacgctatataacga

SEQ ID NO: 167682 - DNA, 703 bp, Zea mays
  Clone ID: MRT4577_84507C.1
ccggccgggagatcctacaaagacgccgagtgcctgaccccatcccctctcgctgcaatgaggcttttcgtcgcacaagacacaacgcgctaggggatactagcaggaacagcgatggcccgagcgaccaaagggagggggctgtccatcaccagacagtcgggacatgcggctgctgctgcttggagacgaagcctctctaggctgcgtacacgctctagaccgaccgcgcgcgataccgcgaacgtatgtaagaccaatccattgatggacctttcccgagaccaacggagcaggctgcccatatggaaagccgactctgtggaagaaggcagatttcacgactccatccggggctgcaccggtgtttttcacgttggcacacccatggacttcctgtgcaaagaccctgacaatgaggtaatcaagccgacggcggaaaggatgataagcataatgcgagcatgctaggaggccggcaccgtgcggagcatcgtctttacttcctccgccgggacggtcaaactggaggagcgggagaggcccgtatactactaggaaagctggaccgacgtcaacttttgtcgtggagtcaagatgaccggatggatgtacattaagactaaaaccatgacggagaacgcgcgcttgaagtactcggcggaccacgggctgaacctgggcaccatcatcctgacgctcg

SEQ ID NO: 167683 - DNA, 692 bp, Zea mays
  unsure (1)..(692): unsure at all n locations
  Clone ID: MRT4577_84508C.1
ccggccgggaaaaaaaagatacttcttattgttgttatcacatacaccacacatcattcacaatgattggacaatccactcgacgatggcttcagctgtctttccttcttatggctagtactgcttcagcaggatccctcaagttaactgactttgagtccatcggcgacaagtcattcccatcaacctgtgttgcagcatacgatacgccgctctcagactgtacccccgacgactttactggtggcaaggcatgcagtgctgcttgtaaggactcagtgcaacaaattcagggcctcatcatggcctcgtgtggtgacgtctcagccgattcggaatctcttcttagccgtggccagaagggaaacctcgtcgctgttctctgccgaaacgccgacgagtctcaatcccaatctgaagctcaatcacaagccaagtctgaatccaagtcagagccccagtctgtctctgagtccgaaacccaagctccagccacaacgacgacaggatctgcatctgctaccaaggttcacaagaacatcctcatcgagacgagtgtttctaccactacgacttcaaaggaaaacctgaacgnngcccccttggtccgatgtggacgaaaacctcgccaccaagagcactgttcttggcatcgacactgagcagcccacaggctctctgcctcttccaaa

SEQ ID NO: 167684 - DNA, 401 bp, Zea mays
  Clone ID: MRT4577_84509C.1
tgcttgtcgccaccgaaccggccaggtcacccgcttgcgtcctcctccgagacgatacccacgcacaccgaacaccggaacagcggaacctgacgagtccacacatagcggtagggggagcaaaatctgcgccaggtgccctagtctacttatacacttcgatcagacgcgtgagcaaagatactaccaccatccatttgtcttgctgccaagggggaggttgcctattaggtacttatcacaagtggcttgacacaaaaggcattgtcagtgaccgcttccttggagcacaaaaccaggactgctagaaaggagatcctaaaactagcgctagcgaatatgggacatggactgcccaccactatgggtgctaagaaagctatcgctgatgagcaaggaat

SEQ ID NO: 167685 - DNA, 391 bp, Zea mays
  Clone ID: MRT4577_8450C.1
cgaggggaccaatgggcccccggggaatgaccaacaaaaatttatttttatttttgcaaataacaacggtcccaccccgccaagagtttacttttttggccctaaaccgcgaccaatacgggcccaatttaaaatttaaaaaccccaggcatattaagtttttaaaaacaaaccttgggggccaccctggggatccatacaagtttataaaaactgtcaaacttttggacccacaaaatcagcatcgggggtcattgaaatgtcaacaggggccctaagttgagcgcaaacttcaatggccccggggacagggaaaaacataaagttgctgaaaaggtctgggttgaccggggctttttgtgaaacagaaacaaacgcctgttgggtaaaa

SEQ ID NO: 167686 - DNA, 359 bp, Zea mays
  Clone ID: MRT4577_84510C.1
gaactacctccccaccatcaacacccaaaagctgatattctacttaaactacttcttcgtcagtacataaaatgatataggacattaaaacatttatgtatatcgtacattaaattattttccccaagcatataagcatgtaatatatatctaatgatttaggacatacatttaaactcaactataaattcacaacaacatgtctattctcaaatacattaagatgatgcttattagacatatctgtgttattagacatgcaccattaagtcataaaccttgctcttccatatgactatccctgtccccaattggtctctattccaaccatcctccgtgaaatcaacaaccgcccactc

SEQ ID NO: 167687 - DNA, 406 bp, Zea mays
  Clone ID: MRT4577_84511C.1
tttatttttttttttttttttttttttttttggtttttttttattttaacacacagctttttttttgttgttatgatctgggaaggggttttttaaacaacactgctttcaacatattttgaaacaaaaacagaaacaccctgtgggaactctataagggaactacaatccatctctcaaaaatgccgggtccacgacacattcaaatgcgcgggagcggatcccaaactacccggggctacgctctgattacgcgggagccatgaggcattcaaaagctcgtttgcagattccagggatagacccttctggcccatacacctcaattgggacgccgggggttgcgccaagcttacacattttaggcaggccagaatgggaatttgggccaccgcgggggacacaa

SEQ ID NO: 167688 - DNA, 237 bp, Zea mays
  Clone ID: MRT4577_84512C.1
ctattttctattctcagcttgccctccactagggggctgttgcatacctgggtggcctgtgtaaagacaccaacctgttcgccatccatgctaagcgtgtgtccattattccaaaggacattcagctggcaaggttgatctcttctcttgagggccctaatcgccacctcattcatttttactaaaacattaagtcctgcttttattgttaatctgttgccattgtaaggacatatt

SEQ ID NO: 167689 - DNA, 250 bp, Zea mays
  Clone ID: MRT4577_84513C.1
ccgacaaaaccagacctttcccacaagtgaccagcgaccctcatcgcagaacgcacgcaatggaagagcacctatcatcatgtatcaagccatgacggcgatacagaggaggcctcattgagagagatcatcagccggtgttgagaagaagggcttctacctcaaggccttgaagattgagaacgtggagaggaggattgatgaaaagaactacagcggatctcgcctcggagcgctatcttcgaggggc

SEQ ID NO: 167690 - DNA, 3144 bp, Zea mays
  Clone ID: MRT4577_84514C.1
gtcgctgaccaacccgccgccgtcctggaccggcaccgacgtctgcggcggcgtctccttcagcggcgtcacctgcaacggcgccgcccgcgtcaccggcatcaacctcgccaagctgcatttatccggcaccctttcctcgtccctcgccaatctcaccgcgctccaatcgctgcagctccaaggcaacgcgctggagggcgacctgccctccctggcccagatgggctccctcgagaccctcgttctcgacggcaacgccttctccaccctgccgccggacttcctcgagggtctcccctcgctgctcaagctcagtatggacgacctccctctcgagccatggagcatccccgacgctatcgcggggtgcgcgatgcttcagaccttctcggcctccaatgcctctgtctctggccccttcccggcggttcttgccaacctgacgtcgctacagacgctgcggctgtcgtacaataaccttaccggggtcctgccggtggggttagaggcgttgggctcgctggagacgctgcagctcaacagccagaggtcgaacggcatgctgtcagggccaattgacgttgtggcgaagttgccgagcttgaagacactgtggcttcagtccaactcgttcaccggcccgatcccggagtttgatcccaacacgcagctggagactttcaatgtcagagacaacagcctcaccggaccggtgccaccctctcttgtagggatcacaagccttcaggatgtggcgctgtccaataactttcttcaagggccaaaaccaaaattcgcagctaagactgtggatattgattctgggaacgggttctgtcacgaagaccctgggccatgcgatccactggtgaccactctgcttggggtggcttcagggtttggatacccattgcagctcaagaagtgggcaggcaacaacccatgcgatccatggcctggtctttcctgcatcaaaatggatgtaactcaaatcaaattgcctcgccggaacttgtcagggcttatttcaccggcttttgcgaacttgactagacttcagcggctggatctgtctaacaatcgacttactggggtaataccagatgctttgacgacactgaaaagtctcaattatcttgatgtctcaaataatcgccttactggacaagtgcctgagttcaagcagcatataaagctgatgactgcaggcaactcgtttggggaatcaggtggtgatagtggagggggtggctccaatgttcggtcctcatcttcaaatcctacaggttcacataactcaaagtcaaatgcgggaatgatcgttggaattcttctagttgtcattcttcttgtcatttgtgttgggcttttcctacatcatcgaaggaacaagaatgtggacaagttcagtcctatctcaacaaagagcccttctggtgaatctgaggtgatgaagattcaggtagttgggacaaatggccatagcaacataagtggttctgtaggctcaactgagctttacagtcattcaagtgctgacaacacaagcattgctgacctcttcgagtcccatgggatgcaattaccgatgagtgtgctactaaaggccacaaacaactttgatgaggactacatcttaggtacagggggctttggggtggtttttaaggggactctcaatgacaagctggttgctgtgaagaggtgcgacagtggcactatgggaactaaagggctgcaagaattcatggctgagattgacgttcttaggaaggtgagacatcggcacttggttgcattgcttggatactgcacccatggcaatgagaggctcttggtctatgaatatatgtcaggaggaacactgcgccagcacttgtgtgatcttcagcagagtggttatactcctcttacatggacacagaggatgacaatagctttggatgttgcccgggggatagaatatttgcatggtttggcgcaggagactttcattcatagggatctgaagccttccaacatattgcttgatcaagatttaagagccaaggtttcggactttggattggtcaagcttgcgaaagatacagataagtccatgatgacaagagtagcagggacatttggataccttgcgcctgaatatgccactacaggaaaggtcactacaaaagtagatgtgtatgcatacggtgtgatactgatggagatgattacgggaaggaaagtacttgatgactcattacccgatggcgaaacgcatctcgtaacgagcttccgaaaaaacatgctcgacaaagagaagttcaggaagtttttggaccccaccctggagctcagcgctgaatcttggaacagcctgctggaggtggccgatcttgctcgccattgcacggcgcgggaaccgtaccagcggccagacatgggtcactgcgtgaacaggctttccagcctagtggaccagtggaagccaaccaacattgttgatgatgacgatgaggagggtgggacaagcgagatgggtcttcaccagcacctagaaatatggagatgcgatgatttcactatatcggattcggattcattcagcgcacacaacacatcaaggaagtaccattgacaattagcgaggcttttttttgtcatacatacatataaatgaggaaccatggtgtggcacatcaagaggctccccagtccccacacgtctggatcacgaacagctttgaaggtcaatgtgccagccagtcaggttgtagttagcgcattgaaaacaaggttacttgataatcagcatcttcattcattgaatgtctgctaaccaggctcaaacttgagagggaagtcatgataccagaaaacttgtgctgtatctagcttagcctgtttatacaatttggtcactttggacactgagaaacattttgttcttgaatggtgaagagggaaaagagatgaaagaaaccatagcttcgccgaaggcgagttctggtggttagttttttaggatgtagagggttgccttttgtgtacaaccaaccatgatttcattattatttatctagtatctgtatttgctctgtacaaccaaccgtcaggattgttttcttcaaatacctgaacgtgcgaaacgatgctacc

SEQ ID NO: 167691 - DNA, 257 bp, Zea mays
  Clone ID: MRT4577_84515C.1
aaatcggcacgaggggggaggccaagtaacagccacgggggcgggggcgacgaggagcggctgcccctccgcggcgtgctggagacgtccccgtcccatcacgccgcagtgcagcctaatgacaattaggcgatgcgcgaggacattaggctctggattgcatacaaacgcgcggtgatgtttctctgcctgctaaaccttccaagcttgatgatgatggtgcagtgtgccaagccactaactaaacctttccgtct

SEQ ID NO: 167692 - DNA, 681 bp, Zea mays
  Clone ID: MRT4577_84516C.1
ggccgcttttttttttttttttttctttttttttttttttttttgtttgcttgctcgagggaagtagattgtttttcataaaagcatgaaccacacatacaacaatgactggcagaataaataaggtaccaaacaaacatgcataacatgcttggtttctgacaaagaaacaagcttgggtaaactagctgggggcatgcatgcaatcaaacctacctgacggacaaacaagccggaagaaagagattgaactagcttgcctgcctagtaaggaagacacacaccgagcgcaagcacttgctggaaggaacctagaacgaaacaacaaacatgcttgtttcgatcgatactgactgggcgtccttccttcttgcggggagggggaaggacgtacttaaatggatgggtttggttatgtattttcgggacctaccaatgaacgagctatctttttatcgagggggggtgggagccaaccaccggatggaagggcaggcattcagtcttgcatctatctattcggacgaactaccttacatacaggataccgaccgaaagttaaaccacccaacaaaggatggatggatgggggtggtttatgtctaggaaagcacaaaaaatacccggcctggcagggacccacccaatcctatatatagtgagattaatcacgctcactga

SEQ ID NO: 167693 - DNA, 1142 bp, Zea mays
  Clone ID: MRT4577_84517C.1
gggtcacgtttacgcgcttcgcgagctgggccactgcctccaggacggctacggcgtgcggcggtgaccccgctgaaggccgccgcctcctggtcgccgcgaacgcccgcgagctcaccctcgcactctccgcggcgaccgcctcgcgccacgccgtcaccgcgctacccttcgccgcggctgctgctgctggcgtcgtcgtcggtggcggcggcggcggcgggtgccccctcctgtccgacttcgggtggagcctccccgaggcggagccccacgcggcgaaccagttcatggtggactggtgggcctcccgctgcgccgcccaggcgggcggtaagaagcgcggcgacggcagcggcgtggacggcgacggagatggcgcggagctccgtctttgctcccacgtgcggtgcgggcggcgcgagacgcggcggcacgagttccggcggtgctccgtgtgcggcgcggccaactactgctcccgcgcgtgccaggcgctggactggaagcgcgcgcacaaggcgcagtgcgtgcccatggaccggtggctcctcgccggcgttgccgttggcggcggcgtcgaggcgcagcaccatcagcagtgaggaaacggctcggcgggcgcatcccgcagcggctgacatgacgtaccagcaccgagtcccctacaggcccacggctccgctgcgtggaccgggcgtagcggaaagcggcgcaggaggggagaaggcgtttcggctgttttcttttctttttgcctctttttcacctgctgatgaattgaatgaggtgtatctcgctggcgctggctgccgttcagatgcgcattttctactaggtagtactccctccttttctttttatttgtcgttggacagtgtaattttgcactatccagtgacaaataaaaagaaacggagggagtaccagggaagcaaagagccaaaaagcagtggagatccaccagccgcgcgcctctccttttattttattttcttgtaatgttctggcatttccaagctaggaagcgtagaattccaatttccaagccgttttgtaatggagctttggagctgagggttttcaaaaaaaaaaaaaaaaaaaaaaaccctccagggcggccactcgcgatctagaacaag

SEQ ID NO: 167694 - DNA, 263 bp, Zea mays
  Clone ID: MRT4577_84518C.1
aaaagggtcggcacgtgggccggcaccacctatatgcccaagggcgtcatgctgacgcatcagaaggtggtgaccggtgtagggcaagaagtggacggagggaaccctgacctgtactgaaataaggatgacgaggtgcttcatgtgctaccgctagttcacatctactacctgaaatcggtgctacaggcagggctactcgccggatgttgcattgtgaacgtgcggacactacgaactggtgacctagtggagagtgggcg

SEQ ID NO: 167695 - DNA, 119 bp, Zea mays
  Clone ID: MRT4577_84519C.1
tcactgttccactatatgaaatgttccttgttaagctaatagatcccaagaacttccacagatatagatgcattgtacagtattcctacaattacattcacaataattattataacttc

SEQ ID NO: 167696 - DNA, 254 bp, Zea mays
  Clone ID: MRT4577_8451C.1
gcaaaactcagttgacgaacgtggaaacgactattgatcggcctcccccgcttcctgcctgggcgagcagtcagcgcagtctggcgcgtacccatgccctcggcaacctggtgggcaacagagccaatcaacagacaacaagagatgggcgctgggctgcagtgctacctaattggccactgccttgcgtgctcacaaactacatcgtgctgatagcgcccacagctaagcgctaaccgaatcgcctgtccagg

SEQ ID NO: 167697 - DNA, 398 bp, Zea mays
  Clone ID: MRT4577_84520C.1
ggactgcaggctgaggccatcaagcagaagcttcagggcgactctgctccggtcacagacggagaccaacctgcccgtctgctgatcacctcagaccaggttatggtgagcaaaggggtgatacgggagaggccacggagtgcagaagaagccagggaattcatcaatgggtactcgggcgatcgagcgttcgcagttaacttcgttcttgtcaccgacctgagcacgggggctacaagaggaggatgggacgtacctgagatcaggtttcagcacataccggacgagttcatcgaccaagtggttaatcagggcgacatgacctgcgtggccggcgggcttaagctgacacatccgtcagtacagccattcgtcaaagaactggtgggcacggtgaa

SEQ ID NO: 167698 - DNA, 392 bp, Zea mays
  unsure (1)..(392): unsure at all n locations
  Clone ID: MRT4577_84521C.1
gggtaccctcgcgggccggccgggatggcgaaaataaccgccgccgccgccgtgctagagtcccggagcctgcgcggcgcccgcgccgttcgactcctccacaagatccatcatcgcttcctccgccttctcggcgccactgcacctaaagccggccgccgcaaggtcgcgagatcgagggagcccaaaagcctcagggcggcggatgaaaagcaggagcaggacatcgaggcacaggaccccaatgccgccgccgccgtttccgcttccgcttctgcttccgaggcggccgnggcgggcaagtactgggcgcaccggtacagccttttcaacctttatgaccgcggcgtgcgcatggacgccgagggctggtactcccgcaccccggagtc

SEQ ID NO: 167699 - DNA, 574 bp, Zea mays
  Clone ID: MRT4577_84522C.1
cccgggggggcccgggccggatttcccgggggcgccccacgcgccctttggcacatgttggcacattctgggaagtcggggatcttttatagctatggagggaaaaaagttattccatatttggctcttcaaagttcccgaacctcaattttcttgtcatgcttcaactctggcttacaatttctgcagatactaatggtttgaatagctgttttgcattgccgtcatacttagcaaaaaaacaattgttgataggtcttaatatacttaagcttgtaatgcaagaccaggttcatttttgagctcaaaggtactctaattacttatctgaactttctcaagttcacaattcgaaaattagaaattgtagacattttcctgtatttttccctttctaagtcaaattgtccaatttgaggatcactcaatctttcttgccgatgcttgtctaggctcatgggtcttatgtccagaaacttagctggtctccaaaactcccatctaaccgaccatttgcaggtttctgtcctgataatgcaatggttgttgatagatacactacaatccttggggc

SEQ ID NO: 167700 - DNA, 565 bp, Zea mays
  Clone ID: MRT4577_84523C.1
ttcgcgtctttctttctctgctgcactcaagtactcccatggcggcgttgctgcttaattcactgcacattagaccagaaaatgatctccatagatcaggatgaacgactcatgtctacttggatcagtgtagcctgacccatgtacaactgtatcacttccaacgacagatacgtatctatcatactcgagtgaagttacctcctcgagggaggcgtcaagagtgagtgtgtccgatccaaacccctacagatgacgcgcgtgctgccctacgataccggcgcgtcgccatctacgaagatctctacgagactacagaagcagctgaccaacctcgctgggatcaagcttaacgccatcctcggaacgaccatggactgcactgcacccaagatctgtcattgaaatccacaatgagttaccgttccttgaccatattgagaaccaaatggagtccctgataaagaagaatggatgcaacgtccctttacttctgatgaactcttgcaacacccttgatgacacacacaacattggtgacaaccattccaaccccaacatccaa

SEQ ID NO: 167701 - DNA, 569 bp, Zea mays
  unsure (1)..(569): unsure at all n locations
  Clone ID: MRT4577_84524C.1
ggtgtgtaacacatgtattacatcattcatacagnctttgttctctgtggcactttgattctgccagtcaacagaggtaagatgtacgatggacggacctgttgacggtgtttgtaatccaagggaaattgttccaccaaagtgcctttaaattccatcatttacatgaaggagtggacctcatcgtcctgctggtagatgtcctcatcgatcaccttgtggctgggggtgtactgggggccagtctggtagacatggtcgaagccgttgacgttcttgttgaagatggcctgggtgtaggtgtgggcgtcggtggcgtccttgtggaagatggcgacgttcttgaagtacatgttgggggtgtagaagcggccgaagttgtcgatcttgcggtcgaaggggaagcccaggggacggttgtccacggcggtcatcagaccgttgcaggagtacagggtgttggcgtggacgtcggggctggcctcgtagggggtgaccatgacgaacagggcgtagggcacgccggccttgtggcccatgggcagcaccaggcggtcggggaagccgca

SEQ ID NO: 167702 - DNA, 311 bp, Zea mays
  Clone ID: MRT4577_84525C.1
gagaaaacatagcattgtcccattcaaccgggatttgcattggtcaacataacttggttaagggggacacctatgggtccccccttgtttcaaaccccaacccaatatgggtctttcgcctaaccccaaacctggatacctgggggggccccaggctgaatttggaaccaccgaggcctgtctccaggtccccctgaagaaaacaccggggaaatcccccccgatggggtccgcgttgaacccttttggggttctggtcttctcttccggccttgatttttggaacccactctgtctctcccccctttttt

SEQ ID NO: 167703 - DNA, 520 bp, Zea mays
  Clone ID: MRT4577_84526C.1
cgaacgggaggtcgttgctggggtcgggagctcggggggcagcggcgaggacactggagagctgctacgaggaggcgacgggaacatggcggcgaggagactgcagatctgctgctgcttgctgtagcatgtgatgagggtgaaaaaagatctattcatctatttaaatgaatgggagaacttgacaggtgtttgaggaaatatatgtcatgtgataaaaaaaatacgaactttagtttctagtatacgttcacaataattgcagatatttgttttcataattaatataagttcacagaactttcatagtgaataatgttaattacgtttgtttttcatgaaaaatagaattaaaattttgtttctatgcgaaatggagaataaagaaattagtttatacaatcggttattactgtagatatagaggaccaaatttagagtacgttgctgaagatgaaaaagatttagaggaccgaatcttctagaggatgctgtatggacagagaatattcctttatag

SEQ ID NO: 167704 - DNA, 1938 bp, Zea mays
  Clone ID: MRT4577_84527C.1
gcggccggagtgcgccacgtttcgagcgtccccttcttccttcttccccgagccgcgtcaaaggaaccaaacctgtgagagctcccctctcccctcccctcccctcccacccttcccttcctctctcctcgtcgattcctcgcactatctcctattctgcacccccagccgccggcaccgacggcgattccacggggcgccgcccccgaatctgcgccctccgcgcttagatctcccccctccgcgcttccggatgtcatgatccgcccccatttgcccaaggacccggccttcccgcgcaccaatgggtccttggacggcggggcccgcggcctcggcgagatcgaggaggtgggcgctgcggccaccgtagccgtcgaacagtccccctcgcagtcctcgtccccgtcggcgtcgtcgccggcggcggcgatgtcatcgtgcgggcagtacatgctacaccgggtgcgcaagctggacaccctagcgggcgtcgccatcaagtatggtgtcgaggtagccgacattaagaggctgaacggcctctcaactgatctccagatgtttgcacacaagacactgcggattccactcccagggaggcaccctccgtcgtcttaccagcagaatggttcatatgagagtgacgacagggaatgtactccacgtcgcattcatgatgatatcttggaatcaatattgaaaacaccaaattccaaagtttcgccagctatgagtcttctgcagggatactatggccttgaaccacctccaaagagagatcaaacaagtgagggcactgagatggcagttcacagtaaaggcaaatctgcttttttggatgttgagccgtggctggagccaccaaattccgaccccttccctcttcagaataggaaaaacagaagcttgatgataggttcttttcttgatggtggtactgatgagaacggtgacagtgaaaggttcataagacggcgccagaaagctgatggtgagctgttaccgagggaggaaaatggtggtgactttctggcaagcgttggaaaaggcttggctctgaggccaaagtctagcaatcgaccagacatgaacaagagccagcagaatctttttgcaatggcggagcctttgtttggcaatggtttgcaaactgtaaggaaatcatccagcactccggagttccaggagccagagaccaacaccagttcatccatatggtcagcgagcaagtggagcataaatacagatgcttttgctcttcctctcccgatccctcgttttgacaacattccaaagcccattgctgcttggagaaacaagccggctcgcgactaataaactgctacgcgcatgatttttcctgaactccaggaggcccagaaagcgggaagtgttcatgaaggagctttacattaggttggcaccagcctctacagctttggaagcagagcagagcaggactgtagtattggcccctgctagctagaacattccgaagatcagacgcatggcatctatgtttccagacggcatctggactaggtttacatgattctcgtgttatattgggcatgttgcgccaagagtagcaacgttaatattcggtcatataaattatagatgctagatgacatagaggagatatatttgaggaggatatattttttttctgtacacaatgagaaaatgtagagcatcaaagggcggttatatatgtgttgtatgtgtgattccataccctaatatagaggtggttggcttcaaaaaaaaaaaaaaaaaaaaaagcgacaaaaaaaaaaaaaaaaaaaaaaaaaaaaaaaaagaacaataaggacctacaacatcaacccctagaactaaaaaatacccacaatgaaataactaaactcttctataccctgaatgataactaaaaaaaaaaacgggggggcccct

SEQ ID NO: 167705 - DNA, 293 bp, Zea mays
  Clone ID: MRT4577_84528C.1
gctggaatcctttaggagcgaacgccatcgaagcggattttcgttatagctcgtgcgccttgtcagccgggcagggattcattaccaccaccctcccgtcccataacatggtcagctgctgcttgcgcggctcgaccgttgtctcctgggcggaggctggtggcttaaggaacggcggcggcggcgtcatctcggactctccggtcgtccgcacgtactgtcttatcacgccgcacgctggtgaaaacctccagctcgcgcttttcctggtcatgccctccatggagctagga

SEQ ID NO: 167706 - DNA, 355 bp, Zea mays
  Clone ID: MRT4577_84529C.1
ataaataatataattgctccaccggggcaacccgggcagtagaaagccaatcggcgacgaggccacaatcgatccatgccctcacgtatctataaaacatatcgcaacccaaaccacactggggtcggcctccgatatgggcccttatttataaaccacccaggccccttatccaggcgccctcggactcgacaagccccctggagacccccgcaaccctacgccagccgcataaccccatggcccacccccgctccttggtcaacactatgaacacgtacctatcgccggctttcccaggcgccgacagcccaaaaaacaccctgctccccaccatgactaccttggcgcccag

SEQ ID NO: 167707 - DNA, 1196 bp, Zea mays
  Clone ID: MRT4577_8452C.1
atttggctcgagctcgagccgatttcggctcgtttgctattcgccgtgcggtactccgggccctcccagttttccccctctcccttccagtaccggcgccgctggccgactcccgtggcgacaacctgagaccggagcgccataatcctccggattcgagacaccgagcgcaccgcgagctttatctgctgtgtttggagctgaaaatgagtgaggcgaatactactcagcttgaccttgagaaaggattttctcaagtgtctaatgataatgattcgagtagccctgcgaccatgcacaagatgaaagttgagacagaagatggtggaagtgagattgaatcacccactccagaaaaacgtgaatctagaagcaaaggggtcgttgtgagttcactggcaaggaatttgcttgcagagaggtacagagacagattttcaaatcagctggtggaagatgagggtcagacagatgatgaagactataatggaagtgtttcgcctagtggtagccaatcacttttttcagaaagcattgaactgcttgataaacacaaggatttgctgagtcttttcaatagaatggagagttctattagattgcttcacctgcgtaagaagatggctacatttaataatattgccacccaggtggagattctcacaaaaaggaagttattatacagtcatttggcccagatgaagcatttattcccagaagcaatccagataaagaggatactagtacatgatgagaagagcctatgcatgtatgctgatatggaaatcacacttgtaatggatgttgtggaatgcacaagtcctgatcagtctccatccatgacaatttgtgaggctttttactcgaagcttttgagatttttggatgctcatcataaggtcccacccaaagagcaagttgatgccctattaaaggaattgtttgccctttcacctgtcccgggtattttgagccccctgctggctccttgtgttattgttgcccaataaaatctataatttatttgaccaaattgacgcaattgtccccctgttttaaaattcaatggtagtcccagatcttagagacctctatatgtttctgttagtatgattgtgttaagtttatatgttctatcttcccagtttcccctctagcagctgataattaatatggtcgcagttgcagctcatgtc

SEQ ID NO: 167708 - DNA, 249 bp, Zea mays
  Clone ID: MRT4577_84530C.1
acggactcgcatccacaaaccacaaccagctcactctagatcaaagaacccatcccatggcttctcacaagccgctcctcctacacaattcctcgttcctgaactgcagtctcctgttgactgctgactacgctccaatgaacctgaccaatgtgaacaactgtcccaaacctttgtggttgaacatcctgtatgattcatagcacgacgtcctggagggcggcggcttcttcctcccgccgctctccc

SEQ ID NO: 167709 - DNA, 596 bp, Zea mays
  Clone ID: MRT4577_84531C.1
atagattatcctcttcctctcttcgtcgcctctgtctatgctgattggctacctcatgtgccgtccccatgggcaataaggcctgctagatgctatcgacagatcattaacaacccgtaccctaagtccaggtactgcacgagtagtccctgacccctggatccggatctacgatagctcgttatgaatagtaaggaagctgatgagctcccctactgagtgcaccttgtctcttgctagaaagagagtgcctcccgagaggcgctctaggctgcccgaattgcctgctgcaagtacatgagcaaatctggatgattggatgccttcctgcttaattcccgatgtcacccgttccgtgtactccgtatctgcatatatgctttcctgtgtcggtgatgatatgctaccacactggaatgaagtgtggctgtgcttagactcacgactgctgagatacgtgggacattgatcagggcctcctttccgagcgatgaaaggactgcaatgctgtgcatggcatgcaatgtctgaggagcgctaatgtcaagttccctgtgcggcaccagatcattgtcagtggatagtggagacttcac

SEQ ID NO: 167710 - DNA, 414 bp, Zea mays
  Clone ID: MRT4577_84532C.1
attggcatgtggccagggggatgtttttatataaccattttttaaaggcacttgagaaaggctgggagaagggcatttttatctgcagggatggggtgacctccaaaaggatgggcaggaaaataaccaggctggcctattttaatggctataatgggggggacccctttgttggccttggaatgggacctatgtttcattctgggccactaattttccatcatgccaccgaaacctaagggcgtttggttgggggccaacctattccaattgaccctatcttaccatgggaaaaaccaaagggggttaccatggaaggatggatggccaactgcccctgttgatggaagctggcctgcccatttggggcataccatcctggggacttgggccggggcaaaaatcctgccaaag

SEQ ID NO: 167711 - DNA, 209 bp, Zea mays
  Clone ID: MRT4577_84533C.1
atcccgtggttcggccaagttcaaagctggcctactccacgttgtggaagttccaacgggctggaagggaactaacctgctctcatgggatccagtgatcaactggatttcgacggggttaacgcaatggtttactaaatcccgcctgccaggaatatacacaacttggggcttgtcggcctaactaaggatgggcacacagaatcaca

SEQ ID NO: 167712 - DNA, 177 bp, Zea mays
  unsure (1)..(177): unsure at all n locations
  Clone ID: MRT4577_84534C.1
ttgtaatttgagaatcagggttcatcaaacgaggcagcaaagattttagatggtcaggatacaagaccatacctggacaattcaaataggaanaaacaaggtcgtggaaggagtcgtgctggtacaggccgaggccgtggctcaaagactgttgatcaaccacgactgactttgatt

SEQ ID NO: 167713 - DNA, 506 bp, Zea mays
  unsure (1)..(506): unsure at all n locations
  Clone ID: MRT4577_84535C.1
ttnttttttttttttttgtcatttccatctttcgggtttttttaagaccaaccagtggaagttataatctcgaccaaaacaaaggggccaacagatctaaaaaaattccctaggtattggagatattaaaaaccccacggagaatcgcacgagttggaattgccccacccagaaacattccctcttacaggctaggcgtcctctccccggcgccggagatgaccgcgagcatggattgttgccgaaggggacgatgaggtgcttcgcgaggttctccacggagccttcgccggtgacctaagcttgctgaagaacgcgaacatggagaacatggtcagccggcccgtcttgagctccttaccttgaggatggcgaactggtcggtgccactgtccaggacagggggtcgaaaggtcaacggtgtgcaacttgtcctaaggaccaaacgttggagatcccggagactcgggccgccgcgaggatgccttcgcgatcacggcacacca

SEQ ID NO: 167714 - DNA, 358 bp, Zea mays
  Clone ID: MRT4577_84536C.1
gggcccggaatattgggcaaggtgttcatgcaaaagtacatttgggagattgaccacgatgacggcaagatcaggttcaggaaggacaagtgcaacacccatcatctccacaacagcagaggcggagaagttaataacaatgctgccgcctcctcaagcgtcgtgcatcgcgtcaattgattcattcctctcttctccatctaccaaaacaatacattttctttccaatttgttctaatgatctgatttctatcttccttgattgtaaaatagatctcaggtgtacatgctcatgaactaacatcgcctgaaaacagagtattgaaatatatatataaatgaatgtcatcccttggcc

SEQ ID NO: 167715 - DNA, 1505 bp, Zea mays
  Clone ID: MRT4577_84537C.1
gattcaagtcagcggtttttagggttcgagatctcggcatcgtgtcgcggaagccatggcggtgagcattctttgctttcctattgattgctcatctcctcgagcttgtgtgccgtgccattaccgatccggggcacctgctcgccgtttttactaattcgttctcggagccggagagcttgagagctggttttcgacttgcggattatgctccagtgatagccgcatctccccagcctgtcatggtagcaaagaaacatggggtaactgttggtaggaagcgaaaggggaaactggggcgtctgtggaactgggaaactgacgcgcgggatgctctttgacaagcatgcttagtaccgtgaaggtgagcaatgtatcactgaaagcagcacaacgtgatataaaggaattcttttccttttctggtgacattgtgcatgttgaaatgcagagtttcgatgagctttctcaagttgcctacattacttttaaagacaaacaaggagcagagacggcaatgcttctcacgggggccaccatagttgatatggctgtaatcgtcacaccagcaaatgattatgagctaccatcttctgttttagctgctcttgagcccaaagacacaaaaccttctgcccttcaaaaggccgaggacattgttgggaccatgctggcaaagggatttatcctcggtagggatgcactggacaaagcgaaagctttggatgagaagcatcagctgacgtcgactgccacagctagagtatcttccttcgacaagagaatcggtctaagtgagaagatcagtgttggcacttcagttgtaaacgataaagtgaaggaaatggatcagaaataccaagtctctgagaagacaaagtcagcactggcagctgctgaacatagtgtctcgactgctggatctgctatcatgaagaacaggtatgtgctaaccggagctgcatgggtaactggtgctttcagcaaggtcaccagtgcagccaacgaggccggtgcaaaggctaaggaaaaaatagcagtcgagcaggagcacaagaatgctgagggtggacctgcacaagcgaacatctcagagacccatgaagcgcacaggggtttggacggcggattctcaaggctacatgactctgaagtgggtgaagatatccccatctctactgcgagtgtcccagctgttacggatgaggagcccagcaaggcttctccaccagctggtgttcctgaaaagccagaagctgcgcacgaattggtaccataattgatgcggttttgcttcatacatggatgcaatgtaaatagacatgaaatgaggtagccattgaactcattctgtggtcttgtggttggcatcttcagattgaaaacctctttgaaggttgaaagttattgggatctaaaggagtttgcaatttgtacctggtctttttgatcaattagtaatcagtattacccggcagtggggaaatgaactttaatgcttgtgt

SEQ ID NO: 167716 - DNA, 148 bp, Zea mays
  Clone ID: MRT4577_84538C.1
gtacaagttgccctcatgggaaagagtatgatccaaaaaataataaatgtgtcatgtcagctaagcagcgtattctaatttttgggattgtaattgggcttgtttgtggtattggatccataagttttgcacttggtgcaattgtact

SEQ ID NO: 167717 - DNA, 205 bp, Zea mays
  Clone ID: MRT4577_84539C.1
tcgtcacgcgttcgctcagaaactgccacagccatggcgaccgtgacgcggaggctgctcacgacgctacttaaaaccctagctcgcggcctctcgcgcgggctttctaccgagaaagccgttggtgcaggcagccacatcggtaagcacacccctgacacgatgcaagacacgagcaaggagctgcccatggaactgatcaacg

SEQ ID NO: 167718 - DNA, 332 bp, Zea mays
  Clone ID: MRT4577_8453C.1
gtgaagttcaggtgtgctgactctgcctcccaaccacctgtcagtcacaggttgctatatcccttgatgtgatactcagggcctgacctcaactctcagttgtagcaatgtgccttgatgtatccaggaaggctgagcaggctgctgcagggtgagccccaagatgcaggaggccctgatgatgcagacatttagaccaagtgcggagtccacctccaccatatcgtggagaagatgggcagagagaaaggtgctgggacggcgggagaaggccgggcccctccccgaactgtgtttgcagacttgaggcaatcaaatggtgtttatattag

SEQ ID NO: 167719 - DNA, 141 bp, Zea mays
  Clone ID: MRT4577_84540C.1
tggcacactggaccctgtagagaaggcccttcgagatgccaaactagacaagtcacagatccatgatattgtcctggtgggtggttctaccagaatccccaagatccagaaacttctgcaagacttcttcaatggaaaaga

SEQ ID NO: 167720 - DNA, 575 bp, Zea mays
  Clone ID: MRT4577_84541C.1
ggcactcaacctaaacgttttggacctcggagcccgtccaatataccctgggggtttcgttctcgatcacggtaattactctctcgtcactgtggatgtgtggcatggttggactgataaatgaatggcaccgctaacagtctacagtcgcatgctcctgtcgtgatcttgcttcgtcagatgcgctggtgagtcggagcaacgccctgctggcgagccgtccgtcccagctccaccatggcgcctcctctcgcgaggtgaatctcccccaggaatggacgtattgaaagcgccgaatcggcaccgctgacgatctcccctaggttgacgggtcatatttgagacaaaaattactgtcgctaatgctagggataggtaggaaggggtagcgtttgctcgcgtgggttagagcgagagtgtgcatagttgtttgactaggaagttggaggcagcaggggttgcatcatcttttgcggtgcagaaacgcatcaggctctcttgcttcttttgttcccgccccgcccccggtaagaaatatccccctccggtgaatattggaaacaacaaaaatttta

SEQ ID NO: 167721 - DNA, 1091 bp, Zea mays
  Clone ID: MRT4577_84542C.1
tgccgatgcggcctggagcagcgacgccgccgccgtcgacgtcgcggcgtccgtctcgccggtggccaggctcgccagccacgagtcgccctcgagctgcacgtccctgggcgtcggcaaggggcccttggtcgccttctggctgctggacgtgccagcgcgaggcgggcagaaggtgatggagtagtcggtgccggtgcaagtgaaggtggaggtggcgtcgtcgtaggcgtagctgtaggagcgcgggcacgccgccttaaacatctgcgagtagggcgaggggtggcacgtgtccgggttgccgaactggccgctgcagcagtactcgggcgtgccgaacgcctcgcacgcgctgcggcaggcctggccgccggcgcgcagctccactgggcaccgctcgttgaggtccaccaggcagcccgtgacggggcagcccggcgccgccgcctccaccaccatgggcaggttgtagccgtccaccaggctcacgtcgtagtagtccttgcccccgccgcccagcgtgaactccgccagcgtcgccggcggggtcgcgcccctgccgcggcactccacctcgcccgacccgcagtcccccgtcgcgcacgcgcccttgcccgacgcggcgtcgaacgcgcaccccgtgcgcgcccagaaccgccccgaccaccccggcggcgccgtcagcgaccgcgtctcgccgggccccagctcgaaccccgtcgtctgcagcggcgagctcccggagttggccagcaaccccggccacaccgtgccgccgcaccggttcgtgaacgtgaacgtgatcccgccggccgcaccttgaaagaatgataggatcacgaatgacgacagactgatcatcaaagaagccatcgtcggactcgatcgaacccaatttaatttacccaacaaattaaaattgaatgtatgtatgtatgtatgtatgtcaaaaaaatgtgacaaggctgaccgagaagttgttgaaatggcagttgcggttagctatatgggggtaagcagtgcagtggcggttaggggggaggaagaaggaagtggtggtgaacggcacgggaggggggttggttaac

SEQ ID NO: 167722 - DNA, 299 bp, Zea mays
  Clone ID: MRT4577_84543C.1
cgccaactcccgcctgccgcagtccgcgcgcgccccctgaagatccgatcgcgaacccgtctaccgggagccagaagaagctggcaatcgatgacgaccagaacccacgaggcttccatgcccgaaggatctcccacgaggtccgaggagatgctctgggagaggagtttaagggctatgccttcaagatcatgggaggatgtgacccacaaggttatccgctgaagcaaggagtcctgagttctgggcgagtccgccttctgctccacagagggactccctgcttccgcaggaatggc

SEQ ID NO: 167723 - DNA, 113 bp, Zea mays
  Clone ID: MRT4577_84544C.1
ttcagttatccactgaatttagggataacgctttaaagcatcatgtgagccaaaagcccaaaaaactccattaaccggataaaggacgtattggtgcattttcttcatagact

SEQ ID NO: 167724 - DNA, 833 bp, Zea mays
  unsure (1)..(833): unsure at all n locations
  Clone ID: MRT4577_84545C.1
gcttcccccaaaacctcacctcatctcctccaccattgaccagacggcggcgctcacctccccccccttggccttccccatcgtcctgctggcttccccggttcttcctcgtttttgatctcagtcactcatgtcttttgaagtcagcgagggatccccttatttcctctcgtgctacttctggttcatatattgcataaaattccgggacttcacttgatacaagtggatcatctggagttttgtgcgaatacttcctatcatgtgaatcagtggtagttggtttaattggcaagactcaaacttctctcatctgagttcagaaacatttgttgcttgagtctttggtgtactgctttccttgagtcttgccaagcctggtttcccatcagttgtttctcctccagctttcggttggaccattctctcttctggtctaatctcatcaatcttttgatcctcccttcagaatagttgtttaacgtgagctgtcctactctgctcacactgcaatcttctgaagctctcttctctggttcttgtctgttctccaagcatttgagagctcctctctccttaagtttggttgatttgtggccctgaattctgtcctttcagggctaaagcatatccctttctggccagacttgatatttccctgattactggtattgttaattgcctaatctggtgaaccatttctggntgtgtttcacctcttgtgttcttctcttgatactgagcacaagagacccactgcagtgatggctcaagcttgcctgccacctggctntcgtttcatccaactgatggtgagcttggttctactactt

SEQ ID NO: 167725 - DNA, 343 bp, Zea mays
  Clone ID: MRT4577_84546C.1
atccaatccatatcagaacaacggtagcgcgatgagaggatcgcagaacacaacgggatgaagagggtcattgttctccttgggcgcctggctatgccagatgccaacgccaatgcgctgcagaggccctgcgcttgcacggggctgcagggcttgtacggctgtggagccagagtgactaaaatgatgggcagccactggatgtacccctacgcggcagaactgagggacacacagcggataccaggtgcggaggggccctactaccccagctgtggacagaccaacgtcatgtaccatccgctcaggtacagggctgacacagcagatgaggatgatggac

SEQ ID NO: 167726 - DNA, 295 bp, Zea mays
  Clone ID: MRT4577_84547C.1
cccactcgtccgaaaaaaaaaaaataaaaaaaaaaaaaaaaaaaaaaaaaaaaaaatttaaaatgagggaaattataacaagtgataaacgcaaaaaaaaaaaggctttttaaaactatattttaccccttatcctacccaaaaacctggaacaatttatttttccctaatcacaaaacccttcccataaaccctccatttaccaaatctactagatcaagtatcccacaatttcttcacagaaaaaaccctattttttctttaaaagactacccccatcttccttatcctcttt

SEQ ID NO: 167727 - DNA, 1839 bp, Zea mays
  Clone ID: MRT4577_84548C.1
ccggccggggccgattcccccggccgggctcttttgtcaataaataaataaataaataaataaagccccgtcttgcgtcatttcttctcgccgattccccatctcgccctgcccgccgaagagcgcgcaagccccatctcgccctgcccgccgaagagcgcgcaagcaccaccgtcccggcagcgcggagatcggtccactccatccacgcggcgtcaggcgagcggggcgcacggacgctgcgaccgatggatctcaaggatagcctctccaaatttaagcaacagcaggagagatgccagtcatcactggcgagcatagctgcttcgacctcaaagccaaagcacagggcccaaccagcgcatgctcctaacgtcccagcaagaccatcacaacctattaagttttcaaatgatacagaaaggctgcagcacatcaattcgattaggaaatctcctgttggagcacagatcaagcttgtcattgaacttctttacaagacaagacaagcttttactgcagagcagataaatgaagcaacttatgttgatattcacggtaataaagctgtctttgacagcttgagaaacaaccccaaagtaagctatgatgggaggcgtttctcttacaagtccaagcatgacctgaagggaaaagatcaactgcttgttttgattagaaagttcccagaaggtcttgctgttgtggaagtcaaggatgcatattcaaatgtattggaagatttgcaggctctgaaggctgctggtgaggtttggctgttatcaaacatggactcccaggaggacattgtatacccaaatgatccaaaagcaaagatcaaggttgatgatgacctgaagcaactcttccgtgaaatagagctgccacgtgacatggtcgacatagagaaggagctacagaaaaacggtttcaagcccatgacaaatactgccaaacgacgagcagctgcccagatcaatggcgtaaaacccaaggctaagcccaagaagaagcagcgtgagatcacaaaacggaccaagctcacgaatgcccatctgcctgagctgttccagaatcttaacacttaaacgtgctacagtatctgacgacggaagatggttcatttcactcctatatattgctacgttgtgtgtatgtgttatgcagcctctgtatgctgtatggcttatggttatgagcgccacaaatttgtttgtcaagattctggatgatatacttatgcattctgacataataggaggcaaaacctcaagattttccttatttttattttatcaattacagcattttctgagtttgcggcattatgtatggttgattttgggtcaattaggttggtgtgaggacaagctgaacatattttgatggattgcttagcttgaaatgataccagaatttaaacctcataattacgagtactgcggatctgcaggtttagctctcgtgccccatgacaaatactgccaaacgacgagcagctgcccagatcaatggcgtaaaacccaaggctaagcccaagaagaagcagcgtgagatcacaaaacggaccaagctcacgaatgcccatctgcctgagctgttccagaatcttaacacttaaacgtgctacagtatctgacgacggaagatggttcattttactcctatttattgctacgttgtgtgtatgtgttatgcagctatgctgtatggcttatggttatgagcgccacaaatttgtttgtcaagattctggatgatatacttatgcattctgacataataggaggcaaaacctcaagattttccttaaaaaaaaaaaaaaaaaaaaaagcggcc

SEQ ID NO: 167728 - DNA, 211 bp, Zea mays
  Clone ID: MRT4577_84549C.1
gcgtagtgagtcggaatcggctcgagctgtgaatgacgagtgcatgctcaagttcggcgagctgcagtcgaagatggtgcaccgcttcctaacttgcaggcatgtcgaaattcagggagatcgttctggaccaggtcggggatcgcgctaccagctacgaggacttcacaaggagcgtctccgagattgagtgccgatacgcgatctatga

SEQ ID NO: 167729 - DNA, 635 bp, Zea mays
  Clone ID: MRT4577_8454C.1
gccggccgggccgggtttctgaaaagaatattttcccaaatacccgattacctgacacgcagttgtactcacttcttcggtccactggagcttccagactaaggtctgaggcagaacttgcaaagcgatagctagtaccccgcttacggtaatacgtagctgataattgacgatagctccccccacgacatttacttctcccatattcgaattcgataagattagaaaaatggacgacatcgaagaaccctccggtcccagtcgcgaagagacagctaagcgagaacaagaggagaaagagcgcaaggcaaaggaggaagccgaacagtcacaattaccctacaaatggacacaaactatcggggaagcagaagtctcaatccctgttcctggtacaatcaagggaagagatttggatgttgttcttacaaagacgaaaatcaaggttgcgttgaagggacaggcgccgataattgagggcgacttcccacaccccattcacgcagatgattctacgtggatgctcgaaaccatccccacaggcaaacaagttaccgtccacctcgataaagtgacaagatggaatggtggccgcacatcgtaaccagcgcacccaagatcgacgccacaaagat

SEQ ID NO: 167730 - DNA, 354 bp, Zea mays
  Clone ID: MRT4577_84550C.1
gacccggcggagtccgccatcaccaaggagatcctggagaatcacatgacccgcagcgggtgagggcggtggtggcgggggctaccgccatggcaacccacgcggcaggtaccgcaactcccacgggaactggaggaactgagcggcggggcccgctcgggcaagttatcctgttcgctaccgcgatgtttaccctaatccagagggtttatcttccatcgcgtcgtgtatgttgttgcccatatgcgcatttgattgctagggcggtctacgtcaggcggtaacgctgggtgcattctcggctgcaggaaacccattcatcaaacagcatggactgcagatcgatcgatgctg

SEQ ID NO: 167731 - DNA, 304 bp, Zea mays
  Clone ID: MRT4577_84551C.1
gttcaagaaaacaataccgccaggcttaataacccagtggcaaagcgggggaacaaaggcgcacaacgtaagttgcaaaccacacaacgacctatagccttgatctcacagttacatatcacggtaggagccactcatggcaaaccacctgatagctgtggaacacaagcccgaggtgtccacaccagtggaggatatattactggtgagacttaaaaccctgctgatgctaccaatattgtacattgttcacttattagtccttctcgagcgcagccagatcctaacgagcctcggagaactc

SEQ ID NO: 167732 - DNA, 782 bp, Zea mays
  unsure (1)..(782): unsure at all n locations
  Clone ID: MRT4577_84552C.1
aactgtgtcttataattaaaatatggtgcagccgtgtctacatgcccttactgttgtgtgccctatcatatcaacaagcaccgccagccagagatacatacatatatgtcatttccgtggtgggctacagcctacagacctacagcaagcgctggccatggcagagcattttgtgctgtgccccgtgatggcagtactattactatccatggacgtcctcggcgccgccgccggcgtcttcaagccgccgccggcgatgtacgtgttcggcgactcgacgctggacgtcggaaacaacaactacctgccgggagcgggcgtccccagggccaacaggccctactacggcgtcgacttccccggcggccttcccaccggaaggttcagcaacggctacaacaccgccgatttcattgcaaagtgcatagggttcgtgagcagccctccgccgtacctgtcgctgctgggagcagcaagctgcggcggcggccttctggttccgacggctctcactatcggcgtcagctatgcttccggaggagctggcatcctcgactccacgaacgccggcaacacgatcccgctatcgaagcaggtgcagtacttcaacgccacgaggtcggagatgatcgccgcggcgggctcctccgacgcggtggacgccctgatcaaccggtccttcgtcctcatcctcgtcggcggcaacgacctgtccgcgttccgnnaccgcggagcgggcgcgggacaggtccggcgccgacctggagagccacgacgcggcc

SEQ ID NO: 167733 - DNA, 412 bp, Zea mays
  Clone ID: MRT4577_84553C.1
atagggggggcaccctttgggggggcccctcaccaaggaggtattaggtccccttttaatggaatcaatccaccggcccttttttttttccattttggggtcccgttccaactgtttaacaccacgtattaagccttttgttaataaaaggctttgaaggaagttggggtgggaaaaaggaagaagtccccgccgccatgaccggggtggccggccctaatgggtccttcctcatccaaaataaaggggcgggaccaaagcatcgatggccatgaatgccgccaaggcccgtttcagcatatttcgtttggaatcctccaacggcttgacacacaacccttcgcaaggctggaagggacgatggccccttccgtccccaaagcaacgtcggaaccaactgaaaaaagagaaa

SEQ ID NO: 167734 - DNA, 444 bp, Zea mays
  Clone ID: MRT4577_84554C.1
acctcgagccggccgagcctattttcgatccactctcccactactcttctgttcctgttccgcaagtccaaatcgagacagcgacctcttgccgagcgttccccattgcgcgaaccagtcacgctcccactgcccgtccgactgcgccgctgacctctaccatcctctggcatggtcgctccagacgagccagaaggagctcatgcgcatcgacaactacgaggacacgacggaggacgactagagacaccgccggcctgagacgcacatcgtggacatccacacgctcatcagaaaggtgaacctccacaagaagagacgagagccctgcccggcgacgcggccgtgacgacgatggagcactccaccgcactcccgccgaatctcgatggctggccggacatggtacaggacgctgctgctgctgctgctgtggggagcttg

SEQ ID NO: 167735 - DNA, 350 bp, Zea mays
  Clone ID: MRT4577_84555C.1
aagggaaccttgattttatacttgatgcgcgaaaaaattgttctttttaaacacgttggaggaggtgcaactacaacttcctcccagggaagaaaaggttgaaagaacaagaaaccggaaaataaattaatttacagggcctttttctgtttgtaatgaaatgggaacgatccaccaaaacgttgtcaagccaaatagttttaaatctgggggttactcctggtgggctccaggtacttctgggggatcaagctctttattttttttttgatattagctggcttaacatggaacttgagttgctggctaagctcaattattaaaaggggggggttttggacctttcgtgt

SEQ ID NO: 167736 - DNA, 348 bp, Zea mays
  Clone ID: MRT4577_84556C.1
gacgaaaacaaattggggactaaaacttatttttattaagaagggcgaccacaggccaaagactgggggcaccaggggggggaaaagacaacctttaggggtcaggggtgcttcaaaccacaccaaaacaaaccggccgggggtaaccaatttaatcgaccttttcgatcttgggaccaggaccggtcccaccagaggggggattcttggccatggcaggcggattgcccatgcccgggccaggggcttggtacattttggggatgatgggggtgcaaatgccctcaagctccttaatttggggttggaactcggccacctcaggtaggggggtgggggccagccagg

SEQ ID NO: 167737 - DNA, 320 bp, Zea mays
  Clone ID: MRT4577_84557C.1
aaaaaaaacaacagggattcattcagctggtaccaaaaaaaaaaaaccggtagtttaaccatcgtttaagggaaggggtgacaaaagaaaccattaaattggcctaaaaaaaacaacattaactaaacatttaccgaataacccccaccgggtttgaacccccaacagctggacttgacgaaggggggtagctgaaaacaacgggcaaaaccccctttatcacaatgcaacccccattgggaaaagccgccccattttcaacaaaacaggaattgcatactggttgacaaaaaaggggggggggggggtaaacattcaaa

SEQ ID NO: 167738 - DNA, 213 bp, Zea mays
  Clone ID: MRT4577_84558C.1
gactttcttatttctgggaagctacatagctcagacaaatgactttattctctgatctactaactcataagagatctaagagagggcactctcagtgatgggttgttggtagcaacgctgatgggcctgtcagagcaacttggttgaatggcatcaatgtggggcatctgtaagagggtggcagcgttaggcgcagcgtgctggcagatcggc

SEQ ID NO: 167739 - DNA, 2755 bp, Zea mays
  Clone ID: MRT4577_84559C.1
ctatatgccacaaaaatcatgatatatcatcaagtacaggaggaatgccccatgctgcattgagtaaaacacaactgaaaaagagtgtgaattcaaatcttttagcagatgagaagtggcatttgataggcgcttctgtgtgggttcggttgatatctgtgcttgaacatcgtctaagggaattctttgagaaagagggacttgaacatgaagctggtgttagtggttcagaattcaggggtcttatcacttctgttgctgcaaagtttgttatggattccattcattttgtgtcatcttcattagtaccactgcatgcatcgttcttgaggaagaatttaccgatgaattcaagttcaagtttgctcttctggttagagtccaagttgcctcagcaactcccagtcagtgatagctatgatcacctctcgaggatttcacagctttcaaacagtgagaatatggaggcattgtttaatattttgtgggaaatatctgttaatcctgtggatgtttgtaatgcctttgtgagtgaaggagttaattgtttttccttaagcaacacgaatgtcactagatcttggaaggacataagatgtcctgtggttgagtgtgataaaattattactgaaagaagtggagaggaacatgaacacagacttggctccaagagattgggacagggattcgctgaaaaagcctcttataatggtgaagtgttgtatgaaactaaaaggagggagttgatcatacaaaaagagtttcagagcccaagggaaattctaaggagaagcggggagcttcttgaggcggtatgtcttaactctgtcaatgagaaacaagctgctattgctactaatcgaaagggccttgttttcttcaattggagtgacaagcagcataacaagagtttttcagagtacgtctggtcaggatctgattggccattagatggctgggctggctgtcagtctacacctactccaacttctatctctcctggtgttgatcttggtcggaaaaaagggtcacaacttggttcagttggagcaactacaggtttgagttctttagcaaagccaggaagagatctaactggtggtggagcatttggaattccaggctatgctggtattggggcctctgggtttgggtggggcgaacctgaagaatttgaggatttcattgatcctccagcaacacttgagaacatacattcaagagcattatcccgccatccctcattaccattgtttcttgttggttcaagcaatacacatgtgtatctgtgggagtttggtaaagctagtgctatggctacatatggtgttctacctgctgctaatattccaccgccttatgcactggcctccatatcatctgttcaatttgactgttatggacagcggtttgccactgctgcattagatggtaccatttgtacatggcaagttgaggtgggtggaagaagcaatgtctatcctacagagtcatctatatgctttgacagccacgcctcggatgttgcctatgtgtctgcaagtagatcagttattgcttctgctggatatagttcaaatggttcaaatgttgttatatgggacacactgtctccaccagctacatctcaaacatctatcatgtgtcatgaaggaggagctcggtctatttctgtgtttgatagtgatagaggctatgggtctatctcaccgcttgttgtaactggtgggaaaaatggagatatagctttgcatgattgccgcttcctttctactggaaagtccaagcatcatagagttaccactgagcatggtgtcgaggcatcttccatgcatgacatcaaatctagtacttttggtggtactgacagtgggatggtctggcatataccaaaggctcatctaggtagtgtcacaaaggtaacgaccatcccaaataccagcttgttcttaaccggaagcaaagatggagatgtgaaactttgggatgctaaaaactcccagctagtctttcactggacaaagatgcatgaacggcacaccttttttcaaccaacctccaggggctttggcggtgttgttagagctgctgtaacagatctccaggtgttgcctaatggtttcgtttcatgtggaggtgatggttctgtgaagcttgttcagataaaagatgatctcgctgcagcatatcagcgttaaaacaagcaaagagggaagaagacatgctagaaaatgcgatggatgcagttggtcacttgatatcattctattttgctttgctcattatacttttgagatgctttactcctttcaggggtggtatagcaaggaggaagctatgatttaagagcactagagcagacatctaggcaatttgacatcagcatttatacgtcgagtttttatacgagcctggtttgtggctagtcaaactgccctcagtggtttttttgaggcctgaattttcgcactttggacagggcaatgcggaccataattttttgtacatctgtacagtcaaatatcttgttttgttggccaggatgttgatggagggtgtaaagttgtaagctagaagtagggagataccaagctacaatacctttttgttacttaatacaaaagtgctgggtttagggttaatgtacaatggcagagcaaatggaccaaacaaatattgtatttggtacgggagtatgtatgcggtttgtcaaggggaccgcagtagttcatcattcaaaacaatattttgcatt

SEQ ID NO: 167740 - DNA, 2220 bp, Zea mays
  Clone ID: MRT4577_8455C.1
gcgggtttttgaaaaaatcagctttgctctcgactttgaagcggcaccgcgcgccgtgcggtactccgcgtcatccgcgcttcattttctaccctcccctccactaccgccgactccgtggcgacatcctgagtcggagcgccgtgctcgtccggattcgagacaccgagcacaacgcgagctctttctgtagtgttcggagctgaaaatgagtgaggtgaataatactcagctggaccttgagaaaggattttctcaagtgtctcatgataatgattcgagtagccctgtaacggtgcacaagatgaaagttgagacagaaggtggaagtgaaatcgaatcacccactccagaaaaacgtgaatctagaagcaaaggggtcgttgtgagttcactggcaaggaatttgcttgcagagaggtacaaagacagacttgcaaatcagctggtggaagatgagagtgagacagatgatgaagactataatgaaagtgtttcgcctagtggtagccgatctctttttttagaaagcattgaacttcttgagaaacacaaggatttgctgaatcttttcaatagaatggagagttctataagattgcttcacctacggaagaagatggctacatttaataatattgccacccaggtggagatactcacaaaaaggaagttattatacagccatttggcccagatgaagcatttgttcccagaagcaatccagataaagaggatactagtacatgacgagaagagcatatgcatgtatgctgatatggaaatcacacttgtaatggatgttgtggaatgcacaagccctgatcactctctatccatgacaatttgtgaggctttttactcaaagcttttgagatttttggatgctcatcataagggtgcagacattcctgaggcaatcctaccggaaccctttaactcaaggccaagggagaagttatatcttgaggcagtacataacggacatgctgctgagccacctctgcatggtgccgttgaggagggattctcaaatgcttcccacttcccacaatcttttcaaaaattcatgtcgaaaaaaatcattgctgatggaactgaaaagactcaattgctatccgacccagcagaactgagctctgtgagtgcttatggtacaaaagggtcaaacagaaaccctaaaaagcaagatgaacatgctccagttccagtgaactctgaaatttctgctactccaagccgccatttgatctcttgttgtcaagagagtacgccaaaacaacagacctcagagtcaccattgttgtctggaacacctgcaatgcagacaccaaaaaggccattgctggctccgcttgagaaacccaaggccacatgtggacacattagtgaaccacgttcagccagttctgcccgcagatcactaaatacatccttaacatatgaaggaggaagcccttcttattatgatggaatggaacatacggctacagctaaaaagtgcatgatctcagaagacttgtcaagttttaacaagtcatttgaggaagatagccatgtcttctttactgataaagacaaaatcaatgaagtggagtcagtggatagccaggaaaggatagcttctctacgtaccacatttgacattgtctatgatatttctcattctaccaagaatccacttatcacgaaacaggaacttttccacaatattcttgccaacaacttggagatagaagagattggggagatagaagagcagctgcatattttagaggatctggctcccgatttgatatcaaagaaggtgataaatggaggagaaatactttatagcatcgaacctataacagataagaattcagttcgggctaggcttgtagtagaacctgtatgagatagctgcaattggttcaaagctgaagaaatttgaagagattctctatatgcatgtaccactaatggaacccagattagctgatttattcaaccatggaagcatctgcatcgctcatgtagtcatgtctgattcgagttcaaatctgtgtttttattgacctgctcagtgccgaaatttctatggaacttaaattcgcaccagctgctctgtgagcttactgtggtaatcccatgaacttgtgtggagttcagatgcccatcggcatctgctctgtgacgtttaactcatgaaaagtgcacaagaatatttattcaatattc

SEQ ID NO: 167741 - DNA, 313 bp, Zea mays
  Clone ID: MRT4577_84560C.1
atcagaacatgtttaattcctatctgtaagattccaaatgttacaatctgtggtggtacaccccacgcgtctcggctcgggcttgagtgcatgtttgttgtacaccctctttcgatccataaagaaattacttggctcagtgttattttaaaaaacacacactttcaggggaagggggctacctatggaaattgcacgaggtcgttcacagggaaggggggaggcttatgatctcgcggcgcccataatccatcaatggttcttggtggggtaggatcccatctttttggtgccggataggccctccgggttg

SEQ ID NO: 167742 - DNA, 453 bp, Zea mays
  Clone ID: MRT4577_84561C.1
ggggggggtgtttttttttttttttttttttttttttttttttttttttttttttttttttttttttttttttttttaacagccaaacattgggggcatataaaacaaaaaaggtcccaaacataagtgggcccataaaaaattaaaaataaattaaaaggtttaaaaaagcgaaacccgagcccattgttcaaagcaacccccccagttgataaacacacccccgggggaaaaaaacaaaccggaaggggcaagcccccccaaaaaaaaacccctaggagccaaagcgggcccccctcaaaatcctgaaaaacccggaaaagtctatttcaccgccaccatttttataaacctttttccccatgttttggatcccaacggggggggaaataaccccccgctctttggaaaacctttgaaaataaaagtaaaaaatttttccatttccatcct

SEQ ID NO: 167743 - DNA, 1427 bp, Zea mays
  Clone ID: MRT4577_84562C.1
taccactgcatgcatcgttcttgaggaagaatttaccgatgaattcaagttcaagtttgctcttctggttagagtccaagttgcctcagcaactcccagtcagtgatagctatgatcacctctcgaggatttcacagctttcaaacagtgagaatatggaggcattgtttaatattttgtgggaaatatctgttaatcctgtggatgtttgtaatgcctttgtgagtgaaggagttaattgtttttccttaagcaacacgaatgtcactagatcttggaaggacataagatgtcctgtggttgagtgtgataaaattattactgaaagaagtggagaggaacatgaacacagacttggctccaagagattgggacagggattcgctgaaaaagcctcttataatggtgaagtgttgtatgaaactaaaaggagggagttgatcatacaaaaagagtttcagagcccaagggaaattctaaggagaagcggggagcttcttgagtggcgcaggcggtatgtcttaactctgtcaatgagaaacaagctgctattgctactaatcgaaagttttgctggccaaacctcatttcaagagctgtctttgacagtgcgtgttgtttgtctagcaagtcattgtgtcatatggttatgctgctacattgttagtactgtataccatctaagggcagcgtctttacagggccttgttttcttcaattggagtgacaagcagcataacaagagtttttcagagtacgtctggtcaggatctgattggccattagatggctgggctggctgtcagtctacacctactccaacttctatctctcctggtgttgatcttggtcggaaaaaagggtcacaacttggttcagttggagcaactacaggtttgagttctttagcaaagccaggaagagatctaactggtggtggagcatttggaattccaggctatgctggtattggggcctctgggtttgggtggggcgaacctgaagaatttgaggatttcattgatcctccagcaacacttgagaacatacattcaagagcattatcccgccatccctcattaccattgtttcttgttggttcaagcaatacacatgtgtatctgtgggagtttggtaaagctagtgctatggctacatatggtgttctacctgctgctaatattccaccgccttatgcactggcctccatatcatctgttcaatttgactgttatggacagcggtttgccactgctgcattagatggtaccatttgtacatggcaagttgagttccaatggttcattactatctgcgaatatgaaacaagagaattgcagtgcattcccacctgtgcctcattttctgcactcttctgcagtagaacccaagttgctcttccgttccgtattgtgactgcaccttga

SEQ ID NO: 167744 - DNA, 1352 bp, Zea mays
  Clone ID: MRT4577_84563C.1
aggcaacatccgaggcgtggctgtcaaagcatatagatgactctgtaggatatagttcaaatggttcaaatgttgttatatgggacacactgtctccaccagctacatctcaaacatctatcatgtgtcatgaaggaggagctcggtctatttctgtgtttgatagtgatagaggctatgggtctatctcaccgcttgttgtaactggtgggaaaaatggagatatagctttgcatgattgccgcttcctttctactggaaagtccaagcatcatagagttaccactgagcatggtgtcgaggcatcttccatgcatgacatcaaatctagtacttttggtggtactgacagtgggatggtctggcatataccaaaggctcatctaggtagtgtcacaaaggtaacgaccatcccaaataccagcttgttcttaaccggaagcaaagatggagatgtgaaactttgggatgctaaaaactcccagctagtctttcactggacaaagatgcatgaacggcacaccttttttcaaccaacctccaggggctttggcggtgttgttagagtatgtagtactgtaaagactataaaatgtttaatgacttcgttcataaattttgttcatgttagagctgctgtaacagatctccaggtgttgcctaatggtttcgtttcatgtggaggtgatggttctgtgaagcttgttcagataaaagatgatctcgctgcagcatatcagcgttaaaacaagcaaagagggaagaagacatgctagaaaatgcgatggatgcagttggtcacttgatatcattctattttgctttgctcattatacttttgagatgctttactcctttcaggggtggtatagcaaggaggaagctatgatttaagagcactagagcagacatctaggcaatttgacatcagcatttatacgtcgagtttttatacgagcctggtttgtggctagtcaaactgccctcagtggtttttttgaggcctgaattttcgcactttggacagggcaatgcggaccataattttttgtacatctgtacagtcaaatatcttgttttgttggccaggatgttgatggagggtgtaaagttgtaagctagaagtagggagataccaagctacaatacctttttgttacttaatacaaaagtgctgggtttagggttaatgtacaatggcagagcaaatggaccaaacaaatattgtatttggtacgggagtatgtatgcggtttgtcaaggggaccgcagtagttcatcattcaaaacaatattttgcattattttgtactgtagatttcactgtttctatagtgaagtttgaatatgag

SEQ ID NO: 167745 - DNA, 241 bp, Zea mays
  Clone ID: MRT4577_84564C.1
aaaaaaaaaacacctttcctgcaaaaaaaagggcccactttttttaggtttaatttgaaaaaaaaaccctttacaaattcccaatcgggcaaacaatctggaataattattaatcccccccccttttctctcacaaaaaaatataaactccttttccattcgcaccccttttttttttttaaacagaaactaccttttttaaaaaaaaatatatggctttccctagcaaaatttccccatt

SEQ ID NO: 167746 - DNA, 378 bp, Zea mays
  Clone ID: MRT4577_84565C.1
gctacacaatgttcatccgagttttacgtatgggtacccaaactaactgagggtgatggagcgtatctacaatatgatctaatgaaagcagaacaagcagcacatccctcatatctacaacacaattatcattaggtcataaaacaaacacaacataatcgtccatcgatatcttgatacaagatcatgactgttgcctacaacttaatagatccaacatactttctcctaacattcaattactaggcgccgctttacagcctgaagactaagaaaaaccactctgtgcacaacttagatgcctgtcaccacatgaactacatcaatgatctcatcaaaaggatgaatgacgttacacgatcaacctcattaatagta

SEQ ID NO: 167747 - DNA, 282 bp, Zea mays
  Clone ID: MRT4577_84566C.1
gaaactcggttacacaggggggtcatttggaatcaaacaccagggcactggcgtttgtttaacacaattgtccaatcaaaggaactcactttttggcactcctactcgactactagttcaggatcatttgaaacaagccaacctaaccggatgggccatttccttaaaaggattcatcccggcagttttaatctggaacatgattttgggggcctttttgtaccgtccgccgggagcataggccatggccagggcactccaacacgcgggggaaggtttgcc

SEQ ID NO: 167748 - DNA, 349 bp, Zea mays
  unsure (1)..(349): unsure at all n locations
  Clone ID: MRT4577_84567C.1
ncaannnnatgcgtggtttatattttttttgttgggaacaacacctaaactgttttttttcggaaaattgcaaaacaaaatcaatgtggggaaatgtcccgtagtccccatgccccaattcctttttcccatggaaaaaaaacccattctgccctttcccaaaaacaatccttttttccacatgttggaccgcccccatcaaagggaccaaaccccccattagtcaacaaaaaacaagctccctttcataggggttccttaaaggaaaaaaatcacaaccctttcataaagcataactccgggggggggagtcctataaccaaaatagcttaaaccgtcaaacccccca

SEQ ID NO: 167749 - DNA, 1907 bp, Zea mays
  Clone ID: MRT4577_84568C.1
ataatatcatgatccgtggatattgctctttaggacagttggaagaggcagtgagactgctcaaaaagatgtctggtagtggtcttcaaccggatgttgtcacttacagtcttctgatacagtattattgcaagattggaagatgcgcagaagctaggagtgtctttgattcaatggttcggaagggtcaaaaacccaattctactatctatcacatcttgcttcatgggtacgccaccaaaggagctcttattgatgtgcgtgatctccttgatttgatgattcgagacggtattccgtttgaacatcgtgccttcaacatcttgatttgtgcatacgctaaacatggagcagtggataaggcaatgactgcatttacagaaatgcgacagaatggtttgaggccagatgtagtcagctacagcacggtaattcacattctttgcaagaccggcagagtggaggatgctgtgtaccatttcaatcagatggtcagtgaagggttgtctcctaacatcataagttttacctcactaatacatggtctatgttccattggtgaatggaagaaggttgaggaactggcttttgaaatgatcaataggggcatccaccctgatgccatattcatgaacacaataatggacaacctatgcaaggaaggaagggttgtggaagcacaagatttctttgatatggttatacacattggtgtgaaaccagatgttgtttcatataatacactgatagatggatattgcttcgttgggaagatggatgaatcgattaagcaacttgatcgtatggtctccattggcttgagacctgacagttggacctataattctctgcttaatggctactttaagaatggaagggttgaagatgcattagctctttacagagaaatgttcaggaaggatgtaaaattttgtgctattacatctaacataatgctgcatgggttatttcaggctggaaggattgttgctgcaagggaattatacatgaaaatggttgacagaggaacacagttgagaatcgaaacatacaacacagttcttggaggactctgtgaaaatagttgtgttgatgaagcgctgagaatgtttgaggacttgcgttcaaaagaatttgagcttgatgttcggactttcagtatagtgattaatgcattgctgaaagttggtaggattgatgaagcaaagagcctgttttcagctatggtgctccgtggtccagtgcctgatgtgataacctacagcttaatgatcaaaagtcatatagaagaaggtttgctagaggagtctgatgatctttttctatctatggagaagaatggctgtgctgccgactcacacatgctaaacatcatagttagaagactacttgaaaaaggagatgtgagaagggctggaacctaccttaccaaaattgatgagaagaacttctcccttgaagcttccaccgctgcattgctgattcctattgtttcagagaagaagtaccagaaagaagtaaagtttcttcctgaaaaataccactctttcatgcaacctagggatgattgagacctttcccggtttttctgtgctggacattagagattgctaactagacttatttcagaagatcaatttgaaaacatgaaatcttctgcataacttgggcacaaatgaagtggagagttacctggccttgaaggattttcttgtttctagagattgtctttcatatttaataaccacgcttgcatttactctgtgcctatcaaataccgtgtgcaggcttgtgtgggtagtgtttacccaatagcatccctatcggctatcgtgattgatggaaattctgaaactccattatgccttctacttttttgcgtcttcacatttcaaaaaaatatttat

SEQ ID NO: 167750 - DNA, 489 bp, Zea mays
  unsure (1)..(489): unsure at all n locations
  Clone ID: MRT4577_84569C.1
caggccaccggnnnccggaatnntcccgggtcgacgccacgccgnntccgccaactttagcagcatnntgaactctttgctgcttnnatttacagcnnagcaacaactacnntaccattcgagcccagctttagctgtatgtnngagccctgcttgccnnnttcttgacccacaacaaccagtnntgttgctcgttactaacctgtcacgcttattgcnnctaacgcnntggcacccnntcttacaacatgcaacaatttgctgcnncattcaaccagacgttgtctttgacaaactcaacagttgttctaccaaccaacccatcattggtggtgccctcttttagattgcttatgagttatagttcaataatgaagttttttggatgatgtttgtggcgtcccagaaataagaaagtacatttctagattcttaaaaaaaaaaatatatgctacaaaaactttttttttctcttaacaacattaattt

SEQ ID NO: 167751 - DNA, 153 bp, Zea mays
  Clone ID: MRT4577_8456C.1
ggcgactgtcatcgcggaacccggccaatcagccggatgtactgtgactctctgaagggtcccgtctggtgggtttcgccgaagaacttccatgtctgcggacgccatgttggctgatgttgtcgaccgtagcggctaccgtcgagtattcag

SEQ ID NO: 167752 - DNA, 354 bp, Zea mays
  Clone ID: MRT4577_84570C.1
gccagccagcaaaaatattcctaaggttctagactcagtagagctaaaactgaatacatgagatgtgacttcggcactactacatatgaggaaggagatgttaatttagaaggtcaagtagtgcctagaaagaatacatttcagtatttaggatcaatgatctagagagatggggatattaaagatgatagccatagaatcaaagcatgatggaggaagcggtgccaagcatctggcgttctatatgacaagatggtaccacagaagttaaaaggcaagttttatagaatgacaattagatctgctatgttgtatggtgcagaatgttggcttacaaaagacatcatttttagc

SEQ ID NO: 167753 - DNA, 1057 bp, Zea mays
  Clone ID: MRT4577_84571C.1
gggtacctcgaggccggccgggatccctaattatgccaaaaggcactagaagaagccagtcaatagcagagttctactactagtaggtagacggctgatctgttctgttgtttagttctcaaagccttctgtttcggcgaccatggaggatgagaggaacacccagcagcaccagggcgcggaggaccagctaggtacgccgccgatcacgtggacgtgaaggatagggggctcctggacagtcttctccgaaggaagaagcacgacgacgaccgggagactcgtcgagcgacgaggaagaggaggcgatcgatgagaacggcgacattatcaagaggaagaagaagaagatgggcctcaaggagaggagaagctcaaggagaagctgccgggccacaaggacggccaccacacggccgcaccgtccccggcgcccgcgcccgtggagacgcatgcccaccaccaggaggaagcgcacaggccgcacgtcgtcccgaccccggccccgccgcctccaccgcacgtccaccagcacgaccacggcgtcgtcgtccaggacgacgtgaagaccgggaccccgccgcatgcaccggaggaggagaagaaaggcctgctggacaagatcaaggagaagctccccggtggccacaacaagaagcctgaagccgctgccgctgccgcaccggctccgcccgtccacgcgccggcgccggcgccgcaggcggagaacgtgagcagcccggatggcaaggagaagaagggcttgctgggcaagatcatggacaagatacccggctaccacaagagctcagctgaggaagcagaccacaaggcggacgccgccggcgagcacaggaccagctcctaaggtcgcagtcgcagcgcgtgtcctggccgtggccgggccttgggcgatcagaaggtagctagcgttggcatgtgggttcggttctggtttgcttttaccaaaagtttgtttcaaggtggatcgcctggtcaaggtccgtggctttttaaggtggatcgcgtgactggcagtgagtgttgctgcttgtgt

SEQ ID NO: 167754 - DNA, 329 bp, Zea mays
  Clone ID: MRT4577_84572C.1
ctttcacactaggaagtacagtttctgtattttattgccattgacatccacgactttcaagtacccgatccaaacaaatatgaccgtctcgccccgccgccctgtccgcgagtgactgcgccgccgtctctgacaagtacgactaccccgccgtgagcccgagcagcaaccctgtgcatcgtcaagctcgccggtcgtcgccggatgttcaaaccgtaccgcggcctgacccccaaagcgcccaagccgcagcaggccgccgccgccgccgctcacaacgctgatgttccggccggcgctgagaccgccgctgcagagacgacttaccg

SEQ ID NO: 167755 - DNA, 1246 bp, Zea mays
  Clone ID: MRT4577_84573C.1
aaaggcactgaagaagccagtcaatagcgagttctactactagtagctagcctgctgatctgttctgttgtttagttcgcaaagccttctgtttcggcgaccatggaggatgagaggaacacccagcagcaccagggcggtgaggcccagcaggacgccgccgatcaggtggacgtgaaggatagggggctcctggacagccttctcggcaggaagaagcacgacgacgaccaggagaagaagaagcagacggatgagctggcgaccggcatggagaaggtcacggtgtccgagcccgagaagcacgggcacaaggaggaggagcacgaggtcgtcggcgagaagaaggagggccttctcgccaagctgcaccgcaccagttccagctccagctcgtcgagcgacgaggaagaggaggccacacggccgcgcccgtggagacgcatgcccaccaccaggaggaagcgcacaggccgcacgtcgtcccgaccccggccccgccgcctccaccgcacgtccaccagcacgaccacggcgtcgtcgtccaggacgacgtgaagaccgggaccccgccgcatgcaccggaggaggagaagaaaggcctgctggacaagatcaaggagaagctccccggtggccacaacaagaagcctgaagccgctgccgctgccgcaccggctccgcccgtccacgcgccggcgccggcgccgcaggcggagaacgtgagcagcccggatggcaaggagaagaagggcggcttgctgggcaagatcatggacaagatacccggctaccacaagagctcagctgaggaagcagaccacaaggcggacgccgccggcgagcacaggaccagctcctaaggtcgcagtcgcagcgcgtgtcctggccgtggccgggccttgggcgatcagaaggtagctagcgttggcatgtgggttcggttctggtttgcttttaccaaaagtttgtttcaaggtggatcgcctggtcaaggtccgtgtgctttttaaggtggatcgcgtgactggcagtgagtgttgctgcttgtgtaggacgtggtacgtacgggttttattttggttccaagtcaaaagtcacggtcggtctggatgttgtgtactgggtttgttgaattatgagcagctgcgcgttgtaattcggctgggctacctggatgcgttaataattgctttggtttctgcccaaaaaaaaaaaaaaaaaaaaaaaaaaaaaaaaactcgag

SEQ ID NO: 167756 - DNA, 1200 bp, Zea mays
  Clone ID: MRT4577_84574C.1
gggtaccccctcgaggtccagcgcggcgatcccttaattaagccaaaaggcactgaagccagtcaatagcgagttctagaactagtagatagcctgctgatctgttctgttgtttagttcgcaaagccttctgtttcggcgaccatggaggatgagaggaacacccagcagcaccagggcggtgaggcccagcaggacgctgccggtcaggtggaggtgaaggatagggggctcctggacagccttctcggcaggaagaagcacgacgacgaccaggagaagaagaagcagacggaggagctggcgaccggcatggagaaggtcacggtgtccgagcccgagaagcacgggcacaaggaggaggagcacgaggtcgtcggcgagaagaaggagggccttttcgccaagctgcaccgcaccagttccagctccagctcgtcgagcgacgaggaagaggaggcgatcgatgagaacggcgagattatcaagaggaagaagaagaaggtgggcctcaaggagaagatcaaggagaagctgccgggccacaaggacggccaccacacggccgcaccgtccccggcgcccgcgcccgcgcccgtggagacgcatgcccaccaccaggaggaagcgcatcacaggccgcacgtcgtcccggccccggcgcctccaccgcacgtggagacgcacgtccaccagcacgaccacggcgtcgtcgtccagaaggtcgaggacgacgtgaagaccgagaccccgccgcatgcacccggggagcaagatcatggactgcttacccggctaccacaagagctcagctgaggaagcagaccacaaggcggacgccgccggcgagcacaggaccagctcctaaggtcgcagtcgcagcgcgtgtcctggccgtggccgggccttgggcgatcagaaggtagctagcgttggcatgtgggttcggttctggtttgcttttaccaaaagtttgtttcaaggtggatcgcctggtcaaggtccgtgtgctttttaaggtggatcgcgtgactggcagtgagtgttgctgcttgtgtaggacgtggtacgtacgggttttattttggttccaagtcaaaagtcacggtcggtctggatgttgtgtactgggtttgttgaattatgagcagctgcgcgttgtaattcggcccggccccctggatgcgttaataattgctt

SEQ ID NO: 167757 - DNA, 520 bp, Zea mays
  Clone ID: MRT4577_84575C.1
gtgccaagccaagccgggatgtataaatttcgctgtctagtattcacctcaatcaatgtgttaactccaaaaaaaaaaaaaaaaaaagaaaaaaaaaaaaaaaaaaaagaaaaaaaaacaaaaaaaaaaaaaaaaaaaaaaaaaaaaaaaaaaaaaaaaaaaaaaaaaggggcggccccccttttttttttttttttttttttttttttttttggggaaaagctttaaagagcacctggcatttttaaaaccgccccaccaagcagaaaggggcagtgggggcccttttttccccacaaaaataaacctaaaaagtttgcgggtttcccaaattaaaaaaaaacacccccccccccccaatttaaaacacgatagccagacttgtccacctcctccattttgtttttcccagggtaatcccccaaaggaggctttttggggtcggcctccggagccttttccttgttaatggtgaggcccaacttgagcatccgggggatccggcttccaaagggttggg

SEQ ID NO: 167758 - DNA, 1290 bp, Zea mays
  Clone ID: MRT4577_84577C.1
aaaaggcactgaagaagccagtcaatagcgagttctactactagtagctagcctgctgatctgttctgttgtttagttcgcaaagccttctgtttcggcgaccatggaggatgagaggaacacccagcagcaccagggcggtgaggcccagcaggacgccgccgatcaggtggacgtgaaggatagggggctcctggacagccttctcggcaggaagaagcacgacgacgaccaggagaagaagaagcagacggatgagctggcgaccggcatggagaagaaggacaagaagaagaaggataagaagaagcacggcgagggccacgaccacgacggcggccacagtagcagcagcagcgacagcgactgagatctggtgtcgcagatgtcgatgctggcttataatgcagcacaggtgcaacacatgtatgcttgctggatggaggattcatgcccacgcgtccgggaagagggggcgatcgatgagaaccgcgagattatcaagaggaagaagaagaagatgggcctcaaggagaagctcaaggagaagctgccgggccacaaggacggccaccacacggccgcaccgtccccggcgcccgcgcccgtggagacgcatgcccaccaccaggaggaagcgcacaggccgcacgtcgtcccgaccccggccccgccgcctccaccgcacgtccaccagcacgaccacggcgtcgtcgtccaggacgacgtgaagaccgggaccccgccgcatgcaccggatgaggagaagaaaggcctgctggacaagatcaaggagaagctccccggtggccacaacaagaagcctgaagccgctgccgctgccgcaccggctccgccgtccacgcgccggcgccggcgccgcaggcggagaacgtgagcagcccggatggcaaggagaagaagggcttgctgggcaagatcatggacaagatacccggctaccacaagagctcagctgaggaagcagaccacaaggcggacgccgccggcgagcacaggaccagctcctaaggtcgcagtcgcagcgcgtgtcctggccgtggccgggccttgggcgatcagaagctagcgttggcatgtgtgttcggttctggattgcttttaccaaaagtttgtttcaaggtggatcgcctggtcaaggtccgtgtgctctattaaggtggatcgcgtgactctggcagtgagtgttgctgcttgtgtaggatgtggtacgtacgggctttattttggttccaagtcaaaaagtcacggtcggtctggatgttgtgt

SEQ ID NO: 167759 - DNA, 357 bp, Zea mays
  Clone ID: MRT4577_84579C.1
actggtcgaaatgttcagtgcagacatgtggcaggaatacatatgggatacaggcaagcagatcagcaaaagatgcgaccggaaacaggcgtgcgtacgtacagaaaacaaaaaaagagtgccactgctcaactggtctatgatcctaatcattcattcttctaccctacaaaattcacttgtgtccaacattaacttatctgtccgcactaaaacttatcttttgtttaatttcagattggtccttggtgctaccgatgatctctacagcccgactgttcttcaacttcatcaactggtcttccattcatccttcttcttttggtataaatatgtctttgtcttggggaaggcatg

SEQ ID NO: 167760 - DNA, 601 bp, Zea mays
  Clone ID: MRT4577_8457C.1
ccaaaaaaacacaggaaagtctgggtttctttcctttaaaaaaaaaaagggaaataatacaaaacagccacctcattggggccaagtacaggctttttgatcctcatccatgaataaacccccaaagttttacaaagcctataaacccgggatgcaactagttagcaaggatagtttttttgccccaaccagctcccatttttttcgtttttgatcagccttcctaacagaaaaacccacatgggtttgtttttatcaaaaacacagtttttccgatgtttccattttccactgagtccatgctcctgaaattaccagggagtttactgtttcccctgccgttccatgtttttgattggccagccaatttgaccagcccataaagatgcatcaacaagctgaaaggccatgctttggaaattaacttgaaatagtagcttaaaccaaaaatttggggcgaacacacccccaatcagcaaatggccaagggtttcctgctcctgatacacaaagggcagcttgcaaggggacccatgccttttttttgcagcctatcagttgtccaaagccttggatgagcgaccagccacatgaaaaactt

SEQ ID NO: 167761 - DNA, 1519 bp, Zea mays
  Clone ID: MRT4577_84580C.1
ctattgcagcagtgcttgaggattcagtgatcagcagatctgcaaggacaaaaggaccaaaggagtgagctggtttttatattttaactgatgcacctggatgctttattgagcggtgtctatgaaatgagttggatggaagggagacttcaacttgtcaactctgtcctctcgtctctgccaacatacgccatgtgcaccttacaagttccagcagcggtcttggagtacattgacacagccagacgacactgtttgtggcgtaattctgatagcaatgcaaaatttaagcctctggtggcttggaataaatgcacacgaccgaagaaaaaaggtggtctgggggtcatcaacctaagaagccagaactcgtatctccgaatgaaatttcttgacaagctctacaacaggaaacaaatcccttgggttaacctggtttggaatacatactactctgacggcaagacccctcatgcatccaagttcatgggctcgttttggtggagagacgcccttaaactttgtgatctcttcagaggaatctccaactgtaaggttggagatggtaaaactgttctattttggcatgatttatggaatgacaacatccgcagaaacaaatttccaaggcttttcaccttcgcaaaaaatcaaagcatttcggttgcttcctttttgactcaggagaacttgacagacaatttccacttaccccttactgagcaagcaaacactgagctgcaacaactcccggatgaagtgcaacaaattcgagaatcagtgattgaacctgaagagaaagactcttggagttatatttgggggaatagcacctactcgtcaactaaactttaccactacactttcaaaaatgtgaatcctccaaaaccatttctctggatcttggagtccagatgttcaaacaagcttaaagtcttcgcctggctgctgttgatggacaggctgaacaccagaaacatcctaaagagaaagaactttaaggttcaaggcgacaactacagctgtgctctttgtcaacttcaaagagaagaaactgccttccatttgttcttcaattgccctttcagccaagactgttggagacatctgaatattcagtggaaccaccaaattgacttctttgcgacctttcaacaagccagggacttgcacggttcaccattctttatggaggtctttatcatagcagcttggcaaatctggaagcaaagaaacaattttatctttgacaggggacgaccatctttcattggctagaaaaaagaattccgcgccgaagctcttctgcaagctaaccgcttttctgaagagaaatcaactcttttctcctcgcttgtgaattcctatagatagcagatagttttttccctgtgctttagttagtttccttctggtttatgtcttgggagcgactgctaatgctctttgtccgtcttcttctttatattaatatatatctaccacagcacagcaggggcttcccttgctgtacattttc

SEQ ID NO: 167762 - DNA, 410 bp, Zea mays
  Clone ID: MRT4577_84581C.1
aactcatactatgcccgtgtgctcggaacggaccacaatgcgctttccacatgctcaagagctgcggagagacaagaagaaaagcctcctcaagagcatgccgggaatatgtaaactcctcccggcgtatccttcttgagcctcggaaaaccggacgacgcacacaaccgagaagttggccaacaccaaggtcaacgagcttcgcgcccatgctgccaaactcctccagatcagcgacacatatgaggacgagttcataagcatcgagacacgatacctcactgtactagcgctctgaagataggagtgtacgacgatcgaaagcaccatcaatggaggtattgatcaccgtactatagccgcgcgtctgcaccggcatatctcgaccagacgaaaaacctgtgatagaa

SEQ ID NO: 167763 - DNA, 347 bp, Zea mays
  Clone ID: MRT4577_84582C.1
acatatcaattatatttatccacactgacattatcaaattccgctctatatacagtgatggtggggaaggtacaaggtaatgagatagcgaatacaaaatcatgaatataaaatgggtttatcaatgcccctgtaaaaagcgaaagagagagcttctcaactccaaactatagtaacactgcttgaaaggtgcatgatacttgctagtggacactgagggtatggaacgatttttcctgaaatagtgcttgcatgaacagcttgaagactcaaggcaaaggctagaaccactgaaccattgcatggcaaaacgagagaaccaaagctttacagacgagatgacaaaa

SEQ ID NO: 167764 - DNA, 789 bp, Zea mays
  Clone ID: MRT4577_84583C.1
ccggccgggatgccgtcgatctgcaatggacccgagtacggagtacatttctgttattgatactgccaagtacccaaaaggtcaatttgtcagcaacaagtggttgatcgaacgattccaggatgtggacctcactgaacgcgacaaagaattcctcagtcgtcaatcaagcaaccctgcgtactaccatagtaaatatctatcacaaggtgaactcgacatcacagggaggtcatggaccatgtccttggctgaactccaacaagccgagcttgggacgctctatccggatatcgatgcgatttcagtaaactcatatgcagggcttatctatctggatctcgatgcagtaaacccatatgtcaacaacatgctcggattgtggacaaaggaccatgaaagtctacatgaaatgtggagcgacgaacataccacgactaagtctgaactagaggatgtaacaatgattgcaagaacattctttggcggtgccgacgaactcgacatttcattgatcattctggcctttcgtaaccggcgactcaggactacggttgaatgggattcagaaaaagtagggccgatagaggtatgtcgatatgaaaacctgaggtaccaaatgtcccgactggaaaaccctggcacggaatcagtgctcgactccctgaaacgactttttataatggaagaggatttgcagtaattgtaacttaattcggaccttgacgctggcagtcttgtaactagtcaagaagatatgttgctcaactcaagactatatgctttata

SEQ ID NO: 167765 - DNA, 211 bp, Zea mays
  Clone ID: MRT4577_84584C.1
gagcaagctacaagcagctggatgcttccatctgtcagtgtacagtagccggcttgcgatcagtagaccggccggaagcggagctcacccgtctctatactatccatcatagaatagaatagatagatagatatgctactcagtaccacacgatcagtagaggtagcagcaggaagcaggactgggacgacgtagagcgccaagaccagag

SEQ ID NO: 167766 - DNA, 138 bp, Zea mays
  Clone ID: MRT4577_84585C.1
ctcacacgtcaggtccacgcatatgtcgcgacgccacggtagtgcacattgacggagtcagttagagtgggaaccctgcgagtcgcgctcgactggggtgtggtcagtctcggtcactctgctctatgctctggacct

SEQ ID NO: 167767 - DNA, 1276 bp, Zea mays
  Clone ID: MRT4577_84586C.1
agcaagcaagagatagacaagcagctccagtccaatcaagaacaacaaccgcagcaagaggagaggagaggaggctcaccggtcgcgaccaaattctcccagagacggtcggaaatgaggagccaagcgctgttcttcctcacgatcgcccttctcaccgtgctcgcgcgatccagcaacaggcaccaccaccaccaccactcccacgttcaaagcagagggcagggagcagcatcaggaggaggaggaggaggaggggagctggcgagccgggcgccggcgccggcgcgcgcgtggccgtgctgcgacagctgcggcggctgcaccaggtcggagccgcggctgtgccggtgcctggacgcggcgccccgcgggtgccacccggcctgcagggactgcgtcaagtccagcctcagcgccgacccgccggtgtaccagtgcatggaccgcgtccccgacttctgcctgcgccgctgcaccgcgcctgccgccgccgccgcgcggtgaccacgcggccgacgccgacccggcgactggtctctggttgctcttcagtcttgacccacccacccaccaccaaccgctccagcctttcgcccaccccaccgccggcgaatcgtgtcgtctgaactctgagccagctgtggattaggtttttttttgttgcgtggaaagagaggctgagagacgagggatctgtaatctgatgagcgaacaaccgaccaaaccaaccttggacgctgtcctgtccgtctgtggtgtggtgtggtgtggttgttgtcctttttcttgttcttctgttttcttttgtttttaatccgacttcacactgctctgcgctgtatggttgactcttctcgtctgtgacggagacgagcacggtgaatcgccgagattggggaaaagacgcttgccgttcacactccacagcatgagctttgagctttggacagggaacacgcggcttacgctcttcatgtcgttgccgtcaaattgtcgaagccaaccctcgaggtccaccgtccacggcttggcgttggcgtggatctttcgtctggatgttctgggaggggagcagagacgctcgtgcctattcatggctgaagatgatgcacctggacgctaatccggcggcaggtcgaggacgaggctgagaggcaggttcatccaccgcgggacacgaaggttgctctcactgatccgagccggccgacaagacaagcagtgaagcacaactgcacaagcaaagcggtcaggaagtgaagtggatgttgag

SEQ ID NO: 167768 - DNA, 437 bp, Zea mays
  Clone ID: MRT4577_84587C.1
agcttctgagcggagacattggcagcctggtggacgcaaatttgcatggtaatgtaaatcttgaggaggttgaaagagtttgcaaagttgcatgctggtgcattcaagatagcgagtttgatcgaccgaccatgaccgaggtggtgcagtttcttgagggtgtttctgagctccacatgcctccggtgccaaggctactcgatgctatcacaggaggagccaccaacaccaaaatctactcaatgctatcactggaggggtcacctacatcagtgtgacatctgtttagctgtccctcaaactaaaatataactcttcagaaaaaatttagctatcccatgagaatatagtaatttatatcatatcatatatatgtaaggacttgggcatttgtggcatgctagtgcatctcgatcaatgcaacctccaggtggtag

SEQ ID NO: 167769 - DNA, 926 bp, Zea mays
  Clone ID: MRT4577_84588C.1
cggacgcgtgggcgtcggcgtggggcaaagcaagcaagagatagacaagcagctccagtccaaccaagaacaaacaacaaccgcagcaagaggagaggaggatcaccggtcgcgaccaaattctcccagagacggtcggaaatgaggagccaagcgctgttcttcctcacgatcgcccttctcaccgtgctcgcgcgatccagcaacaggcaccaccaccaccacctcccacgttcaaagcagagggcagggagcagcatcaggaggaggaggaggaggggagctggcgagccgggggaaggcggcggcgcgcgcgtggccgtgctgcgacagctgcggcggctgcaccaggtcggagccacggctgtgccggtgcctggacgcggcgccccgcgggtgccacccggcctgcagggactgcgtcaagtccagcctcagcgccgacccgccggtgtaccagtgcatggaccgcgtccccgacttctgcctgcgccgctgcaccgcgcccgccgccgccgcgcggtgaccaggcgactggtttctgcttgctcttgagtcttgacccacccacccaccaccaaccgttccagcctttcgcccaccccaccgccggcgaatcgtgtcgtctgaactctgagccagctgtggattaggtttttttttgttgttgttgcgtggaaagagaggctgtgagagacgagggatgtgtaatctgatgagcgaacaaccgaccaaaccaaccttggacgctgtcctgtccgtctgtggtgtggtgtggtgtgttgtgttgccctttttcttgttcttctgttttcttttgtttttaatccgacttcacactgctctgcgctgtatggttgactcttctcgtctgtgaggagacgagcccggtgaatccccgagactggggaaaagacgcttgtttt

SEQ ID NO: 167770 - DNA, 941 bp, Zea mays
  Clone ID: MRT4577_84589C.1
agcagcaagcaaagcaagcaagagatagacaagcagctccagtccaaccaagaacaaacaacaaccgcagcaagaggagaggaggctcaccggtcgcgaccaaattctcccagagacggtcggaaatgaggagccaagcgctgttcttcctcacgatcgcccttctcaccgtgctcgcgcgatccagcaacaggcaccaccaccaccactcccacgttcaaagcagagggcagggagcagcatcaggaggaggaggaggaggaggggagctggcgagccgggggaaggcgccggcggcggcgccggcgcgcgcgtggccgtgctgcgacagctgcggcggctgcaccaggtcggagccgcggcggtgccgatgcctggacgcggcgccccgcgggtgccacccggcctgcagggactgcgtcaagtccagcctcagcgccgacccgccggtgtaccagtgcatggaccgcgtccccgacttctgcctgcgccgctgcaccgcgcccgccgccgccgccgcgcggtgaccacgcggtcgacccggcgactggtttctgcttgctcttgagtcttgacccacccaccaccaaccgctccagcctttcgcccaccccaccgctggcgaatcgtgtcgtctgaactctgagccagctgtggattaggttttttttgttgcgtggaaagagaggctgagagacgagggatctgtaatctgatgagcgaacaaccgaccaaaccaaccttggacgctgtcctgtccgtctgtggtgtggtgtggtgtggtgtgttgtcctttttcttgttcttctgttttcttttgtttttaatccgacttcacactgctctgcgctgtatggttggctcttctcgtctgtgaggagacgagcacggtgaatcgccgagactggggaaaagacgcttgcttttcttgcttgccgtcc

SEQ ID NO: 167771 - DNA, 644 bp, Zea mays
  Clone ID: MRT4577_8458C.1
ggtagggtgtccatagctgttgctgattgtgcttagatttttatgtgaattgtacaaacgttgtattgtatagttggctgtgatggtatgcatatgcctactatcaccaccgctctaccccatatgtcacattaattacctaaactgccaccgaatattggtttacgttggataggaatgacatcatgtagtttacatgcttctatcaaattagtgtggctgcctttcttccagggatcttaattagttttcatatttagttaagttgtagttccccttatttctatcaagaatagccttccaataaggcagtaacacaaatgctacatggcatgtcctgtttgaagtcagaatggtgcatcatgctgcaaatcttctggtatcagatttttttttcaagatatcaatcatcaatcagttctagataggcttgtatgtttcaactttaacaaaaaaatttgatggactatgtaaataaatatttgaatgatcatgaactcacggtataaaacaattgtgggtatcattgtttctaggtcgttatttggctggttactttcgaatactattagtttgggaacctatcatgacacggtaccggctggacatcggtaacttgtcagttctggtatttatggctattc

SEQ ID NO: 167772 - DNA, 927 bp, Zea mays
  Clone ID: MRT4577_84590C.1
ggccgcgaacagcagcaagcaaagcaagcaagagatagacaagcagctccagtccaaccgaaccgcagctagaggagaggaggctcaccggtcgcgaccaaattctcccagagacggtcggaaatgaggagccaagcgctgttcttcctcacgatcgcccttctcaccgtgctcgcgcgatccagcaacaggcaccaccaccaccaccactcccacgttcaaagcagagggcacggagcagcatcaggaggaggaggaggaggaggaggaggggagctggcgagccgggggaaggcggcggcgccggcgccggcgcgcgcgtggccgtgctgcgacagctgcggcggctgcaccaggtcggagccgcggcggtgccggtgcctggacgcggcgccccgcgggtgccacccggcctgcagggactgcgtcaagtccagcctcagcgccgacccgccggtgtaccagtgcatggaccgcgtccccgacttctgcctgcgccgctgcaccgcgcccgccgccgccgccgcgcggtgaccacgcggtcgacccggcgactggtttctgcttgctcttgagtcttgacccacccaccaccaaccgctccagcctttcgcccaccccaccgctggcgaatcgtgtcgtctgaactctgagccagctgtggattaggttttttttgttgcgtggaaagggaggctgagagacgagggatctgtaatctgatgagcgaacaaccgaccaaaccaaccttggacgctgtccgtctgtggtgtggtgtggtgtgttgtcctttctcttgttcttctgttttcttttgtttttaatccgacttcacactgctctgcgctgtatggttgactcttctcgtctgtgaggagacgagcacggtgaatcgccgagactggggaaaagacgcttgcttttctt

SEQ ID NO: 167773 - DNA, 248 bp, Zea mays
  unsure (1)..(248): unsure at all n locations
  Clone ID: MRT4577_84591C.1
gaaaagcgaaagagagccacaccaaagcaggaagcaaacggagcaacaaccaccccagaaggcgggnggaaacagcagcgaaggcgaagagacgaagaaagagcgggcgcgacgacgcacgggccaaggaacagaaacagaagaacagaggggagagcggcacaaacggagggaacggcaccgaaagcgacgggaaaagagagaaccgaaacacacaagccgggaggccaggacagagacacagaagg

SEQ ID NO: 167774 - DNA, 1152 bp, Zea mays
  unsure (1)..(1152): unsure at all n locations
  Clone ID: MRT4577_84592C.1
gcttatactcccacccgtcagcgtcggcgtatgcccccgccggctccttcctctcgccgtcgcgagaccgagcagccagtagcagcaggagtgggtgctccgtgccccgccatccaacaccaaaagtggaacccctcacacccacgcgaggtggtcgacactcgacggagagccgcaaaggaggaggagctggcggtggcggaatccagcaggccgcccatgtcgagcggcgcggacggatcggatccgatcacgggccttggcccgtcgacgatcccagagccgccggaccgtgagccgcctcatctacagtctccgtcgccggcggcgcagcaggaggtggcggcgtcgcaagccgagacgccggtgccagcggtgaccatcgtgatctcgcggccaggggaggaggttcagacgcctgatgcaatgggtggctccccggcgtgctccacgcaggccggtgacggcaaggctacagccacctcggtttcgttgaccgcttcggcggctgccaaggaggccgagttggcaaggtccgacagcttcggcaactacgagcaatgcaggtattcagtcggtgtgggattccctgcgcgcaagctcagggtattttagtgaattgcgagttggaaaggggacgagggtgtgttctgcttgggagtgttccaattttgtatgggtaccttgttaggtttagtagttgcgcgttttatccatctatgaatcacctgctatggctttgggtgctccctatcttgggggcgttgcttcctcatgcggtgtagtgattgtaggtgtatcaacaaatttccatttatgatgtactgattcatttcttgaagtcaccctagaacatggatcatgtcaactggactgtttactttagctgcccttttctgtctgtaactacaccaatagatttttgcctgcagttgngtggaattgttgttcatcacatataacatgcgagcaataagtttgtgaacacgttcattgtcagtttatctgcatcttcattagtattgactttgcccgtgcttgtgacatgtgcttatttagagccatatattagtgcaattaggctgtcacagagtgcaaatgggactacatagcattcctgttagctatgatattttaagggtctcgagggta

SEQ ID NO: 167775 - DNA, 294 bp, Zea mays
  unsure (1)..(294): unsure at all n locations
  Clone ID: MRT4577_84593C.1
attngggtcaatttctttttttaatacccaaaaccacaggggcggctgccctttatgctggtgggtggccgcatccacccatgagcatcactcggtctcgcatgcacaacaacccaactatatcgacaacctctcggcttgctaacatctatcaacaccctgatatgataactcctgcattccatgctcaaggccaacctattgatcctgacacgatgcaagaacattttcaggacttctatgacgacatctatgaacagttaggcaaccgtcgtgagaacgagaatctcaatg

SEQ ID NO: 167776 - DNA, 263 bp, Zea mays
  Clone ID: MRT4577_84594C.1
attcattctttatcaccgtcacaacctgctcgttctctcaatgacgctggcctttgttctgctaccacatcacttatcacccaagccgacactacattaatcacaccacattcttcgcctccgacaccctcttcaaagaagactcactttgttgccctctaagacaaggatcgcattttcaccaacctctattatctacatgaccctttcctgatgggcgccatgaacagagcatactgttataacaccttttttttggtgat

SEQ ID NO: 167777 - DNA, 504 bp, Zea mays
  Clone ID: MRT4577_84595C.1
ccaccaacaaaactttaattctaagccacccggtttttacaaaactaaaatccaaaaaatccccgacctcctcaaatccaaaaaatccccaaaccccagtaacgattcaccttaaaaaagggctagcaaaaggttttgggtccaaacaaaaaaacccaccccagccttgcttttttgggaaaaacctcttaaaaaaactttataaggatgggcgttcttggcctttgcgggccttaaatgggcaaaaaaggggcagaaactacgggagaaaagccggcattattaaaaacacccttaacaaggcccgaaaaaaaagctccacagtgaaaggcccccatgttttttggcacaaaaataaaacggtaaacaaaaagccccttttcactgacaaggaattcacccccgggttctgtccccttttaaagggagtaagccacctttccaaacaacattttccaaacagtactggggataaatgataaaagcccaaaagtcgggtctctc

SEQ ID NO: 167778 - DNA, 395 bp, Zea mays
  Clone ID: MRT4577_84596C.1
gggaagagtcccagatgggttatgcaagtcccgggtcagggcattacttatggggatattgtttcttttttctaaaaaaaaagggtctagacaatcctggttttgaacattattacaacaacgaaaccgtatttttggtccatatatttattggcacttgacaaaaacatgacccacttattcaaaaagaggaacttaccgaagctgtcctgctgctgcacaatacaaaacctcggtgggtttttgaactatgagttccagaacgtaatatccaggaaatgctccctgcatgcttgtttgaaaaggaccccctattattcgtttaaaaaccttctcagaggcctcatacggtctttttaatgtcctgggaggtgtgcgcccagcttgtgaacccc

SEQ ID NO: 167779 - DNA, 366 bp, Zea mays
  Clone ID: MRT4577_84597C.1
cccacgcgttcgcggcaagcaaccacggacggagctcgttacgtcctcctcctcccgtctataaaatcccgtctttttctttctccatatataggggccatcagatccaagaagaggtaagagcaccaaggacctttggctcccgttcaggatccacatttttccgagcgagtttttggttggccttttcctcttcggaccaccttcaaggctctaggtgtatattgccaatcgtaccaataaagttttcatgtctgatctcgactattataatccaaactgacttctatcccttcagtgaggccaatgctgtggtactctggtgcagcagcaggtcaataggacacgttaactggcgcattcaga

SEQ ID NO: 167780 - DNA, 462 bp, Zea mays
  Clone ID: MRT4577_84598C.1
agcagggagatagtaggggtaggatttttaaacaccactctatttctgagtttccaaaccatccaagcccccagaataagcaaggagtccaacccttttctattcaaaccggacacaatggtagaaactcttttccaccacagcatatagtttgtgtcactctggataggcgataagctgtgaataccaaactttcgaaggatgttataccagcccaccctagaaaaagacacaagacaccagcaagtggttaatggtctctggctcttgatcacaaagagggcacctgggaggggtgaatcaagccttttctttccaatctgtcagcagtccaacatctttcttgcgccaccagccataaaaagaatttgcatttgggtggaggcctagatttccagattcttttatggggaccaaagggaattgaaccagttaaaagacccttgtaagctgagcgtgcaa

SEQ ID NO: 167781 - DNA, 883 bp, Zea mays
  Clone ID: MRT4577_84599C.1
cggactagaagaaaagaaacgccaccaaatccaatctcgagcccccctctcccgtccgcccgtcccaacccgatccgatctcccccctcctccgtcgccatgggccgcaagttcttcgtcggcggcaactggaaatgcaatggaactgtcgaacaggtagagagtatcgtcaatactctgaacgctggacagatcgcctctacggatgttgtcgaggttgtcgtcagcccgccctatgtcttccttcccaccgtcaagggtaagctgcgcccagagatccaagttgctgctcagaactgctgggtgaagaagggcggtgctttcaccggtgaagtcagtgctgagatgcttgtcaacctcggcgttccctgggtcatccttggacactctgaaaggaggagcttgatgggagaatcaagcgagtttgttggagagaaggttgcatatgcactcgctcagggcttgaaggtcattgcatgtgttggtgagactcttgagcagcgagaagctggatcaaccatggcagttgtcgctgaacagacaaaagcaattgctggcaagatcaaggactggaccaacgtggttgtcgcttatgaaccagtgtgggccattggcaccggtaaagttgcgacaccggctcaggcgcaggaagtccatgccaatctgagggactggctcaagaccaatgtgagccccgaggttgctgaatccacgcggatcatctatggaggatctgtaactggcgcaagctgcaaggagttggccgcgcagcccgacgtcgatggtttcctcgttggtggagcttccttgaagcctgagttcatcgacatcatcaacgccgccaccgtgaagtctgcctaagcaagatctcgacgtggctcct

SEQ ID NO: 167782 - DNA, 366 bp, Zea mays
  unsure (1)..(366): unsure at all n locations
  Clone ID: MRT4577_8459C.1
ccgggnnctacagctnnttaattttgcagnagcgacccaccagtccacggtccacgcgcgggnaccgcattcacatacaccgcgnggtacccttcgttcgcttctcaagnccttatagcgccccnatcgcacccctttgcgcggagctaggnnngtcagcagnnttcgttcgcttctgttccgcgcagggcgnngcggcagcgtaagctatgtgctacgtaccgaccgtaggtaccgtaggaggagcgaggaggatnnagatgtcgagcccgaaggggtcgtccgtcgtcattctgtcgcacgtgcaaccatctctcgtaggacgagaatgaaactgagnnctcgtcttccacagctttccaggcc

SEQ ID NO: 167783 - DNA, 3339 bp, Zea mays
  Clone ID: MRT4577_845C.1
aattcggcactctgctctagccttcacgactaaatccaccaccactcccgcacacctcacctgcccgcgtcgcctcctcccctgtcctccgcgcgcgttgggcgggcagccagctcccccaccaaaccctaatcactccggcgccgcgccgcgccgcgcctcgcggccctgcctcgatccgctccagcggccgcccgccgaggcggctgtgcggtggttgcgcttgcgctttcgcgcgcaggtccccgtgggtctctgcgcgcagcgggacccgtccacggcggcgaggcgagggcttcaaggcgggcgcaggcggaggggcggaattgctcgggcgatgacacggaggcttgcggccgcggcgtcgcgtccgatgccgtgaatgggagtggcggggcgctgcgggcggcggctgcgtacatggaggccggggcaccgccccgcggctggcgctggggggtgctctggctcgtcagcgtcgagattgtgttggttctagtctgcactcgcggagctggtgcggattctggtgaaagcaaaggatcgtttctgcaagactctgaagctggagaaaaggatgtctaccttagccactcctgcatccacgacgagatactacatcaacggcgacgagctgggaggaaggagtactctgtcatgccacaagtgtaccatgagtctcgggaggatgcggaacgcgtaagaggacggcacttgttgggcatgtcatcttggcgtgctccgcacgagaatgccaggaagccaatacgaatatacctcaattatgatgccgtcggccattcgcccgaccgtgattgtaaaaatgttggcgacatcgtgaagcttggcgaacctcctgtatcatcagcaccaggaacacctatatgcgatcctcatggtgatccaccactggtgggagactgctggtacaattgcacccttgaggacatagctgggaaagacaagaggcaacgtctccgtaaggcactggggcaaacagtagagtggtttagaaaagctctagctgttgaacctgtcaaggggaacctacggctcagtgggtactcagcttgtggtcaggatggaggtgtacaactacctcatgcgtatgttgaagatggtgttgctaatgctgatttagtcctcttagtaacaactagaccaacaacaggtaacacccttgcatgggctgtggcctgtgaacgtgaccagtggggtcgggccattgcaggacatgttaatgtggcccctcgtcatttgacagctgaagctgaaacattactttcagctactctaatacacgaggttatgcatgttctagggtttgatcctcatgccttcacacattttcgtgatgaaaggaaaaggagacgtggtcaggttactgctcaaagtttggataaaaagcttggaagaatggttactcgtgttgtcttaccacgagttgtcatgcacgcgagacatcattatggagcattttcccaaaacttcactgggttagaattggaagacgggggaggccggggcacctcaggttcacattgggagaagaggctcttaatgaatgagatcatgactgggtcagtggatacgagatcagtggtttcaagaatgactttagcattactggaggacagtggatggtatcaagctaattacagcatggctgaacatttagattggggtcagaatcagggaacagagtttgttatatctccttgcaactcatggaaaggggcataccattgcaatacaactcaactatcaggatgcacatataatagggaggcagaaggttactgccctatagtaaactatagtggggacttgcccaagtgggctcaatattttccccaagccaataaaggtggtcaatcttcattagcagactactgcacatactatgttgcttattctgatggttcatgcactgatgtaaatagtgcacgggcgcctgacagaatgttaggtgaagtgcgaggaagtaattcgaggtgcatggcctcaacactagtgcgaactgggtttgtacggggatctatgacccaaggaaatggctgttatcagcaccgctgcacgaacaactcactagaggttgctgttgatgggatctggaagtcatgtccgcaatctggtgggcctgttcagtttccaggattcaacggggaattaatttgtccgatgtatcatgagttgtgtactactgtaccagttccaatgactggccaatgtccaaagtcatgcagttttaacggtgactgcattgatggaacctgtcactgctttcctggttttcatggccatgactgcagcagaagatcttgcccagacaagtgcagtaaccatggtacatgcaaagctaatgggatctgtgaatgtcaaagtggatggacagggattgactgctctacagattatgcaggctacacatgtcagaagggttctgcaatactgcccagtctgtcaatgtgtcatgatgtacttgttagagattcagatgggcagcattgtgcgccaagtgagctcagtatactacagcagcttgaaactgtagttctcgtgccaaattacaatagattgatgccaagtgggcggaccttccttaacttcttcaacaatgccaactgtgcagcagctgcaaagcggctagcctgctggatctcaattcaacggtgtgacgaggatggggacaacaggctccgggtatgctactctgcatgcgaattgtacaatacagcttgtggagcgggtctggattgttcagaccagaccctttttagcaaaagggaagaagaagagaagggtgttccgtgcacaggatatggcgagaagaagtctttctggctataacatctgtgaagcttcttccgttatggctctggtagaagctcagcgtttgtgtaaagtattttccaccccaaattattttctcttttttccccatttcatccactacttcccaattgtaggatacgggaagtaagcgtccgtttcacctaggcacccgaagatgggctgccctggtgtacaagctatgttggagtgggctctttgttagaaggttagtctgacatgaaaaggggagtggacctggtggtgaaagttggatggtagatttttcgttttcaccgcttaagaattagtgattggaatgaatgtgtaaagattgatgtgtgttgtacacactctttacagaatcatttcaatgggagcccgtgttgtgttctttgctccatgcggccatgccccttgccctatttcttaagctgtcgttggcttttatgatatttgattgacgcatccaaggccaacacagtggcagtggcttcgcttatgttc

SEQ ID NO: 167784 - DNA, 672 bp, Zea mays
  Clone ID: MRT4577_84600C.1
attgcgaaccgcgtgcgaagacggcacaattcatcagaagacttcccctccctcacacagcaagaggaaaatcccgagccgtatgctcccgaactcgtacgatgatcaccagctgctgcgcaacacccaactctaggagctctgcgcccgtcgcgcatctgctcctactgggcgattgcgttgtcatctcgcgacaacttccccgacgtaaagtctgaggagaccgctggtacgatcacggactttgatgatcctgcaacacttgcgccaactgcatgtttctgctggaggaccaatacatggccgatacaggtgattctggaggtgcaattccacgaaataaagccactgtacgtcttactatcaacaaaactggcatgaccttgagtatcagtatctatgatgagacaatgactccttcgccatgcaatatggggatgcagaggatcacctgttctgtgatcgaacacccgttctaaggtcgccataatgctattttgtcattgcgacttagtatgacctctctgaactgtatatgtggtcttgagcatgtgcttggcgtatagcatgcaatgaataatgtatcttctagatgagatgatgacaatgttggtgacgaaatggaatatctgcttatgattgacatctcctcgtatgtccaactcaggtgat

SEQ ID NO: 167785 - DNA, 1077 bp, Zea mays
  Clone ID: MRT4577_84601C.1
tgttgtcgcgtggggcatctgcagttcttgtcaatgaaactcgcaactgttaaccccgagcttggctttgacattgagcagatcatatccaaacaagatcaagcggccttactggcccatttaaccaaggaatcatgcagccataattgatgtgcaccattgccaatcccgttgatgttttgcatggagctattcacgaggcgtcaacaatgaaccattattgatttgtccactgttatgttcgttgctggtgcaatcatgggatacattatgttcactgaatctacactcccagttcacactgaacttacccctaaatcttgtggcttccaagattgcagtctagactacggtgatgaatccaataaccaaatatccttggacttttattgtagctttttgtgtgcatttgttccgatacttaacaattaacattatatgacaccatagtttctctaatcacatgtaactccatctagccatctaggtttgtcctaagtcaaacatatcttttaattttgattagaaatatctataaaaaataattgtcttaaataagcagagttatttggttttagtaatgaatttagcaatgccaatgctatttttatcgttctatataaattttagatattcatggtcaaacttaaaaatgtttgacttggacaaatatagatagacctacacatgcattgtgattttaggaagtcctacaattctcctccccaaagtctgctatcaacttctaacagttagtccagttttcatgaacaaatttagttttaatcattctatgttgtgccaaccgccagcaactaataatcagggctgggtcatatcatcatatcatagtagattgtatagctttcttccctgtgcatgcttactggttactagatgaaaaaggtcgtgttacgttatggcgcactcctctcctttgaataggacatgctttcacactctcaattcggcatatccttctagagactagctcacactccaatggtcttctaaatgaatagcacactatagtcaagagtatgacttaccaaattcattattggttccaagcatctt

SEQ ID NO: 167786 - DNA, 386 bp, Zea mays
  unsure (1)..(386): unsure at all n locations
  Clone ID: MRT4577_84602C.1
cccgggggcngtaccgggcctgattcccggtcaccccctgtgatcacttatcactccaaccgcagggaacctgtgaaacaccgggggggtgttaatcnttgccctcgctctcctgggtctcgctgcgagcgccacctccacgcatacaagcggcgggtggggctgccagccaccgccgccgggtcatctaccggcgccggggcatctgccacctccgggtcacctgccacctcctgggcatctcccaccggcgggccacctgccggcggcgggccacctggcaccggcggtccatgtgccggcgccgggtcatctgccggccgcaccatgccactaccctactcaacccgcccgggctcaggcttatccccaggcacacccatgcc

SEQ ID NO: 167787 - DNA, 522 bp, Zea mays
  unsure (1)..(522): unsure at all n locations
  Clone ID: MRT4577_84603C.1
gtttctttaagatcttgttcctgaatgcagtaaggatcaagcggtcttactggcccatttaaccaaggaatcatgcagccataattgatgtgcaccattgccaatcccgttgatgttttgcatggagctattcacgaggcgtcaacaatgaaccattattgatttgtccactgttatgttcgttgctggtgcaatcatgggatacattatgttcactgaatctacactcccagttcacactgaacttacccctaaatcttgtggcttccaagattgcagtctagactacggtgatgaatccaataaccaaatatccttggacttttattgtagctttttgtgtgcatttgttccgatacttaacaattaacattatatgacaccatagtttctctaatcacatgtaacttcatctagccatctaggtttgttctaagtcaaacatatccttttatntttgattagaaatatctataaaacataatcgccttaattagcagagttatttggtttagtatgaat

SEQ ID NO: 167788 - DNA, 2817 bp, Zea mays
  Clone ID: MRT4577_84604C.1
cggcaaagcgaggccaagccactaacagccaaagccttgcagaaagactagggagaaagaagataagtgagaggatgaagcttcttcaagatcttgttcctgaatgcagtaagatcattggcaaggcaatcatgctcgatgagattatcaactatgtgcagtcattgcaacgacaagtcgagatcatatccaaacaagtaaagccacccactcgatcaccatatctccctctaggatcaagcggccttactggcccatttaaccaaggaatcatgcagccataattgatgtgcaccattgccaatcccgttgatgttttgcatggagctattcacgaggcgtcaacaatgaaccattattgatttgtccactgttatgttcgttgctggtgcaatcatgggatacattatgttcactgaacctacgcgcccagttcaaacggaacttacacctctatctcgtggcttccaagattgcgggctagtctacggtaattgttcatttctggactctagatagaaaagaaaattatggcctctagctcaagtcacataatgcatataatgaaatataatcaagttcaatcacaatatgaatacttaaatgcttttatgtggcaagttatattcttctgatattgtgctttttcggtgcaggtgatgaatccaataaccaaatatccttggacttttattgtagctttttgtgtgcatttgttccgatacttaacaattaacattatatgacaccatagtttctctaatcacatgtaactccatctagccatctaggtttgtcctaagtcaaacatatcttttaattttgattagaaatatctataaaaaataattgtcttaaataagcagagttatttggttttagtaatgaatttagcaatgccaatgctatttttatcgttctatataaattttagatattcatggtcaaacttaaaaatgtttgacttggacaaatatagatagacctacacatgcattgtgattttaggaagtcctacaattctcctccccaaagtctgctatcaacttctaacagttagtccagttttcatgaacaaatttagttttaatcattctatgttgtgccaaccgccagcaactaataatcagagctgggtcatatcatcatatcatagtagattgtatagctttcttccctgtgcatgcttactggttactagatgaaaaaggtcgtgttacgttatggcgcactcctctcctttgaataggacatgctttcacactctcaattcggcatatccttctagagactagctgtgagttgggtcctaaatgtttcttccatgttcaattcgaatggcattgttgtgttaattagccgtcctgttttgtatttttttcctacaagttatagtggttacattaatgactaaatcaagatcttgacccactttattgatgacacccttttttcttcttattgcttctcctatcgtctctgagtttgtcattccattcaaacacgaaatttgtgtcagtatagatgccatggaaattttggtttagcttgagtattttgtagatacttcattcttgagtattcttgagtttgccttgttataaattgcagcacactccaatggtcttctaaatgaatagcacactatagtcaagagtatgacttaccaaattcattattggttccaagcatcttgaaagagaagtccatcgtctctcttactgtcatctcagcatggctaacagaagcacgcagcgacaagattaccccacatgttgtatcatggtttactagctagagaggctactcaagatgaggaatttgaagttatgtatggtgaggacgatgatgaagacaaagatgacgaggatgatgatgattatgatacaaagaccaagggggctactggagggggaagggcagcagcgaacgacctgttgagtgcaagcaggagtgagtgctgcacattgaatattggcatgcattggttgtggagcaattagtctggttctacttgatgcaaggtcattgagttattgaagtgatattttgtcgaatattttatatgccattgcaaagcacgggcatctaactagtctttcttatatatgtacactacaatacataatcatttatgccattgtttactacaaatatatatattaggcaactcttgaactggttgcaaggaatatttccactaaaaaaaaaaaaaaaaaaaaaaaaaagggggggccgcagataccttccatgtgggaaggacttcagagcatgcctcagatgaacttcaaccctggtgtggcagctgatagcggcaccaacaactctggctccatgaagatcgaacagtgagctgctgtatagtagcttcgaaattgttgtgtgaatcactgaatcatcgtaaagcgctctcgagatgaagctttttttgtatagctggaggcctgaccatttatgctggattcctgcggttgctcccatactgtgcggcacattgtttatggtatggcatatggatcgtgtacagctggagctgaagactgattccactgtaaatttctgttgtgctttggcctgcgaaaattgggatggaaacctagtagcatccacgaaattcaaggacagaagcttgttgggattgggacttgggaccacgtgctgaatactgatgggcctaaacgtactagacgagtactaatagaatcgtagttgtaggtaaaaaaatgcagagtttgaaaccagtggttttgtcagaaattccatggagtttgctatatttatttatgatatcaaaacagaaactgaatggccgctgac

SEQ ID NO: 167789 - DNA, 270 bp, Zea mays
  Clone ID: MRT4577_84605C.1
agcattctaagaagcgcagatcaatccattactatcatccactaaaaagagccggaagcaaatacatccaagaagaaaagagagtacacacattcacactttaaggtccaggctccacaccttgggttttttttccggagagcggcgagtaacctacgtcctacatgatttttgtttatacaaactcccggtacatatgcctcacatttctacgcggccgcatacctatgttagcgtcccgacttcacgagaagagaaacgacccttggc

SEQ ID NO: 167790 - DNA, 840 bp, Zea mays
  unsure (1)..(840): unsure at all n locations
  Clone ID: MRT4577_84606C.1
ggggaaaaaaaataaaaaaaaaaaaaaatgctgatgcagtacctgttattctgatttctgattcaaggagagaaccctctgctggaagagtatcaccattcagaatccagtcaagatatgctgagctgcggaagctagcccatgccaaaattgacagaggaagtaaaactactggaacagatgacttcaattgccaaatatttcttccccgtaaaaatggtgtttttcaaacaataagttctgaagaaacccgtaaagatgtaaaatgtggtccagttgacaggacggaattttcaaattcatcagaaccaaatgcaagtgtccgcagtgagaattatgtttctagaatgcgcaaaccacgagataactgctatattgaagtttcaagaaaagggagagcaaggtcaagtgtctgtaattgggaagggcgggaccagtcccctagtcacgaagaaccgatgacagccagttcttcgctggctccaacaggccgtccaaattcatctatctacatgaaacctttcctcttctgcagagaggaagcagtcaagcttctgaaactccaatcatagctaatgatgaagatgttatatctcttttcatggaacaacatgagttatttctaagctcgacaaagtctcggctgacaaaattgcagatcattcatcaaatgtgggaaagaaatgacatcagggatgtactctctgcgatggaaaggatgggtgatcatgctgtctgtgctgatatggctagcgttctgatggaaaaaatgatgtaatcacacttgatttatgtacctctatcctacctgccgncactgatcttctggagagtaaaatg

SEQ ID NO: 167791 - DNA, 142 bp, Zea mays
  Clone ID: MRT4577_84607C.1
gggggtcccttctctcaaaaatcattttataacaagccaaactaacaagcctgagaagggtcttttcaataagggggcgccctacacccataattctaccgaagaaagaacgctcctaggcgatgacagggattactactgc

SEQ ID NO: 167792 - DNA, 1884 bp, Zea mays
  Clone ID: MRT4577_84608C.1
gccggccggggaaaaaaaataaaaagagcaaagaagggaccgccgaccgccggatacctgacgctggcgggcggcggcggcggcgaagacgtccgttgcggctgcgacgaatccaagtaaccggggcccttgccgaactggcaggccagataggtcccccgattcaagcggagacggttcactgatttcccttccccgccgccaattcgatcgggctcgcggctcgccgtctctgctctccccaaccggcaccaagccagccaatggcgctcgaggaggcgcagcggccactgtccgccggcgtggcctggcgcctaaccggaagctggctaggctccgaactggttcgaagcttcaagccgatccgcatctatgatctatccagtacattggaggggaaataccagaagcttggagctctgctccgactttcttgatcggcttgccaactggcttgtattcatcaccgaaaaccatttcttgtcttgagtgtattggaggataagaaggtgaacaagaagctgacagccaagctgaccctatactcaggatgtgttgtgccttctggtggtgaaatcgtctctttaagcaactgaactgctttaagtataacagaagagctcagtgatttaccctttagaaaatcctctaccttgctagctctgatggcatggtcagctccataagcaccgaacaccaagcatatatcctccatgatgttcttccctgaagctgcatcagttgaagtccttgccaagagagcagcattgacatatgaagcagcattgccaaattctccgggccgaggcgctgcccggaatgtctcaaaggtgatgccatctcaatcccactttgggatgaatatgctcatcagcagggtcctagaatcacatggagactgctgcaagaactcctccaaagtaaggcacaacctttttggaagccgtctggattgtgactgttgtacctgcagccagtagcacagttgctatgtctgactcgaatggcaacctctgcgccatgattatgttgccacctatggttgttgtgttccgaacaaatggcgaagccactttgcttaggtgattggcaatttttctgaagaccagatttccatctgacaacacctcaatggttgtagcctgtagagatggacacaaccgatccaagctcaattcccttaacgctgctgttgatgactgatagctctggtattcctttgatgtcaatgtacttgtcatagaggtcctgatccatgtgtaagggagttcactgccactccccgctcattttttctaaaggagaaatatccatcttcttgttgttttgtaccgttggatactttagcatcattctcatactactaggagtgtaggtaaggagtccacacatgagtttgtaaaccccatgtgtaagggagttcaccaccgtgatggccctcaccgcatgggcagctcctttgtcaccgcccttctaccttatctaggccctgcttacattccccgtattttgttcttgaaaagtccttgccaagagagcagcataaatataattaaagccattcccacccggccgaggcgctgcccggaatgtctcaaaggtgatgccatctcaatcccactttgggatgaatatgctgatcagcagggtcctagaatcacatggagactgctgcaagaactcctccaaagtaaggcacaacctttttggaagccgtctggattgtgactgttgtacctgcagccagtagcacagttgctatgtctgactcgaatggcaacctctgcgccatgattatgttgccacctaaaaaaaaaaaaaaaaaaaaaaaaaaaaaaaaaaaaaaaaaaaaaaaaaaaaaaaaaaaaaaaaaaaaaaaaaaac

SEQ ID NO: 167793 - DNA, 283 bp, Zea mays
  Clone ID: MRT4577_84609C.1
attatcatgaaaactgttttaagaactgccctcaaaaacacataagaggtccatacacaatccaacaccattcctgctattatacacgaaacatacaagcaaaaacacacaacctcaaaaaaaatctctaataattctaccatcaactaaatcatttcttcatgcactatcatcatgctgactcccctaatcgctagaaccatcattagcgtcaaaactctatccagactaattgctaatgccatctaatttgaagcgcaaatctccatctcttcttccaaca

SEQ ID NO: 167794 - DNA, 1540 bp, Zea mays
  Clone ID: MRT4577_8460C.1
cggcaatggagcacgacgtcgcgcacggtgcaggcggcgctgtccccgcaggcgaagaagcgttcgaggtagctcatcagttgctggcgcaggaggagttcagcgactcggagtccatccagatctccgacctgaagcgccgcatgtggagggaccagatgctgctcaacaggctggagtgccgcgcggacgtcttcagtgccgccggcggggcggggccgtcttcgtccaggccgctcgggccaccgaccgcgggcgcgcacggggaggacgaggaggaggaggaggaggtggaggcccccgaggtgcggtgccggcgcaaggcgatgctgcgcgcgcaggacggcgtcctccgccacatgctcaagatgatggaggcgtgcaacgcgcgcgggttcgtgtacggcgtcatcaacgaggccggcgagcccatgttgggctcctccgacagcctgcgcggctggtggaaggacaacgtcagcttcgaccgggccgggcccatggcgctcgtcacggcgcccaccggcgagagcccgccggggcccgcgtcctgcctgcaccgcctccaggacatccaggacagcacgctggggtccgtgctctcggcgctcatccagcactgcgtgccgccgcagcggagcttcccgctggagcgcgggctggcgccgccgtggtggccgaccgggaaggaggcctggtggggctcccagggcgaggtccaggcgcaccagggcgcgccgccgtaccggaagccgcacgacctcaagaaggcgtggaagatctcgctgctgagctcggtgatcaagcacatgagcccgcgcttcgaccagatgcgcaagctcgtgtggcagtccaagcgcctgcagcagaggatgagcgccaaggagacggagacgtggtccaagatcctccgccaggaggagacgctcagccgacgcctcaagagctcgctcaggatcacgccccttgacggcgacgacgatgacgacatggaccgagacggcctggaggacgtagtccgcggtgtgcaggacaagcgcaagcgcgagctgataagtagcagcagcggagggcgcgccgagctggtggcggatgagaacccgatcgacgaactcctgaagcgtcactacaacctcgtgcctgatcagcacgggatcgtcgtcgcgccggagaacgatgcgggagagctcgacctgctgtacggtgtcgtcgacgacgtgccgccggacgtgctcttcgatctcatcgcgagctgttcgggagccgacgacgcgttccgcctgatcctggactgagcagtggctcagcttgttggtccaggcgtcgctacgcagttggcatggatgggcgggagggatgacgtggtgcgttgtgcttgtttccgttccatttcttctgagctttatcacgatggagctttgagtctttgacggtgagtcctctgtgacgtgggtcgtgggctgagtagattttagactgggcgaggaaccgggtataatagcttgatgagtaatcaaaaggacaaatcgtgcgtgttcag

SEQ ID NO: 167795 - DNA, 323 bp, Zea mays
  Clone ID: MRT4577_84610C.1
tgttgttggtgtctccctagtgcataactgaaagtataatgcggatgttctaatgattcaatcttgtttctaggtggcccatatccctggtgctttgttctttgatgttgatggaatatccgacagaacatctagtgtaagtcgagttctgtagtttgtaccctttattgttgctgatcacaaaatctttttgttgcttgttgatgatactaatatctatttagtacctgcattctttttgttgcatatcgatgatactaatactgtctgatataactagttgctttttttttctttggtaagaatctgcattttaattttac

SEQ ID NO: 167796 - DNA, 234 bp, Zea mays
  unsure (1)..(234): unsure at all n locations
  Clone ID: MRT4577_84611C.1
gagggagcagcacggggggtcagcaccgacgctgcagcgcgccgacgccaganaaaccagccaggagggcagcacgccgacggnccagagggacgggggcgngaaccggcagaaaccaccacgagaagcgcaacaagccggacaaggaggcccccggccgaccaggcccacgggcaccacaaccncacgcngcacnccgagcccaaagccaggaggaggccggacgcggacccg

SEQ ID NO: 167797 - DNA, 510 bp, Zea mays
  Clone ID: MRT4577_84612C.1
gggtacctcgaggccggccgggagcagatgcttcgacacaagctctagagcgcgcacgattgcacgttgtcggaagctcgaggtagaagaataaccacagtctgatcagagtatgctcctctctcctctccgaacgttagctgatggaccgccccctggactcggccatctctaggtcctgctggaagaaggaaaccttctatggcaggaacagctccaatcctccatgcaagttaggtaggcgacaggtatatgaggataaagaacgattggtccctctcctacctcgatgtgacgatgcacgtggactatgttttcgaaccgatgcgactctcggacccggatgataccgttgatgcatcgagaccaaacggctgtactaaggcgacgtgatcacacgtttgcatacttcatgcttgcgagctctgctggtcatcgtcacgaagatctctcgctaagatgaacatcatgcctgcggataccacaactgacgtgggtcgagatcctaga

SEQ ID NO: 167798 - DNA, 379 bp, Zea mays
  Clone ID: MRT4577_84613C.1
caaacaacaaacctattcatgattggcaaaagttcggggggggacccacacacaaaaaaaccgggccatttttaaaccaaccctgccaccaacaggaaattcttggacaacccccatatggggggggccccaaacgacgcaggcccctggggagtttaaaccccccatgatttactgccccccacggaaaccggccacaagggggggggggctcccctttgggatggcgaagtctgcaagggggcggccctcccccaggtggtggccggcgaaaatcaaaccctgctggtccggggggaagccctccttggccgggatcttccccttcaaattggcgagggggcccgagctctcaacctccagggttttggttttccca

SEQ ID NO: 167799 - DNA, 703 bp, Zea mays
  Clone ID: MRT4577_84614C.1
tttggagttttttttttttttttttttttttttttttttttttttttttttttttttttttttttttttttttttttttttttttttttttttttttttgggtggcgggctggcttaaataaaagggatggtttaaaatttttccaaagaaactttgggttccgggggaaattttaaaatattttgggggggacatggacccaaacacacacattttttttggtttcgccaaaaacttttaaccccattttaagttgcccccacctttggggcctttgccccctttcccttggggggccctgggcccccccaaaaaccccttgggaaggccctgaaacctccggttttgggggggaaaaactccggggggggacggcccctggggaaggacaaccttttacccccccccgaaggagcccatcccctcccccagaagctgccaaaaaaaccccccccccggggggcccccgggcccccccaagtctaaaaccctggggaaaaccgggccaaaaaccgggtggggttggccaccctttaaccccgggtcgggggccaattccccaaactgggccaccaaaaggggtttggcaaaaaccccccccccgttgggaatgtgggcgttaacccaggcccccaaaaaccgaaattgcccctgggcgtcaaggccgcccaaccattggtccgggtacaagtgcccggggga

SEQ ID NO: 167800 - DNA, 5214 bp, Zea mays
  unsure (1)..(5214): unsure at all n locations
  Clone ID: MRT4577_84615C.1
ccacgcgtccggcttcatcttgctgatcgtgtccgtggcttcttgatactccgtgactgtctccgtccgaagcgagtgagcaagccgaccaacagcggctgagattcgctgcaacgtcggtatcaaaaggtgtccgagcggttgagattcgcgtgccatgtccggattcagtgccgcggccaacgcagcggcggctgagcggtgcgcgctcgcgttccgcgcacggcccgcggcctcctcgccagcgaagcggcagcagcagccgcagccagcgtccctccgcggctcgggcatcataagcgtacagttatggaactccgcctctaggttgtaccaaaacaaccaactgttcttcgccacgtccgcggaccgcgcgtnnnnngaccttatcggaaagttcacgctggattccaactccgagctccaggtcgcagtgaacccagcgccgcagggtttggtgtcagagattagcctggaggtgaccaacacaagcggttccctgattttgcattggggagcccttcgcccggacaagagagattggatcctcccgtccagaaaacctgatggaacgacagtgtacaagaacagggctctcaggacaccttttgtaaagtcaggtgataactccactctaaggattgagatagatgatcctggggtgcacgccattgagttcctcatctttgacgagacacagaacaaatggtttatatgcaatggccagaattttcaggttcagttccagtcgagccgccatcagggtactggtgcatctggtgcctcctcttctgctacttctaccttggtgccagaggatcttgtgcagatccaagcttaccttcggtgggaaagaaggggaaagcagtcatacacaccagagnnnnnnnnnnnnnnnnnnnnnnntgcacgagctgagttaatagaggaagtaaacagaggtgtttctttagagaagcttcgagctaaattgacaaaagcacctgaagcacctgagtcggatgaaagtaaatcttctgcatctcgaatgcccatcggtaaacttccagaggatcttgtacaggtgcaggcttatataaggtgggagcaagcgggcaagccaaactatcctcctgagaagcaactggtagaatttgaggaagcaaggaaggaactgcaggctgaggtggacaagggaatctctattgatcagttgaggcagaaaattttgaaaggaaacattgagagtaaagtttccaagcagctgaagaacaagaagtacttctctgtagaaaggattcagcgcaaaaagagagatatcacacaacttctcagtaaacataagcatacacttgtggaagataaagtagaggttgtaccaaaacaaccaactgttcttgatctcttcaccaagtctttacatgagaaggatggctgtgaagttctaagcagaaagctcttcaagttcggcgataaagagatactggcaatttctaccaaggttcaaaataaaacagaagttcacttggcaacaaaccataccgacccacttattcttcactggtctttggcaaaaaatgctggagaatggaaggcaccttctccaaatatattgccatctggttccacattgctggacaaggcgtgtgaaactgaatttactaaatctgaattggatggtttgcattaccaggttgttgagatagagcttgatgatggaggatacaaaggaatgccatttgttcttcggtctggtgaaacatggnnnnnnntaatggttctgannnnnncctagatttcagcacccatgatgtcagaaatattaagttaaagggcaatggtgatgctggtaaaggtactgctaaggcattgctggagagaatagcagatctggaggaagatgcccagcgatctcttatgcacagattcaatattgcagcagatnnnnnnnnnnnnnnnnnnnnnnnnnnnnnnnnnnnnnnnnnnnnnnnnnnnnnnnnnnnnngattcatggctaccaggcaactaacatggaataagaactataatgtgaagccacgtgagataagcaaagcacaggataggtttacagatgatcttgagaatatgtacaaagcttatccacagtacagagagatattaagaatgataatggctgctgttggtcgcggaggtgaaggtgatgttggtcaacgcattcgtgatgagatattagtaatacagagaaataatgactgcaaaggtggaatgatggaagaatggcaccagaaattgcacaacaatacaagcccagatgatgtagtgatatgccaggccttaattgattatatcaagagtgactttgatataagcgtttactgggacaccttgaacaaaaatggcataaccaaagagcgtctcttgagctatgatcgtgctattcattcagaaccaaatttcagaagtgaacagaaggcgggtttactccgtgacctgggaaattacatgagaagcctaaaggctgtgcattctggtgctgatcttgaatctgctatagcaagttgtatgggatacaaatcagagggtgaaggtttcatggttggtgttcagatcaatccagtgaagggtttaccatctggatttccggagttgcttgaatttgtgcttgaacatgttgaggataaatcagcggaaccacttcttgaggggctattggaagctcgagttgaactgcgccctttgcttcttgattcgcgcacgcatgaaagatcttatatttttggacattgctcttgattctaccttcaggacagcaattgaaaggtcatatgaggagctgaatgatgcagccccagagaaaataatgtacttcatcagtcttgtccttgaaaatcttgcgctttcaattgacgacaatgaagacatcctgtattgtttaaagggatggaaccaagccttggaaatggctaagcaaaaagacgaccaatgggcgctctatgctaaagcatttcttgacagaaacagacttgcccttgcgagcaagggagaacaataccataatatgatgcagccctctgctgagtatcttggctcgttactcagcatagaccaatgggcagtcaatatcttcagaagaaattatacgcggtggatcagctgctactctgtctgctcttctgaaccgatttgatcctgttttaaggaatgttgctcacctcggaagttggcaggttataagcccggttgaagtatcaggttatgtggttgtggttgatgagttacttgctgtccagaacaaatcttatgataaaccaaccatccttgtggcaaagagtgtcaagggagaggaagaaataccagatggagtagttggtgtaattacacctgatatgccagatgttctgtctcatgtgtcagtccgagcaaggaatagcaaggtactgtttgcgacctgttttgaccacaccactctatctgaacttgaaggatatgatcagaaactgttttccttcaagcctacttctgcagatataacctatagggagatcacagagagtgaacttcagcaatcaagttctccaaatgcagaagttggccatgcagtaccatctatttcattggccaagaagaaatttcttggaaaatatgcaatatcagccgaagaattctctgaggaaatggttggggccaagtctcggaatatagcatacctcaaaggaaaagtaccttcatgggtcggtgtcccaacgtcagttgcgataccatttggcacttttgagaaggttttgtcagatgggcttaataaggaagtagcacagagcatagagaagcttaagatcagacttgcccaagaagattttagtgctctaggtgaaataagaaaagtcgtccttaatcttactgctcctatgcaattggttaatgagctgaaggagaggatgctaggctctggaatgccctggcctggtgatgaaggagacaagcgttgggagcaagcatggatggctattaaaaaggtttgggcatcaaaatggaacgaaagagcatattttagcacacgcaaggtgaaacttgatcatgagtacctttcgatggctgttctcgtgcaagaagttgtgaatgcagattatgcttttgtcattcataccacaaacccatcgtctggagattcttctgagatatatgctgaagtggtgaaagggcttggcgagaccctcgtgggagcctatcctggtcgtgctatgagctttgtttgcaaaaaagatgaccttgactctcccaagttacttggttacccaagcaagccaattggtctcttcataaggcaatcaatcatcttccgttccgactccaacggtgaggacctggaaggttatgctggagcaggattatatgatagtgtaccgatggatgaggaggatgaggttgtacttgattatacaactgaccctcttatagtagaccgtggattccgaagctcaatcctctcaagcatagcacgggctggccatgccatcgaggagctatatggttctcctcaggacgtcgagggagtagtgaaggatggaaaaatctatgtagtccagacaagaccacagatgtagtatgtatgcatctattagacagctcaataagcactgttgtacgcttgtatggttgggacatatgggcgttatggcatgtatagttgtatgcctagatgtacaacacgtgtactcgtatatatatatataaatgctgaaacaagcattggtcctgtactgtagtttctacatttcattgtcaccaataattaagtgtactcctatggctgggagtctatgaaaatggacgtgttgacttattgggtaataaataatttatatatatacttgtgcaagaattttctcctaccgacttgctatgccatcgaggagctatacggttctcctcaggacgtcgagggagtagtgaaggatggaaaaatctatgtagtccagacaagaccacagatgtagtatgtatgcatctattagacagctcaataagcactgttgtacgcttggatggttgggacatatgggcgttatggcatgtatagttgtatgcctagatgtacaacacgtgtactcgtatatatatataaatgctgaaacaagcattggtcctgtactgtagtttctacatttcattgtcaccaataattaagtgtactcctatggctgggagtctatgaaaatggacctgttgacttattgggtaatatataatttatat

SEQ ID NO: 167801 - DNA, 1139 bp, Zea mays
  unsure (1)..(1139): unsure at all n locations
  Clone ID: MRT4577_84616C.1
aatttagctttttgtcattcaaacccccaaccccatcgtttggagattcttattaaatatatgcctaaagtggttaaagggctttggcgagaaccttcgtgggagcctatcctggtcgtgctatgagctttgtttgcaaaaaagatgaccttgactctcncaagttacttggttacccaagcaagccaattggtctcttcataaggcaatcaatcatcttccgttccgactccaacggtgaggacctggaaggttatgctggagcaggattatatgatagtgtcccgatggatgaggaggatgaggttgtacttgattatacaactgaccctcttatagtagaccgtggattccgaagctcaatcctctcaagcatagcacgggctggccatgccatcgaggagctatatggttctcctcaggacgtcgagggagtagtgaaggatggaaaaatctatgtagtccagacaagaccccagatgtagtatgtatgcatctattagacagctcaataagcactgttgtacgcttgtatggttgggacatatgggcgttatggcatgtatagttgtatgcctagatgtacaacacgtgtactcgtatatatatatataaatgctgaaacaagcattggtcctgtactgtagtttcaacatttcattgtcgcgaataattaagtgtactcctatggctggtagtctataaaaaaaaaaaaaaaagaagaaaaaaaaactcaagcggtagcacgggctggccatgccatcgaggagctatacggttctcctcaggacgtcgagggagtagtgaaggatggaaaaatctatgtagtccagacaagaccacagatgtagtatgtatgcatctattagacagctcaataagcactgttgtacgcttggatggttgggacatatgggcgttatggcatgtatagttgtatgcctagatgtacaacacgtgtactcgtatatatatataaatgctgaaacaagcattggtcctgtactgtagtttctacatttcattgtcaccaataattaagtgtactcctatggctgggagtctatgaaaaaaaaaaaaaaaaaaaaaaaaaaaaaaaaaaaaaaaaaaaaaaaaaaaaaagaaaaacaaactaaaaa

SEQ ID NO: 167802 - DNA, 682 bp, Zea mays
  Clone ID: MRT4577_84617C.1
aattcggcacgaggccggactgtgcgcattcttcgggaacgggacagaggagagaggcgagcgagcaacgagacgctgcgctgaccgcccgccccgcccgcgcccattcctcctcccacaattccctcctaccccgcagcccgcgcttcgccgctcgcgcctccttcccatcctcttcttttcaccgccacccctcttcgctctttcggagccatcgtgagtgcgccgcggcttcatcttgctgatcgtgtccgtggcttcttgatactccgtgactgtctccgtccgtgcgtgcgctggcttgatcctggcggttcttgttcttgcctgcattccactcgttcgcttcctcgcgataatatctgcttcgtcttttttttttccttctggtttcttctggtatgtgtaggaagcgagtgagcaagccgagcaacagcggctgagattcgctgcaacgtcggtatcaaaaggtgtccgagcggttgagattcgcgtgccatgtccggattcagtgccgcggccaacgcagcggcggctgagcggtgcgcgctcgcgttccgcgcacggtccgcgggctcctcgccagcgaagcggcagcagcagccgcagccagcgtccctcgacgcagcgggggccagcgccgatccacgacgctctccgcctctagccgcggccccgtcgt

SEQ ID NO: 167803 - DNA, 492 bp, Zea mays
  Clone ID: MRT4577_84618C.1
tttccgggggcaaaccataatagtacttctagccgctagtgtgcgcgcaattcaattccacgcgcgaatgcaccgtgcgaccttgctgtgctacttcattccctttcgcggcgacaagcacgacctggtctgtgctaatggtaattgccagtctaagagaatgatttcatcgagttggtgagaaacgttaattatgtggtgcttaagctctggatggtggggaaaaatagggattgaatttgatcaggctattgagaagctgaagatgatgaatacagattctactgtaaatggtgaccacccatgcatccttgtggatctgtggagctatgctgaatgaaatggcaccattagaccatcttgaatgcaaccagccgtgatcttagagattgctgtgagcaaatatctcaaactccttgagaagggtgtcaatccaggatctatatagggcatactgaaatgttgctctggagggccattcggcaaacaata

SEQ ID NO: 167804 - DNA, 195 bp, Zea mays
  Clone ID: MRT4577_84619C.1
gggtttttcccacgggggggagaacaaagccaaagggttgggccctacgaaacaagacctaccgtaggcccctagactgtatatcgtagaaggcacattgaacattttacatgacaatgggggctcatttacttgacgttttctgttatattctcacaacctatggaatctgacgctcttccagagttctcaata

SEQ ID NO: 167805 - DNA, 263 bp, Zea mays
  Clone ID: MRT4577_8461C.1
cgggctttaagaaccacaccaagcgaagggcactagcaacaacctaacacatggctacaagatttagccctctgggctttggcctttagggccacaaaggtcatattcacaggtactgtctaggctattaagtctcacagtactaaggttgacacagcggcagcacagtcactggctgcgggcgctacacaccatgccattgcacacaatctggcattaacacaacatgacgacagcacacagtttgcatactggcacagcgg

SEQ ID NO: 167806 - DNA, 571 bp, Zea mays
  Clone ID: MRT4577_84620C.1
ttttctttttagctattttagtacgatctactccaatggcaacatggggttacataagtaggttttacttcggcataatattataattaagtaggtacatagattgcatttaaaataggtaacgttttcgatacattttgaacgcaaggtttttttttaattcgaatattaatatttattcaacaattttagtataatatttattcgcacttaaaaataaaattatgctacaaggattattttattgatcatttaggaaacaaattttctgtataaaaataaataaaaataatataaataacctataaataaataaaatagatcagcaaagaattagacgcctaagttatctagttgaggcagacctttttctaggagttcttccatgttgacttgattgagtacttcctgtactttatctttaagaggttcttcgatagcgtcgacaatgatgtgcctaattaaatccggtagggcgttaacgacgacgacgatgattgcgttgaattgtccagtaccgtccatttgaagtttacttttcccaaattcaagtcgagatcttctagaacgg

SEQ ID NO: 167807 - DNA, 526 bp, Zea mays
  unsure (1)..(526): unsure at all n locations
  Clone ID: MRT4577_84621C.1
gggggggcgaccagggaaanacagctcatgcgtcaaaggggttcctgtgnaccactgggcagggggccgggcacccaacagcgtaaattcctctaaaactgggggggttcctagagaaagcgtcaggggcattgtgaatgcccgggggcggggggttgagtccaccggaactcccagaactgggagatcaattctaaagaacttggaggtcggcctggcngcgctagggggggagggaggagcggcctacgaccgggtnggtctgaacgcagcgntgggtgaccacttgcttggctgcggcggagccgaggacatcgacgctgcgctcgaccgtgcgagggaagccattggtggcggggaggctctggggaggcgcatgagctncgtaaaggactggggcagggggctcctaggctggcgctgacccccgggggttactgggtggggcgggcggggttggggtgtcggccccgcactccgggtgtctgcctgccgggggggcccgcggggccctgggcccaccgcg

SEQ ID NO: 167808 - DNA, 400 bp, Zea mays
  Clone ID: MRT4577_84622C.1
tttgaatttaatccaattttttgtgggttatttacggaggatttaataagggtttctgggttaacatctgcggttgtacttgctcaatattaaccactactggtaatggggaaacgagtccctctccgttgcggtcgacgccctggaacctaaccattgccatttcaacagaaggggactcttccaagccgcgcatgacgcgcgcgaataagcttttcaacacgtgtcacaatatgctttccataaataaccctaatgcgtggcgcaagtccttcttgactgcgtcaaagaatcaatacacggttttggtcatcacatgtatccagaaccttattcccaacataattacacaaccgtgctactataataagtcttcaatagcggtcacctaaatacaatt

SEQ ID NO: 167809 - DNA, 464 bp, Zea mays
  Clone ID: MRT4577_84623C.1
ataatcacactttgccactctcctcttccttctttgctactcatttcttctcatactcggcgtccaaaccctactcccctcactttccttccactcaccacgccatgagcccatacactcctatctgaaagcgccaccaaacgtggagtacgaggacacgtaccgaatcagaggcagcaagtacccgatgagtcgcgatagcttaagcgattccttcactccagatctaccacgcgacgcacgtctacacctactacatcgcccacgtcaaaattgacagctcctcaaccaatcatccacagatgctatatgagggcacactgtacaatgctcttccaggatggactggaatcacaaacataaaatgatgcggcattgactccgaagacaacattcatgttattgatctactcggaccaacccgtgaagacctgaccgtatgattgctgccctgatattctcac

SEQ ID NO: 167810 - DNA, 317 bp, Zea mays
  Clone ID: MRT4577_84624C.1
cttatctgcattccaaggacatatggcgggcccgacatctcacgaattacgacgcacttaaattcatgtaatggcggcatgcgcagatatatagtagagacgcggcgtagctagatgcggatactcctgtgaaggcgccatgataggggcgggcagtggtgatcagcagcaactccggatggggctgctgctgcagcatcctctctgggttgagtggcacggcgcacctacgtggccgaccggcccgcagaggcgcacatggtgcccgaggtgtacgagctacgcgactcgtacgcggacgtgggggacatgccggg

SEQ ID NO: 167811 - DNA, 819 bp, Zea mays
  Clone ID: MRT4577_84625C.1
cattgggtacctcgaggccggccgggatccagatacttgaagaaatatcccacccaatactcttgtgttataatatattacagaggagataactcacatgacaacttccatgggatatctcgacttgctgctgcctctgtatcttctctccttcgcaggacgctccttggacacacaaggcgaggattgttcccacagttctatgaacattcgcgccccaatggctacaggacgatcgagaacaaccattgcgatacaggctgtggccaaggaaaccatggatgccggcatctttagtcatagctgcatttcgcatgactgctttgtcaagggctgcgatgcttccgtgctgctgaacaacatgcaacagcagtagttagtgagaaagggtccaacccaaacagtgaactccctcagatctttgaggtgatcgaccacatgtaaggctgatcttgaggctgcctgtccagtagagtctcctgtgccgagattgttgaccttgcggctcgagatgtccaccgccctgtctgctggaccatactgagacgtgccaaattgacggacagactcgctcggtgcgagcatccagggctgcaactatgacatgccagcccccaacaacacactcaccactattattagcgagttcaagcgacaaggtctcattgatcgttgatgatgtcgccctctcaagtgatcataccattggctatgtatcaagtgcactaatcttccggcagaagctatactaccagacaggaaatgcaatggctgacggcacactggatgtatcctactgcgcagagctgattctcgatg

SEQ ID NO: 167812 - DNA, 1357 bp, Zea mays
  Clone ID: MRT4577_84626C.1
cattgggtacctcgaggccggccgggcccactcccacgtctgtccgcgcgcggtgtggtcacactactacggcaccgcccaacgccatacttgccttctccatcctcctgcggtcccgccgtcctctcttctagtccaggccacttctcatggctgtgcacacgcagtacttgtcccatgccttcccctacgaccacagcaccatcaggccggcgctggataacgcaaggaacgcgtccgttttcatcagctcggcggtggtcacccgctcgcggccaaactcagtgctcagcgacctcaccggcaacaacaacagcaacggttgcttcttaccgaggaagcgcgcgcgggttggcgacttggccggcgcgaccttgaacttggacatgcaaggtcaacgcgctctgctgccgctagtgtcggcgccggtgccgctgccgctgcccgcgggggacgtgcagaacaggttgctctgctctgcctccgcgtctaccagtgggcacccgacgcccagcgtcgcgccggtgtcgcagggcctcctgtcgcacctctaccgccacggcgtcgagattgacgcgctagtccgcatcgagaaggagaggctgcgagcggggctgcaggaggcgcgacgccggcacttccggacggtggtgctggcggcggaacgtgcggcggctcggcgcctgcgggcagccgaggcccgaactggagcgcgccatgctgcgcaacgtggcgctcgaggagacgctccggcacactggagccgagggccaggcgtggcaggacatcgctaggcgccacgagggtgtcgcggcgggcctacgcgccacgctggacaacctcacgcagatgcagtcgccatgcgccggcgcagaggctgcaggcgcggctgccgacggcgacgccgaggacgcacagtcgtgctgcttcgagttggagcaggaacagggcgagggcgccgaggcgtacggcgggcgggcgagggcgtgcaggtcgtgcggccaggcagaggcatgcgtgctgctcctgccatgccggcacctatgcctgtgccgcgggtgcgaggcgggcgtctgggcgtgccccgtgtgcgcggtcaccaagaatgcctcgctccacgtcctcctgaactgacatgacaacatgtggcgtggcaatgccaacacatgagtaatgggttcgaccgacccatggaactcctgtcttaagcctatctccagcacatcagtttatccatactaatacatatattttgatatttaaactacactatacgaatagtacatcgtatagtacaatctactgtgcagaacagtgcaaaataatacttttatgtaaactttgaaaaaactgttgc

SEQ ID NO: 167813 - DNA, 440 bp, Zea mays
  Clone ID: MRT4577_84627C.1
cccacgcgtccgcccacgcgtccgctttaaataaccagtgttgcaaaatatttgttggcttctgtgttactccatctgttccatagagatgacgtgcagtcaaagttgaccactttatccacctatacacacgaaagtgtttacagagccagcattatgtatctagaaatttgagaaatatttctagttttcagaacaaaaggcttatattggactatttatcctcttcttaatataataatacacacctgcgtgttcgagaaaaaaaggctttgctgttgtatttcatgtttctcaaaacaaagaaataaattccgtggtgattttcgatctcatgaatgacaaatgttataaataattacattctgtgttttagaacctattttcctggtcactgagttcatactcatcaattaatatgatgtggtgtcaacactaac

SEQ ID NO: 167814 - DNA, 507 bp, Zea mays
  Clone ID: MRT4577_84628C.1
aacaggcccgggtatataaaagttggaaattttgcattatgtttggaaaccgaaactttgaaaggaaaaaacaaaagttttcgggttttggaaaaaaattgtttaacggaacccccgatggggttttaatagcctgcccaccctgaccggagccccgggctgggggggcagggtcaacccggggtagggcgcggggacctaccccgggaaccccttaaacgcaaagcgctgaaggatcatgctgacggccagtttggcctccaggagcccaaagttttggccgatgcaaacccccggcccccaattaaagggggcaaaggccccggggtccctgccccccttggaccccccggggggaaacctccccaggttgaactcgttggggtcggacccccacagggcagggccccgggggataaacatgacgggcgttgaaagcataacccccgccgggtacgggacccctccaatctttgtcggttggcgtgcccggcggttgatggcccc

SEQ ID NO: 167815 - DNA, 406 bp, Zea mays
  unsure (1)..(406): unsure at all n locations
  Clone ID: MRT4577_84629C.1
accaaaccagccccagcggcggcggccccagaacagcgagaggccaggcgaagggagacgaggagggcgacaagcagccccgggccggaagcaacaccgaggcgcnggacancncgcagggccggacggagaaggacgccgagcggcggcacgaggccagggagcccaccaaaggaggagggaggacgacgagggagcacnacggagcacccaggcggaagaacggcggcaccnaccaggacccccccaaggcacacggcgaagccgacgggcaacacgaggaggagggccgggncgacaagaccggcaagaaccgcaagaaggacacaaggggggagccgaggcaggacgacaagcaaggaagaaacgcccacggcgcgggcccggagaaccccaaaccgacgaa

SEQ ID NO: 167816 - DNA, 915 bp, Zea mays
  Clone ID: MRT4577_8462C.1
gtgccgtgccgggctcgtgtcgtgctaaaaaatcgtgcttcgtgccgtgctaacgggccacgtgctttttggacatctatagtccaggcgcaccagggcgtgccgccctaccggaagccgcacgacctcaagaaggcgtggaagatcagcctgctgagcgccgtcatcaagcacatgagcccgcgcttcgaccagatgcgcaagctcgtgtggcagtccaagcgcctgcagcacaagatgagcgccaaggagacggagacgtggtccaagatcctgcgccaggaggagacgctcggccgccgcctcaagagctcgctcaagatcacgcccctcgacggcgatggtgacgaggaggaggaggaggaccgaggcctagacggcctggagcacgtggtccgcggcgtgcaggacaagcgcaagcgagagctcatcagtacaggagataacagcggacagagcagcagcagcagcagagggcgcgccgagctggtggccgatgagatggcgatcgacgaactcctgaagcgtcactacaaccacctgtcggatcagcacgagatcgtcgtcgcgccggagaacgatgcgggagagctcgacctgctgtacggtgtcgtcgacgacgtgccgccggacgtgctcttcgatctcatcgcgagctgttcgggagccgacgacgcgttccgcctgatcctggactgagcagtggctcagcttgttggtccaggcgtcgctacgcagttggcatggatgggcgggagggatgacgtggtgcgttgtgcttgtttccgtgccatttcttctgagctttatcacgatgggtcctctgtgacgtgggctgagtagattttagactgggcgaggaaccgggtataatagcttgatgagtaatcaaaaggacaaatcgtgcgtgttcag

SEQ ID NO: 167817 - DNA, 636 bp, Zea mays
  Clone ID: MRT4577_84630C.1
atccacgccggcggccgcggcgtgctggacgagctggaghgcagcgtcggcktcagsbcctggcacatggagccgtcgaggatgacgctctaccgcttcggcaacacctccagcagctcgctctggtacgagctcgcctactgcgaggccaagggccggatcaagagaggggaccgcgtctggcagatcgcctttgggtcgggcttcaagtgcaacagcgccgtctggaaggcgctacggacggtggacgacgccggccgccgggacaccaacccctgggccgacgacatccacgacctgcccgtgcacgtgcccaaggtgtcgcccttcgcttcttccgaccaggcgccgcccaccaacgcccagcatgtctagctagccaacgttgcccgtgctacgccaatcttgcttctgctgctattacctacgtatactgtatgccccaagcaaagaaccggagcatgtgcctgcacttctgtctgcccgggcttattggccgccattgttatcatatcatcattgttgttactaattatacagggcattattgctcagtttgtactgctacgaactagtagtgtgtaaatcgcaatggactgtctgaattagaattataataataattgctttttgttg

SEQ ID NO: 167818 - DNA, 354 bp, Zea mays
  unsure (1)..(354): unsure at all n locations
  Clone ID: MRT4577_84631C.1
aaaaaanatattaattnttaattataaattgtaaanntntttttntncctaattaatnaanntaantnaaattaattgtnttnnnntaaaatgnnnnntttnaaatnnnaaaanntgtnnntgnanntgnattaatgaatnggncaangngnggggaagaggnggtttgngtattgggnngtnttnngnttnntngtaaatgaatngntgngntnggngttnggntgngngagnggtataagtaaataaaagnggtaatanggttattaaagaataggggataangnaggaaagaaatgtgagtaaaaggtagtaaaagggaggaattgtaaaaagggtgngttgtggngtttt

SEQ ID NO: 167819 - DNA, 388 bp, Zea mays
  Clone ID: MRT4577_84632C.1
gggacaaacagactctagctagattaatgcttaagcacatacctacacacgtgtaaactactgacggccctttcataattagccgcagagattctatacgtgtgtaaaagcagacatatcaaattgccatcatcgccctttgtataattgtcttccaaaacacacggtttcgcgttgcagtatatataaagatcatccagcaaacaactcgagaagcataccagagcacacacagaacgaagtcctcgatcgctcatcgtttcctctgctccggtttcgttggagatccaggcaatggccgacgaagtgcagcaactcaccagggccttctcaggttgccatcactgaactgaatttttatatatatatatttgggcgatcctttcct

SEQ ID NO: 167820 - DNA, 288 bp, Zea mays
  Clone ID: MRT4577_84633C.1
gaaagctgcacgcctgcaggaccggccggaattaatgtttcacgaggagcttaaagtcggcggccgcccttgctttcgtgtgttttttttaaaacattttccggcctaagtcgccatcacagagaaccacggacggcgccaggcagagtcgctcttaacagtagattcataacggcactcatgaatctctcttaggactagctaatgacatccaacccattctaatccacgcccgagttgcattccagggcccctcctttccacatgacagcccactagagccactac

SEQ ID NO: 167821 - DNA, 201 bp, Zea mays
  unsure (1)..(201): unsure at all n locations
  Clone ID: MRT4577_84634C.1
aaccaaaccggcacnccccnacaaagaacaaagancnggaccgagagaaacacgggaagagaggccacaaccagaagcgcacccagaggagccagaaaacagaaaacagaagcggcaacgaaacaaaggagggcaacccaggccaaaagacggagcacaaacgcgaacaaaaaaacaaggggaagacaagcgacaagggac

SEQ ID NO: 167822 - DNA, 992 bp, Zea mays
  Clone ID: MRT4577_84635C.1
atcatgtcttctgacatacgtcttgataatcacatatctagagggaatgtaaataaattacaataactcaaaaaaaatctgaatacgtggctgcgaagttcaaaggccgaccaccaccgtccatcgccgctagaaaacaagcgatctaaagccaccatgttaggcatattatccaatgcaaatgccgattaagtaaaatctaacctcctaaactacgcgcacctgaagtttcacaaatggagggtttcagcgtgctgctgacagctgggatccagtggaggcaaggcgaagaggtggccttaggacagggcagcagtgctggtgtgttgccaccgtatgcaggagacagcctgtgggcctggtcaagcagggtagcttcattggagagattaacaatgggtacacatcaccagagagggtcagaggtgatcactgatcagtcagcggggacgacactggagttggaagtttggaacgcatgagagatggagagacgagagattcaaaagccggtctctgacatcgtggacactcggatctccatccgacgtccacttcattgcctgaagctaaaccaaatttcaggcacctgacatagagtgcctctcgaaaggaatagagtgcacgggaaacacaaacacacacagagagagactatgcattggctgtagaccaccccagaaataattgattgaatcccgcttcctaagcatccttccgactcaggtttgttgatgaatttcctttccaaatcacgattttcctttctagggacttcctgttttaccgatagctctggcaaagggaggcagcaagcttgaggcaacaactgcacaacttgcaagaaagccacaagtatgatcttgcaatggattttgtgactttcttgcaagtaatgcagttcctgcctcatgcttggtgccaccatatcaatacaccaaggcttcgcatcctcccgcaatttccttccccgccctagccaatgagcaagg

SEQ ID NO: 167823 - DNA, 1837 bp, Zea mays
  Clone ID: MRT4577_84636C.1
agcaatgagactgtttctggatcaaacaccccaatccaaacaaggaatatccatgtctttttgtcttgctgttccacggctacataacagaccgcagtgccatgcaatcccagcttccttcgtttatcttgcaccggcagtgtactgaggtagcgctaatctcggttctagagggaatgtaaataaattacaataactcaaaaaaaaatctgaatacatggctgcaaagttcaaagacacaaggctttacagttccaccttggttcttgttggacacgtgcatgtaaaagaggaacacgattcagcagttgggagctcacaccttcatgccagcgttcgacaaccaccgcctatcaccgctagaaaacaagcgatccaaagtcaccatgttaggcatattatccaatgcgaaggtcgattaagtaaaatctaacctcctaaactacgcgcacctgaggtttcacaaatggagggtttcggcatgctgctgactaagaaagcaggtatccagtggacgcaacgcgaagatgtgtcttagggcaggccagcagtgttggtgtgttgccaccgtatgcaggagacagcctgtgggcctggtcaggcagggtagcttcattggagagattaacaatgggtacacatcaccagagagggtcagaggtgatcactgatcagccagcggagacggcattggagttggaagttgggaacgcatgagagatggagagacgagagattcaaaacccggtctctgtcatcgtggacactcggatctccatccgacgtccacttcattgcctgaagctaaaccatatttcaggcacctgacatagagtgcctctcgaaaggaatagagtgcacgggaaacacaaaacacacacacagatagagactatgcattggctgtagaccaccccagaaataattgattgaatcctgttaacaacaaaatacgtcagcaatgattaattgaatatcaccaagcttgttaactatcttaaaccgccatgctttagagtatgcacagtgataacacctgctatggcaaagtgtccattttaaatttttatgtcaaaactttttaaaattcaaagtgaaattgtctattggcaggacagtaaaataccaaacaatggaaaaaccaaggcatttatagtacaacatgacagacagtataagattgtcatttcaacctggagaaactttaggagctggaagagtttaggtctgtgtgagagcaaaatattttttttatagtttctatgcaataccatggttttggacaataccgtagtattttatgtcatgaggtgtttagttgcactcctgaaaactatgttttcaaaaccattgtttatagataccatgatatttttagagtattggagattccactacaacctaaagtttttatggcatgactagcttttgcctaataccatggtttataatattgtctccaaacaatgtttctcaaaaccatgttatttttggagctaccaaaactacggtattatcatgtgtaaaacattgttgccaaacaggccctcagagtttttcaaaatggctctagctcctccctttttaatgaaaaagggccaaacaggccctcaagagttttttcaaaatggctctagctcctccctttttaatgaaaaagggccgtaaataactatttctaccgaaccatttgataaggctcaagagtttttcaaaatggctctagctcctccctttttaatgaaaaagggccgtaaataactatttctaccgaaccatttgataaggctcctatccaggagtcgaaggccaccaatacactcatttttgttccaaa

SEQ ID NO: 167824 - DNA, 271 bp, Zea mays
  Clone ID: MRT4577_84637C.1
ttacatataccacccaggctactttgggaaagctggtatgaatcattaccacttaaagaggaaccagagcttctgctcaactgtcaaccttgacaaattgtagactttggtcagtgaacagacacgggtgaatgctgctaaaaacaagactggggctgctcccatcattgatgtggtgcgatcgggctactacaaagttctgggaaagggaaagctcccaaagcagcctgatctcgtgaaggccaaattcttcagcagaagagctgaggag

SEQ ID NO: 167825 - DNA, 1527 bp, Zea mays
  Clone ID: MRT4577_84638C.1
atttcaaacaccacagaagtcatctttcataaaggtaatcgctgacatacgtcttgataatcacatatctagagggaatgtaaataaattacaataactcaaaaaaaatctgaatacgtggctgcaaagttcaaagacacaaggttttacagttccaccttggttcttgttggacacgtgcatgtaaaagaggaacaccattcagcagttgggagctcacaccttcatgccagcgttcaacaaccaccgtctatcaccgctgaagtttcacaaatggagggtttcggcgtgctgctgactaagaaagcaggtatccagtggaggcaaggcgaagaggtggtctcttagggcaggccagcagtgttggtgtgttgccaccgtatgcaggagacagcctgtgggcctggtcaggcagggtagcttcattggagagattaacaatgggtacacatcaccagagagggtcagagatgatcactgatcagtcagcggggacggcattggagttggaagtttggaacgcatgagagataaacagacgagagattcaaaagccggtctctgtcatcgcggacactctgatctccatccgacgtccagttcattgcctgaagctaaaccatatttcaggcacctgacatagagtgcctctcgaaaggaatagagtgcacaggaaacacaaacacacacacagatagagaccatgcattggctgtagaccaccccagaaataattgattgaatcctgttaacaacaaaatatgtcagcaatgattaattgaatatcaccaagcttgttaactatcttaaccgctatgctttagagtatgcacagtgataacacatgctatggcaaagtgtccatttaaatttttatgtcaaaactttttaaaattcaaagtgaaattgtctgttggcaggacagtaaaataccaaacaatggaaaaaccaaggcctttatagtacaacatgacagacagtataagattgtcatttcaacctggagaatctttattaggcctttgtttggtagggcttctcaaagcttcttcggaggagctggaagagtttcagggtctgtgtgagagcgaagtattttttatagtttatatgcaataccatggttttgacaataccatagtattttatgccataagatgaaaacggtcggaaacggtatttattcggtaatcagttttttagtcgtttttctttgattgcgaataaataaaatatagaatatacaatacaaatttgtattcttgtttttaacatccagcttgttaagattcataaaaggtaaacctcaaattcatcctatattttctcaaataatagatataaacttcggtatggattcagaaacaaattcgataattttttcaactttttgtgttgtagggagcaaataatacattaaacaatttatgtaatattttattcatatttgtactaatatgcttgataacataagaaaagatcaacatcaaattttatacatatctattttaaaatattaaatttgtc

SEQ ID NO: 167826 - DNA, 1891 bp, Zea mays
  Clone ID: MRT4577_84639C.1
gaattgacgatgagcttagcttcactcctttgagtgatgtgccatagtgatcctttttatgacctgttgcaccttctgccgcttatccttgtatctaatggtttctttgcaacatttatcacttaagtaaaaaacacaatagggattcaaaatactataattatatcaagagcaaggatattcacgcctcgaccaagatttgtagtaataatgaaacaattagcaatgagactgtttctggatcaaacaccccaatccaaacaaggaatatccatgtctttttgtcttgctgttccacggctacataacagaccgcagtgccatgcaatcccagcttccttcgtttatcttgcaccggcagtgtactgaggtagcgctaatctcggttctagagggaatgtaaataaattacaataactcaaaaaaaaatctgaatacgtggctgcaaagttcaaagacacaaggctttacagttccaccttggttcttgttggacacgtgcatgtaaaagaggaacacgattcagcagttgggagctcacaccttcatgccagcgttcgacaaccaccgcctatcaccgctgaggtttcacaaatggagggtttcggcatgctgctgactaagaaagcaggtatccagtggacgcaacgcgaagatgtgtcttagggcaggccagcagtgttggtgtgttgccaccgtatgcaggagacagcctgtgggcctggtcaggcagggtagcttcattggagagattaacaatgggtacacatcaccagagagggtcagaggtgatcactgatcagccagcggagacggcattggagttggaagttgggaacgcatgagagatggagagacgagagattcaaaacccggtctctgtcatcgtggacactcggatctccatccgacgtccacttcattgcctgaagctaaaccatatttcaggcacctgacatagagtgcctctcgaaaggaatagagtgcacgggaaacacaaaacacacacacagatagagactatgcattggctgtagaccaccccagaaataattgattgaatcctgttaacaacaaaatacgtcagcaatgattaattgaatatcaccaagcttgttaactatcttaaaccgccatgctttagagtatgcacagtgataacacctgctatggcaaagtgtccattttaaatttttatgtcaaaactttttaaaattcaaagtgaaattgtctattggcaggacagtaaaataccaaacaatggaaaaaccaaggcatttatagtacaacatgacagacagtataagattgtcatttcaacctggagaaactttaggagctggaagagtttaggtctgtgtgagagcaaaatattttttttatagtttctatgcaataccatggttttggacaataccgtagtattttatgtcatgaggtgtttagttgcactcctgaaaactatgttttcaaaaccattgtttatagataccatgatatttttagagtattggagattccactacaacctaaagtttttatggcatgactagcttttgcctaataccatggtttataatattgtctccaaacaatgtttctcaaaaccatgttatttttggagctaccaaaactacggtattatcatgtgtaaaacattgttgccaaacaggccctcagagtttttcaaaatggctctagctcctccctttttaatgaaaaagggccaaacaggccctcaagagttttttcaaaatggctctagctcctccctttttaatgaaaaagggccgtaaataactatttctaccgaaccatttgataaggctcaagagtttttcaaaatggctctagccccacgcgtccgcccacgcgtccgcccacgcgtccg

SEQ ID NO: 167827 - DNA, 440 bp, Zea mays
  Clone ID: MRT4577_8463C.1
gtctgatcataccattgagagatcagactggtatggacgatccttctaataatgcctagtagattgtgactacagctatctcagtggtaacaatctctcaggccccatacctgacttgagcagcatgcacgccctgactgcagtgtatgctcaagcatacttgattcgttctgaacacccattctgcaattttactgaacatgctacgcttttcatcatttgaaaaaaggcgccttgatagcaatcagttcagtggaacgatcaacccattaatggaaaaactagccaatctcaaggagctgttagtactcgatatctcatttcataatctatctcaaacagtgtctgcagacattctttacctaatgcattttctcaaaaaatggcagacacctgaacaacagcaatctcacgggcaaaataccagatggtctgaaaaa

SEQ ID NO: 167828 - DNA, 326 bp, Zea mays
  Clone ID: MRT4577_84640C.1
ccctgtctttttttgtttctgcgacgcgcgcccgttcctggaccttactgaagattgtgctgaacacttcaaaggggacaagagtctcgcatccagggaagagacaaaagagcgtttcacagcgctgcttgtcgaagaactcaaacagagagaagaggaagtaacacaagctcagcatgaggtctatgctaagctgatcgaggccaaaaagatagctccatagtatcagaaggaagctggcaaacgcaactcacgcatggatacctgtcaagaaactaggggagaactcaccctgaagcatcggtccaacaaaagaaactgacttc

SEQ ID NO: 167829 - DNA, 2125 bp, Zea mays
  Clone ID: MRT4577_84641C.1
aaccaaaatactataattatatcaagagcaaggatattcacgcctcgaccaagatttgtagtaataatgaaacaattagcaatgagactgtttctggatcaaacaccccaatccaaacaaggaatatccatgtctttttgtcttgctgttccacggctacataacagaccgcagtgccatgcaatcccagcttccttcgtttatcttgcaccggcagtgtactgaggtagcgctaatctcggttctagagggaatgtaaataaattacaataactcaaaaaaaaatctgaatacgtggctgcaaagttcaaagacacaaggctttacagttccaccttggttcttgttggacacgtgcatgtaaaagaggaacacgattcagcagttgggagctcacaccttcatgccagcgttcgacaaccaccgcctatcaccgctgaggtttcacaaatggagggtttcggcatgctgctgactaagaaagcaggtatccagtggacgcaacgcgaagatgtgtcttagggcaggccagcagtgttggtgtgttgccaccgtatgcaggagacagcctgtgggcctggtcaggcagggtagcttcattggagagattaacaatgggtacacatcaccagagagggtcagaggtgatcactgatcagccagcggagacggcattggagttggaagttgggaacgcatgagagatggagagacgagagattcaaaacccggtctctgtcatcgtggacactcggatctccatccgacgtcccccgcgctgcctgaagctaaaccatatttcaggcacctgacatagagtgcctctcgaaaggaatagagtgcacgggaaacacaaaacacacacacagatagagactatgcattggctgtagaccaccccagaaataattgattgaatcatcaaatctaaatgaactataatctggaacatagggagtacccgcttcctaagcatccttccgactcaggtttgttgatgaatttcctttccaaatcacgattttcctttctagggacctacagatcacatggccatcagggtaatgttatgctttaaaggtgatggacagatgatattccaggaagaatcacaatagccacagatgtcaaactagtacagatgcacattgagaatgcaattgagaagccagtgtttaggaaaacagagaaaccaaacaaactttgccttgaaacgacattggggactataaatgtaacaaaaattactctactgatgttctgtcgattcagactacacgttgagaggtttgctaagattgtaaaaatgtttataatttcggtcattaaatttatattataacatggtaatagcttttggtgccatatatatttattttccttttctctttcttttctgtttattgtgctcatgtagaagttgcaactctaagctatgctaacttgcttaggactaaaaggctttgtttttttctcaaatggctgttcctaaggtattttttgttggtccaaatattagcatgtaaataaaacaggtatgttatccccaaatccaaagcatgaggaacttattgagtattgatttatctttaacaatgtattactagactttgttgtacatttctaaattatttttctaaacttatagcttgtttgtagctcggaaactgacagtacttcctgttttaccgatagctctggcaaagggaggcagcaagcttgaggcaacaactgcacaacttgcaagaaagccacaagtatgatcttgcaatggattctaagataatgtgagaaactcttttccaatgttgtaggcaactaatgggagaggagctttcaggcctaggtgtaagagacctccaaagtttagagaatcagattggaatgagcttgtgactttcttgcaagtaatgcagttcctgcctcatgcttggtgccaccatatgcaatacaccaatggcttcgcatcctcccgcaatttccttccccgccctagccaatgagcaaggggctgtgtggtcatggcccggatgcgccggcctttataacgggcgcgtcgaagtgtctagaaggatcgtatccgcgagtctactaccaagtcgccaacaagtgcccgggccggctc

SEQ ID NO: 167830 - DNA, 170 bp, Zea mays
  unsure (1)..(170): unsure at all n locations
  Clone ID: MRT4577_84642C.1
gcaccgcagagcaatagcgcnccatcacnacacagcnaanctccactccagcgacacgctgcgctcgancncnnncgagcngccctctanatcnatggctcggctgctaccgnnggnngctgcaggctatgcgtggnngncgtcctggttgctggcctgcngggcgtctg

SEQ ID NO: 167831 - DNA, 522 bp, Zea mays
  unsure (1)..(522): unsure at all n locations
  Clone ID: MRT4577_84643C.1
caagcccaaaacataagttgcccaaacccaatagagagctaagtgtgtgcattggcaaaggcccttctatactgctctaggtcctccttagctcgcccggacacctgaatagctatggagtatttgttgtcaaaaaatctaagatcatgttccttccacaagttcaacatgatataaatggctattccattgaatgcccatcttttccctttcaggatcatgggcgagatcaattcccaccagtcgactaagggctcatgctagtctgaagggcagtctgcagacttccaaagttttcccagggcgccaccttgctccaaacctcctgtgcaaaggggcagcgaagacaagtgcccattttcaagcaggccattgcataagatacaatcgtcctggtgaagccaccctctgatggtgaggttgtaattgtatgttgttagtattttattttgactggggatccaggcanagagtttacacttgttcaccgcgtgtgctcaccaaatgatgtcggttttgaac

SEQ ID NO: 167832 - DNA, 472 bp, Zea mays
  Clone ID: MRT4577_84644C.1
ttttttttttttttttttgagacaaacaacgaaaagaagaagattgtaagttgcaacagcttacttacaggcacactgagcaacgttgaagccaaaggcggaacgaacacaataaaccatcatcagaatccactttacaaaatcattaaggtacaatggacaaaatgtaaacacaactacgtactgtctgcatggacaatcatctggcatcggaaaggtcgacagatcatcatcgaatcggatgccaaaacgaacagagtacgtaatgcatgtcctagtctttactccggcccttgcgctcatgccgttgatggagcccccgcctaagtagtagcaaacggtgctcgcgtcacttgaaacgggggacgtgtacgacctgttgccttcggggacgccttttaagagcccgccggagtccccgtgcccgaccccgcctttgttcttatcgtcggcgacggaaccttccgcgttg

SEQ ID NO: 167833 - DNA, 146 bp, Zea mays
  Clone ID: MRT4577_84645C.1
ccacccttagcaagaggtcaccggggcgacattcctggagcattatgaaggacagctcgtcagaactcgacaagatgtttgcctgcatcgaaagggtccacacccttgtccagcctatgtaagccagatatccaaaccctgtctcc

SEQ ID NO: 167834 - DNA, 378 bp, Zea mays
  Clone ID: MRT4577_84646C.1
attcggctcgaggcgggtcggcgaactcaatttttgtgcctcgcccctcagctgttgatgtgtggggtctaaatgaaaaacaacctgatggcaatgcgaatggttcaaagggaatgggattgtctagtcttcgcaccaaggaagcgcgctacctatgctgctagctgtatgcaaagaaacactgctcatactagttggatgtgatacttgttgttgaatgctaacagatgccagtaatctttatgcgcaaacaagcactttcagatctgggacctgtattgcaagactctggtactcctctaggagccatggctcatatgtgaggcgatgatacggtgcttcttgaatgagatccatctgtgctccgccatgataata

SEQ ID NO: 167835 - DNA, 552 bp, Zea mays
  unsure (1)..(552): unsure at all n locations
  Clone ID: MRT4577_84647C.1
tccgaaaatccggtcgaccacgcgtccgtggatacttcgtgtggtgatctttaatcttgacgtcgcaccggctgtgcgcancgctgtgggctggattcccttctgctttcatggtctcttccggtgttctgggtgctaggggtgtggtctggctcgttgtctgttgtcgttgcttcactggtgctgtagatctgttctgtgtgccgtgtgcgcggtggagtgttgtgtttgccatttcgcgtgtcccctgttattccgggttgcggtgtttctgtgtgtgcagtgacgtatctncggaagtcccttgaacatccagaagacttctctggagtggccgggagcacggttgtggagggtattggaaggaaaacctttttatgttgtttgttttggcaacctggttccactaaccaagagtggccatcttcatatactcagcttttttgccctcgaggaatatggacttcctctctttgtcaaggttcgtgacacagcccaggaaccttgcggtcgactctcatttatgaaggaacccggctcctcttgaggact

SEQ ID NO: 167836 - DNA, 280 bp, Zea mays
  Clone ID: MRT4577_84648C.1
tatttgcatttgaatgttgtgcatatagaacatggaaaatgctatattatacacttattcagataacaatgaagataaggccacatgaacaaacttatatattgctatctgagtaagtgtataatatagcattttccctgttctatatgcatttgaatgttgtgcataaaaacgaacctcaattttttctactcatgtgatatgtatatatggagatctaagtgaagcacatgatgttactgtcaaagtgcttgtttacatgcattatatgatgatgaag

SEQ ID NO: 167837 - DNA, 211 bp, Zea mays
  unsure (1)..(211): unsure at all n locations
  Clone ID: MRT4577_84649C.1
caattcgctttcaaccaaatcagaagggggggggtggtccaaaactcgaatttacagtcgtgggaaaatggggctgttgggaaagaaaaaacctgtcattttattaaacaaccccccctttnccggggtggttttcaaagaaggaaacaaaatcagtttaaccaacggggggccaaaggtttcctttcataatgattcagggcgggggggg

SEQ ID NO: 167838 - DNA, 285 bp, Zea mays
  Clone ID: MRT4577_8464C.1
gctggccgacccatcgcccgacgcgcgccgctaaggccacgcgcaccgcgcgtcgtcccggccggccccgtttcaacattccaagacggttcctcttcttatgtgttttgcttgcgtgcgttttttcttaatttggttgtcgatctagctaatcgtgattcgtgaatccgtgacgcagcaccatggataatgaatctgactatttatttaagtacccaggcttgctattgctatgcttgttgttgtaccggtacacatttatatatttggcctttttcacctttc

SEQ ID NO: 167839 - DNA, 178 bp, Zea mays
  Clone ID: MRT4577_84650C.1
gggtctttgctcaagtttcgaaccaaatcctagagccagctgataatatgtaataatctagaggagagaataatgatgtaccaataagtggagattcctccttatgatgcatgctaggttatggaagatgtaaaatattcaactttttcctcctttacatggactttctattttactg

SEQ ID NO: 167840 - DNA, 401 bp, Zea mays
  unsure (1)..(401): unsure at all n locations
  Clone ID: MRT4577_84651C.1
cctcgaggccggccggggattacttgcagtttcttttgtatggacacctagatttagttagttcttgtcttgataaatgaagttgggcggctaattttcagatctacacctattatggctgtagtggattgagctaattgtattggctaatgtattgttacaaaaatcatcaatgtgttataagtgtttggttgtgttgactgccttgggcatgttctcaattaggtttattgtcttctttgctgtagaatagaatggtgactgtagttgactggttttgtttttataggtatgatcatgtaactcaattattgataacccattggtcatgatacttacaacatagattagctttaccagtgctcttgtgtccttataattataaatnaatgggttgttca

SEQ ID NO: 167841 - DNA, 169 bp, Zea mays
  Clone ID: MRT4577_84652C.1
gccggccgggtcgggatggatggatgtattacagttttagtttgttgttgcttcagtttgctgcccatacttcagtttgcttgacaaactattgtgatgatggataaagcgtgatgtgatgacggccaaccagtttactactgaaaaaaaaaaaaaaaaaaggccccta

SEQ ID NO: 167842 - DNA, 159 bp, Zea mays
  unsure (1)..(159): unsure at all n locations
  Clone ID: MRT4577_84653C.1
gactagntctagatcgcnagcngccgcccgcgatctagaagacgcataangacatcgncaagggcgcngcgcaatgcggaggagaagcgggcgtctgcggagnccaancggggcctcaagctggtccaangttnttganctcgacaatgtcangaggcg

SEQ ID NO: 167843 - DNA, 517 bp, Zea mays
  Clone ID: MRT4577_84654C.1
ccggccgggaatgtcgagtggcgacagtcggcggtgggcgcgcatgcagtgggtggcgacgcgaccgagtccggtggtggtgcggcgagcgagcgagcgacacgagctgagtgagtgccctgcaagcccaagctcgtgacacagacaggacatcagctcgactcgcgcggtcgccttgcctgctgcacacgagccgtcgccaactcgatcctcaccgccatggcgcaagctgcttccggctccagcaagatcgacaccaaagctcccacctcagccgacgaggccgctcaacccaagagctacggcgacctggtatccactctcccggctagaggcgggtgggtgtcgctcgtgcagtaccagaactactggctgaaccccggcaggctccagaacatcatccccgtgaaagagctctacaagcctcgcgccgacgacatcgtcctcgccacctacctgaaatgcgggaccacgtggctgaaggcgctggccttcgccatcacgacccggggccctg

SEQ ID NO: 167844 - DNA, 1579 bp, Zea mays
  Clone ID: MRT4577_84655C.1
cgacactcggcggtgggcgcgcatgcagtgggtggcgacgcgaccgagtgcggtggtggtacggcgagcgagcgagcgacacgagctgagtgagtgccctgcaagcccaagctcgtgacagagataggacttcagctcgactcgcgcggtcgccttgcctgctgcacacgagccgtcgccaactcgatcctcaccggtgacccctaccgcagctcatatcatcctgttcttgctcttcatcttactgttaatttcctgccaatttaatcccaccggccatcgttctcctgaaccaaagccatggcgcaagctgcttccggctccagcaagatcgacaccaaagctcccacctcagccgacgaggccgctcaacccaagagctacggcgacctggtatccactctcccggctagaggcgggtgggtatcgctcgtgcagtaccagaactactggctgaaccccggcaggctccagaacatcatccccgtgaaagagctctacaagcctcgcgccgacgacatcgtcctcgccacctacctgaaatgcgggaccacgtggctgaaggcgctggccttcgccatcacgacccgcggccgccaccaccaggccttcgccgccgccgaccaccccctgctcaccgtgcacccgcaggaggccgtgccgcacctggaggtgcacacgccggggcagggcctggcggacatcgagaggctgccgtcgccgaggctgctcgggacgcacctgcccctctccctgctcccgccggccgtggccacctccggctgccgcgtcgtgtacctgtgccggcagcccaaggacgtgttcgtctcgctctggcacttcgtgaagggcatgcgcgggggcaggtcccccgtggagctggacgccgcgctggccatgttctgcgagggggtctcgcctttcgggcccgtctgggagcactacctcgagtactggaaggagagcctggcgaggcctgagcgggtccttttcctcaggtacgaggagatggtggcggacccggtgcgtgccgtgaggacgctcgccggcttcttcgccgtcccgttcaccgacgaggaagaggggcgaggggtcccggaggagattgtgaggctgtgcagcttcgagatgctgagcggcttggaaagcaatcggaccggagatcttgattgcggagacaacacggtgatcggaaaatctaccttcttcaggaagggcaaggttggggactgggagaaccacttgacaaaagagatgggcaagaaggtcgacgccgttttcgaagacaagctccagggatctggtctcgtgttttgaattttgattactatccatgcatggcttttgtttgtgtgatgctgtttgtccagaataactaatcgtttgcgcatgttgcagtatttacgtaacgggatctttctatgctcaaaagacaaagatcaagggatctagccagccctatattttgattagccgtgtctttcgattgtgtgatgatgtttgtcaagaataatctttgtgtagtatttatgtaatgggatctttctactcgaaaaaattactctataactacgctttt

SEQ ID NO: 167845 - DNA, 533 bp, Zea mays
  Clone ID: MRT4577_84656C.1
ccttcttccaaacaaacaacaagcaaaaaaaaataagggggggaagaagtttttttttctaaaaaaaaaaaaaaaacacttttccccccccccaagaaggggggagaaaaaaaagggggaggacaaggctgaactccacaacctacccccccaaaaaagggggccggaaccccaaccccggcctaaataaaaaaggaggagatctgctccccccccccccgggagccgaaaaagaaaaacacccccttgggaagggggaacccaaaccgcccccccggggtggggcctcccccccccggggacttggaagtggggaggggggaaaccttaaaagggaaccagccagggcccttaaccctaaaaagcccggcctgggggcccttgaccaaaaacccacaaaattttttctttttcttcacgttgggggataaaaaggggaaggggaggccgcttgaacttaatctccgaggcatcccccaccccacccatccttttgaagccggcggaaactaccgccccccgcatggtttttt

SEQ ID NO: 167846 - DNA, 443 bp, Zea mays
  Clone ID: MRT4577_84657C.1
atgcgcaaacaggagaccgcacgctatatttcccccgctcatcgctcaagtcgagagatcgagtcgactgctagtaaagcagacagattctccgcgatggcgacgtccgccaccataacaccatgactcctcgaactcacaaagtccctcctccccgcgatgctgatcattcccaggtgactgagccatggagccagcagcagagcatggatacctatacaagaggaccctaagcatctagtgcgaatccatgaatgcccagctcctgggggctactacacacaccttcccccctatcgagaaggcgatcctgtaaaatctcttcccccaccaaacctagaataaccatgatcgcaatctgccatcccatcacgcccgccctacaagggaacgatgcatcacagagaactgcatgttacctgtgcttatatagcacactatga

SEQ ID NO: 167847 - DNA, 343 bp, Zea mays
  Clone ID: MRT4577_84658C.1
gctgtggcgcgcgctagccgagcacgtgtcgtcagcagcgcgaactggaagaagaggaacatcccctagtggccggcgctgcgcggcgccgctcctgcaggactgagcgtggtcatgcaccagcacgcgtcgcctggacgtgggtatgagtaattgaggccccctatgtggtcgacgaacgcattgatctgcccagctcgggcaccccaacaaggagacttaaagtgcgaggttgaacaactgcaggggacaggccacgttactattcctaaacgcctgcatagacgacaaactgcattgaatattagacccctctctcttctctcaacagatactagctggg

SEQ ID NO: 167848 - DNA, 234 bp, Zea mays
  Clone ID: MRT4577_84659C.1
gttacgctatgtttgaagtggctcaactctggattagctaacatgtctaggcagggagttaatataggaacaagattatcatagtgaactaccatcaaatcatctttgtggcgtaataaacggctcttacattattagaaacatatctggcaatgtttcaatgtttatttttattacggtgaaaacctcttgcatgctatggatgaggggttttcttgtaagtctctcatgagc

SEQ ID NO: 167849 - DNA, 396 bp, Zea mays
  Clone ID: MRT4577_8465C.1
gaggcgtttacctctcaggctgttacaccctatacagggatgcacatccctacaaggggctagcttttacacagagagacagggatgcacaccacttgcgggatccgctaactcctgccaccgttactcaagagcttcgagttacgaacatcatgctcttgcagcagatggaccaggtcccttagcagaggtatatggccagagacggaccttcgggagaggatcgtgcggctatgatacgtgcttgaagttgccaacgaggtggagctgcaacctgagggatatgctccatccgactgtgaagcctgccttaaacatatgcacacccctggacataccccaggcctaaatggcttgttcatgagacccatggaaggtgctgataactgtaaagca

SEQ ID NO: 167850 - DNA, 218 bp, Zea mays
  Clone ID: MRT4577_84660C.1
gggcgaaaaaaaacgggggggttttaaaaagaaaaacacccaaacgggcaaacatgggaggggatagaccgggaacatgaagcaaaacagagacccaaggtggaggggaaaaaaggggggaccgggccccacttcccccaccagaccagaggacgcaaactttatttagcccatgtcactcgcaagccgcaccggggagtccacgcaaaaaccactgg

SEQ ID NO: 167851 - DNA, 777 bp, Zea mays
  unsure (1)..(777): unsure at all n locations
  Clone ID: MRT4577_84661C.1
atttcctcctcctggctaagtaacactcgcaagttaagtcaacaccaaccaccgaacttctctagccaagaaagatggcgcggctccccgtcctcgtcctggccgtctcgctagccgtgctagcgtggccggcgtcgtgcaaaagtgttcggtcggtgctcgccccggtcaccaaggaccccgccacccgcctctacaccatcccattccactacggcgccaacatcgtcgtcgacaccgccggcccgctcgtctggtcgacgtgcacgcccgaccacctgccggcggcgttcccgtgcaagagcgacacatgcaggctcgcgaacaagtaccacgtcccgagctgcagcgagagcgcggctgacaagctctgcgaccccagtcacaaggtatgcagggccttcccgtacaacccggtcaccggtgcgtgcgcggccggggatctgatccacaccaggttcgtcgccaacaccaccgacgggaagaacccggtgagccaggtgaacgtgcgggccgtggccgcgtgcgcgccgagcaaactcctcgagtcgctgccgcagggcgcctcgggcgtggcgnngctcgcgggctccgacctggcgctgccggcgcaggtggcgtccgcgcagaaggtcntcaacaagttcctcctctgtctgccccgcggcctctcaagcgaccccggcgtgggcgtcttcggcggcggcccgcttcacttcatgccgcagccggagagggactacacgaaggagttgtgctacgcgccgctcgtcgcca

SEQ ID NO: 167852 - DNA, 463 bp, Zea mays
  Clone ID: MRT4577_84662C.1
agtggaaatgggtcgtcgcaaactgtactgtttgcgagggcatttaacagaggatccaagggatacatacaggcgaggacaatataccgtatgggcattgataagcacaccacggaatatgcctttgactactaactgcacgaatgatccaagcctaccaactacctggtggtacacttaaataagggaagacataagttaccaagaataagcactctaggcaataaaaattacctagaactcagagaattggaccaagaaatcattgaaaagaaaaggatataaaccatgcaccactatgttgctgttcaggggacataagttgcactccaataaaaacactcgatcagacattgacgtagtgctgaccagtactggccttacttgcggcaatccaatcttaagccagggctatacagtaacccttgtagtgtatgacaaacaataatctgatatacttaac

SEQ ID NO: 167853 - DNA, 315 bp, Zea mays
  Clone ID: MRT4577_84663C.1
aaaaaccaaggggggggtttttactcaacaccaaattccaaacaatttgaatgtatacaataatgttcccatcgagaaattaattgaatccaaaacctaccaacttggggaaaaaagatagttttaaaaacatcggactcgccaccccatcccttaaaataatgcccacacttgcaaataatttctttgccttaacggaatggtaccgtagggcgcaaaaaattcctaagataccttttggaaacaacatttaaacttccagccattcgatcgaaggaacaacactgctatgtgccaaacattttttggaaaaca

SEQ ID NO: 167854 - DNA, 370 bp, Zea mays
  Clone ID: MRT4577_84664C.1
gcccggaattccagggatgctattttaaggtgcgggggggtgacaggggacggttctgactaagtgcatctatattcatataggggttaacctgatacagcacgtgtgactgaaagctttcttacgtccattagagggtgcgtgcgcgctgagcaaactttggtcgactatatttatgcggaactattggtgatatctataaccggcctgaataatacagctagcgactttaaatgagcaagatgatggagcgagtcctatagatgggtataaagaggagaaactgggtagagacactcctgcaagaagggaattgtttaaaattacgattgcgactctaggactaacgccgtttcatttagagagtaac

SEQ ID NO: 167855 - DNA, 277 bp, Zea mays
  Clone ID: MRT4577_84665C.1
ggggtgaaaacttgtctgctgagacaaggcgcaacaaatccaatcgtaaaggcccaaactcctgtgcgtaagcgaaacgtaccagaccacgaacgcaggttgatagccgcctgttccgaggcccgttatgttagcccacgtttattagcaaattgactgatatgccagcgacttgtggtatgaattcagaaggagtgccaatatctggtcctgggcgactaactcaccgatactaaacacgctgggacaggccaaccaatgtttggagatgcatttg

SEQ ID NO: 167856 - DNA, 459 bp, Zea mays
  Clone ID: MRT4577_84666C.1
gcctacacaacgacggccccgggcccggaggcgtcggcgttcgcgatgcccctgacgtcgggcgcgtacacgggcacggggcagtacttcgtgcggttccgcgtgggcacccccgcgcagcccttcgtgctcgtcgccgacaccggcagcgacctcacctgggtcaagtgccgcggcgcgtccccgccgtcggccgcgtctccgtcaggctcgccgcgcgtgttccggccggcggactccaagtcgtgggcgcccatcccgtgctcctccgacacgtgcaagtcctacgtccccttctccctcgccaactgctccgccggcaccgccccctgcgcctacgactacaggtacaaggacaactcgtcggcccgcggcgtggtgggcacggacgcggccaccatcgccctctccggctccaacggaggcggcggcacggacaggaaggccaagctgcaggag

SEQ ID NO: 167857 - DNA, 497 bp, Zea mays
  Clone ID: MRT4577_84667C.1
gcagacatatatcttagattctaaaatagatacacgatagcacatctatgttctaggtgtaacatcacagcgcagtcctaaatggctacactaaacgatataggcctgtagacacacatagcctaaccgaaagctgcctatagagcgcatctctttggaatcctgaacactgacaccccttgacaccaacgcagatgctggtcagcgctacatcagctatcactgccacacaggtgcaccggatcacgcattacctggctggggctgaggcgtgcactcttgcgatccttatgcctgatgcccatacactggagctactgtatgaagatgacatctacagcccctgtgctcttgcacaagtatggcgtgcagtagcattttctctagatgccaccggatgatcttatgaaagtgcactacctgctatgccttgacattagtacagccatcttgcacaggatacagacctgatgtattaccaatcaggatcataacga

SEQ ID NO: 167858 - DNA, 516 bp, Zea mays
  Clone ID: MRT4577_84668C.1
tttgtggggggggaactgatcagtaactatattgccgcctagaatatacagcttcacatacaaaattcattgtccttagtctgcagccgaggacactttggatgaatcgcaagcaaaagaaaaaaaaatgaagaaaatgatgtgccactggatatgggattctgcttttctaaagtgtttcaactttactatccgctaatgtctgcagctgtaacatactaacatctgcccccagtcaagcgattaagatttggtcttcagtatcaactcttgattctacgagattgaaaacatggcgaaagcctgagcttgctagtccaaaatcaaggagcctgattctgtagccaagaagaagatgggggtagagtctcatctgtcctgttagtctcaaacagagaaaatctttgcagtctgttaatcttcagccggatagacggcaccttccgagcaatggccttccatatcatctgcacggcatcatcggtctgagatgggtattggtactcaaagtgcttt

SEQ ID NO: 167859 - DNA, 1117 bp, Zea mays
  Clone ID: MRT4577_84669C.1
cgctcctcttgcagctccaccttaatcactcagtcttaggggcttagcgctaggctctagctagccgcgccactccttcgtgtagccatcagccttctcatcgccaccaatggccactgccgaggtccagaccccgaccgtcgtggcggccgaggaagcgcccgtggtggagaccccgccgccggccggggggcgcgaggagtctgcccccgccgaggccgatgctgatgctgatgctgaggctgctgctcctgctgctcccgaggggctgtccaggttcgggtaattcccgggaaaacctccaagaaaatggaaataataggaatgggggattcttcttatcaaagaagaaaagcctccaagaaaatggaggtggaactagcagaaagttcatgatatagaaagcactgctgatggatgatgtgaacatggcacaagcagataacattcaggacactgtaagaaggcttcaatcaaaccatcttgcttagaaaggagaagctgaggtgttgtccaaggataggtatcgatcttccatggaggtccaaccggccgccgctggaccttcatctaatctggatagtgaaagtcatctagtgcaacggaggaggcaataagcaaccaaagaagacatcaaggtttctaagagctcgttcaggtgacaactcgttagccatgcttggtttcagacagccaagtgcaagccctgaatgtccacaaagggaattacaaggtccagagacgtggttgccagcgcgaggtgcttggaagacgaagaatggtgggggatagaaactctttttgatcaatggacggaagagtcattgcaactgcatttagacgtgtccatatactttagtattttttgaattttgagataaagtcgtggtattgaaaaatattatagtttttcccaagtgtttggctaccttgtaaaagctctcttttgaatactataatttagtagttctatggtttagtagataccatggtatttatttttggagtatttaaaactccactccaatctaaaatttttttatctatgactggattttggtacatatacattaaatatcatggtttaaaaaaaaactgctacctcaaaaggctacaa

SEQ ID NO: 167860 - DNA, 106 bp, Zea mays
  Clone ID: MRT4577_8466C.1
atgcctcagaagctgtgtgcacgacaagacccccgagatcatgccagctagcagcaagttcgttactgaccccaaggtgagcaaagcagctgttggtttgccgctg

SEQ ID NO: 167861 - DNA, 2151 bp, Zea mays
  unsure (1)..(2151): unsure at all n locations
  Clone ID: MRT4577_84670C.1
tctcctttctaagtaagatggtttgattgaagccttctaacagtgtcctaaatattatctgcttgtgccctgttcacatcatccgtcggcagtgctttctgtaatatgaattttctgctagttccacctccatttgctagttccacctccattttcttggaggcttttcttctttgataagaagaatccccccttcctattatttccattttcttggaggtttttcaaccgtgtatttgtatagtgcgcatcagcaagttccctctgttttcgagaatcaggcaatagcctagccatctcaggaacaaggtgcgacagtccgaactgctcgacatatgaaagatactcaaaagcatctatggtacctcgacggtattcaccagcgatctctttgaacgcagagtacatgtcctcgttcattcccagagcatagcgcatctttgcagcatggatatcctcggcagcaggaaaagttcgaggacgcttaggcgtaaaaacaggctgcttcatcttgttactagacccagtcaaaggggggaacaatgactcatctccaagcctcggagcgtcccttgcactctgattaaaactggattgctgctctgataatgaagggaatgaggtttcaacactattgtcaggaatatccgggtcagaaagaggtcggaaggacaactgttccagcactcgtccagtcctcgagccttcgccaacttcagcttccctagaactggatccaatacttaatgactgaaacgactctgaaacattgtcaagacgccctgcatggccatcggcagctgcccggtctttttgtgcagttgatgggatatggcagtcagatttatcatggaaagcatttgcagatgatgagatatgacagtcagatcgatcatggaaagcattatgacccctgccacgccgttgttcttgctcatttctgcgatatattaagttggtaggtgtctcaagtgcaacattcctcagagaacgagacatccgcccaccatgctccatagcattatgcttcttcagctgcgctttactcaggaagacaacaaacttcttttccaaacatgcttcatcttcacataggaaatgatcttctctaaaatgcaactcaatgtcctcatagttcgcgaaatattcaacatgcccagggttctgcctcttgcatatgtggcaagaatagtgttccctggacgtatgcatgtaaagctcactatctccataaaatgaacttctgcagaactcacacattggatgaccagcaaaaccattgcgctctacctcagagccatccacttcagagtcaccagtcttgatatgctgagctaactgagacttcaaataaagcttttgttcacaaatgaacaccttcctcccctccaaacaaagattgcacatgtgcaacctatgcacatggaataaatgtcccttcagttgatcgatgctcctgaacttgcttctgcgctttgcttgagcagcaagggcaacctgatcttctgcattgtcacaaacgctacaagaaagtcgacacattgcccgtatcatcctgtagtggtccacatcatcaaagtatgcctgagtatcctcatggtaccagaaatcaccagctttgccctcatttaccccaatggggaacactgagaaatcagcaaccactctagtgtattcacccatggccttagtgacaaagacgaaggggcagacggtcttgcagatgcaacacttgttgtcgcccatcacgaaacggaggcggacgatgcatgtggagcacacgtcgcggtgcccgcacgacccataggccacccactccagcgtatctgcgcacaccgcacaaaagtcttccatggctggcaggcagcgaagatcggccacggcggcggcaagcaagatgatgaaagggttagggcgcgagagtcaaagacaactcaggggatctatttatatcaatgatacggcgtacctatctgcgcagctctaatctccgaagtccgaatatatcttcaaatctggtaaaatagggatcgattctatctcgaacagggaaataacggacaatggtatttaaaataaaggtatctagcaccgtggataaagataaatataaaaaatagtatgagcaaaaaaaaaaaanaaaaagcggcc

SEQ ID NO: 167862 - DNA, 1410 bp, Zea mays
  Clone ID: MRT4577_84671C.1
ccgggtactagccctagagtgggagcggcccgccctaaaatctcttttttaccaatcgtaactcctctttggattgatatcaaagctcttgcaagtctgaactaacaataacatgaaagcacaccatgacgaaggcacaatgcaattcaagcaagaacaccacattcgtcttaataatctagtagtaatcatcatatcctatatgtttagggatataaaacttattacaccacatcgctaattaaccatgttcatattctggacatctcctgctgctggtggaggttgccctggtattttgggtccctgcggacgatgcgcttccagtaccagtgcctgtcaaagagcatccatatctcctcgatgggcacctgcttggtctccggcagcaggaggatgacgaagatggacatgacgacgatgagcgcggcgaagagcacgaaaacgccccatcggaggtggcacagcgcggcgaggaagcactgcgccacggcagccgtccagaagaggttgacgcacaccaccacgctctgccccgccgaccgcatctccagcgggaacagctcgcttggcaccagccatcccaggggcccccaggaccatccataggccaccacgaagagacagatggccaccaccagcaccgtgctcacgcccttgctcagctcctcgccttttccgaacgttgagggcaaggatcacagccaccacgaccatggaggagaccatctgaatgcccgcctcgatgaagaggaagcggcggccaaggcggtcgacggtgaccatggagatgagcgcgccgacgacgagcatggagccggtgatgatggaggagtagagcgccgcggaggagccaaatccaagactctggaagatgacgggcgagtagaagaggatggagttcatgcccgacagctgctggaacgccgggatgccgagcgcgccgatgatgagctgcgggcggttgcgcacggcgagcaggttccggaacgtgcccgtgacggcgcgcgcggcctggctggcctccttgaggtcctcgaactcggcgtccaccttgtgcgtgccgcgcaccttctccagcacgcggcgggcctcctccaggtgcccgcgctcgacgaggctgttgggcgtctcgggaaggaagagcgcgccgacgaagatggcggtggcggggcccatggcgaggcccagcgagaggcgccacccccaggggtgcaggcggtcggtgaagtagttgatgacgtcggccacgaggatgccgaggcaggtggtgagctggaagagctggttcacggcgccgcggatgcggtagggcgcgatctccgagaggtagagcggcacggcctggttgccgaagccgatgccgacgccgaggagcacgcggccgacgatgagcatggcgatgttcat

SEQ ID NO: 167863 - DNA, 562 bp, Zea mays
  Clone ID: MRT4577_84672C.1
caatagaccctcctactgcatcggatctggatgatgctatatcaattgaaatactttcaggaggaactgtccgtattggggttcacattgctgatgtttcttactttttacatccagagactgctttagatgctgaagctcaaagtcgatctacaagtgtttacaccctgaaacataaaatctcaatgttgccttcaggattttcggaagtggtttcacttaatccaggtgtagataggcttgccttttcaattatttgggatattgatcctcatggtaacctaattagtcgttggattggtcgaagcatcatcttttcgtgctgcaagctgtcatatgagcttgtgcaggatctgatttgtaatgaaaccagtcagactaggcttgaaggttcttctcttgaagtacatggtatatttgggagagatgatgttatcaagtcacttagaggcctctatgaagtctcacaaaacttaaggaaattaagttcaagggtggagctctttctcttgatactgcaaagattatgatcatggttgatgaagatgggatccatgtgata

SEQ ID NO: 167864 - DNA, 895 bp, Zea mays
  Clone ID: MRT4577_84673C.1
ttttttttttttttttttttttgcggtacaagttccatgatatactcaagtgccttgttgataaataacgaaccgatgataatttttttttttttttttgaacatggcaagtgcgctttggcgggcaggtgccattgttcaaagagaagtaagaagttgcgggtgaagaggtcgattaaggttcctgccgttagtaacaagatcgctgatatacctccggatgagtactcgtggaggaagtatgggcagaagccgatcaagggttcccctcatcctaggggctactacaaatgcagcagtgtgaggggctgtccagctaggaagcacgtggaacggtgtgtggatgattcggcgatgctcatcgtgacatacgagggcgagcacaaccacaccggaatgccagctcagtcagcagcagcagcagcacaggtgtagccgtgtagtcgtagagaactcatcatcagttcatcactgcacccccgcctccccctccttgaggacgaagtggcaccaccaacatggcctctgttggtcaccaggtcgtcgagatgtctggtcctgcttgcgcccacaagatctgtagcgagaatggagtgtgggtgtacacaagactttctaatccatttggggggcagctggctgttgctcaggattatttattgtggtcttgttgagaggtggaagggagaaggtaaaagtttggcgggaacgggatagccgtgtaaactacttgttcatagcacaatcgtcagcggcaactgccttcatttcatttctctactacggttctgaaatctatttctgttgtttagcataggaattcttttttttgaaacgaaccaggcaggagagctgtcgattatatttataaagaagaagtggtccggatcgaact

SEQ ID NO: 167865 - DNA, 866 bp, Zea mays
  Clone ID: MRT4577_84674C.1
cattgggtacctcgaggccggccgggctcgatcgcctgcatcgacccggccaataaaaccctacgaaatctcgattcccgcgaactgttagggcggcagaaaacgcgttgaccattcacaccccttcgccccaccctccagatcccgaccaggcggcgcgccccgccctcgccggggataccggatctgcggtgccgtcgagccgccggggcaccacggccgatgcgaccagcacagcaccgctgccagaatcgccgacgaatcggctgacgcggtaaactagtctcccgcccggctcccagccgatgggcacctgcgggctcgccgcggtcgtcgtgctactcctcgcctcggctctactccctgcccccgattccgcttcagccagaagccttctggaaggcgagaaccccagctccggcgagaggaggttgtttgggtctccacaggacgctcctgcaccagccgtttctggccagtcttcagccgcggggcagcaggctgagaacaagcggcatcagaaatcactgccgccggtgacgtcaccaccgccgccgccgcccacgcaggagactaattcgcagaaggcagccagtcctcccccaggaccgaatgtcgggacggggcaggaggacacagggagtcaagggaggagggaggagactgacaaactgaaggaggccatggagaagtgtgatgcctcgcataagtgtacctctggaaaggaattttctgcttgccttcaggttcctgataatgctttagttgggccatacattattgtccacaatgaaggccagcatgatatagacattgatgtcaaagaaccatcatcaaatacaaacaatgataaaaagcctctacat

SEQ ID NO: 167866 - DNA, 2403 bp, Zea mays
  Clone ID: MRT4577_84675C.1
cttgcttgccgccgccgtggccgatcttcgctgcctgccagccatggaagacttttgtgcggtgtgcgcagatacgctggagtgggtggcctatgggtcgtgcgggcaccgcgacgtgtgctccacatgcatcgtccgcctccgtttcgtgatgggcgacaacaagtgttgcatctgcaagaccgtctgccccttcgtctttgtcactaaggccatgggtaaatacactagagtgatcactgatttctctgtgttacccgctggtgtaaatgagggcaaagctggggatttctggtaccatgaagatacaaaggcatactttgatgatgcggaccactaccggatgatacggaccatgtgtcaactttcctgtaatgtttgtgacaacgcagaagatcaggttgctcaagcaaagcgcaaaagcaagttcaggagcattgaacaactgaagggacatttatactgcgtgcataggttgcacatgtgcaatctttgtttggaggggaggaaggtgttcatttgtgaacaaaagctttatttgaagtcacagttagctcagcatatgaagactggcgactctgaagtggatggctctgaggtagagcgcaatggttttgctgggcatccaatgtgtgagttctgcagaagttcattttatggagatagtgagctttacatgcatatgtctagggaacactattcttgccacatatgcaagaggcagaaccctggtcgtgttgaatatttcgcgaactatgaggacattgagttgcattttagagaagatcatttcctatgtgaagatgaagcatgtttggaaaagaagtttgttgtcttcctgagtaaagcgcagctgaagaagcataatgctatggagcacggtgggcggatgtctcgttctcagaggaatgctgcacttgagacacctagcagctttatatatcgcagaaatgagcaagaacaacggcgtggcaggggccgtaatgctttccatgatggatctgattgtcatatctcatcgtctgcaaatgctttccatgatcgatctgactgtcatatctcatcatctgcaaatgctttccatgataaatctgactgccatatcccatcaactgcacaaaaagaccgggcagctgccgatggccatgcagggcgtcttgacaatgtttcagagtcgtttcagtcattaagtattggatccagttctagggaagctgaagttggcgaaggctcaaggactggacgagtgctggaacagttgtccttccgacctctttctgacccggatattcctgacaatagtgttgaaacctcattcccttcattatcagagcagcaatccagtctcaatcagagtgcaagggacgctccgaggcttggagatgagtcactgttcccccctttgactgggtctagtaacaagatgaagcagcctgtttttacgcctaagcgtcctcgaacttttcctgctgccgaggatatccatgctgcaaagatgcgctatgctctgggaatgaacgaggacatgtactctgcgttcaaagagatcgctggtgaataccgtcgaggtaccatagatgcttttgagtatctttcatatgtcgagcagttcggactgtcgcaccttgttcctgagatggttaggctattgcctgattctcgaaaacagagggaacttgctgatgcgcactatacaaatacacggttgaaaaacctccaagaaaatggaaataataggaaggggggattcttcttatcaaagaagaaaagcctccaagaaaatggaggtggaactagcgaatggaggtggaactagcagaaaattcatattacagaaagcactgccgacggatgatgtgaacagggcacaagcagataatatttaggacacttttagaaggcttcaatcaaaccatcttacttagaaaggagaagctgaggtgttgtccaaggatgggtattgatctttcatggggttcaaccggccgctgctggacccttcatctaatatggacagtgaaagtcatctagtgcaacggaggaggcaataaggaaccgaagaagacatcaaggtttctcagagctcgttcaagtgacaactcgttagccatgcttgatttaagacagccaagtgcaagccatgaatgtccacaaaggaaattacaaggcctagagacgtgattggtgcttggaagaagaagaatggtggggggcagaaactctttttgatcaattgacggaagagttattgcaactgtatttagacgtagtattttttgaattttgagatagagtcgtggtattgaaaaatattacagtatttttttccaagaagtgtttggcaaccttgtaaaaacactctcttttgaatactataatttagtagttactatggtttagtag

SEQ ID NO: 167867 - DNA, 586 bp, Zea mays
  unsure (1)..(586): unsure at all n locations
  Clone ID: MRT4577_84676C.1
tcgaggcnncggccgggccgggatttcacccacacacaaggctgaccccaccaactagaagcgaaaatctcccgatcccctctagtctccgcggcgaaaatgacaagacgcgcgaagggcgggaagggcctgggcaaggagcgcagcgaagcgccaccggaaggtgctccgcgacgacatccatgggatcacaagaacgccatccgtgggctggggctcacgggcggcatgcagcgcatcgccgggctcatctacaaggagacccgcgtcgtcctcaagatcttcctggagaacgagatccgcgacgccggcacctacgccgaggacgcgcgccgccagaccggcacagtgatgtacgcctgctacacactcatgcgacagggccggaccctctacggattccgcggataaggtaggaacggtcgcgcctcgctgtcgccgctgcggctctattgtctttgcaaatcgcaagatgtgattggggggcgaaaatgcttggttactggaccgctagatcaagcatgttgtgcgtgtgtgaataaatgccaattgtgacttgctgcttgtccaaaaaaaaaaaaaagac

SEQ ID NO: 167868 - DNA, 323 bp, Zea mays
  Clone ID: MRT4577_84677C.1
aaagaggcgggttctgggagggaaagtcttaccatatatcctcttttatacacacgtgacagtacattattttttatacacagacaccctctttgataagcaagtagacccccccccaaggggggggccctgctaccttgatttattttttagggagagaggcaaacacacctgaagggttgctttgcagcaaccataaatcagctactagtggcatcatcctcccaaagggttttggttcctgcatgccatgttggccccgtaccccacttggagaataccggaataccttttgtagtaacccacccggcccttggcgggtt

SEQ ID NO: 167869 - DNA, 265 bp, Zea mays
  Clone ID: MRT4577_84678C.1
atgactcatcatataagaatactttttaaagcaacactggcactacatacaaaactattccaaagtatgatctgcataaatcgtataactctctcactgaataacgaaataagcatttaattgagtcctataatgcaacatattacccatgcattcacatatcgtatgacttctatatatacttctcttctttaaataacattataactctaactttccctttcatcaaattttataataaagaaaaacaccctacttcccctat

SEQ ID NO: 167870 - DNA, 223 bp, Zea mays
  Clone ID: MRT4577_84679C.1
acgcatgcgtgctctgcgtcgatattgactagtaggactgctgagcccgctagaagcgggagcatggacacccaagtgaagcttgctgttgtggtaaaggtgatgggcaggacctgctccaggggtcatgtgacccaggtcagagtgaaattcttggatgaccagaaccgtctcatcatgaggaacgttaagggccctgttcgtcagggtgacatactgaccc

SEQ ID NO: 167871 - DNA, 571 bp, Zea mays
  Clone ID: MRT4577_8467C.1
gtcgacccagcgtttctaaacttaaactgtataataaatagttggtttatttaccctggattcattgatcatttgaaagtctgaaactaaaatgagttaaattgaattagatagaaatagaaataagagagaagggatataaaacaaaaatataaataatatatatataaataaatataggcagaattaatatccctaacttcacaaaaaaataaagttgaaatgatgagccataaaagtttgaatttaagtttgaattcaaattggatttgaaaatggagaaaagaaaatagaaaataaaaaggaaaaagagaaaaatcttaactgggctcactgctgggattttggcccacctagagattacctcgcgccagcccactacaccgattcctggtgtgcgccgacatcccggtcccaccgaccagcctctctcgcacacgcgcgcgaaacttcactatcgcgcgggcccgccctggcagccgctgcgcaacagcccacactcccgcgcgcgccctctgattctttttcgccgacatgcggggcccccacgtcagcctctccaccgcgtttg

SEQ ID NO: 167872 - DNA, 202 bp, Zea mays
  Clone ID: MRT4577_84680C.1
gaaagccaatatgaaggtggtaatagatgtgtcttacagtggacgctgtattaagagtcttcctcacaggaaacaacagttcaagcgcccgtggcatagattcctagatggcgcccaagctacagttacacagtgtatgacctaaaatgaagttaattttgcattataagagcacaccgttatctatgtaaaaagtgttcat

SEQ ID NO: 167873 - DNA, 385 bp, Zea mays
  Clone ID: MRT4577_84681C.1
ggcacgcgtggtggaaccctaagtggtggacctcatggacgtacttaaggattcggcgggacttgcggatacgggtcttgattcatgtgaggaatgaggcgtgcagtttcactttcactttaactctgataatgaccatgcataagcgcattcgtgacttaatgacaaactaagtgtcaaaggacgagtctttcaaattatcgtgcgcactacataatacacttcatgccatatgttgatctcctatttgctatactaattatgatactgaatatgctttagaaaaaacataaaaaaatacaaacaataaaaacatatcaaaaacaacaattcacaccaaggctgaaccaaactagatcgagtaaccctgaagggttgtagcttc

SEQ ID NO: 167874 - DNA, 875 bp, Zea mays
  Clone ID: MRT4577_84682C.1
ccgctcaggcggcgggcggggattctccccacagattcacatcgcaaaacagaaagaaagaaagaaaaaaagacagagagaaagcagcaatggagtcgctgactctgcgcgcctcgccgtcgtcgaccgcctcgccgctgctccgcctgcccggccggcggcgcgcggcgtccgtccgcgtctccgcctccggcgccggcgccggcgagccggacctgtccgtgaccgtgaacgggctgaagatgcccaacccgttcgtgatcggctccggcccccccggcaccaactacaccgtcatgaagcgcgccttcgacgagggctggggcggcgtcatcgccaagaccgtatccttggatgctggaaaagttatcaatgtaactcctcgctatgctcggctcagggcagatcctaatggatctacaaaaagtcctatcattggatggcagaacattgaacttatcagtgatcgacctctcgagacaatgcttaatgagttcaagcaactgaagaaggaataccctgataggatactcattggctcaataatggaggaatacaacaaagctgcatggcatgagcttattgaacgtgttgaggaatctggagtggacgctcttgagataaatttctcatgcccacatggtatgcctgagcgaaaaatgggtgctgctgttggacaggactgtgccttgttagaggaggtttctggttggataaatgagaaggccactgtgcctgtttggtctaagatgactcctaacattacagatattacacagccttcaaggattgctcttaagtcagggtctgaaggaattgccgctatcaacacaattatgagtgtgatggggattgatctcaaaactttgcgccca

SEQ ID NO: 167875 - DNA, 493 bp, Zea mays
  Clone ID: MRT4577_84683C.1
gcttgcagtaccagcaatccagagcggggcagatctaccgagatccgcgtcacagaggagagagagatcgccatggtggcggcgctgggacccggccggttctacggcagcggcctgccgaggccacgcttcttcccgggcgaccgcgtggacccgccggcgtccgtcaccgacccgctcctcgactgggcgcgcgaggcgcactggtccatgggcggcttcggcgtgaagcgcctccgcctgcagggccgcatcgagggctccatcgacaagctccgccgccgcacgcgccgcgacgccagggccaagaccaaggcccgctctgctggccacgtgcccgcctcgctgtccccgctcggctccgaggacgaggcggaggaggtggcggcgccggagcgggcgctcgtcgacgacgacgtggactcggacgggtccgacgagtcggagggggaggaggaggacgagcccctcgctgctatcgtcaccgccgcca

SEQ ID NO: 167876 - DNA, 349 bp, Zea mays
  Clone ID: MRT4577_84684C.1
aaagcgggaaaatgcctgggccaatttttttttgacccccttggggggccaacacatgacccgattgtttaaaaaccccaaccgggtaagggcagttttataattccctaacccgggaaggggcttccccccctgcttattttgggctgcacaagggccccacaaaaattggccccatttttacattaaaaaggggccgtttttttaaaaaaaaggcgcccactaaaaggcaaatttttttaggggattaaaaaaccttgttttaataaaagtttgaaaaaaattgttttttcttcccggggttttccccaaccaaaaaccctctgggataaaccttcttttttgaaaa

SEQ ID NO: 167877 - DNA, 1901 bp, Zea mays
  Clone ID: MRT4577_84685C.1
ggctgctgctaagctgggtgtccttccttcaaaaaacacatttgtttcggtggttccaaattatctaagcttccaaaatgatgagtgagttgaggcccttcttgataagattattcattgagccttttgccatcaattcatgaatgatgaagaagagcttggttgtgggggtaaactctgcaacccaaattgccttaaaaggaagaatcataattctctagtaaagacacaagacactagtagatgatctattgtctcagattcctgatcacacaagggacatctatctgaatgattcaaacctcttttagccaatctatctgtcgtccaacacctcttctgagctgcaagccaaaggaagaatcgacactttggaggggcccaagatttccacacccttttgtagtatcaaaagaacttgatcctaagaaaaaaccctcataagcaacttttgccgaatatttaccatctgatgccaagctgaaaatatgtttgtcttccatgctaggctgcagctcaacactggatactaaatcccagagatggagatagtccactaaggctccaactgatagagctgagagctccttaccccatgccaccagacagtgcccaccttttacttcctttcgacccctccatagaaatcctttccttattttgtcaatagcatatacaacccattggggaatgtcaattgccattgccaaatagatagaagctcctgtgagaacatgctgtacttgaactttccttcctgccctggtcagtaaatcagccttccaactttgtagctgatctgcaattcgttccagaaacggctgaaactgcttcctggttactttgtgcagggatcgaggaagacccaaataccaacagggtaaggtagatatctcatatggcagtagattctgcacctccaataagtcgtcctcaggacaatgaatgggatataccttagatttttgtgcattattgtgaagcctttttccacatttattatcaagaagacccagcaacagagggcagtgatcagagtctccagatgctgtactttggagaagaacattggggaagatggtttcccagtcgactgaacagaatactcgatcaagcttgactaggacagggtcatcctgctgatttgaccatgtaaacctgcgtccatgaagtggggtttctttaagagctagatcatcaatcaccattctgaaacggtccatcatggctctatttgtgttagaattattcttctctgaagttctgtatatgaggttgaaatcaccagccaatacccatggtccaaggcactcagctctgatatctttaagctcttgtccaaagcctcttggcttaaaccatactattaaacccctttcttttgctcttgggaatcttggttgaagcctttctctgctacaacgcctcttcccggccctgagagaatggatgagacgggcaggttcagtctgaatagccttgagcgctacaacatctgacgaggaaatcccagaccgttttgccaaagtcgagcatggatggggaggggcagatgcaagcggagcagtgcaggctgctacaacgccatccaccaattcctcagaatgagttactgctgtttggtgttggatgatccaccttgaataaactttcagagttggcacatctaaggcttgagcttcaactggtagtgtttttccctcgagcagtcgtgggtgatctgcattagtcgtctcaagcggcccagtattatcctgaggcgagactgactccagaactcccagccctcgcatcagtagttcagtactgtgatgaggcgatcccagcacatcccactccagcggcccaacacagaaatcatgcaaggggcaaagttgggctggttgagtcctgcgtcccat

SEQ ID NO: 167878 - DNA, 596 bp, Zea mays
  Clone ID: MRT4577_84686C.1
cattgggtacctcgaggccggccgggaagctgttgccaccgtaagtcacaccgagactgagttcccagcagcctagccgcgcgcttctgcttctgctgacatcgccgacggccgatctgcttctgttgcccagccacgcgctggaggtcgcccgtcagccgctcgccaggtgctcgcccgcggcccgtcagcctgcggcggaggtgcttgccaggtgctcgcggctcgctcgtcagccgcccgtcagtcgctcgccaggtgctcgcccgcggcccgtcagcctacactggaggtgctcgccaggtgctcgctgctcgcccgtcagccgctcgccagcagccaggtgctcgcccgtcagcctgaggcccttcgccggaggtgctcgccaggtgctcgccataacccacggaacctggaaccctcctcatggcgaacaccggtggttctgattgacaagcaccacggaaacctcctccgacactgcaagattcaagatcacgaaggccctcctcaaacaggtcaagtgctagcctgtgtattgttgttttttttctgacttccgattatatttttgctgttgaacatgctatattgct

SEQ ID NO: 167879 - DNA, 655 bp, Zea mays
  Clone ID: MRT4577_84687C.1
cctcgagtttttttttctttttttttttttttttttttttttttttttttttttttttttttttttttttttttatcatcaaccccttttttttcacaaagtctcacaaaacagatcaccctaaaggcgggatcttcacaaaacaaatccaagtttgcattatcactaacatcaccaagtttttcacaagataaagggtaactaacatccccaaccctcataaggggaagtctggatcatcacaaaacaaatcatcaacggggggggcttttggactggttcgggaaagggctggacaaaacatgagggttgttccacccccccgattgaccaggagtagggaactttgtagggtcagctgcagggaacaacgggggggggggagcatgaccctgggcggggccaaggttttgtatgtacccaaacatttccgccatccttttttttagctcctaacgttgcctcctttcataatttaactgagtctggagttgctggatacaatgctgggaggggtcctgccgagggcgtatgggtgggctcgcgctcgggctccttgctcccacctgaaaaaaagggggagtggaggacaagtcaattgccccgtcggaaatccagtaccgcccatgccttttgcctcctccgacccttatga

SEQ ID NO: 167880 - DNA, 227 bp, Zea mays
  Clone ID: MRT4577_84688C.1
gcttaaaagccacttatctgttatgactcatgactcaacaagacgcagaccttcccgaacaaaataaggacctgacacggccactctttattgccccgactgctaccccaatcaagtcacaccctctgttcggatgtacacctatcacgcagctgctactgctagcagcaagaagcaaacccacgacggatgtgtatattacctactgagctcgagccgaattacgg

SEQ ID NO: 167881 - DNA, 362 bp, Zea mays
  Clone ID: MRT4577_84689C.1
attggcgccaactctcctaccatgccatcataactccacgccgttagcttaaaattcatgctcgcgcccgtcacatttcttctcaagccagatcaactcactctagagcgtttgaaccccaactactccaaccattatctcaaactctccaagctacacacactgtctgacctgctcgaaactcttttcataaccgacagtgtcctcaatcctaacaccaccacttaggacgactcgctcacttacaagatgcagagcagccaccatactactattcactctcatccagacatgcaccacaccactacatacatcatcatgaaggaattcctttctggctcctcccgagtgctcatcaccac

SEQ ID NO: 167882 - DNA, 423 bp, Zea mays
  unsure (1)..(423): unsure at all n locations
  Clone ID: MRT4577_8468C.1
aatanttttctttttttttttttttttttttttgggtttttttttggttttttttgggtttttcaaaaaaaaaattcctttttttttataggaaaaaaacagttccgggcaaaaaaacaacccccaaaaccaattggccttttggggttttttttgacccttttttggttaaaagggacaacaattggatattgccgccattgtccaaaggacccttaatttggggggggttcttttaaaaaaaaatggggaaggttgggcaaatatcccaggggcgggatgttcccgaaaccaaataggggaagcccccccccgggggagggggcccctgggacttccccttgcccgggggggttgtttaaaggttgggggggtggttttttcatttgggggggcaagttccttgcccttgggggcttttaa

SEQ ID NO: 167883 - DNA, 332 bp, Zea mays
  unsure (1)..(332): unsure at all n locations
  Clone ID: MRT4577_84690C.1
tcctgntttctccccaccgccccgcagccgtgagaggcaccacgcccccacccgagcctgtagggtgagtcggcttcttccaccggcaacacgtctccgctggtcccctccatcaccatcgctggtccctctccgtcggttcccctccgccgtcactggacctcgtcgtgagtcgtgaccgctgataccagtcccctacgccgccgtcgtccctacgccgtcgtcctcctctacatcgccaacccttaaggttttagactagaacgtcgccgtcaaaccactaggcgccaccgcgccagtagttcctacgcgctccgcccaggccccagtag

SEQ ID NO: 167884 - DNA, 1445 bp, Zea mays
  Clone ID: MRT4577_84691C.1
aggcggtgacaccagtccccaaaaacgtttatggtcataaagtctgcccttcttttgtcagtcggccaattttttttgcatacaatgccttcgtttaagtatcgaataagttgctgcgcctaagaaagaaaaaaaaaaaaaaaaaaaaaagcttgtacaagcttttgtcttgcttttttttttttttttttatacgaaacttttaccatctccctttatcaataaatactatgccacatcaaattatttaatgttcatgaaactttcataaaaccccattgagatcggtataaacccaagcactaatggatgcacacttgcacagaacataaccccaaagcaaggcatgcggctttgacctgaaaacccatctccagttctggttagctattagtcgattaaactactcgacgtgcagctaccgctttgatttctgtggtttgaaaatgttgtgcttgtagtacttcagttcggcgatgctttctttaatatcatccattgccctgtgggttttttgctttcttggagtttgtttcctttctttcgggtaccatcgtatgcataaagccattatactactcacatcgacaattacatgagagaagacggctgcaagctgtggcatgtacttcttcagaaatagaaaatccacataaacagaattcccagctaataatggagtgcctgaatttatgtgcttcctaacaaagtctaaaacttttgcctctgcatcatgctcagaaagttcactctgcagtactctttccgtcaaaccactagctgcatgatgagttttgcaccattcatccatattatctaaacaatctttgctctggcttataactaagtcaggaccctctatttgttttgtaagtttgccatccgttatgatacaagcaatctccaaaatccgatcttttgttatatccaaaccggtcatttccaagtcaatccataccaaaggcatcctgtaatcactagatgatgatacaagtgctgcctcctcatagtttactgcagttgtgtcattctgctcatttttatcaggtttgcttgcagcagttttgtctgtgctggaagacgcctgtggtacttcagctcggccaacatcttcattgctttcagcatccagacacagagccgagaacatatttgcaagcttactcatctaaaaaaatattgatcttgagctgatacagttgaatccttaagggttggcgatgtagaggaggacgacggcgtagggacgacggcggcgtaggggactggtagcagcggtcacgactcacgacgaggtccagtgacggcggaggggaaccgacggagagggaccagcgatggtgatggaggggaccagcggagacgtgttgccggtgggaagaagccgactcaccctacaggctcgggtgggggcgcggagcctcgctcgactggagcgcggtgag

SEQ ID NO: 167885 - DNA, 316 bp, Zea mays
  Clone ID: MRT4577_84692C.1
gcgtccgcccacgcgtccggatacgcactcacctgcgtttctgctgcattctccactgctatctcgcaggcttgctctactggatttatgggatctcataacttgccctcccccggatccgccattccctcgtgccctctctccgtaccctcaaccttatggctcctttcttgcttgcctcaacaatcgccaaataacaggactagctggagccgctgaggatctttacgagcgtaagctatgacggccggttccctgcgggcaaaagaacagaaaaggaacctgtcttgatgtccacgacgtcgctaggctcgac

SEQ ID NO: 167886 - DNA, 358 bp, Zea mays
  Clone ID: MRT4577_84693C.1
cttaaagtaaagaaagaactgatctgaactgcactgctattcaaattcaaaccaactggtctctgaaagcaagccccggaatgcatggagagaagatgcaatcagcacacacaccaaatgcgctcgttgagaacacgcacttaacacacgcacgaaccagggcattccccataacacaaggcccgctttcaataggccaaaaaggctggtggggccctcacccttggggcgctatttggcggacaactacggcgccacgaaggggttctcgccgaacctggccttcgattgagacctttttttgtccaacagactgtacaacattgccagctcggtggtgaactttttctacaacccc

SEQ ID NO: 167887 - DNA, 657 bp, Zea mays
  Clone ID: MRT4577_84694C.1
ccccctctcgagtttttttttttttttttttttttttttttttttttttttttttttttttttttttttttttttttttttttttttttttaaaggccagggggaacacctttgttttttgccaacataaaaggggcggttgttaacggggtcgtttttgaaactttcacacaaaaacaagagggccctccgttccaatgggcagcaaaaagaaaatcaacgaacagtcccagaaaagttttccaaccctttgttcttccccccccaattaagcggttttcacccaagcaaacggggaatccaaaaacctgctccccaaaagagggggcgatgcccctcgataaaaaaaataggggaagttcacgttcgggggaaaaatcgggggggctttttcaagcccccagaaaaaaaacctaccgggtttaacatttcaccgtgggggccagctacttttaacatagggttactttggctacagttgggttaagcccttgcttttaaacactgaaaatttttccttgggaacccaattttccagaccaacaacaatgacaagccccggccctgagcttttttttgttcaccaaattttcaaaccaacggggacgggcattcactgaaaacataggcggcccttgcttaccagtttttcttttc

SEQ ID NO: 167888 - DNA, 546 bp, Zea mays
  unsure (1)..(546): unsure at all n locations
  Clone ID: MRT4577_84695C.1
gttctgagnagtccgtcgtcgacaagctgcaaacctcaggactgggcggctccggagaaggctcacacgccgctcgttgccttcccggcgacggcgctggtggtgccagagccgctcggggtcgtgctcgtcttctcatgctggaacctcccaataggcctagctctggaaccgctctcgggagcccacctcggcgttcctcgcggccaacatacccaagtacctggactccaaggccgtgaaggtggtggagggcgggccggaggtgggggagaagctcatggagcaccgatgggacaaggttctcttcactggcagcagccgcgttgggcgccttatcatggcccaggccgccaagcacctcaccccggtggcgctggagctcggctccaagtgcccctgcatcgtcgactggcttgacagcgacagggacagccaggtagctgtgaatcgcatcatcggagcgaaatggtcgacctgttccggccaagcctgcatcgccatcgactacctgctggtggaggaggagtttgctccggttctgat

SEQ ID NO: 167889 - DNA, 2114 bp, Zea mays
  unsure (1)..(2114): unsure at all n locations
  Clone ID: MRT4577_84696C.1
ggtacctcgaggcccattgggtacctcgaggccggccgggacacagcccaggctcgagactacaacgttacagcacaacacactgctgcacgtacatacgcagatagagaccagcagcaagctcgatcgagactcgagaggcatggggagtgtaccggaggagaaggccaagctgggcttcggcggcctggtgggcgacctgagggaggtgtacgagagcggcaggacgcagggcctggagtggcggcagtcgcagctcaggggcctcgtcaggctcctggaggagaaggaggaggagatcttcgacgtgctccacgaggacctggggaagcaccgcggcgaggccttcagagacgaggttggggttctgaagaagtccgtcgtcgacaagctgcaaaacctcaagaactgggcggctccggagaaggctcacacgccgctcgttgccttcccggcgaccgcgctggtggtgccagagccgctcggggtcgtgctcgtcttctcatgctggaacctcccaataggcctagctctggaaccgctctcgggagccctggcggccggcaacgccgtggtggtgaagccgtcggagctcgcgccggccacctcggcgttcctcgcggccaacatacccaagtacctggactccaaggccgtgaaggtggtggagggcgggccggaggtgggggagaagctcatggagcaccgatgggacaaggttctcttcactggcagcagccgcgttgggcgccttatcatggcccaggccgccaagcacctcaccccggtggcgctggagctcggctcctgcctagctctggaaccgctctcgggagccctggcggccggcaacgccgtggtggtgaagccgtcggagctcgcgccgtcggcgttcctcgcggcatacccaagtacctggactccaaggccgtgaaggtggtggagggcgggccggaggtgggggagaagctcatggagcaccgatgggacaaggttctcttcactggcagcagccgcgttgggcgccttatcatggcccaggccgccaagcacctcaccccggtggcgctggagctcggctccaagtgcccctgcatcgtcgactggcttgacagcgacagggacagccaggtagctgtgaatcgcatcatcggagcgaaatggtccacctgttccggccaagcctgcatcgccatcgactacctgctggtggaggaggagtttgctccgattctgatcgagatgctcaagtcgacgctggagaggttcttcaccaagccagagtacatggcgcgcatcctgaacgagaagcagttccagaggctgagcggcttcctggccgaccgcagggtggcgtcttccgtggtccacggcggccacttcaaccccaagacgctgagcatggagcccacgcttctgctcaaccctccgctcgactccgacatcatgacggaggagatattcggcccgctgctcccgatcatcacggtgaagaagatcgaagacagcatcaagttcctcaggtccaagcccaagccgctggcgatctacgccttcaccaggaacgagaagctgaagcaacgcatcatagacgagacgtcgtcggggagcatcacgttcaacgacgccatcgtgcagtatggcctggacagcatcccgttcggtggcgtggggcacagcgggttcggccagtaccacggcaagtactcgtttgacatgttcagccacaagaaggcggtgctcaagaggagcttcctcgtcgagttcatgttccgctacccgccgtgggacgagaccaagatcggaatgctcaggcgcgtctaccgcttcgactacgtctcgctcttcctcgcgctcatcggcctcaggagatgaagcagccggcggagagtgcgtgaacaatcgagccaacagaatttgcacccacacccaacacacagttgctagtggtcaattgtcgttcatactgatcgatgaatatgtaattgtnccttctgtacaccaaaacgtctgtagtgtcgttnactcgttttanacgtgtctgtctatttatcgcaccaaaagatatttaataataatggatttaaaacttnctaaaaaananaaaaaaaaaa

SEQ ID NO: 167890 - DNA, 266 bp, Zea mays
  Clone ID: MRT4577_84697C.1
atcatatctagctagtagctccctgacaagttcactagagaagcatttcacggaggagccatgtctgacgagacgcaccaccagcacctgttccaccaccgcaaggcagaggaggatgaaggcgcctccggcgaggtcgactacgagaagaaggagaagcaccacaagcacatggagcagctcggccagctcggcgccatcgccgccggcgagtacgctctgcacgagacgcacaaggccaggatggacccggagaacgatcacgg

SEQ ID NO: 167891 - DNA, 1482 bp, Zea mays
  Clone ID: MRT4577_84698C.1
agtctggccgccacgcgtccgcccacgcgtccgcccacgcgtccgatgttttgtgttcgttccacgtgtctgtgcacaggcctagctctggaaccgctctcgggagccctggcggccggcaacgccgtggtggtgaagccgtcggagctcgcgccggccacctcggcgttcctcgcggccaacatacccaagtacctggactccaaggccgtgaaggtggtggagggcgggccggaggtgggggagaagctcatggagcaccgatgggacaaggttctcttcactggtaatgaactacgtacgtaatgcatgagcgtgtatctgcgttaccacctggtgtctctctcactctcaggcagcagccgcgttgggcgccttatcatggcccaggccgccaagcacctcaccccggtggcgctggagctcggctccaagtgcccctgcatcgtcgactggcttgacagcgacagggacagccaggtagctgtgaatcgcatcatcggagcgaaatggtccacctgttccggccaagcctgcatcgccatcgactacctgctggtggaggaggagtttgctccgattctgatcgagatgctcaagtcgacgctggagaggttcttcaccaagccagagtacatggcgcgcatcctgaacgagaagcagttccagaggctgagcggcttcctggccgaccgcagggtggcgtcttccgtggtccacggcggccacttcaaccccaagacgctgagcatggagcccacgcttctgctcaaccctccgctcgactccgacatcatgacggaggagatattcggcccgctgctcccgatcatcacggtgaagaagatcgaagacagcatcaagttcctcaggtccaagcccaagccgctggcgatctacgccttcaccaggaacgagaagctgaagcaacgcatcatagacgagacgtcgtcggggagcatcacgttcaacgacgccatcgtgcagtatggcctggacagcatcccgttcggtggcgtggggcacagcgggttcggccagtaccacggcaagtactcgtttgacatgttcagccacaagaaggcggtgctcaagaggagcttcctcgtcgagttcatgttccgctacccgccgtgggacgagaccaagatcggaatgctcaggcgcgtctaccgcttcgactacgtctcgctcttcctcgcgctcatcggcctcaggagatgaagcagacggcggagagtgcgtgaacaatcgagccaacagaatttgcacccacacccaacacacagttgctagtggtcaattgtcgttcatactgatcgatgaatatgtaattgtcccttctgtacaccaaaacgtctgtagtgtcgtttactcgttttatacgtgtctgtctatttatcgcaccaaaagatatttaataataatggattattatctttctaaaaaaaaaaaaaaaaaaaagaaaaaaaaaaacgcgtg

SEQ ID NO: 167892 - DNA, 750 bp, Zea mays
  Clone ID: MRT4577_84699C.1
gccacgcgttcgaccacgcgttcggtcactggccacaggcaggcaggaagatcggacgagtcggcgaggaagctgcctgctttcagatagagagagttattaagatggcgttgcttcggctgcttgccatctccctgctcttcgcagtggccactcctgtcagggacatggcccacgatgcctgctcgtcagaaggcagggaggtccacgacaccgaacgctcaagcagaggaagctttccgcccgggaacgccatggggtcgcttcctctccttgctgcctgctgctccctcctgctcacggtcgcagctcctgcccgggacagcactaccagcgtctgcgcttcgcaaatcggcggatcaccaagggtcaatggttctagaggcctactttctatgtgcacagaaaaagatggaggaggacccgttgacaatgcaacagaggagaagagcttgtgtctgatatctctcggggaaggaggctagtgccttttatagatggatcgggtgctccaatggtcaactgaaatagatgaattcatccatgaatgaattttgttgttacctaaaatgtttagataaacttagttgttgctagttatagacaccatcattcatccattaatgtatgttgaaaacgataaaactttacgttgatgagcatgtacatgttattgtctagtgtttggaatttgtaaaccaacaaaaaaacttgacatgatgatttttctcttaaaaggcccctagggcc

SEQ ID NO: 167893 - DNA, 267 bp, Zea mays
  Clone ID: MRT4577_8469C.1
atcatgcctggagacgtcgaggttgatctcggagctgtgattctcgctgcaggacgcctgcgtctctctgacgttgaggttgatgagctccgatgccgccttctgcctccctccgcctcccttgagcgccatgatctgcatgcgaaccagcagctcacgcacatcacatgacgacacggactgcagaatgcatgggccggggtgtggtgtggggctcacaaagagagacgcacgggacgtgattggtagatggatcgagtggctaat

SEQ ID NO: 167894 - DNA, 280 bp, Zea mays
  Clone ID: MRT4577_846C.1
gaggggagggggctcaagattacattattgtaagtgttcttttttagtaagttagtgtgtttctaataataacattatcattaatgtacaggaaattctgtagttttagaaaaaattttgtcgtacagtaaaaactgaccattatgagttccatacatggagactgctgcatgtaggcaattattgtctaagagcttattagttttatacaatctttttaacggaggagtatgttctccagtgcagaactgatgacgcccaacattactatacaaatgct

SEQ ID NO: 167895 - DNA, 444 bp, Zea mays
  Clone ID: MRT4577_84700C.1
aaaaacccccaaaaccaacctggggtttgcccagggggggggccaaaaggcaaaatttaacccaaaacaatggggggggggggaaaaacccaaaccaccccctttggggggggctacgggccacccctttcgacccggcccacctaaaaaagggcactactgttttgggggggttgtttttaactaagggtgaaaaccaagtggggccttgcccccatgcctgaagcttcctgttcccaagttaaaaaacctcaaagggaagggcccccttgattttttcgaggggacaagaaaagagggtgtacacggggtccactgaccccaccggaagttttggtgggggcgggctgttcaaaaggatttggaatgcaactgggaacaacaaccccggtgatttgggcccaaccccaccggggcttgacccaggggggaaaatgacaaaac

SEQ ID NO: 167896 - DNA, 168 bp, Zea mays
  Clone ID: MRT4577_84701C.1
gcacgcgatcctgccttcagtttactgggttgcgttgtgcttgcagtggacgacgaaacgacgaaactgctgctgaatccacctcatgctctgtatctatctgtaccacacggcgaatttacatcagacggacggttatataagaagggatctgtacatttctctgtc

SEQ ID NO: 167897 - DNA, 705 bp, Zea mays
  Clone ID: MRT4577_84702C.1
ggtaccggcgccttccctcgagtttttttttttttttttttttttttttttttttttttttttttttggagagaaagggggtgggaaccactaaaccttaagagaaaaatcatcatgtcaagtttttttgttggtttacaaattccaaacactagacaataacatgtacatgctcatcaacgtaaagttttatcgttttcaacatacattaatggatgaatgatggtgtctataactagcaacaactaagtttatctaaacattttaggtaacaacaaaattcattcatggatgaattcatctatttcagttgaccattggagcacccgatccatctataaaaggcactagcctccttccccgagagatatcaaacacaagctcttctcctctgttgcattggcaacgggtcctcctccatctttttctgtgcacatagaaagtaggcctctaaaaccattgacccttggtgatcctgcttgggataagcgcccgattaggtttttggggagcactcaccatgactgcttcatctacttctcgaaaacgtttgtggtcgccgatttgcgaagcgcaaacgctggtagtgctgtcccgggcaggagctgcgaccgtgagcaggagggagcagcaggcagcaaggagaggaagcgaccccatggcgttcccgggcggaaagcttcctctgcttgaggccgtctgtct

SEQ ID NO: 167898 - DNA, 276 bp, Zea mays
  Clone ID: MRT4577_84703C.1
caagtctgcagtcatcaagtcatgaccccgtgtggtgctggcatggactgagtcgcctgtgttgggttgtggtgtgctgaactgtgggcagcactgttggcctgaactgtttctgtgctaagggttagtgttttcaatgtgcgaagggactgaagcttagggcaaagtgtgggcagatgttaggcaccgaagcaaagcaggcccctgaggattgcatgcagcggtggagcctgttgggagcgaaagctctgggagagacgtgaggctagtgctgct

SEQ ID NO: 167899 - DNA, 402 bp, Zea mays
  Clone ID: MRT4577_84704C.1
gggaggaaaataatataactttaaaacatatttcgggaaaccccttaacttaaaacccaaaccaaacccaataacctcaacccaaaggtttaaacattaagcataatggaaaagggccctataacttaaaattagaaaccccgggaccccgcccctttagcacccaaagggggggggggcctatagggggcaacccgccttaaaaggggggccctgggccccgatggaagcttaaaagtggacaaagggggggggtatttttttccatcgcccccttaaaactataaaggggccccgggaaggctggggctggacccttaaagggttccactttttcccaaaggccattttttttttgcttctggggccccagttcatccgagaagggggggaacctttgca

SEQ ID NO: 167900 - DNA, 298 bp, Zea mays
  Clone ID: MRT4577_84705C.1
attcggcatacgagctggttcgaccagctcacttgttgccgccgccctttttttttcgataggggggatcttttacaaaatgactgagggggtgcactctcaagcttcaactacaggccagaggaccaataaagtgactcgggaagtgaagcgcaacttgatctgattacttgtgaaggaagtatactgggggatagtccggttaacaacagtctatccgtgccgtgacagagtagaactgaatgtggggcacaaggggaagtgtgaccaacagtcaatttgccatctagcaggcaat

SEQ ID NO: 167901 - DNA, 484 bp, Zea mays
  Clone ID: MRT4577_84706C.1
gggggggaaaaaagggagattgaatttgacaactttttcctgtaaaaaatacaaaaacagggttggggcccaaacaaattctgaaaattattctttggccaagggctgggaaaaaaaaaaaacaaattttgagacccaggggttgggaaaaaaactgggggaattgcaaaaagggtccccatgcaaatgggggctgaaaaaatccttttacccctaaaacctcctaaaggggggctccagtctaagaagaaaccccaggcggtttttttagggaaagaaaaacctgggggaacaagaccttatcccccacccttgaaaatgatcccaaagggggctaggcccttcccggggaggacccctggaacatacaaaaatccggggttgttgaatccaagggacaggtattaaagggagggttgggagggaattcccattgcctttaaaaagggcccttccccattggaagcagcgcattgcccaggaa

SEQ ID NO: 167902 - DNA, 402 bp, Zea mays
  Clone ID: MRT4577_84707C.1
cacatgacccgagcgtgaagaagccatgtcctggctcggtaagggtggcaaggggctcggcaagggcggtgcgaaacgtcaccggaaggtgctgcgcgacaacatccagggcatcaccaagtccggagatccgtttgctggcgaggaggggcggcgacaagcgcatctcgatgctcatctacgaggagacccgcgtcgtgctcaagatctttctccagaacgtcatccgcgacgccgttacctacactgagcacgcccgccgtaagaccttaaccgccatggacgtccactacgcgctaaaacgccatggcccaaccctctacgctttcctctgctaggctcaaggtatcctcgatatgatctccccttctggagatgccatactttgtggccgtgcccaca

SEQ ID NO: 167903 - DNA, 682 bp, Zea mays
  unsure (1)..(682): unsure at all n locations
  Clone ID: MRT4577_84708C.1
cccgcgcgtctcggcgctcggtggagggcctcgaagagagccggggaagatctggatccgcgcgccacgccgttccagatcctcggcctcgacgccgccgccggctactccgccgccgaactcaaggccgcctttcgcgcccaggttaaggaattccatcctgatgtttgcaaggacccagaaaatgcagatttaataatgaggcgagtgatcgaggcctaccagatgttatctggcaaccaagaaatgatgtttgaaaggaacaatgttgacccatttgatgaacctgagtgtgaagctcgtgacatatttgtcaatgaacttctatgcattggcactgatgatactggtacagctcgtgcaatatctcaaggtaatggagaagatgatcttgttcagctcgctgttgggcagtgtccaagaaagtgcatatactatgtgacgccttgccaacgcactattttggaggatgttcttgctagcagttctggattccctcctttcaaaagcgaagttcgagaataacaggtataagaagccccaaagaggagcaaaatcatcctccgattatgttgattggatgtgatctgatcccgagacacaaagaggatgccagattcagccgaaggcagttcggtagatttatgctggtttgcctattctncttgtccttggtcagttg

SEQ ID NO: 167904 - DNA, 726 bp, Zea mays
  Clone ID: MRT4577_84709C.1
atcgccacacccggacaccccacacaggcacccagccacgcgagcggcgaaactgcgggagccaatcagaacctacagcgatgcaatgatcgccgtcgcatcgtccttcccctcgcgcgcccacgcggctccgttcggctcggggacactgccaccgccgtctacgcggcgcagcacgtccctccgccacccgcgcgtctcggcgctcggtggaggcctcgaaggagagccggggaagatactggatccgcgcgccacgccgttccagatcctcggcctcgacgccgccgccggctactccgccgccgaactcaaggccgcctttcgcgcccgggttaaggaattccatcctgatgtttgcaaggacccagaaaatgcagatttaataatgaggcgagtgatcgaggcctatcaggaacaatgttgacccatttgatgaacctgagtgtgaagctcgtgacatatttgtcaatgaacttctatgcattggcactggatgtccatattcttgtgttaaaagggcacctcatgtattttcattttcagatgatactggtacagctcgtgcaatatctcaaggtaatggagaagatgatcttgttcagctcgctgttgggcagtgtccaagaaagtgcatatactatgtgacgccttgccaacgcactattttggaggatgttcttgctagtgtgttgatggtgccttacgatcttgctgaagcagcag

SEQ ID NO: 167905 - DNA, 360 bp, Zea mays
  Clone ID: MRT4577_8470C.1
agttagtggccattgctgtggattatcatcagataccgcagtcagatgattgacagaatacaaggaggatacattatgatttagattccgcggtgagtgcctgggtttctctcatgcaaccgcctggaaggagaaacccaaaatctttcgcattgtttatcaaatacccgggtagaccgacggctgttttaaagggttcaagattcatctttgaaataaaatctcgatagctgtaagcctctggcagcatgccaaagatatccttaccatgacatatggtgtcctggattctccgctcgtctagaaaccgcatgtttcctccgatgcggtcagaatgagaaaaccccgtcatcttgacca

SEQ ID NO: 167906 - DNA, 1185 bp, Zea mays
  Clone ID: MRT4577_84710C.1
cgttacatttgcaccgcacgcacccgccgacgcccgcgcggccacgcactaggcggcaccgcagcgacggtcgacgggggccacacccggacaccccacacaggcacccagccacgcgagcggcgaaactgcgggagccaatcagaacctacagcgatgcaatgatcgccgtcgcatcgtccttcccctcgcgcgcccacgcggctccgttcggctcggggacactgccaccgccgtctacgcggcgcagcacgtccctccgccacccgcgcgtctcggcgctcggtggaggcctcgaaggagagccggggaagatactggatccgcgcgccacgccgttccagatcctcggcctcgacgccgccgccggctactccgccgccgaactcaaggccgcctttcgcgcccgggttaaggaattccatcctgatgtttgcaaggacccagaaaatgcagatttaataatgaggcgagtgatcgaggcctatcagatgttatctggcaaccaagaaatgatgtttgaaaggaacaatgttgacccatttgatgaacctgagtgtgaagctcgtgacatatttgtcaatgaacttctatgcattggcactggatgtccatattcttgtgttaaaagggcacctcatgtattttcattttcagatgatactggtacagctcgtgcaatatctcaaggtaatggagaagatgatcttgttcagctcgctgttgggcagtgtccaagaaagtgcatatactatgtgacgccttgccaacgcactattttggaggatgttcttgctagtgtgttgatggtgccttacgatcttgctgaagcagcagttctggattccctcctttcaaaagcgaagttcgagaataacaggtataagaagccccaaagaggagcaaaatcatcctccgattatgttgattggatgtgatctgatcccgagacacaaagaggatgccagattcagccgaaggcagttcggtagatttatgctggtttgcctattctccttgtccttggtcagttgcccgatagtttataaaatggaatacgtttacgtggacagactgctttgtttgtggtatacggttatgatttctataatatttctttctgccagaattttactccgtcttttcttggcataagaaactcctaggattgactgggagcttaat

SEQ ID NO: 167907 - DNA, 810 bp, Zea mays
  Clone ID: MRT4577_84711C.1
agtcaaactcgccaccgctcccagcaacggaaccaacaaatccccacccaatctcgtctccgatcgacccgaggctcgtcgaatccccaccgcctcaagatgcagatatttgtgaagacactcacgggcaagaccatcacccttgaggtggagtcgtctgacaccatcgacaatgtcaaggccaagatccaggacaaggagggcattccgccggaccagcagcgtctcatcttcgctggcaagcagcttgaggacgggaggacccttgctgactacaacatccagaaggagtccacccttcaccttgtcctgcgtttgcgtggtggcatgcagatcttcgtgaagaccctcaccggcaagaccatcactttggaggttgagagctctgacaccatcgacaacgtcaaggccaagatccaggacaaggagggcattcccccggaccagcagcgccttatctttgctggcaagcagctggaggatggccgcacccttgccgactacaacatccagaaggagtccaccctccacctggtgctgcgcctgcgtggtggcatgcagatcttcgtgaagacccttactggaaagaccatcactctggaggtggagagctccgacaccatcgacaacgtcaaggccaagatccaggataaggagggtattcccccggaccagcagcgtctcgtcttcgctggcaggcagctggaggatggccgtacccttgctgactacacatccagaaggatccaccctccaccttgtcctgcgtctgcgtggtgcatgcagatcttcgtgaagacctcactggga

SEQ ID NO: 167908 - DNA, 602 bp, Zea mays
  unsure (1)..(602): unsure at all n locations
  Clone ID: MRT4577_84712C.1
ggccgggccccgcatctcctagcccagctagatcattggacaatatcgaaacagctctagctagcgcgctcgtcgtctaacctggcttccggcatggcttccaagcagatcggagtcttgacctgcttcattgccatcaccgctctcgccttccgtccctgcgcatccgccggccatggacggtggctggncgaacgncggngccacctggaacganccagccaagggcgctggatccgacggaggagcgcgcgagggccacagcagacgaccaccaacatgcgccaacgcagaaaaaaccgacggcagccaagacatctgccactagaataactgctgccaaaactgatatcaggagaggtacaccagataattacctggtgccttaaacttgaggggatgatgaagcacacaaaggaggaccagaaatcgatgctgctgatattgcaaatgatttaaacatcagctataactacagctttgcaccattaaagcaatatcttttccacattgaaaacagcgccatcgctggtgatggcgtatagactgaatacccgaaaactccatcagagggagccggtcgctttagcaacctgaacacc

SEQ ID NO: 167909 - DNA, 294 bp, Zea mays
  Clone ID: MRT4577_84713C.1
aaaccaaaactctatggttaattttaaccttgaaagtattatatttataaggaggacaacgcatgtggcacagatgggcttttcagaactaattaaagtatcacaaccttattgaagcatgcatgcatgcatttgccagatttggaagaaggtttattcccacaccggcaaccccacacattcggtccaggaactaatacccaagttttacaagaccgttgtattcaccaaaaatgctttcattgatttttaaaacaagaaccaatatggactattatgaggcgaacattccgc

SEQ ID NO: 167910 - DNA, 204 bp, Zea mays
  Clone ID: MRT4577_84714C.1
agcaagaggggcccaaatgaatagataaaagggcacatgctaacagatcttaacagtttacacgataaccggaacgatcacaaacaaaacttgggatgatgaaaactaggtattggtaaagcaggggcaggatcgcattatttttttttgggagccgccttggtcaccttggggccgggaggggtctttttcttcacacttttg

SEQ ID NO: 167911 - DNA, 724 bp, Zea mays
  Clone ID: MRT4577_84715C.1
gcacaaacagacgggaccgtcacttcccccacccggcccgtcaccagccggcataaatacccaccccctcccctcctccaatcctcaccaccgctcccagcaacggaaccaacaaatcccaagctaatctcgtctccgatcgactcgaggcttgtcgaatcctccttccccaccgcctcaagatgcagatctttgtgaagacactgacgggcaagaccatcacccttgaggtggagtcgtctgacaccatcgacaatgtcaaggccaagatccaggacaaggagggcattccccctgaccagcagcgtctcatctttgctggcaagcagctggaggatggccgaaccctcgctgactacaacatccagaaggagtccaccctccaccttgtcctgcgtctgcgtggtggcatgcagatcttcgtgaagaccctcaccggcaagaccatcactctggaggttgagagctctgacaccatcgacaatgtcaaggccaagatccaggacaaggagggcattcccccggaccagcagcgcctgatctttgccggcaagcagctggaggatggccgcacccttgcggactacaacatccagaaggagtccaccctccacctggtgctccgcctccgtggtggtcagtaattgtcctggcgttgtacctgctggtttatccttggtcgtccggttggtggtgccctgtcgatcgtttgaactgttttctc

SEQ ID NO: 167912 - DNA, 231 bp, Zea mays
  Clone ID: MRT4577_84716C.1
taatacccttcgcgacccactcttcctgattgtttctcaaattgctgtttactgtactgtaagagtttcaaatctgttaaatttagagttatgtcctttgtcaggtgaaagtttattctcgacttacattattcttcactgtactgtttaaagagttctaatagagtttatttactcatatctatatactctattttttctcttttattttattaaaatatttcttttttt

SEQ ID NO: 167913 - DNA, 872 bp, Zea mays
  Clone ID: MRT4577_84717C.1
cggccgctcgaggcggccgggcgggcagctcccaggcacggaaccaacaaatccccacccaatctcgtctccgatcgactccacgctcgtcgaatactcctcccccaccgcctcaagatgcagatctttgtgaagaccctcactggcaagaccatcaccctagaggttgagagctccgacaccatagacaacgtcaaggccaagatccaggacaaggagggcattcccccggaccagcagcgtctcatcttcgctggcaagcagctggaggatggccgtacccttgctgactacaacatccagaaggagtccaccctccaccttgtcctgcgtctgcgtggtggcatgcagatcttcgtgaagaccctcaccggcaagaccatcactcttgaggtggagagctccgacaccatcgacaacgtcaaggccaagatccaggacaaggagggcattcctccggaccagcagcgtctcatcttcgctggcaagcagcttgaggatggccgtaccctcgctgactacaacatccagaaggagtccacccttcacctggtgctccgcctccgtggtggtatgcagatttttgtgaagaccctcaccggcaagaccatcacccttgaggttgagagctctgacaccatcgacaacgtcaaggccaagatccaggacaaggagggcattcccccggaccagcagcgcctgatctttgctggcaagcagctggaggatggccgtaccctcgccgactacacatccagaaggagtccaccctccaccttgtcctgcgcctgcgtggtggcatgcaaatcttcgtgaagacccttcaccggaagaccatcactctggaaggtgagagctccgacaccatcgac

SEQ ID NO: 167914 - DNA, 666 bp, Zea mays
  Clone ID: MRT4577_84718C.1
gaacggaaccaacttatccccaccaatctcgtctccaatcgacccgaggctcgtcgaatcctccttccccaccgcctcaagatgcagatctttgtgaagacactgacgggcaagaccatcacccttgaggtggagtcgtctgacaccatcgacaatgtcaaggccaagatccaggacaaggagggcattcctccagaccagcagcgtctcatcttcgctgggaagcagctggaggatggccgtaccctcgctgactacaacatccagaaggagtccaccctccaccttgtcctgcgtctgcgtggtggcatgcagatcttcgtgaagaccctcactggaaagactatcacccttgaggttgagagctctgacaccatcgacaatgtcaaggccaagatccaagacaaggagggcattcccccggaccagcagcgcctgatctttgctggcaagcagctggaggatggtcgcaccctcgccgactacaacatccagaaggagtccacccttcacctggtgctccgcctccgtggtggtcagtaattgccctctcactcgacctgctgctgctgctgtaccctgtgtcgtcctgtgggtgcgcctttgttcaagtgctgtctcgtttgtgtgaagtcgtactgtgtctggtttaatggaccatcgagt

SEQ ID NO: 167915 - DNA, 425 bp, Zea mays
  Clone ID: MRT4577_84719C.1
gaccctacaacaagggtggcagggcatcgctaaggaaaggaggatcttttttcttagaacaaagcataagacattgctgagctatatgaaagacatggagatcgaacctgatgtaacctgttacacagtattgattgatggacagtgcaaagcagaatatctagatgaagcacgtgaattgtttgatgagatgttagcgaaaggacttacccctgatgtttacgtgtacacagctcttataaatggatactgtagccagggagaaatagctaaggctgaagatcttttacaagaaatgacagataaggggatgaagccagatgtactgaccttttcagtattacatcagagaactttgagacatcgaaaggctcattcatactcatgatgtcctaatggctatgtgataaatgtcagtttgactg

SEQ ID NO: 167916 - DNA, 724 bp, Zea mays
  unsure (1)..(724): unsure at all n locations
  Clone ID: MRT4577_8471C.1
cggatatccactcgttaaacaacaccaacccaaaaacctaataccgtcaagatgaagttctctgtcgccactgccctccttgccgccgtctctggcgccgccgcctacggcaagaacggtaccgtcatcgtcaccgaggtcgtccagagctacaccacctactgcccggctcccactcagatcacccacggtgacaagaccatcaccgtcaccaaggccggtatcgtcaccatcaccgactgcccttgcaccatcgagaagcccgttcagaccaagactgctgagacccccagcgttctccctcctgctcccaccggtggcgtcacccccaccaagcagcccgtccccgtccccactgccggtgctggcaagctctccgctgccggcctcgctggtgttgtcggtcttgctgctttcgtcctgtaaagcaaccaaccgcttttgaatcacgcttcgccatcacgtcccaaacccgcctacggtttcctttgtcaagatgtcaccgctttaatttatcgtggggatccgccttcgccagccatgtgtctggtgactggtagcgtcgtgggagaagaagatggttgcgttgggaagaagggatgaaaggaaggcgtgggaatagtgcgagggaagtggacgttcgctttcaactncggcagttgaccccctcctcttgaacctcttcctgacgggaggggtgaataggggtttggatgatattgct

SEQ ID NO: 167917 - DNA, 615 bp, Zea mays
  unsure (1)..(615): unsure at all n locations
  Clone ID: MRT4577_84720C.1
nagcgaattctctcctactttactcctatcctctgcggtctggacgcctgctagaggcttgaccaagcagcaggatcagcagcagcgatggcgcctctgaacctgtactctatgccactgtcccccaacgttctgcgcgtggccaccgtgctcaacgacaagggcctctacttcaagatcgtccccgtcgacctcaccaccggcgcccacatagcagcccgacttcctcaccctcaaccctttactgtagatcccggctctcgtcgacggaaacgaagtcctcttctaaccccgcgcgatcaaccggtacatcgccagcaaggacgcgtcggtaggacacggacctgctccccgcgacggggtcgacggctaaattgcacgtgtggttataggggcagtcgcgccacttctacccgaacgcgtcgccgttggcgttccagctgttcgtgaggccgctcctgggcgtgcccccgacgcggcgttggtggacaagcactcgtagcagctcgcccaggtgctcgacctatacgaggcgtatctcggccgcaacaagtacctcgtcgtagacgagttcacgctcggcgacgccaaccacacgtcctacctgctctacct

SEQ ID NO: 167918 - DNA, 266 bp, Zea mays
  Clone ID: MRT4577_84721C.1
ggctcgacccactcgtccgctgactatttgatggtttggctgccagatcgcattggactgtctgacttagcatgtgctgaaatgtccaatatatagcatggattacttagattttgaatgtgctcaacatgctgaatcatcatagatatgcactgctgagtgagtttgcatgtgttacctaattcctaacgcttccacattggccttcgtatgcttgcagctctgatctggagctagctatatcacttcaacagcaagagtttgag

SEQ ID NO: 167919 - DNA, 350 bp, Zea mays
  Clone ID: MRT4577_84722C.1
cgttgctgtcggacaacaggaagtcagcaaccatccactacatgcagtacaaagaagggagagaagtggagggagcaggagagaccttcagatgatgtgctcatctcgccactggtttgcagccacagccgctgcaggactccaggagaatgggcagggacgcagggtgctgtgccgctgcccgccggtgtagccgccgcccgccggtgtccaggactgcaggggcagtggcgcagtgcaagagaaggagaggcaggggcggtgcaagagaggagaggagaggacagaggagatgtgcagagagccagtgttggcggctagggtagaataggagaggagcgacagcaacg

SEQ ID NO: 167920 - DNA, 549 bp, Zea mays
  Clone ID: MRT4577_84723C.1
gccggccggttcgggatcacaatccacacactttctcacacatctataatctataggtgtgtctttatcgcgaacataggttcagcactttcaatcgcatcgtccgttctcggttccaaacctgattggtcccaactcgacgactcacgcaaaatggcagccaagcaagccgctgaaaagctcatctcggagcacctcgtcgctgtcttcagcaagagctactgtccctactgctcgcaggccaagagcgtgatcgacaagctcggactcgacaagagcaagatcggcatcctggagcttgataccatgggctctgagggctcggacatccaggcctatcttcaagagaagacaagccagaggaccgtccccaacatcttcatcaaccagaagcacctgggtggttgctctgatttgctggacgctcagaagagcggaaagctccaacagcttgtcaagtagaagattgcagtagaataatgtagcttacacgatcgcccaatcccaagctcctttgcctttcaaaaaaaaaaaaaaaaaaggccccta

SEQ ID NO: 167921 - DNA, 435 bp, Zea mays
  Clone ID: MRT4577_84724C.1
gtatgaaaacatttcatgttttttttgagtctttacattacagaatccttaaccggtacaaggaggagctcattgtacatttgccgaaggcaccacataaaggactggcgttcaccggagggtgcaaagtcccacagggaacaattagaacagggaaaggcccactaaaaacaacctttacattctctggacggaacatagcaaaggacggaatatgcggtcgtacacacatgcactgtccatcaatcggttcattcccccaggccaaggtctgggcgggtgacacaggctttctgaggaccgggcttgtcacgggcaactagaggttgctcctgggcaccttggccaacagtaacggcagccccaaaaagcctgacctggtggactaaggggggaacatttccatgacttttaccccttcccctctttcaagct

SEQ ID NO: 167922 - DNA, 970 bp, Zea mays
  Clone ID: MRT4577_84725C.1
gggtaattcggcacgaggttcagatctactccattgccacgttcctctcccggccgcttctcatgacgtctccgagcgaaaaccctaaccctaatcctaatacaccatttgagatcgggaagcttttcaggccaacgaatcccatgcccaacgccacccccaaccccatcttccccggcgtcgctggaggcccggcgccatccggcccctactcctaccctccggtgaccccgcccttccaccgcggaccctacatccactacccgcaggacccccacgccatgacccgcccagttgtctccttccccatgccaaacccaaacctcaaccccaacccgaacgctaaccccaacgccgtcgccccgggccccaaccccggcgcgcgcctcatgcagctgctcgggaactccgggccgacacaattcgagaccgccgtctccatgcccccgcccacatcggaattcgcacaactgcagttgctcccagcgatgccatccgcgccgccggccaggatgctgagcagcaccagcagcaaggtgcccagggggcggttacttggcaccggggaacgagcggtgcacgatgttgactcgaggctgcccggggaagcgcagccaccgcagctggaggtgacaccgattaccaagtacacatcggatcccgggctcgtgctgggcagacagatcgctgtgaaccggtcgtgtatgggctcaagctcggtaacatccgtgtgctgaacatcaacaccgcactccgttcactcctccgtggtcacacacaggaaggtctgcgcattcacctccttccgcgccgtcaatggaagccagatctccaaacacgcggtcctcgcaacgtcgatcgaatccaatccaatccacagcaaacaatggcgtccaacggcagcgacgtggtgatgatgtacgggacacggcgctgttggagccgtccaagcagcccaagtcagcgactt

SEQ ID NO: 167923 - DNA, 1851 bp, Zea mays
  Clone ID: MRT4577_84726C.1
ctggtagggctgggccaaatcgaaaaccccaaagcttcgaccctggtcggtgtcaccgcccgggcggagaaggtccccatcgatctcggtctcctctctcctccctctcttggggcatggatcgcgccgccgcatcgccgcccgccgtggaggaacccgtcagggccacctccgttctcgacagcctcggcgcggaggtgctggcggtcatgtccccggtctccatctgcatggccctcgtcgtgctcctcatctccctcctctcgccgccgtcctccgggtccgcggcgggttcgcccccgccagtcaccgctgccacactcgtctacctcgagtcccctaacgactccccgggccagaagctcctcggggcgcttctcgacgccgccgtcttcgttgccctcgtcgccgctgtcaccttcgtcctcgtcgcgctctattactaccgctgcacgggcttcctcaagaactacatgcgcttctccgccttcttcgtcatcttctccatgggaggcgccatcgtagccgccgtgctccgccgcctcggggccccgctcgatgcggccaccgtgctcctgctcctcttcaacggcgccgctgtcggggtcctctctgtcttcgcctccgccgttcccatcctcgtccgccaggggtacatggttgcgctcgccgccatcgtcgccgcctggctctccaggctccctgagtggaccacgtggatcatgctcgtcgcgctcgccctgtacgacctcgtcgccgtgcttgcaccccggggaccgctcaggatgcttgtggagctagcctcctccagggatgatgagctaccggcactcgtctacgaatctcggcctactgtcggtccagccactagttcttcctcttatgcttcagtcatggggtctgtggagatgcaaaccatgtcagattctggtcagatctgtggcaatcgatatgaccgggtggagcaggaggaatatgccagccacgcctccttggaaatgagggatcttggaagaggccgatcaagcgttggtgagatgaaccgaccgagaggtcctgtgcttcaaatggagaaccttgaaagggaggtaccagcgacttcagcagagctgacggcaaatcaaggtgggggttcacagcatgccatcattcaaattgaacaacctgacgaagaagagacatcacctttggtgtctgcaccctctaccaacactgcagcattggatgtggaggagcatagacaaagttcatcgtcagagcctctggattttgagatgtttgagtctaccaggggcatcaagctgggccttggtgattttgttttctacagtgttcttgttgggagagctgccatgtatgatctgatgaccgtgtatgcatgctaccttgccatcattgctgggcttggttgcacccttatcttgctttccatatgccggcacgcacttcctgcactcccaatctctattatgctgggagtgacattctacttcttgacacggttgctgatggagccatttgtggttggtgcttcaacaaatttggtgatgttctgacttttcactgatctgctgttgcatttacatgtggatgaagccctcaaccaaaagaaagttgttggtcagcaactcagcattctatgtgagagtgactaatattttgttggttacttatcgtaaactgtcatttgtatttattgctaggagtgctcaagaccatagactccgtggtagcatcatagatagatttagctcatgtcttgtagttccatcaacctaacatggtattcgagaagagctattctacattctgaataatcaagtaattgatcatccattaggcctaaaaaaa

SEQ ID NO: 167924 - DNA, 301 bp, Zea mays
  unsure (1)..(301): unsure at all n locations
  Clone ID: MRT4577_84727C.1
ttaacacaaaaaaaaccttatcaaaataagatgctcaacattgcgcgtctggattttgcgctgggaaatcttattgcgtctggagctcaatcgcaatctattggcttggttttctttctgtgctgctccaggtgaatgttantacccctggcggaggggggggttgggaggacacatgggattttccttgctggtgtgggtggggttgatgttgacggttggctgtggtcctggtttgctcgtctccacttttgtgtttgtcaggggttggcaaccagtttttttggtatgtcctttttac

SEQ ID NO: 167925 - DNA, 436 bp, Zea mays
  Clone ID: MRT4577_84728C.1
ccctaataattccaccgccaaccggcacaagcgcggggtgtttttcaaaaaaggtcccgcaagccaccaggccaaaaaggggcaacaagcccaagcaacatagtacacccagggcgaagccagaaacacgcccgcacagagacacgcagcggaagcgagcgagaataaatggacggagcaggagaacccaatattcaaaagacagggggaagcaacagcacacggggaacaaggcatcatcaactcgagggaggagaaaacaagggacaactccagagacagactaagggaagcggcacccaacaggagcctcgagagctggacgaccgggacgcctagaacgatggtccattcaccaccactgcatgtcaccgggaaagagcaaacacgggccgaggaacaccctgtgaaccacaggacacacacccatggaaac

SEQ ID NO: 167926 - DNA, 117 bp, Zea mays
  Clone ID: MRT4577_84729C.1
atggattttacattcgtaacatttcaatatgggagggtgccttaaatgacattggtggctttctgcagcctatgaataatccagtaattgtacaatacgtaactgacgtcccatatt

SEQ ID NO: 167927 - DNA, 342 bp, Zea mays
  Clone ID: MRT4577_8472C.1
aagggcacaaaacgtttttgtttttatggttttccgggggcaaaaaacacaagttaaaaccctaaatttttttttttgggaaaagaatacaaatcaaaggaatttgggaaagggggggtttgggttgtccaaaaaagttagggggcgggggagggggcccacccctttgttaccaaaaacaaaaccgggggcttgggccgggggaatttccttccgggggatttgttttgggattcgacagtatagggggggcctgttttggcgcccttaattttaagggtgggcgaaaagttttgggtgggccccccgaggatttgtttttggggggggtagacaacgaat

SEQ ID NO: 167928 - DNA, 797 bp, Zea mays
  Clone ID: MRT4577_84730C.1
gaattgggtacctcgaggccggccgggccgggccagcccaaagttaccttcgctaccggttctcctcgtctgcaacgaggcaacgagtgacgagcccaccgccaccggcaagtcccctccgccgtccttcagtaccggaagaaggcgaggcgcccaaccgagagcaccaggggaaaggaagtgcgcctaggcatcgacatggaggacttctacgtcacgatcccctacggcctgctgctcgtagccggcggcgtagccggctacatgaagcgcggcagcgccgcgtctctggtcgccgggggcggattcggtgctgcgctccttctcgctggtgcgctcagcgcctgggccttcgcgcacgccggaggtggcgctgccgccatctttgccaccgtccttcagatcgtttgtgctgtgctattgactgttgttatgggaataagatacgtcaaaacacaaaagataatgcctgctggaattgtcgcttctatcagtgcactcgtactgatattttacgtgtacaagatatctaccggtggcaacaaggtttatatgtcggtgagtgccgagtgaatctgggcgtgtggtgttccgtgtacatgtttgtacggcagctaaatgtgaagacaacaaaatcatctgtgtatcaattgtattttagtgaggcaaacactgtaccaaacaatgatggcacgagttagttaagatgtggatgtggacacatggtcaatttaagcttttttatagaacttgctaaactgttgcaacttcctcgaaaaaaaaaaaaaaaagcggcc

SEQ ID NO: 167929 - DNA, 300 bp, Zea mays
  Clone ID: MRT4577_84731C.1
ttttttttttttttttcgcgaatgtgatacgccaggcacgagacgggcgaacgcaagcgcgccggacatcgagtgtctgaacgaaaaaaagcaacgccaaccgacgaaatgactatgaaaaatacaaagaaatttcggcacaaaagctttgcgccgggacggcatcatcaagggatgccaggggcggggggcttttacggggaacttgtcgttatgacaggtaaggcttgcgaagctgcttgggcgaatctggctggaaatcctggaaaccagggttcacgtccgattcgcctgtgcatc

SEQ ID NO: 167930 - DNA, 222 bp, Zea mays
  Clone ID: MRT4577_84732C.1
cgggcgggggccgtctggttttcttttgactgagcccctagagaatgctatgtttttcacctttcctcaaaataaaactcgcttctcttgattaacaatggtatgatgcaccctcagacactaaaaatggttcttactacagaccatgtcagtcttattaaaaaaacatggggtgccatccggtcacatcgcgtgcaaagactttattttcccaacgataat

SEQ ID NO: 167931 - DNA, 1126 bp, Zea mays
  unsure (1)..(1126): unsure at all n locations
  Clone ID: MRT4577_84733C.1
caaaatataattttggggtgtctgtatttggtccaaaaaagtgctactattaagcaaccggatagcacgcacccggcgagcgaggccacggcgggcgagccagggagtggcgcgggagcttatctccgagcccggtgatgtgacgccttggccgcgatcgtggctgcccgaccctcggtgacggattgcaggccgggtccaccgcgcggcctcgatttccccttaacacaacacagaggaagcaggcggcggcgatcgggcgatggcatggcgggcgagcctgtctcggagcctaaaggagatccgcgtcctcttctgtcagtcctccccggccagcgccgccgcccgtgagttcgtgaagaagaactatggtgacatcaaggctcgcaacccctccctccccttccttgtccgcgagtgctccggtgtccagccccagctctgggcgcgctacgatatgggtgtggagagatgcgtgaacttggatggcctgacggaagcacagattgataaaaagctggaggagcttgccaaggccggcgagtctcttaaaaccaaatagttttggaactctatcctgccatgtttaacgttcccaaataaatgatgccatatgggtgagcaattgttactctatcgttatctgtagttgtgcctggaattaagtctttaattggcttaactttgtgaaataatcactactcttttacttgccatgcattttctagattacatgctatattgaaaagggaaaaaatcaatgatttgataagaagaatatatacctagtagcttgtgcatgagagattgatcgtgcaatatttctgcgcagttatatacataattgtatcacagttctatacttcagttctgcgcatgactgaaattgtgcagacacatgtacgattaattatttgtttttttctatactttgatgccatggtataaagtttttttnnnaagatgcacacacagccaccagcacgtacccaactcccacgcagctcggttcagtaaaagctactatcagtagtggggcggtggttggcacatcgcagttgatacggaggcgtagcgtaggctgtactggttctcccgcgtcggcgtcgacggccgtgtccttctc

SEQ ID NO: 167932 - DNA, 684 bp, Zea mays
  Clone ID: MRT4577_84734C.1
tgggtacctcgaggccggccgggaccttaactgagtgctttgcagagccgcaagaatgagggacaaattgctccgtttcgccgcatagccgagaggaagcaggcggcggcgagaatccagtagaacgcgagcagacggcggcgatggcatggcgggcgagcctgtctcggagtgtaaaggagatacgcgtcctcttctgccagtcctcccccgctagcgcccccgcccgggagttcgtgaagaagaactatggtgacatcaaggcccgcaacccctccctccccttccttgtccgcgagtgctccggtgtccagccccagctctgggcgcgctacgatatgggtgtggagagatgcgtgaacttggatggtctgacggaagcacagattgataagaagctggaggaacttgcaatggccggggagtctcttaaaaccaaatagttttggaactcgtatcatgtcttgtttaatgttccaaaataatagatactcctaccatattggtggacaattgctactctgtcattatctgtagttgtgcgtggtacgaagccttcgattagcaaaacttaatgtgtaataattactattgttttatatgctatgcattttctagattacatgaatgattgaaaatgaaaaaaaaaaaaaaaacacctgccaaaaaaaaaaaaaagcggcc

SEQ ID NO: 167933 - DNA, 435 bp, Zea mays
  Clone ID: MRT4577_84735C.1
ccatgatgaatgttgtcactctggcacgtatctaaaacagggggtgacgaaacactgttcaaacctaacgagtgcgtgttgccaaccatcatgtgcactgaggcacgacccggagagcacataccacgggtgggaccatgtcagcatatcctgctggcgggctaccgccgccaaaacatgacaggccgtgaggggcgggcgcgtcttgactgacatcttgcatattatgggactcctgatcaagaaatgctcaaaaatcaatgggaggaccgggccaatttagggagaggctatgagttccaaatgaacatcaactggatgcgagagatgactaattcctcatactaacatgctataagctatataaacccgcaagcacagcaaatgactgattacctattatatatgaaaccaaaatggcgcgcgcctaataat

SEQ ID NO: 167934 - DNA, 470 bp, Zea mays
  Clone ID: MRT4577_84737C.1
gcacgaggccgcggccgccgcggccgccgtcgggcctcgtcgctcgtcggcgtggccaccgcggccgaggcgccggctccctcccccgccggccccaccggggccgccgccgtgactggcccggcgctcgctgtcggcacgctcgctgtggccgccgctggctacctcttctgctgagctgctgggttttgccattgcgcgcgtcgtctccggctgcagtgtcagcagagccgcccgtgcgttgccgcccccggccggacccggagtgacgatacatatcagttcatcgcttctttctacttgattcttaccagtattttcatgttgtgtgtggtctgatcgattgacgtactacgcgagttgccgacttgccggttgctgagtgtgtgtatgttgggttcttatactctctctatataaaataatacagcaagtttatactaaagaaaaaaaaaaaaaaaaagccggcc

SEQ ID NO: 167935 - DNA, 409 bp, Zea mays
  Clone ID: MRT4577_84739C.1
gccgatacctacactggttgtaatgggggtcacggacactctccctgtgagcactaatctaccagtcgcatctccactgagctccccgatccgatataccacagccaaaatcgaggactagatacaggacaaaggtgagtctcagagcagggaccactgtcaagtccgacctataccgcaagcgttggaaggggatcctatggagagatagggagcctcctgcatccgcttgtgtagcacctgttgccgactggggaagggtggaccaccgacgcgggtggagaagtgcttcaaacactgggatccgtcactcataatgggtagggcgtgggggtactagactcactgtgagggacccacttgacgataacctatcgttaccgaagttagttactacctacagaatgaa

SEQ ID NO: 167936 - DNA, 421 bp, Zea mays
  Clone ID: MRT4577_8473C.1
aacactcgtcctctagttctagatcgctatcggactgatgtatgaaaaggatggttacggactaaaaaaaaaaaaaaaaaaaaaaaaaaaaaaaaaaaaaaaaaaaaaaaaaaaaaaaaaaaaaaaaaaaaaaaaaaaaaaaaaaaaaaaaaaaaaaaaaaaaaaaaaaaaaaaaaaaaaaaaaaaaaaaaaaaaaaaaaaaaaaaaaaagagggggcccctttaaaagcaccaattttaactaccctttgcaacaaactgaaaaactttttaaaaggcgacccaaatttaaattaatggaacttgtttaaaaaacggataaattggaaaaccctggtattaaccaactttatcacctttaaaaaaaaaacccttttgaaaatatggttaatatacaaaaagacacaaccaattgatcttt

SEQ ID NO: 167937 - DNA, 381 bp, Zea mays
  Clone ID: MRT4577_84740C.1
ctcgctggcgcgcctcgcgctgggcgggttcaggctccgcgccgtcccgggcggggtagcggagggtctccgctcgctctccctcagccacgccgacgtcacagacgaggcggtccgggacatcgtgtccagctgccgggcgctggagctcctcagcttgaggagctgcaacctcctcagatcggttaggatcgccggcgagacgctgcggtccctggagatcgtgcgctgcttgggcgtgcgggagctccgggtcaacgcgccctcgctcgagtcgttcgccttccacggcgacaacgtctactcgacgagcgacgacgacgaggaggacttgtcttctgccgtcgacctgggatccacgccggctctgcgggacgcgta

SEQ ID NO: 167938 - DNA, 228 bp, Zea mays
  unsure (1)..(228): unsure at all n locations
  Clone ID: MRT4577_84741C.1
ggtacacccggtcgccttcaccttgcccttaggccgcaggtaggggaggcgttgcgccgccccccgccctttccgtctcgccgtggcgcctgcgcnncccgcgccttccgtctnnngccgcgccttcnttccgtttatttgaccctgccaagnntcagctttgcgggtttattcttacttttnntatctaggagnaaatggtctgtttctttctttttttgaggacac

SEQ ID NO: 167939 - DNA, 304 bp, Zea mays
  Clone ID: MRT4577_84742C.1
cggacgcgtgggcggacgcgtgggagcgaaacgacgctgggtggtgtgatgtttgcaggtcgtggtccacaggctgccggagcatacagcagttcattttcaattcttattatcatatattatggaagaagaaatgaacatcttcaggattgaacagtgtcgcgaaattgtagatgatggttccacaatcccaatgggaccgacagacaaagagacatgctgcttcctgctgtgagttttgtattgcagacgacactgtttatgtggagttaaaaaaaaatatatacgcaaaaaagacttggaa

SEQ ID NO: 167940 - DNA, 238 bp, Zea mays
  Clone ID: MRT4577_84743C.1
gccgctagcatcctgctaccagaagatgtacgcgatgccggtcctggcaccgccgttgttgtggttgacgggggcagtgcaggactccggcaccggtgcggagctgaagtaaggtgacgtagtcgacgtcgctgggcctctgagactggatgaggagcgcgacgacaccttccttggcgtgttgaaactgtacgctttcgctcaacactattgcgtcttctgtggctcaccgatggga

SEQ ID NO: 167941 - DNA, 1559 bp, Zea mays
  Clone ID: MRT4577_84744C.1
cgggtacccttccctccgcccgccggccctgcggccggtgcttcgcttcgcggcccagcatatcctccgcctgcgcagcactttgccctgcgccgagccctcccgctcccgtgcacttccgcctccacctagcccgctcgccggcacccgcccactcccctacctatttgtcccttcatcgtcgcgccatctgtggagcgacctccttcaatgagcgttgaagcgcttgggtcggagaatccatctgcagagatgggcctagagatggtatcgtcgaatgcgtttgcagagattccccattccccggtagcgtcaggaaggctagacacggtggcacaccgccctcggggagagctggaacaatccaacgtcgaagtgctgaagcgggatgtgctgcgtcccataagattcgaagtccggaaggaggcgtagctgagcaatttgactgaaatcgacgatgaggatgcgtatatgggtgagatgcttattgcaattgtaatctatagttgcagtcctgctgctggcacagcgggtggtgcttcgcttagcctagcctagctgcgcatgcgcatgctcgtgaccaatggcgtccagcaaggtgccactgttcctcgtcctcaacctcctgctcttcgcggcggccaacgcctgcccttactgcccgggcaacaatggccacggtagcagtgggcaccatggcggcagtgggcatggcggcggtggcaccggcggttccggtggcggcagcgggcctggtggcggcagcagcggcggagggtacggtccgatcggtggtggtggtggcggcggcggaggaggagggtacggtccgatcggtgatggtggcagcggcggtgggatcggacccatcggagggggcagcggggggatcggacccataggaggtggcagcggtggtgggtacggccccatcggtggcggtggcggggaggtgggatcggtggcggtggcggtggcaacgatggcacgagcggctggtacggccattgcccgacgaacgcgctgaagctcggcgtgtgcgccaacgtgctggatctgatcaaggccaaggtcggcgtgccggtgaacgagccgtgctgcccgctgctgaacgggctcgtggagctcgaagccgccgtgtgcctctgcacggccatcaaggccaacgtgctggggctcaacctcaacatccccgtcaacctcagcctcgtcctcaacttctgcggcaagggcgtccccacgggcttcaagtgcctttaaccatgcatgcacatcatgtgtgtgcgcgtgccgtacgtacgtagtatccaagaccacgcgatgcgtgagtatgacgaagaatacgcgcgtgcgccatgcttgccggccggggatacggtgtttgtggtaatgctgttagtttcgtttcttcagtgtagtatgtagccagggcatgcatgtgtccaagtccaagttcgactttgggttgcttgtacttctccatttcataattgaaatcatatttcagatttgagttaaaaggtaaaaaaaaaaaaaaaaaaaaaaaactcgaggggggg

SEQ ID NO: 167942 - DNA, 592 bp, Zea mays
  Clone ID: MRT4577_84745C.1
gcttggcggcctagcatagctgcgctgcgcatgctagtgaccaatggcgtccagcaaggtgccactgttcctcgtcctcaacctcctgctcttcgcggcagccaacgcctgcccttactgcccgggcaacaatggccacggtagcagtgggcaccatggcagcagcggcggagggtacggtccgatcggtggtggtggcagtggcggcggcggaggaggagggtacggtccgatcggtgatggtggcagcggcggcggtgggatcggacccatcggaggaggcagcggtgggatcggacccataggaggtggcagcggtggtgggtacggtcccatcggtggaggtggaggtgggatcggtggcggtggcaacgacggcacgagcggctggtacggccattgcccgacgaacgcgctgaagctcggcgtgtgcgccaacgtgctggatctgatcaaggccaaggtcggcgtgccggtgaacgagccgggctgcccgctgctgaacgggctcgtggagctcgaagccgccgggtgcctctgcacggccatcaaggccaacgggctggggctcaacctcaacatccccggcaac

SEQ ID NO: 167943 - DNA, 560 bp, Zea mays
  unsure (1)..(560): unsure at all n locations
  Clone ID: MRT4577_84746C.1
cccccgcgtccgcacctgcagctgccacagcgggtggtgcttcgcttggcggcctagcatagctgcgctgcgcatgctagtgaccaatggcgtccagcaaggtgccactgttcctcgtcctcaacctcctgctcttcgcggcagccaacgcctgcccttactgcccgggcaacaatggccacggtagcagtgggcaccatggcggcagtgggcatggcggcggtggcagcggcggttccggtggcggcagtgggcctggtggcggcagcagcggcggagggtacggtccgatcggtggtggtggcagtggcggcggcggaggaggagggtacggtccgatcggtgatggtggcagcggcggcggtgggatcggacccatcggaggaggcagcggtgggatcggacccataggaggtggcagcggtggtgggtacggtcccatcggtggaggtggaggtgggatcngtggcggtggcaacgacggcacgagcggctggtacggccattgcccgacgaacgcgctgaagctcggcgtgtgcgccaacgtgctggatctgatc

SEQ ID NO: 167944 - DNA, 370 bp, Zea mays
  Clone ID: MRT4577_84747C.1
tttttttttttttattttctgaaaaaaaggacagttaaattacatagaatcgatggaaacgaagataccttacatagtcaaacaaaagaaccacgaaagcaagttctgccatttcgcatcaatcaatcatctacctaatcatgcccagcggtatggccggcggcgcccccatcaccgcgccgccgccggcttttttttgtctctgccggtccatgttttcctcccagccttctcgcacaaacacatacacgaggacgacgacattccgcaggccgtatggttatgagcgcgcgcgcgcgcacacacacacgcacgtaatagaacgcaatttgcactgcatgcgcttaccgatccccaggtcgaagccgcg

SEQ ID NO: 167945 - DNA, 1108 bp, Zea mays
  Clone ID: MRT4577_84748C.1
gagcgagaagcgagaagtcttcccctcgcctcgtctccgcccacaacaaacatcacccgaagccgcgtggagccatcatccagatcggagccagcgcgccgggtgatgctgttccggccacgaaagtagccgtcttgcaccccgacccaagagccatggcggaggatggcgaggagaagctgctcgcgacggtgcagcatatcgtgcagacgctggggagcagcgacacaatgacggaggacatcctcaaggtcttctccaactacgacggccgcctctcgctcgacaagctctacgccgcgcgcgcggcggcggcggccgctgcgtccggtggtggcggaggaggaggaggaggaggagggggaggaatcgtaggggagcgctcgatgccgacgtcaccgccgctgcccccgcctcccgcggcggcggtgtcggccgctgggccgaggccgctggtcacgtcgatggagcggaccgtgcgcgcgctggaccgccagatctcgcagttcgtggccatggatcggctgatttgggcggactccgccgacgcggacgcgttcctggaggcggtcgacgacctcatcggcaccgtgcaggagctggacgccgcggggaccaaccgcgccttgctcgaccgctccgacgagctgctcagccggtgcatggcgcgtctggaggatgagttcagggagctcatagagcgccccgacgccgccgcccccgtggtgccgggcgggttcgggtcggacgggagcgacgacgacgaggaggacttcggagccggggacaactacggcgacgagccgatcccgatcgccaagccggtgacggactacgacgtcgtgatcgatgctctctcgccggggtccatcgccaacgtccaccagattgccaggaggatggtggacgccggctttggccgcgagtgcgctgaggcctacgccgcggcgcggcgcggctttgtcgacgaaagcgttgcgcgcctcggcgtccgctcccgcaccgccgaggaggttcacgcctcaccctgggaggtgcttgagttcgacatcgcccgctggatcccggccttcaacatgatgtttcgcatcctgatccccagtgagcg

SEQ ID NO: 167946 - DNA, 341 bp, Zea mays
  Clone ID: MRT4577_84749C.1
tcgtttgacaacaagcggctacacctgagacatggtgccctgagcgtccatatcaccacaaggtacatcactcgtcacagaacaagcactaaaccaaagtgcgatgtacaatggacacatactgcccaacacacaagacctttctgtacatctgaatcttctaccgttcgacacctatccagagagaaacaccacactctgtgcttgagaacagccatattcatactgtctattgaaccagctgagatcttgaaccagcaagaccatcaaaggagccatagcgcacccccagagtggcggacccctccaactcgtatcacatagcagggcaggctgccctc

SEQ ID NO: 167947 - DNA, 548 bp, Zea mays
  Clone ID: MRT4577_8474C.1
ctcgagccggccgggagaaacatcccatatcggcctaggcccaggactgcacctgctcgatcaagaggcgaagaaagcctactgatcgaccatggtgctgatgccgcgcaccaagcggatggccctcctttccaccccggggaaggactccgctgacgatgttgccaccgactccccgacgaacccagcgccatacacgggcgcccccccaacggcgatgcgcaacacgcccgagaccgtggtgtctaaggagaaccacctgatgaaatgagcgcggaagggctcgatctgaaccatgaccttcagcgtctcctgctgcagatcggacatgatgtacagagggacctgccgctacgactcccaccggtgcggcggcttcttcaggccgtggacgcgccactgcgattgcatgatcgaggaccgcaacgttcaccaacatacatggctccaggcctccgatagggtcatgagaaattgactgagcccaccggatcaatttcaatgggcatctgtgtcaacggcggcggatactaccattactcatactc

SEQ ID NO: 167948 - DNA, 482 bp, Zea mays
  unsure (1)..(482): unsure at all n locations
  Clone ID: MRT4577_84750C.1
tcgannggccggccggnaaanaaaaaaaaaaaaaaaaaaaaaaaaaaaaaaaaaaaaaaaaaaaaaaaaaaaaaaaaaaaaaaaaaaaaaaaaaaaaaaaagaaaaaataaagggaaggctttatgttgggctttcaagttgaaaaattggggcaacaggaaattttgctttacctaggcaatatattgcggacgcgtgggcttactcatccaccatgaaaaatctttgctgcagtggagcttcttgtcggcgaacaatgcaaacgttgtacttctttcatgcgattgagtagttgatgttttacttctgttgccaccaacagttgaacgctgtacttgcagattgataagatctccgtgcttcctaaaaaaaaaaaaaaattctaaaaaaaaaaaaaaaaaaaaaaaaaaaaaaaaaaaaaaaaaaaaaaaaaaaaaaaaaaaaaaaaaaaaaaaaaaaaaaaataaaaaataataatatt

SEQ ID NO: 167949 - DNA, 285 bp, Zea mays
  Clone ID: MRT4577_84751C.1
tcatcctcccacacgacctctgacacctccgttcctattcaccacgcccccatacttcacagccatcgcctaactaccgagctggtgattatcaatctcattcttaccaactttgattaccataagaccaaattcttatcgacactgtcagaatcacctccaaaccctgataactcactgcgcaacatacctaactttcccaccttatccaaagttacctactatccatccttgctgctgtatcatcaacaattcaaactttatcgcttgaactccaaggtctcc

SEQ ID NO: 167950 - DNA, 1208 bp, Zea mays
  unsure (1)..(1208): unsure at all n locations
  Clone ID: MRT4577_84752C.1
aaaaaaaaacaaaaaaaaaaaaaaaaaaaaaaaaattttaaaaaaaaaaaaaaaaaaaaaaaaaaaaaaaaaaaaaaaaaaaacctgccccttcctccgttgcactccgggcgggggtctcctcgatgggcaacacactggggccctttatcaggggtttatttatggaatgggaaaatctaatccgccgggaccctgcccaaattgctgcccaagggggcgtaatacatcctatcactcggtatgttatgaactatctccgacctgcgtggggatcgcggcaaacattgaaagaggtgatggaaggtgactttggggctaatggaggggcccctgtggctgttgatcctgaccgccccacataatcctttgctgggcacattgtttgaatcttggatgttcttaaaaagaatctggatatgaagtctaaaatataccgggacccatcttttgcttctatcttcctgaggaataatggcaagtccatcatacacaaggtgaatgacagtgagttgggtgttttactcggtgatgagtggataaagcagatgacaaatagagttcgacgctggagcatggattatcagcgggcaacatggggcaaggttacaactgtgctgcaaagtggcactccaggcattggtggactcccagccaaggcaatgctgcagaaactgcgaatgtnttaatacatattttgaggagatctatgcggcacagtcagaatgggtgatagcagatgaccagctaaaggttgacattagggcagcggtggaggagacagtgatgccagtttacgcctctttaattgccaagttaaagtcttctcctgaaactgggcgtgatttgtacatcaaatacaccccagaggatgttgtagcccacatccagcacttgtttgaaggagcagcaaagtgataaatgatatgtatccttgtagcctgttatactgcagcttctgctcttctgaacttgtgaagatgctaccatggattctccatttgtggttaatgtcttgtactcacatatggtgatgctgttgctcaaattacaactgtgcatcactgtttttgtcctccatgagtagcatgattattttgtaacaatattaggattccatatctgttttaagcactactttaatttaaccccattaagtgtaaaaaaaaaaaaaaaaaaaaaagaaaaaaaaaaaaaaaaaagcggcc

SEQ ID NO: 167951 - DNA, 810 bp, Zea mays
  Clone ID: MRT4577_84753C.1
aattcggcacgagggtcgctccggctagacaccaccgcgtcctcgatcccctcccgagtcccgagcgagcgaaaagtcctccggcctcgccgtctcgtctcgtctcgtctcctcccctctcaagtagtcaagtctcaaccacctccccaagccgcgtggagccctcatccagatcggagccagcgcgccgtgtgatgccgttccggccgtgggagtagctgtcttgcccccggcccaggagccatggcggaggatggcgaggagaagctgctcgcgacggtgcagcgcatcgtgcagacgctggggagcagcgacaccatgacagaggacatcctcaaggtgttctccaactacgacggccgcctctcgctcgacaagctctacgccgcggcggcggcggtgccggccacggggccgaggccaccggtcacgtcgatggagcggaccgtgcgcgcgctggaccgccagatctcgcagttcgtggccatggaccggctgatttgggcggactccgccgacgcggacgcgttcctggaggcggtcgacgatctcatcggcaccgtgcaggagctggacgccgcggggaccaaccgcgccctgctcgaccgcgccgacgagttgctcagccggtgcatggcgcggctggaggacgagttcagggcgctcatagagcgccccgacgacgccgcccccgcggtgccgggcgggttcgggtcggacgggagcgacgacgacgacgatgacttcggggccggggacggctacggcgacgagccgatccccatcgccaagccggtgacggactatgac

SEQ ID NO: 167952 - DNA, 855 bp, Zea mays
  Clone ID: MRT4577_84754C.1
cattgggtacctcgaggccggccgggcgccctattcgctctgcctccatggtctccacggtctgagccgccagcatcgagggggagggtcggagggacacgagcggatccgaggcggcctccacggtctgcgccgccaccatccgctctgccgccgccaccatccgctctgccgcccttcgctccacttcgaagagctggagcttgaagcgctgagcctttacctgtgcgcggaccaaaccataggatttgttcatgcacgggagaggaatcaagatctgcgcctcctagacatcgcggattgtgtccgcaaggccgtggagtttacggtccactggggcgcagcagtggctctcgccattgcgcacctaaactttggtggtaacctccatgatgccattggtctcccttatggatcgacgacagcggacttagaccttctaaatgcacacacgtcacacgacatgagttggagagtattatggattgtaatcttgccgatggagagtacgtgctcatccccgagcaaggacctgtccaagaggaggaccaggagcaggcttcagaagctgctattgaggatctccccgcagccccagcaattgaaggtaccatgcaggatgtagttgatggtgtgacttggcctaccaccctgccaccgggttggacggtcgagtgggatattgctccggcaggagaggagcatgaggagtagtgggctaggccttgcccatttcctcattaccgacgacatcgattatccgctgcactttaatttgtgaactttatttgctactccaaaaactccgatttatgtaataactccgtacttaatttgaggtttcctgttttatcg

SEQ ID NO: 167953 - DNA, 334 bp, Zea mays
  unsure (1)..(334): unsure at all n locations
  Clone ID: MRT4577_84755C.1
naaaaaaaaaaaaaaaaaacaaacaaatttctaaaaaaaaataaaaaacaaaatnaacaggaagaggccttcaaaaaggagatcgcacccacccaaacacaaaaaaaacaaaaaaaaaaaataaaaaaaggccgccccctctaaataacccaaccttacttccccgtccatccaacataataacttttttatatggcccccaaaattaaattcactcccccccttttaacaaccccttaactggaaaaaccctgcctttccccaactaaatccccttgaaaaaaatccccttttccccacctggcttaataacaaaaagcccccaaccaatccc

SEQ ID NO: 167954 - DNA, 1873 bp, Zea mays
  unsure (1)..(1873): unsure at all n locations
  Clone ID: MRT4577_84756C.1
cctgccgggagggagctcatagagcgccccgacgccgccgcccccgtggtgccgggtgggttcgggtcggacgggaccgacgacgaccaataggacttcggaggtgggtacttagtacgtgctttgcctatcccgatcgccgagccggtgaagggcgtgatcgtcgtgatcgatgctctctcgccggggtccatcgccaacgtgcaccagatcgccaggaggatggtggacgccggctttggccgcgagtgcgctgaggcctacgccgcggcgcgccgcggcttcgtcgacgagagcgttgcgcgcctcggcgtccgttcccgcaccgccgaggaggttcatgcctcaccctgggaggagcttgagttcgacatcgcccgctggatcccggcgttcaacatggtgtttcgcatactgattcccagtgagcgccgcctatgtgaccgcgttttcgacggcctcgcccccttcggcgatcttgccttcatcgccgccgtgcgtacccaggctctgcagctcatatcgttcggcgacgctatctcttcctcaagccgctcgccggagcgccttttccgcgtcgttgacatgtacgaggctgtgcgtgacattctccctgaccttgatcctgtgttctctgacccatactctgctgcactccatgcggaggtctccgccatgtgcaacacactggggtcctctatcaaaggtatatttatggagttggaaaatctcatccgccgtgaccctgcccgagttgctgcccaaggtggtgccatacatcctatcactcggtatgttatgaactatctccgtgctgcgtgtgggtcgcggcagacattggaagaggtgatggaaggtgactttggtgctaatggaggtgcgcctgtggctgttgatcctgaccgccccacatcatcccttgctgtgcacattgcttggatcatggatgttcttcaaaagaatctggatatgaagtctaagatataccgtgatccatctcttgcttctatcttcttgatgaataatggcaagtacatcatacacaaggtgaatgacagtgagttgggtgttttactcggtgatgagtggataaagcagatgacaaatagagttcgacgctggagcatggattatcagcgggcaacatggggcaaggttacaactgtgctgcaaagtggcactccaggcattggtggactcccagccaaggcaatgctgcagaaactgcgaatgtttaatacatattttgaggagatctatgcggcacagtcagaatgggtgatagcagatgaccagctaaaggttgacattagggcagcggtggaggagacagtgatgccagtttacgcctctttaattgccaagttaaagtcttctcctgaaactgggcgtgatttgtacatcaaatacaccccagaggatgttgtagcccacatccagcacttgtttgaaggagcagcaaagtgataaatgatatgtatccttgtagcctgttatactgcagcttctgctcttctgaacttgtgaagatgctaccatggattctcctattcgtggttaatttcttgtactcacgtaaggtgatgctgttgtctcaaattacaactgtgcattgctgtttttgtcatccatgaggaagttatgcagttcggcaaatgttgtatatgcgtgtagtgtatctgtatcaatgaatagcatgattattttgtaacagtattaggattccatctctgtttcaagcactactttaatttaaccccattatgttatgcgtggagatcaatatttatttcaagcaanatttatttattttatctttatataatatattatttttaatttttttatttatttatattattttttaattttt

SEQ ID NO: 167955 - DNA, 366 bp, Zea mays
  Clone ID: MRT4577_84757C.1
tcctcctctttttatatctaaaccgcactactaccgtccacagggggaggttgacatacagaaagcaaagggaaccgaaagacgaagaacgcaaacagaacaacaccgggcccgcagggaccgggtaagggcaaaagcaaaagaggaggaggggggcagccggagaaaaacgagcaaaaacccacttcaacaggagggcacacaaaaaacccgaacaacagacacggaacaacggccggaggaagcagcaggaagccgccacccaaccgtggcaaaaacaacacgaccaagccccagggggaacacgaccggggaccctacccgcaaccggaaccgcgaaaaaaaacccccccccccaaagagaaa

SEQ ID NO: 167956 - DNA, 697 bp, Zea mays
  Clone ID: MRT4577_84758C.1
tgaggccggcggtgagacattccccgcgcataggtgcgtgctcgcggctcggtcgccggtcttcgctgcagagttctttggcgcgatggaggagagtaaaagcggcagtgcggtccacattcacgacatggaggctcgggtcttcaaggctttgcttcatttcatatatactgacttgtgttggaaaacgaatgaagttgaagaggaagaagaagacgatgtcatggctcagcacctgcttgttgcagcagacaggtataacttgccaagattgaagctcatatgtgaagataaattatgcaagtacatcgatgtgggaacggtggcaaccatattggcactagccgagcagcaccattgccatggattgaagaaggcatgctttcgtttccttagctccccggagaatttgaaggtagccgtggcaagtgaaagcttcgatcatttgagcaagaattgcccctctgttatgaaggagttggttgccatgctcggcaccttacttgagtaaggctgggttttgtgtgttcttgtgttggtgtgtgctaatgtgatgtgatgaatcaaatgctcctgatttgtctgggtttctgctacctggtttctgtatgtgttgtttgataccaatgaatccaggtattcaagtcaagaaaactctgttcagtttgcactttcagtatttccggaactgactacc

SEQ ID NO: 167957 - DNA, 328 bp, Zea mays
  Clone ID: MRT4577_84759C.1
aggagattgagaagtctacctccagcatcttaccacttcaaaacgtcttcatccgggggtgaagatactcaacgcccccaagttccatcttgggaagctcatggaggatcacagcgactacaaagaggatgttggcgacaatctctagaggcctgtagagggagatgaggattggcacgaggtcgctgctgccgcatagtacgattgctacttctatatctaggcaagtatagacatgatgttgcttatgacgtgtacttatagagtcgtctagaatatgtgtactcgtgttgccataagattctgacatgaaacaagtctaaaatta

SEQ ID NO: 167958 - DNA, 300 bp, Zea mays
  unsure (1)..(300): unsure at all n locations
  Clone ID: MRT4577_8475C.1
gctacattgcacccctgcaaggtatccttgctgctgtgagccactgcaccattgcaacncctttcagcataatgtcagacgttaggagaccgcgtgcctccggagctctatctgtgcctgtgctctcagacatcagcgggtatcctctcgaggaaccctgtccagaaaccaaggatggaagccttttgttgtgtcctcaaggagggaggcgtcctccctggcatcaaggttgacaagggcaccattgaggttgttggcactgataaggagaccaccacccaaggccatgacgaccttggc

SEQ ID NO: 167959 - DNA, 346 bp, Zea mays
  Clone ID: MRT4577_84760C.1
tgcatcatcttaaatgaaccatggctgacagaccaccgccgaggcagaacaccatgaggagagagctctccttctgaatgaatgaaactgataggaccgccaacagtcctccatctgcttgccaggcaagatcatacgctaaagcactggggggaagccctctttgttctggatcttgcactacacggccaccatggtgcccaagctctcaacctacagggatatggtcttgccaggcaaggacttcacaaagatctacataccacctctcaagcagagcaccaagtggagggtgctctccttctgcatgatagatcaatgctagggtacctgcccaatcgaacaa

SEQ ID NO: 167960 - DNA, 592 bp, Zea mays
  Clone ID: MRT4577_84761C.1
ggggccaaacccagttttgcattttttaaaaataaaaattttccccccgggttttttttaactttggttggcttttggccaaaaaacagggaaaaggacccctcacctttggccctaaaaagggtttttgatccttggggggcagtttgcccttacaggggggggccccgttgttgggtaatgcaaatcagggggcttccgggggaacagggttcgtttaaagactttgtttttcctgaagggccaaattcgatttttttggtttaaaatttaagcctcccccacattttggggacaaacatttgggccttaaaattgaaaatgggctggggaaaatttagctttttttcagcctgaacatggtttttggggcgggaaacaattttgccccccaaagttgtttcctcctccccaaaaaattaaatttttttttttgaaaaccaaggccttttttttttttggaactaaggcttggaatttttcgcccagttttttttttaggcaaaaagctttttctttggccttgggaccatataaattagtgggtttgcatccaaaatttttttgttttttgacttgggcttttcctttt

SEQ ID NO: 167961 - DNA, 179 bp, Zea mays
  Clone ID: MRT4577_84762C.1
cccacgcgtacgctcacaacctctactcttcttctgggctgtggacaaccaactcagagaggagcagccagcggcagcctcctgttctttactcccctctaattccgcgcctagcaactaggcatgtaggacaaggctaggaccatggcacccagcctgaagtacctcctgcggaaggc

SEQ ID NO: 167962 - DNA, 154 bp, Zea mays
  Clone ID: MRT4577_84763C.1
gaaacttcatactttatgcggggtaactatactattctctaccacatccacaaaaaattttatttacaatcatcttttcttatgcactctttactttttagatctttaaaacattttttgccccttcgaccaacttagaaatgttttgtctaaa

SEQ ID NO: 167963 - DNA, 294 bp, Zea mays
  Clone ID: MRT4577_84764C.1
aacgggccgacccacgcgtgcggactaaatgaaatccattcactttatacctctaaagacaccaggagtcaccatgagggggtttgttcttatcctcgcacagcccaatctcacttaaatccccgaacatcaacctaaaaatctgcttcagaagcaccatccaaaacctccacttcatctagctcatccactttaattacaccttcggcaccaactatctcttcactaacaaccaccaacaccctatacaataatctttacagcgacaaactacaaaatgcccacatataatat

SEQ ID NO: 167964 - DNA, 745 bp, Zea mays
  Clone ID: MRT4577_84765C.1
acagcacaagcacaacccatcagctgcagcccaaacagctgcccagaacagtgcagcccatcggctgcacccggactttcccttctcgttccagcggcttcgagtctggagaggactcgcctgttctagggttcggtgcccagtcgctgctcgcgtctccgccctccggccaggtcactggcgctaggaggcgctaaatcgagttggcgacgcctccctcacccgtccccgatcgacgtcgggaggcattcctggcggcgtcggcgtccccgcacgcgcgcactactgactcatctgtgcagatcgagccgtcagtgagcatggcagatcttcctttataagaagagttgacaatgtcaatggacattcctaggggccgtttggcttgaagataatcactctcaaccagccaaacgttcaaaattccaactgattcaggaatccaatggaatcctcaatcaaagaatcaaggagtagagctgaagaatcaggaagtggagctctcccaaacttctgttaatttcgataaccggcattcagctctagaagatagctgttgcaagatatgcctctggagggtgacaactctggcttactcctcgacgtcatcatgctctgcacctgaagtttgtggctacgatctgcatacaactccagcgaggcacaagcccgtcgagaaagacatgtaaaaaagcaaagtcacgcgcagatggatcgatgccctgctcactgggacgacaccacc

SEQ ID NO: 167965 - DNA, 3041 bp, Zea mays
  Clone ID: MRT4577_84766C.1
ttccacgcgtccgcccacgcgtccgcccacgcgtacgcccacgcgtccgcggacgcgtgggctagggttcggtgcccagtcgctgctcgcgtctccgccctccggccaggtcactggcgctaggaggcgctaaatcgagttggcgacgcctccctcacccgtccccgatcgacgtcgggaggcattcctggcggcgtcggcgtccccgcacgcgcgcactactgactcatctgtgcagatcgagccgtcagtgagcatggcagatcttcctttataagaagagttgactatgtgtgagcatgactgcatgagagaccttttactgcgtcacatgttttcattgtaatttatatacgcgtcacacttatttttcaacttgacatattaggacatgcctccatatcagttcatgttaacatagaaacgtcctccatattatgagtcaatgatccactctgttttttatgcaacttcaaaaagcaatggacattcctaggggccgtttggcttgaagataatcactctcaaccagccaaacgttcaaaattccaactgattcaggaatccaatggaatcctcaatcaaagaatcaaggagtagagctgaagaatcaggaagtggagctctcccaaacttttgttaatttcgataaccggcattcagctctagaagatagctgttgcaagataagttttggatccatgtattgcagcttcctttcaaactaaatggcactcctgcagaacattttgtttgcaacatttttttgctcctagagttcaattttaggccaactcaaatgtaagtgcagttccagcccgagtacaactatggaatagtgcagtgcaggcacctacggattggaaatttgtgtttgcgcatgacctgttctatcatgtacatggttttctagatacgccactggagggtgacaagtctggcttgctcctcgacgtcatcatgctctgcacctgaagtttgtggctacgatctgcatacaactccagcgaggcacaaccccgtcgagatggatcgatgccgtgctcactgggacgacaccaccacaagaatattcctggacctctgcatcgccgagaaggaaaagcagaactacaacagcaaggggttgaccaagatagggtggcacaatctgtaccgcaacttcaaggaagagacacgcaggtcttatgataccaagcagctgcagaacaagttcaacggcctgaagaggatgtacagcctgtggagactgcagaacgacaaggctggacctggaggaggaggcgggtgggacaagagttcgagcactgttacacaggatgctgacggatgggacaaccagatcacggagaccagtgcagcagaagacttccgtggcaaggcgctcgcgcacgaggacgcgctcgccgttattttcggccccaaagacggcacaaattcgccgtccgtcggtggtggcgccggtgacagaacaccaggcgggggcgggggaggcgaggaagagaaccatgctcgagcgtcaggggacaatgccgcttgtccggaggattcggctcgaggttacaggtctggccgtgcgtccccatggtcaagccaggaccaccacatccacatggtcggcagccgcccagccaagaagcctaagaacacggggtactatgccgaaggcgtgtccgagagcatgctcggaagcaggaacgagagcagcagtgccatcaggcgtgagcaagaagaggtggtagagttgctgcagctcgtagaaaaggacggcgtgtctcagggatctgagctgttcttcatagctactgagctgtttaggtcgccgatccgacgcgcggcatttaggtgcatcaccactccgaagaaccgagttgcatggctccggtggacttgggacaatgttaagatgtgatgatggcggcgttcttgcttagttttcagttgcctgtactgagaattcttcctcgggcagttcgtgagaaactagttgtattgtattataccctgtcctgtccgttcttttttatttgtcgtgttttagttgcgacaaatattcgagatcggatttagtattattgtaaatatatacagatttccagcacagcgcgttctgtcaatatatacaatgcacacataaaagtagttagggtactctactagctgaggacaagtagtcaccatgatgttttcttagttacaacccaagtgcagaacgtagctacggctgcaccaatttatcggaaaatcgaagcagcaggaccaggatgcataggaaaataatggcggcttcaatgactgcatctaagcccatcaattgctctgccattttattgagagtttcacgcccaagcacctccaaatggtagtttaacttaacagggaggttctgctctgcatgtcggacacagtaatgtagcatatccagtacagccatatcagtttggtcatcatcggatcctggtatatcataaatttgctgggcaggaatatctagtagctctgctaactcagcttgaacgtgaacacgttgctgtatcgacagtctatcaccatgtgtgacaacaacaacaggtttatcatctccaatcgacaagaacggatacataaaagtttgacaaagtatctcagtgtatcctttattgctgtcatccattgactcgaggacagcaacaccatcaacaacaaatatcacgaaattgaccttccggattttgtaacgaagataactgtattgcctccccaatggtttcatgttccctatcttattgccttcatcatcatcccacattgttgtctccccatggcttattccttttgtcatccactgatgcagcattttgaaatttttctctaggtcgtttgaccagccacgtgtatcgtaaatacatacggcacttgaattccttggaattggatactcgcgaagaaacattgtaccatttgattttgaattgcatgacacctgtgctcgatctggtgcaaaaggatcatcatccttttttaagaccctagtattcggtttacaagtgtgctcttgcccg

SEQ ID NO: 167966 - DNA, 620 bp, Zea mays
  Clone ID: MRT4577_84767C.1
agctagctagctgacagtactactacacaatactacacacgcgtacatbaggtcacgtgtacgtsggtacagcctagctcagctctggaaakagctagcaggaccgggcgcgcggcgggacgcattatcacgcgcgcsactcacgagccaaatctaacggagctgctttctcgatcaatcggtcggccggagagcttggtggacgggcaaacgagaaghagggccgggggcctgcgtasgatagcyagcgtaccatgaggcccgaagttgaagccgacgacgacggtgtkggcgatggagaaggcggcgagcycsaggtcgccgaggtggccggcgaaggctgcgtrawgacgtacatgcygtargtracgacgcggctgaagatggccggcgccacgatgtcccacagcttcctcgactcctcccacacccgcgccgcgargwgctgctgcttcttgccgccctcgccgccgccgccgtccgcgtccagcagcgccacccggcacgcgtccscbcgctccatcgtcgtctgcgtcttggttgctcggtttccctcgatctccctctctctctctctccaaatgtttttaccttttaggggagggraggaggaagaggag

SEQ ID NO: 167967 - DNA, 329 bp, Zea mays
  Clone ID: MRT4577_84768C.1
tcggtttttgatcgcgagcggccgtctttctatccagggggatttttaattttcaagacagaaaacggattgaacttgaaaccaatttaaatgtaatacaaaagtgaaacgcgcctttatatgaaaggattggaggaatataacggattgtataagagtaaagataatttgttcatagattcataagatgtttgcatgctggtagtttatctgaattgaatactgaattgaggcaggtttaaaagttgatgaatatattaggactgtacgttgaaaaaatgcaattacatccttgtaaaactgtagatgtgcaaagaaatacgaaaatc

SEQ ID NO: 167968 - DNA, 729 bp, Zea mays
  Clone ID: MRT4577_84769C.1
cctcgaagccggccgggacgcagggcgcaccatatcattgacgagaaatgcggagtagaggcagggacgcgtcagcgcgagcgataacgcacactgacatgggcgccacggcggactccaccgcgctccccggaggaacgcgcctccccgctgacggagccgccgcaccgacctctggcctcctcctcccgcgacgtaataaactgtcgccgctccctctccgtgtccaatatgtgacgaggatgtggttgatccgggtgaatacctcctccgactactcctccggcgtaagcgttgacgacttcatcggcaacttgaaagccaagtggcacgcactgtcgagaacaagagcactgtcctcacatacgccggacattgctgacgacgatcgctggctgacgttcgacatctctaaggccatgaattccatgtgtctgctgctcacagaatgcagctagacgatcttcttgacacctgaagtgttcacaagcactacattcacctcaactaaaaacgagaaaacagcccgcgacgtgaacccagaaatatgccaatgagatggatgtgaaatgaaatcaaaagtccatatccggcattactgcttaaatgcatactgattgtgaacgctgccccatgagactgtacgcgagaacagaggtacatgcattcgcagtcgcccgtatgcattctgcaccatctaaggatcgagtgctagtccaacatcaacct

SEQ ID NO: 167969 - DNA, 547 bp, Zea mays
  Clone ID: MRT4577_8476C.1
ctctggctatctaagggttttgtatttatgcggcgcctctggtcatatgacatccctggacaggacgcctctgctactcacagatcgagacgatgatcgcttctatgcgacgctacacaccagactacctgcctaagatacctgtgagagctcactctcgtccggaagcatcgctatggaggatgaggactcctctagaaggacgtcattatgcgcttaagatcgtgacgctggctaagactggcgtatacattgctaaggccaaccgctggtactagatcgaatatgcggctggagacgcgagatgccctggtaagggtgtcggtggaaattggcctgcgctaccatgtactgcgtttgctggtgctgaccctgacgctaacgatgatgatgaccttgatctgtatggggatgaaactgaggaggacaggaaggcatgtgctgatgcgggacagcagtggcaaggtctcctctaacaagagagagtacagcgcaattgctgcgaccttatgtgatgtacaaaccataggcacgatgatgactgagc

SEQ ID NO: 167970 - DNA, 521 bp, Zea mays
  Clone ID: MRT4577_84770C.1
tcgctcggccaccggagatcgagcggcgccagcccacctcatgcgcggacgcccggcagctccaaactacgagacgcccgttaggacacgcagcggcaggccacaacgcgccaaaccctaggcatcgttgccgaccatcaccctcgccgcccgctgtggcgccgccctgtgtggccaagcacagcactccgccattctgccgacgtcgggcgcgccaagcagctcgtcgaccgtccagtccgccgtggcgccgttgcgggtggcaagggactccagtgaagaacctgctgtaccaaaaaaaatcctcatggcggccatgaggaacactaaatgctgagtgttgcagaggagtcgtggtgtccgtgctcctcatggaggagtcttggcgtccatgctcctcaccttggagcctgcgttaatgctagctacaaggaaagagatgactgtaccgctggcactgtggtgctctcccttatgccctggtgctacctacgtcacccgttaattgctcgaggaattgc

SEQ ID NO: 167971 - DNA, 204 bp, Zea mays
  Clone ID: MRT4577_84771C.1
tcgtacacacgcgtgtatttcaaattgcttgagtggtctacactgccctgccatcatactccacgtgagcccggtcgagcgtgagcaagggaaaggcatggctgttccgaatcattgaacgctggcgctgggcgtgcttttggccgtgaccgtggtggctcatcaagcctgtgtgcgcgcagcgatcacaatttccaccgtgta

SEQ ID NO: 167972 - DNA, 330 bp, Zea mays
  unsure (1)..(330): unsure at all n locations
  Clone ID: MRT4577_84772C.1
gagctcacatgtcggcggccgccctattttaattatcatgagagctaaaaggcacttttttttttgctgttaatttattaatttatgagggcaaatagcaggttctaaatattccgcaaatatgaaataagccttgtcctttaaacatgcgctagttgataaagcattaaaaagtgccctactaggagttccctttaagctaaaaaacacctacaaaaaatctgccaaaaagaccacagtatctgccattcacattaaccactgtcaaaattttcaaccaatccaacgggactancatttaaaaaacatcctgtttaatgcaaacctcat

SEQ ID NO: 167973 - DNA, 401 bp, Zea mays
  Clone ID: MRT4577_84773C.1
gccacgcgtgcgagcagatttgttattggcgtattccctcttatgcgggcgcttcttatacacgggcaggtgaaattatttccatccatggcgccacaaatctgcagccgacgttctccctgctcctctatccatagtgcacggctgccgctgtctctgctctacctttcatggcgccactcctggccagaatctcgctcgactatgtgctcggctacaggaacaggcgccctcctgcatctgccatgggacatggaatctatcaagtgcacgcgaccaacactttccccatggcgcccctctgcatgtcctacgctggggactaccgattctgtgtgcaggtacctcctatgtggtacttgggcataggaacttcttctgcaagaccggcgcttgatttc

SEQ ID NO: 167974 - DNA, 287 bp, Zea mays
  Clone ID: MRT4577_84774C.1
aaataaaaaaaaaaaaaaaaaaaaaaaataaaaaaaaaaacaaaataacaaaacttaaacagacaaacttggaactttaatataatgtgcactaaatacctttaatcttacttcctttccacaactttacaacttttaaaactttaaaactacaatacttacccacctttatttatatccccctttttccaattcccttacttccccaaattccatcacctctctacctttcccacttttccacactttcaatatctcaatatacactccctctatctcctttattt

SEQ ID NO: 167975 - DNA, 437 bp, Zea mays
  unsure (1)..(437): unsure at all n locations
  Clone ID: MRT4577_84775C.1
gctgccgcgtcgtagctnggtcctctgngcggncgcctttttttttttttttttttttttttttttttttttttttttttttttgtggtcattcaaaaatggatggccccggccctcgcccggtgggttcacccccgggtgcccccccctgcgtcggcgcctggctgccatcgtccgtttcctggaggccgcgggttgcggtgttcgttgggccccccttcgtcatgtccctccgccgggtggggcagcttctgcccgcctgcgcccttgtcaggttgtgtgccgcgaatgccagcctgccctctttccggccggtcgtccgtacgggtggttctgggggccgtgcccccgtgcggggttgctgaggcagttggttcccggggccctntgtagcggcccatgccctgccctttctgggccccgggtctgcttcgcgg

SEQ ID NO: 167976 - DNA, 853 bp, Zea mays
  unsure (1)..(853): unsure at all n locations
  Clone ID: MRT4577_84776C.1
cctcgaggccggccgggggccgatactgacactgagagacgaaagctaggggagcaaatgggattagagaccccatcctggccgccaagcttccaacgtacgcagcctgctcgtcttccacctccggccatcttcctccctctaccgcgcttccctccccacagcagcagaccaccggcgctccctgttcttcttccccgtgggcgcgcccccttcatccaggcagcagacgacgcacgcacgccaggaacgcccgagctctccatctctaatccagcatgcagggcatttctcagggtccgagctcgtccccttggcttgggctccttgtttgcttcctgcacgtacgctccctcaacgccggcctcctctgccctaggttcggcagctctccccaaccaagcttctcccatggcgctgctacctccaagatggagctcgacaccccaaagaaattccccctgggcgctggaggcgccaagctcgcgccggtgagcacctcccatggcgtggccatctccctgctgttgccagggccgacgagtccaagtcttgtctctagccttccttgccgactatggctgcccagcagctcgtcacctccctctctagtgcatgccccagctgtcatttccccacgccgagcgtgccctctcgccatcctttgccttgctgctcgcagttgagtttccaactcgtcgcagctcgcgcaccacttgttcggtgatatgcacagtagctgcatgtctcagattatcgcagcagcgagctccttcgccggcgctccttcgccggcgctgtccacagcagcagtcccaacgcgacngtgtgaccctttggtgagcaccttgct

SEQ ID NO: 167977 - DNA, 502 bp, Zea mays
  Clone ID: MRT4577_84777C.1
agcttccaacgtacgcagcctgctcgtcttggaccgccggccatcttgctgcctggaccgagcttccctccccacagcagcagaccaccggcgctccctgttcttcttccccgtgggcgcccccccttcatccaggcagcagacgacacacgcacgccaggaacgcccgagctctccatctctaatccagcgcgcagggcatttctcagggtccgagctcgagcaggtgagctcgtccccttggcttgggctccttgtttgcttcctgcacgtacgctccctcaacgccggcctcctctgccctaggtccggcagccctccccaaccaagcttctcccatggcgctgctacctccaggatggagctcgacaccccaaaggttggaatccgaccctctctctgttcccctcaatttcaagctcccctggcgtttctttttgccctgcagaaattccccctgggcgctggaggcgccaagctcgcgccggtgagcaactcccat

SEQ ID NO: 167978 - DNA, 294 bp, Zea mays
  Clone ID: MRT4577_84778C.1
actgcggaccaacacgaaatcgagatgcagcacaagtttaaaccagaggacgttcgttcacatcaagaataaggtaagatctgtcgacgtagactcagcgggcttccttggcaacaatgtcgtcgagaaggcgatggatgatcctgatagagcaactcgaattttagatggctcgcctacaaatcgactaggctgacgtcgtgaaggatgtggcttccatcttgggtcctcctatcaactgaggtctacttccgcttacatgtgcgacggatctagctgatgcttaccacggaa

SEQ ID NO: 167979 - DNA, 1707 bp, Zea mays
  unsure (1)..(1707): unsure at all n locations
  Clone ID: MRT4577_84779C.1
ggccgcttttttttttttttttttgcatttcccaaaatataatccgcattttgtaacttagtttttcgcatcaaacaacgcattgcatatttttttatcaaaatataaaaacatacgagtttctttgtacttcgtcttctttctctacccacgtccattcatacaattatattttcacgcacatattcacgccatcgactgaatcataaataaaaacgaaatcacaatttttctaaagcgaacaaccccgcgtactcgtgtcgcgcatgtccgcatgctgtccacagcttggggctttcgtcgagcatggaatgcgcgaggcatgacgacaagggcacgggtcgacgacgatgtggctgctctcgtcgagctggaacaagtcgtggcgctgtggttcttgctgcgcatgacaagcacgacatcgacggcaagcccaatactcgacgatagcaagctgcgggctgggacaaagctcgatccagcggctaggacagcaaggtgcctcaccaagggtcacaacgtcgcgttgggactgctgctgtggacaggcgccggcgaaggagcgccggcgaaggagctcgctgctgcgataatctgagacatgcagctactgtgcatatcaccgaacaagtggtgcgcgagctgcgacgagttggaaactcaactgcgagcagcaaggcaaaggatggcgagagggcacgctcggcgtggggaaatgacagctggggcatgcactagagagggaggtgacgagctgctgggcagccatagtcggcaaggaaggctagagacaagacttggactcgtcggccctggcaacagcagggagatggccacgccatgggaggtgctcaccggcgcgagcttggcgcctccagcgcccagggggaatttctgcagggcaaaaagaaacgccaggggagcttgaaattgaggggaacagagagagggtcggattccaacctttggggtgtcgagctccatcttggaggtagcagcgccatgggagaagcttggttggggagagctgccgaacctagggcagaggaggccggcgttgagggagcgtacgtgcaggaagcaaacaaggagcccaagccaaggggacgagctcggaccctgagaaatgccctgcatgctggattagagatggagagctcgggcgttcctggcgtgcgtgcgtcgtctgctgcctggatgaagggggcgcgcccacggggaagaagaacagggagcgccggtggtctgctgctgtggggagggaagcgcggtagagggaggaagatggccggaggtggaagacgagcaggctgcgtacgttggaagcttggcggccaggaaattcccggcctggttagcgacgaggccggcgatttgctgctgtggggaggggtgccggacctagggcagaggagnccgagagggaagaagggaggtcggccatgggggactcctcgcgcgcactggaccagaggagggcccgcgccatgggaggcgccatggatgagctcggtgctcaatcctgcctgttgaccgacgccggagggagctcacgcgcctggaagaaaggaacgcgcgtggggagcttggggcttgcgcgccatggaaggagcggtggtggctggaggtgaggggcagccagggagctcctgcgcgctgggggagaaatgctcctgctctcgctgctgaattcaagggaagcaagct

SEQ ID NO: 167980 - DNA, 362 bp, Zea mays
  unsure (1)..(362): unsure at all n locations
  Clone ID: MRT4577_8477C.1
agcccacgcgtccgcccacgcgtccgcggacgcgtgggtttttttttaacatgacatggcttatgtaactggcaagccaagctgctgctggtacagggaaccttcaaaggaaggaaaaatattgcctggcaatggcaatggcagtcacccgacctggcaagaatggaagatgatgatggggctatggacaaataatttacctattccttgtgttcgcctctactgacagcaatcaatcgatcatttacagtgtgtgtttgtgtagattaaccttggacacgacaataccttgtttttgttcctatccttcctcaacaacaacanannaacaaaacaatgaaagaaatgaatcttgccgccac

SEQ ID NO: 167981 - DNA, 706 bp, Zea mays
  Clone ID: MRT4577_84780C.1
acgcagcctgctcgtcttccacctccggccatcttcctccctctaccgagcttccctccccacagcagcagaccaccggcgctccctgttcttcttccccgtgggcgcccccccttcatccaggcagcagacgacacacgcacgccaggaacgcccgagctctccatctctaatccagcgcgcagggcatttctcagggtccgagctcgagcaggtccggcagccctccccaaccaagcttctcccatggcgctgctacctccaggatggagctcgacaccccaaaggttggaatccgaccctctctctgttcccctcaatttcaagctcccctggcgtttctttttgccctgcagaaattccccctgggcgctggaggcgccaagctcgcgccggtgagcaactcccatggcgtggccatctccctgctgttgccagggccgacgagtccaagtcttgtctctagccttccttgccgactatgggctgcccagcagctcgtcacctccctctctagtgcatgccccggctgtcatttccccacgccgagcgtgccctctcgccatcctttgccttgctgctcgcagctgagtttcctactcgtcgcagctcgcgcaccacctgttcgacgttatgcacagtagctgcatgtctcagattatcgcagcagcgagctccttcgccggcgcctgtccacaacagcagt

SEQ ID NO: 167982 - DNA, 195 bp, Zea mays
  Clone ID: MRT4577_84781C.1
aaaaaggcggctacgtacaagaaggcgccgccctagggagtagggagacccaacgcgagagaaaaccaccgagagatgatgagaagacagacaactccgcctcgaacggctcaaaacagcagcgccgccgaggaacgaaacactaaaaaaaaaaccccgtacaagagcggggaaaaaataaaaaggcggcaggac

SEQ ID NO: 167983 - DNA, 399 bp, Zea mays
  unsure (1)..(399): unsure at all n locations
  Clone ID: MRT4577_84782C.1
cggaatnaanggggggacccacgcgggcgctagaacgcgcccaacctcgtccagttttatcatttttaggcacgatattcaagagggctcacaggaatatttggcagtatctaaggcaagcaaaaaaccaaaacatgtctcaacctcatcgtgaacctagacaaccaacagacaacgcacaattcacatttattcataaggtacacaatcttgaaacatgcataataagcactctgaaaaaacccctgtactgcaatttggacccttggcgtgtcagattgacgacacggtaaatgcacacccaatcaatgcttgaccacccgactagcttgacacatgagtggttgatagcgatacccatcttaagcaactagaatctctgcctggtatacccaaaga

SEQ ID NO: 167984 - DNA, 764 bp, Zea mays
  Clone ID: MRT4577_84783C.1
tttttttttttttttttttttttttttttttttttttttttttttttttttttttttttttttttttttttttttttttttttttttttttttttggaaaaaaaacccccaatcaacccctttttttttaaaaccctttaaggggacccccaaacccgggggggttttctgggcccccatttccccaaccccccccgggggacaaccctggggttccggcccctagggaaaaaaaaagtttggggggtttaaaccaaccggaaggggggaccccaaggggaaaaaaacctggggaacccgtaaaaaacaacccaagggttccccttccaggggggggggggaaaccgcccccccttttgggggccttgcggccattcccaaacccggcttgggggggcccccattcccctggccccgatttgggtttttaagacccccccccccccccgggttaggggccttggggggcccggcaaaaaaacccggcttggggaaccccgggggaaagggggggttttttgggggggggggggccccccttggggggaaaaaaaacaacgggggcggggggcccgtttttggggggggccttccccgctttccccttgggggggaccccttgggggaggggggggggggcctccccataaaagggtcccgggggccctcccccgggaaaaaaaacgggggccctagggccccaaacctgttttgggacctgggggggttggaccctttaacccggcaaaaatttgggggggttt

SEQ ID NO: 167985 - DNA, 275 bp, Zea mays
  Clone ID: MRT4577_84784C.1
ccaacacgttcgatcgaacaaggacggatgcctggccttctctggtaaattaaacgtcggataccatggcatatagacatgctgcatccggacacagagttgacagaaccaagggtctgtcaactggattgtaggaatacacatagctttctccgatgcggacattcatgagttgggtttcaacgttgtatgcgaggtgtacaacctgatgtagcacatggtctactgcctctagtaaaacatctagggcacattgagcggacacctgaactaga

SEQ ID NO: 167986 - DNA, 267 bp, Zea mays
  Clone ID: MRT4577_84785C.1
ccggggaaaaaattaccgtggcaaaaacaacccctttcaggattgagccggaccacatgtagcaacatggggtaagtaggtaggtaggtatgggagcccaggcccaggaggcgcacggtggagcccagcaaggacaaggactccgtccggttacggtgtgtggtggcgactggtgcgatgcaaagggcggaagactcggaggagataggacaacttagtgtactacacatggtactgatggcagtggtggtcgatgactcccacttc

SEQ ID NO: 167987 - DNA, 343 bp, Zea mays
  Clone ID: MRT4577_84786C.1
tgagctttcttaatccctccaatgcaccggctgctgaatctacttagagggctgaaaatacccctaactaccatgtgaacgatgtttctagctctcttgtaacagactcacacaactaaagctcattactacatagaccaaggcagacgcacatacatgtatctgcgcagtgccctgccaaaaagtctaactccctacatccgcagacaggagctcactctcaacatattcagatgctataatatcaatatatgatgaggctacatgtaggtggacaaaacacactacatacatagagaaaaaaaaggcatacttctttgcaacaaaaaaaggcatataccct

SEQ ID NO: 167988 - DNA, 379 bp, Zea mays
  Clone ID: MRT4577_84787C.1
gtatccatctgttcattagcggttatccacttggatccatggaaacatacatctacaggtgacgcatgacggatgccaccgttcacgtggcatcaagaattcactgctgacctccgaatagaaccaaaaatcgtatgtggacacggtttccatgatgactgactctgtggaccggcacgcaacattgctaggtacgagagagaacatggtcttcttgttgacgggggggacgaccaggtgccctaccgatggtgctgagagcgcaccagggcacgtactaggccggggttgcccaccagcgtcggttcgctctgccctaaggtgttgcgcgagtccttgaaaccgccgttattgtcaggcccgacgaccatggcgcccg

SEQ ID NO: 167989 - DNA, 190 bp, Zea mays
  Clone ID: MRT4577_84788C.1
atttgtacacttgttactccagcaaggtaactcgaaatggactgcgggtttagtgatttaccacacataaacacctatgactaaagcatataactcttatataacgactctgctaccatatttataggcatttactccaaggtaatcattatcaaggaaaggactgtttgacacaacacttttatttttt

SEQ ID NO: 167990 - DNA, 458 bp, Zea mays
  Clone ID: MRT4577_84789C.1
catgccttcgctgcctttgccctgctccttttgactggatggagggagcagaacgtgaccctcaaccagctaatcaagggtctctgtgatggcaacaggactgatgacgcaatggatatggtgttcagaagaatgccggagcttggctatacacctgatgttttctcctacaatgctcttatcaaggggctctgcgtcgagaaaaagagtcaagaggctcttgagctgctgcttcacatgacggccgatggcggatacaactgctctcccaatgtggtgtcgtataacacaatcattgatggcttctttaaagaaggtgaagtcgacaaagcttacttcctgtttgatgaaatgattggccaggggtttccacctgatgttgtgacatacagctcactcattgatggcctgtgcaaggctcaagcaatggacaaggctgaagcaatcctacacatatg

SEQ ID NO: 167991 - DNA, 809 bp, Zea mays
  Clone ID: MRT4577_8478C.1
gcttccaggtacaggagctcttgcggcggcggcgcagcgagcatctgttgccctcgcccttcgcaatggcctccccctcctctgtctcccgtccgcggaagcgtcccgccgccgtcgccttttcttcctcgcctccgccgccgtcgccttttcttcctcgcctccgccgccgcctcaggggctaaggactctgaaattgacaccaaagaagaattttcccctgatctggcggacctgtgatgttcttcagctttatctaaagtcttttggcaggacagctcgtttgacgagtccagagggacgtcagcgagactactttgaggcagagttcttttttaaagaagaagctgaagatgcattgcagaactgcaaaatcccaaacatgaccattgaatgggctgaagcaaacatatcagacaatccacttacaggtaatgataagtataagtaaatcttgagcctgcttattggtttcacgagaaataattcgcttctgtcaatacaggaccagcacaaatttcgtatgacccaccaaggtgtgactacgatgattttaacattctggtaaacagctcgagcacaacttttaaataattcgcttattggtctgaagcaaacatatcagacaatccacttacaggaccagcacaaatttcgtatgacccaccaaggtgtgactacgatgattttaacattctgccattagtaccacagccacgaaacaatccttttcacataaaaatgggtattacctaaaatgccgaaaagacacaagggcagccagaagaactcaattccagccgctcgta

SEQ ID NO: 167992 - DNA, 284 bp, Zea mays
  Clone ID: MRT4577_84790C.1
tctttcccccatggagtcctcaccttttgagcagggttagtcagggcgcactctcttgctctggaatggatttcttttatttatttattttagttttatgtgtatgagtggtttttcttcatgtaagcttactgctatgccattggaggctagaagagtgcactggatcctccagctctgaatgatagatggttacaagctatcctgtgggtgcttggaactgagcacccagtgcttctaactctccaggccctgtaatggactcaggcagcataagccaatag

SEQ ID NO: 167993 - DNA, 192 bp, Zea mays
  Clone ID: MRT4577_84791C.1
caaaaagctctaggatctgacttgtcatgcacggtcagcgcctgcgatatctacagagtggtcgcaccacctggcgccatgcggcgtatcggaggaaagagactaccaatccgtctagctaaagcacactgccaagtgagacgaagtcaatggtttcgatcagacaaaccacaatggggcttctgggcaatc

SEQ ID NO: 167994 - DNA, 353 bp, Zea mays
  Clone ID: MRT4577_84792C.1
aacacacggagcgatgcgctctctttactagatcacacactggggaccaagaagttttgccttcctagggcccttggtctttctggatggggcgacaacggcacacattatcctacaagggtcacatgctcctatagctccccttcttccgccatacctttcatcaatgatagcttcagtatgtgaaaacccagctcttgaaccctataggctccaacaagcaagtcgcaggaagcaacatacctttatcacccttgtttcaacaatcgccagccgtatctacggtgctgggatcggttcacaccatcaaggcacagcagctgcagcaactcgtgctacctgtgatcaaccaa

SEQ ID NO: 167995 - DNA, 543 bp, Zea mays
  Clone ID: MRT4577_84793C.1
cagacctgatggttctgtttgaaggatcacaggaagtctcgaagaagcttatgagcaagtctctgaacgagccagaagccttgatgaagagttgacaaaattgaggactgagcttgagtctctgcggtctgagcgtgataaggcggtgcttgaagctgattttgctcgggaccggcttaatgggtttgcagtggagcttgagcatcagaggaaggagtctaactctgcttcacttagaaatgcggagttgactcgtttagtagttgattatgaaagaagacttcgtgaagatttggattctaaacaagctttagaggagaatctaaggaagctatcaatggaggtgtccacattgaagaatgcaaaagagagtttagagaagtcagagagaagagctttggatgaagtccgtgatttaacggagcgagtgcatcgtttgcaggccacaatcgacacaatccataccactgaggaggtccaagagaatgctaggtccatggaaaggagaaatcatgaggaacacattaagcgactggaaaggga

SEQ ID NO: 167996 - DNA, 140 bp, Zea mays
  Clone ID: MRT4577_84794C.1
aatggaaaagactcgccatccgtttatattttttaagaaccattgggtacatccgacgtttgagccaacatgggaaaacgcttgccatttaccaacatgcatttatttttacatttgaactaattttgagcccaaattcg

SEQ ID NO: 167997 - DNA, 2525 bp, Zea mays
  Clone ID: MRT4577_84795C.1
ggctaacctccttttttctctctctatctttctctccatctgtggacttctccggttttgtttgacgagatgcctgcgctcgccgtcgacgccgcgacacccgtggcgcacgccttcgcgtcctgcgacgcggcgcgcttccccgccccgcccgtggtgggccccgccgccgcggccgaggccgccccctggtcggccgacctctccgcggcgctctacaacgtggacggctggggcgcgccctacttcttcgtcaacgacgacggcgacgtggccgtgcgcccgcacggcgccgcgactctcccgggccaggagatcgacctggccaaggtcgtggccaaggccgcgggcccgcgcgccggaggcgggctcggcctgccgctgccgctgctcgtgcgcttccccgacgtcctgcgccaccgcgtcgagacgctcaacgccgccttcggctacgccgtccgctccaccggctacggctcaaggtaccagggcgtgtacccggtcaagtgcaaccaggacaggtacgtcgtcgaggacattgtggagttcggcgcgccctttgggttcggcctcgaggccggctccaagcccgagctgctgctcgccatgagctgcctcgccgcgcgcggcggcctggacgccctgctcatctgcaacgggtacaaggacgacggctacgtctcgctcgcgctcatggcgcgctccatgggcctcaacaccgtcatcgtgctcgagcaggaggaggagctcgacattgtcgtcgaggccagccgccgcctcggcgtgcgccccgtcgtcggcatgcgcgccaagctgcgcaccaagcacgccggccacttcggctccacgtccggggagaagggcaagttcggcctcagcgccgcgcagatactgtccgtggtcaccaagctcaaggccatcggtatgctcgactgcctccagctgctgcacttccacatcggctcccagatcccgaccaccgccctgctctccgacggcgtcggcgaggccgcgcagatctactgcgagctcgcccgcctcggcgcggacatgcgcgtcatcgacgtcggcggcggcctcggcattgactacgacgggacccactcggcgcagaccgacatgtcggtggcgtacagcctggaggagtacgcgggcgccgtggtggccgccgtgggccgcgtgtgtgaccgcaagggggtgcagcaccccatcatctgcagcgagagcggccgcgcgctggtgtcgcaccactcggtcctggtgttcgaggccttctcggctacggcgccgggacgcctggacgcggccacggcctacctcctcgacgagctcacggacgactgccgcgccgactaccgcaacgtcatggccgccgccgtgcgcggcgactacgacacgtgcggcctgtacgccgaccagctgaagcggcggtccgcggagctgttcaaggagggggtccttggcctggagcacctcgccgcggtggacgccttctgcgagctcgtcgcccgcggcatgggcgcgcccgagccgccgcgcacctaccacatcaacctgtccgtgttcacctccctgccggacatgtgggccatcgggcagcagttccccatcatcccgatccagcggctgcaggagcgacccgccgtcgacggcgtgctctcggacctcacctgcgacagcgacggcaaggtgagcgagttcatcggcgggaggcacagcctgccgctgcacgagctgcccacccacgccacccgcggctactacctgggcatgttcctcgggggcgcctaccaggaggccctcggcgggctgcacaacctcttcggcgggcccagcgtggtgcgcgtgtcccagtgcgacgggccccactgcttcgccgtgacgcgcgccgccgcgggcccgtcctgcgccgacgtgctccgcgcgatgcagcacgagcccgaggtgatgtacgaggtgctgaagcagaggaccgacggcgccacggccgccgccctcgcccgggccttcggcgcaatgccgtacctggtgttcgaccccgaggccgccgtgatgtccggcggcgagagcagcgactcggagcggtcggccgccggcgccgccgaggaggaagacgatgaggagtgggagttcatgcgcgggctcaccgtctgatgacgtgcccgcccgcccgccccgggtgaaacaaggcgagtccgtcgccaggaagttgtcagtggccggccggcgttggtttacataataacccccaccgcccggtgttgtatcgtgtcgtggtcgtagtcgtcgggtgtctcgtcgtcgccggagttgtttggcgccacctttttattccgaacgcgtcagtgtccactgttcgcctttccttttttttctctctctttcatgggaataatctgaaggaaactaatagcaagtttctctttaactggaaatttcgttttttcaagaattcacaaaaaaaaaaaaaaaaaaaaaaaaaaaaaaaaaaaacccctcgagctgggaggactccgagcacgcgg

SEQ ID NO: 167998 - DNA, 297 bp, Zea mays
  unsure (1)..(297): unsure at all n locations
  Clone ID: MRT4577_84796C.1
gcgggcggaaaatcttgtgaatgtccanattagctttttctttttcaaccttgatcagtttccacgggcagtatgctcttgaaaaggtccttgacatcaaccacctctttgatccggacgatgtcagtcataattcaaattgtatgacaactgaggacataacagctgcaacaaatgcgatgttctacaatacagaatactctgatgcttcttcaccctaccttagtcatttacacacagatcgattggcagctcaaaatcaatatttctatcccacttacagactaattcataacc

SEQ ID NO: 167999 - DNA, 405 bp, Zea mays
  Clone ID: MRT4577_84797C.1
gctggaggcacaccatctgctaaatatacaacgtgagtgcatccctgtcaacagccgtgacaatgtgggtgctagtgttgagactgcccccgagagggttaccagctacaacaccatcgcctacaacgttcgattgaaaaatgctctggcaaaccataaggactttcacattgacatatgccctcatatactcacgatgaacctcaataaggatcaccatgactaataacgcctgaaattacacgtacttgtagaggtacaatatatgtatcaagagattgaaatggtctataacctgtaaatctatcactaagagcatcaatattagcacttattaaaccttattactaccgatgttactacctaatttatatacttctctaaaaattatgcttaaaaaaatat

SEQ ID NO: 168000 - DNA, 230 bp, Zea mays
  Clone ID: MRT4577_84798C.1
gttccaccacgtgaacgctttctggtgacccaccttagacagtttgtacctagatacaagcaaggcatcttacagcaagcaagaaagcttttccatgaagctgggaacgacgctcctgcatgtgaaaagacccccgtagatttacatttggcagtccctgaaggagactctggacttgcccatcgtgctcagcatgtacttgatgaagacggtcgacctgtttcaacctc

SEQ ID NO: 168001 - DNA, 495 bp, Zea mays
  Clone ID: MRT4577_84799C.1
ctgcatacaggcgcatagtaggtgctcttcggtacctggtgaacacaagaccggacatagcatttgctgtgggatttgtctcacgttttatggagaagcctactaccgagcatctgcttgctgtgaagcgagtgctgcggtacgtagcaggtacttcggactatggctgctactatcagagaaggaagaaaccagcaggcttgaccgggtacagtgacagtgaccatgcgggtgatgttgatactcgcaagagcacgacaggagtggtcttcttccttggtggcagtctcattacttggcaatcacagaagcagaaaatagtggccttgtcaagctgcgaagctgaatatattgcagcagctgtcgcctcctgtcagggtgtttggctggcacggttgcttgctgaactgcgaggagaagaagctgaaccggtgatgctcttcatcgacaacagatccggcattagaattgtccaagactcctgtgtttcatgag

SEQ ID NO: 168002 - DNA, 652 bp, Zea mays
  Clone ID: MRT4577_8479C.1
tatactcaagaccaccgaatcttctgcgattaatatccccgcacctgcatgtctacctcaacgggatccggcgagaggattacgatggaggcgctgctgtgccagtgaatgaaggcgtgtaccacaactacggtgggcgtcacccccccgagggacccatcctccgcatccacaactgaggcttcttcgaaagccaccggcatcatgaacatacgctctatctgtcaccaggagatactgaccgaactaggacaagccaaggtggctgcctccgcatatcgacaggatacgaagaacgcaaatgacgccggaatggatccgcgagatgatggctcaaacactcaagaagctgtagtccaaatagatgtgaagacaactgacccgcaagattccgctgatgtaaacgacactcagcgaggctgacgatactgtctactcctacgagaatgtaaaactgaatagactgtcataaacatgcaagaagagggacgacctcacagtgatcctgctagcctcggtgagacacgtgcactgggcgttcacaccgcaactgctacaactactactataaggtcgactacccgactgatgacaggtacaacattgtcaatagttgatcttagtccaaagcaaacaagctcaacaagatcta

SEQ ID NO: 168003 - DNA, 1097 bp, Zea mays
  Clone ID: MRT4577_847C.1
tcgtcttcgctatgcaccacgagcgcctccgccgctccaacgctccaacgcttgagcgcctccaacgccactccaacgccacgagcgcctccgccgctccaccgaacaactccaacgccactccagctcttgcagcagtagaactctactgcagccagctacgacaccctgcgcctgccgcactaggtacatttgattctggtttctgccgcacaagatccgctacctcttggacccggacatctacaccgacggcaggatctccgtgcagggcatcgacgccgtgctcttcgcgccggacgacgccaaggccacgcagaccgtcgacccgaacaggaagcctcctaccatcgtcacccacaagaagaagatcaagctccggcgagattggggaggtcattacatcaaaaaaaagattgggggaggtggtgtagattaatttcacaactgatcgctagcatcaatcaatgccagttcatctattgctcaacctcagtattggccaacgtgaaaacatgggaggtgaagtgaagcaagtggtagttgagcatatgctggtgggttggttgtcttcatgaacatctctttgatggctgataccattcctgggactgcaagccaacactgtcctttaacccatgacccatgagcaacaatttcttcttaaaacagagcatgatgttaaagaaatttggcttcaagcgcaaaattaggttgcttcgtggcagtgatgcatggcctcaacaaatgatttgagcaaatttgtacctctttccatctcctgtcgctgcctctaccatatctacctgaaggaacaaatttgagcgcatcttctgttgacagtggctttagtttgctattggtgctccagtaagaaaaatagatgtattttgttgacggtggcttcacaatctggcacatgactcatgaaaagcagtgttctgctacaaacattgtgttgatagtggctttagtttgtgtttatgcatcagtttgctgatgatgatgcttatactgtctttactacttcagtttgcttgacaaactattgtgatgatggataaagtgtgatatgatgatgaatgaaccaatttact

SEQ ID NO: 168004 - DNA, 207 bp, Zea mays
  Clone ID: MRT4577_84800C.1
acccaacccccccgtgatattactggtactcaaaaccaaggtttttcaaaaaaagtgttgtttttttcctaaaaccccaaaaaaattttttccatttaatcaggggcctaacaaagattatagggccgggggtggaaaccattgagaagtaaattaaatggacttcgaaacttgaaacaatgccccattttttcgctaacgggatta

SEQ ID NO: 168005 - DNA, 656 bp, Zea mays
  Clone ID: MRT4577_84801C.1
atctggtctggaggagaactcgcggggctctcacgggcggcgacgggcaaaatcctccgccggcgggtgagggcggagaggagccgcagctctccatgtcttcatatgatgcctcgacagaagggtgaaggaagtgcagtgcctgtaccgtggactccaggaatgggtaggaacatcgaaaattatgttttgagggaccaggaaactcggtatcgtcagagatatcttgatctaatggtaaaccatgaagtgaggcatatcttcaagacacgatctaaagttgtctcgtttatccggaagtttcttgatgaccgtgaatttttggaggtggagactccgatgatgaacatgattgctggtggagcagctgcaaggccttttattacacatcacaatgaattaaatatgaggctttttatgcgcattgctcctgaattatatctgaaggaattggttgttggtggattggaccgtgtttatgaaattggaaaacaattcaagaatgaaagaattgatttaacacacaatcctgaattcacaacttgtgagttttatatggcttatgccgattataatgaattgatggagcttactgaaaccatgttggcaggcatggttaaggacctggacagtggctataagataaaaaatcatgc

SEQ ID NO: 168006 - DNA, 370 bp, Zea mays
  Clone ID: MRT4577_84802C.1
tttgggggttttttaaccgtgttttgtgatatttgatggttttaacaaggcataaagccacaggctcaacagcaaagcataccttacttcccaacggtgactcactttaaacaaaaaactgcagggaagggggcctaaaactgctcttgctagcttatgatgacatttgatttatccttgacagtacagcagcgatgccactacaggtacaactaaaagtgctggaactaaatgtcgacaccttttacccgggattgcagacattcgactccctttatcttgcgtgtcaatacaggtgatggtgcaatggcaatgtttttcagggtcatatggtcgcgcggtccatcggatcaaggcccaggtcaggcct

SEQ ID NO: 168007 - DNA, 266 bp, Zea mays
  Clone ID: MRT4577_84803C.1
agtcggcggccgcccttctttcttggggttatgtttatgacgatggtgccggtacattgcacctcacagcacaccacgatcagattgctagggagccagatttcacccacactttcacaaccgactggtaaatcatcctcgagcacatctacacacgaaagacgtcctggtgaacggctattacgatacatttcactactcgttgaccgggacaaccatgacctggcgcacctcggtgccgcagcgcgagacgccggggcacacct

SEQ ID NO: 168008 - DNA, 352 bp, Zea mays
  Clone ID: MRT4577_84804C.1
gggacgcagaaacctcaaggggggcaacaaaagtgatccacaaaaaagttgtttgaggcagccaacacaacaaaacaaacagaacgatgtggggccacaagggaccacaaaggacctggggcaagaggcacagaggacccgacacacccggtaaggccgggcggaccaagggcgaaacgccgggacctaaggcccggggacggaacggccgggggaaaaaatagtggaacagcgacgaagccgcatggaagacccaccccggggggaccagtggaagcggaagggagggaaccgtcaccggaggacggaggaaaacaaacctaaggtggggaccggctccgacatgcgtaaa

SEQ ID NO: 168009 - DNA, 232 bp, Zea mays
  Clone ID: MRT4577_84805C.1
ctctagagagaagacgaaattctaccatagagttctgttgccttgaacacgaggccatgctataaatgctacaaatggaggacggttccaaaagaagaatttgaaacgattcgagagaacttcactaaggatccatggatctgcagcacacgaccagacagatcttgtgaagaagatgatgagattgagtacgacagcagccgcatctgggttttgcacaaccccgccatac

SEQ ID NO: 168010 - DNA, 500 bp, Zea mays
  Clone ID: MRT4577_84806C.1
atcagagagaagacccctgcgcgcgagacgaggtacgttcagcaacgagtcattcgcgcccatcataaggggtatgatgcgtactggccatagagactcaagccaactctttttcgcccacatacactgtgttgatctaccggttggcaaccagagcaactagcaatgaactgtccaatgatatagaccatgtgccgctctgccctacattgtatgtactggcacatagttacctctattaacatgtgcttgaactcatgtattagtgatgagtgtacagcagcacaatggatagagctagcgcaatcatatactctgtgcttgaccctgtcatggcaagtgctaacactaacatgaagctctctgagttcaatatagaaagaaaaaaaacctgccgcctgatctaatattaatgcacatgggaagaaagatggctgcataaatcaacatgctctcttcgaagagacgcgcgaagagaccatctactaatgctggcgcac

SEQ ID NO: 168011 - DNA, 1125 bp, Zea mays
  Clone ID: MRT4577_84807C.1
aaaaaatctcctcatgtctgtcttcgcacacgtgggtagacttctcacacggcgctctttgctcctcgcctctcttctggctgcatggcccttgcgctcgctcagcttgctagtgaccagcacatggcgctcggcctcaatttcgccatgactgtgtccctgcagcagcgccgtccggccatcagcagcatcggcgagctcgcttcgagctccgtccatggccgcgagtccacctccgctgagctgccagtttccagctcctctatcatttgctccggcgtgcgggcgtcactcgtccgtgatcccagccgtgctagttgacatggtcggccattttagccggcatcgccaccagccgtccgtcgccttcctgctccccacgccgacgtccagtgcatcgtcgccagggttcgacttgcagcttgtgcaagctgctatcgagctcgcccggccatggcgctcacgccccagccttttgcctgctcctcgcaccgtgattgccgagttcaccggcaacagcagtctcgtcgtgccgcaaactgtgagctgggtctccgctgttttcggcggtcgactagctcgccaaggcgtttttcaccagtgaagcatacttgtcatgcccagtgtcctcgccgtgtctgtaaagccgttgtggagttgttgttgttcgcctccacgccatgtgagacagcgtcgtcgatcccttcaaggtgctcgtcgtcgtctcctcatcgccttgccgaacgtctcggaccacaccagcctgtcgctggagaaacatagtgcagtacgatgccccatcaagtgttcggtgttatgcgcgaactagaagtcgttgctgatatcgcggtcttcaagttgagtttattttattggtgagctgattccctacttctattattttgttttaatgatttgatgtgttagattaaatattggtcataatgatagtcattatatgctatttttttttaaaaaataggttattaatgtttatgtaatttctggtaataattattagttagacgtttttatatgtatatggtaaagtttaggcggcaatgtaatttaggtgaggagtactttgatggtggatacgaatgactagggtaatgtaatcgattt

SEQ ID NO: 168012 - DNA, 331 bp, Zea mays
  Clone ID: MRT4577_84808C.1
ctaatcccacatccagtctctgggcacaaaatttccggcggcgatggcggcggctgtggcgaggacatggttcggcgcatgttgtgcggctctgccttcgcgccggcgaaggcgcgcgccgtgcgccccaaggcctacccatcaagaaacctctgtttgtgctgttcaagcacgcgtaccacaagtgaatgactcagagaaccctcaagggcgggaggggactgtgtgcaacctctaattgtgaccgaccgaagcagcgggcaatgtaagggataggcctttggaaggtctgcttctactcaataggcacacagagccctagagggaccgg

SEQ ID NO: 168013 - DNA, 290 bp, Zea mays
  Clone ID: MRT4577_84809C.1
cccacgcgtccgcggacgcgtgggctccaataagctccccagctgcacgccggacgcagcagcagcagcagtagagatggccgccctcgccgtctcctccacggccgccttcccgccaagccgcgcctcccacgcgcgcgccttaccgaggcctgttccgacaccgctggggacggcaacggcagcagcagcagcagcgtgtcgctcgcgatcctgccagaagacgttctcaggccgcgctggctctgtcgtcggtgcttatcttcttgggcggcaccttcccttccccc

SEQ ID NO: 168014 - DNA, 460 bp, Zea mays
  unsure (1)..(460): unsure at all n locations
  Clone ID: MRT4577_8480C.1
aaggcggcaggcgacccgggagcgcgcgacccggccccccggcaggccgccgcgggggcgccccgccgagccggagagccgaacgaggcacccaggggcccgaagaaagcggccacagccagagccagggggggccaacacaccacgcacagacggcgccgcagcgccaagcgcacggcaggcagccgcaccggccgggcggccccgcgcccccgccccggcagcccacacccgcccgcagccagaagagccgccgccagcgaccgcccagcccgccccaagaggcaacggaggancggcacaccagcacaggcacgggaccccaaacaacgggcggcggcgagggagcaccccagaggagcgacccggcgaaggacccgacggcgaggaggaggccngcaacaacgaggaggacaccaaccacgagagaaccagcggacgaagaagagcaccccgaccg

SEQ ID NO: 168015 - DNA, 1378 bp, Zea mays
  Clone ID: MRT4577_84810C.1
cttgggagaaagaaccaggaattggtttcacgagtccaaaccaaacaccggactttggaagacctttgagagccaggacacttgatggggctggcgtggagagggtcaaagaaatccgtgcgcatgagaagctatatgagaagcttcgtatgcgaaggaaaggcgaggagctgccaacgtttatacccccaaagccaacactggaagcattgattgagtcagggtactcgctggttgaaggagcaggaactaataatgagctccaagctttcaaaagagtatatgaagaacttagaatagtttgatacacgagaaggggtaacttcttgttttcagtttatttggagcaataatacaccatccaatttgttccaacatccaaccaccggagtcgaatcgatgcttcgattgtcccagaaatcgtggtgggttcagatatgaactgctgaaaggaacgcatatcgtcactctatatgcacccttaattcgtgatgggagaatggaaaaattctactggcagcccaaccgtgaagatataattagtattgttcatggcatgtatataaaggatggattatctgttgaagaagtatcaagaattgtagacgcatttccgaaccaagctctggacttctatggagctttgagatccaggacatatgatcaggctatcttggagtgggtcgaagaaatcggtgggcatgaacagctaaatgagaagcttcttaagcgaaagaaaggcgaggagcttccaacgtttatacccccaaagccaacactggaagcattgattgagtcagggtactcgctggtgaaggagcaggaactaataatgagctccaagctttcaaaagagtatatgaagaacttagaatagtttgatacacgagaaggggtaacttcttgttttcagtttatttggagcaatacgagaccatccaatttgttccaacatccaaccaccggagtcgaatcgatgcttcgattgtcccagaaatcgtggtgggttcagatatgaactgctgaaaggaacgcatatcgtcattgtccttaattactctcatcgtgcattgccaaaaagtctttgggttgactcgaaagacttgtgagctgtgccacggagtggcccatgtatgtatgtatgtggagcgagcggaagcgtccaaagagcctcatcagtcctccttctgacaaaaagtttatacctgacttaatttgttgccacatctgggccggggatgcgtgatctaggggattctcagctctccttggcaatggcatgaaaggatctggtggtacactaccctgtcatctattcgacccagatcagacgtactacacatggaaactaaactagtactagtaaataatctcgtgc

SEQ ID NO: 168016 - DNA, 399 bp, Zea mays
  Clone ID: MRT4577_84811C.1
ggggtaaaaaacataaatttactgggtggccatttcaaaacccagcaagacaaatgttgtttgcctcgaaggggcaaaaaattttgggggaaaaaacaagcaatggccactggaacatcctaaactttatgctaaaacaaaccacaagggttgcgacaagaagcttatgaatcctgaaaaacccccccacaaagtgtgataaccggagttgtttccactgccaccacctgagggggaacccggaggaaattgggtagggaaaaggcccttgcaggcggggggggggtcccttaggccccaacccttggagaggcccagggccctttcaaggcttatttttaaggcctttaaaaatttccgcggggccgaaaaatcccaaggcccttgggggcgtttttg

SEQ ID NO: 168017 - DNA, 570 bp, Zea mays
  unsure (1)..(570): unsure at all n locations
  Clone ID: MRT4577_84812C.1
agcaagcccacgaataaacatattataattaacaacagaacaacatctcatcccactttgtcgttgggactcaggacgaatgtacaaattgtcgaaataggctaaaggaaccggcgacaaatctctctttgatttgtttcttgttttgattttgattgatcaagtagccgagtcgactagtagtagttcaccatggagcacttttgcctgatctcgccctcatatccggtaagcacctcgatggcgcccatcttaaccatggccttagcgaacttggcctcccacgcctggccgacggcggcatggaacgcgacgagccccgcggtccaggggctgtcgagcagcgtctggtcggaggtgaagggcaccttgtgctccagcacgttcttgaagtactggttgtcgaaggcattcggcgtcaccgtgtcgagcggcaccgtcgtgcggtcctccatgtcgccgtccgtggatggcgggcagcgccgcttgagggtcgccgcgtacgccgggtggnagggccggtccgtccgcccgggctcgccctgaaagctgtacaggcggtcccgtgat

SEQ ID NO: 168018 - DNA, 303 bp, Zea mays
  unsure (1)..(303): unsure at all n locations
  Clone ID: MRT4577_84813C.1
cgtgtaccggncgtgcacacctgaaacccaatttttaacctacggatccacgggcaatccggctggctcttacctatatcacccttgttgctccaacactcattagccctattacagaaaatacctggggggggggggttggcacataacatcaggggacaccaactacaacaccttgtgctagcacaccatgctgcctactctcagtagcaacagtgccttgcattcaaccaactctctgggttgaactgtgcttattatttgccgctgcaactaccattcagcctgcttgctgctggctac

SEQ ID NO: 168019 - DNA, 234 bp, Zea mays
  Clone ID: MRT4577_84814C.1
gggcggcgctctaactagggtcccccgggctgcggaatcgcacgaggctgccattctcagcccgcgcgatgcgttgccgtgctccgcaaccgctgagcgagaagaagagagggccggcaagggcgaccgcccggctctcggcatcgagctcgggacgacggactgctgcggcggcgctgcggcagcccgaccgcgtcgagatggttggcgaggaccagggagatccggcccacg

SEQ ID NO: 168020 - DNA, 345 bp, Zea mays
  Clone ID: MRT4577_84815C.1
ggggaaaaaacaaacaccttttacgggtccaagtccacccaatcaagccaggggggtttgacaaaacatttgacaaaccaggtgccacgacagacagggggctcgcccatggggccccaacttacaaggggggggggggcaaaatttgaaaaaagacccggcccatgcaaattggccacacttattttgaaaaaggagggggacataactggaaactaggcaacgttgaggaacttggaaagcctaaaaccccttcctgggaacaattgccgggccaaactaatggacctccccctaaaaaacccacatttgttggaaagggctcaccggggttaggagggaccc

SEQ ID NO: 168021 - DNA, 513 bp, Zea mays
  Clone ID: MRT4577_84816C.1
atggccgactcgccccgtacccgcgtcgacgagcgtcagtcggctcgcggctgcgactgtgggcgggggcagcaggttgggaaagaagaacagggcgaaggctgggaagacaaatggattgagaagagattgtcatgtacttttgctctcctctcccaggccaataggttagagcttgttaactcggtgttctcagctctcccaacctttctgatgtgcaccctgagaattccggttgccacggcctatgaacaatttcttgaattagacgaaacttggggacaaatcacggtgaccaacacaaaggatgcttggaaattcatttggggatctgataatttctctacaaagaagacttataaacatttaatgggtcaggctcaagttcatcagatcttcagatcgctttggaaaaataaatatcaaccaaaacataaggtcttttttttggctttggttaaagaacagactcaatacaagggatatgctgaggaggaaaaacatgactcttga

SEQ ID NO: 168022 - DNA, 835 bp, Zea mays
  Clone ID: MRT4577_84817C.1
aaaacctcaacaataataattaataaacaaaatcttawttttaccctcacaaaattactatctccacaaataatcttatcccycaawtaaaacacttcctccaaaaatccaattactccctaactatcaatcttaatrcaacamcaadtaarttwaaaactarwtawtvcccataaacaaaaaatacaatcttaacttacttcttaacactttaaaraaaaacttaacctcaaacaaaaacaaataatrctatttaaatatatcatactttctaaaataamcaacaatwtaaataataccaaraarcttatararctartccaaarratcccatrcaaaatwamcctcathtcttthaawwcchwawaaaaattcccaattcaaacccacaccaaacaataaaataattaaattccacaacattttaattcaaaataacctcactatttttattcaactcaacaaaaaaaataatcarrtrrctrctrcaarcarctaaaaraacctaaaaactataaactacctctactccatatacccaaaaaatttcaaatcaccttataatactaaacaatacatacaataaaaataatcctaaacaacttaacaaacacacaaartaattarctcraaacaacaattcaatcatacaaatcttacaarttctacmacttcaaaaacttatataaacttctacaatatcatacaaatctaaacctaaatacttatacaacaacacatttaaacataatctdrcwtctrctartacrtrrtrtacccaaaccaaattcrrtaartttattattattattataaattaatattwcctaacaaa

SEQ ID NO: 168023 - DNA, 609 bp, Zea mays
  Clone ID: MRT4577_84818C.1
cctcgaggccggccgggccggggtcttctcccctgcgacaaagacgacgcaagtccctactcctccaaaccctcgccgactcagatccagcttcctcgcaccgccgtcgccatgccgttcactccaggcccctactctggcgtcagcaccctcgcccttgtggcgagggcgtcggcctttggcgtcggtgtcgtctacgggagcatcaagctctcaatcctcaaggtaacaaaacctaaaaaggaggaagtgcatgatcatcactaaggatgacagggctgctacatgttaattcccatatatgcaaggatgttatcaaattggcagtgcaccccttctccatacgtgcaatttcgtttatgatttgtggacctgtctgtaacatacctgcttttttttgtgttgtaataaattcttatacaatgacatgaaatcaggaagtggaaaagcaatagtaataattgcaagtcgttcgacaaaaaaaaaaaaaaaaaaggcccctagggcccttgctcctgaagcttgagcaatctcatatttggtttctatgatgtcatgtttgattgttgagatggctacactttatttgcactttgccctaggatcctt

SEQ ID NO: 168024 - DNA, 543 bp, Zea mays
  Clone ID: MRT4577_84819C.1
acgtcagctatgctgtggatcggctgatcaccaacggagctgttcttgcttcttgccccattgatactgtgctgagaaggctgatgatgacttgaggtgaagctgatgagccgaggagcgtattgtacgcattccaggaggtccttaagatagttggtccgaacgtgcctgttgctggcagctgaggcttacattctgcgtgccattggtgccgctactgtgcttcttggctacgaccagtttcagatgctattgttggcaaagatgtcaccggttcggtggcgctgatatggcttataatagatgacaaacaagagcagcctgctttcgtgccagacgagtcaggatctgtacatgttttggcctttcatatcgaagaaatggccccttgatgcctgagacttcatcctacattcgctttggggggggacattgagctcactagactcgtaactgtcctactatgtggcgtgatggaaaccgcaatcatgtcacatagggagagactatactggccttaggcgtagacgggcaatcctgctt

SEQ ID NO: 168025 - DNA, 681 bp, Zea mays
  Clone ID: MRT4577_8481C.1
gaatacccaccagagtctagacgcgcgcccctccacccaccagactccgtcggcatttatacctccggcgacgcacgcatcatacacacacaaaaaccgcgggcagcccaccgaccgcccgatctcagatcaggaagcaaccttgaaagctgaaaccccagtcgaatcggaaacctagcgccatgtctgccacggcgggggacgaggcggcggtggcggagcgcctggaggcgctgcggaggaagctgggcaagaagcagcacttcgaggaggccgtcgccgacctcgccgccacgctccgcgaccgctacgccggcgcctcgcccgccctccgcgagtcgatgtactctacggtttgccgtgttgcaaccgtccttcagactagatatacagcacctggattctggcgtgctggtctgaacctcttcgtagcaacagagaagctgttaactaatcctgctgaaaaggaacgcctcaaaacctgcattttgagggcccgggagcatcttgatgaaaaagaaaatgaggagtcaatgccaaccaacagagaaccagacactagattcctttttgaaggccatcttaccgtgggacaagaacctcctcctccagcatggcttgtcgcccagaatttaacacgagaattgaacatcttagcggaaccttctggagatcaaaacg

SEQ ID NO: 168026 - DNA, 647 bp, Zea mays
  Clone ID: MRT4577_84820C.1
ttgggtacctcgaggccattggggtcctcgggcccggccggggtcttctcccctgcgtcaaagacgacgcaagcccttgcctctccctactccaaaccctcgccgactcagatccagcttcctcgcaccgccgtcgccatgccgttcactccaggcccctactctggcgtcagcaccctcgcccttgtggcgagggcgtcggcctttggcgtcggtgtcgtctacgggagcatcaagctctcaatcctaaaggtaacaaaacctaaaaaggaggaagtgcatgatcatcactaaggatgacagggctgctacatgttataaaattggcagtgcaccccttctccatacgtgcaatttcgtttatgatttgtggacctgtctgtaacatacctgctgttttttttgtgttgtaataaattcttatacaatgacatgaaatcaggaagtggaaaaagcaatattaataattgcaagtcgttcgacaaaaaaaaaaaaaaaaaagcggccaaaaaaaaaaaaaaaaagcggccaaaaaattgctgttctaatagtttcgagactcaatattctgagtcttgtatctctaccgctctgttggataatgcatgccgcaagagttgttcaaaaaaaaaaaaaaaaaagcggcc

SEQ ID NO: 168027 - DNA, 674 bp, Zea mays
  Clone ID: MRT4577_84821C.1
ccggccgggaagcccttgcctctccctactccaaaccctcgccgactcagatccagcttcctcgcaccgccgtcgccatgccgttcactccaggcccctactctggcgtcagcaccctcgcccttgtggcgagggcgtcggcctttggcgtcggtgtcgtctacgggagcatcaagctctcaatcctaaaggtaacaaaacctaaaaaggaggaagtgcatgatcatcactaaggatgacagggctgctacatgttataaaattggcagtgcaccccttctccatacgtgcaatttcgtttatgatttgtggacctgtctgtaacatacctgctgttttttttgtgttgtaataaattcttatacaatgacatgaaatcaggaagtggaaaaagcaatattaataattgcaagtcgttcgacaaatcttgattagttgggccggttgcctgttaaaagagatttggtgggtgtggttgtccagaccgtccgaactagtggacaataagggcgctaggatactgtggagaccttaacagttgctgacaattggacccatatggcagccactcttaaaggccatgcaatatagaccctgtttgttaccgtttatgacaatcaatttatataatctcataagttaggggtactaaaaaaaaaaaaaaaaaagcggcc

SEQ ID NO: 168028 - DNA, 541 bp, Zea mays
  Clone ID: MRT4577_84822C.1
tacctcgaggccggccggggtcttctctcgcacgagcaaagacgacgcaagcccttgcctctccctactccaaaccctcgccgactcagatccagcttcctcgcaccgccgtcgccatgccgttcactccaggcccctactctggcgtcagcaccctcgcccttgtggcgagggcgtcggcctttggcgtcggtgtcgtctacgggagcatcaagctctcaatcctaaaggtaacaaaacctaaaaaggaggaagtgcatgatcatcactaaggatgacagggctgctacatgttataaaattggcagtgcaccccttctccatacgtgcaatttcgtttatgatttgtggacctgtctgtaacatacctgctgttttttttgtgttgtaataaattcttatacaatgacatgaaatcaggaagtggaaaaagcaatattaataattgcaagtcgttcgacaaatcttgattaaaaaaaaaaaaaaaaagcggccaaaaaaaaaaaaaaaaaaaaagaaaaaaaaaaaaaaaaaagcggcc

SEQ ID NO: 168029 - DNA, 612 bp, Zea mays
  Clone ID: MRT4577_84823C.1
tggttgcggtcttctcccctgcgtcaaagacgacgcaagcccttgcctctccctactccaaccctcgccgactcagatccagcttcctcgcaccgccgtcgccatgccgttcactccaggcccctactctggcgtcagcaccctcgcccttgtggcgagggcgtcggcctttggtgtcggtgtcgtctacgggagcatcaagctctcaatcctcaaggtcacaaaacctaaaaaggaggaagtgcatgatcatcactaaggatgacagggctgctacatgttaattcccatatatgcaaggatgttataaaattggcagtgcaccccttatccatacgtgcaatttcgtttatgatttgtggacctgtctgtaacatacctgctgtttttttttgtgttgtaataaattcttatacaatgactgaatgacatgaaatcaggaagtggaaaaagcaatagtaataattgcaagtcgttcgacaaatcttgattagttgggccggttgcctgttaaaagagatttggtggggtgtggttgtccagaccgtccgaactattttgtcaccctgaaatgagtggattctctggaatgttatgttcgttatgggcttc

SEQ ID NO: 168030 - DNA, 456 bp, Zea mays
  Clone ID: MRT4577_84824C.1
ataaaaaaaaaaaaaaaaaaaaaaaaaagctaaaaaataaaaacggaaaaaaaactaaagaaaaaaaaaaaaaaaaataaataagcaaaaaaaaaaaaaaaaaaaaaaaaaaaaaagggttggcccttgggccgaaacccccttagggggaattttggcagatttcccccaactggggggcggtttgggcttatttttagggggcccatttccctttttaggggggggattaaaaattacctggggctgggtttttaaacaatgaggcctgggaaaaaccttctttccccaattttattcccttggaagacaatccccttttccctgtttgggttaattaaaaaaggcccctgccgaatgccctttccaaaagttcgccccccttgatggggaattggccccccctttttggggggttttaactccgtgggtgggggggttaccccccattggccc

SEQ ID NO: 168031 - DNA, 496 bp, Zea mays
  Clone ID: MRT4577_84825C.1
gccggcaaggcctttcactccaaaccctcgccgactcagatccagcttcctcgcaccgccgtcgccatgccgttcactccaggcccctactctggcgtcagcaccctcgcccttgtggcgagggcgtcggcctttggcgtcggtgtcgtctacgggagcatcaagctctcaatcctaaaggtaacaaaacctaaaaaggaggaagtgcatgatcatcactaaggatgacagggctgctacatgttataaaattggcagtgcaccccttctccatacgtgcaatttcgtttatgatttgtggacctgtctgtaacatacctgctgttttttttgtgttgtaataaattcttatacaatgacatgaaatcaggaagtggaaaaaaaaaaaaaaaaaaaaaaaaaaaaaaaaaaaaaaaaaaaaaaaaaaaaaaaaaaaaaaaaaaaaaaaaaaaaaaaaaaaaaaaaaaaggaaaaaaaaaaaaaaaaagggccccta

SEQ ID NO: 168032 - DNA, 626 bp, Zea mays
  Clone ID: MRT4577_84826C.1
cggacgcgtggggtcgtccatcgttggtgcgctcctgccagcatacattcggctcacggcgaccaacgccgccgtggaggcgatgacgaagatcctggccaaggaggtggcggcgaagggggtgaccgcgaacgtggtcgcgccggggcccgtgcgcaccgagctgttcttggccgggaaggacgaagcgttcctgcggagggtggagcagcagtccatgggccgcatcgccgagacgacggacgtggcaccggtggtggcgttcctggccagcgacgccgcggcttgggttaacggccaggtcatcagggtcaacggcggttttgtctaataagggtccaagtgcgccagatgttcagatatagtggtatctgccacatacgcaagttttttaaaaaaaaatacgcaaaaatgtgagtggcgcgtgtgtgttttaataaaaaaaaatcaagttatgcagtgtactgagtgcggattatgccgtgtaactcaacttattatatgaacgtcatatcaagttactgcggaacaagggctctacagcgatgctgtccacgtttcgctttgactagagaggttatactgagatcgagtctattggcttagctttaatttgttatttctat

SEQ ID NO: 168033 - DNA, 468 bp, Zea mays
  Clone ID: MRT4577_84827C.1
ttcggaaactccaactcttgccgactcagatccagcttcctcgcaccgccgtcgccatgccgttcactccaggcccctactctggcgtcagcaccctcgcccttgtggcgagggcgtcggcctttggcgtcggtgtcgtctcaaggtaacaaaacctaaaaaggaggaagtgcatgatcatcactaaggacgacaaggctgctacattttaattcccacatatggaaggatgttataaattggcagtgcaccccttctccatacgtacaatttcgtttatgatttgtggacctgtctgtaacatacctgctgttttttttttgtgttgtaataaattcttatacaatgacatgaaatcaggaagtggaaaagcaagtcgttcgacaaaaaaaaaaaaaaaaaaaaaaaaaaaaaatcaaatttcaagttgttagaaagaaaccaaagaaaatataaaaagaacctagg

SEQ ID NO: 168034 - DNA, 995 bp, Zea mays
  Clone ID: MRT4577_84828C.1
tggggccctcgaggcccggcgggccgatcgcggcttcaaagacgacgcaagccctcgcctgtcctcactcctaaccctcgcccgactcagatctatctgccccgcgccgccgtcgccatgccgttcactccgggtccctactctggcgtcagcaccctcgcccttgtagcgagggcatcggtcttcggcttcggtgtcgtctacgggagcatcaagctctcaatcctcaaggcaacaaagcctaaaaaggaagaagcgcatgctcatcactaaggacgacagggctgctacatgttaatttctatggaaggatgatataaaaatgtggttgcactctttctccatacgtgcaatttgatttatgatttgtggacatcttgctgtaacacacctgctgagttatcttagttttgtgtcataataaaattcttagccaatgacttgaaatcaggaaggggaaaatcaaaagaacccacttttgttttgtccatcaagctctcaatcctcaaggtcacaaaacctaaaaaggaggaagtgcatgatcatcactaaggatgacagggctgctacatgttaattcccatatatgcaaggatgttataaaattggcagtgcaccccttatccatacgtgcaatttcgtttatgatttgtggacctgtctgtaacatacctgctgtttttttttgtgttgtaataaattcttatacaatgactgaatgacatgaaatcaggaagtggaaaaagcaatagtaataattgcaagtcgttcgacaaaaaaaaaaaaaaaaaagcggcctagggcctccaaaaatagaacacatttagagaagaaaaattgacgaactagacgaaataaatggacataaatggatacatgagagaaaaagggggccccccaaacccccatttttgtccccttaagggaggataaattgccccttgggccttaaaaaacccccaaagtttttgggaaaaaatccttaagcgaagggg

SEQ ID NO: 168035 - DNA, 595 bp, Zea mays
  Clone ID: MRT4577_84829C.1
tacctcgaggccggccggggtcttctttcctgcgacaaagacgacgcaagcccttgtctctccctactcctccaaaccctcgccgactcagatccagcttcctcgcaccgccgtcgccatgccgttcactccaggcccctactctggcgtcagcaccctcgcccttgtggcgagggcgtcggcctttggcgtcggtgtcgtctacgggagcatcaagctctcaatcctcaagttctatgcatcaaactctgttctactgaggtatcatagattggagtttcacctacaacatgcatcaatttaaatccatcgtctaggtaacaaaacctaaaaaggaggaagtgcatgatcatcactaaggatgacagggctgctacatgttaattcccatatatgcaaggatgttatcaaattggcagtgcaccccttctccatacgtgcaatttcgtttatgatttgtggacctgtctgtaacatacctgctttttttttgtgttgtaataaattcttatacaatgacatgaaatcaggaagtggaaaagcaatagtaataattgcaagtcgttcgacgaaaaaaaaaaaaaaaaaagcggcc

SEQ ID NO: 168036 - DNA, 520 bp, Zea mays
  Clone ID: MRT4577_8482C.1
tttttgttcgaccccacggtccgacaagatgatgttggtgggctcgaggtattgaaggatggaatgtggatagctgtgcctgctttgcgtgatggcatccttgtgattctggctgatcagacagagatcatcaccaatggaagatacaagagttcagttcatcgagctgttgtcaatgctgagcgtgcccgcttatcagtagcaacattttatgatccatcaaaatcaaggaaaatatgcactgccccacagcttgtgagcaaggatgagccacaaaagtatcgggatgtaatttatggtgactatgtctcatcttggtatagcaaaggtccagagggcaagcgaaacattgacgccctcctgattcagaagtagagccataggtgccttaaaacaggattgggccactcatcagtgttctaatgcatgtccaacatatcagtttccaaccataatctatgaagataagtaaacgaacttgtatactggatgcagtgcaataaagaaaattttcattgcc

SEQ ID NO: 168037 - DNA, 247 bp, Zea mays
  Clone ID: MRT4577_84830C.1
aggggcacaaggaagcttgattaaaaagggtttttttttttttaaccacaagcccaaggtgttttgtggttagagactccattaaaaaagacgatttgggtgggggtgtgccatacaaaaagagacaccagaggggtgatccatccccagctatagagatcgggttataatcaaaaaacttcggccggtgatggacggcggacaaggcgggcttaaaagacctcgaacgttaaaagggggtggagcg

SEQ ID NO: 168038 - DNA, 143 bp, Zea mays
  Clone ID: MRT4577_84831C.1
ggaaacgaaaattaaatatcagcttttgttaaacgatggaaggggggtttccttgttgatctatcaaactggccgaattaaatgtgccggagggcagttcaaccaagctggatccctgaacatcacaggatccccaacaatgc

SEQ ID NO: 168039 - DNA, 443 bp, Zea mays
  Clone ID: MRT4577_84832C.1
aattactatctttttatttaatctggctaacacattcctatcctgtggtgcaccatctcggtcgttcacagatctaagagggctaaggtggtttctattatattacttacttaagatctcattaactctgccaaatgcccaaacacgacactgcaaacggaacaattatacaatccaactctacgaactaaggcgggaccaaatgcttcatagataagcagctcaactgttctgaacagactttttagtatggagggggacgctgacctctcatgacattaaagcatgtttgggcatctcttcacacgatggagttgtcatccaattcaatcagggattccctgtacgccggcgggcactaaaacatgggagggcccatcacattgacttgtacattgcacaacacagggaccaggaagagccctctgaattcacgtcggggt

SEQ ID NO: 168040 - DNA, 175 bp, Zea mays
  Clone ID: MRT4577_84833C.1
tgtgatggttctgcagattcgtccttaagcagggtaacaacgcagaacgcggactgaagagggagcatgtgattaagcgatggactatatggcataaatttagctggtttcatgcttaagaccatgtggtttgttttgggtacttgttctcacagtgttgtgaagggcgttgttt

SEQ ID NO: 168041 - DNA, 374 bp, Zea mays
  Clone ID: MRT4577_84834C.1
acgaaacctatcttttgtaaacaacaggcattttagatgtcaagcacacagataccatcggatcacttattctaaattacattaaaaggaaacaaactccaaacatgggttaatggggggctgttttaaaaaaacagttccgggattggattttactggtgaaagaagggggactgggcttccattccattacaaagaattgggaccatttaaactatgggggaacaaagggggggaaaatagaggagcagaaacagggtagacgccttgccattttccagaggaggcccttatgccattacaggtttaacgggtttctaatttggtttagctttattaaccttggtgcccatgcccgtttttttggcacagga

SEQ ID NO: 168042 - DNA, 368 bp, Zea mays
  Clone ID: MRT4577_84835C.1
ggggattgggttctatttttttcctcttttcttttgttggaaacaaaccgtcaaaccccttgagggccccctggtggggtttggaccaaggaacatttacaccttctcgggcccccccaaaaccggaattaaaaagccctttatgccaaggggggctttaaaaaaaccggcacggccggcccccaacttaaaggtttaccccaaccccccggccgggggggaccaaaaacaaaaagggttagggcattctaagcccctccctggaccccaaactgaaaccggtcggcaggggggccttttttgggagaacccccaccgccggtttttgtaatattcccacaaacctttgggttcctatggccccccct

SEQ ID NO: 168043 - DNA, 282 bp, Zea mays
  Clone ID: MRT4577_84836C.1
cggacgcgtgggcggccacagagcatgataataccattgccccttgaaggctgtctcgagagcgagcttctacgccctctatgattgccttgcctgcttgcctctactcgtccggcccagccatggccaccatcctggagaccatacagaaggcgaggctcctgcactcacaggccgctcaaggacgagctgccaaccttatgcggcggcggcagacaggagagccacctcacaggcctgcggaagctgctgaccgccttctccggcaagatccagcccatc

SEQ ID NO: 168044 - DNA, 233 bp, Zea mays
  Clone ID: MRT4577_84837C.1
cggatattcacatggatcttgacttcaagtttttatttaccgacctcctcttcgactcaggaatagggccaacattcaccctccaggatggtttcttacactacctcaaggggatcttcatgctgctgagctacatcgtgatcgagcatccttttttgttccgaggcaacctgtaaataacaacaatgacgctgcgctgtcgttgtcaactggcactttgagtgcacacgctg

SEQ ID NO: 168045 - DNA, 168 bp, Zea mays
  Clone ID: MRT4577_84838C.1
cctacctcagggagggccttcttctggggctcagcgacgggcaccaagggttcacttgcctaaacttcccggttgaagggggccttaagcttgggggataccaggcttttttccaacttttggcttggggttccggttggccaatttaacggcacacaagggcctttt

SEQ ID NO: 168046 - DNA, 1618 bp, Zea mays
  Clone ID: MRT4577_84839C.1
ctgcaggtaccggtccggaattaattcccgggtcgacgagctcactagtcggcggccgccctttcgtttttttttttttttttttgagtttttttacagcgctaagagatagatttatactctttcaggaatcagtatgcatcaagccaataactgtgattcctttagcaagtcaggagaaacaacttgttgatttagacaagaaacacctgtatcaagccagcaaccgtctccctttcacaatacaaacactcatcaccactcgagcactccacacagaagagcaagcacgcaaacgacaagctcttttcatatctacaggaagcttatctttgggtcaaggctagggatttctgtatacaccaattgcagcgagcaggggccgcttctatggttgatatgcactcaaacaattacacgaatcagctacactcagtgaggtcgaccgagcagattaggaaacgcttcacacccaacaaatggttacagctttttattacctgtaggcacagtctccggtgagaaaacatgaggccgtgtgatgttgttagtgaccacccaatgtggcgagggcaaactgatctacaactgtgccgggctctgcttttggtttcgctgtagcatatgagtttgcaaactgcagttttttacatgtattgctgcaaccgtggacaagagatcctttgattggtccaacaacatttgttcttgtgttgcaagtttagaaagctcagacaccacagagcttgttccctcgaccttagacagcaaattacatattgatgatgtcattgtgttcattacatccactgctgagttaactgcttccttcacagcttgtgcatcagcctttgcaccatcaacaactggaagacgtagagtactagccttcagagctttgattgctgctgataaagcacttgaatgatgtttttcgatatgagaccagtcctctagaaatgacatctgcctcctaagaatagcaaacagcttgagtttttgcttttgaagctggagtctgctccttttgttactgacattgtcacgcaatcttgatatttctttccatgcactgtgaagagttttctcagcagtgaagctctgcaccagaagcgtagcatctgtccgagcattgatgcatcgccactgcaaatgccgattgtccaacagccgcaatctgtgtgcctcctcgattctcttctccccctttttcgcccttctcacctctgccgcaaaactgatgatagatggcgcatttgctggagcctgcaccgtatgtccatttggcgatgcctccccactgcgccctcttgatggactcggagcgccccggcttccacggcatggagacggggaccgacctggcagtctgggtgacattgggctgtctgaaaacgacctccggccagacgacggtagcggcagtccaggctctggaagtcggcgcaggcggctgttgtttccctgccagaatctcgccggcacgctgatgccacggcgcgggggatccccggcgccggagttgctaccagacgaggcactgtcggtgtcggaggacgcggagaggtctggagcggctgcagctgcccggtcggacggcgagagtgacgtggtggag

SEQ ID NO: 168047 - DNA, 1248 bp, Zea mays
  Clone ID: MRT4577_8483C.1
acggcattacctacaccgtcgcctaatttgccaacgcccgccgccgttccgatggaaaccgccgagccggcgcgcgtccaagccctcgctgaggccggcgtgttccgcctcccggcgcagtacatccagccgcctgagcacagaccgaccccctcgccttctcctattgccgcggcgctctccgtgccggtcgtcgacctctcaacctccaccgccgacgacgccgtccgcgccgcgtgcgcggactggggcgcctttcacgtggtcggccacggcgtgccgggggagctcctcgacgcggtgcgcgcggcagggctcgcgttcttccgcgcgcccatggaggacaagctccggttcgcctgcgacccggccaggggcgccgcctcggaagggtacggcagccgcatgctcgccaacgacgactccgtgctcgactggcgcgactactttgaccaccacacgctcccggagtcccgctgtgatcccgcccgctggcccgacttcgtccccggttacagagatactattgcaaaatacagccacagcatgaaggatcttgctcaaaaattgttgtgcatcatctcagaaaatctgagcctgccaccatcttatatacaagaggcggttggagaagttttccagaacattactattagctactattctccgtgtccacaacctgatcttgctcttggattacaatctcattctgatatgggcgcaataacacttctgatacaagatgatgttggtgggcttgaagtattaaaggatggaatgtggatacctgtgcctgctttgcgtgatggcatccttgtgattctcgctgatcagacagagatcatcaccaatggaagatacaagagttcagttcatcgagctgttgtcaatgctgagcatgcccgcttatcagtagcaacattttatgatccatcaaaatcaaggaaaatatgcactgccccgcagcttgtgagtgagaatgaaccacaaaagtatcgggatgtaatttatggtgactatgtctcatcttggtatagcaaaggtccagagggcaagcgaaacatcgacgccctcctgattcagcactagagccataggtatgccttaaaacagggttgggccactcatctgtttcctaaacttctaatgcatgtacaatatatcagtttccaactttaaacaatcaggataaggaaaccaacttgtatactggatgcagtgcaataaagtaccttttcattgtcagtc

SEQ ID NO: 168048 - DNA, 362 bp, Zea mays
  Clone ID: MRT4577_84840C.1
tttggtttttttttttgggtcttcggatttttatttttatatttttaataatattgtatatttttttttttcttgatgaaaaaacggcctacaaagaaagggataaaaaaaaaaaaaactagggggtaacgcccaaaaattgaaagcctgaacaatttcttaagaaaaaaacatttggaaaaaacgccctcacacggggagaaagggacaaaggggattaacttataacatgcccaaggaaggaaaaaataaagaccgtgcattttgcaaacaaaacaaaaatattgtgggccagagtttaactgggccttaacacggaaccacccctgtgaacaagggcaaagatggggtaaaatccaccc

SEQ ID NO: 168049 - DNA, 508 bp, Zea mays
  unsure (1)..(508): unsure at all n locations
  Clone ID: MRT4577_84841C.1
gtgatattgaccacactaagcttcaaacccattgccttctgcggtatgtgtcagcttggctttttttgtagctgcactctttatgttaaaatctggaacaaggttgcgaagcattggcttcaaaatttaaattacatgcttatgtaggccgttcatcatgttttatgatttaattgaacagatcattgtggagtgtagcaacaaaaaatgtcaaattcaattcaagcttggcttgtgctaataattctaggtttatgtggttcacaggactccacatatttcagcaatgcaccatgacgaaacatctgatctgaagattgtggccgaaaattttgaagaaaacctagagattacaggcacatccttagaggctcgtaagctnggtcgttgaaatctgtgacattgtggcgacaagagcagcccggctggctgctgcggggcttgcanggatcctcatgaaagatcggagagatccagcgtcgaggacaacggtcagtcatcgcatcga

SEQ ID NO: 168050 - DNA, 287 bp, Zea mays
  Clone ID: MRT4577_84842C.1
tttttctttctctgttaagacagcagcctttgctgttcagtgtactaaggctgcgtgcaaccgcaagtggcggtgcactatgctgggtcacaaacatggttaactaatacaggggcgtcttgctcttcctactactaccccattctgcgccgccaccatgccccgcctaactgcgctagctgacctgtggcggcgacgaaggtggtcgcgctatgctcatcattctgctggtttcgcggtccaacataggaccctccagttggttaacgtcagcgtcggctgcaacg

SEQ ID NO: 168051 - DNA, 528 bp, Zea mays
  Clone ID: MRT4577_84843C.1
ccaaaagcagttttttttttaatttagggtaaaaaacccggggggggccttttaaaatttttaattaacgtttcccaaccaattttttccctttttttaaaaagaccccccccttgttaatttaaaaggcaaaaggggtttatttcccttttttaatttttttaagcttatcctaaaggggggggccacttttgggaatttagggcccagggccccggggggggatgggttctatccaacccccctttgggaaaaaaatccccccgggggggttcccccaaacaacaacattgggggggggggggttttttttccccatggggcctttggggaaggggtccggggggacattcccccaaaacccaaaaaaaattttcccaaaaagaggcccccatgatgggaacccgtttttgtttgggtaaaaaatgccccccccccccccccccaggttgataataaaaataggggtggggggaatacaaaagcgttgcccatttgaacatgtaaagctgggaaaaatcccttttt

SEQ ID NO: 168052 - DNA, 426 bp, Zea mays
  Clone ID: MRT4577_84844C.1
gtttcttgcaactagaactgactttacctactgtttgcttttagcacatgttggtctatgattgtaaggctatcttctgcagttacccatccttatcccgatattcaaacttcactttgcgaacagtgcggcctacagtgcaaaacagtgttttgggtgaccatatgggtgaaccgctcgagacggtctaagataaaagaaagaagaaaagcaggtaacgactattgtgtaatcaggccttatgtgcaagcgagccttatggtctgttagatcatgatccaaccgtatgtcacctttaacacttatatctatagttggatcataatctaacggactaagatgttttgtttgcacgcttgcacacaaggtttgattgaacaatagtcattgtcagaaaagcatgggagagaattgatatactctgtt

SEQ ID NO: 168053 - DNA, 271 bp, Zea mays
  Clone ID: MRT4577_84845C.1
tatcaacctgtacacttcagcaagagctgggaaaactaacaagacaattgttgcagttgcacctacattcgtctgtgctaatcgtgctgagaacagacgagagttttacacagacttaaaagatcaacgcacagctttggcacatgagaatatccagacacacgccagcaagagggaagaggaaaaagaatctctatgacaactgaggaataacttggacgtccgagcataacgcatgtgatacttcgagcactacggacacccaccaaac

SEQ ID NO: 168054 - DNA, 210 bp, Zea mays
  unsure (1)..(210): unsure at all n locations
  Clone ID: MRT4577_84846C.1
cactactccacactcgagatccatctcgcagcacacgagcgggatggcttctaccagcaccaccttcctcgccgtcttgctggtactggccgcgntcgggcgctcgtgacgtccggctcactgcgctacatccacgctctgctgagcgtgaagcaggcgctggttaacgcggcgtcgctgtctacgttgactccggcttcgcccaactgc

SEQ ID NO: 168055 - DNA, 856 bp, Zea mays
  unsure (1)..(856): unsure at all n locations
  Clone ID: MRT4577_84847C.1
atataaagaagccccgcagcctcctcctatctccccctcgcgcacacgccaagcgaccaaatcgccgccgcagccgcctagggcttcgccgccgtcgcagatccctccttccggccgtctgctgcgggtcctccgtgttcgtggctgctgtctcggcgccgacagaaatttccctgccgtcaggttttgtgagtgttcgttaccaacttctgcaatgggtggaagcaactatgatgatgactgggtgttgcccagtgctgacatcactcttgttcttgttggaaaacttggctatggcaagagtgcaactggcaatagtatacttggacgggaagcatttgtatcagaatactctcatgccagtgtgacaaacacttgtcagatgggaagcaccatgctgacggatggccgcaccatcaatgttattgatacaccaggattatttgacatgaccgttacccctgaggatgctggcaaagaaattgttaagtgcatgaacatggctaaagatgggatacatgctgtgttgatggttttttctgctacatctcgattttctcgagaagattctagtacaattgagactatcaaagtgttttttggagagaaaatcgttgatcacttggtcttagttttcacttatggagacttagttggtgaaaatttattgaagaacatgttaagtaatgccccagagtatcttccagaaagttgttcagctatgcaaaaaatagaagtggttctttttgataacaagaccagggaccctaggattcgaactagcagctcgaacgttgcctttgatggggggntgatctgntagtgcaaataatggaggaacccatttacagatcag

SEQ ID NO: 168056 - DNA, 723 bp, Zea mays
  Clone ID: MRT4577_84848C.1
ttttttttttttttttttcctttcgttctccctatctctgttatccttataatgcccggtactctccttcctccccacatccttctgtttctctgacctccgtttcccagagtcactcttagacagaacctcctcagccctgtcatccacagccactgctcgtctgcttgacctcttggactcatcccctgatcccctggacctgtcggccagcttctccacttcagcatgcccaaaggtctcgctcttggacctcttgtcgaccaggtgatcgtcacagacgccactgttccaccggtcgctgaccacatcaaccacggcctcctcaaccctctccttcctcttcttcccgtgctcagcgtacccgttccctgatctcacggcctcctgtcccgaggacgagcggcgcctctcaggctcgggatctctggaaaccctagccgccgcggcctcctcgcgcgcgccggcgaccggagccgactcctcgccatctgactccgaccggtcagcggaccctcctcgcctgtgggaccggtgcgacctgtgacgcgagctccgaggcatggcgggccaaccctaactgaaaaactaccagcccagatgcggaagctggcgacgcggggcccttgaagccctagggcgcgcgcggatctagacagacgtggcggcggggagaggggaccgcgagcgcgctggggtacggcggctagggttttggtgggg

SEQ ID NO: 168057 - DNA, 238 bp, Zea mays
  Clone ID: MRT4577_84849C.1
attatattacattccttttttttttggcaaaaaaaaaaggcgattttttgtacacttggcacgggaaaaaaatcaaaaatagttgtaaatagcaagtttaataaccgtagccaggcaacatttgtacacattgtcatgtcatttcgatttatagtggtagcaccgtagcatcaaccatttggggacagcaagaaaaactggccggcgtggggagcccaaacaactaaaggaactgtgt

SEQ ID NO: 168058 - DNA, 306 bp, Zea mays
  unsure (1)..(306): unsure at all n locations
  Clone ID: MRT4577_8484C.1
tgcatctcggtgggcgaggtaacgctacgtcccnaccacgagacaccgcacgggtgggacatcatgttctacctgtgccagctcgagaagggggacatcttgttcgctgagattgcgctgatagggactggatggtcattcctgaagcctttccttcctcctaaaaaaaaggatcgtctgaaaaannnaaacccggggggggttacaaaaaacacaactgcggggggggggggccacacctttcgagggcggcagggatggaaaacaagaaaccagaactaatcacaaaaaaaaaaacaacaaaca

SEQ ID NO: 168059 - DNA, 755 bp, Zea mays
  Clone ID: MRT4577_84850C.1
cctcgagttttttttttttttttttttttttttttttttttttttttttttttttttttttttttttttttttttttttttttttttgggggaaacccgccccttttttttttgggggaccacaaggctaaatgggccggcaacaaaacatttttacccccggggggggaaaaaaaaacccccctccctttttcggggggcaaaaaaaaaaaaaaaaattttgggttccaaacccccccctaggtttttatttaggggggggccccccccccacataaagaggccccatgttttaaagcgggggaaaaaattttttgggtaggctttttcgaaaaatggaactttttaaaccactggggggaccccttaagggagcggggggattttttttggggggcgacgaaaacaaggccaaaacggtggggggacccggggccccattcaaagttttcccccaaaaaccaagcgaaggacccctgcccatttgcccccaagtttattgaccccttaaaagttaaaaaggggccccggaagaaaacaaccctttgggagccattaaaggccccccccagggggaaaggtttttcctttgtataaacacccccaattccgttctaagggaagaaaaaaggggggttcccatattgggtcttaaaaaacaaaaggaaatcctttaggcctttgggggaaaagaaaacccacggttttcccataggaggaccaaggggtttcccggcaggcccatactttttttg

SEQ ID NO: 168060 - DNA, 108 bp, Zea mays
  Clone ID: MRT4577_84851C.1
atggcaacattgccggtgaggactccccggatcgactcagagtgccccaagggtgaatctgaggacaccgacgcgacccccagggaacaacgaatgtacacggagtag

SEQ ID NO: 168061 - DNA, 271 bp, Zea mays
  Clone ID: MRT4577_84852C.1
gaagggtaaaccaaccgaaaaattagggataaaggttgtaacaaaggtcgccaaggctatctcacaaatagtgttcatcacaacaattctctacatacaatcgctaaacggaagaatattaacgctcccgggcacagtggcgaataaagaataatttaccgatcattgatctttaagaacgggagtggcggaacccaaggtgagcaacgcgggctcattaaaaataggagcatcgaggttgacgctgcaatttgggacgggaaagagataa

SEQ ID NO: 168062 - DNA, 141 bp, Zea mays
  Clone ID: MRT4577_84853C.1
gatcgggaggggggaggagcatattatgcgatgaagggaggctggtgcagagggatggcaaagaagtgaagagaaacttaagctggatatagatagctagcagtgatccataacaccaaaactcaggctcgggccgaatgt

SEQ ID NO: 168063 - DNA, 470 bp, Zea mays
  unsure (1)..(470): unsure at all n locations
  Clone ID: MRT4577_84854C.1
aagcctcaagcaagcagagcgccgtgacatcacgaaacatatagagctagctgctctgcctctgcttcaccaatcacctcgcggaggggaaggtttccccctttgacacagccgagctcccctccatcagcagccagctcctcgtcgcaaagcaagaagatgatgctcgcgtacatggaccgccgctgcttcgccgacgtccccggcggcgcgctctgggaggaggtgctccactgggccgtcgacaaccacgggctcgccccggcgtcctggacggactacctccgcctcaccgtgggcggcacgctctccaatggcggcgtcagcggccagtccttccgctacgggccccaggtgtccaacgtggncgagctcgaggtggtcaccgncgacggcgagcgccgcgnctgctcgccctcctcccacccggacctcttcttcgncgtggtcggcnggctcggncagttcgg

SEQ ID NO: 168064 - DNA, 548 bp, Zea mays
  Clone ID: MRT4577_84855C.1
catcctccatccgcttgctcctgctccctcgagtcaaagcagtggatatggtggcgcgagcagcgagctagggaggctaggtagcagactagtgtcgctattaatcgtaccacgccgccgccgggaaattgcccttctccgccactgccactgaagctatactgtcgcagagagagcgccccaccacccgacgggccgcctgatgatggctggttcacggcgctggtggcgagcgtgccggcgcgaacggcggaggaggtgcggcggcactacgaggcgctggtggaggacgtggccgctatcgaggccggccgcatcccgctcccgcgctacgctggggaggagtcgtccgcggcgacgcccgagggctccggtgccgccggcccctccacgcccaaggacggaggaggagggagcgggcaccgacgcgaagaacggaagggcggcgtcggcgctgacgcggggaagagttgctctaaggccgagcaggagcggcgcaagggcggtgcctggaccgaagaggagcacaggttggtcttggtgggtct

SEQ ID NO: 168065 - DNA, 541 bp, Zea mays
  Clone ID: MRT4577_84856C.1
ggccgcttttttttttttttttttctctgaagaaactgaaatgagctaggatcttttcctgtaggcaattgaaatatgagtgtctgataaattctacaatacgaactgccccacacagtcagaggtctcgaattgtcaaaattgaacaaaatgttctacctcgagacaaccgattacaatacgctgtgttaaaataaaccccctgctacctgaaaatggggatatcaattgcactacagaccttctacagtgtgaaacaggaaccaagcctcccattatatgcccactgacatccaatgattgccgatatccgagccatatcatgagacctgatacacttttcatgtgtatgatagacttcgcacggttgccattttgcaaaaatacttgcttatatctgcctttgctgtgccaaaacacactttgcttcgctacgataggactacttggcagaaataacctatttacatcccactttaaccgtagactcatcctctagagggaataagcctacttccatctcaccgcgatcggaaaacgt

SEQ ID NO: 168066 - DNA, 520 bp, Zea mays
  unsure (1)..(520): unsure at all n locations
  Clone ID: MRT4577_84857C.1
tcgttataaacccagccagtggcccacctgtacctgtagtaaattcctgatgctgggcccatataagacaacttactctgacatggaattgccagaatacctatccttttttatggtttgcctaatattcttaatgggaattcgcatattgggtgattcgaatatatggattttcttcttggttttgcaccttaaattttcgattgccaaatgttaccaaaatatcattagcagttgattacagctacgaatgaagttgctcatgctgctatatcccctactcattatgcattcttcgtactaactggatacagcagaggtggggggactaccagttactccctccgttccaaattttttcagtccgcatccattcgaatgataatgaacgtagatgcatatctagtctaaaacgaatcatgntttgggacggaaggagtatgatctaaccgcttacctttatccattctgcagntctttatactgctttnctgctccctggccgngttctgcaacatga

SEQ ID NO: 168067 - DNA, 1299 bp, Zea mays
  Clone ID: MRT4577_84858C.1
gcccttctccgccactgccactgaagctatactgtcgcagagagagcgccccaccacccgcggaccagacatctgcgatgaccactctggcgacggacacggcggcgtggacacgggaggaggacaaggcgttcgagaacgcggtggcagcctccgcggcgccgccggccgacgggccgcctgatgatggctggttcacggcgctggtggcgagcgtgccggcgcgaacggcggaggaggtgcggcggcactacgaggcgctggtggaggacgtggccgctatcgaggccggccgcatcccgctcccgcgctacgctggggaggagtcgtccgcggcgacgcccgagggctccggtgccgccggcccctccacgcccaaggacggaggaggagggagcgggcaccgacgcgaagaacggaagggcggcgtcggcgctgacgcggggaagagttgctctaaggccgagcaggagcggcgcaagggcgtgccgtggacggaagaggagcacaggttgttcttgttgggtctggacaagttcggcaagggcgactggcggagcatctcgcgcaacttcgtcatctcgcggacgccgacgcaggtggcgagccacgcgcagaaatacttcatccgcctcaactcgatgaaccgggacaggcgccgctccagcatccacgacatcaccagcgtgaccgccggcgaggtggccacggccggcgcgcccatcacgggcggcggcccgaccgcggcgggggcgatgccgatggggccgggcggcatgaagcaccaccacccggttccgccgatgggcatgtacgggcacgcgcccatgggccacccggtcgccgggcacatggtggcgccggcggccgtcggcacgccggtcatgttcccgccgggccatcactcgccctatgtcctgccggtgggatacccggcgccaccgaccaagatgcaccagtgatcgtctacgaccggcatttgcgcatctgcgcagctgcatccctttgctcgttctttcttgatttcgttgatgatcttgtgtagccaaagctatctatatccatcctttcctcatctcccgggtctttgatttttgacgtaacatatagatgacttgagcgagtgcagggcaggcaggcgaataatgagtatcgctacttacaggaaggctcaaggaatgtgtaattagtagcagccttcctgggtgcaaatattcatcatttgtgcaactggggactgacagaatctcatttcccggatgtaaatcgattgtctataatatctcatctgtgcgaaat

SEQ ID NO: 168068 - DNA, 425 bp, Zea mays
  Clone ID: MRT4577_84859C.1
cattaacagttgacacacgtgggagacaggcaaataagagaatagcccattacagctagccacaaaattcgttcatgaatcataagcatcagagcagcttaaaacacatgggtctcttagaacattggtctatgtccttgcagagcaactagaaaaatctttgatcacagcacattcagaggttttatgcgttggcagcaacctgggcatggggcaccccgcttccttagctctactatgatgctcagctggattcccttgcccttgggcaggctaacccacgggttattaccctcaggcgttggggaacactgtgcccataccgggggataactggtggcccagggagacctgcaagagaatggtctaaaagctgccctagggcttttccctgttatgtataacacacccacagccagtgttcc

SEQ ID NO: 168069 - DNA, 636 bp, Zea mays
  Clone ID: MRT4577_8485C.1
cattggtacctcgagccggccgggagattgatagtgacccgcatatcctctcctggacgcgacgccgtctccaatgtctccgtatcgctgcgacgtgcgtgagctttgtgctcgcgatctctgcggagggcccagcagctgacagcacttagtcccgtgatcaggcatgggatcatcaccgctcggccctcgagatcctaggtcgcgagcccgacggaatctctgtgtgatacggacccccctacacggcgaggaccagcaggccgacgcagaaagtcccgaagacggagtgcaacgacacgtctttctccaccgacgatgtgcgcctcctcctgacggagggatccttctcgggcacggactacgactgccacatgctcaccgtacgcaagggcttcgagctcgcggtgctcctcgacgacgtgctatcgcccacgatggcgtatcatgatcagcttccagaagtcgtcctgaacgaagggtaacaacgcaacgtcctggaactgcaacacgggttgcgctctttatcaacaatataactagagcatgagttcagccacctggccaatgtcttctccctctgcgcatgaatcgggcgcttgccggatgatgcctaatgatataacattctttgat

SEQ ID NO: 168070 - DNA, 488 bp, Zea mays
  Clone ID: MRT4577_84860C.1
ggccaaaaaaaggggaggaaaaaaccccccttctattcaaaaaaggggggggggggccccgtaacttgcccaaaaaaaagaatcccccaaaacccccggaaaaaaacccggcccccccccaaaaggggggggagaaaaaaaaaaaaaaggggggggggaaaggcccaaaaaaaaaccccccgggggcgggaggggcccccccaaaaaaaaaattggggatggggaaaaatctgtttgaacggcccccccaaggccgtttttgtttttgtaccccccagaaaaggaaagaaagggccccatggcccccaaaacccaggaaaaggcccgggaacccaagggccctcaaaagggggaaaaagccccccttggccccaaaaaaaaccgaaagggccaaaactgccccctttccccctgggaaaaacgggggaaagggggcccgcccccgaaaaggaggaaaatttttcccgtccccccaaaagggccgggcc

SEQ ID NO: 168071 - DNA, 119 bp, Zea mays
  unsure (1)..(119): unsure at all n locations
  Clone ID: MRT4577_84861C.1
gcacgttcgncacacgtgcgccgaccctacgaagagcgcgtcactgacgacaagagcaccggtagccaacctgacaacactactgaacaagaggcatccaccactgacaataacctcca

SEQ ID NO: 168072 - DNA, 329 bp, Zea mays
  Clone ID: MRT4577_84862C.1
aatccgttgaggcactgcaggccaatgtccatagtcttaagacatacaaggccaatctgatcagctttccaattcattctcacaacgttcacgctcatgtctctactccacatgaacttgtcaacgatacccagatccagggtgactacataccttatactcgtagttagaaacctccacttaaggcactataccatgcataccttactaatttatcacctacctttttcaatcaaatactagaattgatgatgtcacaacaacatttacaccctccattttttttatttttattttcactatatttttcattttaaccttttattctt

SEQ ID NO: 168073 - DNA, 327 bp, Zea mays
  Clone ID: MRT4577_84863C.1
gcggctgccagacaccgccaacggtacatgtaccgtcctcggtgcatctgccagctggggttcacctgccatcgtgggtgcatctcccaccgccgcaccagctgtcgcagccattactgctgccaccgtcggtgcatgtgccgccgccggatcatctgacgccgcagccatgccactaccgtacttagctggcccagcctcagactcatcccgagtcgcacccatgcccgtgccaacaggcgcatacaagcccatgccagctgcacggtacctgcggcgttggcagcaccctaatcctgggccagttcctcaagtttctgatgcgtc

SEQ ID NO: 168074 - DNA, 134 bp, Zea mays
  Clone ID: MRT4577_84864C.1
ctgtgttcaatggaagtgatcacatggtttccaccacagctcacgagctctttcctacaacaaatagagtgcaggatttaatgctggctggccgatgctaatggccatcgagtttggcttttctgtgacatttt

SEQ ID NO: 168075 - DNA, 393 bp, Zea mays
  unsure (1)..(393): unsure at all n locations
  Clone ID: MRT4577_84865C.1
gccacgcaccccaccgtcttccccgtcaccatcatgttcgccatgaagtgcttgtcgctgctcaagttcctcatggacctcggctgcaacggcgagccctgcttctcgtgtctgtaccgcaacggcccgtacccgcccgccccgccgccctccaacaggttcaatgatgcgcccgcctcggacaaggcgcccagcgcggtccagttctgcgagttcctgtctgccccggacgtgagccgctgggcagggcccatcatcgatgtactcttggactacgtgggcaacgtgcagctctgctcgcggctgaaggagcatattgacagcttcgaggactgggctgtcattaaagagaaagcagaacctncaagacccctggctcatctgtgccggctg

SEQ ID NO: 168076 - DNA, 1393 bp, Zea mays
  Clone ID: MRT4577_84866C.1
gccagggctcgcctcgggggaccgcgtgttgctagcgagctcggtgctgccggctgccgccccagtgcgaggcgatggggaggaggctggacgtgctgctggggcggacgacgaagcagacggcgcggctcaagtcgctgctggggctggcggcgacgcgcctcggcgtggtgcggggccaccgccaggtgcggtgcgggcaggcgcgcggggacgtggagcagcttctccgcctcggccacgcggaccgcgcgctggcccgcgccgagcacgtcgtgcgggagcagaacgcgctcgacgtcctcgccgagctcgaggcctgctgcaacctcatcgccgagcgggccgcgctcgtcgacgacgcgcacaggggggagtgccccgaggagctgcgggaggcggcggcggggctggtatacgccgccgccaggtgcggggaccttccggagctgcaagaggtccgggccatcctcgccgccaagttcggcagggagttcgtctccgccgcgtccaacctccgcagcgggtgcggggtcaaccccaagatcgtgcagaagctgtcgaccaagcagccgagcctggagagccgacagctggtgctacaggagatcgccgccgacaaagggatcgccgtgcgcatctacgagccgcctcctccctacgaggactcggggagctccaaccacagccataggaagacggagcacgatggcgagaggatcagtaggacgccaccagttgatggccgcgacgaagacatctccggccactcggcgcagaggtacaaggacgtggaagcggcagctcaggccgcgttcgagtcggccgcctcggcagccgccgccgcgaaggcggccatggagctctcgcgtggggagcccagggggcccggtgacaggaggagggcagggaggacgcaaatggatgatcctgagatcgagaaacaagatgaggtgcttcatggaaacaaacccgagaagattgggcatggccggaattacagttcagatgttgagatcacgccggaggacgacgaggcaaaccacggcaacgttgcagtggacgaaccgaaacagcgggagcctgccaggggaaagccggcatcggtcagaacaaagtggggattttagcggcatccagatcgcaacggaggagatggtttcttcgtcttgtcaatatattggcatggaagttgttttttttcactgtagtagtatgtaattaacgacggttaccaaaaaaacacatgagcgatttgatttattgccaacagtttgcacactagtacactatgcctgtactaatgctatgttctgttaatgtgtagcgttaattgtagtacatgttctttggaggaaaaatattgatgttgcaattcaaatgatctgcttgg

SEQ ID NO: 168077 - DNA, 630 bp, Zea mays
  Clone ID: MRT4577_84867C.1
gtccactctcaccaccacaggggggggggggggtacattccctcaagacctacttctcttcccatcaagaccttctgtgcagcttacaacgaaacactacacatggcctttaatatagcgcacgagcaattgtctcttacccctactacttctatcacttaagaatcaaaatgcggggggcggggcgctgattcactagataccgacacgatcttgattggcctcctacaggcatataccataaccgacatcaaaactatctcacatgacataggtcaatgctgcaggcagactctagacctccttatattctaatgccacatggcgcctaccactggctttatatcaatccatcaggcttgttatcagggcattggcatttaatggtgcccaaggactgtcccccaatctgacacgttataagagcgttcataactagattttctgatgattatggctatggtataaacaatattctcgatatcgtctgtgctgcagctgaagactatttattccacttgccatcctcctgtggtcctactctagacaggaccagtgacctgttatgatgagtgactgccgctagctacctgatggatctcttatggagattgctaaagtatatccact

SEQ ID NO: 168078 - DNA, 671 bp, Zea mays
  Clone ID: MRT4577_84868C.1
gccggccgggttccagaattgttcatcaagctgtcttgttcccctcttgtcctcttctttccggcgatgggcgacggcgtcctcctctacgacgactgcgcgctggaggaccacctcaccatacgacgccgatattacgcgcctctaccttcgcaaaagaccctcaccctccatgcgcacatcagtctcgcctcggacagcgcgactgtcattctccaaatcaagaacggcatgcccacataaccacattctccgacaccccctcgaaagcaactgaagaatccacgcaccttgcctaactacaacatccaagagagtcgatcttcatctgatcctcaactgtaggagggcaaccataatcaaggactaaactctcacctgcgaaaaagatcaagatcaacactgcacccactgactcgattaacaggatcgagaaaagcgctaaagagaacgaaggcatttctccaatgcagcaaaggatcatctatacaggaaagaaacttgctaatgactgtaccacataggactacaacatcaagggagaatctgtactccatcattgacttactctgagaggctgctactcactataatactgaccaactatctactcgataaactgatccgtattctgctaaatagtgcatactgatgctgtacttgcaacgaga

SEQ ID NO: 168079 - DNA, 1146 bp, Zea mays
  Clone ID: MRT4577_84869C.1
atggggaggaggctggacgtgctgctggggcggacgacgaagcagacggcgcggctcaagtcgctgctggggctggcggcgacgcgcctcggcgtggtgcggggccaccgccaggtgcggtgcgggcaggcgcgcggggacgtggagcagcttctccgcctcggccacgcggaccgcgcgctggcccgcgccgagcacgtcgtgcgggagcagaacgcgctcgacgtcctcgccgagctcgaggcctgctgcaacctcatcgccgagcgggccgcgctcgtcgacgacgcgcacaggggggagtgccccgaggagctgcgggaggcggcggcggggctggtatacgccgccgccaggtgcggggaccttccggagctgcaagaggtccgggccatcctcgccgccaagttcggcagggagttcgtctccgccgcgtccaacctccgcagcgggtgcggggtcaaccccaaggtgaggcccggcggcgacccgcgtactctggctggctggccgactgacttctcaaccttggattctcgactaaacttggattctcgacagatcgtgcagaagctgtcgaccaagcagccgagcctggagagccgacagctggtgctacaggagatcgccgccgacaaagggatcgccgtgcgcatctacgagccgcctcctccctacgaggactcggggagctccaaccacagccacaggaagacggagcacgatggcgagaggatcagtaggacgccaccagttgatggccgggacgaagacatctccggccactcggcgcagaggtacaaggacgtggaagcggcagctcaggccgcgttcgagtcggccgcctcggcagccgccgccgcgaaggcggccatggagctctcgcgtggggagcccagggggcccggtgacaggaggagggcagggaggacgcaaatggatgatcctgagatcgagaaacaagatgaggtgcttcatggaaacaaacccgagaagattgggcatggccggaattacagttcagatgttgagatcacgccggaggacgacgaggcaaaccacggcaacgttgcagtggacgaaccgaaacagcgggagcctgccaggggaaagccggcatcggtcagaacaaagtggggattttag

SEQ ID NO: 168080 - DNA, 555 bp, Zea mays
  Clone ID: MRT4577_8486C.1
gacgattcaagctacaaatgttcatttagccaaaagtcgaccaacactcagagcaaatgtcaggcattggaatttggatacatagcatggtctgctttcagaactactagtaacattgaaatttgacaaaaagtctttagaacagtagtagacccacacacattggtgatgataaacttagaaaagagatgttcccttgcccttcttgtctccaccaatctcaaaatgcttgcacctcttgattgcgtgctgtgagtagtgcttgcagctctggcactgcagcttcagcacaatcttcttggtggtcttagccttcttgtggaagacaggcttggtctgaccaccatatcctgactgcttgcggtcataacggcgctttccctgggcagacaggctatccttacccttcttgtactgagtcaccttgtggagagtgtgcttcttgcactccttgttcttgcagtaggtcttcttggtcttaggaacgttcaccattttggcggcggcggaaaggaggccggaagggcttgtgcggcgtgctccctatccggtcgc

SEQ ID NO: 168081 - DNA, 406 bp, Zea mays
  Clone ID: MRT4577_84870C.1
ctagttctagatcgcgagcggacgccctttattctctttttctatctatggggaaacgtccgaaatccgggatgacctggagctgattacactcacaatgtggtgttgaatgtgcgttgcgaggtcttacaaggattgttctaaaacccataaacttaagatagtggagaccaaagcagcctaggaaaactttcatgcattacatgaaggagctaccgtgtggcccatagagggccaagaccgtgaaaattatcgtcacagaaggagcatatgcgtaagtacactgtgaaatgaatgaacccatggaacgccggcggcacgatgtgttaactactacgtcgggccgtctcgcgcgctacttactacaccgaggaagctcgccgtccagttgtcacatgcagagatc

SEQ ID NO: 168082 - DNA, 462 bp, Zea mays
  Clone ID: MRT4577_84871C.1
ccacgccttccggaagggggcctttattttggttagaaaggttaacccgcagtaccttttggcacatggaatggactggctaatgccttttggcttgaactggtacccccggttgacaaaagccttggcaaccccccaaggattcctggagccttttgggggttaataaaaaatttggaattttattcttaatcattggcctttgggggtctggacaaaactttaccaggggatttccttggctttacattggcaaaacattacctttcaaggtttggctttcaatccaacgattcttgcacaatggttgcaaaaaaatgggcaaattggttattccgggcttttcacaaaaaccggattatgaaggtattcttaaatgctttgttcaacaagggattgcacaagatttcaagaaccatgaacttgacccgagatttgaaatcttgaaagatgcttgggaaa

SEQ ID NO: 168083 - DNA, 292 bp, Zea mays
  Clone ID: MRT4577_84872C.1
ccactgttgacgtgacgatttacgacttgatcgcacgagaatcactaccgatactatcgcaggaataatttatcaaaaattagacttttggctctttttgaaagcccgacttgcgatcgttcgtgcgacggctcgacatcgataaaaccccccaccttattctacagaaacccgaccgaaccctctgaaacctcaacaacaccgttaagatggctcaaaatcaacattgccgtttttacgaggagaagtacccggagatcgacagcttcgtcatggtcaatgtcaagcagat

SEQ ID NO: 168084 - DNA, 516 bp, Zea mays
  Clone ID: MRT4577_84873C.1
tgttaagattgtgaacccacacaacaaggacattcgcgacatccctggcttggcaccacccgtcagcaggcggctgttgcgatagaggacaggtgaattgcatacctggtgtaaaaattgatgtggcgcggcgccttggcaagcccatctgtattctacgtcttgtaaaacgctgctccagtcatgtggtatattgctgtaaaacttctcatgggatccactcctactccttggctacaaaaaaaaaaaaaaaaaaaaaaaaaaaaaaaaaaaaaaaaaaaaaaaaaaaaaaaaaaaaaaaaaaaaaaaaaaaggcccctaaaagaccaaaaattgttcccttgagaaaaaattaatcgacacgtgttacaagggacaaactataatcctttctaaagtgaaaaaacgggccccccccgaccccttttttgtaccctttggggagcctaaagggggggccagggacaccaagtgaaaagccctccctgcataaattttcggtgcccccccccgccc

SEQ ID NO: 168085 - DNA, 423 bp, Zea mays
  Clone ID: MRT4577_84874C.1
gggaacaaatttacctcaatccattaacaaaacccgccgatggttttcgctgggcgagtccctcgggcagaacaagggttcatttgcaaaaaaagccctgacaatggcgggggacccgtttcactggaggaaaaaacaaaagggggaagttcataaattattgcaacacaggttacacctcatttgaaacatttgactatttgcgttcccaaaaaaaaacgagctacttttaaacaagccgctacaattcccttgaacccccgcagcctcactttttaaccccctcaaactctgcccccggggcctggtcgccgccaccctgagggccaaatcctgactgggagccgccaaaaccaccaccaaacatgtgctggccaatcttcaaaaccgccttggtggcagcctcaagcttggccttgatct

SEQ ID NO: 168086 - DNA, 303 bp, Zea mays
  Clone ID: MRT4577_84875C.1
tgcaacgggagccacatcaccgtagtccgacccctcgataacaatggccaccgtcctaggcagcccccgcgcgccggccttcttcatctcgccgtcctccctccgtgccgcgccggcgcacaccgccgtggcgctgcctgcagccaaggtgggcatcatgggccgtagcgccagcatcaggggcaggctgcgcgcgcaggccacctacaacgttaagctgatcacgccggagggggaggtggagctgcaggtgctcgacgacgtgtacatcctggaccaggccgatgaggacggcatcgacct

SEQ ID NO: 168087 - DNA, 440 bp, Zea mays
  Clone ID: MRT4577_84876C.1
gccaagatttgcatcaatgatgacagattactacccaatggtgctatcaagtatactagtttaccatcagtcaccagtccacgggactcaagcctttcttctggcagtcctccatcgccggcaagtattgttcttcatcaaaggaatgaccatgagagattacacaataatcagcaaaatttgtctgacctcaaacctcaaaggtacataccacctggagggcgtaactgttcaagtgaaatgactacatcagtaaagcatatgcagcctattgagggtgcttggttgcacagctcatcaaatgagcatttgggctccaataacgacaaatctcaagcatcttcacagttaggaaacgataattcaaatcccaagcaaattacttcagcagaaaatggaacatctgacaccgtgcagcaaaagccacagtatgctgatgt

SEQ ID NO: 168088 - DNA, 486 bp, Zea mays
  unsure (1)..(486): unsure at all n locations
  Clone ID: MRT4577_84877C.1
atcnctacacaaaccgcctccctcttccttggttccttcccatctctctctctctctctgtgcccacacacaccatgtgtgcccgcatttccctaaataggccgctcgctcccgcgccgatcctctcctcctcccccgccccctccccctcctcactccctatccactcctcctagcagcgcgagcgccagcgcgccggcgagccagcagctgcctcccgggcggcgcggagcgggagctttccgcgctggttacggagccggagcgagccggagctaggatgatgggcgccagggtcaacgccagcgccaacgcggccgactgcggggagtacccgcagcctcgacccccccggccggtacggaaggcacaacgacgccctcggcaagggcgcgcccaagaccgtgtaacgggcgttcgacaagtaccaaagccatgcagatggcgtggaatcacccgaagcctgtaccacttcctgcagagacc

SEQ ID NO: 168089 - DNA, 1216 bp, Zea mays
  Clone ID: MRT4577_84878C.1
ggggaacctagcatatacacctccagaatatctgagaaatggcagggttactccagaaagcgtcattttcagttttggcactgtacttcttgaccttctcagtgggaaacgcataccgccttcacatgcgcttgatatcatgagaggcagaaacatccaagcagttatggattcacatttggagggaaactactcaattgaggtggctactacattggtgaatcttgcttctcagtgtctacaatatgagccaagagatcgtcctgacataaaaaagttggtttccattctggagcctttgcagaaaaaaatagaggtaccgtcctatgtgatgcttggaattgcaaagccagtggaagaaccacaggcacctcctactccacagcgccctctttctcccatgggagaagcttgttccagaatggaccttactgccatctatcagatcctattcacaacgcattaccgagatgatgaagggagcaatgagctgtcttttcaagaatggacacagcagatgagggatatgctggatgcaaggaaacgtggcgactctgccttcaaagacaaagattttaaggcagcaatcgattgctatactcagtttgtcgatgtggggataatggtgtcaccgactgtattcgccagacgaagcttgtgctaccttatgtgtgaccaacctgatgcggccctccgtgatgcaatgcaagcgcagatcgtctaccctgattggccaacagcattctacatgcaggcagttgcactatccaagctaaacatgcagagtgacgccgtggacatgctgaacgaggcatcacagctagaagagaagaggcaaaagagcacaagagttccttgaatggcattgccagctcagagaagtggcacgtcttctatacatataacatagattgcacactatgtagtacagtagtatattctccaacctttcccaccctgtaaaaagcgcatagtatattgcgtggtctagaattagaagtaaggagaagtgaactgcagagaagatgctctttgctccctggactctggagccctgtgatggcacttgtgtgataggttcaattttttgggcccatgtatataacatccgttgcatgggagtttagagtataggttgccggttggtcaggagggccctgtcgccgaagataataaacatgttatgtttgtgaaaaactgtctgggtatcgcttcc

SEQ ID NO: 168090 - DNA, 239 bp, Zea mays
  Clone ID: MRT4577_84879C.1
gtctccgacactgtctaggggcggtccaaaatttctatggatttggggaggacgagatacaagcgaacgggaaaacacaagcctagccgtatgcacgggccaacagaggggacacgtacccgcaaggatagaacgcaagctggattgtagatcagggacgaccaaccagggcggaccaatacgagaccatcctttcgttacgcggggtgttggaacaagacgtgggcccgacgaacaca

SEQ ID NO: 168091 - DNA, 815 bp, Zea mays
  Clone ID: MRT4577_8487C.1
acaaaatcgatggatttatttcatatgcaatatcatctccaacaattcagtgagcgaactgtgggatttcattcagccagttacattacataaaccatcctcggtgtgatcaagctttagactaaggcaatggcagaacaaaatcaaacaaacacacaacacattcaatgaagattcagggtgcaaaacttcatttagccaaaagacaacccacactcagcgcaaatgtcaggcattggaatttgatacacagcatgacctgctttcagaactactagtaacattgaaatttgacgagtttttagaacagtagtagacccacaggttcgatccaacatcgagatgggcgatgagaaacttagaagagagatgttcccttgcccttcttgtctccaccaatctcaaaatgcttgcacctcttaattgcgtgctgtgagtagtgcttgcagctctggcactgcagcttcaatacgattttcttggtggtcttggccttcttgtggaagacaggcttggtctggccaccatatcctgactgcttgcggtcataacggcgctttccctgggcagacaggctatccttacccttcttgtactgagtaaccttgtggagagtgtgcttcttgcactccttgttcttgcagtaggtcttcttggtcttaggaacgttcaccattttggcggcggcggaaagggctcgtgcggcgtgctccctactccagtaggtagaggtagagaggctgcaacgagtggcggcggcgggtgtagaagcgctgtgcttttatggcaaggcgcccgccgctgtctagggtttc

SEQ ID NO: 168092 - DNA, 1540 bp, Zea mays
  Clone ID: MRT4577_84880C.1
ccggccggggcgaccggccggggcgagaaaactgaaatttggcgcgggcgcgacctcgccacccaaattcatcaagctcaacacgatctcaattcgattccagttcatccatccaacgcctcccgcctgtacgtatagaagaaagaaggaagaaccgtcaccgtacgtcctcgccagtacaaataatggccctgctcaaagccgcgcgcgtcgccgatgtgcccaccctggacgtggtggtggcccccggcctggtggcggttgccaaggcgaggagcgccgcggctgtgggcggccggttctcggtgatcgggcaccgcggcaaggggatgaacgcgctggcgtcggaggacccgcgtctgcgggatgtgcgcgagaacacggtccgctccttcaacgacgccgggcgcttccccgtcgactacgtcgagttcgacgtccaggtcaccaaggacgggtgcccaatcatcttccatgacaacttcatcttcacacaagacgatggtaagatttcacaaaagcgtgtggccgatattcagctggaagacttcctgcagtatgggctccagaacgagcaggggaaggttggcaagcccctgcttcgcagattgaaggatggcaggatggtgaactgggacgtgcaatcagaggacgctctttgcacactcgaagaagcgttcgacaaggtcaatccaaggttgggcttcaacgtcgagctgaaatttgacgacagtcttgaatacaccgaggaagagctcactcgcatcctccaggccatccttaaggtggttttcgagtacgccaaggacaggcctatacttttctccagttttcagcccgacgctgcgcagctcatgcgcaaattgcaaggcacataccctgtctacttcttgacgaacggagggacggagctatacgccgacgtgaggaggaactcgctggaggaggccgtcaagctgtgccttgccggtggcctgcaaggaatagtttcagaagcccgcgggatcttcaggcaccccgccgccgtgccaaagatcaaggaggctaacctctccctgctaacctatggaacattgaacaacgtgccggaggcggtttacatgcagcacctcatgggagtgaacggggtcatcgtcgacctggtgccggagatcaccgaggcagtctctgagctcatcgccctgcccctgcccgaccccgacctggaagtgggcagcttgagcaaccaggcggcagctagaggagccacaacaccgaatttctcgcagcgcgagatctcgttcctgctgaggcttattcctgagcttgtccaataatgcctagacttcctggtgttctgtctgtctatcatggatgaattgactaatgtgttactgatgtactgatccgcatacaagaaaagaagcccttgtgcagggtattatttgttgtcgtgggttgaaataactgtaaaattatcctgctcccgttttaaaaaaaaaaaaaaaaaaaaaaaaaaaaaaaaaaaaaaaaaaaaaaaaaaaaaaaaaaaaaaaaaaaa

SEQ ID NO: 168093 - DNA, 296 bp, Zea mays
  unsure (1)..(296): unsure at all n locations
  Clone ID: MRT4577_84881C.1
ggggcacgnaaaacatctttttttaagccttgttcatcgggggcctccaccaaaataaggtggtcgcccaagggtaaaagccaaggcttttttctttccaccccgggccaaacaataattataagaatgaattaacacccatttgatcccgcaaaattttacagcccaaaactgggtgtgcccagaatttttgggactgggttccttggacatttagggcctggttgggagccagtgaaaacaaaggggttgggggggctataaacccctactatttaaaaaagaataggggggga

SEQ ID NO: 168094 - DNA, 1637 bp, Zea mays
  Clone ID: MRT4577_84882C.1
cccggcgccacccaaattcatcaagctcaacacgatctcaattcgattccagttcatccatccaacgcctcccgcctgtacgtatagaagaaagaaggaagaaccgtcaccgtacgtcctcgccagtacaaataatggccctgctcaaagccgcgcgcgtcgccgatgtgcccaccctggacgtggtggtggcccccggcctggtggcggttgccaaggcgaggagcgccgcggctgtgggcggccggttctcggtgatcggccaccgcggcaaggggatgaacgcgctggcgtcggaggacccgcgtctgcgggatgtgcgcgagaacacggtccgctccttcaacgacgccgggcgcttccccgtcgactacgtcgagttcgacgtccagatgttgagaagagaaccgtgaataccgattttgcaggtcaccaaggacgggtgcccaatcatcttccatgacaacttcatcttcacacaagacgatggtaagatttcacaaaagcgtgtggccgatattcagctggaagacttcctgcagtatgggctccagaacgagcaggggaaggttggcaagcccctgcttcgcagattgaaggatggcaggatggtgaactgggacgtgcaatcagaggacgctctttgcacactcgaagaagcgttcgacaaggtcaatccaaggttgggcttcaacgtcgagctgaaatttgacgacagtcttgaatacaccgaggaagagctcactcgcatcctccaggccatccttaaggtggttttcgagtacgccaaggacaggcctatacttttctccagttttcagcccgacgctgcgcagctcatgcgcaaattgcaaggcacataccctgtctacttcttgacgaacggagggacggagctatacgccgacgtgaggaggaactcgctggaggaggccgtcaagctgtgccttgccggtggcctgcaaggaatagtttcagaagcccgcgggatcttcaggcaccccgccgccgtgccaaagatcaaggaagctaacctctccctgctaacctatggaacattgaacaacgtgccggaggcggtttacatgcagcacctcatgggagtgaacggggtcatcgtcgacctggtgccggagatcaccgaggcagtctctgagctcatcgccctgcccctgcccgagcccgacctggaagtgggcagcttgagcaaccaggcggcagctagaggagccacaactccgaatttctcgcagcgcgagatctcgttcctgctgaggcttattcctgagcttgtccaataatgcctagacttcctggtgttctgtctgtctatcatggatgaattgactaatgtgttactgatgtactgatccgcatacaagaaaagaagcccttgtgcagggtattatttgttgtcgtgggttgatttgtctgtcctgaagcttgtcctgctcccagttttacttatgctgacagggttgggtatttgataatgccgcacgagaacacaacagggggcgtgacgacaagtgtttagactttacaccgaacaaaagagtcatgagtgcaaggaactgtttgagttaaaccataacctgttgggaattgctatgaaaaaaaaaaaaaaaaaagcggcc

SEQ ID NO: 168095 - DNA, 323 bp, Zea mays
  unsure (1)..(323): unsure at all n locations
  Clone ID: MRT4577_84883C.1
gaacggaaagtgtggaccaaagtttgcttcaattctgccaaattattaaaccgactgacaaaggcaaaaaaaaacgatgggtgtaanatcagacaaaatctgcccaaacattcactaaaattttgccctgagaaagaaaaccacaagcccaaaactgtcatcgtaatctttgggcgccaaccaaacgcgtttgccactatttgaccgacagcgcatttgaatctagcattggggccaaccaggaatgccagcaacaacaacgagtgcattaggtgatgaaagcacagatggattcacatacaacagctggtacaaaaaaagac

SEQ ID NO: 168096 - DNA, 811 bp, Zea mays
  unsure (1)..(811): unsure at all n locations
  Clone ID: MRT4577_84884C.1
ctctccctgctaacctatggaacattgaagtaagtggtggtggtggctcgcaaaaatagatagataggattaatttgtggcactgcctgcctgtgtgtgcatgtcctggatggatttagatgctgagagttgccgtctgtgtatccttctcgcagcaacgtgccggaggcggtgtacatgcagcacctcatgggagtgaacggggtcatcgtcgacctggtgccggagatcaccgaggcagtctctgagctcatcgccctgcccgagcccgacctcgacctggaagtgggcagcttgagcaaccaggcggcagctagaggagccacaacaccgaatttctcgcagcgcgagatctcgttcctgctgaggcttattcctgagcttgtccaataatgcctagacttcctggtgtctgtctgtctgtctatcatggatgaattgactaatgtgttactgatgtactgatccgcatacaagaaaagaagcccttgtgcagggtattatttgttgtcgtgggttgatttgtctgtcctgagagcttgtcctgctcccagttttacttttttcttaagtaaaagttactgtaggaggtctacagtatttttttgcttaaggaaacaagattggggtgaagatacaggagggtgagtatagaaaaaaaatagagttacagaacanataatnttttnnnnnnnnnnnnnnnnnnnnnnnnnnnnnnnnnnnnnnnnnnnnnnnnnnnnnnnnnnnnnnnnnnnnnnnnnnnnnnnnnnnnnnnnnnnnnnnnnnnnnnnnnnnnnnnnnnnnnnnnnnn

SEQ ID NO: 168097 - DNA, 227 bp, Zea mays
  Clone ID: MRT4577_84885C.1
ggcgtcctccctcccacgagagcaccgacgtccggactccggttcggtggacgcgcacggacgaacccctctggaaagagagaggattcctccgccgcttccgcgttggacgcactggacagctcacgcacgccgctgctttcgcagccagccagatccgttggttccaacggaacatttccttccacgcccgccaccgcgcaccggcatctccatctccatctcca

SEQ ID NO: 168098 - DNA, 1818 bp, Zea mays
  Clone ID: MRT4577_84886C.1
gctcaacacgatctcaattcgattccagttcatccatccaacgcctcccgcctgtacgtatagaagaaagaaggaagaaccgtcaccgtacgtcctcgccagtacaaataatggccctgctcaaagccgcgcgcgtcgccgatgtgcccaccctggacgtggtggtggcccccggcctggtggcggttgccaaggcgaggagcgccgcggctgtgggcggccggttctcggtgatcggccaccgcggcaaggggatgaacgcgctggcgtcggaggacccgcgtctgcgggatgtgcgcgagaacacggtccgctccttcaacgacgccgggcgcttccccgtcgactacgtcgagttcgacgtccaggtactaataaactgatgattcattcattcatggcacggcctaccaatgcaaataaatctatctcacgctatgagaagaaaaccgagagagagagagagagagggcttgccttcccggccggccgttagtgctcaattgggcacgcgattaccgaggcaagcagaggcctcgggtcgggtggggcttgtttgacggggacggcagatccacgtctctgtcacgtgactccaggcggtggtcgcttgctccatgtgccgcgtcgcatcccgatctctggctgtggttgcctggctggcaagggccaaccgcccgtcgtcagcgatgaggatgcttgtagtgtcgtgtcgacttttgcaaaaacaacgtgcccagccctgggtttgtgcgccgccgcaccagccaaaacaaagacgaaaccgaaagactcgtcaaaaggcaaaaccaagtgaggaaagacaactgaccatagcaaaaaacacaactttgctagttggtttccacgtatctttgccgcatgaactggtcccggccgtcacgtttgcttatagttccaccacaataatagtcgacccgtggtcccgttggttttgattgagagtagagagcatccaccggacagttaaaagtgtgtttcattgttttttcccctaataatctagtacttattctctacgtccacataatttagtcgttttgggtttattctaaattaaactattttaattttaatcaacaatatatataattaaattattttaaacttaaaagaattatatattatgatagtttaattcatgataaatttagtaaaattacttttgtattgtaaaaccttataaaaggttcgatatatatataactggtcaaaattgatagggaacgacttagaacaaacttaaaataactaaattaaactaaattatatggacgaaggggtaggtacctactccacagtacttaatttcctctagtagttaaccgaaacacggtagatactgaatgaatgtgttgcaagaaacatactgatctgtctacttttgcttctcccctcttcgcctcttcaataattcggtgtgcaaagatgttgagaagagaaccgtgaataccgattttgcaggtcaccaaggacgggtgcccaatcatcttccatgacaacttcatcttcacacaagacgatgtgagttcatgtatacgtgcttcatatcatatatatataacgtgttaaaataagatagcggaactttattttactccggcaccaatgtagaggctaaacctcttcgttttggtccttctcagggtaagatttcacaaaagcgtgtggccgatattcagctggaagacttcctgcagtatgggctccagaacgagcaggggaaggtacggcgagtcaccatgcatcttgcttatgggattgagtaaccagtagccactaccatctctcgtctcc

SEQ ID NO: 168099 - DNA, 228 bp, Zea mays
  Clone ID: MRT4577_84887C.1
tagctcacttttctttggccgccctttctttttttttttggggtggttaaaaaaaaacggggggaccattcataagggtaacccacgtgcacaaacgggtgttccacgaccctgattctcgttgggaagcaattgctcatcgtacaaagcgttaaacatcgaatctcacgggggctcacactcggcttctcatgaaaagaaagcatcccaacacaccatctttgaatg

SEQ ID NO: 168100 - DNA, 383 bp, Zea mays
  Clone ID: MRT4577_84888C.1
cccttccgtaacctggaatcctctaaaccggccgcccttgggttttttttccttaacctttggaaagcttttcatttcattggacccaagcacagaaggcttttccttgtagggaagggatcgccatcctatccaaggaaaaaggaaattccgttcccaactgaaatgataccttccccaaaccggttccttggctaaataacaaaaaaccaggccactcctgaattgaacaagccctccaaaccttccatccaggtactgggctgtaaacaaaactaacactaccttggcccaggcactgggcatggaacatccaagccatttcgtccggccccttgtccaattccaatccaagcaaaaacataactcttccccaaacccaa

SEQ ID NO: 168101 - DNA, 207 bp, Zea mays
  Clone ID: MRT4577_84889C.1
tcccggtcgcccagcgtccggttttgcgggacacaactataatatacctgggatgtggttctgcagaggcacggggcctactggttgtctgttcgaatatccaatctggcgcgtcctgccaagcgcgtgacatatgcccaagacattcattagcagtaggatacggttgtgggcgtgtagttgtgcggaggaagaactttggctcgt

SEQ ID NO: 168102 - DNA, 380 bp, Zea mays
  Clone ID: MRT4577_8488C.1
gccacacgtcctgccgagataactatatcggctgtgctctgacagcttagacctgcgggctgattcaatcaagatgaaaccagatatctgacagaccgcatacagaatggtgccacagaagtcgtggaagcaaaagctgaatcacgctccgtgactgtttcaatggctgaagctgctactaaaggcgctgacgcatgcttgcgagctatgcaaagcgaacctggaagctatgaatgctcatatgctgcatgcaatgcagcagatctgccgatctaatcaacgaatgtcaagcttggacgctgttgacccgaggatattctaccgattggccataacaatgatatcgtaagagctagtctggtagcgacagaggaggaact

SEQ ID NO: 168103 - DNA, 268 bp, Zea mays
  unsure (1)..(268): unsure at all n locations
  Clone ID: MRT4577_84890C.1
ccgggcgaggtgcgcgtagctgccgtcgttgtcgccggtccatccaccatgggcggggcggcgggcagaagtccaagatggcccgcgagcgcgagacttggagaagaacaagggggccaaggggagccagctcgagaccaacaagaaggccatgagcatccagtgcaaagtgtgcatgcaaacattcatgtgtaccacgactgaagtgaantgccggggggagcggaggccaatcatcccaatacatacntntaccatttcttccccc

SEQ ID NO: 168104 - DNA, 539 bp, Zea mays
  Clone ID: MRT4577_84891C.1
cctcgagccggccgggatccacacgagctcgatctatctttctctaacgtgcgcgtacactcttgcatcccatccttcactccgagttatcatcgaggctctacttacgctcgccactccttcgcgtagccatcatccttctgatcgtcaccatgtccactggcgagggccagtacccctaccgtgcagcggggcgaggaagggactgtgtcgcacaccccgccgccgtgcgccacggcctagaatactgcccccggcgaggccgagcgcgacgctgctgctcttgctgatgccgagaagcttccacgcgacgagccagacgcagcctccgaggctgacgccgctccctcctgctgctgccgaggagcacgccgcgccgaactgccaacgaggcgcaggctgctgctcctggtggcgccgaggacactcctgggcgccagcaggaagcagccgacgaccaggatgctgctgatgctactacctggtgcgtccagcagcccggcgtgatcgagcctggcggcgaggcagacgctgctgct

SEQ ID NO: 168105 - DNA, 395 bp, Zea mays
  Clone ID: MRT4577_84892C.1
gggaagagaagggatcaaaaaaatatggcccctgggaaaaaattggaaacttgggccccattattttggggggcaaaaaaaagaagtttttttgggggttcgttaacgggaaattgtatttttaaccccggaaaatggggaaaaccctttttggaagaaggggcttaggggaccaaaccaaccctttagagcagacgaccccaagggcaacagccaaaaaaaacggccttcgaaggggggcgcaggttaactttaatggcccgattaaaacggttaaagccgcctgaccgatggggggacatggggggaacaaaagcccggcccggggttcccaaaaagggacttaccctggggccacctaatcgaggcaaggggttgggtcggcgtctttttcg

SEQ ID NO: 168106 - DNA, 1096 bp, Zea mays
  Clone ID: MRT4577_84893C.1
gcgcccacgcgtccggggtgctttgccacgaagcaaaaccagtttcctccccacaaatagagcccgcccagcgacgggcgggtcgtggacgtggcccgtttcgtaaagccaaggactcaaatctcttcaaccagaaccagcgaagcgtgcgtggacgcgtcctattcttcttccctccccgacctttccccaacttctcctccctccttcaaatccgatctccccgcaaggccgggatcatgcgcaactccaccgccgcccagccctctactccctcctccgcccccgccatgtccggctcaggccccgcttacgtggcgccggcctcttccacccccgtcggcggcggatacacctacccggcgccggcctcctccgggggcagcgccggctacgccaggatcccgacctaccccgcgcccccgtcgtcgtaccccgccaccaaccctcccacgccgaggtcttccgcgcggcggccttctccaggccaccgtcgctcggggaggcgctcgcccggacgcgccgcaacgccgcctacttccgcgccaactacgcgctggccgtgctcgccgccgtggcggcctcgctgctctggcaccccggcacgctgctcgcgctcgtcctcctctgcgccgcctggttcttcctctacttcgcgcgggggaaccagccgctcagggtcctggggacggagttcgacgacgggaccgtgctcgccgcgctctgcggggtcaccgtcgtcgccttgctcttcaccagcgtcggctggaacgtcgtgggatccgtcatggtcgggggcgcgctggtcggcgcgcacgccgcgctcaggaccaccgacgacctcttcctcacggagcaggaggccgccggggacgggctggtggcagccgggcccatcttgcccacctatgtccgcatcgtttgattgattcgcgcagctgggcggtgtcattcatcaatcttgatgttattgcttgcagacagtagcaattttccttgtaattaccatcacgatgatgtctgatattggttgtgggtgtgtaaagatctatatttgttcagaaagacaactgcgatatcgcgcacatactgattt

SEQ ID NO: 168107 - DNA, 201 bp, Zea mays
  Clone ID: MRT4577_84894C.1
tgcttttctgctattggtccaccgttgcacagcaggaatgcagagtacagggcgttgtgggatgcatgatcgaacatgccatgtggcgggggggttttgccggagtcagacttcgcgcgtgattgactagaggctacagatcgtgacgtcgcatgcatgcaccatttaatacgtattattgtttatatacaatgtcatgta

SEQ ID NO: 168108 - DNA, 1281 bp, Zea mays
  Clone ID: MRT4577_84895C.1
agaagaggattgaaggctgtcgcagattagatgtgtttgaatcccgggtcctattcttcttccctccccgacctttccccaacttctcctccctccttcaaatccgatctccccgcaaggccgcaatcatgcgcaactccaccgccgcccagccctctactccctcctccgcccccgccatgtccggctcaggccccgcttacgtggcgccggcctcttccacccccgtcggcggcggatacacctacccggcgccggcctcctccgggggcagcgccggctacgccaggatcccgacctaccccgcgcccccgtcggcgtaccccgccaccaaccctcccacgccgcaggtctccaccaacgccccggtccaggaccccacggcgccgccgtccccgctggccaaggcgggcgagctcgtcgcgcggctccgcgagcagggccaggcgctgatcgcggcgcgccggccctgggccgaggtcttccgcgcgccggccttctccaggccaccgtcgctcggggaggcgctcgcccggacgcgccgcaacgccgcctacttccgcgccaactacgcgctggccgtgctcgccgtcgtggcggcctcgctgctctggcaccccggcacgctcttcgtgctcctcttcctctgcgccgcctggttcttcctctacttcgcgcggcccgcgcagggcgggcagccgctcagggtcctggggatggagttcgacgacggctccgtgctcgccgcgctctgcggggtcaccgtcatcgccatgctcttcaccagcgtcggctggaacgtggtgggctccgtcatgatcgggggtgcgctggtcagcgcgcacgccgcgctcaggaccaccgacgacctcttcctcacggagcaggaggccgccggggacggcctgttggcagctggcatgagcgccgccgggcccatgttgcccacctatgtccgcattggttgattcgcgcagctgggcgtggtgtgttcatcatggtttgcatacagccttcatgcagttcagcgatcttgatgctattgcttgcagatattagcaatcttccttgtaattaccatcacgatgtctaatattggttgtgggcgtgtgaaatgtcaagctttttttctgtatttctggtgaaactggattcaattgctgtttcgaatggtggtgttcgatcttcgttaactacatctcagaatgacagctgcgattttgcctgcacattctggttcccgatgcttcaggctcaattctcaatgtgatgaagttagct

SEQ ID NO: 168109 - DNA, 457 bp, Zea mays
  Clone ID: MRT4577_84896C.1
cgcagcacgcgtacgtaactggaccctaagggcgcctttttttttttttttttttttatattatatttggttgtttcaattttttttgtgaccaactgttaaccacaaatttcagtccatggttgcttacaggccaaagacaaaacggagacacagaaagcgacctctaaggaggggggggcgcaagacaaaacgcagccggggacggaggaaacgaccagtaggaccccaagccggaacgggtgagccaggagccaagaaccaaaaaaacacggccaccgaagtgaccaggcacaggctgaaaacggccaccctcccaaaaagaagacaaaggaacaacaaaatgtgacaagatggagccggcccagtcaagggatcaggaaggcggggacaaggatattagcaacaccatccgctccagctggcacagtttccaagatcaccagcatggcaggtc

SEQ ID NO: 168110 - DNA, 1356 bp, Zea mays
  Clone ID: MRT4577_84897C.1
ccggctcccccgccccgtcccccgcgtcgcccgcccctgcccctcccgcccgcccccccgaattcgcggccgcgcctcgaggtcggccgggagcttcccaatcccacccggccaccccgcccgccccagtctggcagcctgcctccatagtccatctcctctccccctaccgacaccgatcccattccccaggcccaagcgcccatggatcccaagcccgacgccagcgcgcccgccgcggtgccagcggagcacgcggcgtacccgaggctgtcaccggaggacatcgccccgccgccgccgcctgtcgtgccgccgtccggcgccaacccctacgtgctctccgccccgtcgcctaacccgcccgccaagagcgctagggagaatctgagggagatgttcggcatggtggggaagaagttcaacgaggccgcgcgcaagaccgagggcatcgccggcgacgtctggcagcatctgaaaactggacccagcatcactgatactgccatggggaggattgctcagatatccaaggttatatctgagggtggctacgacaagatatttcagcagacttttgagtgctcgcctgatgagaagctcaacaaggcatatgtgtgctacctatcaacgtcgcatggaccaatcatgggcgtcctgtatctctcgactgtcaagattgcattcggtagcgacagccctgtgaaatatgtgactgaggacaacaaaactgagtcatccttttataaggttgttttaccccttcatcacctgagatcagttactcccacagcaagtcagcaaaaccctgcagagaggtacattcaggtcgtttcagtcgacaaccacgagttctggttcatgggtttcgtgaactatgatagcgctgtaaagaatcttcaggagtctgttcgagttgttcacggggcctagaggttgcccatcacttttcctctatgtggatgtagtatgcccgtgtaaatgtatttgtgcatggcacctgtaaagttgtgtgttgaaattggtacacatcattaaggctatgtttgtttctctcctaaattatataagttggattataatgaaaagatagtagagtaaattatcactttgatatcataaataagttaaaataaactacttaatgctagcttattttaacttatttgtagttctaaagtgatgttttactcttctacctttccaccataacccaacttatacaatctaaagagaaacaaacacaccctaagcagtgcattcagatctgtggcatgtgaatgttttttggataaatgtgtaaatctctactacttattaaggctgtaagggtagcctgccgttctgccttcgttc

SEQ ID NO: 168111 - DNA, 308 bp, Zea mays
  Clone ID: MRT4577_84898C.1
gggacaaaaatttcccgccccaacaagaaaaagattccctcatcgggtttccctttggggggcaatgggtttttacctaaaaaaaccccctaaaaagggtttttgaagggtttaaaaaaaagggggaaataattttttttaaagaattaattagcagttttgttaaggggccttttaaaaggtttataaaaaggttaattaactttttggagaacaaaaagagcccccttaaggggggggacacccctaggggcggccgggtccgggggggggaaaaatttggctgccccgcaaaataagggtttatt

SEQ ID NO: 168112 - DNA, 165 bp, Zea mays
  Clone ID: MRT4577_84899C.1
gaagggcacaggccgctccacctcgccgtcgagggaggccacgcggaggccgtggagctgctgctcgacatgggcgccgaagccaacgcacggacaaggcgcagcgccacgcagctccagatagcgaaagccatagagtacgaggcaatcgatcagctcctgtgc

SEQ ID NO: 168113 - DNA, 329 bp, Zea mays
  unsure (1)..(329): unsure at all n locations
  Clone ID: MRT4577_8489C.1
actcactatagaggaaaggctggtacagcctagcagagtaccagagtccgagatattccaggggcaggcccagccctnntttttttttttattatttttttatttttttagggcagagaggcaacatcttgtaatgtggcgattctattccaataggccatgcgatcacatggcacatggcataccaaatccaatgcgttaaccatgatttgacatatgctattttacacgtacttattcaatgagagtgagagagtaactaaaggttgccgatacaaagtgaactacttcttgaactactcattgcttagttgtcacacttttcactc

SEQ ID NO: 168114 - DNA, 430 bp, Zea mays
  Clone ID: MRT4577_848C.1
tgtcaggccacgcgactgcttttattgcaattgaggactgtggcataaaatctagagctcagagattgttgagtagcattaccaattcacttgagacggtactgaaatgcaacgtggaagtcaagattggtccactagcagaattgatggacggagaagtaacattagaggctggtcctaatgtaagaagatacgagtctgacgtcttgagttgctcatcaaacagtgaccgactaaagggagctttagattcaaggagaagctctggtcatcctgatgaagtaaagaaagaactggagacgtacaaagaagttcccatccagactacaaaagaaccaacaattgacgaccagcgactggaaagtgcatggcttcaggttactgagaagcacacaccttgtctggtggatcaggcactacacgatcaaca

SEQ ID NO: 168115 - DNA, 469 bp, Zea mays
  Clone ID: MRT4577_84901C.1
attacacatattttttgaactacatcgatgacaacaaagaggttgacatggcatggagacataagcatgattatggcaccaatcgataaacactatccgtacactagtataaacgggcgagaagagactgagccagggagctatcaggccggcctgacgggctatgcacgctcctggcggcatagtcaagtggtctgacaagggaagatcttgggcattataacaactcggtggccgagtaaggggctacatgttagtgtgcttttaacaagacacacaaagaaaaacatgggagccctccttgatgtcctggagggtgaggactgtaaatgaaaggcttatttgaagggcaactccaggttgggaacaaagcatttgaagggcaattagtggatgaacaatttctgactctattggtacttgcatatctagagcaatggcacacttgccctgggggaatcgtgcttgg

SEQ ID NO: 168116 - DNA, 954 bp, Zea mays
  Clone ID: MRT4577_84902C.1
ccggccgggggaatccaggcagtcgtccgcgtcgaatgccctgtcgagcttcgcccctgaccctcctccccacccagacagcttccgcctcagggtaaccctagccaaatccccaatcccaccggccaccaccacgtattccttgtcggcgcgactaccgccgcaccctcgcctgccacctcctctccgccgttgcagcgctgaagctaggccgtggtcgcatcgttgcatcctcccaaccgaggcaccagcgttgctcctcctcttgcccccaccgtcgccataaggaagcgccagaggaggcatgcactgcggcgaagcatggcgacagcggttaaaccctagcgaggcggctcggggtgaggtggtggatgttgcggtaggtccacaagggccaactccgccgcccgcacaaggcgctcaccgacttcgtcgcgcttctcgtcgatgacacggccgcggtcgttgtcgtctggccaccgtcctccctgtaccttgaagtccttatggccacgcggccagggtcagaacagttgctggaccacgccgccgcacgccaaatgtttaacagaagcacaagcaccgaaaaccaaaattcttatggcctgctctccttagctgcgtgttttcttcttcgtcttgttgtatgttggagcatgataagattttggagctaatcattctgatgactcgtgctgtccaagatgcttctcaacaagatcatcccgctgctggtggaggaggtgctgtaggagacagtaaattcatgtttagatcatttttggtctagctcctaatgcagttcttggagaacgtcttgtcgtgttatcattttctattaaatcaagttgttcagttgggtcatgtctttgtgtttggtttcccattgaactgagtcgcttgtaacacaaaacacaggctcattcttgaatcactggttagatttggttccct

SEQ ID NO: 168117 - DNA, 749 bp, Zea mays
  Clone ID: MRT4577_84903C.1
ggtacgcctgcaggtaccggtccggaattcccgggtcgacccacgcgtccgggaggagggcgctacaggcgacagcgctgcagacgccattatcctctgcttctccgctgcacggacgtcgccgtcgtgctcgtctcccactcgattgcggcctattggtggatccatttaattcaagaaaatggagaccgaacagccagaagaaaccttccccaacaccgaaaccaatggtgaatttggtaaacgccctgcagaagatatggaagaggagcaagcctttaaaagatctagaaatactgatgagatggttgaattgcgcattttgcttcagagcaagaatgctggagcagtgattggaaaaggaggcaagaatattaaggctctccgtacagactacaatgccagtgtttcagtcccagacagcagtggccccgagcgcatactgagtatcagtgctgatattgagacgattggagaaattctgaagaaaatcatccctaccttggaagagggcctgcagttgccatcacccactgcaaccagccagctcccgctcgaatctgatgctgtggaatgcttaaattaccaacattataaaggaagtgactttgattgcgagttgagactgttgattcatcagagtctggcaggaggaataattggtgttaaaggtgctaaaatcaaagaacttcgagaaaacactcagacacaatcaagcttttccaggagtgctgccctcactctactga

SEQ ID NO: 168118 - DNA, 1793 bp, Zea mays
  Clone ID: MRT4577_84904C.1
cagaaccaaacgcggcccccttgccctctcccacttctcctcccccgccccgccgccattccccccccactcttcaccaccgcagcgccgccgcgtacaaggcgattaggcgaagctgcaccggaaggagaaggagagaagcgagagtctccccagccagagcaagccgaatccgaagctagcggagaggagagagggctgagtgaggatgccgacggttacctgcaacgcgtgcaacgcggggttcgacgacgaggagcagcagcggcttcactaccgctctgaatggcaccgttacaacctcaagcgcaaggtggctggagttcctggtgtcacagaggctctgtttctggctaggcaagctgctttggcggaggggagcaagcctgctagcaccccaatgctttacagctgtgctctttgtggaaaggagtacagaagctcgaaagctcacgagcagcatcttaactcgcgatcacatcttttgaaagcctctcaggagcccaatgcctctattgctggtatcacgatagtcaagccacttcctgaacgagtctcacgaagagctccatctgcagtagaggaggatcaagacgacgatgaggaagaagagtgggttgaagttgacccaagtgagatggagttggctgatgagtctacttcaaacatgcaagaagatgagcactcctcaaaatcagatgatgacatggatgaccttgaagagttggatatctcgtcgtgtttcatgtgtgacctcaagcatgacaccatagaagactgcatggtccatatgcataagaagcatgggtttttcatacctgacagtgaatacttgaaggatcccagtggtcttcttacttatgttggactgaaggtgaagcgtgattttatctgcctctactgcaatgacagatgccagtccttcttcagtctagaggctgtcaggaagcacatggatgcaaaggggcattgcaagttgcggtatggagatggtggagatgatgaagatgctgacctcgaggaattctatgattacagcagcagttatgttgattcagaaggcaagcagttgattgctgttgatgacttgaacaacaacattgagctgggaatcggtgggtctgagctagtaataacaaacaagagcgagaaaggcactcgggtcagaacccttggctctagggaatttatgcgctactatcgccagaaaccacggccttctgttgcaccagaccgtgcgcttgcactttcactagcttccagctacaagagcatgggtttggtgacagtgcagtctaaggagcagatggtgaggctgaaagttctccgtgctatgaacaggaccggggtcgagactatgcggaacaagatcggaatgaagagcaatgtgatccggaacctccctaagaattgcccgcactagacaacactgccttctcctgcaccctatctggagcttctcctggcatttatatggtgtcttatggtttcttgtctgtcgctgacaacgttggcgcttaagatatttggaataggactacaccttccatagtttttgttgaactctgtggtgcggaagcagctgttgccattatggcggaaattgctgacgcctcattgaacatgtttagtttttattttgttaaaaaattgggcaaaaaagtttgatgctcatattcatcacaaaaaattgtacttgtcgggttatttatatccgttccctgaatactatctttcactctaatatattaatcactcaaaaagtcaaacaatcaaaaaaaagtttgatttca

SEQ ID NO: 168119 - DNA, 437 bp, Zea mays
  unsure (1)..(437): unsure at all n locations
  Clone ID: MRT4577_84905C.1
cccacgcgtccggtggcgcgtgacggtcggagatgtcccggaagaggcagccgcaggcgagcgccggcccgcggcgcgccggcggtggtggagggggtgagcctagtgggagcacatcgtgcttctccctgccccagcgccccgccgagccgaagcggcagaggatcgcccttcgcgatgtcaacacggaggtgatgcagaacaccattgcgctcgagcccctcgccaggagagtggaagaatttgacaagggcaattggaccgaagaaaatacacagatactatgtgatcttgttgttgaacagattagggaaggaaactatcttcatggccacatgaaaaatacagcttacaaggtcatggctcanaagtattatgaatgcactaaccttttccatgcaccaaagcaacttgaaaatagatacaaccagtgcgag

SEQ ID NO: 168120 - DNA, 359 bp, Zea mays
  Clone ID: MRT4577_84906C.1
agcggggatccttaaagacttcctacgcgtccgctgatacccccatatccgactcggagaagcattttttaaaatggaaggcccactctatttcctccactacctaccctcaccatgctgtcaccgttcttaagaacaacttcatcttcatcaacaaccgttccttttttgctttccaaagtttctaccatcaatacttttaatcatggtcactccaacatccaatttctcaccatacacatattccatgttaaaaatcatgaacatattttttctttatcacacaactcatacatattttatttttaccttacttaacatcaacttatttatatttcttaaaatttaattgctatcct

SEQ ID NO: 168121 - DNA, 1318 bp, Zea mays
  Clone ID: MRT4577_84907C.1
gcagccgcaggcgagcgccggcccgcggcgcgccggcggtggtggagggggtgagcctagtgggagcacatcgtgcttctccctgccccagcgccccgccgagccgaagcggcagaggatcgcccttcgcgagtgagttcgccctcccctcgcgctctctggatcgggtcgcgccgattcgtgcacgtcgctctctgattcgatgccgtggtggcttggactgttccccttgcacttgcattgcagtgtcaacacggaggtgatgcagaacaccattgcgctcgagcccctcgccaggagagtggaagaatttgacaagggcaattggaccgaagaaaatacacagatactctgtgatcttgttgttgaacagattagggaaggaaactatcttcatggccacatgaaaaatacagcttacaaggtcatggctcaaaagtattatgaatgcactaaccttttccatgcaccaaagcaacttgaaaatagatacaaccagtgcgaggctatgtaccagtggatcaattgggccgatggtgaacctggattatgtcggggagacaatggaagcataatagcagatgatggttggtgggaaaactatacacagggaaagtactctgagtgtaaaaaattcaaatatggcatgccttcttacattgaccaactagcagagatgttcggtgtaacaacagttgatgtttggacttcatatgttgctggagaaagtgaggaaccaacatatggtaatttggacatgggtgaggaggaggatgaagtagatattaggagtccattgagcagcagtagtaagaagaggactggcagcaatactgatacagccagtagtcctcctaggaagcataaaagtccaatgattgaatgcgaagctttgatagacaccctacaatctttaaactccaaagacttggatgtggccaaacagatacaagaagaccacatagctaaaaataagaagttagaacaggaaaaagagaataaggagatagataaatgtttcgaactggccaaagaatgtggagcaactgaggagacagaggagttctatgtagccactaggatctttgcagaaagatactaccgttatgtcttcatcaaaatgactacaaatgcagggagaatggcttggttgaagaagtggtgcagggactggactggttgaagcatgtttcagttatattttatttgtgttgagcatcatttgtcatgttgtgaaccatttgtgttaagaacctttattcctatcatcatgctgtgaaccatctttaagatagtttatgggcttgggcttgtgaac

SEQ ID NO: 168122 - DNA, 348 bp, Zea mays
  Clone ID: MRT4577_84908C.1
cggacgcgtggggtcagaagttaaggtcgtgccggttcgcgagcaagctactttcttgagaaaacgattcgttccaggtgctttcggaactttacccgtacccagctttggccgtgtgttgtcaaaactgcctgtgagggcgaattttaacgcctctgtcacagacgatgattatatggcgggcaagctactgtctgccgcctatgagcatcggcacattgctagtttacgaacactcctattggaaacagctgaacaaatgtcgtcaaagccgcatatggatatgcgaaaccaggctatggcgtacaaatatactgcggaggaacttaaagagatgacggggaacgc

SEQ ID NO: 168123 - DNA, 664 bp, Zea mays
  unsure (1)..(664): unsure at all n locations
  Clone ID: MRT4577_84909C.1
acaggttcaagttcgacgcggaggccgcgctcaggtacgccaaggccaacgccatgttcgggcaggtggacacgcagtaccacctccgcgaggtcgaggcgggggcgggccgcgagccgctggcggcgccggaagcagccccgcagcagcgctccgagctgcggctcatggagaccgctgcgttcaggcccggcacctccggcaacggagctccgctgcccatgtccagggccggggccgcgccggcgcgtccggccgtgggggtggggcagccgcccaagtcgatcttgaagaagagcaccgacgagggaagctctgggaccaccagggaggtctcccgtgtgaagttcgtgctggacggcgcggacggcggcacgctcgcgccgccgccgagcgtcggcggcaatggcaatggcgcagacgggggctcaccaatggtggccaaggccgccaaatccgtggggttcgctccttcccagcctctgcagccaccaccgcgcacgctgcagccgcccatgcgcccggcgcaccagcagcctccacgcgccgncgtcacgcagcagctcccgccgcagccgctgcctcagcatctcccgtaccaccagcacccccgcggcgccgacgggccttcgctggcccctcccnncagtcagctgctggcata

SEQ ID NO: 168124 - DNA, 481 bp, Zea mays
  unsure (1)..(481): unsure at all n locations
  Clone ID: MRT4577_8490C.1
agccaccgccgcgcaccaccacgacgaccccacccaccacgccgacgcgcacagcggagaccccgcagccgcagcagagcacgacaccgagcccgaaacaaccgccgccgnggccgacagcgacgacaacgaagcaaaccgaccccacagaccacgcagaggcgggcaccgacagcgccacagaagaggaggccaacccggcggagcagcagcaacaagggcacaaacnccaccgacagccgacacaccggcaccaccaccaccaccaccacttttttaaatgccaccccgccacctaccgagacgcgtcgcgcaagatcccttgatctggccacagcaaaaggcgaaagcaggcagagagccaccttgacatcttgcccgaatccgaagaggaggacagggaggaggcggaggaaatgcccgaggccgaaccggacacggaacaataccataccggaaaaaaaaacaaagggggaggagg

SEQ ID NO: 168125 - DNA, 309 bp, Zea mays
  Clone ID: MRT4577_84910C.1
tacccacgcgtccttgatgcaacgccaacccggaccggcaggggggatttggaaacaagaaggggtgatcaccaccaacgcagagatccggtacagggccaacatagcagggacgcatgacgtggtaagcaggacccacccagagcacccgcagagcggcaacagaggaagggacctcgaccgggcgctcggggaccaccacgccactcataacggcggaaccgtgacaataggggcacaactacgtaaggggagggggacaccgactcaagacgactgaggaccaacaacggtgaaacacaggttgac

SEQ ID NO: 168126 - DNA, 636 bp, Zea mays
  Clone ID: MRT4577_84911C.1
cttcggggttatctgtcagcctctcacacagctattgaagacaggtgcgcacttcacttggacatctgcgcatgacaccgccttttccacccccaagcaacctctcacgccggctcctgcgccaccaccaccaccccctgctcctcccctcacaccggccacggccccccaccccacccgcccactgcccccgcactcccgccccatcggcacccctcccccccctcccccaacgcccccgcgcctcagacccccggcccctccactcccccccaacgccccccccccccctaccgtccccaccccccccccccccccccccccccccccctcccccccccccccccccctcccccccccccccccccccccccccccccccccccccccaccctcccccccccctccctcccccccccccccccccccccccccctcctcccccccctccacccccccgcccctcccccctcccccccccccccctcctcctccccccccccccctccccccccctctctccccccaccccccacccccccctcacccctcctcctcccctcccctcctcccccgcctctccccctccctctccccccccctctcctccccccctctccccccccccctcccccc

SEQ ID NO: 168127 - DNA, 480 bp, Zea mays
  Clone ID: MRT4577_84912C.1
cccacatggctcgaacgctttcatgaagccaacaagtcgatacaaaccctggacagtctacaccatactatacatacctctgtgcactcacaacaactcatttacgccctgattgacagtcagtataccatattaggcgcatttattagcgacacttacataacagtcacaacaactacaacggctaatgctcgcaccactttgctggctactataaggaacatgatgtggttgcatccaaccaactaactgcatcgatttctatttcttattcgcaacatcatttacttctattcaatcagttagttgctgcctacccccagtattctcttccatttatccaactggcactatctaactgtcttgcttatatacatgcacggcacctactaccatttaaactgctagctggagtgagccctgctggcttcttgacacatccacaaatgttgccgctctaccagcatgctaagcctaacg

SEQ ID NO: 168128 - DNA, 121 bp, Zea mays
  Clone ID: MRT4577_84913C.1
agcagctataaaacgagccgcaaccacaggcggctcgccaaacgccgtatcgaattcaagggttttgcagcacaccgacaccgagcaccgaagacagcagcatcaggagcggcccccatcg

SEQ ID NO: 168129 - DNA, 305 bp, Zea mays
  unsure (1)..(305): unsure at all n locations
  Clone ID: MRT4577_84914C.1
cggacgcgtgggcttgtgaggacacaaacctttgtganaagtgcatttgagcaggtggatgctgcccaattaaagcaggggaacttaatcaattatggggtggccattgttggaagaagaaaacccctggtgtaaaaaaagatatatgctgagggacacaaggtgtaggcaccatctgtggaaacgaaaaagagcacccctgttacgaggaaacttttgaagcgcaaggggggactctccctttacgcacacattgaggagcaacttttcagcggacggttgttggtatgcattattttcccccc

SEQ ID NO: 168130 - DNA, 556 bp, Zea mays
  Clone ID: MRT4577_84915C.1
ggtgggtttttttttttttttttttttttttttttttttttttttttttttttttttttttaggatcattaaaaccaaaactttattatgaccatgcctatattattgggcataccacacatgaaaatggggggcggcttactggatttttacatatatagatagagagagatgggtagaggggatttcccaaatattatgaatcaatagtaggggggaatgggaggggaaaccccacagggggtggggcgggagctgggcagctggtactgggagagtccacccatgggcgggatggtttgggccattattatgggcatgggggtgaaaccctggggtgccaacaactggtggtggtgctgcataaaaactgggttgtacagggtggtggtggggggagcggcaccctcaaactggattattatttgcagctggtgggcgaaggactggacctccataaacctcatttggtggtgggaaaactgttgccggagcgggtggaacatggggcttgggtggccacacccggggtaatagggggccccccccagggggc

SEQ ID NO: 168131 - DNA, 174 bp, Zea mays
  Clone ID: MRT4577_84916C.1
acgacgtctgatccctcttaccgcaccttcttgatgatctacccgttcgaaccccaaacccggccctgtgctgtatgctctgagatgattacaaaccatatggttaaccatcttactacacaacatggatgtttattcaagaatcgtcgccttctgcccatattcatcattcca

SEQ ID NO: 168132 - DNA, 357 bp, Zea mays
  Clone ID: MRT4577_84917C.1
ttttttttttttttttttttttggttgtgggttttttttgtgggggtgtttttttttttttttttttttttgccaaagggaaaacgggatcacgtgacacattggtatattcccggttatttcggcccaataaaggttttaacttaaaaatgggggtttttctccacaacaggttgggcaaaaatggacaaaaaaaaccccctctgggaaaaaaaatttcccactttttcaacaaattgagcttgttccatgggcctaattcacaacacctttgatgtctcggcaaaacgggggggggctcattaagggggagggtaaaaaaaatgggatcagggtgggggggagatttcccccggt

SEQ ID NO: 168133 - DNA, 622 bp, Zea mays
  Clone ID: MRT4577_84918C.1
cactcctaagggcgattgggactctcgaggccggccggggctcccttctctctagcgcctccttgccctttctggcggcgcagctccgcccttggctctcctgcgcgcagctgggcgtggcgtggcccgactccggcgagcggttgaagaaaccccgatgccaagcaccttccccaccggagcttcgctgacctgctgtccacgtttctcttcgccgtgcttcatcgtgatggcgtggtgaggtcatggttcgttttcgagcttcgaggaatcgacggtaaagcttcggcgaccaaatgatccagttcttcgagttctacgagatcgaagactctgagcatctgtttggtgaaggtaaggaagaaggtgtcgaggcggatctccaggagttccaggacttcgacgagttcgaggattaggctagcgatctcccccagtcagctgcctatggtgggttgtttacgttggctacgttttgattctgtgcactttgatttatattatgtaaatggctctagtctgtaatattattacttactctttattgtaattcgaaacattgtgctatgatgagtcatttatgtaatcgctgtgcaaaaaaaaaaaaaaaaaatttgcggcc

SEQ ID NO: 168134 - DNA, 611 bp, Zea mays
  Clone ID: MRT4577_84919C.1
gccggccggtccggggctacactgcatcttgccgcgtccacgtaggaaccatcacgcgctcgcctcgtcggagcagccacaggagcatcgtcgcgtccgcgcttcatcctcgccgtcgtcgagtcgtcactttggagctccaccagactccacgaggtcgccttgccgagtcgccgacgtccatggcgcggagttctctgtcgctgtccacgttccatcttcaacggcgagcctctgtgtctccgtgtctagatcgcgatttgttcctgcgcttcgaggaatcgatgatcaagcttcggcgatcaagtgatctagctcttcgagttccatgaggctgaagaacctgagcatctgtttggtgaagattgcctttggtgcgatctatgctcaggtaaagaagaaggcgtcgaggtggatctccgggagttccaggacttcggcgagttcgaggattaggctagcgacctcccccagtcagttgcatgtggtgggttgtttacgttggctacgtttctgttctgtgcactttgattatattatgcaaatgactctagtctttcatattattacttatctttattgtcacaaaaaagaaaaaaaaaggaccctat

SEQ ID NO: 168135 - DNA, 457 bp, Zea mays
  Clone ID: MRT4577_8491C.1
acctacaaaaaagcagagcagagcaaaactagttgctcgcccgaccaacaaacactctgcctccttccttctgcttctcccccgcccgtcctctgatcccgcctccgatggactccgccgcggcgtcgtccctcgtcgtcagccccgcctccgacgaccgcttctgggacggcctgcgcacccgcgtcgacaccatcatcgaggaccgccgcctcgtcgcctccgccgcgtccacgtgcgcggcggcgtccgggcggcccaagcggctccgggaggactcgctgatgctggtccgtggcctcgactccgtcgccgcgtccctcgcgcagctctccgacaccctcaccgccgcccagaagggcgtgaacgctctggccatgtgctcgtcccaggtgagggaacgcgagagcggggaggaggagcccgatgtgaaacgccgttgcaccgcctcgacgga

SEQ ID NO: 168136 - DNA, 481 bp, Zea mays
  Clone ID: MRT4577_84920C.1
ggaccaaggcacaatcagaatcgcggggaccgaaattaagggggccattcctggggggccgggtttatccccgggggcagcccaattagggggggcaagggaagccccccgggcaaatcttgccccaattgttgaggatgagggtgaggctaaggggcatattgggggggatgcccaggaccttggccttgatgggggggcaaaggcacagggcgacatcgagggccaccagcccctccagcagggggcaaaattgctcgggctggggcaggcccaccttgacgaggcctaacacgtgggcccacaccttgagtttgagcgcgttaatcgggcagcggccggggctgggcaacaacggggtcggcaccactggcggcgttgggaccactgggccgggacagaagggttcgcaaccattcgcgggggcagcaaaaaaaagcccagggcaagaaaaaacgcaaccctgggagccattgggggg

SEQ ID NO: 168137 - DNA, 798 bp, Zea mays
  unsure (1)..(798): unsure at all n locations
  Clone ID: MRT4577_84921C.1
caggcgcctgcgcagccgcccgcccagccgctgcgacctaggtcccaccaacctggccgcccctccatggctcatcttccccaaccgctccctccgctttgtacacacgcagaactgctcgcccagcagccctctcgctcgtctcgccgtcgcgccggctgctgtacgcgtcggagccgccgacgctgtcaagcttcgccgcctcgcccgaagcagcctcgccccaccgtgtcgcgccatcgcctcgtccttcgtcgccaagattgcgatccgtttccgagcttcgaggaatcgaagatcaagagttggcgaccaagtgatcaagctcctcgagctctgcgagattgaagattctgagcatctgtttggtgaaggttgcctttggtgcaatctatgcttaggtaaagaagaaggtgtcgaggcggatctccaggagttccaggacttcgatgagttcgaggattaggctagcgacctcccccagtcggctgcctgtggtgggttgtttacgttggctacgtttcgattctgtgtactttgatttatatatgtaaatggctctagtctgtaatattattacttactctttattgtaattcgaagcattgtgctatgatgagtcatttatgtaatcgctgtgtacgtgaatttctgatcctggcacgtacatggttcgcattcggtttaccttcaaaaaaccgggtgtgacaatttgtaaacaaacaattgtagcccatgtggcacaattgactaacagacaggagattatagcccaanaaaaaaaaaaaaaaagcggcc

SEQ ID NO: 168138 - DNA, 240 bp, Zea mays
  Clone ID: MRT4577_84922C.1
gaaataaagtcgatcgatcgggattttccggagacagaaggaccgccagtgagcagagcagcagcgagcgtttatgggtagggtacgtgtacatgcacgggccacatgcatcgcatattcacatcacatggatggtgcacgtcaggtccatgtggtggagtcgctttttcaccagcgatagaacgaaggagggtcgtcgtcgtcgtacgtcgccggcagatagcattggggcccgcgcgc

SEQ ID NO: 168139 - DNA, 621 bp, Zea mays
  Clone ID: MRT4577_84923C.1
ccggccgggatgcctctccctcccgcacgccagcgcccaaccgccccacctcctattcttcttccccaggactcccccacggcctgacgcaaaacacatggcgccccatatttctctcctataaccgcccagcgaccggctcgccgtttgccgcgtcaagcagcaccctcgtctcgccatcgacgtccgtgcagtaggagcctgtgtccggactccccggagcatccgtccaaaatcgccgtcttccttgcgcgcttggtccgtcgtttgtcgtgcgcagattgcaatctgttcctgagcttcgaggaatcgacggtcaagcgttggcgaccgagtgatcaagttcttcgagttctacgagattgaagaccctgagcatctgtttggttaaggttgcctttggtgcaatctatgctcaggtaaagaaggtgtcgaggcggatctccaggggttccaggacttcgacgagtccgaggattaggctagcgacctcccccagtcagctgcctgtggtgggttgtatacgttggctacgtttcgattctgtgtactttgatttatattatgtaaatggctctagtctgtaatattattacttactctttatttgaattcggagca

SEQ ID NO: 168140 - DNA, 685 bp, Zea mays
  Clone ID: MRT4577_84924C.1
ggcgattgggatcatcgaggccggccgggatgcagtccattcttgctcaagatacagaaaagtgccaaccgcccacccatgccggccatttgaacaacccctgcatctccctcgccccgctcccttctctctagcgcctccctgccctcgggcacgaccagccctttccgcggcgcagctctgcccttggctctcctgcgcacagctcggcgtggcgtggcccggctccggtgagcggttgaagaaaccccgacgccaagcaccttccccaccggagctttgctaacctgttgtctgtttctcctcgccgtgcttcatcgtgatggtctggtgagaatgcgatccatctccaagcttcgagggatcgaagatcaagcgttggcgaccatgtgaccaagctctctgagttctatgaggctgaagatcctgagcatctgtttggtgaaggttgcctttggtgcaatctatgctcaggtaaagaagaaggcgtcgaggcggatctccaggagttccaggacttcgactagttcgaggattaggctagcgacctcccccagtcagctgcctgtggtgggtttatttacgttggctacgtttctattctgtgtactttgattatattatgtaaatgactctagtctttcatattattacttatctttattgttattcgaagcattgtgcg

SEQ ID NO: 168141 - DNA, 778 bp, Zea mays
  unsure (1)..(778): unsure at all n locations
  Clone ID: MRT4577_84925C.1
gggcaattgggttcctcgaggccggccggacactgttcatcttcctcaaaccgccactccctcacgtcttgcgcgcagccgccgcaccacgtcctcgcctcgcggcatctcgcctcaccttgctgcatctcgcgctcgcctcgccctcgctgcgctcgtcatcctgcagagaagccccacgtgcacgtcctctggccgagctcccagcaccctccgcaaaagccccatggaggcgtgcgattagagcccctgcccatcccctacgtgttgctgtgcccggacgccgccgcagccgcgtagccatggccgccgtcatgccctgcgcacacgtcacttccgccatacgcccactgctccggcgatcttgttggcatgtgtggtcgctacatcccgcgttgccaagatcgtgattcgtttccgagcttcgaggaatcgacgatcaagccttggtgaccaagtgattgaactcttcgagttctacgaggctgaagaccctgagcatctatttggtgaaggttgcctttggtgcaatctatgctcaggtaaacaaggcgtcgaggcggatctccaggagttccaggacgtcgacgagttcgaggattaggctagcgacctcccccagtcagctgcctgtggtgggttgtttacattggctacgtttcgattctgtgtactttgatttatattatgtaaatgactctangttgtaatattattacttactctttattgtaattcgaagcattgtgcaaaaaaaaaaaaaaaaaatttgcggccc

SEQ ID NO: 168142 - DNA, 541 bp, Zea mays
  Clone ID: MRT4577_84926C.1
cgtccatttttttttttttttttttgtataataacagagtgtatagagattaatgtcacaataatgcagagtatttattacatagtaggaagtcttacaaattaaaatataaacatggatcaaactaaaatccatccttggtgccagaaagtcaactgggagacgccgacctagacctctcacgaacacagcacaacatccaccatgcgcctcatccagtggtacctgttcttgacctgacactttagattccaggtaccagggtgattcttcagatcctcgtgacctcacgacgacgacgatgtggcgaatcactttgcagttcgaggccaaatctggttgaccaacgaataacaccggtctctgggcgctccccagacccgactccaaagcttgccgatggcgaggatacgaggtggcttcctcctctctcttcgataaagcacggtgcgaattccccaagggcggctcgccctggggagtatcccatcgcgcggccatggtgaccttccttgcaccgaggcagaacctcccatatacc

SEQ ID NO: 168143 - DNA, 598 bp, Zea mays
  Clone ID: MRT4577_84927C.1
tgtgcggcgttggagccggccgggccgggaggccgcccaatctcctattctcttctccaactgcctctccccacccatctcgcccatgttcgcgaaacccagagccgaaccgcccccagtcgacctcggctctccggcgagctgccctccatgtcctggccacacagtcgttcgtcgcgccgatcgcccaggaagatctgcgatgcgctcgtcgttgccgagatcgcgattcgtttatgagcttcgaggaatcgatgatcaagcatggcgacaaagtgatcgaactcttcgagttctacgagatcgaagaccctgagcatctgtttggtgaaggtgccttcggtgcaatctatgcttaggtaaagaagaatgcgtcgaggcggatctccaggagttccaagacttcgacgagttcgaggattaggctagcgacctcccccagtcagctgcttgtggtgggtttatttacgttggctacgtttctattctgtgtactttgattatattatgtaaatgactctagtctttaatattattactcattctatattgttattcgaagcattgtgcagaaaaaaaaaaaaaaaaaaggccccta

SEQ ID NO: 168144 - DNA, 672 bp, Zea mays
  Clone ID: MRT4577_84928C.1
cttatagtaataaaacttgaccaactaaaagcaactgcttaaccttaactccacatacagctagtccactttagccaaacgggacatttgctgagtacgttgatgtgtattcacccttgctttacaaaccaccccaccctaggttgtccccactgtactcagtgctcaggaggtgatgctggcaacatggaggactttgaggagttccaggactacgatgagttctagtttttcttagtggcaaacccccagtcggctgcctgtgaaggccttatcttctacgtttcgtattccgcactttgatattggttcttcgggttctacgaggctgaagatccttagcatctgtttggtgaacgacaatggatcaagcagtctcattagctgcgagaagcagacgattcgaatcgagtttttatccttacaaggttacctttggtgcaatctatgctcaggtaaagtagaaggtgtcaaggcggatctccaggagttccaggacttcgacgagttcgaggattaggctagcgacctccccagtcagctgcctgtggtgggtttgtttacgttggctacgtttcgattctttgtactttgatttatattatgtaaatggctctagtctgtaatattattactcactctttattgtaaaataaagcattgtgctataat

SEQ ID NO: 168145 - DNA, 556 bp, Zea mays
  Clone ID: MRT4577_84929C.1
ggtggtggggttttttttttttttttttttttttttttttttttttttttttttttttttttttttttttttttttttttttttttttttttggggggagaaaccacccaatttttatggggaaaaaccgggttgacattggaattttggggggggggcctgggaaaaactaccaaataaaaacctggggaggggaccaaaccggggggggggggggaattgggagcctatcctggtgacattggggaaaaaatccataacccaccattattattgaaaggggggggggagggcaatgccatggaaccctgggccaccaaaagggaaaaaaattggtacaggaggacctttccgggcatgggaggaatgtttactccttgtatttaatggtctcaagcgggaacccaaggatttggaaggaggggggaaaattttccacctggaccttgaggttttggaagtccttggtggtcaacaagcccttggttgaaaccctttggggagcttgcccaactccttttgggatgttaaggcaaaaggggaaatggctggggga

SEQ ID NO: 168146 - DNA, 1044 bp, Zea mays
  unsure (1)..(1044): unsure at all n locations
  Clone ID: MRT4577_8492C.1
cctcgaggccggccgggccgggaacggttcacacttcacagcccacatcaacaaatggccaggaaagaagtgacgctcctgctcttcctcgtgctgcttgtcgcagccgtcgaggcacagctgcacgacgagcctacggcggccgctgtcgggcggcggcgtggcgcgaaggccgccacggcgccgacgcacctccacttcttcttccacgacacggtgagcggcaagtcgccgacggcggtacgcgtggtgagcccgccggcgtcgtcgccgtcgcccgtgttcgggatggtgaacgtgatggacgacccgctgacggaagggccggagcaagggtcggcccccgtcggccgcgcccagggcctgtacatggggtccgaccaggccaagatcggcttcctgcaggccatgaacctcgtgttcaccgcgggggactacaacggcagcacgctcgcgctgctcggccgcaactgcccgctcgacgccgtccgcgagctccccgtcgtcggcggcacgggcgcgttccgcttcgcccgcggctacgcgctgctgcgcacccactggctcgacttcgccaccggcgacgccaccgtcgagtacgacgtctacgtcacggactagctaattaataacgtaccgccttgctagccctcaccctcactgatgagtgccataagcattactacaaagacaggaccacgcaacaacaatggtgccaataaaggctttgaagcatgcttcgccacagagcgcctgctttttcttttaaaaccagcattttcgtttcagcttatatatatatttatagaacgcatgatctgtatccaatacaagcttcagaacccctttatgttttcggaaaaggtcgtccaaaactccggtccagattatgttgctatttgaaaactgaggcaatatatagctttatatcattatatgtgagtgtgtgtttnctgtcagaccccccacttacgccactnngggcgaggccagagnnatnccaggaaaactgaagggttccaatattgttttgctttggtgtcc

SEQ ID NO: 168147 - DNA, 1035 bp, Zea mays
  Clone ID: MRT4577_84930C.1
gggatggcgacgagcccggccttgggggtcttgctgaggtacagcatgtaggacgtgtgctcgacgtgtacgaggcgcacctggcccgcaacaagtaccttgcttgcgacgaggtaatgctcagcctcgccatcggcacgccgatcatgccccaccatgcacggacgtcgtcatcaggaggagagacgcggtgagcatgcgcatcaccttcgtcgtgcgtccaagcctcgccatcatcgagctcgtcgacgccttcgccctctcgccatcgaggagggagccacgccacgttcaccttatggtagtttgtcgcggagactgcgatccatttccaagcttccaggaatctaagatcaaacttcggcgaccaaatgacctatttcttcgagttccacgagattgaagatcctaaacatttgtttggtgaaggatgcctttggcgtgggctatggcgtgggcggacgcgtgggcggacgcgtggggcagagcaaccgcgccaggcttcttctccaggtccgcgtgtgagaaatcgcagcctctgttcatctcccaaatttcaaaccatctcctaccaacgtcgcgaagacctgggatccatggcgcccttgcagcagaccagccggtcttggcaccccaacccctgcggctcccctgccatccgtgtcccctgcgttctagggtggtcgtcccgcgttgttgccgtcgagattgcgatctgttcccgagcttcgaggaatcgacggacaagcttcagcgaccaagagatcgaactcttcgagttctacgaggctgaagattctgagcatctgtttggtgaaggttgcctttggtgcaatctatgctcaggtaaggaagaaggtgtcgaggtggatctccaggagttccaagaattcgacgagttcgaggattaggctagcgacctcccccagtcagctgcctgtggtgggttgtttacgttggctacgtttcggttctgtgtactttgatttatattatgtaaatggctctagtctgtaatattattacttactcttt

SEQ ID NO: 168148 - DNA, 313 bp, Zea mays
  Clone ID: MRT4577_84931C.1
gggggcataaaacttttttgcccaattttttaacaaaataaaacctaaacttgttcaagggggggtcagcaatttccgccataagggcaacagctgtttccgccccacagagttcaacaaaaactttgggggggggggtcctattccaaatattttaagccccaactttgtcagggacagacaaaaaaccataagaccccctataaatgccaggagaagctccaaatagggtgcaggaaaaggcaattttttttagggcgggcaatttttagggggggtccggaacacattggttttaattccgaacttggtc

SEQ ID NO: 168149 - DNA, 396 bp, Zea mays
  Clone ID: MRT4577_84932C.1
gaccctcgaggtctgcccgtctacccaaggcctttcccgcgcgctgacgacctgggctccgttgtctcttctcactgctcccgagcctctttcttctgtatgggccttttccccttttccagtgaatttctcggctcctcatgtccatacaaatgccggcccgctgcttccgcggagaccgccagtccagtagctagagttgggcctccccgcgaactccattggccgcagaacttctccgaagcaggttttggctttgtccctggcttcatgatttttccggcttgtactgtcaattgtctagtgctagagcgccgtaagagacagccttgtgatcgtgaagagtgtgtgtgtaatgttaacagttattactaataattgatttaagattgattc

SEQ ID NO: 168150 - DNA, 273 bp, Zea mays
  Clone ID: MRT4577_84933C.1
ccgtaaagggtaaaaaagacatcatccccccttccaaaaaagggaatgaaaaaaaaaaaaaaaaaaaaaaaaaaaaaaaaaaaaaaaaaaaaaaaaaaatttctatgaacctccacctctctctctctctctctccttcccagttccctccgtcctctccagttccacaaaaggctccgtgcctaaatcgtcccgtgaaaaatgtgttggggatcaaggagtggttaattgaatccatcccctcccgtgcttccctcatcaaggttaaaatgg

SEQ ID NO: 168151 - DNA, 152 bp, Zea mays
  Clone ID: MRT4577_84934C.1
atggtgtggttttacccaacaaaacatccccatgccctgatgaatctggggaaactcaaacctacaggataattttttgggcccttcacatgtcccaatattcataacagggcctaaggattctttaaatatagtcccccaattacaatctc

SEQ ID NO: 168152 - DNA, 972 bp, Zea mays
  Clone ID: MRT4577_84935C.1
atggtgcgtcatagaaatccgtctgtagttgagtccgactcagatgacgacgctccagagattcgtgaagatactcctcctcggtccagatccaagcgcgggcgcggatctggcaatgtcctgccaggaagtgaggccttagggtctcatggggctcgcggtcgaacgaccctgaatcccttcggtcggtctcgacctgcggcaaatccacaagcctgggaggctaccagcgatgatgagggaggaaaagatgacgacattgatctccctcctgccaatgcacccattatccaggggttagttcttcacagagcgcaggcccgttgctctgccaatgagcaagtcattgatttcactgccagtggagggtctgcccttcttcaggacatgcgcttccaaaatcctacattccgagttcgtgatgtcaggatcgatggtaatcgcttctggaccctcctccatgttgatttctataactcagttatccttccgaaaaagcaccagcccatcctacatcatcgtttcattaactgggatggatgcgaagccattggtgatcccaagatgactcaggaattgagagcctgtgagagaaaaaggatgaagaccataatgacattccaatacgattggaatgatgaagtcattgcacaattttattctaccctctgcattaagaacgctgatgaggaaagtccatacaactttccttatctaaatttttttattgaaggcagctggtataaggtcaaggctcagtcctctcaagggacacgatctcgcctcgcccgagcccagcctcgggcaaaggcagccgaccccggaggattcacgtctcacccgagggccccctcaagcaacggacacaccttcggctcgcccgaggcccagtcttcgcagagaagcaaccttggccagatcgccacgccaaccgaccgtatcgcaggagcatttaatgcaaggatcgcctga

SEQ ID NO: 168153 - DNA, 405 bp, Zea mays
  unsure (1)..(405): unsure at all n locations
  Clone ID: MRT4577_84936C.1
ccgcggcagtataagaaacttaccatgattcacctatggacggagagcgaacgcgcgagcaggccatgcttgagaataggacgggcttggctgacggatcgtcgtggggcgagggggtctcggccggacggcgctntcaccctcccaggcgtggcctttccagagaacttgagaccggcccgcggctgaggacgtctctccagactacaattcgggcggagaggccgtcgcgttctaatgctgggctgctcccgggtcgctcgcccgcgtacagtgcccgcacgggcgataccgagggcgaactactacctactgcgggaccgcactaatggatactagctaggcaccgaccttggctgctacatggtcctagctggttactgtgcgagattgttatccggtcac

SEQ ID NO: 168154 - DNA, 502 bp, Zea mays
  Clone ID: MRT4577_84937C.1
gagctcttctcatcttgcctccgcctctctctcttctctctggtctcccgcctcattgttgattcaggcatatcgggaagtcgccatgacggactcagaggattttcttcttcatcgaagggcgtcgacggaccgtccaagacctacccacattgggatgtgaccgtcctcaagagcagcttcatctctcttgagaaccgcccctggaggatgtcttcttctctaactctcacatcgtgatgcatggctcgtgccaaatcgccactgttgatgccagtagtacatattcagcgaacattggctcgaacatgttgtcccttccgcacacgactgagatattccagatgctcagctcactgaacatccgctgcttgctactctacaagatcgatcccggcatgcttgttacttctcgccgacaccgctaatcgcatgatcattagactccgcgctgatggaaactcttgctgggccatcatccaagtcacgactctgaaagcgg

SEQ ID NO: 168155 - DNA, 1258 bp, Zea mays
  unsure (1)..(1258): unsure at all n locations
  Clone ID: MRT4577_84938C.1
cccagcgtcggcatccagaagggaagatgatatcttccccgttctcgccgatggctgcaacaccaacacccactgccgccgttttgctcgcgcgcccgctcatcgcactgtccagtgctttcacctcccctcatcgtgcgcgggtgccgagcggtccctcctccatctcggtgccgccactgaggagtcgatggtgccagtggcgcggcccgctccgatcgctgccccccgaaggatctccggccgagctgatggaagaggactccaagtttgtgccgttgaacgcggacgatcccatgtacggcccaccggcgctactgctcatcggatttgagaaaggcgaaactgtcacgattcaggccttcctgaaagagcttgaaggtgaattcctcaaggtgatccattgtacagaggagatgacaaagcaaaccttatgggatgccatgcacactgagcagcctgatttggaagctgtcaagattgcaggaccactgccaaggatatgcatattttctggtctaactggcgaggagatgatgatgttcatcaacgccttcccagaaaccgggctggaagcagctgcctttgctgcgcttgtccctaacagtgcagagaaggttctcggcgaagtgatcgaggaaataatgggagaccatgagatgctgacaggaaaggactccaaatgagaagaatttgaagcacggacatgcctatcaagaaaattgtcactttgcattctgatatatggcatctaaatctgattcaaattgccgcaacaggaagctgggtatggaaaaaactgttcaagatagtgttgcagaagaaacatcagtttaatttttcttctgataaatacgggtccttttccatctggtcacctccagaatttgagctcctacttactgtatgtcgtacatataatatagtttatagtgaccaacaagttgctcatgactggccagcttttggactttgggggctttctgtccgttgacttttttctattgatttttataatattttatttagcttttcagtacataacaatctagagaggcttctctcagcgtgttttatagcttttagtttatttgtttactcaaaagtcagttgtccagatttttaaacgccaggtcaacatcttatggcttctggctaccagaaactattgaaacaaagctgagataaatattttgagacattcccaatgatggtctcaaaatgtttttttttctttcnnnnnnnaaaaaaaaaaaaa

SEQ ID NO: 168156 - DNA, 368 bp, Zea mays
  Clone ID: MRT4577_84939C.1
caagcaaacccgcaccgagctccattcatcttaaccagcacagcacacctggtgaggcaagaatcatactgataaacttaatctgatgcacatgctttaccatggtcaggcgctatatgccgcagtaccaaagagcttaccgacaataacatccacaccaaacccctatttggactagtgcaatcatgcgtggaagaaggctatggtttcgaccctgaaactctatattctcccagctcgaccccttcagccccatcatatggaaccaggatatacacctactatctcaagtataccaatctccttcctaacaggtacgagctccttgctttctatgaacgacatccacctcttggaaactgggccca

SEQ ID NO: 168157 - DNA, 329 bp, Zea mays
  Clone ID: MRT4577_8493C.1
cccacgcgtccgaccacgcgtccgaaaaaaaatacaaataataaaatataaaggaaaagagatataatactggagggcgctttagaggaaatgaacagaaaggatgtccgactgtgacgtgtctgagctttcaggcgcgttatcctattctctttcatttgccgttgtactgatttcgttaccctacaaagtacctaatgaatctacacattttgcgtctatctatattttcaccttaactgaaccagagtcattgctatgaagccctttgtatacgacttgcataccggttgcgaattaagcgtcacaattggcgcgctcttcgtgga

SEQ ID NO: 168158 - DNA, 279 bp, Zea mays
  unsure (1)..(279): unsure at all n locations
  Clone ID: MRT4577_84940C.1
aanacgggtttgttttttatttttttttttggtagaaaaacatggatgaactgttggatatgggatatatcaaaaccgtacacaaaggttcggggggcttggtatgcggctgcgtgtaaaaactgatgataattgataatctacggacacgaacaaattcggtcactgagcagacgaatgagccagcacgccttttgacgacgatccacaaatcatatacatgcatgaacaggatcgatcgatatggtcactgcccgaacgagagcattttcgcgttta

SEQ ID NO: 168159 - DNA, 226 bp, Zea mays
  Clone ID: MRT4577_84941C.1
cacgcactaaacctaacctccctctgtgtaagcccatacaaatcacaaaataccaaaacaacagctgcacctagaactttctctctcggtccccatcctatatttactacatatcccctcacagaaatctggattccacttgtggagatcctttgccattatttgccaaccaacgtagcatcttgttccaccacttagtttatcaaccgcccaaaattccacaaca

SEQ ID NO: 168160 - DNA, 322 bp, Zea mays
  Clone ID: MRT4577_84942C.1
gaacattcttggtgcattggtcaaaatcatacggggcggaaggcctacttagctataactaggctcaacctcaagcttgattggagtggtgtcatatactacaacgaactacttcgtctattacagcctgaagaaggtgtacaagaagatgttcaagacaaatgagattgtgattgccccaacactagtcatagcttctgactcatgagctatttcaagcacatcaaccatccatgttgacgtggcacgtaagcacatgcaagttggagctgttggtcgcacgaaggtttacaagaacatgcttcatgcctagaagagcatt

SEQ ID NO: 168161 - DNA, 313 bp, Zea mays
  Clone ID: MRT4577_84943C.1
gagctcactagttggcggccgcccttctttttttttttttttgttttttttttttttttttttttttttttggttttttaatacccccaaaagaagcagtgattttttttatttgcaaggaaccaagggattcataaaaagaacaaaccctctacaggggagtccgaaaccacccggaccggactacaagaaacaaagctgttgataaggtacagggtgtaaaccacaaaattggctggtggaagaatccggaagagaccaatttccgggttacgtacccgggcatgctaacctattgctttttttttggggg

SEQ ID NO: 168162 - DNA, 656 bp, Zea mays
  Clone ID: MRT4577_84944C.1
gttcctaccctattccctcctccccctcccgttttcctttgcctttttcctccacacaagtaaggcgctcaacctcgccgtccgcctaaaaaccctagaccggcgatgtccgaccccgagacccccgcgcgcggcggctcccgcagcttcgacttccgagccgaccacgcgctctgctcctacgatgactctcgccgcctcgatcgagcccaagcgccccgatccgggcgacggcgtgcccgattttcgtggtagcagattgtggagggcagttgcggaaccttatgaacgagaaagttatgggaaagaggatgcgctttctgctgttgataaatgcgtgaaatggtatgctgagaatttgctacgatctcttgaggcactcactagacgactttcacaactggagatttattgctatgagctagagagatccataagtgaactacgaaatgatgggcttcgtgatagagactgaccataaggagaatactcttgatacacatcaacatgactcactgaggcctatccaagatcttagggacgctgagtgactcttctgtagctcagaatgaactggcctaatttcagcttactgctgatacatctgaagcgagtgaagatgtaccacacatttattcctgcctcaatcaatgctg

SEQ ID NO: 168163 - DNA, 319 bp, Zea mays
  Clone ID: MRT4577_84945C.1
cctggccggtgcttattgtgtcgatgatgatctgtacgtgcaccttgacgcctgaaacaccgcatgaggcgaggtacgcgtggagctcgactataagttccgcacccaggtgcgggtgcaccagtcccagccctaggacggacagcgagtccatgacgatgtccggatggttgcccgtcacgcccggtgactgcactgggtacgccagcgccggctcgaagtgctccatcggcggacccgtcgtatgtgtcacgccgtcccagaaccctggcatggggtgccacacgtacacctgcatcacgccgtgcgcgtacttggt

SEQ ID NO: 168164 - DNA, 416 bp, Zea mays
  Clone ID: MRT4577_84946C.1
aagtcggaaaaaaccctgaacccctgtcccacccatacataatggcaccgtagcccatgtagagaagactgcatggtttttaaagtggtaaggcgagacaaggtgttggaccaccgcctgaacgcctaggcgaggtaggcgggcaaggtgcctaggcgttggaccaccgtctggacgcctaggcgacgccttaagaacagtggaagactgtgattgtcgccggaccttacacctgtgctttagcatgggaaaaaacgagggaattttttgtaaccctattatgatatttgctcccacaccagtcaaactcaggacctgtgaaatgctacctagtacacctaaccaactatgctaaaggcccttacattactagtgaatagacattgagggccttagcgcgttgtacaactattatt

SEQ ID NO: 168165 - DNA, 356 bp, Zea mays
  Clone ID: MRT4577_84947C.1
ctccatttttctctccagccggcatttctccctacgcactccctccgcctggcgtgttcctctccctctcccatggccgctccctggggatcgcctgcctgctcaagcgcacgcccagccccagcccggatcttcttcctcctgcgccgcgcgctgcggtgctccagccatggccgccgagctcggcctatgctcctccctgcgtcgcgcgccgagatccctacagtcctccctgcgccctgccgaagccctcctatggcgcgcccctcttcctggttcttctctgcgcgcgcgtctactccctcagctcaccacgcgccctgctcctcgctcctccctgtgcgcgcgctcctggc

SEQ ID NO: 168166 - DNA, 323 bp, Zea mays
  unsure (1)..(323): unsure at all n locations
  Clone ID: MRT4577_84948C.1
gttatcccnanacaacccacactactaccctaaccgcccgcctctctcaaaagcgcaggaccagctgagcatgccgcctgtcaccgcactcctgggggttgcggtgatggcggcggtctcgggcccgtcgctcagtgaggaacgcccgtcattactccggcggtttctccccgctccacgggggggggggctnggaggtggagaaggagtggtggaaggagttggttgaataatatgctgttggaacagttgtaccatctgntgaaattgctagtacctatgggagataatattgttcnnacattgntataacnnctctgacg

SEQ ID NO: 168167 - DNA, 715 bp, Zea mays
  unsure (1)..(715): unsure at all n locations
  Clone ID: MRT4577_84949C.1
gccggcctggttgggagggactaccgcagccagcacaggcatagcacccgagtggccaggcatacgtgcaactgtgcaaagaggaggcagtggcagtgggagcctgggctgggaggagaaaaatcaggaaccagtcttacatattctccccaaagcttcccccctgcaagctccacagcacggcagagggcgcgagcaccaactttgcgtccattaactgctcagagcctcagagcatcaggaggctggtggtcgccggcgcagcgtctgcgaggcggcatccgaggccgagggtaccactgcacggattccccggtggccccgaggcgttcgagctcgtcgcgaggttctgctacgctgacggcggacgcggcggggcggtgaccgcggccaacgcgtgcgcgctgcggtgcgcggcggagttcctggacatggcggcggccgcagacgcgcccgcgcccgaggccgcgtccacggccgcgccgagcctggtgcggatgacggagaaggcgctcgaggagatgccgcactggccgtggcacgccgtcgtggacgccgtcaagcagtgccagcgccgcctgctcccgctcgcggactccaccggcgcgttcgacgcggccgtggacgcgctggtgtccctgatggcncgtgccccgccgcccgntgacgccacgcccacgggctcctcgccggagagcacggcgttccgcttctc

SEQ ID NO: 168168 - DNA, 2224 bp, Zea mays
  Clone ID: MRT4577_8494C.1
cgattgggtacctcgagccggccgggatcggtcgccatactacaccacccacaagatcatgcagggactcctcgaccagtacacgctggccagcaacgagaaaggccttgatgtggtgctgcggatggccgactacttcagcaaccgcgtgaagaacctggtgcagatccacactatccagaggcactgggaggcgatgaacgaggagaccggcggcttcaacgacgtcatgtatcagctgtacactataacgagagatcagaaacacctgacgatggctcatcttttcgacaagccatgcttcctcggaccacttggtctccataaagacgacatctcgggcttgcatgtgaacacgcatctccccgtcctcgttggtgcgcagaagagatacgaggtcgttggcgatcgtctctacaaggacatctcgacttacttgtttgatgtggtgaattcttctcacactttcgcaaccggaggcacatctaccatggaacactggcatgacccaaagaggctggtggacgagatcaagatcagctcgaacgaggagacctgcgccacctacaacttcctcaaggtgtcgcggaacctgttccggtggacgaaggaggccaagtacgcggaccactacgagaggctgctcatcaacgggatcatgggcaaccagaggggaacacagcccggggtcatgctctacttccttcccatggggccggggcggtccaagagcgtcagtggccagtcaccgtctggccttccgcccaagaacccaggggggtggggaggtcccaacgacacgttctggtgctgctatggcacggggatagagtcgttctcaaagctaggggactccatatacttcctcgaggaaggtgagagtgacccctgggctctacatcatccagtacataccgagcaccttcgactggaaagccacgggcctcactgtcaaccagcgggcgaaacctctgctgtcaacggaccccttcttcaaagtttcgctcaccatttctgcaaagcgaggtgcccgacaagcgaaggtgagtgtccggatcccatcgtggacgacaactgttggcgcaacggcgatcctgaacggccagaagctcaacctgacacccactggcaactcgactaatggtggtttcctgacgattaccaagctctgggccaatgacaccttgaccctccatttccccattacccttagaactgaggcaattaaggatgaccggccggagtacgcgtccatccaagcggtgctgttcggaccgcacctcctcgccggcctgacacacggcaagctgccagtgacagacagcagccactccaacgacggcctgaccgcaggcatctgggaagtggacgccacaggcgccgcctccgtcgccggctgggtcaccccgctccactccgagacgctcaactcacagctcgtcaccctgaaacagagcattggcgggcgcaccctcgtcttgtcggtgtccatcgctgacgcgaagctggagatgcagcagcagcccgcccccgggaccgacgcgtgcgtgcacgccacgttccgcgcctacggccaggcgggcggcagcagccagctgctgcgagggcccaacgtgacgatcgagccgttcgacagaccgggcatggcggtcaccaacggcctcgccgtcggctgccgtggaggccgcgacacgctcttcaacgccgtgccggggctggacggcgcgccgggctccgtgtccctggagcttgccaccaggccggggtggttcgtggcgacggcccccacagcgatgcacgcgaacgccaccacgcaggtcgtctgccgagccaacaagggcggcgcggcgttccggcgagcggcgagcttcgcgcgcgcgccgccgctgaggcgttaccacccgctgagcttcgcggcgcgcgggacggcgcggaacttcctgctggagccgctgcggagcctgcaggatgagttctacaccgtctattttagcctcgtctccgacggcgagagctgattgatcggtgtgctcctgaacgaacgctccgctagtttcgctgtgcaatgagccattgacgctctgtatcccccatgaactatgtgcaatttggagtggagtaaaaatgtatggcgctagttccatgaatccatcaaaattcccttaccgttaatagcttaaattttggagtaattactctaattttaaagaaggcccccccaatt

SEQ ID NO: 168169 - DNA, 462 bp, Zea mays
  Clone ID: MRT4577_84950C.1
ccggccggggtatcactgcgaacttcctaagtcactgcatccagtatctcgcctacgtcgaccatcgtctctgtgatctactgctggtcgcagaacatgactactgtgctccagagcacgcgaccttcgattaggccgggcgggtcctgcgcgacagaaggcatgagtttaatcggcgcgcataagctagctagctagcacgcacgcacgagctagaagcgaaggagaaaagcagctcttcagctaggcaggagggcacaggaaggaggagatggggtcaaagaggattcagaaggagctcaaggatctgcagaaggaccctcccacctcgtgcagtgcaagccctgttgttttttttttgccccactcgcccgcaacaataatgggtccatctgatagcccatattctggtgaagataaacaaaaacaatccatttttctcctgattatccttacgcaacc

SEQ ID NO: 168170 - DNA, 249 bp, Zea mays
  Clone ID: MRT4577_84951C.1
tttctttttttttttttttttttgggggatgtttagaatttttccggttcttttttgaggcactaaaattggacatgttaaaaacaatgagtttaagtgggagggggttccgagcaccaggttgtggacgctggactccggtttatttatacccgcagatgtcggatgtttgacccttccaaaaccacatttttcaccaaccatccttgattttccttcaatcccttacagtcttctgtgaaatagata

SEQ ID NO: 168171 - DNA, 214 bp, Zea mays
  unsure (1)..(214): unsure at all n locations
  Clone ID: MRT4577_84952C.1
ggcgcctctgnngctgtacgggatgccgctgtncccccaacgtggtgcgcgtggcgcaccgtgctaccacganangggcctcgaattncgagantcgtaccnccgtncgaacctacnatnatgcggacgaccnaacnaaganagaccncgaactgttcgtacgnacccctaacaaanaccttatacggtaccngaataccccggtctcctacgt

SEQ ID NO: 168172 - DNA, 174 bp, Zea mays
  unsure (1)..(174): unsure at all n locations
  Clone ID: MRT4577_84953C.1
annattaaaactaggcgataccacatatttgttttacccgctttgcagcttgcgttgcgggagtttttggcgggctgacgttggtgtgtgcgcggacggtggtcggggattacagagctaccacatgtccgacaccgggggggngactcncactacaggctgtggggcgctgta

SEQ ID NO: 168173 - DNA, 564 bp, Zea mays
  Clone ID: MRT4577_84954C.1
ccggccggagagcccacatccctccccggtcgcctcttctcctccctcctgccttggtccttagtaaagacgatcagatcaatatgctgtcaaagcgagagagaaaaaaggaatgtcgtggatatagcttcctggtcacctcggagaccgtgtacgatgcgcaccctgacaagctgtgcgaccatgagtacggactcgacgctgcacgcctgcctgtggcagacaccccgaacagcaaggtggactgcgagacctgtaccacgacgaacatgcttatggtgttctcctacatcaccaccaaggtcgatgcgagctatctacccagaagatcatggcagcgacacctgcacgcgagcatctacgttcaccatcctacgaccagacgatctacgcctaccgctgcaaggtgctggtgaacattgagcaacagtcccctaacatcgacgcagggcgagctcgtcgcacttcacgatatgaggccgaggagatcgagcgccgagagactcagactcacatgcatcggtttacaccacctgacgactaccctccgagctgatgaccgct

SEQ ID NO: 168174 - DNA, 442 bp, Zea mays
  Clone ID: MRT4577_84955C.1
tagctccccatggcacccgacgcccccctactctcttcacgttgcccagccccctgccctgctccgctcctgctcgcccaagccttctccatcttctcccatggacgcaagtagcaggaagctccgtggcgctggtttcccccttcacgccatccctggcagctcgagctcctccctgtcttctcctccccacgacagccccttcgcgtcacgtgaaccgagctgcagcagcagccccgacgtcttcgcgtcgtgtgctccacccgatctacgcagccccggtcgcgacgacatcaaaccttgccgtcgtcgatgccgcacctcatgctccgcctatacgatgaaatgctagctgattggacgacatgcgcaacccaaatccgattcggccaggtggtttgatgttgtaatttactcgctgcgatttagttgaggatgtgta

SEQ ID NO: 168175 - DNA, 391 bp, Zea mays
  Clone ID: MRT4577_84956C.1
ggttggaacctttgggctgatttatgtgcttggtgtattgttcttttgcgcttttctccctctgtttggtattgctgagtctggtcgggaggtagaataaatttacgagttacggtgaatctggtgctggggacggttgcgagtgatgagcgtaagtctaagccttaggagtctaagctgaagtgaagtccttggcctactatgcctaagactaatgagtagatgtagtaggcggcggcggataggtcggggtagttgggtgatattcatgatgatcctattggtcttacgtttgagagtgagcgttgtcatgttgctcctgatcctgatcctattattgatgagaatcgttagaagagtaagactccgcctactcttcggcctttggata

SEQ ID NO: 168176 - DNA, 584 bp, Zea mays
  Clone ID: MRT4577_84957C.1
cattgggacctcgagccggccgaaattgactatattccctgcctctcgctagcgccttccctccgcaaacggaaggctctcgtgaccaccgggatgtccgccatggagaccgacatcaacgcgccgccgccgcccgccccagctggcgagggatcctctgcggccggtccgtcctcctcccgcaagcccaacaagcgcttcgagatcaagaagtggaacgccgtcgcgctctgggcatgggatatcgtcgtcgacaactgcgctatctgccgcaaccacatcatggatctatgcatcgagtgccaggcgaaccaagccagcgcgaccagcgaggagtgcactgttgcttgggataacagtgagtgggagttccagaaatatggccactagttcctgggcaccctcatgtgatgttggggcttacttctagtgactgctaccactcgagtgtatttttttctgccaaacagctccatcttttactgctttggatgcttgcatgtatcacaggtcaattatcactagtagtacgtccacctgggactgtatttggattgttcgttgagaggatagtagttccattt

SEQ ID NO: 168177 - DNA, 438 bp, Zea mays
  Clone ID: MRT4577_84958C.1
ctcacgcgtccgatccgctgtcgcatgcgctgtatttcaagctctactccatgaagtgcagctccaagagcaacaccagcagggacgcgggcatggacggcaccgcagcaagagccaacaaggacgcgaacaagggcacggccggacgcacggccaacaagccgaggacgaagtccgtgacgaggtccctgaaggcccggctgcagcgcatcgtgcggcgtatgaagaaggatctgaacaaggaccgcgacgcgcagggcgtccgcacgtacgtggccgtctacctggacgacgtgctcgagtacgtggtcgaccaggtgctggaccttgccgacgacaatgacaaggacaacatgatgacgcgcatcatgctgctggacatgctcatggacaagcagctcgacgaggagctgggcaagctgatgatcggcgacagca

SEQ ID NO: 168178 - DNA, 304 bp, Zea mays
  Clone ID: MRT4577_8495C.1
atttaatactatttatataaagttttaaatatacgatgaaataagggatgtaatagtgcatctagtctagattgccttaggagctacccgcaaccaagaactcttccggcaccttcataaatcaagtccagctacaagctgcggcggcttcagcacacataagctgggtgcactctaaccaacagcaatgtactgtgactcaacaaccgccgtcgtcgttcaaccgaatccgaacaggccatacttgaagcaacagtaaatatgacattattacactacaataaacgaccaacagtattaaaac

SEQ ID NO: 168179 - DNA, 1074 bp, Zea mays
  Clone ID: MRT4577_84960C.1
atggcgctccaggggcgggggcgggcggcgggcgcgctccgaggccgtgggcggcaggtcggggtggagtcagttggcagaaccggtgttaccattcctaccgttgcagctgcgaacgagctgtacaaggttgcaaaatcgcttggccttagtgaccatgacttgacgaggatttattgcacaagtcgccacctcaagtttcatctagctgtctccaacaaatccttcaatctccatggctacacagcgtcgacacttcacgaattgcttagagggattctatctttaagtcatgagttcatcaagcttcctgatccagaaaccactctacttgaggatccaaagtggaaatggtttgataactgcttaggtgcactagatggcacacatatcgatgtgaatgttccattgactaaccaaggatttcttgccccataccgatctacatggtaccacttgaatgaatgtgctagtcaaggcaacaatccatctaccgtgagagaattgttcaacctacatcatgcaacagctagtaatgtgatagagagaactcttgggctattgaagatgagatgggcaatcttgaggactagttcttattttgttttagaaaatcagattaggatcatacatgcttgctacatattgcataattttttaagggataggcaaagagatatggacaatgttctaatacatcaagttgatattgtcatctctggtgctcctactaaaaatcaaggagaaatgagtctgattacgcatgttcaatcaactaatgaatggagtgattttagagacaccaaagctagtgaaatttcgaaaagacaatggtcacatggttcgtttaactcaatgtggtgtgagaagtttgacatgcttactgctgcattgaaagatgatggcccaaagctaccctcttctgttgaagttcttgactcactacaagaggttgatggacttgatgaagacacaaaacttgagctttatgacatcctcaccactaatgcatgcaagttcgagtcgatgatggcactcccaaaggaaaggaggaagcgatggcttatgatgtag

SEQ ID NO: 168180 - DNA, 318 bp, Zea mays
  unsure (1)..(318): unsure at all n locations
  Clone ID: MRT4577_84961C.1
ggcacgagcatccaagtaaatataaattcagcggcgaccgacgaccggccggccgtgcacccttcgcactactactgcgcccgcggacggcgtcagaggagcagcacccagccagcagcatggcctgcaccaggaggcagttgtggtgggcatgcctgctggcggcgtggtgctgcgccggcsccgccgcggccgcccagccgccggcgcgcancgcggacccgctgcagagcaggtkccaggnggactttgggaagctgacggactgcatggactacgcgacggggcacgccgcgtcgccctcgtccacctgcgtgc

SEQ ID NO: 168181 - DNA, 113 bp, Zea mays
  Clone ID: MRT4577_84962C.1
tgttgatcttgagcatgcccagtcgccgccggagctcgactcgctcctgtacaacaaatcatatgatgcgagctattcaactggcgatttacttggatggcacatccatcttt

SEQ ID NO: 168182 - DNA, 339 bp, Zea mays
  Clone ID: MRT4577_84963C.1
tttttgtcgcaggttatgtgtgaccgccaccactaatattaacaagttatgtgatagcggcacattatactatcataaaaagcatattaaccgggctagaataaaggaagctcaggtaaatcagatgacttacataccaccttggtggccatgctcttttcgaatcggcttatgcgtgagggacacattaaggcctagttgtggacaactaaagagctctggaatccaactattgctgaagtatctggtctggtctgcatgatatggagctggcctgaacagaacccgctctaaaacgataacgtgggtatctgtactccattggcagcatacgcaaac

SEQ ID NO: 168183 - DNA, 775 bp, Zea mays
  Clone ID: MRT4577_84964C.1
cccacgcgtccgccccgcgtccgcccagcgtccgcccacgcgtccgttggtgggttttcctcgttaaaaaaaacaatcgccaagtttttttaactatacaatccaggaaggaagtcactgtcacttggtgagatcgatggcccgcgtcgccgccgtcctcgttgctctcctcgccctctttgccgtcgcggccacggcgcaggcccctgccgcgtcgcccaagcgcgccccagcccctgcgccacccaagatggcccctctcccgccgccgccgaccagggcccccatggcctccccgccctcgcctcccacgatgtcgccggcgtccgccccctccgccgacgctccagccacgagccccgccggtgcgggatttggcgacgcgatggccccggcgggagcctccgctctgactccggccgccgcgcccgtcacggagaagagcacagccgcatctgcctccgccatcagcttcgtcgccatcgccggcgctgtggcagccgccgccgtcgtgttctagacatccggaagtggatctgaggagctgcagctgcacctgagccgctctgctgttgttgatagatgccctctgtttgctctgttttacgatccattgtttatttatttatttgtttgtttgtcatttagaggtctgagacagagatgaggatgtgtaatcctatcaattttctgaacgggagttgtttctatgctccgcaagcaaaaaaaaaaaaaaaaaaaaaaaaaaaaaaaaaaaaaaaaacccacgcgtccg

SEQ ID NO: 168184 - DNA, 548 bp, Zea mays
  Clone ID: MRT4577_84965C.1
attggttaacgggaatttcatttcttattcctttatcttgaatcttagaacgtaacacgcgaatcacgaatcagccccatgcgccttgcagatcacaacttcacaccttaacctatactttaaactgtgcgcgatacattataaactaaaatcacaactcaaatcacttatttataatcaaaataccaaacaccggacgcagggacagtcaccgatgacggacggacgaccggcccacataccagatctctaagatatatgagagctgtccgcaaccttgaacctttaccaccttgaacctgtacccgttcccaccttccaccttctctatagccttgacatcccctatgccctctgccacctgaccacatactacccgcttgcccacgagccaaggactctccacattacaaactaagaactgttagccgttggcccagcgcccaccattgacagtacacagcacaccgtgtgctgtgtcactaccactaacttgtgaacttctaacttctgatcgaatatggactcgtcgccgttgccgttgtcaa

SEQ ID NO: 168185 - DNA, 440 bp, Zea mays
  Clone ID: MRT4577_84966C.1
aaaaccaggaaatgtaactttttttttttggtgggccccatacctcatccaaaaaactttattcttgaattccaccctaaaccccacctaaaagagggcccccccactgatgcctttcaggcaggaagctgctggcttctccaaaccacgtcggccaaagggcaacaaccgttggacctgtaaaaaggccccggggttagccccaaactcctggataaaaggcatcaacccttcttgctgcaaaaaggaaacactgcttgctggacacagctgcctaaatgggcttaatacctgctgcccgaaattaaccccggggcccactgccgccaactgcttaaatggaacaatgtcctgcttgttaaaacaagacccacctaccccgcccaacggcacaagatggtgggggcaatatcagaaagggccaatgaaaataaatggat

SEQ ID NO: 168186 - DNA, 418 bp, Zea mays
  Clone ID: MRT4577_84967C.1
cggacgcgtgggcggacgcgtggggcctaggcgagccagccctaggccaacctcactcaggcagaggaagagacgccctcactattcatggtggttgtgcaaccgtccatgaagactgttcacgatgcacactacgtcgagcatgtctatctcaatgagcacaaggtgctgccggatttcgacatcaacggcgaacaacgggagatgaagtggtacctcgacactggtgcgttgaaccacatgaccggcgacgcggacgtcttctccgactacaaccacgacgtcgtcgaattcgtacgtttcggcgatggatctttggtggaggtcatcgagcgcggatcgatcctgttcgagtcgaaggatggaggccacagggcgattcatgatgtctatcacatcctgtgtcttcggagcaaca

SEQ ID NO: 168187 - DNA, 233 bp, Zea mays
  Clone ID: MRT4577_84968C.1
accattgcctgtacccttttgctcctcaccctgatacatctcttcgcggaatccttaacccaggctgtgctaactcaaacattctcactatcctgctccctatgccataagatctccatcactctctcttgaagcatcaacaatatctttaattatcgtgtgcacttgtaccaacaagtcccatgatcggtcctcaaaaccatcatctatactactaacaatcgacccttttt

SEQ ID NO: 168188 - DNA, 1249 bp, Zea mays
  Clone ID: MRT4577_84969C.1
gcggcgctcggccgggccgggcaggagccttgtgcattcatcactttcctgactcacctcactcgatcatcctccagtcttgtcgtcgcctgctagcttgaatattacgccagcatctcgccaggaaaatggcgggcactactccgcgccgcttgctcctggtcatcgtccccctcgtcgccgtcgtgccggcgtccgcaaaagactacatggtcggcgactcgtccgggtggaagtccggagtggactacgctgcctgggccaagggcaagccgttcgccatcggcgacacgctctcgttccagtacagctcggcgcactcggtgctggaggtgagcgaggcggaccacggcgcgtgctcggcgagcaacccgctgcggtcgcaccagggccagagcaccaccatcccgctcaccaaggccggcacccgctacttcatctgcggcgcccccggccactgcgcctcgggcatgaaggtcgccatcaccgtctccggcggcggcggcggcggcagcagcagcgccgacaacaccgcgactccgtcgggtccctccgtgcgggcgacgaacacgaagccggcgtccggtggcgcgacgacgacggacgagtcggactccagcgcggctggcagcggcgcccgcctcgcgatgggcctgctgttcggggccgcgggcctcgctgcaataatgggctgaattgaggacccgctagggaaaaggcagtgcggtttcacgaatttcctatttagtttcctgcgttctctgcttgcgtccccgagtcgcgaggctgagtgttcggccgtgcatatttttcgtatacttttgctgtgtttttttggggctattcgttgttcaatactgttgtttcagaataaaatttcatccttgaccattccatgcaactgtttgacagtggacctgcgagggaagagccttttctcactcgtatttaaacggccgtcgtggaccttgacgtcgtcccaagccactcgactcgacgacgacatcatgtggcaaacagaggactcgaacggcccacggcaaagtatcaatgaatcatctgtcttttttttttccttttccttgtctactgatgttgtgggtggaacaagtactcaaagacagtgcaattcaatggggtcatgcagcgcctagccgtggttattctattggactcgggaagttttgcatcttttgtcagtcaaacaatggttgcccgtttatctagggcgtaaaaaaaaaaaaaaaaa

SEQ ID NO: 168189 - DNA, 103 bp, Zea mays
  Clone ID: MRT4577_8496C.1
gtatacacgtcttggcttcaaatcgaactcctcccgcgatcgatcccaatcgaacgcatcaagccgatagcctaatggtggcacttctcgatgtcgggcgcca

SEQ ID NO: 168190 - DNA, 491 bp, Zea mays
  Clone ID: MRT4577_84970C.1
caaccagtcgtacccccaccgaccatgcgtacgcgttgagtagatccagagcagtggggctgggaagtgcccgaggtgagatcaggcgaggtgatcaggtccgcttcctcctcttcctccgttggcttctacacgctccaggacgaggaggagtagggtgatgagggccgcgtccttgaggcatgggagcacgcatacgccgccctaggccaggtgaccagcttttggccgggcccattgctggcgacgagaatccaatagtgaagctttctatgtgttggcagataaactgagcagtgaggggtcttgacggtagcagagtaggtcctggctgtgttggaaggtaaactaaacagtgaggggtcctgacgtctgcaaagagcactgagaaaaggcacatgaggggcagtaagaggacagcaagtcctactgttgttggaaaataaattgagcaagtgctggtggcggctatagaaaaaggcacgaggggt

SEQ ID NO: 168191 - DNA, 664 bp, Zea mays
  unsure (1)..(664): unsure at all n locations
  Clone ID: MRT4577_84971C.1
cggacgcgtgggcgcccgcgcgctccacacgttcccgccgtggcgctcgcctttcatcctggtccccacgcctccttccatcctcgcccgcgcgctccgcacgtacccgccgtcgcgctcgcctccctcctctttgttgcctccgcgtcggcctccaccccgctatgacgcaagcaagggcggcgcttgccatggcatcgacgggaaccaggcatcactcttcctatctctcctgcttcctcctcctctcccctgctgccacgaggcgcggctcagctcctcctcgaagcgggcggggaatccaggccgcgcggcggcggggcggaggaggaggaggagcgggggatgatggggtgcctcttcggctgcttccgcgcgtccggcgacggcggcgaagcgaagggcgccggagaccgcaacacgtccctggcccccgcgacgacgacgacgatccaacaggatggtacgggcaggaggatcaggccaccgtcgaggaacgcgctctccgccgtgttccagcgagaagatgagggatcgagggcggcgcangcggcgagctcgtgggcggaacagactggtgagagcaagaggatggatcaggagcttgagccccagaccattatccaaaaaaactgtggtgcattacttgaaactacaaacaaca

SEQ ID NO: 168192 - DNA, 820 bp, Zea mays
  Clone ID: MRT4577_84972C.1
cctcgaggccggccgggccgggaattttcacttggcctcctcatcttttcctccttttcggccggcgtcatcgccgaacgcggatacgccgatacacataccccggctagctgtctggactctggagtgtcctccgggctaagcaaacccatagcccgatcagatcgatggcaccggcgccccgcgcttccagcttcttctcggtgctcctcgtcctcctctttgcgctgtcggtggggtgcgcgtccgccaccggcgtcttccaggtgcgccgcaagttcccgcgccacggaggacggggtgtggcggagcacctcgcggcgctgcggaggcatgacgccaaccgccacggccggctccttggcgccgtcgacttggccctcggcggcgtcgggctccccacagataccggcctgtactacacccggatcgagatcggctcgccgcccaagggctactacgtgcaggtggacaccggcagcgatatcctctgggtcaactgcatccgctgcgatggctgccccaccagaagcggactcgggatagagctgacgcagtacgatccggctgggagcgggaccacggtggggtgcgagcaggagttctgcgttgccaacagcgcgggcggcgtgccccccacgtgcccctcgacgtcgtcgccgtgccagttcaggatcacctacggagatgggagcacaaccaccggcttctacgtcacagacttcgtgcagtacaaccaggtgtccggcaacggccagaccaccacgtccaatgccagcatcacctttgggtgtggtgcttagcttggtggggatttggg

SEQ ID NO: 168193 - DNA, 2292 bp, Zea mays
  Clone ID: MRT4577_84973C.1
gggtacctcgaggccggccgggcttttcggccggcgtcttcgccgaacgcggatacacatacataccccggctagctgtctggactctggagtgtcctccgggctaagcaaacccatagcccgatcagatcgatggcgccggcgccccgcgcttccagcttcttctcggtgctcctcgtcctcctctttgcgctgtcggtggggcgcgcgtccgcaaccggcgtcttccaggtgcgccgcaagttcccgcgccacggaggacggggtgtggcggagcacctcgcggcgctgcggaggcatgacgtcggccgccacggccggctacttggcgccgtcgacttggccctcggcggcgtcgggctccccacagataccggcctgtactacacccggatcgagatcggctcgccgcccaagggctactacgtgcaggtggacaccggcagcgatatcctctgggtcaactgcatccgctgcgacggctgccccaccaggagcggcctcggagaacggctcgatctaaccatctccatggccaggccagaccaggcgatgcgcgatgctcccatgccattcttgtccctctggtccttgtctgcttggtttgatgatttttgtcgtgaagaatcgtcctcccctgcacattggtttggtggcagatagagctgacgcagtacgatccggctggtagcgggaccacggtggggtgcgagcaggagttctgcgttgccaacagcgcgggcggcgtgccccccacgtgcccctcgacgtcgtcgccgtgccagttcaggatcacctacggagatgggagcacaaccaccggcttctacgtcacagacttcgtgcagtacaaccaggtgtccggcaacggccagaggaccacgcccatttcctgctgctcctttgggtgtggtgctcagcttggtggggatttgggatcctcgaaccaggcccttgatgggattcttgggttcggccagtcggattcgtcgatgctatcgcagttggctgctgctcgtagagtgaggaagatttttgctcactgcttggacactgtgcgtggtggtggcatcttcgctatcgggaatgtggtacagcccaaagtaaagacgacgccgttggtgcccaacgtgacacactacaatgtcaatctgcaaggaatttctgttggtggtgctacacttcagcttccaacaagtacttttgattcgggtgacagtaaaggcactatcattgacagtgggacaacactggcatattttccgagggaagtttataggactttgttggctgcggtctttgataagtaccaagatctgcccttacataattatcaagacttcgtgtgttttcaattttctggaagtatagatgatggatttcccgtaatcacctttagttttgagggagaccttacactgaatgtttacccagatgattaccttttccagaacgggaatgatttatactgtatggggttcctggatggtggtgtacagactaaagatgggaaagatatgctcctcttaggagacttggtcctctcaaacaaactagtagtttatgacttggaaaaagaagttattggatggacagactacaactgctcctcgagcattaaaattgaggatgacaagactggctcagtgtacactgtcgacgcacaaaacatctccgctgggtggagatttcaatggcacaactccttaattctgttgatattaataaggacaatctggagctgtttggttatagcctaacgctggatctaggactaaagccccgtttgtttccttccaagattatataatccagctcgtggattatataagcacctattgacctgcttatagattatcataatctagatatccggattatataattcacctaataatctatattgtttgtttaactctcaatttatttaagctagattatataatatagatggtaaacaaacaaggcctaaaacatattttctgtaacaaaaaatagttgagttcagaagttcaacaaagagtacagaatattatatagattgtcccttgtgttttagacgtaaactgtagcaacatatcaagctactaaaatgactttagttgatgtcaggctgttttgcaccttctgcgtttctatcagatatatcatcaggtgtacgtgttactgtgcaatgtaccgtctgttctggaaggatttgtgtaaatgtaataattcaatcgtagaaaacaaaaaaaaaaaaaaaagggcggcagcctacaaggaacctcaacaacccggaaattatttccg

SEQ ID NO: 168194 - DNA, 303 bp, Zea mays
  Clone ID: MRT4577_84974C.1
cccacgcgtccgggctgctttatgacatcaatggtcgcttccgtcttcgaccaatcagggatgacgatgccaagttcgagctctgcaatgtgatgtccgttcagtttggccagtaggtgatcacctacctgaacagctacgacggctgtaccatccggtacaccgacgcgctcatcaaggtcaacgtcactatcagagatcgatgtggagaccaacaagatcatggacttcgtcgagtttgacgtcgtcaacgtggtcatggtgaccggcgggagtatcaccgggcgtgtaggtgtgatcaag

SEQ ID NO: 168195 - DNA, 444 bp, Zea mays
  unsure (1)..(444): unsure at all n locations
  Clone ID: MRT4577_84975C.1
ggaaannccggggnggacccgggcgtccgtattaaaggaaaataaaaaaatctttaaatttatttttttggctaaggggggacctcgtgggtgggggctttagggccaaaaggggaaaaaacctatataatgatggaaaataacctaatacccaccctatggtttcgtttggtcgagaccctacctaaaaaccagtccctatgggaataaatccatctatcaaaaaggggtagatctatcataatggttgaagcacctgcatttttttctctacaaaaaaaaccggtttctaggctgtgaagcaaaacctaaggggttgtggataaaagggagggttgatagattgaaggacgaagattaagaacgatttcgggttcccatatgtatggtctatgaattacatcttaaaaaaaaagggcattgtgttaaagcttcaatttaatt

SEQ ID NO: 168196 - DNA, 214 bp, Zea mays
  Clone ID: MRT4577_84976C.1
gcgaattctgtgcctcgtgtgggaagatatcttttatactttgatattggaaaaggcacttagtgatcgggaaagatgcccgccgagttgataatctatgccaacgcatttatttgagttacaggctattagagggaactagccactttaaagaattgcatgagattattgaagatgcaaaagcaaacattggaaagtgaggttgggccacttt

SEQ ID NO: 168197 - DNA, 216 bp, Zea mays
  Clone ID: MRT4577_84977C.1
attattatctaccacatttgcactgtgggggtttgttaatcatttcttgggccccgcttggatcaaaacatcttcaggtgacccctccgttagaattgggagggagtactgaaccggtgcccgttttaaaccacagacacacttcgggaaagcaggaacacaaaagggggccgctacatcatgttggccagaggtgagatgatacaaaatctgtct

SEQ ID NO: 168198 - DNA, 629 bp, Zea mays
  unsure (1)..(629): unsure at all n locations
  Clone ID: MRT4577_84978C.1
cattgggaccctcgaggccggccgggatcgtaactcccattcggtgctcttctcctccagacgccgccaggagaaggtccacttgccccacgccgccgcatcacaactcgcagatgtgtctagtagctaccgacccgctacctggtcctgttcatcacagctcaccttcggtcctcatcggactctagggatgaaccctggactacttctagaagtgaagcggctcagatgatcatatgttataactgctgctgctggtcaatagcacagcgtgactgctcacctccatcgagcctctgctgatacggtccgatgttcctcaagtagtgatgagtaccctgcgtgtacatagaaatgtatccagcctggtcccagatgtgtaacctgagcatgatcctcgaacgtcccagatctccgtttcggcagctttagcagcattgactggcactgttggataaatacagctgggtctctcccttagggcggcctgacctgatcgacatgatcttggcatgtactatcgatccctgcgctaagatggccatgtcgatcactgtgacaagcaacgcgtcgttgacagattccctgtagctctgtaatcctaagatgnaaaagctgtccgagctgag

SEQ ID NO: 168199 - DNA, 365 bp, Zea mays
  unsure (1)..(365): unsure at all n locations
  Clone ID: MRT4577_84979C.1
gaaacaggagacgagcgnaggaacncgggggcagcgggggccggccgaccncaaagggcgaacgcacgagggacacccnnngagcnnggagcggacaaagcatagaaccgcgagggggcaggagcaaggcgggggggggggggganaaaagcgaagatatagaggccggggacaangcaacnnggcgccagagggagacagacacaccaggaanacagccaggnggggaaagggcgcgagggcaggcgngaaccaaagggcactatttgaggggaaagttgctggaggcaatggtgagcgagttctcaggcgagatggtgaccgtgtgggccaggtatttgattgctgcaggatgctaaccttct

SEQ ID NO: 168200 - DNA, 925 bp, Zea mays
  unsure (1)..(925): unsure at all n locations
  Clone ID: MRT4577_8497C.1
gcgggttgctgtcactcgctctgaggcctcgacgcgctgctagctgagagccgaaagaaggaatcctcggccggcagcaggagaggagagccaccgtttgatcagcgaccgggcaagagcaggccgcggccggccaccccgcccgtctctgtccgaccccgcaccagcgactcgccgagtgcaggcacaagaggggggctccatccatgaggcagccatgctggtgctcatcaacaggtatttcaggagcaggaacagcagcccggccggaggaggcggcgaagagatggcgccggcggcgacttccagcgaccacctctgtttgccgggctgcgtgcccgtgcgcgccaagcgggcctcctcctccgccgccgccgcggccacggccaccacggcgcgggcgtcgcggcacaacttcgtcagggccgcggcgtcgggcctgctggcgggggcgcacttcaccaaccacgagtcgctgccgccgcttccctacgcgtacgccgagttcgtcgcggcgttcccgcagtacgcccacggcgcgctggcgcgggcggacgcgatccggggcgaggagtaccagcacctggaccgccacgtctgcctggactacaccggcatcaacctcttctcgcacgcgcagatgagcgcctccctgccgtccacctcctccgcgccgcccgcctggcagccgcccttcttcgacatcgcgtacaagtccacgagcctgcgcgcgcaggtgcaatgcgnggacaacgccgcgggncgcggaagggcggcgtccggcgccgccgtcacccggcgcatcatggcgtcgctcaagatcccccggngacgatnacgccatggntgtgcacggccacagggaacgcggcgttccgcctcctcgncgagtcctactcgttccagccaggcaagagctgcttcc

SEQ ID NO: 168201 - DNA, 851 bp, Zea mays
  Clone ID: MRT4577_84980C.1
gccggccgggaattcggcacgagggtttcggtctccggaaaggaaagcaaaagaggagggggcgagagaagaaactgatttttggcgaggccaagccgggggtgggattaccgggagcacgctgactgggatcacggcggatggcggcggcggataggcagttggtagttgccgtcgaggggaccgcggcgctggggccctactggtccaccattgtggcggagtacgtcgagaagatcgtgaggagcttttgtgcaagtgaactgccaggccagaagcttgtgggtactccgcctgaacttgcattagttgtttttcatacccatggaccttacagtgcttttgatgtgcagcgaagtggatggacaaaagatgtcgatgctttcctatcatggttatctggaatattgttcagtggtggaggattcagtgaagcttctacttgtgaaggtcttgctgaagcattgaagatacttcaaggcaatcctaatacaacccaaggtcatcaaaaccatgaagcacaaaagcattgcatacttgtcgctgcaagtaatccttatcctctgccgacacctgtatactgtcttcctactcaaagtactgatcacaaagagaacattgagacatcaaaagaaccttcaattgctgatgctgagaccgttgcaaagtcatttgctcagtgctctgtctcattgtcagtgatatctccaaaacagcttccaacattaaaggcaatatacaatgcgggcaagcgaaatcttcgggctgctgatccatcagtcgaccatgcgaaaaatccacacttccttgttttgctctctgagaatttcatggaggcacggactgctctt

SEQ ID NO: 168202 - DNA, 1285 bp, Zea mays
  Clone ID: MRT4577_84981C.1
gcgtgcgcggagcgcgtcctggccggggtcctcgcggcgcccggccgccgggacgcggaccagcgcgcgctgctggaggccgtcgtggacgcgctgcctcccgccgccgacgcgcccctcccggccgccttcctctgccgcctcctccgcgccgggggcaccgccgaggcgtccgccaagacgtgccgcgacatggagctccgcggcaggcccgtgctggaccaggccaccgcgggggacctgctgggcgtcgcgctcgacggcgccggggagcgcgtcgtcaacgcgggcaccctccggcgcgtcgtcgccgcgtgcgtcgagcgccagcagacgcagcagggccggcgggcgtccctggccggaggtccggcaggtgagctcagcgcgctggagaaggtggcgaagacggtggatgaggtggcggcggagatggcgtcgcacgagtcgctgcctatctccaagttcgtgggcgtggcgggcgcggtgcccagggacgcgcgcccgtcgcacaactgcctgtaccgcgccgtggacatctacctcaagacacacccggggctggacgagatcgagcgggagaaggtgtgcagcgtcatggacccgctcaggctgtcgtaccaggcgcggatgcacgcgtcgcagaacaagcggctgccgctgcaggccgtgctcagcgtgctctactacgaccagctgaagatccgtagcgcggacggcagcggcggcacggaggaagggtgggagacacagtcggccgccgggaaggcccgtgcgcaggcgcgggcggacgtgtcgctggcaagggagaacgaggcgctgcggttggagctggcgcggatgcgagcgtacgtgtcagggatgcagcagagcagcaaggggagcgggtcgaggccatcgtcgtcatcgctggtaccaggcccagcgacggcgacggggaagaaggcaagcttcttagggtcggtgtcgcggacgttgagccggctgaacccgtttaagggcgggtgggccaaggacacgaccagcattgccgatgggcgtgacaggacttccatgcatgtggtgaagcccaagaggaggaggttctctatcggctaattattttgtgatatatcgatatgatcgtgtcatcgtgtgtgacttatatttaatcactgtgattagaagttagaacagggggtgtggatgtttgtactttctctgtccatgaaaaaaaacaatatgcactacaaaggcaaaagtgtaggttaaaaaaaacgcggactaacgagtaaatagtatttct

SEQ ID NO: 168203 - DNA, 246 bp, Zea mays
  unsure (1)..(246): unsure at all n locations
  Clone ID: MRT4577_84982C.1
ccgggnaaaaaaaaaaaaaaaaaaaaaaaaaaaaaaaaaaatttaaaaaaaaaagaaaaagaaaaaaaaaaaagcggccgcggcccctccagctctaggttccgtttccctgagggtgagggtgaacgcttgcgctaggcatggtcatggcctgtagccggtgccagagtgaaatcgcgatcacattcacacacaccatccaaatccgaaaccgtaagcataaagggggggggcggctaaggataa

SEQ ID NO: 168204 - DNA, 311 bp, Zea mays
  Clone ID: MRT4577_84983C.1
ggtggcgtgcgcttggaagatgccgctacgtaatctcgatgctcgctcgaggtgtctaccactgtccacctacaccttcacctcctccaccttacatgaagccatactactatcactcaccatcgactccttaccactattagctagcatacgctctatggatatgaagaatatgtgcaacgaatacaagaaagcgattgaaaaggaagaagaagcgcttcgcgatgcacgaaagagaagaattggaagcaaagtttcggcgttttgtcttttataaaaaaaatgttaaatcattataattctctatgata

SEQ ID NO: 168205 - DNA, 393 bp, Zea mays
  Clone ID: MRT4577_84984C.1
tcgtttacgcgttcgggagcagcagatgcacggtcattgaaacggcaatcggcaaacctcaatggagccacgaatgacaagaggtttctttactttattatgacgagacgacaaaatcacacccacctataccagaacatatattcacagaagccaaggattacatgttgacatgctgacacgaaggaaccagaaaagagatctgaagcatgagaattgtagaaaaacccatacgctacacgagtaatgcaagatataagggagttgaataatgctggacccaaagaaacatacaaaaatgagctcactgcctatgacaggggctactgtcgacttagactagagtacacgggccaagctgctcagtctgaatagttacaagtgatcagacac

SEQ ID NO: 168206 - DNA, 341 bp, Zea mays
  Clone ID: MRT4577_84985C.1
gtcatgaagcctgagctagatggggtgaatgagcatgcgctcggagacaccaccaaaggataggtggcaactgaaccagactacaatcctgcgagcaaggaacatagagcaccactaagatgagaaccggcatgccggggaatttggaaaagggactactggtgcacagggtgatgcaaacatgaatgttaccaacagccagataccattgacagcaacaaactcaagcaaatgaagacgatgtacaagttcacgctcccaccaaatgatcaaagacagcgggggcacgagctcaccaagagcaaccgaaacgatgtcagacgcgatggttgacgaatcac

SEQ ID NO: 168207 - DNA, 280 bp, Zea mays
  Clone ID: MRT4577_84986C.1
ccccttcctcaaaaaatttttttaaaaaaatcaaagccccttggtcgctgcccgtcaacaaagggggggtggatattgccccctggggcccattttttgcgcccttttctggtttttccccctttttacatttgccgggcggggcccccccccttttgtttttttggagcccaaaaaaggttttccatcccgcttccatgggcgggtcctgggccccccgtgttgtgccccaattttatccggcttgcaggaaccaacatggggaccttttatttttttt

SEQ ID NO: 168208 - DNA, 254 bp, Zea mays
  Clone ID: MRT4577_84987C.1
ccgtccgaaaaaaaaaaaaaaaaaaaaaaaaaaaaaaaaaaaaaaaaaaaaaaaaaaaaaaaaaaaaaaaaaaaaaaaaaaaaaaaggggcgggccggttttagaaggaatccaagctttacgttaccgcgtcgcatcgcgacggtcattagcttcttttttatagggtgtccaccttaaaatctcatattcacttgggcccggtcgttttctaacaacggtcggtgaactggggaaaaaacccttggcggttc

SEQ ID NO: 168209 - DNA, 469 bp, Zea mays
  Clone ID: MRT4577_84988C.1
cgaggccggccgggccggaacttcttctcctctcgtctcagccagctagcgcctccatttcgagatctgtcgctggagagaaccacaccaacgataggtcatggagtgaagagaagtatccacaacgtacaatatgccctatcgtgtcacgccaagctcggagaagtccactatctcaggtatacctctatgaacaaccattgcacggcattgtcagagcgtagcgatcaagaggatcgagatggaggatgctgaaatgaacacgcggaacttcaagtactcttgactgctcatcaagctcaaggctgagcgcgacagaggtatcaccattgatatcggtctgtataagtttgagaacaccttttttttttgcactcacacccatgccggtggacaccgtaactgcatcccgaacatgatcaccggaaactcccaagctgactgcgatgcccttatcattgactccacc

SEQ ID NO: 168210 - DNA, 380 bp, Zea mays
  Clone ID: MRT4577_84989C.1
ccctcatccgccatcaatctcaggggcgccccagccaccccgcccttcactcacctaaccatggcggagcgcggcggccagcgtggtggagagcgcggcgggttcggtcgtggcttcggtcgcggcgggcgcggtgaccagggtgggcgtcgcggcgggcgccgtggcccgcgccaagaggaagagaagtgggttcccgtgaccaagctcgggcgccttgtcagggagaacatgatcaccaagagcgaggagatctacctccactcgctccccggcaaggagcaccatatcgcatagaccctcgttccgaggctcaaggacgaggtcatgaagatcacccccgtccagtagcagacccaagcccggcagcgcactaagtt

SEQ ID NO: 168211 - DNA, 292 bp, Zea mays
  Clone ID: MRT4577_8498C.1
cgtatgctcatcgctccgtctatggccgactctcaccacgcagccgatcggtcccacccctgatacggctgcgcacagcgtcatagcaaaggagagaatcctcctaccgtggatggtcaccgtctgggtgacatggactcgggctgggatatcctgcaagaactcgggtgtcgtctccgcggattttgcatcactcgacgtctgtggcggtcatcgtctaggctcttctacgattcctagctgggtacggtgtgtactcggaagtgcggtttacacgcacgtgccgctctac

SEQ ID NO: 168212 - DNA, 1250 bp, Zea mays
  Clone ID: MRT4577_84990C.1
ttcccggccctcccaaccctcgcgccgccgctccccagcacaccgctcccagcgcgccaaatcggcggcaacctcggacccttcactcacccagctatggcggagcgaggcggcgagcgtggcggcgaacgcggcggcgagcgtggcggttttggccgcgggttcgggcgcggcgggcgcggcgaccgtggtggtcgccgtggtggccggcgcggcggccgccagcaggaggaggagaagtgggtgcccgtcaccaagctcgggcgcctcgtgaaggagaacaggatcaacaagattgaggagatctacctgcactcgctgcccgtcaaggagcaccagatcgtggagaccctcgtcccggggctcaaggacgaggtgatgaagatcacgcccgtccagaagcagacccgcgccgggcagcgcacgcgcttcaaggccttcgtcgtcgtcggcgacggggacggccacgtcgggctcggcgtcaagtgcgccaaggaggtcgccaccgccatccgtggcgccatcatcctggccaagctctcggtcgtgcccgtcaggaggggctactggggaaacaagatcggccagccgcacactgtgccctgcaaggtcaccggcaagtgcgggtccgtcaccgtgcgcatggtgccggcgcccagggggtccgggattgtcgctgcccgcgtgcccaagaaggtcctccagttcgccggcattgaagatgtctttacctcgtcccgtggctccaccaagacactcggtaacttcgtcaaggcaacctttgattgtctgatgaagacctacggcttcctcactcctgagttctgggccgagaccaagtatgccaagaccccgttccaggagttcaccgacctcttggctaagccgacaaagggtcttctgatcgaggctcccaccgagacagtggaagcttgaacgtcttagtttactgttccaagtgtcgcgaaaagagttttctgtactagctacatattttaaatgttattttgaattatgatgagaaaccaaggtatgcacccaagataattgatgtcctgttgttttcgtatgtgggtatcgaaccccaaagatgtcctattgttttctgtactccgcatgtaataaaaatctgtcctgcctgtgttaggccatctgcactagtctacgcatagattatccaaaaacactgttctgcattaaactcctaaagataagaaaaaaaaaaaagggcggccgctcgcgatctagaa

SEQ ID NO: 168213 - DNA, 913 bp, Zea mays
  unsure (1)..(913): unsure at all n locations
  Clone ID: MRT4577_84991C.1
cattgggtacctcgaggccggccggnattgaattacaattagtgtttataaaaaaaaaaaaaaaaaaaaaaaaaaaaaaaaaagttggaggagatctacctgcactcgctgccggtcaaggagcaccagatcgtggagaccctcgtcccggggctcaaggacgaggtgatgaagatcacgcccgtccagaagcagacccgcgccgggcagcgcacgcgtttcaaggccttcgtcgtcgtcggcgacggggacggccacgtcgggctcggcgtcaagtgcgccaaggaggtcgccaccgccatccgtggcgccatcatcctggccaagctctcggtcgtgcccgtcaggaggggctactggggaaacaagatcggccagccgcacactgtgccctgcaaggtcaccggcaagtgcgggtccgtcaccgtgcgcatggtgccggcgcccagggggtctggcatcgtcgccgcccgcgtgcccaagaaggtgctgcagttcgctggcattgaggatgtctttacctcgtcccgtggctccactaagacccttggcaacttcgtcaaggcaaccttcgactgcctgatgaagacctacggcttccttactcctgaattctggagtcagaccaagttctccatgactccgttccagcagtacacggacctgctggcgaagcccaccaagggtcttgtgcttgaggccccaactgagacagtagaggcttaggatggtttgtgctgtctaaatgcactttctatgttatagttaagaactgttgtcaactttcaaaaaaaaatttgggttttgttttgccctggatgttntttgttgtcaagtttttgatataacagactcttttttaatcagtgaatgctacataatcatctcaaaaatctcatgataggcttttttc

SEQ ID NO: 168214 - DNA, 1109 bp, Zea mays
  unsure (1)..(1109): unsure at all n locations
  Clone ID: MRT4577_84992C.1
gaacggcccgccctttagttctagatcgcgagaaaaagcccttatcatgagatcattatgtagcattcatcgataaaaagtgccatagcataatccaaaacttgacagtacagaacagcatccaggacaaaacagaacccaaaatcgactccggcagttcttagctataatatagataccgcatttagacaagcacccgacgagtagagctctccactcaaaccatcctaagcctctactgtctcagttggggcctcgagcacaaggcccttggtgggctttgccagcaggtcggtgtactgctggaacggggccatggagaacttggtctggctccagaattcaggagtgaggaagccgtaggtcttcatcaggcagtcgaaggttgccttgacgaagttgccaagggtcttagtggagccacgggacgaggtgaagacatcctcaatgccagcgaactgcagcaccttcttgggcacgcgcgcggcgacgatgccagaacccctgggcgcgggcaccatgcgcacagtgacggagccacacttgccggtgaccttgcagggcacggtgtggggctgtccgatcttgttcccccagtaccccctcctgacggggacgacggagagcttggctaggatgatggcgccgcggatggcggtggccacctccttggcgcacttgactcccaggccgacgtggccgtcgccatcgccgacaacgacgaaggccttgaagcgggtgcgctgcccggcacgggtctgcttctggacgggcgtgatcttcatgacctcgtccttgagccccgggacgagggtctcgacgatctggtgctccttgacggggagcgagtgcaggtagatctcctcgatcttggtgatcttgttctccttgacaaggcggccgagcttggtgacgggaacccacttctcttcctcttggcgcgggccacggccgaacccgccgcgctctccaccacgctcgccgccgcgctccgccatggttaggtgagtgaagggtggggtggctggggcgcccctgagattgatgggggatgagggtttggggctgcggcggcgcaaagagttttnccggccggcctcgaggtaccc

SEQ ID NO: 168215 - DNA, 1189 bp, Zea mays
  Clone ID: MRT4577_84994C.1
tcgaggccggccggggggccgggacctccacccgtccagcaccgccactgttcgcgccgccgtagccccccaacccccatcaccctccggagcgtcgcagcgatcccacccctccttctccccttcacccatccatggcggagcgcggcggcgagcgtggcggcgagcgcggcgggtttggccgtggcttcgggcgcggcgggcgcggcgaccgtggcgggcgccgaggcggccgtcgcggcccgcgtcaggaggaagagaagtgggtccccgttacgaagctcggccgcctcgtcaaggagaacaggatcaccaagatcgaggagatctacctccactcgctccccgtcaaggagcaccagatcatcgagaccctcgtgccggggctcaaggacgaggtgatgaagatcacgcccgttcagaagcagacccgcgccggacagcgcacccgcttcaaggcctttgtcgtcgtgggcgacggcgacggccacgtcggcctgggagtcaagtgcgccaaggaggtggccaccgccatccgcggcgccatcatcctcgccaagctctccgttgttcccgtcaggagaggctactgggggaacaagatcgggcagccgcacaccgtgccctgcaaggtcaccggcaagtgcgggtccgtcaccgtgcgcatggtgcctgcgcccaggggttctggcatcgtcgccgcgcgcgtgcccaagaaggtgctgcagttcgctggcattgaggatgtcttcacctcgtcccgtggctccactaagacccttggcaacttcgtcaaggcaaccttcgactgcctcatgaagacctacggcttccttacgcctgaattctggagtcagaccaagttctccatgactccgttccagcagtacacggacctgctggcgaagcccaccaagggtcttgtgcttgaggccccaactgagacagtagaggcttaggatggtttgtgctgtctaaatgcactttctatgttatagttaagaactgttgtcaactttgggttttgttttgccctggatgttctttgttgtcaagttttggatataacagcactcttttttaatcagtgaatgctacataatcatctcaaaactcatgataatctttttttcaaaaaaaaaaaaaaaaaaaaaaaaaaaaaaaaaaaaaaaaaaaaaaaaaaaaaaaa

SEQ ID NO: 168216 - DNA, 411 bp, Zea mays
  Clone ID: MRT4577_84995C.1
agcacaggaatccggctcgaggaccgccccacaatgggtcgctcaccgaacacaccgacaaaaagggagggcttaaaaaaaaaaatggggcccacaacccccacaccaacgagcgcaaaaaacaagccaaggcacacaagagagacaccggcccgagcccagaaagcccgcccaccgcccgcaggcacaccaccccgccaacaaacgagccgccctagaacccggcggcaccacgagcaaaaccaaaccccgcaaaaaaacggaacctcgccacaaacacacacaacagacaacccaggaaacaacaagggcaaaaaaaggcaccgccaaaggcaccgaacccaacacaaaggacggagcagacgagcccacctgccacaggcccccacccccaaaaccagccacaccaac

SEQ ID NO: 168217 - DNA, 199 bp, Zea mays
  Clone ID: MRT4577_84996C.1
aaaaacaaatttccttgtataccacctagttttacacacaggcaacggagataatgatatttttcgcaagcctagtgggactcatggaatagccgtagacaggtccctaatgttcgtgcgggccatccgcaggggggggggggtagttgaaaattgtgtcctttcatgcccgggtgtggccctggcctgcggctaacgg

SEQ ID NO: 168218 - DNA, 257 bp, Zea mays
  Clone ID: MRT4577_84997C.1
tcggcctggggctggtggtgccagggagactactactccgaaacaagatgctgcaatgccagatgatcgtctacacccacacgcagggatacaggttgaggctccaactacctgatgctgacctgtaactatccgcgcagtgcgcacaacaacatccactacgactgacccaagtacttgatgtcgcccgacgagggagaggactactacccgtgcaggcacgtgttgttacggcacgtagcgccggcaacaccact

SEQ ID NO: 168219 - DNA, 127 bp, Zea mays
  Clone ID: MRT4577_84998C.1
cacactcctacgccacgtttcctggtatccgtttccacgtctcagggcggttagggacaattgtgttatcaaccctccctctatccacctgtcacaaacacccctacgttaatgtttaatgccagtt

SEQ ID NO: 168220 - DNA, 280 bp, Zea mays
  Clone ID: MRT4577_84999C.1
cattgacataagtaatcttctcatgtcaatgttgttttgttgaccctgtaacataacaacattgacataagtaatcttctcatgtcagtgttgttttgttacagggtaaacagaggttccttgagcaatgcagtctctaacatcacaaactactgatattggtgtgagttgccgcttgatatgaactaagctttatttaccaataatataaacttcatgcctgttagttgtatataattgatttttttgttgaatgacatttgattactatgccctgtca

SEQ ID NO: 168221 - DNA, 301 bp, Zea mays
  Clone ID: MRT4577_8499C.1
gccagccacagacccctgggagcttccgctttgaaagaagcaagacacgtggcctcgtgacgggcaagctaggccccagaggcgctggaggtctccaggggcctgctgaaggagttgtagggggccctgctacctgttcttgggcctcaggctctgcacagtcaagcagcccttgctttcggagctcctgtccaaaagtagggatgcggatcctgctgaggccgccatggcctggctggtgggaaggccggcagcgggcggaggggatccagccacttcgccctcttcttctgaagatcag

SEQ ID NO: 168222 - DNA, 653 bp, Zea mays
  unsure (1)..(653): unsure at all n locations
  Clone ID: MRT4577_849C.1
gtcgngaaacaccctggccttaggaggccaggcgattctctgccgcctcgtctcgtcttcgctatgcgccacgagcgcctccgccgctccaacgccctgagcgcctccaacaccactccaacgccacgagcgcctccgccgctccaccgaacaactccaggtcgcgggagcggccatttctctgggcaggtcgccgctccaccgaacaactccaacgccactccaaatcttgcagcagtagaactctactgcagccagctatgacaccctgcgcttgccgcactagggcatcgacgccgtgctcttcatgccggacgacaccaaggccacgcagaccgccgacccgaacaggaatcctcccgccatcgtcacccacaagaagaagatcaagctctggcgaggtcagtacctacctaccttcagatctggacctgctcctttgtgtcctccgtcgacccgaacaggaagtatcccaccactgcattgtccttttttcaataatagcaccaaaatttatagctcgtaatatctagattagggaggtcattacgtcaaaaaaagaagatggggaggtgtgtagattaatttcacaactgatcgctagcatcaatcaatgccagttcatctattggtcagaatgttgccggtgagtg

SEQ ID NO: 168223 - DNA, 742 bp, Zea mays
  Clone ID: MRT4577_84C.1
ccgggtgttggttggtcacctgttttttccttatggttcccttcacgcgcgctcgttaacattgtctcaatccagttacaagaaggaaacatgcatggccgttaatttgttatatgaattttgaacttgcgtataatgtacagtttcgcgctgggatagaactaaaggagtgtgtgctacttattttcgctgcagcctaaaagtagtttgtctacagaagatcattctctatgtgatcctaattacctttcctgtaattttgtcttgatccttgtgtccaagcatggtttatgtattgcttgtctgtgcagacacatgccatcttggatggtgaaatttctttgtccacttataaagtagagttagctttctttagcacgtctgaagcattcccttggatatgcgtcatctctgcgacgttaacagctttgttttctttttgcacgctgacagtgtctgccatgtccaagtgacggggcgctcgctctcaccagatttaatgatagacctctccgatcctgctggttactcgaacctcaagtatctgccgggtgccggtaacttgcgcccagaagacctaatcagcattgacgccaaggactcaccggactggcgctcgcttgtttccaggtacaggcagatgaggcaactggctatggtgtacatgctgcttggacccgtgcagttgcagtttatggatgaagacgaagctgacttgcagatgtaggctttgttttccctg

SEQ ID NO: 168224 - DNA, 346 bp, Zea mays
  Clone ID: MRT4577_85000C.1
aaaaaacgggaaagggaactttttatttcgggggggccccatccctcatccaaaaaattttttttttgaattacccctaaaaagcaatctaaaagagggcccccccaatgatgggttgttggaaggaggcccctgggtctgtcaaaacaagttggacaaagggcaacaattgttgtaattgtaaaagggttgcggggttacccccaaaccgctggaaaaaaggcaacaactggtgctgggtcaaaaaggaaacccggtttgctgcaactagctggctaaaggggaaaaaaatttgctgccgcaaaaaaccaggggggttcaaggcggcccattggttaaaaggaaa

SEQ ID NO: 168225 - DNA, 218 bp, Zea mays
  Clone ID: MRT4577_85001C.1
tagaacttatccaatgcttcatatccacttactggagaaccctctttggggagggagctgaaatcaaatattgtcacaaaacaacaagccaattgtgccgtcatctcacatgagctaagtgatgatacctgtattgacagagagctctagtcacttattgttatcgaaccaacataccaccatgcaatcaattttgatggttagagtgaaaatcatta

SEQ ID NO: 168226 - DNA, 238 bp, Zea mays
  Clone ID: MRT4577_85002C.1
aatgcggtcgccatggacatgagtacatcatcgtcgacctcttctgccaccgtgacgtcagtcttggacagaggcggatctgaagggggttggtggctctagccccgctacatctatgaaactccattgaggaaagaggtatagggtataggagaaatgaggaggaaaaagaagtatttttaaatgagcctccactccattggagaaagaggaggaggttacagaagaaaaaaaaaaa

SEQ ID NO: 168227 - DNA, 305 bp, Zea mays
  Clone ID: MRT4577_85003C.1
cccacgcgtccgcatggccgtcgccgtgaaggtggtgaaccctgacgtggccgtgcacgaggcccggttcgcccgagcggtggaacgcatcggccgggcgagacacccgaacctggtgacgctcgtgggcgcgtgcccggcggcgcgcgccgtcgtgtacgagctggtgccgggcgggagcctggaggagcgcctggacccgggaggcgggagcgggtcggcgccgccgccgttgccgcggcacgcagcggagcggcgtcgcctacggagcgtgctccgcgctagcgttcctgcactccacgctg

SEQ ID NO: 168228 - DNA, 360 bp, Zea mays
  Clone ID: MRT4577_85004C.1
ctctacgcgttcgtataaagcacattatttgtaccaacaattggcagccaaaatatttttgcttccttatgctccttggtctttctgcaaggcgctgctaccgcaaccattttcccacaatgctcacaagctcctatagctaactttcttcccccattcctgtgagcaggggggtcttaagaatgtgaaaacccacttttttatccctgcaggatccaacaggcaatccaaaaaagcatcttacctaaatcacccttagacctacaacaaccgagggccctaccacagcaggtaccttgggagaatccgttggcgcataacataaaagcacagctactacgacaacttgtgctaggaaac

SEQ ID NO: 168229 - DNA, 1433 bp, Zea mays
  unsure (1)..(1433): unsure at all n locations
  Clone ID: MRT4577_85005C.1
ttaatcccacacgtaggatgagcaagggataaaaatgggtcgatgtaccatctcttggcatgcgtgtgtaggcccctggtacggatccgagctctccggcattgccttgatgtcgtcgtctctggaggaagcgtgctggtagggctctgagctctcaggcatcgtctcgactactgcgccagcatcgtcactagaggaggcgactactgcgccagcatcgtcacctccttccctttgccgtctcaggtacattgtaaggtcctcaagagcctggtctgttaagagtccttccttcaacggcgcatcccgcccgcggccgcatccaccccgcggccttccttcaatgctgcatcctgcccgcggcctaacttcaatggcgcatggaaggtcatctgtatcgcggccgtggatccggcgcctcaaatcctcccaataccgcgcccgcgccgtccaaatctgccgcagatctcctctccccattactgggaggtccgccatccatggaaggtctgctagaggcacaatattttcttgtaagctgcactatgatcacatggtactcgttgattatctcatatctagggatgttggtgtgctttgtgctcaatatctattaaggtgtttatgcttggtttcccagtcttggcatgcttttgttgatgatttagtttactcaacaaaaatagaaaagcttaactgtaaaaagcagaggatttctagggataaagatagcaacagagccagttcaagtaaccagtataagaatggttctggttgtgataaagaagtcgaggattcacggaagcttttccgcgatgctaaaaaatgtctttatttattaaagagaacgttggaagatctgcaaaagaaggatttgttcccttacaaccccaagcctcttcttagaagcttggcccggttccaggagctgggtgagcaggggtgaaattcgagttaaacctggtgaggaagctactatctgtagaagttgaagaatgacccttgggcagatagttgtatcgatatagtagttggtaaaagggagctgtgaatataatatatatctcttctaattcatgatctggtctaggactttgagtcgtctgaatcatacagagaaattccagatgctgctacctctttcttttttttttgcaagttgcctgctactctgatgcattgggccatgcgaggccacctatcatgcaaggcaccattgttcactatacattaagtagcatcacatcatggtggcacttcaattgtgcagcaatcattttgtcctgtgctcttacccgggtcagtgtataagagcgcagagctgaacagcgatagacgatatgcgattcacgcatccgcaaacacatgacgaaaattttgatggtttgcggttaccgtcccgagtgttttttttnnngaaaaaataatataat

SEQ ID NO: 168230 - DNA, 314 bp, Zea mays
  Clone ID: MRT4577_85006C.1
gccaagaagacagccaaaagggagccaccaagctagcgggaaaccaaaaccaaaccgggccaaaaaacccccccagctgggaaacaccccccaagaaccaaaccgggggggccccaccgggggagcggacgaaaaagcaccccccagagggcgacagcaaacaaaatgccagggccggcagagaaaaaccttcccgacaggaaaaacacgggccgtaccccccaaaaaaggcggaaaaaaaaacccccttccacagagggggggccacgagaaaaggcccgcccgaacgccctctccaaaaaaaggccaacccc

SEQ ID NO: 168231 - DNA, 456 bp, Zea mays
  Clone ID: MRT4577_85007C.1
aaaccaaaattgggattggtgggtttatcgaaatatgagaccaaaaaaacctatttggggggggaaaaaaagagccctattccccccctaaacctgggggctgggggggcccctctgaggaaagagccctggcctgaagcagggcccttcaagcccggaatttctcccccttggccacttcccccacccccccaaaggacaaaggccccctttgggggatccctggaggggggaaggcaaaaattctctgggggcccgaaaaacccttgcccccggcctgctcaacaaaaaaactcatgggggcccccccctaaaaaaaccccagcttgcccttcttgctctttttggccctgggggaccccgaaaccccccccaaaaaaaaagggcgggggaagtcccccaccaggctgcccatgtaccccccggagtagggcttccccgaggcgccgggcccct

SEQ ID NO: 168232 - DNA, 160 bp, Zea mays
  Clone ID: MRT4577_85008C.1
cgattcagctgaacgatctcgtactataccatcgctccttgacttcatcaggatgctgcttagagtcctcgcctccgaccaatggtccctgtatgtgaatcagtcctatgctgattaggaagaccaacagccagcaactatcaataacctatctggaagc

SEQ ID NO: 168233 - DNA, 668 bp, Zea mays
  Clone ID: MRT4577_85009C.1
gtgcggcgctcaggcggcggttcgaacaacgaatctataaactgaagttccacttttaacacacacatatcatgaggatgcctactcatgtgtgatctccttatgcctgatggcccttgccccatctgctatggtctgtgccatgaacaccacctcaccatgagcaagaacgagtgcataccactcgtaccaacctgatgcaacacctggatacaacctctgatgccatcaacacctctggcccttcctagctaagcccccgagctagcataacaaatagaaatactataaatactcatgtgacatgcgcgttgctatatgacgactcgagacattcaactaaagccatgagctgacaataaatatactcccgctgacccctgctcaaaacgctcaaaatgaggcctctacgagctgctctcgcctctacaactacaggatcccccgaggccgcctgaattcaatatcgagtccatcatatatcagcgacctcgaggtggactacctcgacccacctcacctgatccacacgcatattatcctcgctatctgggcctgccattacaagctcatgactgccaaacaactgctacctcatctgcttaatcgccgctcagcaagtccccctatccgctgcagcctgaatacagaatagaccccctccgact

SEQ ID NO: 168234 - DNA, 246 bp, Zea mays
  Clone ID: MRT4577_8500C.1
gccagtgccaacacccacatccaaatttgcgttagataccaggaacctgcgcgttagggagcggctcgattctgtgccagtgcgtgcagttcctgaagcatcaacgcagccccatagcaacgccctactgctcgcctcagtaccagtcgtcgcttcatcaatgttgccagcagctcatgcaagttgagtctcaccttccataccaggcgatctttcgattgttcgtccagttcatgctgcaggatc

SEQ ID NO: 168235 - DNA, 286 bp, Zea mays
  unsure (1)..(286): unsure at all n locations
  Clone ID: MRT4577_85010C.1
ggtgccctcgcggccggccgggaggcaaaggcactgcacgccaccttatgtatagccgaagatcaaagaaggagccgataacgatggcttacgacagagctcgcaaaggccgtcgcgcccaggaagaagggcaacgtaaagtagtgcctccatatgtgccattctgtcctgcatggcctctgtccttcttggctataacacttggggtgatgagtcgcagcgcccatgtacatcaagaaggacctgaatatcaccgacgtgcagctgcacatcctgatcggnatcc

SEQ ID NO: 168236 - DNA, 544 bp, Zea mays
  unsure (1)..(544): unsure at all n locations
  Clone ID: MRT4577_85011C.1
atcaannaaacaagggctgaagcaggggtctattctacttttattttttttacaattattagagaaatttgcaccatgctttctcaactacttgctgcacacatgtgaaacacatttgaagtacaattgtantcacatgggctgcccagggcgcactaaccaccantacaaattttgtgggtaaagaggaaactaggctcggatcatccctaaaggacagcaaaactgaaagcgctgncaaccacctcccaaaactaattggtcattgatttcattccataacaagatccancggacaaacaagtcnacccncccttctgataacaagatcctgcnnactancaantcnactctnccttctgaggccctgtttgnattcnntagagctaaagtttanttgnactaaactttantcctnctaatgttancccattanctattaatcacnnngcttttaaacactatnnactaatannttntttntgtgtttagtcctgattanctcatatttgtggactaatttttanggaagctaaagtttagt

SEQ ID NO: 168237 - DNA, 445 bp, Zea mays
  unsure (1)..(445): unsure at all n locations
  Clone ID: MRT4577_85012C.1
gggcaggcccgagcattgtcaacgacgacgtctgccgttgtgctcctgctcctcctccgcgttgcggggcgccaaacaaaccagcgcacccactcctttcaatcccttcgttcacccccatccatccagccagccatgggccgtaaggactgcggcaaccacggagaggacgacctgcggcggtcatgcccgcgcctgctagcaatcctcctaggcgggggcctgatcctnatcgtaatcacactgatcatctacctggaggaccgccccacacacccgcgcttttacctacaggacgcgtcactgcagcagctaaacctgtccaactccacctccccgagctcgaccctcctctccacaaatctacaggggaggctagactcacacaacccgaactttctctgagggatatactacaaccgactgaacaaatacacaacgaaca

SEQ ID NO: 168238 - DNA, 1722 bp, Zea mays
  Clone ID: MRT4577_85013C.1
tcgaggccggccgggattagagatatatctactacccgaacagtttacctgagtatagtgccatgtcgacggcaccccacttcgtgctggtgccgctcctggcgcagggccacatgatccccacgatggacctggcgcgcctcatagccagccagggcgcgcgtgtcacggtggtgctgacgcccgtgaacgccgcgcgccacagggccgtcctggagcacgacacgcgtgcggggctcgccatcgacttcgccgagctcgcgttcccggggcctgcggtcggcctccccgagggctgcgagagcttcgacatgctggcagacatctccctcttcgccacgttctacgaggcgctgtggatgctccccgagccgctcgaggcgtacctccgctcgctgccccgtctcccggactgccttctctgcgactcgtgcagctcgtggaccgccaccgtcgcgcggcggctcggcgtcctgcggatcgtggtccacttcccctccgcgttctacatcctcgcggcgcacagcctcgcgaagcacggcgcgtacgaccgcgccgccgacgacttcgagccgctcgaggtgccggcggagttccccgtgcgcgccgtggtgaacagggcgacgtcgctggggctcctccagtggaccgggttcgagaggttccggcgcgacacgctcgacgccgaagccaccgccgacggcatactgttcaacacctgcgctgccttggagggcgccttcgtggagcgcttcgcggcggagctcggcaagaggatctgggcggtggggccagtatgcctcgtcgactccaatgctgcccgcgcgacggctgagagaggcgaccgcgccgcggtggacgccgagcaggttgtgacctggctcgacgcgcggccggcggcgtccgtgctctacgtcagcttcggcagcatcgcgcgcctgctcccgccgcaggtcgccgagctcgccgtcgctctggaggcgtcgcgctggccgttcgtctggtcggccaaagagacggccggcctggacgccgggtttgaggagcgcgtgaaaggccggggcctcgtcgtccgcggatgggctccgcagatggccatcctgtcgcaccctgccgtgggcggcttcctcacgcacgccgggtggaactcgatcctggagagtctctgctacggcgtgccgatgctcacttggccgcacttcgtcgaccagttcctgaacgaggcgctggtcgtggacgtgctcggcgtcggcgtccgctcgggcgccaaggtgccggccacgcatgagatgcacgtaacgatagaggtgcaggtcggaagggtcgacatcgagaggaccgtgtcagagctcatggaccaaggctcgtcgtcggcgatgcgcgcgagggctaaggagctcgctgcagaggtgagagccgcaatggcgaagggcggttcgtcggacgccgacgtgaaggacattgttcgccacgtcattgaggtggccaagaataagagggagcacgcacgagggcaccattcttgatggaagactccaatggtaatcgctaaggacaaacacaaccagcgcgcgcggaaacaagaagctctcgaggagtagacaacagaggcctaacatgcgaagaggacatgctgctgttgtatatatttctccacctttcatccgaatcaatcaaacaatatagatgcctgttaacgaaagcaaaaaaaaaaaagccgcc

SEQ ID NO: 168239 - DNA, 447 bp, Zea mays
  Clone ID: MRT4577_85014C.1
aacctaaaccaacatttttcccaaccaaccacccccctaggttctttccccaacacggggcggggggatatgggcaggcaaccataattcccatggggaagagaaaaaaatgggtgggggggggggcccgggttaaacggccccgggcaaaaccgatttcacgggcccctaggggggcaaaattatccatcccccaggcggcaaaattccccccccccgcggggcggggggcaggaaagagcccccaagcacccttgcaatccccctgaacatgcaagggagtagagggccaagcttcccgggcaactttttaacagggggggggatccccttttttttttccggccccacaggctcgctctaaagagggaccaaaaagcccggcccggggaggggatccccacccgaggataacggggcgaacgggctgaatcctttggcgagggg

SEQ ID NO: 168240 - DNA, 156 bp, Zea mays
  Clone ID: MRT4577_85015C.1
cccacgcgtccgcaaatgaagaaactcaggttcattatcttggtcctaggattcagaatgagttgatacatttgcttgcttctgctattaagtccaaaattattaagaaaataaagagtgcaaagtatttctctgtcatacttgattgtaccccgg

SEQ ID NO: 168241 - DNA, 580 bp, Zea mays
  unsure (1)..(580): unsure at all n locations
  Clone ID: MRT4577_85016C.1
naaaaaaaaaaaaaaaaaaaaaaaaaaaaaaaaaaaaaaaaaaaaaaaaaaaaaaaaaaaaaaaaaaaaagggcggccgattcgagaactaaaaactagaatttttttggacgacaaagctcggggacatactaacatagcagtttagctgtttggaaccagatgcatgtcctccatagtaaaagctgggggggggtgcagcatgtctctggaagggagagaccataatccccgccaggagtccatcccttcttttcaacatttggtcacccccccgcagggggggtttccagacccccccaacctggtggcttaagggatccggacttggtgctcccaacgcattgcttactggcaacatcacaggcgccttgtccccccacctgaccggtgatagcgccctgcttcccggggtttgcacacacctgggggtggcatctgagctcacaggcgttggcaacctgggcagcagggctgccaaggaaggtttcctggtcatccctccccggggggtgccctttcttggcggccggcgggctttgctacgggaccccgccttttttcccctcgaccctgcccc

SEQ ID NO: 168242 - DNA, 205 bp, Zea mays
  unsure (1)..(205): unsure at all n locations
  Clone ID: MRT4577_85017C.1
acctgctcntacaatctaggggntaatgatgcatggcagcatgatgctactaagctatgcgactcttttgaggggatacttattatncgncgctcttctaatgattagaatggggaaagaatgggcatggcttttcactaaagaaaaatggcgggcttaccacatnccntctttagcgagatcgaatattgatatgccgagagaa

SEQ ID NO: 168243 - DNA, 457 bp, Zea mays
  Clone ID: MRT4577_85018C.1
cgcgtacgcccacgcgtccgcccacgcgtccgagcaactaccattgaataaacgaccatcatctgatcgtgggccttctttggttctgactaaagaaatttccagtggtgtcaccattaccaaacaagaaaataaggtacacatataaatgcatttacaattgttgctatgtttagaaattattccttggccactctggttatccaattttggcaggtagcaaatgctaatgctaaatctggagaggaagctgagattaaaattcatctggcttgtgaatattctgggaaaccaattcagttcttgcaggaagtagaattcatgtcatgtactctgtcaaactctatcaatgagatcactttgagattttttgtgccaaactgaagcaccaattgatatgctgttgtttctcatatgggttgatgttataaaataaaatgacgtttaaagatgggat

SEQ ID NO: 168244 - DNA, 1182 bp, Zea mays
  Clone ID: MRT4577_85019C.1
ccggccgggaaaaaaaaaaaaaaaataggggaagaagaatatttttggtcgatttctaattctcctcgcgagcccaaaccctaaacctaaacctttcacccgccgccgccgccaccaccagcactgccactccgccaccaccgtcccgaagccccctcccagcgccatcgacttcatctcggattgaagcaatgtcgtcggacgatgaggtcagggaggagaaggagctcgacctctcctccaacgacgttgtcaccaagtacaaggctgccgccgaaatcctcaacaacgctctgaagattgttgtgtctcagtgcaagccaaaagtcaagattgttgacctttgcgagaagggcgactctttcataagagagcaaactgggaatgtttacaagaacgcaaagaggaagattgaaaggggtattgctttcccaacctgtgtatccgtcaatgacacagtttgccacttctcaccgcttgcaaccgatgatgccgttctggaagaaaatgacatggttaaaattgatatgggctgtcatattgatggctttattgctgtggtggcacatacacatgtaattacaaatgggcctgtcacaggaagggctggtgatgtgcttgctgctgccaacacagcagcagaagtcgcaatgcggcttgtgagacctgggaagaaattgtgctcagtgtctccaatgctgatacaaaggttgatgatgctgaatttgaagaaaatgaagtatatgcaatcgatattgtcaccagcactggggaggggaagcccaagttattggatgagaaacagaccaccatctacaaaagggccgtagacaagaattatcacttgaagatgaaagcgtcaaggtttattttcagtgagatcagccagaagttcccaatcatgccttttactgctagggcattagaagagaagcgtgcgcgtttaggcttggtggaatgcatgaaccatgaactattgcagccgtaccctgtacttcatgagaagccaggcgatcttgttgcacacataaagttcactgtgctgctgatgcccaatggatcagataagataacatcacatcctctacaggagttaaagcccaccaaatccattgaagacaatgcagagataaaggcatggcttgctttggggacgaaatcaaagaagagggtggtgggaag

SEQ ID NO: 168245 - DNA, 781 bp, Zea mays
  unsure (1)..(781): unsure at all n locations
  Clone ID: MRT4577_8501C.1
cattgggtacctcgaggccggccgggntaccaaataaactacttttcttagcatcaaagcttcaattatctgacagctcggcaatatggcacaggatctacgctcccaggatatcaaaaacccaattgacgttgcagagtacctcttccgtcgacttcaacaagttggagtcgagtcagtgcacggtgtgccaggagactacaacctcgtcgcactcgactacattcccaaagtcggcctgaaatgggtcggcaactgcaatgagctcaatgctggctacgcggcagatggctacgcaagagtcaagggcatctctgcactggtcacgacttttggtgttggagaactctcggcagtcaatgctatcgctggcgcttactccgaatacgtacccatagtccacatcgtcggctatccatcgactgcatcacagaagaacggagcactgctacaccacactcttggaaatggcgactttactgttttctcgaggatgtccaaggaaatctcatgtgctgtttccatgctgaacagccaacacgaagcagccatgctcatcgacaacgccatccgggaatgttacctaaagtcgaggcccgtctacatatctttgcctagcgatatggtgacgaagaaagtcgatggcgatcgcctcaacacaccacttgatctggaatatccacagaacgaccaagaagccgaagactatgtttgtagatgtggtctttgaatatctacatgcagcaaagaccctgtcatcctttgtggatgcatgtgctat

SEQ ID NO: 168246 - DNA, 308 bp, Zea mays
  Clone ID: MRT4577_85020C.1
gccatgatcagcacacaccaggatattccttaggaccagccttatcccacgaacatgattccagtgggaccaatgatatgtatgtgggagcggtgataacaacactttctataaactctttacggctgtagcttgcttacttcggacgacattacacgtatatgtgagaccctatgccctgtgtggatgaagtggccttcgcttatttatggtagcagtaaactgaccgaccgcgctgttgtcataggctgtaacagagatccttgggctgtgatgcaccttgaccgtctggccttcaggaatggcca

SEQ ID NO: 168247 - DNA, 2000 bp, Zea mays
  Clone ID: MRT4577_85021C.1
ctcgaggccggccggggacacgactctcggcaacggatatctcggctctcgcatcgatgaagaacgtagcaaaatgcgatacctggtgtgaattgcagaatcccgcgaaccatcgagtttttgaacgcaagttgcgcccgaagccttctggcggagggcacgtctgcctgggcgtcacgccaggccggccgggacccgatctggctgcctcggtcgatttctaattctcctcgcgagcccaaaccctaaacctaaacctttcacccgccgccgccgccaccaccagcactgccactccgccaccaccgtcccgaagccccctcccagcgccatcgacttcatctcggattgaagcaatgtcgtcggacgatgaggtcagggaggagaaggagctcgacctctcctccaacgacgttgtcaccaagtacaaggctgccgccgaaatcctcaacaacgctctgaagattgttgtgtctcagtgcaagccaaaagtcaagattgttgacctttgcgagaagggcgactctttcataagagagcaaactgggaatgtttacaagaacgcaaagaggaagattgaaaggggtattgctttcccaacctgtgtatccgtcaatgacacagtttgccacttctcaccgcttgcaaccgatgatgccgttctggaagaaaatgacatggttaaaattgatatgggctgtcatattgatggctttattgctgtggtggcacatacacatgtaattacaaatgggcctgtcacaggaagggctggtgatgtgcttgctgctgcttatgattgcaaaattgtggaaggtgttcttagccatcaactgaaacaatttgtgattgatggtaacaaagttgtgctcagtgtctccaatgctgatacaaaggttgatgatgctgaatttgaagaaaatgaagtatatgcaatcgatattgtcaccagcactggggaggggaagcccaagttattggatgagaaacagaccaccatctacaaaagggccgtagacaagaattatcacttgaagatgaaagcgtcaaggtttattttcagtgagatcagccagaagttcccaatcatgccttttactgctagggcattagaagagaagcgtgcgcgtttaggcttggtggaatgcatgaaccatgaactattgcagccgtaccctgtacttcatgagaagccaggcgatcttgttgcacacataaagttcactgtgctgctgatgcccaatggatcagataagataacatcacatcctctacaggagttaaagcctaccaaatccattgaagacaatgcagagataaaggcatggcttgctttggggacgaaatcaaagaagaagggtggtgggaagaagaagaaaggcaagaaaggagatgcagcagaagcagatcccatggaggaggcgacaaacggtgctacaagccaagaataattctgatttttggaattactgccaccagcttttttcttgtttcttcgctgcatctgatggtgttatattacattcagttgtggaaaaattgagtactttttctagcttctaagaaatgaagcatcctgttgcccattatcgcatccaatggcccaaaattaatcagataagaggcgggggaagggtggacaggaggccaagccgcacttcacgccatcgcattctcagacaatgcagagctccaggaccaaatctggctccgctgaggcgaagggcaacggcaagacgaaatcaaagaagaagggtggtgggaagaagaagaaaggcaagaaaggagatgcagcagaagcagatcccatggaggaggcgacaaacggtgctacaagccaagaataattctgatttttggaattactgccaccagcttttttcttgtttcttcgctgcatctgatggtgttatattacattcagttgtggaaaaattgagtactatttctagcttctaagaaatgaagcatcctattatcgcaaaaaaaaaaaaaaatta

SEQ ID NO: 168248 - DNA, 1766 bp, Zea mays
  Clone ID: MRT4577_85022C.1
cattgggcggctcgaggcggcggcaggcccgccggcgccgccagccacgcacccacccccatccggggctccgcgcgccaccgccgccgccccgaggcccccatccccgcgaaagcgagctccggcaccggggtaacgccgtatcgacgcacacccctccccccaaaacccttggcagccgccggggccggccgcgatctggctgcctcggtcgatttctaattctcctcgcgagcccaaaccctaaacctaaacctttcacccgccgccgccgccaccaccagcactgccactccgccaccaccgtcccgaagccccctcccagcgccatcgacttcatctcggattgaagcaatgtcgtcggacgatgaggtcagggaggagaaggagctcgacctctcctccaacgacgttgtcaccaagtacaaggctgccgccgaaatcctcaacaacgctctgaagattgttgtgtctcagtgcaagccaaaagtcaagattgttgacctttgcgagaagggcgactctttcataagagagcaaactgggaatgtttacaagaacgcaaagaggaagattgaaaggggtattgctttcccaacctgtgtatccgtcaatgacacagtttgccacttctcaccgcttgcaaccgatgatgccgttctggaagaaaatgacatggttaaaattgatatgggctgtcatattgatggctttattgctgtggtggcacatacacatgtaattacaaatgggcctgtcacaggaagggctggtgatgtgcttgctgctgccaacacagcagcagaagtcgcaatgcggcttgtgagacctgggaagaaaaataaggatgttactgaagcaattcagaaagttgctgctgcttatgattgcaaaattgtggaaggtgttcttagccatcaactgaaacaatttgtgattgatggtaacaaagttgtgctcagtgtctccaatgctgatacaaaggttgatgatgctgaatttgaagaaaatgaagtatatgcaatcgatattgtcaccagcactggggaggggaagcccaagttattggatgagaaacagaccaccatctacaaaagggccgtagacaagaattatcacttgaagatgaaagcgtcaaggtttattttcagtgagatcagccagaagttcccaatcatgccttttactgctagggcattagaagagaagcgtgcgcgtttaggcttggtggaatgcatgaaccatgaactattgcagccgtaccctgtacttcatgagaagccaggcgatcttgttgcacacataaagttcactgtgctgctgatgcccaatggatcagataagataacatcacatcctctacaggagttaaagcccaccaaatccattgaagacaatgcagagataaaggcatggcttgctttggggacgaaatcaaagaagaagggtggtgggaagaagaagaaaggcaagaaaggagatgcagcagaagcagatcccatggaggaggcgacaaacggtgctacaagccaagaataattctgatttttggaattactgccaccagcttttttcttgtttcttcgctgcatctgatggtgttatattacattcagttgtggaaaaattgagtactatttctagcttctaagaaatgaagcatcctgttgattatcgcatccaatggcacaaagataattactacaaggcatacctagtgttggttctctgttaaaaaaaaaaaaaaaaaaaaaaaaaaagcggcc

SEQ ID NO: 168249 - DNA, 291 bp, Zea mays
  Clone ID: MRT4577_85023C.1
tctcatagcggacgcgcttttctttttttttttgttgttctgagacagaggccaggcattccataacctcactggaggcgcgtgcaagacactacacgggcaaattgctgcgccatgacaaacatctacatatcaaaatggatgggacaaagcggaaagtataacacatctgccgtgcgggaaatccgcctaagagtctacgggtcaccacctaagattatcatctactctccatattagtactaccacgtgggggcaggggactgtaagagaagaagaccctctgcaaac

SEQ ID NO: 168250 - DNA, 843 bp, Zea mays
  unsure (1)..(843): unsure at all n locations
  Clone ID: MRT4577_85024C.1
aagattgctctccgacatcgccgcaatggcttgggccacaaattgaggtcatccgtgcagcgacgaagtcaatcgagcgcgagatcaactctgtcaatgacaacccacttattgacgtatctcgtggaaaggcaatccacggtggaaactttcagggcacgcccatcggtgtgtccatggacaacacgaggcttgccattgctgcgattggcaagctcatgtttgcccagttctcggagctagtaaacgacttctacaacaatggcttgccctccaacctctctggtggccgcaacccaagtcttgactatggcttcaagggtgccgagatcgcaatggcgtcatactgctcggagctccaattcttgggcaaccctgtgaccaaccatgtccagagtgcggaacagcacaaccaagatgttaactccctaggattaatctcagcccgtaagactgctgaggccatcgacattctgaagctcatgtcctctacatttttggttgcactgtgccaagccatcgacctgcgccacctcgaggagaatgtcaagaacgcagtcaaggattgtgtcacaagagtggtcaggaagaccctgatcacaaatgacatgggtggcctccacaacgcgcgcttttgtgagaaggaccttattcgaacaatcgaccgcgaggcggtgtttgcatacgcggacgacccttgcagcgccaactatcctctcatgaagaagatgcgagcagtgttggtggagcacgccttggncaacggcgaggctgagcgcacgcggaaacctcggtgtttgccaggttgccaaatcgagcaggagctttgtgcgaactacctca

SEQ ID NO: 168251 - DNA, 798 bp, Zea mays
  unsure (1)..(798): unsure at all n locations
  Clone ID: MRT4577_85025C.1
cctcgaggccgngccggggagcagataaaccgaagcatgtcgatgagcctgcacgcctcgtatgtcgtcccatccctagtctcattctcatcccatccaatgttccccgccgcacgctgctccgtccctggtctctacccccacccgaacgcagccgcctgccgccgtgcgccgccgcccaccgccgtgtcagccaaggcgcgccgctcgagccgaggctcccgccgcgaacgctcgtgggacgacggcggcggatcggattccgacgtcgacgacggcttcttcggccaagagcagggcgaggaggatgagccaacgccctcccccgccggacgtcccgccccagcagcgccccagctgcgggggtccgacgtgctgcgcgcgctgcagagggccgccgcggccaaggaggccgccaggaacaagaagaagccggcggcgcgccagcggcaggggaaagagaggccggcgggtggcgacgtggaagcccgggaggtgaggcccgtggtgataaggcccgagtggacggcgaggatccgggagctggagctcagggtgcagcagctcgccgccgacaagtaacaccgctaccggtcgtcagtacagtgcagaaggaaacgaagctaaccaccgaccaaccagtctcatcgtctttgcgctctcgaattcgttcactgtgtgtctgtcggtctgtctcanagatagattttttttagaaccaaatgatgaggcacagaattctgctgcccacgtgctagcagttgcattccagctcagaagcactccaaaactgatgct

SEQ ID NO: 168252 - DNA, 534 bp, Zea mays
  Clone ID: MRT4577_85026C.1
aaccggcaaagagggggggataagagggaaaatgcgaagaggcatctgtgaaagcacccaaagccccattggctaacatggtggcccgcaaacgcacggggcaacagaacctctagagcgggaaaacacaagctgattgcagcgagtctgccggaaacgcactagccctggattgcttcgccttcttcggctgacggatgaattccgggacatttccccgaagatcactgcctaactgaaggacttctgcagcagcgcggcgaggtagacctcgtccttgctgctgcagccgccgatggcaacactcttgtcgggggcgacccactggatggccttgtagccaagcctccgcagcatggcggggaaaacgccccccaggtcgctcctccggcaccagaaagggaccacccaaagaagcccgcccgggcgcagcacacgggcggaggcgaaccacaaggaactccaacgccacccccgggaaccaacgggtcacggggtgccccgcccgcaccaaggaccatgggccccatcccc

SEQ ID NO: 168253 - DNA, 438 bp, Zea mays
  Clone ID: MRT4577_85027C.1
gttgaagaaggaaggtccggggttggaagggttatttttcgccggatttcccattgattgggaaaattgggtttccctgccgcgtcctttttaacctttaactttttagggatttcttcagtttttaaattaaaaggggatttgtccaaccccaatttccatttaatttttaatttaaattaattttaatgtaataagctttaagagaggtgtccaccatttggttcctcactcgggttattacctgggcccgggttgggggaggcagaaaaaattaaagggaccattttgtttggaaaaaaaattgaggaaaaatagttccttacctcattttaaccataaatttgtcgtcgccattcgttttaaaatgcgtccgaaattatttttttttttttttaattaattaaaaaaattattaatttaaggtcccacttttta

SEQ ID NO: 168254 - DNA, 272 bp, Zea mays
  unsure (1)..(272): unsure at all n locations
  Clone ID: MRT4577_85028C.1
gattgctgctcattatcaaataatgactgcactggcgcatatatggacaagggaactgaccaagatcagcgaaaaggagcaatcccttaattctgctgcccagcccctccaggaaaatatggacaagagctcatctgggttcgctgtggttgctgccaaactcatgcaatttaacaagcctaggtttctcttttcggatgcttcaatttccatccttgttgaatgttntagcccttgatgagaaaagaaattaatgcttcagtgagacttta

SEQ ID NO: 168255 - DNA, 339 bp, Zea mays
  unsure (1)..(339): unsure at all n locations
  Clone ID: MRT4577_85029C.1
ccggggcntggcccgatatcaccttctggttagctattgtggcaccggtgtttccaagagtactatgtcatgacgcatccggtgcagcgtagagctctggaggagcacatggaggtcttcgccgatggggacaccgtggtgccgacgttcctgttgcagtgcgagcgcttcgctagctgcgcgtcttagcacaataacgtgtgcgactcggtgtctttcgtcatcggctcccaggatgcgtcgcgactgtaccacccggtttcgggactcgcgggttagcccgctgcacgacctactagcagtattagcttcatacattacaccgtcgttgacgttaac

SEQ ID NO: 168256 - DNA, 820 bp, Zea mays
  Clone ID: MRT4577_8502C.1
ccatcgctggcccatcccggatccactccgctccatccccgctaccttcccctagtgtcaaggtagccaagatgtgtggtgccccggcgacctcttgccccgagacaaccagcgcgccgccccctacaaccatctccgcgcgacactggagctcctctccacctcgtgcatccgcgcgcgcggatcccctgctacccacggcggccttctcgccatgccccgcctgcttcagatccatggccagcccggctcctgtccggccccctgctccggcgagctctcctcccccttgctcttgagccatgcaatccactttcacagccaagggacttagccatcccaggggcgtcaggggcagctggcttcaaaaattggagggggttcggttatctggggggtccgcgacgagggatccgaggcatccaccgtgccgccagccccgtgcagctcggttgccacccatgtgcagctcggtcctccgcgcaccaccaattcccgcccactgcacctcatcttggttcgttgcctcgccaccacgtcgggcttcctagcggcctgacccgcctttcccggttagccccggcgaccacgagctctcccggagcccctgtgtccggttgccgttgaagtgactacagtaggaagccgccagcgatggagcagatccagggtcaacgagcaccgctggatccatctcagccgctcgctggcacaggcaaattttgcaaattatgttcgggacccgtatttgcgttcacttcgtgctatttctgcagtttatttgctctatggtagccggtgttgatgcagtcactctgcg

SEQ ID NO: 168257 - DNA, 461 bp, Zea mays
  Clone ID: MRT4577_85030C.1
cctgcaggtcgacccgccgggggcgcaccggacaccgcgcgatgtgcggtgctcttccggccgctggaccctacctccggctgaaccgattccagggttggcgggccatcttctgcatgtcgatctcctgcttctgttccatgtagcggcgctctgctggtgtgagatggtcatagtcaggatgtggtttcccttcatctccattcttatcagattcagtctgagatgactcctcacgttggtacttcttcttctttttctttactccaccatctttcacgtctagcgctttacccttcagctttagccgtcccccaacgacgttttggtatcccaacatcttgctgtaacaaagaaatcgagtaaagttgtagagagactgccgttgagcacgggagacggaagacattgggtctgtttggttcagcttttttctgaccagcttttctgagaatctggct

SEQ ID NO: 168258 - DNA, 500 bp, Zea mays
  Clone ID: MRT4577_85031C.1
cctcccgcaccatggcctttgtttttttaattaatccggggaccatgaaaaaaaaatagggaccccggaaaggggtttaatttatttggttaaccaccccaccccaccccacaccacaccatggggccaaagcttccctgatccaatccatccggggcaatacaatccccgaaaagagaaaaccacttccaggcttccagttactgttccgggggcggaggcccggggggggccccacgaaaagaaaccatgctgggcaagaaaactttgacaataactttttccccgggggagtcttcgctcgagtggtatccccccggcaagttaatacccctccgttgcccctgggctagccctgccggaccaggaccgggggcagcaccctcaggaaaagctgccactcttttcatgtgggacccctccaactgcccggaaagcaaatcccgctccttggatatggatggcaccctggggaagaaaaagctggccttcttcgggtt

SEQ ID NO: 168259 - DNA, 1181 bp, Zea mays
  Clone ID: MRT4577_85032C.1
gggcatccctgctcatgcagagattagctgttcctttcccaatattgactgcagtgctaactattacttccgccattccaaattgtaaattgatttagatgtgtctaacattgaccaagtttataggaaaatgtattaatgttatggttgctagatcggtgagggattagagctgctggcggaggtggcgcggtactgttcacacgtagatgcgtggagaatgagatcgatgggtaggaacgccggccgggggcctctgcgcacggccgagcaagaggacggcttctcccttctaattcttgcctactttatttcttatccattgattacataaataggtcggctggtcgcccctgtcttgctagagatccttatttccttaaagctctcaacaaactactaactgataactttcctagataatctcaactaatcttctagataatctcaactaatcttcttatcctttgacttgcgctccttgctgttgctccttgccgcaacccccttgggccctgataggttctgacaattaacatctacaactacactgccaaatttattccgtgtcaaaatatattttttgcatgtaattaattcatttgataatgcctcaaaaaaactcttaacaaactaactggtaaccttcctagataatctcaactaatctcctaaataatctcaactaatcttctaatcttatctctaactatcattatctaatcccccttggagggcccatggctgctgctgccgcagcccctgcgtgggcctccttaggccctgacactacacccctcctggacaagcagctcgtcctcgagctgcagcatgacggatgctcaaagaccggtggcgtcgcacatggggacggagacgccgtcaacgaagatgatgtgacgaaatttggcgttgtccctagagatgggcacgccgacgtccaggatgtggtgacaaaattggcaggcgatgctgcccatggagatggggacgtcggttgccaggatggcgtgacgaaggtggcatacgtcgcagcccatggagatggggacgtcggttgccaggacggcgtgacgaaggtgacatgcggcgcaatccatggagatggggacgccagttgccaggatgacgtcgcggaattggcagcagaagtcatgggatcagatcgaaacccaagctag

SEQ ID NO: 168260 - DNA, 486 bp, Zea mays
  Clone ID: MRT4577_85033C.1
tagtgtgaacggcacttgcacatgggtaagccgatcctaagggacgggggaaacccggcagatagcgcgatcacgcgcgtcacccgaaagggaatcgggttaagatttcccgagccgggacgtggcgcctgttgccgtcccaaaccgccgccacgttccaggccacaagctaccctctgttcggcgcgctgagcggtctggacgagagcaccatcgcctcgctgcccaagacgcagagggagcccctctccttcttcgggagcgacttcgtgaccccgaagcaggagaaccagacgctgcgccccttcttcgacgagtggcccaagtcgagggactcgtggccggagctgaacgaggacaacagcctcggctcctcggccacccatctctccatctccatccccatggcgccctccgacttcaacaccagctccagatcgccgaatggaataccgtcaagatgaactgagtaaccatgcggacccc

SEQ ID NO: 168261 - DNA, 1627 bp, Zea mays
  Clone ID: MRT4577_85034C.1
acacaaaactacatacattctatgaggtaatatccgaccgatatgtatgtacaccaatccaaatagcaaatacaacactgtaaaacaaagacatgaccaccatgtatgagaaaagttaatggctgcctgactttttgattattttgttttcgggattatggacgccacccccttcaaattcaagggcttgaagaacgttaagccgaacactcctgcagatgcgcgacattttaagatttactggcggtgtgtggctcgctcgttttagctactgcccaaggttcccgagaagacgctccaccgcagcatgtacattcccagcggtagcgagcagtgcttgaatgttctccgcagtgtcaatgaaacccatttcttggagctgagtaagctgtgtggcataaagctcctccggtggcacattggaagtatttggaacacctaagccacctcccgaaccaagcccactgagcatgctcatcaaggtgtcaaggctagggtttccaggcgtacctgtggcactgcctgaattgtttctaccctggttaggttgatgttgaccaagctgtcctaataaagactgctgaaataagagtaattgctgcaaagtctcaggcgatgtcagctggcgaagaaattctggattttgaaatatttccctcatctgagggtttgattccatcaggttgcgtgcatttgggttgaagctaagcaactggttcatggtctgtgggtcagacataatgctctgcatcatctgcatcattgcagggttttgcaacatctgactgaaaagagaaacatcaggagaaccaccaagcatattccccaaatctggtgaacccaaacctcctaaaccaccagaagcaccagttcttggactgccagcaagaccaccaagcaaactactcaaatctggtgaaccaagccctcccaatccaccagtggcaccagtacctccaacatgaccagaagcaccagttcttgtgttgccactcgtgcgtgttgctccttgtgcagtcccagctgatgacctgccacttcctggagcaccaacacctggaaatagatctcccaggccacctgccgggacgctactaggagtagatgaagcaagggagctggcagcagcaggtgcactggatgcagctggtggggcaacaccacgcaccaagtgaattgtgtgatctgtctcaacaccgtagctttctagggtttgctcgtccttgaggatgcggcccttgtagatcagacgctgctgcggcgccggcacgtcgcagctcccggctacgacctccttgaacccgcccaccgtggcgcccaggtccgtctgcaccgtgaacttagagccgttcgcgcaccggatgtgcagcgtcgcctcccccgctgccgcctccactgaggcagcgggaggggactcgccgctccctgcgccctcgcctccgcttgccatggcctcgagccctatctccggcccggtccacggctccgattgggttttgccttgtgcgcgtcagctgcgaggtctcgctccttgttttttctcctcctgttgcttgcaatggattgagggaagaagaactaaaggaaacagggcccaagtctgaactctcccggccggccctcgagg

SEQ ID NO: 168262 - DNA, 237 bp, Zea mays
  Clone ID: MRT4577_85035C.1
ctttaatgctttttcaagaactaacacagttattcctatactggattttaggtctctgaagaactgctggtgtttaggaataagaatgtgcatgaagcctaaaataccaagaaagcttatactgaatttaagcaaagaaataaaggagaaaagagaagaatctgagaattggggaggcatagattcttataaaaatcacaaaatttgttgtaaattagaggggagaaatttagaatt

SEQ ID NO: 168263 - DNA, 815 bp, Zea mays
  Clone ID: MRT4577_85036C.1
gtcgtccgactctgatccgccgacgtgaccacgaccacacaacacaagcttgctaggtgctcgcgatcatatcgacgatcgtgtctgtccgtacgtgctcgagaattggaacgatccggatggccgggaggaggaaggcgagcaacgcggcggcgctggtagcggtgctgatcgtggccgtggcggcggccgcggccggcgccatcaagctctgcggcgtggacgagtccgcagtggacgcgtgcacgccctactgcaaggcgggcagcacgcaggcggcgccgggccagctgtgctgcgccaaggtcaagtccgcccgctggagctgcctctgcgactaccggagcgctctctccagcgacatcgacgccgcgcgcgtcatggacctcgccaccaagtgcaagtgcgactacccgccggcgtcctgcgacgacaactagctagccgtttattctgtgtctagactagatctagatgccacgccggacgtgtctcgtggccatcgattatcgtgtattgttgctttatttatcatcgtttcagtgctacgtacggtacgggtatagtaacaaactgtgacggcctgacgggctctgcacactgcgcgcaggctgcatgcttgtgcactgcagtcgtgctcgtgctcgtcggtgggctatctatctatctatccgtcagccgcgtgccacgtcgtgtaccctctcgtacgtacgtgtttctttgctgcgtcctactagtactagctcactgctgtggcactgtgcctgtgcggtgcgtccacgtcgtccgtcgcaaacaataaacatcaggtctcc

SEQ ID NO: 168264 - DNA, 148 bp, Zea mays
  Clone ID: MRT4577_85037C.1
atggttttccccccgcgggcaaacaacagaactgggcatttataaaggttgcccgctataaccccatgtcgcggaacatgattatcgacctggatgaatgaaaattaaaaacatcttaaagccagaaatgcctaaaacggaggatctt

SEQ ID NO: 168265 - DNA, 2353 bp, Zea mays
  Clone ID: MRT4577_85038C.1
aatttgatttgatagtatattggaaatcaaaaatcgatagttggaaaagacagactacaggggaagatgacgtatgctccccgccttcggccgcttttttttttttttttttgcagaggaaaccacccgttggattagaatagataataatttgatttgatagtatattggaaatcaagaatcgatagttggaaaagacagactacagggaggtaacatccgaccgatacgtatgtacaccaatcaacattgcaaaatacatcgctgtaaaaaaaaaagacaagaccaccatgtatgacaaaagtaaacggctgcctgactctttcattattttgttttcgggactatggacgccgccgccttcaaattctggggcttgaggaacattaagccgaacactcctgcatatgcgcgacaattttaagatttacgaatagtgtctggctcgctcgggttagctactgtccaaggttcccaagaaggcgttccaccgcagcatgtacattcccagcagtagcgaccagtgcttgaatgttctccgcggtgtcaataaaccccatttcttggagttgagtaagctgtgtggcatagagctcctccggtggcacgctggaggtatttggaacacctagaccacctcccgaaccaagcccgctgagcatgctcatcaaggtgtcaaggctagggtttccccgtgtacctgtggcactgcctgcattgttcccgccctggctaggttgatgttgaccaagctgtcctaataaagactgctgaaatgagagtaattgctgcaaagtctcaggcgatgtcagctggcgaagaaattctggattttgaaatatttccctcatctgagtgtttgattccatcaggttgcgtgcatttgggttgaagttaagcaactggttcatggtctgtgggtcagacataatgttctgcatcatctgtatcattgcagggttttgcaacatctgactgaacggagaaacatcaggtgaaccaccaagcatactccccaaatctggtgaacccgaacctcctaaaccaccagcagcaccagttcttggactgccagcaagaccaccaagcaaactactcaattctggtgaacccaatcctcccagtccaccggtggcaccagtgcccccaacaccaccagttcttgcattgccactaggagtccgtgttgcaccttgtgcactcccagcattggtgctccagggatttggaagtggattagtatttggagctggggttccagttgtcgattctgaaccagtagttggagcatttgttgcaggttgaccttgaccaggttggctagacccctgattcccgagaagagctgaaaatggatttgaggctgtgcttccttccccacccattgttgttgcatttagaaatggctcctggacagtttcatacatgcgacggagcatattaaaaccttcaggagaggactcaatgttgctcatagctctgtctgtgttccgcatcatctctctcatgatttcagggttcctagcagcttcgagtgtttggcggaggacgcttgggtcattgagcacatgggcaagatcaggattccgatccatgatctcgcgcatttgtgggttgttcatgatcatattgcgtattaaatcagggttattcatgagattttgcatcgctggcatattcattatctccctcatcaagttgggattctggcttaaatgctgctcaacttgctctaattctggaaatcctggcctaaatatacctgatggcctgtcatttcctggagcatcaacacctggaaatagacctcccaggccacctgcagggccactactaggagtaaatgaagcaagggggttggcagcagcaggtgcactggatgcagctggtggggcgacacctcgcaccaagtgaattgtgtgatccgtctcaacgccatagctgtctagggtttgctcgtccttgaggatgcggcccttgtagatcaggcgctgctgcggtgctggcacgtcgcagctaccggatacgacctccttgaacgcgcccaccgtggcgcccaggtccgtctgcaccgtgaacttggagccgttcgcgcaccggatgtgcagcgtcgcctcccccgctgccgcctccactgaggcggcgggaggggattcgccgctccctgcgccctcgcctccgcttgccatcgcctcgagacctagttccgatccggtccgcggctccgattggggcttgccgtgtgcgcgtcagctgcgagttctcgctcttttttcctcctgttcccttgtgcttgcaatggattgagggaagaagaactgaaggaaaccccggcccggccgcgagctaccca

SEQ ID NO: 168266 - DNA, 274 bp, Zea mays
  Clone ID: MRT4577_8503C.1
aaaactttaaattttttttactgaaccgggggggccatattaagatagaagaactagtgccatacaaaaaccggcaatgtctacaacgtatataacttgaaccacaataaacttgtctgaataggaaaaaaaacaatagttaaaagacgggtaaaaaactagcgatagagaaataaacctgaattcaaaacgaaatgtagagtgatcaaatcccaagaagaaaaaataccacaccctaccggattctccacttttccaaatcccaaaagcaaaa

SEQ ID NO: 168267 - DNA, 1220 bp, Zea mays
  Clone ID: MRT4577_85040C.1
aataaactcagattctctacacagccagattctccccacagcagatttctcagaaaagctggtcagaaagacttgatccagacagacccagtgtcttccgtctcccgtgctcaacggcagtctctcggcaactttactcgatttctttgttacagcaagatgttgggataccaaaacgtcgttgggggacggctaaagctgaagggtaaagcgctagacgtgaaagatggtggagtaaagaaaaagaagaagaagtaccaacgtgaggagtcatctcagactgaatctgataagaatggagatgaagggaaaccacatcctgactatgaccatctcacaccagcagagcgccgctacatggaacagaagcaggagatcgacatgcagaagcccccgcgaagagttatcttttctgctttacggcccgccaaccctggaatcgggtgagccgtagctgggtgccgggtgcgccaaggggaccgcgtctagggcgttggcccggttcctcgcggtgaacctggagccgcgggacggtgccaaagcgtgcacgcccctaggacccacaaacggtattgggccgccaaggcccacggcctctggtcacggaaggcgcaatcgcctaaggcagtgtgtaacaactcacctgccgaatcaactagccccgaaaatggatggcgctgaagcgcgcgacccacacccggccatctgggcgagcgacatgccccgatgagtaggagggcgcggcggccgccgcaaaacccggggcgcgagcccgggcggagcggccgtcggtgcagatcttggtggtagtagcaaatattcaaatgagaactttgaaggccgaagaggagaaaggttccatgtgaacggcacttgcacatgggtaagccgatcctaagggacgggggacaacccggcagatagcgcgatcacgcgcgtcacccgaaagggaatcgggttaagatttcccgagccgggacgtggcggcagacggcggcgtccatagtcccgaaaacaaaataatgaaagagtcaggcagccgtttacttttgtcatacatggtggtcttgtcttttttttttacagcgatgtattttgcaatgttgattggtgtacatacgtatcggtcggatgttacctccctgtagtctgtcttttccaactatcgattcttgatttccaatatactatcaaatcaaattattatctattctaatcca

SEQ ID NO: 168268 - DNA, 547 bp, Zea mays
  Clone ID: MRT4577_85041C.1
ggccgcttttttttttttttttttctttaaggccttattcatgggccaaaatactcgcaataagcgatttatttaccaactactccacgcgcgataataataaatatcgcgactcttatttcttgggtttttttttttttttttttttttttttttttttttttcaaaacaagggagctgcaaattatttttaaaattttgaaatcccgggcctgggtaatccccaccatagcttcattatttggaaggggtaataaaatacaacccccgccttatatgatttggttgggacaagccaacagttaatttaaggggtaacagatatcttttaatgacctcatccaggggggtatccggaaccttggggaacaacaaagaagggtttgttccatcgccgccgatttaaaaatttgtaaagcagcctccataaaaaagggggaaatagggccccactccggtttgttgggccaggtcagtccttttatttgaagccaaaatttctttggcgggaatggggtttttttccaaacctccgaaaagcccggcc

SEQ ID NO: 168269 - DNA, 277 bp, Zea mays
  Clone ID: MRT4577_85043C.1
acaacctataatttctattcatatatgcacataccagccaccatgggtactgagaatttttatattgttaatataaccaatccactacatactcatttcctctctattatgcattcccctcattcctaaccagaaaacacataatcccacttcatcttttaaacatctttatttcctgtaaattgaaactgaaactccccatcgaactcctaactaattccccactagttaagtatatgcctaatgcgaaaacatattatacctttccacattttta

SEQ ID NO: 168270 - DNA, 458 bp, Zea mays
  Clone ID: MRT4577_85044C.1
gactaatataacattttaggaaatgcagtgagtcctattgtgctgtaaaattaagagaaaactgctagacaattaactctccggttgtcctaaaaacacagtatttggctgatgtagttttttttgttcagactgataaacatgggaacttgaagagctgttctacagtttcgtgctgataatgcgaagcagagtgaaatgattgtgaccattgccatgtgtgctggttttgctggtggattggttgactggcctcatattcagttaccatgtaacaatggagtttgaacaatcctatagattcgatgtctatgcttgggagcatgcctttcttgtgacggctcaaaagtgaagaagtgctaccttgtgctgatttgttgcacatgagattttacctacttgtgaataaaaggaatgtggtttaaaaaaactgcattgactgaaaaaagtaaatttac

SEQ ID NO: 168271 - DNA, 120 bp, Zea mays
  Clone ID: MRT4577_85045C.1
acctgcatccaacctcataccatttgtatacttttacctaaattcatttcaattgccgtacgtaaacaacgttcagacttaaaaagccatagccttattaaacttaatgcacacatttac

SEQ ID NO: 168272 - DNA, 383 bp, Zea mays
  Clone ID: MRT4577_85046C.1
gttggcttctcctccctttccggctcggcgttgccttctgcacctccatcgctgggtgatgtagccggcgaggtccagcccgcgaatcgcaccctccgaccaggtgagaggacagagatgatgctcgcggtctccatgctgctgagccggctgttcgcctacaaggagatgatggtcctgatggtgggactcctcgacgccggagagaccaccaccctctacgaggtgcagatcgtcgagaacgtcgccaccatcctcaccatcgtattcaatgttgacattgtggagtacaagaacatcagcttcactgactggctacggcggggaccagaacagaaacaggccactgagggggcattacttcctgaagacgcagggcctca

SEQ ID NO: 168273 - DNA, 170 bp, Zea mays
  Clone ID: MRT4577_85047C.1
tgtacggttctctggatttgcttgtccttttttttatattaaaccacactatattatataagtagaaacataatgacaagggggtggggataaccgtacacttactcttatttcaaaccttaatataacctcaataccaattttactttccttcatttactatattttat

SEQ ID NO: 168274 - DNA, 352 bp, Zea mays
  Clone ID: MRT4577_85048C.1
cgggcgcggataccagctgctgcctacctccttgccttccctcctacctctctcttgcgccgttcgtctctcgcctcttctcttctccccatcagcccccagcctcgctctctctctcacactactcacagaaccatggacttgctcacagtagtgttccccggacagaatgaccaaagacgacgagtccccgcgtgcggaagcatccacaaccatgcgctgaaggcgaacatacactgccacgtgtgcaaggacaaggtcaagaagccttgttcagcagatccaaggcgcgtactcggcggacattgatgtggacaaccacaacgtctcggcgacggctgacgagcactcg

SEQ ID NO: 168275 - DNA, 4839 bp, Zea mays
  Clone ID: MRT4577_85049C.1
atggatcctaaggggaagggaatcgtgatcaacgataaggagaaggagtccttcgtcaacgagcccaaagatgacaagcataccgactcaggctcgggccatagacggaaggaagggaagaagaagaagacaaggcgcatcaaggaaatcgtctactacgacgacagcgacgaatcttcctcttcccaaaaggacaacgacgacaacgactatgacaaacaaaagacggttaactcaaacttttcttttgattattcgcgcattccgcatagctcaaatgctcatttgctccccattccacttggcaagcctcctcactttgatggagaggactacggattttggagtcacaaaatgcgtactcacctattttctctccatccaagcatttgggagattgtggaaagtggaatgaaatttgatagctcggatagcccttcatttattaatgaacagatccataaaaatgcacaagctactactgtgttgctagcctctttgtgcagggacgagtatcacaaggtgagcggcttggacaatgccaagcagatttgggacaccctcaagatctctcatgaggggaatgatgtcaccttactcaccaagatggagttggtggagggcgagctcggacgattcgcgatgataaggggcgaggagccgacacaaacatacaaccggctcaagatccttatcaacaaaataaggagctacggaagcacgcggtggacggatcacgacgtcgtccgcctaatgctaaggtcatttaccgttcttgatcctcacttggtgaacaatattcgtgaaaatcctaggtacatcaagatgtcgcccgaagaaattcttggaaaatttgtaagcgggcgaatgatgatcaaggaggcgaggtacgtggacgacgcattgaatggcccaatccatgagcctcaacccattgctcttaaggcaacgaggagcaaggaggcgctacccagcaaagtggcgcaaattgaggcggctggtcttaatgatgaagagatggccctcatcatcaaaagattcaagacggcgcttaaaggtcgcaagggacagccaagcaagaccaaagccaaggggaagcgctcatgcttcaaatgtggtaagcttggtcattttattgctaactgtcccgacaatgatagtgatcaggaccaagtgaacaagagggaaaagaagaagcactacaagaaggcaaagggcgaggcacatctaggcaaggaatgggactcggattgctcctcttccgactccgacaatgaaggactcgccgccaccgccttcaacaaatcaaccctcttccccaacgagcgtcacacatgccttatggcaagggagaagaaggtatgtactcggaactctacctatgcttcttcaagtgaggacgaatctagtgatgaagatgaagtagattactcatgtttgtttaagggtctagatagaaccaaggtagacaaaattaatgaattgattgatgctctaaatgagaagaacatgcttttagagaaacaagaggatttattgtatgaagaacatgataaatttatagaagctcaaaaatcctatgctttagaagttaaaagaaatgaaatgctttcttttgaactatctacttgtcatgaaaccatctctactttaaaaggtgtcaacaatgatttaaatgctaaattagaagtagcaaataaatccaattcttgtgtagaacatgtcgcaatttgttctaggtgtaaagattttgatattaatgcttgtagtgaacacttagtttctatttcaaaattaaatgatgaattagctagtcttaatgcacaacttaagactagcaagagtgattttgataaactgaaatttgctagggatgcctacactgttggtagacacccctccattaaggatggacttggcttcaaaagggaagccaagaacttaacaagccataaggctcccattcccgcaaaggagaaagggaaggcccctatggctactagcactaaaaagaaccatgcttttttatatcatgatagaagacaatctagaagtgcttataggggttataatgcttttgattctcatcatatgattgcttctagctcttcttatatgcatggtagaaatatgtctaggagaaatgctattcatcatgtgcctagaaagaatgttagtcatgctcctaggaaagtagtaaatgaattttctacagtatatcatgctttgaatgcttcctttgcaatttgtagaaaggatagaaaagtaattgctaggaagttaggggctaaatgcaagggtgataaaacttgcatttgggtccctaagaagatttgtgctaaccttgtaggacccaacatgagttgggtttatgcatccgggggttcaagctggattatagacagcggatgcacaaaccatatgacgggggagaagaagatgttcacctcctacgtcaagagtaaggattcccaagattcaattatattcggtgatgggaatcaaggcaaggataagtctgaaacccaagggaccctcaagcgcttcctcaggagagctcaaaatgagtttgagctcaaggtgaagaagataaggagcgacaacgggtccgaattcaagaaccttcaagtggaggagttccttgaagaggaagggatcaagcacgagttctccgctccctacacaccacagcaaaatggtgtggttgagaggaagaacaggacgctaatcgacatggcgaggacgatgcttggagaatttaagacccccgagcggttttggtcggaagtcgtgaacacgggcttgccacgccatcaacagggtctaccttcaccgactcctcaagaagacgtcgcgtatagagtcttcaacaaatcattgggtttggttgaagtctctagcgacgttgtatttgatgagactaatggctctccaagagagcaagttgttgatcttgatgaagtagatgaagaagatgttccaacggccgccatacgaaccatggcgattggtgacgtgcgaccacaggaacaagatgagcaagatcaaccctcttcctcaactatggtgcattccccaacacaagacgatgaacaagttcatcaacaggaggcgtgtgatcaagggggagcacaagatgatcatgtgatggaggaagaagcgcaaccggcacctccaacccaagttcgagcgatgattcaaagggatcatcccgtcgaccaaattctgggtgacattagcaagggagtaactactcgatctcgattagttaatttttgtgaacattactcctttgtctcttctattgagcctttcagggtagaagaggccttgctagatccggactgggtgttggccatgcaagaggagttaaacaacttcaagcgcaatgaagtttggacactggtgcctcgtcccaagcaaaatgttgtgggaaccaagtgggtgttccgcaacaaacaggacgagcacggggtggtgacaaggaacaaggctcgacttgtggcaaaaggttatgcccaagtcgcaggtttggactttgaggagacttttgctcctgtggctaggctagagtcaattcgtatcttgctagcatatgccgctcaccattctttcaggttgttccaaatggatgtgaagagcgcattcctcaacgggccaataaaggaggaggtgtacgtggagcaaccccctggcttcgaggatgaacggtaccccgaccacgtgtgtaagctctctaaggcgctctatggacttaagcaagccccaagagcatggtatgaatgccttagagatttcttaattgctaatgctttcaaggttgggaaagccgatccaactctttttacaaagacttgtgatggtgatttatttgtgtgccaaatttatgtcgatgacataatatttggttctactaataaaaagtcttgtgaagagtttagcagggtgatgacgcagaaattcgagatgtcgatgatgggcgagttgaactacttccttgggttccaagtgaagcaactcaaggacggcaccttcatctcccaaacgaagtacacgcaggacctgctaaagcggtttgggatgaaggacgccaagcctgcaaagacaccgatgggaaccgacggacacaccgacctcaacaaaggaggtaagtccgttgatcaaaaagcataccggtcaatgatagggtcattactttacttatgtgctagtagaccggatattatgcttagcgtatgcatgtgtgctagatttcaatccgatcctaaggagtgtcacttagtggcggtgaagcgaattcttagatatttagttgctacgccttgcctcgggctctggtatccaaaggggtctacctttgacttgattggatactcagactccgattatgctggatgtaaggtcgataggaagagtacatcggggacgtgccaattcttaggaaggtccttggtgtcatggaaatctaagaaacaaacctccgttgccctatccaccgctgaggccgagtacattgccgcaggacagtgttgcgcgcaactactttggatgaggcaaaccctcagggactttggctacactctgagcaaagtcccactcctatgtgataatgagagtgctatccgcatggcggaaaatcctgttgaacacagccgcacaaagcacatagacatccggcatcactttttgagagaccaccagcaaaagggggatatcgaggtgtttcatgttagcaccgagaaccagctagccgatatctttaccaagcctctagatgagaagaccttctgcaggttgcgtagtgagctaaatgtcttagattcgcggaacttggattga

SEQ ID NO: 168276 - DNA, 2613 bp, Zea mays
  Clone ID: MRT4577_8504C.1
aattatcaactcatttctatattattattatgcaaaaaatagaaacgatattaaattacaaatgttccttcggcttgaaagaaggtaaaaacacaagcgtgacgcaaaagtaaatgcccagtccgcgtgaacagtacgggggcactgttcacctatttataggcacgggacatagctcatgtaaaattacatccatgccctttacatttggtagtaattctatagtaatccaccgaggtctgaacagccttttaatatttaaggcggtttccttttctgctatcacaccaaagctttcttgctcacagctttggcgctgggtcaaccttcgcattctttgggctactaacactgtggtaccgatttgagcacgaagatacctgttcacacattatactccaaaaacattgttaaatcatgtttttgaggaccttcggcaagccgaaggcccccaagaacattattattaatctatttccatttatcttatttgtacaaacaatattaaattacaaatgtaccttcggcttgaaggagtgaaaatacaagtatggcgccaaaagcaaatgccgagtcagcgtgaacagtacgggagtactgttcatctatttataggcgcgggtcgcagcccatgcaagattacattaatgccctttacgtttataaataactctatagtaattcttcgaggtctaatctggtttttcatctttaagtcggtttccctttccgccgttatgtcgaagctcttctgtgcatagcttcgtaatgatcttttccttcgtcacaatcaccttccgtcccactcaagcttcgtcttggccttaatcttatatactcgtaatccaattccgaagatacctgctcacacatttcacttggaaaacattgttaaatcatgtttttgaggaccttcggaagccgaaggccgccaacaaatattaatgttgaagattgtgaggtagagtagaggatttgctgactagaataaaatataatataaaaattcatgagtggacagcctaatatcgctcccacgcgtccggccgccgataaaacggccagccgggcagcggagacgcggagtggggcgcgacggcgcgtaacctgtggggtttcaggttttgtccctgcgtggcagcgacccagccccatcgagcatcgaggcatggaaccgggagccaaatcggaagcaaagcaaggtgaggcgggatctggcgcgggggcaagcggcagcggcaaggtgtatcatgagaggcagaggctgcaattctgtctcctccatgctctcaacaaccttatgcaggaaaaggaatgtttcacccgtgttgagttggacgggattgctggaaatcttgttctcaatgatccagacaagggccaatggactcctctaccattcatttttaaacctcaccacaatgttataactgggaactatgatgtgaatgttctcatcacagcattagaagctagaaacaagaaggtggtttggcatgatcgtcgtaaaggggcatcatcggttgatctgaatgcagaaacattggtaggcctgatgatcaatgtacctatcaggaggttcagggggctttggactggcaggcattgggtggcaattcgacgcattgatggcatctggtttaatttggacagtgatctttctgaacccaagcagtttaaggaccaagaaaacgtgattgggttccttgacagtgtgctcagccaaggtggagaactcatggttgtgctgcaagaaatttcctaaaccttacggtttaatcgctgatcgtaatggacagattggtaaatcgaaggtccagtatgcaacatatacacttggtttattcatatactggtttattggtaaatcgaaggtccagtatgcagacacctgctaacccttggtttgatttattgctgtgcccgtctctatcatatactggattgccaagcaggtgtctgcagtaggtagaacattagcttgctaaatggtgaaaatagtgaacttcaatcctcagcaagaattaatgttgctgcggaattgtacagaactaatagggaggttgcttgtgttgcagttatatgctttggagaaacgaagttatcccatgctcctagaatctgtcagttcgtttgtaagtaccattggatatcaggaaacgtaacattatctgtagactgtagactgtactatgtaatcagagcgatgtcccatggtctttcaaatattacaaagcataaaatatatgtagctgtaagatcattgttgtttaatggcatcatattaagttagggatcatatactggattgccaagcaggtgtctgcagtaggtagaacattagcttgctaaatgatgaaaatagcgaacttcaatcctcagcaagaattaatgttgctgcggaattgtacagaactaatagggaggttgcttgtgttgtagttatatgctttggagaaacgaagttatcccatgctcctagaatttgtcagttcgtttgtaagtaccattggatatcagggaacgtaacattatctgtagactgtactagttgatacccctggagtaatcagagcgatgtcccagggtctttcaaagaaaaaaaaaaaaaaa

SEQ ID NO: 168277 - DNA, 2325 bp, Zea mays
  Clone ID: MRT4577_85050C.1
gtttatgcatcagggggtacaagttggattatcgacagcggatgcacaaaccacatgacgggggagaagaggatgttctcttcctacgtcaagaacaaggattcccaggattcaataatattcggtgatgggaaacaaggcaagatagaccttgtgcagcttgtcaagcaggaaaaatctgaaacccaagggaccctcaagcgcttcctaaggagagctcaaaacgagtttgagctcaaagtgaagaagataaggagcgacaatgggttcgaattcaagaaccttcaagtggaggagtaccttgaggaggaagggatcaagcacgagttctccgctccctacacaccacagcaaaatggtgtggtagagaggaagaacaggacgcttatagacatggcaaggacgatgcttggagagttcaagacccccgagcacttttggtcggaagccgtgaacacggcttgtcacgccatcaacagggtctaccttcatcgcctcctcaagaagacgtcgtatgagctactaaccgtttttgggagtaaatgctacattctagtgaagaagggtaggaattccaaatttgctcccaaatccgtagaagggtttttgttaggttatgactcatatacaaaggcgtatagagtcttcaacaaatcatcgggtttggttgaagtctctagcgacgttgtatttgatgagactaatggctctccaagagagcaagttgtcgattgtgatgatgtagatgaagaagaagttccaacggccgcaatacgcaccatggcgattggagatcctttcagggtagaagaggccttgctagatccggactgggtgttggccatgcaggaggagctcaacaacttcaaaagaaatgaagtttggacactggtgcctcgtcccaagcaaaatgttgtgggaaccaagtgggtgtttcgcaacaagcaagatgaacatggggtggtgacaaggaacaaggcacgacttgtggcaaaaggttatgcccaagtcgcaggtttggactttgaggagacttttgctcctgtggctaggctagagtccattcgtattttgctagcatatgccgctcaccattccttcaggttgttccaaatggatgtgaagagcgccttcctcaacgggccaatcaaggaggaggtgtacgtggagcaaccccctggcttcgaggatgaacggcaccccgacgacgtgtgtaagctctctaaggcgctctatggacttaagcaagccccaagagcatggtatgaatgccttagagactttttaattgctaatgctttcaaggttgggaaagccgatccaactctttttactaagacttgtgatggtgatctttttgtgtgccaaatttatgtcgatgacataatatttggttcaactaatcaaaagtcttgtgaagagtttagcagggtgttgacgcagaaattcgagatgtcgatgatgggcgagttaagatacttccttgggttccaagtgaggcaactcaaggatggaaccttcatctctcaaaccaagtacacgcaagacttgatcaagaggtttgggatgaaggacgccaagcccgcaaagactccgatgggaactgacggacacaccgacctcaacaaaggaggtaagtccgttgatcaaaaggcataccggtctatgatagggtctttactttatttatgtgcaagtagatcggatattatgcttagtgtatgcatgtgtgctagatttcaatccgatcctaaggagtgtcacttagtggctgtgaagcggattcttagatatttagtcgctacgccttgttttgggatctggtatccaaaggggtctacctttgacttgattggatattctgactccgactatgctggatgtaaggtcgataggaagagtacatcggggacgtgccaattcttaggaaggtccctgttgtcatggagttctaagaaacaaacctccgttgccctatccaccgctgaggccgtgtatgttgccgcaggacagtgttgcgcgcaactactttggatgaggcaaaccctcagggactttggctacaatctgagcaaagtcccactcctatgtgataatgagagtgctatccgcatggcggataatcctgttgaacacagccgcacaaagcacatagacatccggcatcactttttgagagaccaccagcaaaagggagatatcgaagtatttcatgttagctccgagaaccagctagccgatatctttaccaagcctttagatgagcataccttttgcaagttgcgaagtgagctaaatgtcttagattcgcggaacttgtattga

SEQ ID NO: 168278 - DNA, 2580 bp, Zea mays
  Clone ID: MRT4577_85051C.1
gtttatgcatccgggggttcaagctggattatcgacagcggatgcacaaaccatatgacgggggagaaggagatgttcacctcctacgtcaagaacaaggattcccaagattcaataatattcggtgatgggaaccaaggcaaggtaaaagggtcagttgagtctctgggatataatttactatctgttagtcaattatgcaatacgggatacaattgtttattcacaaacatagatgtgtctgtctttagaagaagtgatggttcattagcttttaagggtgtattagatgacaaactttatttagttgattttgcaaaagaggaggccggtctagatgcatgcttaatagctaagactagcatgggctggctgtggcatcgccgcttagcacatgtagggatgaagaaccttcacaagcttctaaagggagaacacgataagtatgaaacccaagggaccctcaagcgcttcctaaggagagctcaaaacgagtttgagctcaaggtgaagaagataaggagcgacaacgggtccgagttcaagaacctccaagtggaggagttccttgaggaggaagggatcaagcacgagttctccgctccctacacaccacaacaaaatggtgtggtagagaggaagaacaggacgctcatcgatatggcgaggacgatgcttggagagttcaagacccccgagtgcttttggtcggaagccgtgaacacggcttgccacgccatcaacagggtctaccttcaccgcctcctcaagaagacgtcgtatgagcttctaaccgataacaaacccaatgtatcttactttcgtgtatttgggagcaaatgctacattctagtgaagaagggtagaaattctaagtttgctcccaaagctgtagaagggtttttgttaggttatgactcaaatacaaaggcgtatagggtcttcaataaatcatcgagtttggttgaagtctctagcgacgttgtatttgatgagaccaatggctctccaagagagcaagttgttgatcttgatgatgtagatgaagaagatgttccgacggccgctatacgaaccatggcgattggtgatgtacgaccacaggaacaaaaggagcaagatcagccttcttcctcaacaatggtgcaacccccaactcaagatgatgaacaggaggcgtatgatcaagggggagcacaagatgatcaacacggagtggtgacaaggaacaaggctcgacttgtggcaaaaggttatgcccaagtcgcaggtttggactttgaggagacttttgctcctgtggctaggctagagtccattcgtatcttgctagcatatgccgctcaccattctttcaggttgttccaaatggatgtgaagagcgctttcctcaacgggccaatcaaggaggaggtgtacgtggagcaaccccctggcttcgaggatgaacggtaccccgaccacgtgtgtaagctctctaaggcgctctatggacttaagaaagccccaagagcatggtatgaatgccttagagatttcttaattgctaatgctttcaaggttgggaaagtcgatccaactcttttcactaagacttgtgacaatgatctttttgtgtgccaaatttatgtcgatgacataatatttggttctactaataaaaagtcttgtgaagagtttagcagggtgatgacgcagaaattcgagatgtcaatgatgggcgagttgaactacttccttgggttccaagtgaagcaactcaaggacggcaccttcatctctcaaacgaagtacacacaagacttgctgaagcggtgtgggatgaaggatgccaagcccgcaaagactccgatggggaccgacagacacactgatctcaacaaaggaggtaagtccgttgatcaaaatgcataccggtcaatgatagggtcattactttacttatgtgctagtagaccggatattatgcttagcgtatgcatgtgtgctagtattcaatccgatcctaaggagtgtcacttagtggcagtggagcgaatccttagatatttagttgctacgccttgcttcgggctctggtatccaaaggggtctacctttgacttgattggatattcaaattccgacaatgttggatgtaaggtcgataggaagagtacatcggggacgtgccaattcttaggaaggtccctggtgtcatggaactctaagaaacaaacttctgttgccctatccaccgctgaggccgagtatgttgccgcaggacagtgttgcgcgcaactactttggatgaggcaaaccctccgggactttggctacaatctgagcaaagttccactcctatgtgataatgagagtgctatccgcatggtggaaaatcctgttgaacacagccgcacaaagcacatagacatccgacatcactttttgagagaccaccagcaaaaggaagatatcgaagtgtttcatgttagcaccgagaaccaactagccgatatctttaccaagcctctagatgagaagaccttttgcaggttgcgtagtgagctaaatgtcttagattcgcggaacttggattga

SEQ ID NO: 168279 - DNA, 5229 bp, Zea mays
  Clone ID: MRT4577_85052C.1
atggatcctaaggggaagggaattgtgatcaacgacaaggagagggagtccttcgtcaacgagccaagggatgacaagtccaacgactcaagctcgggccacagacgcaaagatgggaagaagaagaagacaagacgcatcaaggagatcgtctactacgacagcgatgagtctacttcttcccaaaaggatgaggacaacgactacaaacaaaagacggttaactcgaacttttcatttgattattctcgtattcctcaaagttcgaattcgcatttgctttccattccactcggcaagcccccacactttgatggagaagactacggattttggagccacaaaatgcgtagtcacctattctctctccatccaagcatatgggagattgtagagagtggaatgaaatttgatagctcggatagtcctgtgattataaatgaacaaattcatagaaatgcacaagctactactgttctcttagcatctttgtgtagggaagagtacaataaggtgagcggcttggacaatgccaagcaaatatgggacaccctcaagatctctcacgagggcaacgacgtcaccatgctcaccaagatggagctggtggagggcgaacttgggagatttgctatgataaggggggaggagccaacccaaacatacaatcggctcaagacccttgtcaacaaaataaggagctacgggagcacgcgatggacggatcacgacgtcgtccgcctaatgctaaggtcttttaccattcttgatcctcatttggtgaacaacattcgtgaaaatcctaggtacaccaagatgtcgcctgaagaaattcttgggaagttcgtaagcgggcggatgatgattaaggaggcaagatatgtggacgacgcgttgaacggtcctattcatgagcctcaacccgttgctctcaaggcaacaaggagtaaggaggcgctaccaagcaaggtggcgcaagttgaggcggccgggctaaataatgaggagatggccctcatcataaagcgcttcaagacggcgcttaaaggtcgcaagggacagccaagcaagaccaaagccaaggggaagcgctcatgcttcaaatgcggtaagcttggtcattttattgctaactgtcccgacaatgatagtgatcaggaccaagggaacaagagggaaaagaagaagcactacaagaaggcaaagggcgaggcgcatctaggcaaggaatgggactcggattgctcctcttccaactccgacaatgaaggactcgccgccaccgccttcaacaaatcaaccctcttccccaacgagcgtcacacatgcctgatggcaagtgagaagaaggtatgtactcggaactctacctatgcttcttcaagtgaggacgaatctagtgatgaagatgaagtagattactcatgtttgtttaagggtctagatagaaccaaggtagacaaaattaatgaattgattgatgctctaaatgagaagaacatgcttttagagaaacaagaggatttattgtatgaagaacatgataaatttatagaagctcaaaaatcctatgctttagaagttaaaagaaatgaattgctttcttttgaactatctacttgtcatgaaaccatctctactttaaaaggtgtcaacaatgatttaaatgctaaattagaagtagcaaataaatccaattcttgtgtagaacatgtcgcaatttgttctaggtgtaaagattttgatattaatgcttgtagtgaacacttagtttctatttcaaaattaaatgatgaattagctagtcttaatgcacaacttaagactagcaagagtgattttgataaactgaaatttgctagggatgcctacactgttggtagacacccctccattaaggatggacttggcttcaaaagggaagccaagaacttaacaagccataaggctcccattcccgcaaaggagaaagggaaggcccctatggctactagcactaaaaagaaccatgcttttttatatcatgatagaagacaatctagaagtgcttataggggttataatgcttatgatgattttgattctcatcacatgattgcttctagctcttcatatatgcatggtagaaatatgtctaggagaaatgctattcatcatgtgcctagaaagaatgttagtcatgcttctaggaaagtagtaaatgaaccttctacaatttattgtgctttaaatgcttcctttgctattcgtagaaaggataagaaaattgttgctaggaagttaggggcaaaatgcaagggtgacaaaacttgcatttgggtccctaaggatatttgcactaaccttgtaggacccaacatgagttgggtttatgcatccgggggttcaagctggattatcgacagcggatgcacaaaccatatgacgggggagaagaaaatgttcacctcctacgtaaaaaataaagattcccaagattcaattatattcggtgatgggaatcaaggcaaggtaaaaggtttagatgtgtctgtctttagaagaagtgatggttcactagcttttaaaggtgtattagacggcaaactttatttagttgattttgcaaaagaagaggccggtctagatgcatgcttaatagctaagactagcatgggctggctgtggcatcgccgcttagcacatgtggggatgaagaacctccataagcttctaaagggagaacacgtgataggtctaactaatgttcaattcgaaaaagatagaccttgtgcagcttgtcaagcagggaaacaggtgggaggctctcatcacaccaaaaatgtgatgacaacatcaagacccttggagatgctgcatatggacctcttcggacccgtcgcctatctgagcataggaggaagtaagtatggtttagttattgttgatgacttttcccgcttcacttgggtgttctttttacaggataagtctgaaacccaagggaccctcaagcgcttcctcaggagagctcaaaatgagtttgagctcaaagtgaagaagataaggagcgacaacgggtccgagttcaagaaccttcaagtggaggagttccttgaagaggaagggatcaagcacgagttctccgctccctacacaccacagcaaaatggtgtggtagagaggaagaacaggacgctcatcgacatggcgaggacgatgctaggagagttcaagacccccgagtgcttttggacggaagccgttaacacggcttgccacgccatcaacagggtctaccttcatcgcctcctcaagaagacgtcgtatgagctactaaccggtaacaaacccaatgtatcttactttcgtgtatttgggagcaagtgctacattctagtgaagaagggtagaaattctaaatttgctcccaaagctgtagaagggtttttgttaggttatgactcaaatacaaaggcgtatagagtcttcaacaagtcatcgggcttggttgaagtctctagcgacgttgtatttgatgagactaatggctctccaagagagcaagttgttgatcttgatgatgtagatgaagaagatgttccaacggccgctatgcgcaccatggcgattggtgatgtgcgaccacaggaacacttggagcgagatcaaccttcttcctcaactatggtgcatcccccaactcaagacgatgaacagcctttcagggtagaggaggccttgctagatccggactgggtgttggccatgcaggaagagctcaacaacttcaagaggaatgaagtttggacgctggtgcctcgtccgaagcaaaatgttgtgggaaccaagtgggtgttccgcaacaaacaggacgaacatggggtggtgacgagaaacaaggctcgacttgtggcaaaaggttatgcccaagtcgcaggtttggatttcgaggagacttttgctcctgtggctaggctagagtccattcgaatcttgctagcatatgccgctcaccattctttcagattgtaccaaatggatgtgaagagcgctttcctcaacgggccaataaaggaggaagtgtacgtggagcaaccccctggcttcgaggatgaacggtaccccgaccacgtgtgtaagctctctaaggcgctctatggacttaagcaagccccaagagcatggtatgaatgccttagagatttcttaattgctaatgctttcaaggttgggaaagccgatccaactctttttacaaagacttgtgatggtgatttatttgtgtgccaaatttatgtcgatgacataatatttggttctactaataaaaagtcttgtgaagagtttagcagggtgatgacgcagaaattcgagatgtcaatgatgggcgagttgaactacttccttgggttccaagtgaagcaactcaaggacggcaccttcatctcccaaacgaagtacacgcaggacctgctaaagcggtttgggatgaaggacgccaagcctgcaaagacaccgatgggaaccgacggacacaccgacctcaacaaaggaggtaagtccgttgatcaaaaagcataccggtcaatgatagggtcattactttacttatgtgctagtagaccggatattatgcttagcgtatgcatgtgtgctagatttcaatccgatcctaaggagtgtcacttagtggcggtgaagcgaattcttagatatttagttgctacgccttgcctcgggctctggtatccaaaggggtctacctttgacttgattggatattcagactccgactatgctggatgtaaggtcgataggaagagtacatcggggacgtgccaattcttaggaaggtccctggtgtcatggaactctaagaaacaaacctccgttgccctatccaccgctgaggccgagtatgttgccgcaggacagtgttgcgcgcaactactttggatgaggcaaaccctcagggactttagctacaatctgagcaaagtcccgctcctatgtgataatgagagtgctatccgcatggcggaaaatcctgttgaacacagccgcacaaagcacatagacatccggcatcactttttgagagaccaccagcaaaagggagatatcgaagtgtttcatgttagcaccgagaaccagctagccgatatctttaccaagcctctagatgagaagaccttttgcaggctgcgtagtgagctaaatgtcttagattcgcggaacctggattga

SEQ ID NO: 168280 - DNA, 921 bp, Zea mays
  unsure (1)..(921): unsure at all n locations
  Clone ID: MRT4577_85053C.1
agcgacgcccatggaggcggnggcggagctggcgctgcgcctccgggcggccgccaacgaccgcctcgctcgctacgagccgctggcgctcgtcgccgcgccgctcctggcgctcctcgtcgcgcggaccctccacgccacggccagcgccgtcgccgaccgggggctcgtcgccatcgccatcgccgccgtcaagttgctgccgggagtctccggctacatcgcggcggagaagaagaaggttgttgacaagatgcaatcaggtggggccaagaacaatcggcgagctgagttgccaactattggccttgccgagcaagtgatagaggaacttgaaacactgaaagccaaagatgtagactggcagggaaaatgctctggcacagtatatattgctggaagtgagtctgagggtcattttcaattgataaacaaggcgtactctatgttttcacacaccaatccgctccatcaagatgtatttaagagcgtagcaaacatggaagctgaagtcgttgcaatgacagcggctttacttggcagcaaagaaaaatcatctggtggacaaatttgcggcaacatgacatcaggtggaactgaaagcatattattagcagtcaaaacatcacgtgactatatgcgatcaaagaaaggaattacaaggcctgaaatgataattgctgaatcagcacattctgcatatgacaaagctgctcaatacttcaatattaaagtgcggcgtgtacctgtgaacaaagagtttcttgcagatgtgaaaggattcaaacgatgcataaatggaaacaccataatgatggttggatctgcaccaggatttccgcatggtttaattgatcctattgaggaacttggggaactggcttcgcgctatgacatttgcttgcatgttgatttatgcct

SEQ ID NO: 168281 - DNA, 2757 bp, Zea mays
  Clone ID: MRT4577_85054C.1
atggcttgtagcgctaaaaagaactatgcctttttgtatcatgataagagacaatctagaaatgcttatcggagttataatgcatacaatgcttttgattctcatgccatgttcgcttctagttcttcttatgtgcatgatagaaatgttggtaggagaaatgttgttcataatatgcctaggagaaatggtgttaatgttcctaggaaagctaatgaaccttctacaatatatcatgctttaaatacttcatttgctatttgtagaaaagataagaagatagttgctagaaaattaggggcaagatgcaagggagacaaaacttgcatttgggtccctaaggatatttgcactaaccttgtaggacccaacatgagttgggtttatgcatccgggggttcaagctggattatcgacagcggatgcacaaaccatatgacgggggagaagaagatgttcacctcctacgtcaaaaataaggattcccaagattcaataattttcggtgatgggaaccaaggcaaggataagtctgaaacccaagggaccctcaagcgcttcctcaggagagctcaaaatgagtttgagctcaaagtgaagaagataaggagcgacaacgggtccgagttcaagaaccttcaagtggaggagttccttgaagaggaagggatcaagcacgagttctccgctccctacacaccacagcaaaatggtgtggtagagaggaagaacaggacgctcatcgatatggcgaggacaatgctaggagagttcaagacccctgagtgcttttggacggaagccgtgaacacggcttgccacgccatcaacggggtctaccttcatcgcctcctcaagaagacttcgtatgagctactaaccgatgaagaagatgttccgacggccgctatacgaaccatggcgattggagaagtgcggccacaggaacaagatgaacgagatcaaccttcttcctcaacatcggtgcatcccccaactcaagacgatgaacaggttcatcaaaaggaggcgtgtgatcaagggggagcacaagatgatcacgtgatggaggaagaagcgcaaccggcacctccaacccaagttcgagcgatgatccaaagggatcatcccgtcgatcaaattctgggtgacattagcaagggagtaactactcggtctcgattagttaatttttgtgaacattactcctttgtctcttctattgagcctttcatggtagaagaagccttgcaagattcggactgggtgctggccatgcaagaggagctcaacaacttcaagaggaatgaagtttggacgctggtgcctcgtcccaagcagaatgttgtgggaaccaagtgggtgttccgcaacaaacaagacgagcacggagtggtgacgaggaacaaggctcgacttgtggcaaaaggttatgcacaagtcgcaggtttggactttgaggagacttttgctcctgtggctaggctagaatcaattcgtatcttgctagcatatgccgctcaccattctttcaggttgttccaaatggatgtgaagagcgctttcctcaacgggccaatcaaggaggaggtgtacgtggagcaaccccctggctttgaggatgaacggtaccccgaccacgtgtgtaagctctctaaggcgctctatggacttaagcaagccccaagagcatggtatgaatgccttagagatttcttaattgcaaatgctttcaaggttgggaaagccgatccaactcttttcactaagacatgtgatggtgatttgtttgtgtgccaaatttatgtcgatgacataatatttggttctactaataaaaagtcttgtgaagagtttagcagggtgatgacgcagaaattcgagatgtcaatgatgggcgagttgaactacttccttgggttccaagtgaagcaactcaaggacggcaccttcatctctcaaacgaagtacacgcaagatctgctaaagcggtttgggatgaaggacgccaagcccgcaaagactccgatgggaaccgacggacacaccgacctcaacaaaggaggtaagtccgttgatcaaaaagcataccggtcaatgatagggtcattactttacttatgtgctagtagaccagatattatgcttagcgtatgcatgtgtgctagatttcaatccgatcctaaggagtgtcacttagtggcggtgaagcgaattcttagatatttagttgctacgccttgcttcgggctctggtatccaaaggggtctacctttgacttgattggatattcagattccgattatgctggatgtaaggtcgataggaagagtacatcggggacgtgccaattcttaggaaggtccctggtgtcatggaactctaagaaacaaacctctgttgccctatccaccgctgaggccgagtatgttgccgcaggacagtgttgtgcgcaactactttggatgaggcaaaccctcagggactttggctacaatctgagcaaagtcccactcctatgtgataatgagagtgctatccgcatggcggaaaattctgttgagcacagccgcacaaagcacatagacatccgacatcactttttgagagaccaccagcaaaagggagatatcgaagtgtttcatgttagcaccgagaaccagctagccgatatctttaccaagcctctagatgagaagaccttttgcaggctgtgtagtgagctaaatgtcttagattcacggaacttggattga

SEQ ID NO: 168282 - DNA, 2232 bp, Zea mays
  Clone ID: MRT4577_85055C.1
atgggaatcaaggcaagaagaagtgatggttcactagcttttaagggtgtattagacggcaaactttatttagttgattttgcaaaagaggaggccggtctagatgcatgcttaattgctaagactagcatgggctggctgtggcatcgccggttagcacatgtggggatgaagaaccttcacaagcttctaaagggagaacacgtgataggtctaaccaatgttactttcgaaaaagatagaccttgtgcagcttgtcaagcaggtaaacaagtgggaggagcgcatcacaccaaaaatgtgatgaccacatcaagacctttggagatgcttcacatggacctcttcggacccgtcgcctatctaagtataggaggaagtaagtatggtcttgttatagttgatgacttttctcgcttcacttgggtattctttttacaggataaatctgaaacccaagggaccctcaagcgctttctaaggagagctcaaaacgagtttgagctcaaggtgaaaaagataaggagcgacaatgtgtccgagttcaagaaccttcaagtagaggagtaccttgaggaggaagggatcaagcacgagttctccgctccctacacaccacagcaaaatggtgtggtagagaggaagaacaggacgcttatagacatggcgaggacgatgcttggagagttcaagatcctcgagcgcttttgggtagaagaggccttgctagatccggactgggtgttggccatacaggaggagctcaacaacttcaaaagaaatgaagtttggacactggtgcctcgtcctaagcaaaatgttgtgggaaccaagtgggtgttccgcaacaaacaagacgagcacggggtggtgacaaggaacaaggcacgacttgtggcaaaaggttatgcccaagtcgcaggtttggactttgaggagacttttgctcctgtggctgggctagactccattcgtatcttgctagcatatgccgctcaccattccttcaggttgttccaaatggatgtgaagagcgctttcctcaacgggccaatcaaggaggaggtgtacgtggagcaaccccctggcttcgaggatgaacggtaccccgaccacgtgtgtaagctctctaaggcgctctatggacttaagcaagccccaagagcatggtatgaatgccttagagactttttaattgctaatgctttcaaggttgggaaagccgatccaactctttttactaagacttgtgatggtgatctttttgtgtgccaaatttatgtcgatgacataatatttggttctactaaccaaaagtcttgtgaagagtttagcagggtgatgactcagaaattcgagatgtcgatgatgggcgagttaagctacttccttggattccaagtgaggcaactcaaggatggaaccttcatctctcaaaccaagtacacgcaagacttgatcaagcggtttgggatgaaggatgccaagcccgcaaagactccgatgggaaccgacggacacaccgacctcaacaaaggaggtaagtccgttgatcaaaaagcataccggtctatgatagggtctttactttatttatgtgctagtagaccggatatcatgcttagtgtatgcatgtgtgctagatttcaatctgatccaagggagtgtcacttagtggctgtgaagcgaattcttagatatttagtcgctacgccttgtttcgggatctggtatccaaaggggtctacctttgacttgattggatattcagattccgactatgctggatgtaaggtcgataggaagagtacatcggggacgtgccaattcttaggaaggtccctagtgtcatggagttctaagaaacaaacctccgttgccctatccaccgctgaggccgagtacgttgccgcaggacagtgttgcgcgcaactactttggatgaggcaaaccctcagggactttggctacaatctgagcaaagtcccactcctatgtgataatgagagtgctatccgcatggcggataatcccgttgaacacagccgcacaaagcacatagacatccgacatcactttctgagagaccaccagcaaaagggagatatcgaagtgtttcatgttagctccgagaatcagctagccaatatctttaccaagcctttagatgagcagacattttgcaagttgcttagtgagctaaatgtcttagattcgcggaacttggattga

SEQ ID NO: 168283 - DNA, 1377 bp, Zea mays
  Clone ID: MRT4577_85056C.1
atgcaggaggaactcaacaacttcaagcacaatgaagtttggacactggtgcctcgtcccaagcaaaatattgtgggaaccaagtgggtgttccgcaacaaacaggacgagcacggggtggtgacgaggaacaaggctcgacttgtggcaaaaggttatgcccaagtcgcaggtttggactttgaggagacttttgctcctgtggctaggctagaatcaattcgtatcttgctagcatatgccgctcaccattctttcaggttgttccaaatggatgtgaagagcgctttcctcaacgggccaataaaggaggaggtgtacgtggagcaaccccctggcttcgaggatgaacggtaccccgaccacgtgtgtaagctctctaaggcgctctatggacttaagcaagccccaagagcatggtatgaatgccttagagatttcttaattgctaatgctttcaaggttgggaaagtcgatccaactcttttcactaagacatgtgatggtgatttgtttgtgtgccaaatttatgtcgatgacataatatttggttctactaataaaaagtcttgtgaagagtttagcagggtgatgacgcagaaattcgagatgtcaatgatgggcgagttgaactactttcttgggttccaagtgaagcaactcaaggacggcaccttcatctctcaaacgaagtacacgcaagacctgctgaagcggtttgggatgaaggacgccaagcccgcaaagacgccgatggggacgacgggacacacgacctcaacaaagagatttcaatccgatcctaaggaatgtcacttagtggcagtgaagcggattcttagatatttagttgctacgccttgcttcgggctctggtatccaaaggggtctacctttgacttaattggatattcagactccgattatgctggatgtaaggtcgatagtaagagtacatcggggacgtgccaattcttaggaaggtccctggtgtcatggaattctaagaaacaaacctccgttgccctatccaccgctgaggccgagtatgttgccgcaggacagtgttgcgcgcaactactttggatgaggcaaaccctcagggactttggctacaatctgagcaaagtcccactcctatgtgataatgagagtgctatccgcatggcggaaaatcctgttgagcacagccgcacaaagcacatagacatccggcatcactttctgagagaccaccagcaaaagggagatatcgaagtgtttcatgttagcaccgagaaccagctagccgatatctttaccaagcctctagatgagaagaccttttgcaggctgcgtagtgagctaaatgtcttagattcgcggaacttggattga

SEQ ID NO: 168284 - DNA, 1099 bp, Zea mays
  Clone ID: MRT4577_85057C.1
atgacgggggagaagaagatgttcacctcctacgtcaagaacaaggattcccaagattcaatcatattcggtgacgggaaccaaggcaaggataaatctgaaacccaagggaccctcaagcgcttcctaaggagagctcaaaatgagttcgagctcaaggtgaagaagattaggagcgacaacgggtccgagttcaagaaccttcaagtggaggagtaccttgaggaggaagggatcaagcacgagttctccgctccctacacaccacagcaaaacggtgtggtagagaggaagaacaggacgctcatcgacatggcgaggacgatgcttggagagttcaagacccccgagcggttttggtcggaagccgtgaacacggcttgccacgccatcaaccggatgaagaagacgttccgacggccgccattcgcaccatggcgattggagatgtgcgaccacaggaacaaacggagcaagatcaaccttcttcctcaacaatggtgcaacccccaactcaagacgatgaacaggttcatcaagaggaggcgcttgatcaagggggagcacaagatgatcatgtgatggaggaagaagcgcaaccggcacctccaacccaagttcgagcgatgattcaaagggatcatcccgtcgatcaaattctgggtgacattagcaagggagtaactactcgatctcgattagttaatttttgtgaacattactcctttgtctcttctattgagcctttcagggtagaggaggccttgctagatccggactgggtattggccatgcaagaggagctcaacaacttcaagcgcaatgaagtttggacattagtgcctcgtccgaagcaaaatgttgtgggaaccaagtgggtgttccgcaacaaacaggacgagcacggggtggtgatgaggaacaaggctcgacttgtggcaaaaggttatgcccaagtcgcaggtttggactttgaggagactttcgctcctgtggctaggctagagtctattcgtatcttgctagcatacgccgctcaccattctttcaggttgtttcaaatggatgtgaagagcgcctttctcaacgggccaatcaa

SEQ ID NO: 168285 - DNA, 4428 bp, Zea mays
  Clone ID: MRT4577_85058C.1
atggatcctaaggggaagggaattgtgatcaacgataaggaggagtccttcgtcaacgagccgaaggatgacaagcctaccgactcgggctcgggccacaaacgcaaagatgggaagaagaagaagacaagacgcatcaaggagatcatctactacgacgcagcgatgagtccacttcttcccaaaaggacaacgacgacaacgactacgacaaaagaaagacgggacgagtaccataaggtgagcggcttggacaatgccaagcagatctgggacaccctcaagatctctcatgaggggaacaacatcaccttgctcaccaagatggagttggtagagggcgatctcaggagatttgcaatgataaggggcgaggagccaacccaaacatacaaccggctcaagaccctcatcaacaaaataaggagctacggaagcacgcgatggatggaccacgacgtcgttcgcctaatgctaaggtcctttactgtacttgatccacatctggtgaacaatattcgtgaaaatcctaggtacaccaagatgtcgcccgaagaagttcttgggaagtttgtgagcgggcgaatgatgatcaaggaggcgagatacgtggacgacgcattgaatggtccaatcaatgagcctcaaccctttgctctcaaggcaacaagaagcaaggaggcgctacctagcaaggtggcacaagttgaggcagcagggctaaatgatgaagagatggctctcatcattaagcgcttcaagatggcgctaaagggtcacaaggggcagccaagcaagaccaagacaaaggggaagcgctcatgcttcaagtgtggactcgccgccaccgccttcaacaagtcatccctcttccccaacgagcgtcacacatgcctcatggcaaaggagaagaaggtatgtactcgaaacaatgccacttatgattcttctagtgatgatgagtctagtgatgaagaaatagattactctagtttgttcaagggattggatagaactaaaatagataagattaatgaattgattgatgccttgaatgaaaaggatagacttttagagaaacaagaggaccttttatatgaagagcatgacaaatttgtagaggcacaaaaatctcatgcattagaagttaaaagaaatgaaatgctttcttatgaactatcttcttgccatgagacaatttctagcttaaggagcataaatgatgatttgaatgctaagttagagatagctagtaaatctaactcttgtgtagaacatgttatgatttgcaataggtgtaaagattttgacattgatgcttgtagtgaacacctagtttcaaattccaaattgaatgatgaattggctagtcttaatgcccaacttaagactagcaagaatgaatttgacaagctaaagtttgcaagggatgcctacacgattggtagacacccctcaattaaggatggacttggcttcaagatggaagccaagaacttaacaagccataaggctcccatctcctccaaggagaaagggaaggcccctatgactagtagtgctaaaaagaaccatgcttttatgtaccatgatagaagacagtcttataggagttgtaatgcttatgatgcttttgactctcatgccatgtttgcttctagttctttctatatgcatggtagagatatgcctaggagaaatgttgttaatattcctaggaaagttaatgaaccttctacaatatatcatgcttgcaatgcttcatttgccatttgtagaaagaataagaaggtttatgcatccgggggttcaagttggattatcgacagcggatgcacaaaccatatgacgagggagaagaagatgttcacctcctacgtcaaaaacaaggattcccaagattcaataatattcggtgatgggaatcaaggcaagatagaccttgtgcagcttgtcaagcaggataaaactgaaacccaagggaccctcaagcgcttcctaaggagagctcaaaacgagtttgagctcaaggtgaagaagataaggagcgacaatggatccgagttcaagaaccttcaagtggaggagtaccttgaggaggaagggatcaagcacgagttctccgctccctacacaccacagcaaaatggtgtggtagaaaggaagaacaggacgcttatagacatggcgaggacgatgcttggagagttcaagacccccgagtgcttttggtcggaagccgtgaacacggcttgccacgccatcaacagggtctaccttcatcgcctcctcaagaagacatcgtatgagctactaaccggtaacaaacccaatgtttcgtattttcgagtttttgggagtaaatgctacattctagtgaagaagggtaggaattccaaatttgctcccaaagccgtagaagggtttttgttaggttatgactcaaatacaaaggcgtatagagtcttcaacaaatcatcgggtgtggttgaagtctctagcgacgttgtatttgatgagactaatggctctccaagagagcaagttgttgatattgatgatgtagatgaagaagaagttccaacggccgcaatacgcaccatagcgattggagatgtgcggccacaggaacaagatgaacgagatcaaccttcttcctcaacaatggtgcatcccccaactcaagatgatgaacaggaggcatgtggtcaagggggagcacaagatgatcatgtaatggaggaagaagcgcaaccggcacctccaacccaagttcgagcgatgattcaaagggatcatcccgtcgaccaaattttgggtgatattagcaagggagtaactactcgatctcgattagttaatttttgtgagcattactcttttgtctcttctattgagcctttcagggtagaagaggccttgctagatccagactgggtgttggccatgcaggaggagctcaacaacttcaagagaaatgaagtttggacacttgtgcctcgtcccaagcaaaatgttgtgggaaccaagtgggtgttccgcaacaaacaagacgagcacggggtggtgacaaggaacaaggcacgacttgtagcaaaaggttatgcccaagtcgcaggtttggactttgaggagacttttgctcctgtggctaggctagaatccattcgcattttgctagtatatgtcgctcaccattctttcaggttgttccaaatggatgtgaagagcgctttcctcaatgggccaatcaaggaggaggtgtacgtggagcaaccccctggcttcgaggatgaacggtaccccgaccacgtgtgtaagctctctaaggcgctctatggacttaagcaagccccaagagcatggtatgaatgccttagagactttttaattgctaatgctttcaaggttgggaaagccgatccaactctttttactaagacttgtgagggtgatctttttgtgtgccaaatttatgtcgatgacataatatttggttctactaaccaaaagtcttgtgaagagtttagcagggtgatgactcaaaagtttgagatgtcgatgatgggcgagttaagctatttccttgggtttcaagtgaggcaactcaaggatgggaccttcatctcccaaacgaagtacacacaagacttgatcaagcgttttgggatgaaggacgccaagcccgcaaagactccgatgggaaccgacggacacaccgacctcaacaaaggaggtaagtccgttaatcaaaaggcataccggtctatgatagggtctttactttatttatgtgctagtagaccggatattatgcttagcgtctgcatgtgtgctagatttcaatccgatccaagggagtgtcacttagtggctgtgaagcgaattcttagatatttagtcgctacgccttgcttcgggatctggtatccaaaggggtctacctttgacttaattggatattcagactccgactatgctggatgtaaggtcgataggaagagtacatcggggacgtgccaattcttaggaaggtccctagtgtcatggagttctaagaaacaaacttctgttgccctatccaccgctgaggccgagtacgttgccgcaggacagtgttgcgcacaactactttgcatgaggcaaaccctcagggactttggctacaatttgagcaaagtcccactcctatgtgataatgagagtgctatccgcatggcggataatcctgttgaacacagccgcacaaagcacatagacatccggcatcactttttgagagaccaccagcaaaagggagatatcgaagtgtttcatgttagctccgagaaccagctagccgatatctttaccaagcctttagatgagcagaccttttgcaagttgcgtagtgagctaaatgtcttagattcgcggaacttggattga

SEQ ID NO: 168286 - DNA, 577 bp, Zea mays
  Clone ID: MRT4577_85059C.1
actcgataatggtgccctcataccggcatgtgtttcctagaaataatcaatatattggttgagatttatctcgataaaaaaaaaaaaaaaaaaaaaaaaaaaaaaaaaaaaaaaaaaaaaaaaaaaaaaaaaaaaaaaaaaaaaaaaaaaaaaaaaaaaaaaaaaaaaaacctaaaaaaaaaaaaaaaaaaaaaaaaaacgcttcaacctgggccgaaaccccccaaaggggaactttggagaatttcattacaatgggggggccgtggattttcaatttaggggccccataaaccccttaagggagccaattaaaaatacttgggccgattttaaaaaacggcgggtggggaaaaacccgggaggccccaaattaaagccctttcaaaaaaatcccctttctgaatggggggtgaaaacgaaaagggcccgcccattacccccttccaaaagtgggggcaacccaaagggaaaacgcccccccctttaagggcctaataaccgcggggggggggggggttccccccaagggggccctttaacttggcaagccccttaaagcccttaatttggggtt

SEQ ID NO: 168287 - DNA, 1321 bp, Zea mays
  Clone ID: MRT4577_8505C.1
aaaaaaagagtggggcgcgacggcgcgtaacctgtggggtttcaggttttgtccctgcgtggcagcgacccagccccatcgagcatcgaggcatggaaccgggagccaaatcggaagcaaagcaaggtgaggcaggatctggcgcgggggaaagcggcagcggcaaggtgtatcatgagaggcagaggctgcaattctgtctcctccatgctctcaacaaccttatgcaggaaaaggaatgtttcacccgtgctgagttggacggcatcgctggaaatcttgttctcaatgatccaaacaagggccagtggactcctctaccattcatttttaaacctcaccacaatgttataactgggaactatgatgtgaatgttcttatcacagcattagaagctagaaacaagaaggtggtttggcatgatcgtcgtaaaggggcatcatcggttgatctgaatgcagaaacattggtaggcctggtgatcaatgtacctatcaggaggttcagggggctttggactggcaggcattgggtggcaattcgacgcattgatggcatctggtttaatttggacagtgatctttctgaacccaagcagtttaaggaccaagaaaacgtgattgggttccttgacagtgtgctcagccaaggtggagaactcatggttgtgctgcaaggtgaataaccctattgccccgaatctcaaatggctaccgaatagcctcttaaaaaaaacttgcccatgcttttgagttgtcatctgaatgagatcacatgcacctactgcagaaatttcctaaaccttacggtttaatcgctgatcataatggacagattggtaaatcgaaggtccagtatgcaacatatacgcttggtttattcatatactggtttattggtaaatcgaaggtccagtatgcagacacctgctaacccttggtttgatttattgctgtgcccgtctctatcatatactggattgccaagcaggtgtctgcagtaggtagaacattagcttgctaaatgatgaaaatagcgaacttcaatcctcagcaagaattaatgttgctgcggaattgtacagaactaatagggaggttgcttgtgttgtagttatatgctttggagaaacgaagttatcccatgctcctagaatttgtcagttcgtttgtaagtaccattggatatcagggaacgtaacattatctgtagactgtactagttgatacccctggagtaatcagagcgatgtcccatggtctttcaaatattacaaagcataaaatatatgtagttgtaagatcattgttgtttaatgct

SEQ ID NO: 168288 - DNA, 336 bp, Zea mays
  Clone ID: MRT4577_85060C.1
caaaaaaaagccctcattttttgggggaaaaaaaacattttaatcccctttctcggaattcccaaatgttttaacgggtgctcacccccgtgggattactggggggccacccccctacctcttttgtaaagccttttcttgtgtgcccaaaggttctaaaccccgtcgcgggcaaaagggaaaataaaaccttttcgaagcccccaagaccacaaatagacgtgttttgtaaaaggggcgcagttttaacccccgccccgggatttaaactttttgttataccccgggcccccttgggagggggcccttatatcccccttgggccccttttccccg

SEQ ID NO: 168289 - DNA, 126 bp, Zea mays
  Clone ID: MRT4577_85061C.1
gagctcattgtcggcggccgccctttgattatttttgggtcaatttggatcaaagatacgggatacaacaaacggaacagtgactgagactttgacacagccagtagcaagccccttgggccaaca

SEQ ID NO: 168290 - DNA, 124 bp, Zea mays
  Clone ID: MRT4577_85062C.1
taccagcctacctctcttctacgcgtcgttgaattgatcaccagccagcgccatgggcacgtccatgaccgacttcgctgtgctgtcccatccgtccgctggctcggggatcccctggtgccgt

SEQ ID NO: 168291 - DNA, 936 bp, Zea mays
  unsure (1)..(936): unsure at all n locations
  Clone ID: MRT4577_85063C.1
acatatataagattaaataaattaggtggggataatttcgacaagtgttgtcaccacaacaatacaagaattcggaaatcggactacatgaggtgccagagtggccctgttgttcatgaagttttttgttggacaaacaatttaaaacacaattacaccaccgttttgcaaccacaaaagctttcattaaattctaaaattaaactcagaaagacacttcctagtcataaaaaacaacaactcaaaaaagttttattgcgagtccacaatgaacaaggggatatcaggtcttgcactggcagtctcctctgacccatcagctgcttgtgtttcttttccctcctttgaactcttatccttcttttcttcttcttggaggccttgctctcggaaggggcaggagcatcttcctttttctctgtatcactagtctagttggcacctttgttctcagcatcctgtgcagcgctgctcgaatcccagaaagtcccagctcagccaatactaaatcaagttttgctagttccttctttttcatctcttttttagacagttgtctttctgtatctttgggtggcgcagccagggccatagctttcttgatagcaggttcggctggggcatcttccgcatcatgctttaggttcatcctcagctccatcatcaacctcaaaatcaaggtcctcatcatcactctcaatgtcttaaaataacttcatataagtcctcatgtgtcacgggtagggtagggtaggatgtagatcgagcgaggggaggggtcatgggagatgatggcgtcgatgcgagacagcgtggctaggaggcccctaatgtcgtccccgatgccaaaaatggtgtagagctcctggccggcgaggtcgtccagtgacgtcgtgcattgcttgatgaatgagtcgagcaccgcctnctggggtc

SEQ ID NO: 168292 - DNA, 440 bp, Zea mays
  unsure (1)..(440): unsure at all n locations
  Clone ID: MRT4577_85064C.1
ccccgcgtccgcccagcgtccgcggccgcgtgggcggncgcgtgggctgacgcgatagaacgaaaagtgtattaagagactggttcctgatgtcgttccagatttctctattgttattcgtatatagaccgtcggcggcgccccggcgggcctgatcgtgatggagctgtacgccaacgaggtgcccaagaccgtatagaacttccgcgcgctgtgcacgggcgagaagggcgtgggcaagttcgggaagtcgtttcactacaagggcttcaccttgcaccgtgttatgcccgagttaatgtgctagggnggtgattttacttgtggaaacggnaccggnggtgagttcatttactgtgagaagttntnttgagagaagtttgtgcgtaagaacactgnccttggtgtggtttttatggncaatggtgggcctaatatca

SEQ ID NO: 168293 - DNA, 1051 bp, Zea mays
  Clone ID: MRT4577_85065C.1
ctctaaacatccccgcggcgatggatctccgtctcgcccactactagcccgccagcgcgaccgtgggtggttacggggatgggactcctcgggcggaggccgtggctgctgctcctcgccctcgcttccgcggccgtcgccgtggaagcctccgagggcgacgctgatccgctctacagtgacacaatttggacagaaaagctatatttttcatcagctgctgcctttctggggtactctctcattttggcgatactgcggacttcaagtttaagagacgaagcttctagagtcatggttgccgctcctattctggcgtttgtgacaacccacattctgtacctcaacttctatgagcttgacaaaggcctaaacatgaaggtttgtactgtgataagcattgctcagtgtctcctgtgggcactgtgggctgtcatgagtgggcatcgttcgcggctcaagatcatatctgtcgccgtcggaggtgcggttgcagtacttgtggaagcctacgacattccaccgcgatggggatacgcagatggccgtgctatctgcctcgctgtggctatccccctgtcgtacctttggtggagctttgccaaggaggatgctgagatgcgaacatcagcaatcctaaagaagacacgataacgaggaaatgcgacatgccgcctgtgtgcacccacccagccattgtaaagataaaagtttcacttgtaatcttaggtatgtgaattatcgtattatttttgttcgacgatgtttctttcttggctcacttcagaaggccatattgtttaatgggcccatttctattctttaatttatacagcaactgaacacttggtaggctcgtgctcatcaactgcaatctcagaagattgttaccatgcgttagtgaatggccgcttatcataataatgtctgtgggcgcttttgttggctaaaaaaaaaaaaaaaaaaagcaaatttggtgtgcaattgttgtataaaacatgaagaaaaagatgaagttgaaacgcatcgcacgcttagtagtgtttggttc

SEQ ID NO: 168294 - DNA, 498 bp, Zea mays
  Clone ID: MRT4577_85066C.1
ggccgcttttttttttttttttttgaaccaaacacttcttacgcacaatccggaaccaaacactactaagcgtgcgatgcgtttcaacttcatctttttcttcatgttttatacaacaattgcacaccaaatttgctcaggatctcacaagaaatagccaacaaaagcgcccacagacattattatgataagcggccattcactaacgcatggtaacaatcttctgagattgcagttgatgagcacgagcctaccaagtgttcagttgctaagattacaagtgaaacttttatctttacaatggctgggtgggtgcacacaggcggcatgtcgcatttcctcgttatcgtgtcttctttaggattgctgatgttcgcatctcagcatcctccttggcaaagctccaccaaaggtacgacagggggatagccacagcgaggcagatagcacgggcatctgcgtatccccatcgggggtggaaggccgtaggctggcaca

SEQ ID NO: 168295 - DNA, 724 bp, Zea mays
  Clone ID: MRT4577_85067C.1
aactcttctttcacttctccagccgtcacagacaaccggccgccaggaagcatggccgaccgtgccctgctaatcacctcctccctttctgtctttcaatttgttcctgtcgctcactttcgttcggccgccaggaagcaccagcggctggctctggccgactgcgccctgcacagagccacacagccgcccactctctgtttggtttctgttttttttttcgtttctacttgccgcactattactcggtcgccaaggagaactagacatttgcactgtgcaattgaactcgaatttagtcctcatttactcgaatcccttactgtgtgtttaaatatatgagatggatatcttgtaatgggatcgagttttggaggaaaaaaattgtagatccgggccccgcgatatttctgttattttctgtgatgattttagtgcatctatgcacattcacgcggtttaaaaaaaaattagggttctaaccgtaattttattctgtgactttttcttatctgttcttgaccgtggtttataatcacgagtctcttttgtctctgttgacagatgtaccgattagggttaggtcataaaccctaaccctagacggttatgtgatctctctggtttgaggccgagacactgtgtctcttatcatggccaaaactaatccttaagggttaagggaaaaccctaacccgagagcatcaactatttctttctattc

SEQ ID NO: 168296 - DNA, 886 bp, Zea mays
  unsure (1)..(886): unsure at all n locations
  Clone ID: MRT4577_85068C.1
gcgcgcccgccgggggaacagccccgactgggctatattcgttctcccggcgtgctccgtctctcctctcagcgcgacgattacggtaacgccgtcgccgccctacggctcagatcttcgtcgtcatcttctccggcaacgagcacccaaagatggtggtccttcaaccagatcggttcctgagcgagctgacgagcatgtacgagcggagcacggagaagggctccgtctgggtcaccatgaagcgatcaactctcaagggcaaggcacagttgcggaagatggagaataaggggcaggaggtagagcacaggtgcctcgtccgcgcctccaatggcaagaagaacatctccacctcggtttctctaaaggagtacacaaagttccaagcttcatacgcaacagttcttaaggcccatatgcatgctctgaagaaaagggagaggaaagacaagaagaaggctgcagatgctgagaaggcaattgagaccgcacccaagaagcagaagaaagcatcttcaaagaaatcttcagggtccaagtcataaggcgctcacagaactcagtgtgtcttctcctttatgttgtttaccgccagactaattagagtgtcgtgaagttttacttatctggtttttattcgaattcgtgtctggaagatgaaagcctgtgaatacacctttatagagccgtgtcatcgatgctaacattttttgaagcagagttttgaggtgaatgtgaggcgctgtgctgccctgattggcattaacgaaaatgcacaagtttgaacttttattgcataaaggtaatggagtttgttagggaaaaaaaaaaaaaaaaaagtccgattagaatcgattaatanaaaaaaaaaaaaaaagcccct

SEQ ID NO: 168297 - DNA, 2043 bp, Zea mays
  unsure (1)..(2043): unsure at all n locations
  Clone ID: MRT4577_85069C.1
actccgcgtgtcgatctgctccccccaaaccacacggacgcacacacgcacgcacgaatcaatcaggcaccagcaccacaccactcccttccctgcgtcccggagacagaaaagtctcctcccatctccgccctggccccctctcaaacatccccgcggcgatggatctccgtctcgcccactactagcccgccagcgcgaccgtgggtggttacggggatgggactcctcgggcggaggccgtggctgctgctcctcgccctcgcttccgcggccgtcgccgtggaagcctccgagggcgacgctgatccgctctacagagcctgtgtggaaggatgccaaaaaaacaggctccctgaaggaggcttctattaaacactgtatggtgccaaccgatggccagcctgctgacaaatcgtggtacgcgcacgagccgctgtacttgcaatggaaggactggaactgcaagagcgaatgcagataccactgtatgatggaaagggagggtgaaagagcaaagcttggccttcagcctgttaagtatcatggcaaatggcctttgaaacgcgcctctgtgtttcaggagcctttatctgcagctctctccgctcttactctcgttgtgcaatttaatgggtggctatcgttcttcctcttgctttattataagcttcctctacggccagaaactcacaagacatactacgaatacactggcctgtggcacatctatgggctccttgccatgaattcatggttctggagtgccatatatcacagttgtgacacaatttggacagaaaagctatatttttcatcagctgctgcccctttctggggtacntctctcattttggacccacgcgtccgcccacgcgtccgcggacgcgtgggcgaaaattgaggggcatcagcacacctgagatggactgggcttgggcagctaaccggttaattgagaaggatgaggcagaaactccagacgatgctcctttaaattatttgccgcggaagaggctaattttgacaagccagttgatccagcaacttctccctgctataccagcgaccattctgagagcacaagctgtgtctgcttacggaagtgcgacatacactctatcaatgttgacactaagggatgcatgcagcatggcatcatcatcatcatcatcatcatataactcttgctcacctgtggaggatgaaaataacccatctgaacaaccaagtgctaagaaaatggaagacagagtgtcaaaggttgtggaagtcttcgttggaagaatccggaagatggaaaatgactttataagtttgaacaagagggcctcgatgctagatgtgcaactggagtgccaagatctggagagaatttctattgtaaatcgtctgggaagatttcatggccggagccatgcagcggcagttgagagttcatcagctccagaaatgactcctcggagaatttttcctgaaagacatgtcatgtcttttgccgtgcctggaaatcttcctgaaggagtgtgctgtttgtcactctagtggaatgatcttcagttattttctagccgcaatgatgatcccgggtcgcgccctgtgattcccagtgctccttgtcccatgcaaagcatggccaaacagaaggatcatattgtcaaggggtaacttgagaactggaagcatcacagtaccacgatgaggcaggccggggacatgttccagccgatcaagtcagtgctggctgttgttgatgcaccttatatcaagtataggtccatgtatattgtggaaagtgaaggaaaaaaactgtggatctcccatcatttttctcgatgaagagtaattagcctcagaatttttttagagaagtcgatgcttactagcttagtgcatctggtgggtttcttgggtatttgtcgatctctaagaaatccgtgatgatggagtgttggcaggctaggagtggaaataataatgtgagcctttctctgggttctttggttcctttagggagggattcaaattggctagtgtgtcctc

SEQ ID NO: 168298 - DNA, 319 bp, Zea mays
  Clone ID: MRT4577_8506C.1
aaagaagtagataattaatggaagtcatgcttttgctacaacatgtgttgcaaagtgcaaatcaccttctgcgaatgttactaataagccaactatggatcaacaagttgctcttaataagggggtttgggatgagagaagtagttaagcagctgctagctcactcaaattaatacagtatgtttcagcagtcgagttgagagcaacctttccaaggactaacttaactttctactttaccagctaataagccgaaggcacatcatgttgggggggacccttctgatttctttccattattttgcgtgcaagggatact

SEQ ID NO: 168299 - DNA, 1921 bp, Zea mays
  Clone ID: MRT4577_85070C.1
ttgggaccctcgaggccggccgggaaaaagaaacgccgcgcacgcacacccacacgcgagtcccttcccttccctttccctctgcccgcccggctgcctgttgttatcgtcgtcgtcgtcgcatcccccaccccactccgcgtgtcgatctgctccccccaaaccacacggacgcacacacacggacgcacgcacgaatcaatcaggcaccacaccacccccttccctgcgtcccggagacagaaaagtctcctcccatctccgccctggccccctctcaaacatccccgcggcgatggatctccgtctcgcccactagcccgccagcgcgaccgtgggtgtgggtgggtacggggatgggactcctcgggcggaggccgtggctgctgctcctcgccctcgcttccgcggccgtcgccgtcgccgtcgccgtggaagcctccgagggcgacgctgatccgctctacagatcccccatggaggcagaaaacagagcctgtgtggaaggatgccaaaaaacaggctccctgaaggaggcttctattaaacactgtatggtgccaaccgatggccagcctgctgacaaatcgtggtacgcgcacgagccgctgtacttgcaatggaaggactggaactgcaagagcgaatgcagataccactgtatgatggaaagggagggcgaaagagcaaagcttggccttcagcctgttaagtatcatggcaaatggcctttgaaacgcgcctctgtgtttcaggagcctttatctgcagctctctccgctcttactctcgttgtgcaatttaatgggtggctatcgttcttcctcttgctttattataagcttcctctacggccagaaactcacaagacatactacgaatacactggcctgtggcacatctatgggctccttgccatgaattcatggttctggagtgccatatatcacagttgtgacacaatttggacagaaaagctatatttttcatcagctgctgcctttctggggtactctctcattttggcgatactgcggacttcaagtttaagagacgaagcttctagagtcatggttgccgctcctattctggcatttgtgacaacccacattctgtacctcaacttctatgagcttgacaaaggcctaaacatgaaggtttgtactgtgataagcattgctcagtgtctcctgtgggcactgtgggctgtcatgagtgggcatcgttcgcggctcaagatcatatctgtcgccgtcggaggtgcggttgcagtacttgtggaagcctacgacattccaccgcgatggggatacgcagatggccgtgctatctgcctcgctgtggctatccccctgtcgtacctttggtggagctttgccaaggaggatgctgagatgcgaacatcagcaatcctaaagaagacacgataacgaggaaatgcgacatgccgcctgtgtgatagttttgtgtctctgcacccacccagccattgtaaagataaaagtttcacttgtaatcttaggtatgtgaattatcgtattatttttgttcggcgatgttcctttcgtgtctcacttcagaaggccatattgtttaatgggcccatttctattctttaatttatacagcaactgaacacttggtaggctcgtgctcatcacctgcaatctcgtcccatgcaaagcatggccaaacagaaggatcatattgtcaaggggcaactagagaactggaagcatcacagtaccacgatgaggcaggccggggacatgttccagccgatcaagtcagagctggctgtggtggatccacctaaaacaaagttaaggtcatggtttttgggggaaagaaaaggaaaaaaactgagatcctccaacaattttgttggatgaaaagtatttaggcccaagaatttttttag

SEQ ID NO: 168300 - DNA, 453 bp, Zea mays
  Clone ID: MRT4577_85071C.1
gggtacctcgtaggcggccggggaactctcccttctcctcgcctcgccttgtggatccaccctccatatccccagcagaagcgaagcttctgacctcgccggcttggagcttgacccggcgaagcacaatcaaaatcggtggcggtctccggtcactgatgctgatcctgctccttctcctcttcttgcgcactacggtcgtcatcgcgtctactcgtatagcgcgcagagacgaagagaactatacagccatacaccgctccaggagcctagaaaggatagacatcgcaatatttggaatgcattctcacgaatgttgtcgataatacctcccggacgagaagataggctagggcgacaccgtgagaatttgaataaataaacgaagcacatgagatgctatatgatggatagaaaagcaaaatctatgagctctagaagatattagaaggg

SEQ ID NO: 168301 - DNA, 301 bp, Zea mays
  Clone ID: MRT4577_85073C.1
cgcccaaaccatctctaccctcgccaccaaccgtccccgcaccacggccaaagccctagggagcggctccgccgaccactccatggaggacgacgccatctcgacgctcatggacatcgacgactcgccgctcatcgctgcgggggccgggttcctcgacgaggaggacggggaacgcgagatgttcttctcccccccccccccctcgcggccaagaaggggccccccccccccccccccctccccccctccctcccccttccccccccccccccccccccctccctcctttccccccccc

SEQ ID NO: 168302 - DNA, 372 bp, Zea mays
  Clone ID: MRT4577_85074C.1
tgaataaccgaataaggtctaacagcctacaatagcttatgtggtcaaaaactaaaaataagccaacacaaaggggccttaatcaactccactccatctgtcggtgccgtgagccactgtttcccactggaacgccgctggttcgagaaaacgcggccacgcatgcaaattgacttccccagtctggaaccatgtgcatgccaaatggaagccagtctcgtctcgcgcggcaaccccgatcgagattatggatgaaaacggatggatacagttagatacagggtcattccatatcctatcttaatatatttatctcgaatacgggaccagatatagatagttaagattcgggacggatgcagaacgggacca

SEQ ID NO: 168303 - DNA, 1828 bp, Zea mays
  Clone ID: MRT4577_85075C.1
gggatatgggtggacgagacgatcatacggtcagggtagagtggggggcgtagccatgtatcaccagacaacctctaggccacagcagaggccatctacccgacaacctcaccagatccacgcggtcttacctgacctgcctgtctcgccgatcgcgagtactcgaggccggccgggaaacctcagctgaggccatcttctccatctccaattgtgctactgtaggagctgctgcattcggggagagacacgcgaccagtttgccggcaccaacacggcctgctgctccgcattttgatgactatttctgtctgaaaactgtctctgtcagttgttcattcaggctgctgcagcaagcaactggatgatggcttccaggcagtcagggaacaatgcacaagaagcagcatcaccattggcgagtcctcctcactccaacatagccagcatcatcccttcgctgcccctcgagaccaggtgcccaccgttccctctccgccggtacgccaacttttgggtgcctgaggtaatattgaaggcagacctccccggcattcattcctgcttcaagccgagacccaccgacgtgttcgtcgcaagcttccccaagtctggcaccacttggctcaaggcccttgccttcgcgacgctgaagcgttccacgcatccgccattggatggcgaccatccgctgcgtcgttgcaaccctcatgactgtgtcaggttcctcgatgctaatttcaaccagcagaaggatgagttggaggctctcccgtccccgcgcgtgctggccacgcacctcccctactccctgctgcccggcagcatcaccggggatagggagcgctcggggtgccgcatcgtgtatgtctgccgggaacccaaggacgcgctggtctctgactggctgttcacgaggaaggcagcgtcggcttgtggggctgacgcccggtcgttcacgatccaggaagccttggagctgttctgtgatggccgctgtcccggcggcccacagtggaaccacgtcctccagtactggaaggagagcgtgaggaggcctgacagggtgttgttccttcggtacgaggagatgctgattgatcccgaggcacacgtcaggaagctggccaagttcatggggtgtggattttctgaggaggaggaggagcacggggtggtgagcgccatcgtggagctgtgtagcctgggcaagatgagggacatggaggtgaacagaaatggaagcaatatgttgggggtcaagaacgaaagcttcttcaggaagggagttgctggggactggagcaaccatatgacgccggagatggcgcagagcctagacaaggtcgtagaggatgcattgcaagggactggattcagctttacgagcaaagcatgatgagccactgcgctcatggtagttgcgaactccataatgccaagatcaactcgttttagtcggtattgcttgctggatggagatcatgccagccagccatggtgagcatccttcttttgtgatgaaggggaaattgatttggtataattcatctgtataagtttgttacaaatcgtagtttgtagatcataccagccatggtgagcattcttctttggtgatgaaggggaaattgatttgtgactattcatttgtataacatttttacaaaccatagtctttggcaccttggcatgccaaaatcatacgcattactatgtaaaggttcgttttaaagccatgtattatcactgattatatttgccttaataaaatcatcataaaccatcgatcaaaaaaaaaaaaaaaagggggggggcgacagcaacg

SEQ ID NO: 168304 - DNA, 258 bp, Zea mays
  Clone ID: MRT4577_85076C.1
caaccatcacacacaaatcacacacacctacacttccccaacccccaaccagcatcatggacagcaccaagggcaacgaccgccagtctcctccccccgagacccagtctgacaggcaaaccggccagcctgcttcgggtcaaggaacagacaacgcctctcacaaggagcaaaccaacaagtccggccttgagaaccttacctccaaccccacgggacccatggacaaggctgtcgaggagaagtttgccaagacgc

SEQ ID NO: 168305 - DNA, 771 bp, Zea mays
  Clone ID: MRT4577_85077C.1
gctgcagcacccgcacctcggcgacttcgccggctgcacgtcgcccaccggggtgggggattccagggaccccttcgatctgcaacagccacagatcggaccaaggatgatgtacgggaacatcgccaaccacgaggcgttcctgaggaggaagctcgaagagcagcagcaggccatcgagctggagggccgccgcttcatggggctgcatctcctcgacctcaagatcaggggccaccacctcggctcctcccccgccacgaccgtcgtggggcaaggcgagggcggcaagggcagtggcaatggcaatgccgtccagctggaggatgtcatcgtccaagatactcctacgaagatgaacagtaacagccttgcaatgagtgcgcctgcagctgctgtatctgctgcagccgatgcaggaggcgagcacgaggagcagcaggaagcagggcacggggaggaaggcgacggcagtcccaagcaggcagtcaaccttggggaagacgagaagacggaatctggccccgtcacagctccacctccacccattgttgctcgtggattccaaggaagtggcgtggccgtggagcacatcttgcctgacagccccttcgcatccaccaccaacaaggaggcctcagctccaacggctcagaacgggagcatcatcagcaatggcagccctcaccatgtggcttcttcggccctcttcccacctgcacccgacattgagctgcccccgtacaactcttgcttctttcaggcgcccag

SEQ ID NO: 168306 - DNA, 431 bp, Zea mays
  unsure (1)..(431): unsure at all n locations
  Clone ID: MRT4577_85078C.1
gtatctctagcctctttttctttctttctcttcttttgtgttctcctgattaaaggatgctatacctgtaatctctgaactagcagnaatattagagtaactacntcgaaaaaaaaaaaaaaaaaaaaaaaaaaaaaaaaaaaaaaaaaaaaaaaaaaaaaaaaaaaaaaaaaaaaaaaaaaaaaaaaaaaaaaaaaaaaaaaagaaaaaaaaaaaaaaaaaaaaaaaaaaaaagagaaacaaaaaataaaaaaaaatagaacaaaaattacacaacgggagaaaatgggaaaaaccggggggaaaccccaacaaaatgccccttggggccactccccccttttccccagccggtgtaaaacgggggggagccccgccacatacccccacttgccaaaaagtgcaaacccttaggggcgagcggacacccc

SEQ ID NO: 168307 - DNA, 322 bp, Zea mays
  unsure (1)..(322): unsure at all n locations
  Clone ID: MRT4577_85079C.1
ggtggtgttcaactggccagnnggagccgggtgggtgggccgcgtgaccatatgcggacgcgcgtgcatcgattngcgtcgcnncgggcacgctttgaccggcatccgtnngcgtgcnncgacgannngtcgacgccattatgcgcnngcgtcgctttggtgaacggcgnnngcgggtggggaccggcngatgacnncgtggtngtattgcnngcaccgcgacggcnngggatgctanngtgcgactnnngccccgggnngcgtcgcngcttgccctttgtgacgcttagnngcccgcnntccagtattgaaggggtgttcc

SEQ ID NO: 168308 - DNA, 571 bp, Zea mays
  Clone ID: MRT4577_8507C.1
cccagcgtccgcggaagcgtgggcggaagcgtggtgaaaaaaaaaaaaatataaaaaaaaaaaaaaaaaaaaaaaaaaaaaaataaaaaaaaaaaaaaaaaaaataaaaaaaaaaaaaaaaaaaaaaaaaaaaaaaaaaaaaaaaaaaaaggggggcctttttaaaaaacaaaagtttactaacggggtcttgaaacaaaaaattttttttttgggggctctaaaattaaattaattggccgtgttttaaaaaccttggggaattggaaaaaaacttgggtttaccaaattaaatcgctttgaaaaaaatccttttttcgcaagttgggtgtaaaagtaaaaaaggccctgacagatgccttttcaaaaaatttagcaaccttaaatggaaatatggaacccccctttaatgggacattaaacgggggtggtggtggggttttcaccaaggggaaccttttaatttgcaaagctattacgccccggtttttcgatttttttacttttttttttcccaaatttccacgtttttccccctaaagtttaaaaaggggggtttttttaagggtcc

SEQ ID NO: 168309 - DNA, 352 bp, Zea mays
  Clone ID: MRT4577_85080C.1
tttctttaataataattgtttgttaatcatttttgcttaaaatagacaataaactgaattccagctcgggccttcttagattcttgaagccttggctccaagggaaaaaagaaaaagaaatctatgtaccatgcagtgccacgtagtttagatgtacctgtacactgtatccagctgtccccagatccgttggatatgtgaacgaaaaaatccataatatataagcaacgttgctgtgctatgtgctgtacagagtgacagactgaagaaattcagcgatcgagcgagagaatcctatcctacggatagtggcttcaactaccaaggccgtggtgccaccttaacgatgcac

SEQ ID NO: 168310 - DNA, 403 bp, Zea mays
  Clone ID: MRT4577_85081C.1
aaaaaaaaaactgtgaccccccctctattgcgcgcaagggggggcacgctggcgccccaaccgggggggaaaggaattcggccgggccacccgggagggacgggtccaccaaggtttaccgggcggcggcgggtccttcttgggaacccctaacccccccccgggtggggggcccactcaaaagggcgtgccttagcattcgggcctcggggggatatatatacggggggtcccccggaatgggagtaaaggcggacgttaaaaactttcactggggaccggacatttttcgggggttggccaacacttttttgggcgtgccaaactggccgggctgggactggccctgcttgaaactgcccggggcgggggcggggccgctcctccggggggggggggcccc

SEQ ID NO: 168311 - DNA, 154 bp, Zea mays
  Clone ID: MRT4577_85082C.1
gtactctcagtgttgtgttgtgccatctatctttgcgagatcgcagcgcatttatttttttgcagcagtttgcggtctgacgaccggccccccttcctcattcatcaaatcctgatgctatacggtggggtttcgtctattcatttatgttttt

SEQ ID NO: 168312 - DNA, 369 bp, Zea mays
  Clone ID: MRT4577_85083C.1
cttccttttttttttttttttttttttttccttcttttcttttttgggggttaggtttttttttttttccattttccccccctccaccttttacacccggaaatttccgcaccaccccctttggagacccaaatcacccctgaataccgccacaaaaaagaaggcgcctatcttttcacacacggacacaggcttaaaaagccacacccataccaggggcaccaaattaacatccccaaacacaaacggagaggcctccgcaaaaccataattccggttcatccccccaaattcccggcagacataacaaaagccacaccgggggacccccatcatccacctgcataacaacacccgtggataccccgg

SEQ ID NO: 168313 - DNA, 728 bp, Zea mays
  unsure (1)..(728): unsure at all n locations
  Clone ID: MRT4577_85084C.1
cccgggttcgtacccacgtcgtttcgcttccttcgcatttttcctttgcaaccgtgttgcgctagtcccccttcccaaccataanaccgtatggcgcctcaagggccgtanagtaagctccgcgtgcgaagaaagccggtggnagggaggagcctcgtcggccgtataaaacgactcgccggggaagtnatagtctcctctaaaggggccggggtgttttaaaaaaccgcggggttttttcccccccccttttttttttgtttgttccctctttttgttttttttttttttttttctcttttttttttttttttctcttttttttttggggttgtgttgttttggtttttttttttttttttctttttcttttcgttctttctttttttttttttttttggttgtttgtgttgtttttctttttttttcttttttttttttttttttttttttttttttttttttgttcctctttttcttttgtttttttttttttgtttttttttttttttttgtttgtttttgttttggtgtttgttgttttttttttttgttttttcttctggtgtttgtttggtgttttttttttgccttttcggttttttctcttttttctgttttttttttctttttttgtttgtctttttttttcgtttttggtgctttgctgttttttttgtttgtttttgtttttttgttttttgttttttttaatttttatttttaat

SEQ ID NO: 168314 - DNA, 831 bp, Zea mays
  Clone ID: MRT4577_85085C.1
ccctgctaaaccacttgctaaaccagcggaaacctaaccagctagcagcattagcttttcaacaagcctcgctcgcgcgccgtgaccgatagatggccatcacccacgacgactacgtctccctgtgcctcatggcgctcgcagccgcgggaggaggaggagggcacgctgcggctgccagtgccaggacgacgacgatgacgacgcaagagtgcgagctccgcttccggtgctccgtctgcggcaaggccttcgcgtcgcaccaggcgctgggcgggcacaaggccagccaccggaagccgccgccgacgctcgtacaggcggcgtcgtcgtcgtcgtcggtgacgacgaatacctcgtcggcgggcggcagcggcgccgggcaggggaggcacaggtgctcggtgtgccaccggggcttcgccacggggcaggcgctcggcgggcacaagaggtgccattactgggacgggctctcggtgtcgctcaccgcgtcggcggcgtcggggtccgcgtcgagcttgaggggcttcgatctgaatttggtgccggccgccggcgcggcaaggtggcgagaggaggaagaggtgcagagccccttgccggtcaagaagcggcggctgtcctccggtccttccaccgaacttagtttaacgatttagagttccttttggcgatctgaggcttgtagagtgttttcgttgcttcattcttttaaccgtattttagtttttgtgtttgcgcggtgaataaacgtgtatttaattttgtcgagccatatatacttgagataaaagccataggccatataggcatctaccaattgaggtt

SEQ ID NO: 168315 - DNA, 315 bp, Zea mays
  unsure (1)..(315): unsure at all n locations
  Clone ID: MRT4577_85086C.1
cttcagaccattagctttatctatttctgagcgcagaagaaccccatcgacgggaggatggtgttgctcgttgccgtccttcttctggttgttgttgctagcaccacctccacgcatactaccagcggctgctgctgctagccaccgccgccggttgatctaccgccgccggcgcatcagccacctcctgttgatctgccgcctcctgcgcatcttctaccgccggtgcacctgctgccgccggtggacctgctaccgccggtccatgatgcgccgccggttgatcatgtgccgncaccatgatactactactac

SEQ ID NO: 168316 - DNA, 114 bp, Zea mays
  Clone ID: MRT4577_85087C.1
ctggcaaggagggcactaagagtacgacgaggccttctacgcttgacgtcattggttcagggtaattcagtgcagcgtcaatctacaagcactctgcgctggatgctaactcta

SEQ ID NO: 168317 - DNA, 231 bp, Zea mays
  unsure (1)..(231): unsure at all n locations
  Clone ID: MRT4577_85088C.1
gggggggggggnngggcacaccaacacacnngaacgaagaaggagggacacacacaccagcaaggaacgaccgcgaggcccaccccaaagacgggggaaccggggccaaacgcaccgcnccggggcgcacgcaaccacacgncggcccagcgcgcaccgccggaccagagcccaggagngcacaggggcccagacccccacacccaccgcaggagccccgggggggccaag

SEQ ID NO: 168318 - DNA, 1793 bp, Zea mays
  Clone ID: MRT4577_85089C.1
ccacgcgtccgtcataaccagtgctcaagtaatagcaatcttggaaacgttgcacaagctgtggccacgaagactgttttccacatctactacaatcccaggttaactcaatctgaattcattgtaccctattggaagttcacaagaagcttcaatcaaccaatttctgttggaatgaggtgcagaatgcgatatgaaagtgacgatgcttctgaaagaaggtgcactggtataataattggaagcagagaagctgatcctatatggtatggttcgaaatggaaatgcttggtggttagatgggatgatggtatagagtgccgttggcccaatagggtatctccttgggagattgagctcacaggatctgtttcaggatctcaaatgtgcgctcccagttcaaaacgtctgaaaccatgcctcccccaagttaatccggagattgtgcttccaaatggaagtgtttcttcagattttgcgggatctgccagattccacaaggtcttgcaaggtcaagaattgttgggtttcaaaacccatgatggtcctgctatttctgcttctcaggcaactgaagcaagaaatttgcagtacagtgatgaacgtagtaacatgagtaacaataacttagggatcccaagacttggtgttaggtctccaactggaatccctgggtttccctaccattgctcaggctttggggaatctcaaagattccaaaaggtcttgcaaggtcaagaagtgtttcatcctttccgaggaggatgtttggctgatggccatataagaactgctggcatgtatcaacctgacggtaggcatgtatctggtgcagcttataaatggtctgcaccacaagggtatgatttcccacagccagcaaaaccggtttttctgttgcaagaatcatccccatcatctgtgatgatgtttccacaaactagatctaagataactcacttggaatatgagtacagctgcctggataaggatgaggatggtagacttgataggactgttcctactcaagacatgggaagaagcaatcaaacattatctctttggcctcatcttgtttcaggcgaagcaatagaagaatgtactggaactgtgaatatgcactcccccgtcagtggtgcagagcatgaatcaaacaatgagagtacagttgaaaatggctgcaaaatctttggtatctcattggctgaaaagatccgatcatgcgatgaagcagactcttgtagtgcaaaatgtaattctcggctccagcctttgaagtcacaaatgccaaaatcgctaggcagctgttgggccactgttcacgagcaaaggcctgttgttggcagggtggttgacgtctcggcgacggatatgatgatctgatccacatggcatatccttgtagaatatgcaggaaggactaccgagtgcaactttcatggcctgaaccacatcctggatgaaagattgctgaaggtgaccttatgattcttgaaacagggatgtttgacaaatttgtaatgtacttttgggctttaagtatcttattatcttaagctacctagtaatcagcacttgtaccttaaggtgtgcgttatggcaagttcttttagagggcttgtttggactagcaccatctcccaagtactcgtcgcattgtttctttgccccgggaaacaagtccgttttggaagtttggctccagtcctgttggtaccatttgttgcatcgtgtgtgcttgtacaattgcacatctcaagcggtaaagcatgatttgaccagctaaaagggga

SEQ ID NO: 168319 - DNA, 233 bp, Zea mays
  unsure (1)..(233): unsure at all n locations
  Clone ID: MRT4577_8508C.1
tnnttttttttatcttttaccggnnnnttttttttttggggagggaaaactgtaccatttttacatataaccccccacaaaattttttgccaaagaaaaatcttccaaaaaaagatgggacgggtggggtcaagactcgttgaaaaaaaacatccgggggccaaccaagtcacccccgtgaggcgaacctgcctattattattgacaaatttggggattttggaccccacaag

SEQ ID NO: 168320 - DNA, 249 bp, Zea mays
  Clone ID: MRT4577_85090C.1
cacccactcgtcctcccactcctccgatcgctttttccaacatcacaccctaactcatcttacgcatcattggaacttttataaagatcatcccgatccctaacctctataacaactattcctacttaatcattaactacatcaccaatacaacatcacccgacaactactactaacccgataaagatctcaaccatatctcctaactcctcacctacttactactccttacccaccacccatcaccac

SEQ ID NO: 168321 - DNA, 1679 bp, Zea mays
  Clone ID: MRT4577_85091C.1
tgggtaccctcgagtctcgggccggccgggtctcctcctcctcctccccccccccccccctctctctctctctctctccctctctctcctgtttcttctagtagtacaaataaagaagaagctgaggtgctcgaggcacggcgagggaggggagggagacacaaggcgagtgtccctactccgagggcagtccggtgtgcaagcgcatagcatagcaggaaccacaagaaaaaaggcccatggcttccttctcaccgagtggccggatgacacggacggcggcatcttctctggcagcgcgcgtggtcctcgcgctcctcctcctcatcggggtatccggttccggagccacccaggcagcgtctccccacacccaccacagtcggcagctggatgtgaaccacaagaagccagtgcagacgtttcggcccatcaacattgcccaccgagggtcaaatggcgaactgcccgaagagacagcggccgccgacctgagggcgatcgaagaaggcgcggacttcatcgagacggacgtactcgcgtccaaggacgggcatctcgtctgcttccacgatgtgacgctggacgcgaccaccgacgtcgcggaccacgcggagttcgctggcaggaagaggacctacgaggtccaaggagaagatgtcaccggatggttcatcgtggacttcactcttgaagagctcagatcactgagggtgaagcagcggttcagtttcagggaccagcggtacaacggcaagtaccagatcattacgttcgaagagtacatcctgatcgcgctctacgctgacaggaccgtcgggatctacccggagatcaagaaccccgtgttcatcaaccagcacgtgaagtggtcggacggaaagcgattcgaggacaagttcgtggagacgctgctcaggtacggctacggaggcgagtacatgtccgatggctggctccggcagccgctgttcatccagtccttcgcgccgacctcgctcatctacgtctccaacatgacggactcccccaagctgctcctgatcgacgacacgacggtcccgacgcaggacaccaaccagtcgtaccacgagataacctcggacgcctacctcgcgttcatcgggagctacgtggtggggatcgggccgtggaaggacacgctggtgcctccggacccgacagacaaccgcctgggacgccccgccgacctcgtcgcgcgagcgcacgctctgcgtctccaggtgcacccgtacaccttcaggaacgagaaccagtacctgcacttcgacttccggcaggacccctacgccgagtacgcgtactggctcgacgaggtcgccgtcgacgggctgttcaccgatttcactggtagtctgcacaagtaccaggagtggactaggccgtaccggaaggagcaggagaagacgagcccggaggcactcttgcgcgagatcgcgggcatgctcaagaacgacggctatgactgatgacttaggttgccttcagttttccccgtctgtcactctctctgtaatggttaactaaataataaagcgacggtttcatggatgcatcatctggacgtgggtgtatcattaccagacactgaattttcagtaacgctctttaaaacatcagtggagtatctcgtttccttgggaacgggggatgttgcc

SEQ ID NO: 168322 - DNA, 807 bp, Zea mays
  Clone ID: MRT4577_85092C.1
tacctggggactggtagagctaaattcttcctttttttttgtactgtatatatcgcctacttggatttgcacaaacaaaaggctaaaacaaatcgagagagaaaaaaacatttaattttgcagagggcgatcgaagaaggcgcggacttcatcgagacggacgtactcgcgtccaaggacgggcatctcgtctgcttccacgacgtgacgctggacgcgaccaccgacgtcgcggaccacgcggagtttgctggcaggaagaggacctacgaggtccaaggagaagatgtcaccggatggttcatcggtatcccctgctggtgctgacgatgatgatgatgacggtggcttggtagactgatcaatcatgtttttttttaatttggtttccagtggacttcactcttgaagagctcagatcactgagggtgaagcagcggttcagtttcagggaccagcggtacaacggttagacacactctctctagttagcatgcagtctgactgacctgacctctcacgtacgctgtctctcttcttctgttcgatcgcatcggatcggaccacaggcaagtaccagatcattacgttcgaagagtacatcctgatcgcgctctacgctgacaggaccgtcgggatctacccggagatcaagaaccccgtgttcatcaaccagcacgtaagtatatatatattagcctgatctgatctgcccaatggcggcgacgacgacgacgacaaactccaaggaaaaaatttcctctttttttcctcaaaaaaaaacccacgcgtccgcccacgcgtccg

SEQ ID NO: 168323 - DNA, 165 bp, Zea mays
  Clone ID: MRT4577_85093C.1
gtacatctaaaatctgtatagggattatcattttttccttatctttgtttaacttttcgttgttgcttacatgtaaatgaagtattcatttatttaaatttggtgtattgatttaattcttcctttagcatgtatgctgtgaatattcatatttaaacttgcggc

SEQ ID NO: 168324 - DNA, 346 bp, Zea mays
  unsure (1)..(346): unsure at all n locations
  Clone ID: MRT4577_85094C.1
cgacaacatgatggaggagtacgagaagctggccgctgccgcgcccgacggctccgccaagctgcgggtcttcctcttcccggcctccgggagcgatgcggccggctctggctccgggtcccacctcgtcgccgcggtggacgagtctgggcagcggtacatcgacaccatcaactgcgtctccgcggaggctatggccgtggccatgcgtccgaaggacagtgtcgccagtgccggttcctccgcacacaactccgaggcatccgagtacagcggcctagtggaaggtatgtcaccgcgggcggtgccgccgnctgcgttcgctgcaactgagtattcatattca

SEQ ID NO: 168325 - DNA, 524 bp, Zea mays
  Clone ID: MRT4577_85095C.1
gccggcagggccgggctctgtttatcttacaaagaatctcaatactatgcagatcttcgtaaagacccttaccggtaaaaccattaccttggaagtcgagagctgacaccattgacaatgtcaagcaaaagattcaagacaaggaaggtattcctcctgatcaacaacgtctcattttcgccggtaaacaattggaagatggtcgcaccttgggtgactacaacattcaaaaggaatccactcttcacttggttctccgtcttcgtggtggtatcattgaaccctctcttaaggctttggcttctaagtacaactgtgaaaagatgatttgccgcaagtgttatgctcgtcttcctcctcgtgccactaactgtcgtaagagaaagtgtggacacaccaaccaacttcgtcccaagaagaagctcaaataaacgtatcgtttatattcttttgtgtctttggggataataaaaagaattttatttctaagaacgaaccaaaaaaaaaaaaaaaaaaggccccta

SEQ ID NO: 168326 - DNA, 204 bp, Zea mays
  Clone ID: MRT4577_85096C.1
tgtgggccgtgcccacgaccgcgcgaccgccgccgccctacgccaggtgccctggtcggtcccttcgagccaggtcgtcgtcgtcccttcgcagccgacgagcgcccgtcagcctggaggaccactcgatgtaatcgaagacaccgggggttcacagctgtttttttttgtgtgaatttacgttcctgaaaggttcgctttcgt

SEQ ID NO: 168327 - DNA, 638 bp, Zea mays
  unsure (1)..(638): unsure at all n locations
  Clone ID: MRT4577_85097C.1
gactcgtttgcagcgctagctacgcactaggctgtggacaacccaaaccccaaccccaacccagtagatccagattcctgtcttgcagtcgcagctcggtaaggaggaggccagcgccatgtcggcgctgttcaacttcaactccttcctcatagtggtgctgctggtgatctgcacctgcacctacatcaagatgcagttccctgccatcctcaacgatcgcaccgggttccgtggtttcttttggaaagcagccagaataggtgagcggttgagcccttgggtggcatttgggtgcttcgcgatgggggtatccaccatcttcttctgaaggcccgggctatcatgtccatgatttgagtctaggttgccagagttaaatataggaaggatcatgtcacactgtatttctgttcatgcctccagagaagccttctgcttctgttactgttgtggcgaaagcggcttcttgataccgagcatgcaggtttgatgaatgcactcaggtcggtgcacttgccgatcagacagagatgatactgtgtttgcaaatgctaggtgcaagaagttaacaatgaaatgatggaggattatgtatgttgtgtagaatgttgtttgngtcctgcaaaaccaactgt

SEQ ID NO: 168328 - DNA, 316 bp, Zea mays
  Clone ID: MRT4577_85098C.1
ctgaagatgggcgcctaacgagtgcatggtgctctacaatgaagcgctgtacgacatctgcttccgcaggctcaagcttagcacgctgatcttcggcagacctcaaccatctcatctcggtcatgatgatgggtgtcagcagctgcatccgcatcctggggcagctcaagtcggaccatctcaagatcgactgtcagcatgatacggatccggagcgtgcaattcgtcatagcggggatcgtggagtgtaactcgatgggcatccagcagtagcgcgccctgacggtaccggagcctatccatcagatgtgggagt

SEQ ID NO: 168329 - DNA, 1326 bp, Zea mays
  Clone ID: MRT4577_85099C.1
gtaccctcgggttttccgggattcaccgatcccctgggaccttttctcacctaggaagaagctgcgggtgccccaccatccggacttcccgttcgacggccagctgttgaatccgattttccacggcaacccactcggtccgagcaacggcggcggtgctcttcgctgtttctcggacatcgctcctgcaggcatacagggagccaggcatgctcagttcggtctaccactaacagaccgccagcttaacaagctgcacctcggtctgttccaaggcggcggttttaagcggcggcttgacgctatcactccaccatgccctatatccaggggctttgtgatcggcagtgcaccggtcgacgagagcgtctcttgcgtgctgacgatcggcacgccacgggccgcagagagatctgacgacaggaagaaaccacatctaatgctgttcggaaagcctatccttaccgagcagcagatgagctctagagggtcaagggaaacactctcccctgaggccactgggaacagttccgatggcagtgttcagaaaacgggaaacgtatccgatggctccggctcgtcgatctgcatcggttcctcgtcccgaggccgcgaggcttctaggctcgggttcgaatttgaagccgggcactgcaaggtatttgtggagtcggaggatgtcggtcgcaccatcgacctgtccgtctttggctcgtacgaagagctgtacggtcagttggccgacatgtttggaatcgagagggcagaggtaatgagccacctttgttaccgtgatgctgctggcgctgtcaagcgtactggcgacgagccgttctgtgacttcatgaaagtggcacggaggctcaccatagtagagagcaccgaggggaggctgcagaaacctctcgtcgagtacatggcttgattgcatgactgttcgataaggcactctgaagcttgaggaagactgaagcttggagcgaatatgttttcgtttgcgtttgtctgccgtgaagcggaatcgcgatgtctgtctcgtcgtgtgaaagaaactcgtgtatcggattttcgtctgtcgtgacttggtcgttagaactctgtcgtggtcagttgtgttgcgcttgcgcttgggtcgaagttgatagatggcctctttgatgaactagcttggaataaagttcgagttgtggttagggaatgccagtgccatggcaattcagttgtcgttgtcgatttagttaaaatgcgtgtatttgttgctgcagtttgatagcacttgccaagatatgttgaacttatcgtggttatgttcatttcctcagcgtg

SEQ ID NO: 168330 - DNA, 358 bp, Zea mays
  Clone ID: MRT4577_8509C.1
attcggctcgaggctgactgccttgcttttttttgatagactgaactgctgcacaagggggggagaagttacaacgtgtttgggggtcctcgtgcctattgctcaccgctgttgcgagcattgtttgcagggacttcaagccgggctacgagcattattagagcattactgatacggactgcatggaccatgattgtgcacggatcattcgctcaaaggggtggccattggctcgtgaatattcttcggactcattatatctgttgcttcacctaaatatcctgctgtctcagctaggagtcctgaactgcccgtaagagaacactgcattgttgctcacagctgatcatactcactg

SEQ ID NO: 168331 - DNA, 258 bp, Zea mays
  Clone ID: MRT4577_850C.1
agagcaagcacgcggacggcacgcgcgacaatagctctcgaggacgatgctgccttcagcgatgacctgagacgcgactcgtgctgcctgggtgcctgtatatgatcactaccttacacgtaacacggatatgcgttaatgacgctatcgtatgctgcgcagctcgtgttaatgttacgtagaattgctgctgcgagcctatctttgcttgctcacagccaagaaaaaaaaaactgatctctgcacctgatgtgctag

SEQ ID NO: 168332 - DNA, 408 bp, Zea mays
  Clone ID: MRT4577_85100C.1
gttgcatcccaaaacaatcgcaaagctggacccatccgggttgatcaaaggctcttgtacaaacgcggttaagcaaaaaaacaaagtttgtgccggggacaccaacttggaaaactctcaaagggggcgacccccaggggtcgcatccccctgccgggggggtaacgcggtaccactacccaacctttagaaaggactttaacttcaaagagggtgcatgcgcctgctgtggaactggagggccattaggcggcttgtgcggacctccacctgcatgcggtggtgcccgggaggaaccagccaacacccgtactggctgagcacaccttcggttgctaaggcggatactgccgtggttaaggcctacccggtggaggcatttaacccccggttggtggggagggtggg

SEQ ID NO: 168333 - DNA, 216 bp, Zea mays
  Clone ID: MRT4577_85101C.1
aagagtaggagtagcatgatgattattgatctccgggatttcagatctcaccaaagtttccctgggatttctattggtctgatcctacaacggaactaaacactgggagttggcgttatattacaacgatcggaaacaacaacaacaacaaagagagacaaggggaatccaatgcattattattgcacaagcggggccgctaatcctggggatctc

SEQ ID NO: 168334 - DNA, 363 bp, Zea mays
  unsure (1)..(363): unsure at all n locations
  Clone ID: MRT4577_85102C.1
cccacgcgtcctgtttcgttccaggnaacaagnaaaaagaagaaatccgaggaaagaactacaggngataaacatanaaaacaanngcttgtcaagcggaaaggccaagnntgcgtgatatcaagaagccgtcntggtccatatgngaggtgaaatgtctggcatcaacccgaatgtcagccgaagtgttcggttcaagagttgattccagtagtgtattcaggttggccatgttggacatgaaagggttgtttctggtcgtaatgtggcatgttttgcttattagaatggcttaactccttaatttgtctaacattattatatctgagtaaaattttgcctgcgtctaatacacttttcacc

SEQ ID NO: 168335 - DNA, 509 bp, Zea mays
  Clone ID: MRT4577_85103C.1
ggtcaaagctgtgctaactgggggacttacatagaggactccttactacggtcctttctgtggtctatgctggtgcccgtgctggtttcttttcaactgcgctctcaccaccagggtgggggggggggaccgacacgtcattgattgccttcaaccaggcagacgagacaggatgatccgagggctgtgccatggtcctacacatacttctactttatcttttacctgatcttcttgctctccagcatgttcttgactgtgctcttaactggctgtgcaactagcgttggagagagcgaaaatcttggggattttgggtgggcatctatctgggccaagattgcaacccaaggggcgaccatatggctgtttatatggccgattgttttacccatcctgtattcctacagggaattctaagtagcaaccacggatagcccggagcttcagacgtgtctactgtggtctataatatatcctatcaagaatacatgctttaaaacatgctc

SEQ ID NO: 168336 - DNA, 290 bp, Zea mays
  Clone ID: MRT4577_85104C.1
tccacccactttagtataccaccagctgccaccgcgcggcccgggcggaccacactgtagggcaggaatgggtttcaacggctccatcatggaaagcgacccgctgaactggggcgcacctactgatgaaactgatcgttagccacctgaacaaggggaagtgcatggtggagcaagtccgccagacccgggagaatatcgagggctgcactgctcattcatatcaaaaggtcgacggcgttcccgcaaatgtcgcgtgcggcgatggcgtcgagctttacaaggaggcc

SEQ ID NO: 168337 - DNA, 1200 bp, Zea mays
  Clone ID: MRT4577_85105C.1
ccgggcccagtccacccagcccacagcccaggccactcgcaaatcgcaacccacagcacgtctcctcctttgctcgtccaccctgccatctccgcaacccctacctacaggcagcagcccagcacgtccctttctacgcctccacctccctcgattcgttccgagcccatcgcctccgcctcttcgtcaccgtcgaggtcgcaccacatggcggcgctcctagcccggcaggcagcgcaggcgctccgcgcgagacagtcggcgcagctcgggccgacaacgtcggcgatgcaggggcacctccgtacctacatgaacgcggggattcccaagcggttcaaagaggaagaggagaaagaacagcttgcaaaagatatcgcaaaagattggaatgctgtgtttgaaaggagcatcaatacattgtttttgactgaaatggtccgtggcttgatgctaactctcaagtacttcttcgagagaaacgttacaattaactatccgtttgagaagggtcctctgagtccccgcttccgtggtgagcacgctctcagacgttacgaatctggggaagagcgttgcattgcttgtaaactatgcgaagctatatgcccagctcaggcaattacaattgaggctgaagaacgtgaagacggcagtcgccgaaccacaaggtatgatattgacatgaccaaatgcatttactgtgggttctgccaagaggcttgcccagtcgatgctattgttgaggggcctaactttgagtttgctactgagacacacgaggaactactgtacgacaaggagaaattgctcgagaatggtgaccgctgggaaactgagattgctgagaacttgagatctgagagcctttatcgctgaatatgtctttcattgtggttgatatactgtgttcttccattttccatattttgctcaactacctgatgaataagtataaacgatatatcataacttagataccaggtaccatgtttttttacctcggcaccgtctgtctgttatgttcattaccttgctaaaagtggcaccgagttttctttaatgggaaagttccttctggactggagcactgagctgttttcagtcagacctttattttatatacaatgaaacaggacattgtgctcaaaaaaaaaaaaaaaaaaaaaaaaaaaaaaaaaaaaaaaaaaaaaaaaaaaa

SEQ ID NO: 168338 - DNA, 281 bp, Zea mays
  Clone ID: MRT4577_85106C.1
ctgcgccctctccgtcgagtggctcaccggcgtcacctggcaggacgccggcggggtggggctgataaacggttcctgctacctgggccagccgatgtcgttctccatctcaacgctcatctcgatcgaagtgctcgtgatcggctacatagagttccagcgcaacacctagctcgacccgtagaagaggctgtacacgggcggctcctacttttacccgctcggactgtgggccagacctgagacgaaggagcggctgctgctgctggatatcaagcacg

SEQ ID NO: 168339 - DNA, 506 bp, Zea mays
  Clone ID: MRT4577_85107C.1
cccacgcgtccgcccacgcgtccgacctttagcccaccttacattagagatttggacatcaaaagaaagctaaaacattctaaaccttttagatctctaagtttagaagagggaggcaaacatgccctagaatattggagatcgcagttgctgctatcaccaagtaacacactaagatatcgaagaccacaactgctgctatcaccgtgcttttacttctaccttaacaactaagatctcaatccatcttaatttgtccaaccgaactctgaatgaaaaaaaggaatcgcatttcaggaatgattgacgagttagcacaatgcaggtttagaacctttggttatttctaaaataaagactcgcatgtatggctataacaatttatacttttaaaaatggatacttattgagacctgataaccacatttagctagcttagcaggagggagcatgctaactcataatccaagagtcaagagatgcgcacaaaactttttcgtctgggg

SEQ ID NO: 168340 - DNA, 112 bp, Zea mays
  unsure (1)..(112): unsure at all n locations
  Clone ID: MRT4577_85108C.1
tcctcnttttaggacgcaaacagaccggatgggagacaccatttaagaaacctcacggtttatacacttaacaaagcacaaaagaactagaactcagtgaattcggtaccag

SEQ ID NO: 168341 - DNA, 356 bp, Zea mays
  Clone ID: MRT4577_85109C.1
tgggcaagcttccgaagcacgcgtgcttctccccctcgacggtcgcaccgtcgtggaccgcggagggcgcggctccgcccgtcgtgacccggatgatcaccatgctgtggccgtcggtgctgtccgtcagcacgtcggcgtgcatcgagtgcagctccgcgccgtcgaactacgaccccgcaatcggccctggcgacttgcacttcgtcgcaacaacgacgctcacggtagagggctagaacaagccgaacgtgcccgggaagattgtcggcatagcctacgtcccgctgtcgccgtggaccctcactctcatgcagaaggctgtgcgcagaccgatgcatagctaaaacggacac

SEQ ID NO: 168342 - DNA, 260 bp, Zea mays
  Clone ID: MRT4577_8510C.1
cgccgagcgagggctggctggcctgtggggatttttttggaacgtgcgggtgatggacgtttgcgactgtactgtgacgtgcgtcacctttggtatgcgaagcatcggctgcaccttgggttgcatgttctgcgccctcgcgtactgcaccgccagaatatctggcaaggacatgaacccctcaggaaccttgcgactgattttaatgagcaagttgtccatcaccagggcggtgttttaaatcaatttgaaagttcttg

SEQ ID NO: 168343 - DNA, 658 bp, Zea mays
  Clone ID: MRT4577_85110C.1
acctcaacccacttcacttcagagttcagtcccctccagctctcgagttcgacagatcttggctcacttcaccgccggcggacgcagcgaagcgagggaggagcaatggcggaccgcgggggctacgtgcaggtgcagcacgggcagtacggcggcgggcaccacggcgggcagcagcagcacgggcgccagatgggcgagcagatgaagggcatgttccaggagaaggcgccgtcggcgtcgcaggcgctgacggtggcgacgctgttcccgctgggcgggctgctgctggtgctgtccgggctggcgctggcgggccacgccatccagagccgcgcggaggacgcgcgcgccggaggaggtggccacaccggcgccaccggcggagcgggcgccggcaccggcaccggcaccagggcgtcgtcgtaagctggagctagcaggccgatgtcagtccgccgcgccgcgtcgtctactacctgatctatgtgtgctagcgccttcgtacgtgtctacacgagcgagtgtgtgtgtgtgttcgtgcgtgtcagtgtgtgtgtgatgtttctactgttgtactactgctcgtgttcgtccgatcgatcggtttagtaccgagttgtgaataagaaaaggcccgggcccgcttcgtttgtcg

SEQ ID NO: 168344 - DNA, 3151 bp, Zea mays
  Clone ID: MRT4577_85111C.1
cccacgcgcggccacacccacgtcagcccatccgattcctcgccgccgccgccatgcttctcctttcctccgccatcttcaccaccgcacgcctcccactcgccgtctccgctcgcctcccaaaccctaccaacaccacccgcctcatcttcgccggcctacctgcctcctccccggtccgcgccttctgccccagggcgcgcccctccccctccacttgcgccgccttctcctccaccatggccgcctccgacaaccccctcctcgtcgccgacttcgacttcccgcccttcgaccgcgtcgagcccagccacgtccgccccggcatccacgaactgctaacacgactcgagggcgagcttgaagagctcgagaagggcatcgagcccacgtgggcgaagctggtcgagccgctagaacgcatcaccgacaggctcgaggtgatctggggcatggtcgatcaccttaagtccgtcaaggactccgctgatctccgcgccgccgtagaggaagtgcagcccgtaaaagtcagtttccaactaaggctaggacagagcaagcctatctatgaagctttcaaggccatcaggaactcttctaattgggacagtctcagcgatgctcgcaagcgtatagttgaagctcaaataaaggaagctgttctcagtggagttgcacttgaggatgaacaaaggaagaaatttaaccaaatcgaacaagagcttgaaaaactgacacaaaagtttagtgaaaatgtgctggatgccacaaagaaattcgagaagttaattactgataagaaagaaattgagggtttacctgctacagcccttggtttagcagcgcagactgctgtgtcaaagggccatgaaaatgctacagctgaaaatggaccttgggttatcacgttggatgcaccaagctatattcctgttatgcaacatgctcgaaacagagagctccgcgaagaagtttatcatgcttatctgacccgcgcctcaagcagtgaacttgataacaccaacatcatctgccaaattctaaagttaaggctagagaaggctaaacttcttggctacaagaactatgctgaggtaagcatggctcagaaaatggcaactgttgagcgagtagaagagcttctcgagaagctgcgtgctgcttcctgggatcatgctgtcaaagatatggaagatctgaaagtctttgcgaaagattctggttctcctgaagctaatgatttgactcactgggaccttaccttctggagtgaacgactgagagagtctaaatatgatatcaatgaggaagagctgcgcccttattttgcactacccaaggttatggatggcctcttcactctggcacataagctttttggagttactgttgaacctgcagatgggctggctccggtctggcacagtgatgtcaaattttattgtgtcaaagactcttccagtagccctgttgcttacttttacttcgatccttattcaagaccatctgaaaagcgtggaggggcttggatgaatgtagtcttttctcgaagtcgcgtgctagctcgcaatggtttggctgctaggctgcctgttgcccatatagtgtgcaatcagactccaccagttggcgagaagcccagtctcatgaccttccgtgaggttgaaactgtgttccatgaatttgggcacgcccttcagcacatgcttactaaacaagatgaaggctttgttgctggcattcgtggagttgaatgggatgctgtagagttacccttccagttcatggagaactggtgctatcacaagaatactcttttgagcattgcaaaacattatgaaaccggtgaaactcttccagaggaaatttatgcgaagcttgtagctgcaaagaatttccgtgctggcaccttgagcctgcgtcagatacgatttgccagtgtagatatggagcttcatacaagttatgaccccaatggctcagtgtccatatatgatgtggaccaaagagttgcagaacggacacaagttcttgctcctctgccggaggacagattcctgtgcagctttagccatatttttgcaggtggctatgctgctggatactacagttacaagtgggctgaagtactgtcagctgatgcattctcagcttttgaagacgctggtttggatgatgagaaggcaatcgaggaaactggcagacgattcagagacactgttcttgcgcttggaggtggaaagtctccgcttgaggtgttcgtttcattccgaggacgggagccttcgcctgaaccacttcttagacaaaacggcttgcttcctgttgctgcctagtgccccaaagatttctctgttatttatgcttaaacagggaccattttcatccggtcaattatttgatgaagatagacatttcacccttgtttgtttaccctcctctagattattaaataagttagaagacaaacaaacaacatatattattaatgtatgtgttttttatatgtgtctagattcatcgtctgctatttgaatatagacataaaaatgaaatgaataccagttttttagaacggaatgataggtggtgcttatataatctataagcttgattgtaaacaaagagggcctaagctgaggtagtcatggtccaactgccggagctgcccgtggaggtctctactggctgacatgatctctggcatcaggggatgcgagcggtcgccggcaacaaactcgcagaccacgccgcccacctctagcatgctgcacccgggcaccttggccaccctcctctcctccatgtcccgccgcaccttgagcacctcctcccacttgccccacccggcgtacatgttggacagctgcacgtgcaccccgctgtggtccaggcccagctccgccagccagcgtaccacctgctcgccggcctccacgtcgccgtgcgccgcgcaggcgttcagcaacgcgcccagcacgtacgagtcgggcctcatgggcatcgaacgcacggcctccaaggcgtccgccagctgtccggcgcggcccaggacgtccaccaggcacccgtagtgctccacgccgggctccatgccgtgcaccgccgccatgctgcggaacacctccttggcgcggccgacgaggcccgc

SEQ ID NO: 168345 - DNA, 569 bp, Zea mays
  Clone ID: MRT4577_85112C.1
cgtttcaaaaaaaagagaggaaaacaaagttccttcttccctcgaaaaaaaaatcagtctcgcaatggagagcagcgtaggcatagagacggccgcggcagtggcggttggtgcaggtgtgggcggaggaggagggtacggctgcggcgggtgggagacgccgaagcgcgaggagtgccgcatcccggcgacgctgccgtgccccgcggcgccgaggaaggccgtgccggacttcgggaagcggcgcagcccgcccaagaacggctacttccagccgccggacctggaggcgctcttcgcgctcgcgccgcgccgccaggccttctgcgcgtgacttggcgcggacttgattttttggggagggagttgtagatagcttgccggtctcgctctgttgtactctttctagtgggggtgtttagtggccgcgggtgtattagggaggcagtagggtggttttagggagtagtaggtaggtaggtggtggactcttaaatcataagcatactgtttggttaagctgatgaaatccttatatatgtttcctgtcaaaaaaaaaaaaaaaaaaa

SEQ ID NO: 168346 - DNA, 358 bp, Zea mays
  Clone ID: MRT4577_85113C.1
aactaatcaggcagtaatgcatgcttctctcgctaattaaattacacctcattacattaattacacagagtggaaagtaagaaaagaaataacaaagaaagttgggaaaaaagaaaaagaaaactaattagactttgtttaggtattctagtattaactctaatccacgtgtgtgtgaagatgattaaaattaatactagagtattcaaactagacaataaaatgacaacaaatgttggatgagaccggagcaagcaaagcaatgcccgcaagagagagagagcaaaccaagcttgagttgcgttgcgcctctctttgagactggcacagcaggcagtccgccggcagctagctgcga

SEQ ID NO: 168347 - DNA, 194 bp, Zea mays
  Clone ID: MRT4577_85114C.1
gttatcctcgcatcaaaccgtggcactgtgatggagttgggtattactccaattgtgacctctggtatggtaatgcaacttcttgtgggatcgaggatcattgaggttgacaccattttaaaaagggacgtgccccgcttgaattgtcgcaaaaaattgcctgggtatcttgaccgctatgggggaacctgtgg

SEQ ID NO: 168348 - DNA, 485 bp, Zea mays
  unsure (1)..(485): unsure at all n locations
  Clone ID: MRT4577_85115C.1
ccgggtcgnacccacgccgtccggtacgcttctcagcttggagcttttttgccgctggctccgtagcttgagtttgatcgcaaggcgtatacgctcgcgcttgttccaaacggtcgggcggttgttggcgccccccagatgatgtgcttggcaactgcacagtttacatgctgtgaaccttgagctaaggcccaaaaatattgcattggtgactacgacgtctgcttcagagggtcaggactgacaaagctccgcacttgtgaaatttgtgagggggaaaaacctcacttatgtcactgtttacacagaccttctgtgttacacgtgtttgcatgacataatatattaaggccatttgacttgaaaaaatgcagcttaacttaatgaaccttttcccaagaaaggtgtcatttagaaaacttgggaccagctacggtaacttccctatgatatatctcagtggaagcctgtttggatgccaaaac

SEQ ID NO: 168349 - DNA, 2183 bp, Zea mays
  Clone ID: MRT4577_85116C.1
gacaaattgttatttgacagatccaggacttggagtgcagtgatagcagttttgggaacaaccctaatttatgtggtcctggcaccacaaaaccttgtcctggtgctcctcccttttctccacctcctccatacaaccctacaacccctgtgcaatcaccaggaagtagctcttccagtactggagcaattgctggtggagtggctgctggtgcagccttgctatttgctattcctgcaattagttttgcctattggcggcgcaggaaaccacaagaacatttctttgatgtacctgccgaggaagatccagaggtgcatcttggccagcttaaaagattttcactacgagaattacaagttgcaacagatggcttcagcaataagaacattcttggaagaggtggatttggcaaagtctacaaaggacggctggcagatggatctttagttgctgttaagagactaaaggaggagcgcacgcctggtggagaattacagtttcaaacagaagttgagatgattagtatggctgtacacagaaatctattgcgtcttcgtggattctgtatgacaccaacagaaaggttgcttgtgtatccatacatggctaatggaagtgttgcgtcacgtttaagagaccgaccaccagctgaacctccgctagattggcaaacaagacaaaggattgcattgggttctgctaggggcctgtcttatttacatgatcattgtgatccaaagattattcatcgtgatgtcaaagctgcaaatattttgttagatgaagacttcgaagctgtggtgggggatttcggtttggccaaactaatggattacaaggatacccatgtaactactgctgttcgaggaacaattgggcacattgcacctgaatacctttcaacaggaaaatcctctgagaaaactgatgtatttggctatggaattactcttttagagcttattacaggacaacgtgccttcgatctagctcgtcttgctaatgatgatgatgtcatgcttcttgactgggtagttaactgtgccatttcctctgttcaaattgtaccccaagtgttcatgccttttttgtggcttccgtactgtgcaggggctggtgctcaccttttcctatgcaattgttagaaatttgctgatcatttcatccaatgacaaatagagctttgatattaatgtctaaaagataaatattttaactgaattgatattgtgacaggctgataactaaacaagtagagtgacatgctcgtgtctctgaaagtcctcatatatttgttagaatattgctttagcctgttaggatttatttcattgcattcttttgatatgacatgatttggctagcaaattaataccatgttcaattgctttacttaggtcaaggggttgctcaaggagaagaaactggagagtctggtcgacgaagatctagaccacaactacatcgatgtcgaggtggaatctctgatccaggtggcgctcctctgcactcagagcaaccccatggaacgtcctaagatgtcggaggttgtgaggatgcttgaaggcgatggtctcgccgagaggtgggaggagtggcagaaggtagaagtggtacggcaagaggttgagctaggccctcatcgaacctcggaatggattctcgactccaccgacaacctccacgctgaacagctgtcagggccgaggtgaaggcaagcttgagatcagactcccactaattctggtacggaggagtattttgcaagggcacaatagagatgtgtatcaatcatcctagtaaaaaaaaaatccaccaatttgttaatataccagtcagtgggtgaagcgaagattggcagccatggctttggatgtatattgcttgatgtggtcagccatgccttttgagttcttctatgccagggcagcagagctggaggagcttatgtcatgtgcagttgccgcatgcgccaatgctcctgtgtttgtaaaggtcggagctgaggtgctgcggctatcatctgggtccgcgataagttaattgtactgatagttgatatctaactactattttgtgtatcaaatgaaaatgttggaactaaaggatcggatagtataggtgtcttatgaacctgttctggctggcaaaattaaccagaaatatggatttgccacttc

SEQ ID NO: 168350 - DNA, 4421 bp, Zea mays
  Clone ID: MRT4577_85117C.1
gtctaccctatgtatcacgaacattcccagcgaggaaaaaagataaagtccgagaccgacggaaagggaagggcagccggagagcggctgatatgtggggttacgtttcggagagaactcctccgcgaatagagagagggacgggggcggggccggcggaagcggagcctgcgcccgccggaccgaatcctcgccggatcgcccggcctgccggggcggcgctgcggacggcctgatccggctggaatggcggcgggccgacgagggatctagcggaggtgggtgtcgcgcggcaatggctgcggcggaggcgcggcgccggtcagcggtctgggccctgctgccgctgctgctgcggctgctccacccggccgcgctcgtgctggccaacaccgaaggtgatgccttgcatagcttgaggactaacttaaatgatcctaataatgttctacaaagttgggatcccactctggtcaacccctgcacttggtttcatgttacctgcaataatgacaacagtgttatcagagttgatcttggaaatgctgcactatcaggaactttggttccgcaacttggccagctcaaaaacttgcagtacctggagctctacagtaataatatcagtggcactatacctagtgaacttgggaatcttacaaacttggtcagtttggatttgtacttgaacaacttcactggtcccataccagattcattggggaagctattgaagctgcggttcttgcgtcttaacaacaacagcctttctggttcaattacaaaatcataaattgagatcactgcactccaagctctgcatcgatgaaatagccgtttttctggagaagtgccatcaactggttccttttcgttattcacccctatcagttttgggaacaaccctaatttatgtggtcctggcaccacaaaaccttgtcctggtgctcctcccttttttccacctcctccatacaaccctacaacccctgtgcaatcaccaggaagtagcttttccagtactggagcaattgctagtggaggggctgcaggtgccagcatgcgatttgcataatcctgccaaaagcaaggccaccttatttcactgataaacaaaggcagagtttgtggctgaagggaagttagtgaatacagatagccaaagagaaatattaggagcaaagcttgtaccaaaatattgtggcgttcttgttgaaggccttgaaaatattgaacttggcaatattatagatgaggaggtacctagaccatctaatcagattcgtacactaattgatgctattggctatgttattccttggccaattacacatgtgaagcaagctagaagctcatcttgtacccgcaacaagttagtacctgcagcacgtggtagacaaagctagatggggtggtcaaatctatagggaagtctagtataattgcaatgtgaatcacttatattttagtgcttactaacatttttaagccaaatttgtatgatattgctactctgggtatacttcgatgtgattgcccattggcactttcagaacatgtattgctatcgaaaacggaagtatctggctatggagttaaacttttagaggttattacaggagagggggccttcgatctagtttgccttgctaatgatgatgatgtcatgcatcttgattgggtcaagggattgctcaaggagaagaaactggagagtctggtcgaccaagatctagaacacaactacgtcgacgttgaggtggaatctctggtacaggtcgcactcctctgcactcagagcaaccccatggaacgccctaagatgtcagaggttgtgaggatgctcgaaggcgatggtctcgccgagagatgggaggagtggcagaaagcggaagtagtacggcaagaggtcgagctaggccctcatcgaacttcggaatggatcctcgacttgaccgacaacctccacgctgaacagctgtcagggccgaggtgaacgcagctttggactcactgattcttgtatcttgcaagggcaatagcgatgtgtatcaatcatcctagtcaagaatcccccatttgttcataccaatcgttgggtgaagcacgaggctatcactgcactccaagtcctggatctgtcaaataacaatttgtctggagaagttccatcaactggttccttttcgttattcacccctatcagttttgggaacaaccctaatttatgtggtcctggcaccacaaaaccttgtcctggtgctcctcccttttctccacctcctccatacaaccctacaacccctgtgcaatcaccaggaagtagctcttccagtactggagcaattgctggtggagtggctgctggtgcagccttgctatttgctattcctgcaattagttttgcctattggcggcgcaggaaaccacaagaacatttctttgatgtacctgccgaggaagatccagaggtgcatcttggccagcttaaaagattttcactacgagaattacaagttgcaacagatggcttcagcaataagaacattcttggaagaggtggatttggcaaagtctacaaaggacggctggcagatggatctttagttgctgttaagagactaaaggaggagcgcacgcctggtggagaattacagtttcaaacagaagttgagatgattagtatggctgtacacagaaatctattgcgtcttcgtggattctgtatgacaccaacagaaaggttgcttgtgtatccatacatggctaatggaagtgttgcgtcacgtttaagagaccgaccaccagctgaacctccgctagattggcaaacaagacaaaggattgcattgggttctgctaggggcctgtcttatttacatgatcattgtgatccaaagattattcatcgtgatgtcaaagctgcaaatattctgttagatgaagacttcgaagctgtggtgggggatttcggtttggccaaactaatggattacaaggatacccatgtaactactgctgttcgaggaacaattgggcacattgcacctgaatacctttcaacaggaaaatcctctgagaaaactgatgtatttggctatggaattactcttttagagcttattacaggacaacgtgccttcgatctagctcgtcttgctaatgatgatgatgtcatgcttcttgactgggtcaaggggttgctcaaggagaagaaactggagagtctggtcgacgaagatctagaccacaactacatcgatgtcgaggtggaatctctgatccaggtggcgctcctctgcactcagagcaaccccatggaacgtcctaagatgtcggaggttgtgaggatgcttgaaggcgatggtctcgccgagaggtgggaggagtggcagaaggtagaagtggtacggcaagaggttgagctaggccctcatcgaacctcggaatggattctcgactccaccgacaacctccacgctgaacagctgtcagggccgaggtgaaggcaagcttgagatcagactcccactaattctggtacggaggagtattttgcaagggcacaatagagatgtgtatcaatcatcctagtaaaaaaaaaatccaccaatttgttaatataccagtcagtgggtgaagcgaagattggcagccatggctttggatgtatattgcttgatgtggtcagccatgccttttgagttcttctatgccagggcagcagagctggaggagcttatgtcatgtgcagttgccgcatgcgccaatgctcctgtgtttgtaaaggtcggagctgaggtgctgcggctatcatctgggtccgcgataagttaattgtactgatagttgatatctaactactattttgtgtatcaaatgaaaatgttggaactaaaggatcggatagtataggtgtcttatgaacctgttctggctggcaaaattaaccagaaatatggatttgccacttcaactatgtcagcagatttgcgcataaaaaaaatccaccaatttgttaatataccagtcagtgggtgaagcgaagattggcagccatggctttggatgtatattgcttgatgtggtcagccatgccttttgagttcttctatgccatggcagcagagctggaggagcttatgtcatgtgcagttgccgcatgcgccaatgctcctgtgtttgtaaaggtcggagctgaggtgctgcggctatcatctgggtccgcgataagttaattgtactgatagttgatatctaactactattttgtgtatcaaatgaaaatgttggaactaaaggatcggatggtataggtgtcttatgaacctgttctggctggcaaaattaaccagaaatatggatttgccacttcaactatgtcagcagatttgcgcaaaaaaaaaaaaaaaatataaaaa

SEQ ID NO: 168351 - DNA, 319 bp, Zea mays
  Clone ID: MRT4577_85118C.1
tcgtaaaattctagtcggcatatgtcacgattcactcgagcactcaacctagggaaggtgtggagcgctggcgcgcggcgtggtgtcccgcgaatggcgacgcggtcgcgggcaagaagaatgggtcggtttccttcaccatcgactgcaccaaggcagtggaggacatgatcatgggggtctcctccctcgagaagttcctgcaggagcacatgggggtctccgacggcaaggatggcgacctgacgctactccttcaccatctctcgcgagaggaccaaggtcaccctcacctctgactgacccttctccaagaggt

SEQ ID NO: 168352 - DNA, 597 bp, Zea mays
  unsure (1)..(597): unsure at all n locations
  Clone ID: MRT4577_85119C.1
gtgcgcacagtcggggatcaacggcgtcctgaagaagccgcttgttctgcaggaagtgaaagaagagctcacgcggattcttcagaacacatgatacttacaaattattggtgggttcctttgctgcctgccaagagctctgaactctgaagtagccaaacatggcgccaccctgactgacgatgaatacgaccccactgtctagcatagcagaagaaaaaatttacaggctctcggaatacataggctgtcgagggtttctggtgtcttgcagcacaattgctggaatatggcaaatggtagtgaaatggcaaatgccgatgtgccatggtgagtctattcagatgggaattgcggtggcctgagaatgaaggagagtctgatacttagtccttcatagaaacctgggtggtggtatatgtaatggccagtagtggcaataaggctgaagttttgtaagttagctaacctggttgtaaggatctaatgtagggagttccacaattgtatttatcaccaccttttaggaatggaagaatgacccattcactgcccttatgagcagattaannnnnnnnnnnnnnnnnnnnnnnnnnn

SEQ ID NO: 168353 - DNA, 124 bp, Zea mays
  Clone ID: MRT4577_8511C.1
cgtccgagaactggctgtcgtatggaacgtgctgactccgataatccatgagaaagagcagaacagagtatttcctgagctctacgaagctggggacagaggggctatcaaagcttaccatctt

SEQ ID NO: 168354 - DNA, 480 bp, Zea mays
  Clone ID: MRT4577_85120C.1
ttgggtcgacccacgcgtcgcgacagtgacaggcattggtgcgacaggaagcatcgagtcggggatggcgacagagtgagcgaagggtgtatctgtcaagactgtcttgagcagcaggcagaacaggtccaccgcgatgcacctcattgggtggtccgccttgaaaagcctacgtggcatcggctatggacatgggctctggtgcattcatggggagcttaactacggcaacctgaagagttgtgcggagacgtacatgacgactgctgactttgaagagctgatgaaggaagttgactctgtggtgatgacaggtggaactggttcatcccgatgcatgactgccggctaagtggacgttgagaacatgagctgcaagttgtgaataaaggaagctctactgtcacttggttaaatgaactatgcccagctgtgatggcggcaccaaccactacggcgacctcgatgacgacagaagat

SEQ ID NO: 168355 - DNA, 1049 bp, Zea mays
  Clone ID: MRT4577_85121C.1
aaccaaatccaaattcaagtttgaattcaaaaagatgagatgtatgagatgcacctggctttgttccttaaagccgggtgtgacagtcaccgatctgttagctgatagcctgatacgccatcatgaacagacataaaagaaagagagaagggagaaccaaagcttagcttatgagatgttagtcacaatggttaaataaacccaacaagggcaaaattctagcagggtcaaatctgattctgtagagcccctttgtttacacaccagaacaagctttaacacctcgactcagcacagtttctcgtatcacactttccatcgtctttgagcagagcaccagatcatccttcgagcattgccttggctgcatcgatgagtgcaggtctgaagctgttcgatgctcggccaagggcagtgtagccttccttgtcctcgacatcaacatcagcaccatgtctaattagcagaagagcagcccctttgttctcacatataacagcatgcgtaagaggtgtttgtcctgtcttgtcaacagcatcaacttcagcaccttcctcaatgaggaattcacacagctccgcgtttccagtgcttgcagctctatgcaaaggtgtgcagccaaacttgtctttcttgttgacattagcaccatgggctattagtttttcagctatgttaagcctccctcgctcaagcaggatgtcgacgatttgagagttgccggagctcgcggcggagtggatcggcgcccacccctcctcgtcctgcgcattcagcacgctagccgcggcgtcaccaccgcactgggcaagcgcgagcaccacctggggatgcccggcagcggcggcgacgtggaggagggagcggccgtcctcgttgcgcagggagaggtcggcgggggcgagggaggcgaacgcggcggcgtcgccggactcagcggcgcggaagagctccttctctgacggtcgcctctcctcgccgccggcttcgtcgacgtccatcgctgcagccatccggactccggaggtactcgtacttcgagttcgaga

SEQ ID NO: 168356 - DNA, 644 bp, Zea mays
  Clone ID: MRT4577_85122C.1
ggggggcatccgatgtcacggcacgttgattattcgtctccactccacaatggttaaataaacccaacaagggcaacgtaaagttaaaattctagcggggtcaaatctgattctgtagagagccccgttgtttacacaccagaacaagctttaacacctcgactcagcccggtttctcgtaccacactttccatcgtctttgagcagagcaccagatcatccttcgagcattgccttcgctgcatcgatcagtgcaggtctgaagctgttcgatgctcggccaagggcagggtagccttccttgtcctcaacatcaacatcagcaccatgtctaattagcagaagagcagcccctttattctcacatataacagcatgcgtaagaggtgtttgtcctgtcctgtcaacagcatcaacttcagcaccttcctcaatgaggaattcacacagctccgcgtttccagtgcttgcagctctatgcaaaggtgtgcagccaaactcgctcaagcaggatgtcgacgatttgagagttgccggagctcgcggcggagtggatcggcgcccacccctcctcgtcctgcgcattcagcacgctagccgcggcgtcaccaccgcactgggcaagcgcgagcaccacctgggga

SEQ ID NO: 168357 - DNA, 1047 bp, Zea mays
  Clone ID: MRT4577_85123C.1
gcactaacctaacccaggaattctgtttctcgtatcacactttccatcggagaaccaaagcttagcttatgagatgttagtcacaatggttaaataaacccaacaagggcaaaattctagcagggtcaaatctgattctgtagagagcccctttgtttacacaccagaacaagctttaacacctcgactcagcacagtttctcgtatcacactttccatcgtctttgagcagagcaccagatcatccttcgagcattgccttggctgcatcgatgagtgcaggtctgaagctgttcgatgctcggccaagggcagtgtagccttccttgtcctcgacatcaacatcagcaccatgtctaattagcagaagagcaacccctttgttctcacatataacagcatgcgtaagaggtgtttgtcctgtcttgtcaacagcatcaacttcagcaccttcctcaatgaggaattcacacagctccgcgtttccagtgcttgcagctctatgcaaaggtgtgcagccaaacttgtctttcttgttgacattagcaccatgggctattagtttttcagctatgttaagcctccctttactcgcagcataatgaagagcagttcgaccaccatcagtaaccaggttaacatcagcacctcgctcaagcaggatgtcgacgatttgagagttgccggagctcgcggcggagtggatcggcgcccacccctcctcgtcctgcgcattcagcacgctagccgcggcgtcaccaccgcactgggcaagcgcgagcaccacctggggatgcccggcagcggcggcgacgtggaggagggagcggccgtcctcgttgcgcagggagaggtcggcgggggcgagggaggcgaacgcggcggcgtcgccggactcagcggcgcggaagagctccttctctgacggtcgcctctcctcgccgccggcttcgtcgacgtccatcgctgcagccatccggactccggaggtactcgtacttcgagttgtggctagagactagagttgacgcgtctttccccggccgg

SEQ ID NO: 168358 - DNA, 287 bp, Zea mays
  Clone ID: MRT4577_85124C.1
agctttgcaggtattgctggacatcttcactggggtgcggctttacttgccaccctccacaccagacttcagccctctcagacgctactttgtggcattcgacggggacctggtacaggaatttgatatgacttcagccacgcacgtgctgggtagcagggacaagaaccctgcggcccagcaggtctccccagagtggatttgggcatgtatccggaaacggagactggtagctccctgctaggtttgctgtcttccctctctcagccatactctcctttaccata

SEQ ID NO: 168359 - DNA, 270 bp, Zea mays
  unsure (1)..(270): unsure at all n locations
  Clone ID: MRT4577_85125C.1
ttcncgatntgctagctactgctcttgcccagcatgagcaaacggccgttgatgacaacgccggcggtcggagaagacggcgagccatccagcggcgctcgcggagccggtgcgccgccgccgtctcagccggtcggtaccggccgctacgcaagactgcagagcgccggcaccgggaccagtgcctgcgacggcgccgggccagacgtcttgtgacctatttggaaaggcgttttgaagcggcggaccatcccgcaaccgttgatcggt

SEQ ID NO: 168360 - DNA, 129 bp, Zea mays
  unsure (1)..(129): unsure at all n locations
  Clone ID: MRT4577_85126C.1
gaactagcgttgacaaatatttgaaaactgagatagtacataggtagagtactatttatattgnttttttatttaccacgacaaatatttaagaacatagttaatacatagatagagtactacttttgt

SEQ ID NO: 168361 - DNA, 184 bp, Zea mays
  unsure (1)..(184): unsure at all n locations
  Clone ID: MRT4577_85127C.1
ctcgctctgaagcttgccaagttaaagcaganaactctcatgagggcaaagaggaagagagaggtcatcatcttcgtcctcacgaagatcatatcacctgttactcacactgacaataacaaataaagcatttcattttcatgaatgtttcatctatagattttctactttttctctttcctac

SEQ ID NO: 168362 - DNA, 294 bp, Zea mays
  Clone ID: MRT4577_85128C.1
ggggggggttttttttttttttttttttttttggaacaaaatgagatgggtgttttttaatttgatcaacgacttttcattttcagtggactactttattgggtgatcatttccacactccctacaccgtcttacatgggggtgaattttagggggggggggggggcagcagcttgcgatcgagcttggctaatcgtccatggcgggccgaacaaccaggtgttggctttgttcgctagccccttttctttttgtttggggccgtgcgtgtgctggcgagtggtcgggcgcgct

SEQ ID NO: 168363 - DNA, 1262 bp, Zea mays
  Clone ID: MRT4577_85129C.1
cctcgaggccggccgggccgggaccggattttgggtagcggggaccggttgccttctctacccgtgattggaggtcgcccggagctgaggtcggtcacggtctacgcggacggaaggcgggaagaaacacggtgggcacccaacgcggagaattcacgacggtcctatatatgagtataatatatacagctacttcccaccctctcccccgcaccgtcggcaccaagatgacgaccccgccgcgccgatcgccgccgctccggggaagaggccatgcgggacttcgggctctggcgcctatggtcaacatccacgagcgctcgcctgtgcccgcgtgcgtgccggcacacccggacccttcgtcgtcgatctccccggacgactggcggcgtttggagggcgcaacgttctctgtgatgtgcaagatccatcccaccgtctcctcccagcaccttcgcgccagggtaatcgactacatccagcgcctcttcaggctccaccatgacggctaccaggtcatttcatttggatctgttccattgaagacatatcttcctgatggagatatcgacttgactttattgtgcgctgcaatttctgatgagaatctggaaaatgaagtgtgcgctattctaaaatcggaagagcagaggaaagattctgaatttgaagtcaaggatgtcaagtatgtacctgctgaggtcaagcttgtgaagtgcaaggtgcaaaacattgctgtagacatctcagttaatcagattggtggacccaataaagtttattttctagagaaggttgatcaaaacttggggaaaaataacttgttgaggagaagcataatgcttatcaaacattggtgttattatgaaagctgcattcttggtgctcaacgtggtttggtttccacttatgctttggagacattagtgctgtacattttccatgtcttccacaagtctctggatggtccattggctgttctctataggtttcttgactactatagcaaatttgattgggataacaaggggatcagcttgtttggtcctatttcactatcttcactacccgagctagtcaccgagccaccatatactcgtgatgatggttttctctcacgggaggcgtttctcagagactgtgctaaggcttttagtgtccccccaataaactctgaggaaaatccgcaagtattctccaaaaagtttgtgaatatagttgacccattgaagcagagtaacaatcttggacgcagtatcagc

SEQ ID NO: 168364 - DNA, 405 bp, Zea mays
  Clone ID: MRT4577_8512C.1
ggcatgtattcgacgctctttgtctggatcaccaatatatgaccgatagcggggcagcacacatgccggtgcagaagaaaaggacaacgttagaatcgagacaggctatgcgtcagtgagggggagtccggccccgctgtcgccgaaaaacagcaattgcgaactcccccgacacgctcgcatagatgagaccaacttttagacgtgctatatcactctttaaatccatctagaaagtgaacctatgggactgcagtggccgtgcgttcgacaatatgtgtgcattaggtaccgccaggagtggatcctttcggaccttctgcggatcgagagtccagtcgcccggaagagctagtacgatgcactgcaagggtttgtggcggcatgtacgggcaggaaccactt

SEQ ID NO: 168365 - DNA, 1355 bp, Zea mays
  Clone ID: MRT4577_85130C.1
tggaaaatgaagtgtgcgctattctaaaatcggaagagcagaggaaagattctgaatttgaagtcaaggatgtcaagtatgtacctgctgaggtcaagcttgtgaaggtaccatattctaaaatcgtagatctttatggtggcaggtcaagcttgtgaagtgcaaggtgcaaaacattgctgtagacatctcagttaatcagattggtggacccaataaagtttattttctagagaaggttgatcaaaacttggggaaaaataacttgttgaggagaagcataatgcttatcaaacattggtgttattatgaaagctgcattcttggtgctcaacgtggtttggtttccacttatgctttggagacattagtgctgtacattttccatgtcttccacaagtctctggatggtccattggctgtttcttgactactatagcaaatttgattgggataacaaggggatcagcttgtttggtcctatttcactatcttcactacccgagctagtcagtaagtgaaagtgaattcggctcgaggaactgttgattgtgctgtatgttggtgttctgtctgcggttgaaactattggtcattggcatggcttttcttgaacagccgagccaccatatactcgtgatgatggttttctctcacgggaggcgtttctcaaagactgtgctaaggcttttagtgtccccccaataaactctgaggaaaatccgcaagtattctccaaaaagtttgtgaatatagttgacccattgaagcagagtaacaatcttggacgcagtatcagcaaaggaaaccttggccggatacgcaaggaattctattttggtgcttgcaagctcggcaagattcttcaggcgcccgcgtgtttctctgccaacgaaatcaaccggtttttcaggaacacattaagcagggcagatgttccggtgagctctcctgatgatgttctacaggccgctagtgtttctgcgtcaccgggcaacaagggcgtggaaggagtcagcaagggcagttcacccaacaactcgtgtgacgttctgtgcaatcagttcggttacattaaaatctcagattccaacaatgcgctgcagaatctggtcgtggacaggcccgcttaggctgtacctgcacatggtcatagaacctccagcagcttactcatcttactttctaccatactttttttaaaaaaaacttccacattataaagaatacagtctatggtataaaataatgttttacatggctgtatacacggaccgctgatcatagcctaagtcgttgtcgttggtgcccacacaactgtaaaatcgtaacctgttacaacgtcttttttagac

SEQ ID NO: 168366 - DNA, 196 bp, Zea mays
  Clone ID: MRT4577_85131C.1
ggccgacaccgcgcgtattaggcgacgtccggtgagaaagcctagcgccgagtcgggggcgtttccagggcccttcgacgcgcccgatcacgcgaccagatgcgtggtcagcgttgccgccgatcgagacccccgacgacgggcgacggtagcgacgtggatgacaagagcgacccgctgctggggcaggacccgc

SEQ ID NO: 168367 - DNA, 500 bp, Zea mays
  Clone ID: MRT4577_85132C.1
actgcgtgcctgacgttcgcgaacacgtctgcgccgccaaacatagctgagcgtcagcctgacaaggacgccggctacggtcgaccgtggggccgagcccacatgaaccaactagaccactacacagagcgccacgctcggaacagaaccagcagcggtctgtgatgtgcgccaacactggacttgaccttctttacacgggttatcagctgaaacaacacgattgccttgcccatcacgacagagcatgacaccttggtccggagcgtggccaggcgacacactgatcctttctctacgatgccggtactgctcactgtggctattgagcgccatcccgtcttaaatcctgaaggtgacctaccttactcctcgattgctcatcatgggaggacgatgagaacaccagaaaaacactaggggctaagatgggataagacacatgcgaccctccagctctcagctggatatcgagtagatagcacacaccaccatgtgca

SEQ ID NO: 168368 - DNA, 1709 bp, Zea mays
  Clone ID: MRT4577_85133C.1
attgatcgcttactccaccgaggcgaggaagcgcagaccagatcgccggaggtgagcggcgatctcaccagctgcgagcaacagcaggtaacgaatcaccactgcacttcctctctgtcccaccctgattggtaattacttctgtcgggctcatccatttcaatgttctcttttctcctctctcaatcgttcgcttccttcaccgaggcggggaattgccacccagatcgctagaggcaagtggcgatctcaccagctccaggcagcagcatcggcgccttggccgtccatcccccgttaacgggcggttccccgacgaggccctatcccaccacccccgaatgtttgggttactccatgcttcacgattatcccacagcgacaacacctagatggaatcgcactaatgccggccggcccgggctgccaaactccaaagacacgattgtagttggattaattcccaccccacaaccccccaccacaagaacttgttcgatcgaattcttcttcaactacccgccgcgggaacccaaggaaggaggcaaagcaaaggcttctcgcagggtttcccgtcagcggcttctgcggcgggcgccatgaacagcagcaagcaggcgctgatttacagcttcgtggccaagggctccgtcgtgctggcggagcacacggccttctccggcaacttcagcaccgttgccgtccagtgcctccagaagcttccccccaacagcaccagatccacctactcctgtgacggccacaccttcaacttcctcgtcaaccgcggcttcgtgttcctagtggtcgccgatgaggcggccgggaggagcgtccccttcgtcttcctagagagggttagggaagacttcatgcagcggtatgggtccagtatcgatgaggaggggcagcacccgctcgctgatgatgctgatgaggatgactttctgttcgaagaccggttcagcattgcctacaaccttgaccgtgaattcggcccgaggttgaaggaccatatgcagtattgtgttaatcatccagaggaaattaacaagctctccaaggtgaaagcccacctatcggatgtcaaagggatcatgatggacaacattgagaagatattggatcgcggggagaagattgagcttttggtgggtaagacagagaccctacagtcacaggcggacagcttccacaggcatggcagagagttgaggcgaaagatgtggcttcagaacctgaggtttaagctgatggtgggtggcggcattgcggctctgatccttatcatttggctgatggtctgcaggggattcaaatgttagagcacaccaagttgctcgccttttttttttcttttcaggcgtttgatatgcacagactttcaaccaaattgtgttttcagtgtcacggtatcgcaatgtagtggacttcaatccccgcagtctttcccatgttccattacttccatatgataatggtaaaaggtaggaagctggagtacgcggtcagaactgtttggaggagatatgacatcacgacttaaatatctgtacattccaaaaatgcaagctcctattatttcggtaccttctgtactggtaccaacgatcattgtaaatgcataacgcactttggtgtttgtgtaccaaaaaaaaaaaagccaaaaagggggcatgtctcaagctgtttccctcgccatcattcgc

SEQ ID NO: 168369 - DNA, 349 bp, Zea mays
  unsure (1)..(349): unsure at all n locations
  Clone ID: MRT4577_85134C.1
gtcgactcgcacgcgtctcgtggcacgtttcaaatctgtggcccctctgcnngttcgagatnctgatctganngctggcaccagtcccactttgcgcgcatgggcggagggactncgtgagccgccaagccccaatctcactggcaaagttcggcggtagtgccagaagctcgcctggcgagcctcactcnnaccatcgtaggagaatctgnntcgtcgactctcgccgtaaagcccgtacgagaatnctcgcatctncgtggtctgtctgctactctcacgttctgtccactactctngatatcactcnnttctggaaagggctaagagggtggcaccgnnngtgttt

SEQ ID NO: 168370 - DNA, 1286 bp, Zea mays
  Clone ID: MRT4577_85135C.1
cccagatgttccgcgtgctccatgcttatccattttgctgctgagaccaaacgtagatctaccgcgtgcgtgaaaccaaaaccaaaaaattagcgtagtatttttcagaattgaacgcagatctgtcgcatgctccatgctcatccgtttcgctgctatcttttctcctctctcgattgatcgcttactccaccgaggcgaggaagcgcagcccagatcgccggaggtgagcggcgatctcaccagctccgagcaacagcagatcgctagaggcaagtggcgatctcaccagctccaggcagcagcagggtttcccgtcagcggcttctgcggcgggcgccatgaacagcagcaagcaggcgctgatttacagcttcgtggccaagggctccgtcgtgctggcggagcacacggccttctccggcaacttcagcaccgttgccgtccagtgcctccagaagcttccccccaacagcaccagatccacctactcctgtgacggccacaccttcaacttcctcgtcaaccgcggcttcgtgttcctagtggtcgccgatgaggcggccgggaggagcgtccccttcgtcttcctagagagggttagggaagacttcatgcagcggtatgggtccagtatcgatgaggaggggcagcacccgctcgctgatgatgctgatgaggatgactttctgttcgaagaccggttcagcattgcctacaaccttgaccgtgaattcggcccgaggttgaaggaccatatgcagtattgtgttaatcatccagaggaaattaacaagctctccaaggtgaaagcccacctatcggatgtcaaagggatcatgatggacaacattgagaagatattggatcgcggggagaagattgagcttttggtgggtaagacagagaccctacagtcacaggcggacagcttccacaggcatggcagagagttgaggcgaaagatgtggcttcagaacctgaggtttaagctgatggtgggtggcggcattgcggctctgatcctcatcatttggctgatggtctgcaggggattcaaatgttagagcacaccaagttgctcgccttttttcttttcaggcgtttgatatgcacagactttcaaccaaattgtgttttcagtgtcacggtatcgcaatgtagtggacttcaatccccgcagtctttcccatgttccattacttccatatgataatggtaaaaggtaggaagctggagtacgcggtcagaactgtctggaggagatatgacatcacgacttaaat

SEQ ID NO: 168371 - DNA, 1216 bp, Zea mays
  Clone ID: MRT4577_85136C.1
ctcgaggccggccgggacgattgtagttggattaattcccaccccacaaccccccaccacaagaacttgttcgatcgaattcttcttcaactacccgccgcgggaacccaaggaaggaggcaaagcaaaggcttctcgcaggttcgcatcctccggaaccatccactcctctcatcccgctcggagtttgacctctcccgacctgagatccgattgaatcgggtttcccgtcagcggcttctgcggcgggcgccatgaacagcagcaagcaggcgctgatttacagcttcgtggccaagggctccgtcgtgctggcggagcacacggccttctccggcaacttcagcaccgttgccgtccagtgcctccagaagcttccccccaacagcaccagatccacctactcctgtgacggccacaccttcaacttcctcgtcaaccgcggcttcgtgttcctagtggtcgccgatgaggcggccgggaggagcgtccccttcgtcttcctagagagggttagggaagacttcatgcagcggtatgggtccagtatcgatgaggaggggcagcacccgctcgctgatgatgctgatgaggatgactttctgttcgaagaccggttcagcattgcctacaaccttgaccgtgaattcggcccgaggttgaaggaccatatgcagtattgtgttaatcatccagaggaaattaacaagctctccaaggtgaaagcccacctatcggatgtcaaagggatcatgatggacaacattgagaagatattggatcgcggggagaagattgagcttttggtgggtaagacagagaccctacagtcacaggcggacagcttccacaggcatggcagagagttgaggcgaaagatgtggcttcagaacctgaggtttaagctgatggtgggtggcggcattgcggctctgatccttatcatttggctgatggtctgcaggggattcaaatgttagagcacaccaagttgctcgccttttttttttcttttcaggcgtttgatatgcacagactttcaaccaaattgtgttttcagtgtcacgatatcgcaatgtagtggacttcaatccccgcagtctttcccatgttccattacttccatatgataatggtaaaaggtaggaagctggagtacgcggtcagaactgtttggaggagatatgacatcacgacttaaatatctgtacattcc

SEQ ID NO: 168372 - DNA, 360 bp, Zea mays
  Clone ID: MRT4577_85137C.1
acgctgggtcttcagaccattagctttatctactccatagcgcagaagaacccgatcgacacgatcagggtgttgctcgtagcgctcgctctcatggctctaactgccagcgccaaattctcgcatacaatcacaggctgcacaatgtactacaattcacgcagatcatttacgtgagccctggtaccttcttgacacagccacagttgttagccgttctaccagcacgctgcgcctaacgcttgcaccctcttacaactgcaacaattgctgtcattgaaccaacttgctttgacaaacctagcagtgttctaccaacaacccatcattggtggtgccctcttttagatttcttatgag

SEQ ID NO: 168373 - DNA, 477 bp, Zea mays
  Clone ID: MRT4577_85138C.1
ggtttttggtttttttttttttttttttttttttttttttttttttttttttttttttttttttttttttttttttgggaccccaacgggtaaaaaggtctttggggttggcccattgattaactttttttaaaccccggccccttttgggaatgcttgaccaaaaaaaagaatttccctgcctgaggcatgttatcatctgcgggggtgctggggggcatatccgggttaaaaaaaagggggaaaaggggctccttaaaagttttgggatgccggggacgggaccccgaatttccattcaggggggaaaacgccccatgggggggccttgggggggtctttggtcatcccccggaacgtaagggactcggaggggagggcctcccgggtttgccacatttgcccccagtggcgcttaatttccggccattggacacgcttgttccctttaaccgaccccgcggggagggccccggc

SEQ ID NO: 168374 - DNA, 520 bp, Zea mays
  Clone ID: MRT4577_85139C.1
gggtacctcgaggccggccgggccgggattcattccagcgagtctgcagctcactatcattctcccggcgcaatcccgctggcaagtacttctagccgctgctttctaccatgcgtctaccttcatcgccactgaagcggagagaaacaagcgtacgcggaggatagagaagaagctcctcacgatgaagtgcaaatcctactctggcttcgtcttgtggaccagaggagccagagcttctcctggccatgggatgaacgaggatggaatggattgtgcatctcgtatgcgaggaggtttgctgtacgacgtagcggatgtaaatctgcgtctccgatatactgctattatgctgtagagactgtggatatgttgcacttagactagaagtatagtgatgactggtactagagcctgattgatactcctcgcctcatcgcgagacgttggcgaaggcggccccgacggccctcgagatctcctttattctttcttgtagacgacctcaaatcctccggta

SEQ ID NO: 168375 - DNA, 131 bp, Zea mays
  Clone ID: MRT4577_8513C.1
gctttctattgagcatcagatgtaaaacaattaactagtatcttcattttacactgtatctaaaattatttgtgttcacaatatttctcaataatgaaaatcaagatatgcaatcagtgtaaccatccatt

SEQ ID NO: 168376 - DNA, 470 bp, Zea mays
  Clone ID: MRT4577_85140C.1
ttataaacatgtgcaggtttttcgagggggcctggcattggagtatgttttaagggaagtcagttcattttatgaatgaggtatgggttcatggatgtggtaaataatgtcatcatcgtggttagagtagcaccctcaaatgcctacctcatagctggtcttaagtctccaatccttgtatttggctctcattacgatatgttgtttatttgcctcatctttttccatcttttttttacccaaatgtagctggaagcgaaacttcagttgttgatgttttagttttcgcaggtcgaacatttcgtgctcttgatgttactttttcccactccccaactctgtttgctttggtcttggttctctcaggattattttgtggatgctcaattacatgctctcaggaataagactgttctgcatctgagctgcgagcctgcaagtgaactgcgtatttgctggcgcacttcttt

SEQ ID NO: 168377 - DNA, 586 bp, Zea mays
  Clone ID: MRT4577_85141C.1
cccactcgattcgaccacccatccgccagctaatggaataaccagaatgagggaactatgcaacggcgaatggccggagctgctgcaccgatgctgtccgtgggtccggcggaaggtacatcggctgctaccgaacaagggggttaggctagcaagctcatcactggctaatgccaacgtagttgcgcaccccacgcccatctcactggcgcagcgcgcgcagctggcgctgatgccgcatccggagccatccatcaacagcccgcgttgctgaataccaccaacaccaatttctgctactacaacaactactgtatgacccacccccgccacttgtacaagcacgtgccgccgttactggacgcgcggcggatccctttgcaacgtccacaagcgtggaggctggcgctgaaacaagcgtgctggcaattcctcatcctacattgctgggtcttgatgcttaaagatgggtccatcaggaaggctactgagcagcccatgaactacaccggccaccatcacaggcactactcagtgctatcattactcagtggctgatctctttctctaagcacttgccggtgtt

SEQ ID NO: 168378 - DNA, 600 bp, Zea mays
  unsure (1)..(600): unsure at all n locations
  Clone ID: MRT4577_85142C.1
gggatttatgaatatagtagattaattggtttggaatttgacattccaccatcttccaaagtttagatataagtatatcccaaatttataggacgagggggtggaaattgattttgtgtatccctagtccatgtttctactctgcaacttatgttggctcactcttctgtatctgaaatgtagtacataaataccccccctcatattaccaacaatagtatacacatatattctatataaaaccatactaacttaactgatctatgcctaaattattatgattattagaatggagttcaattccaaggatccaaacagggcctaagaattcatgccatcccatgtcagctcattcctatacgcatgagactcgccatagatgtttgtgaatctccccacatcccataatggagaaggcaatgcgctccacagttggcattagacttgaaactcatcagtaggtagtgttgagaaggataaagaaagatcacacggtccatatacctgaaactatatttttagttatatataaaaggagtctctactatgcaaacctagagtagagaagagnaaatagataaccaacaccattctcctcat

SEQ ID NO: 168379 - DNA, 442 bp, Zea mays
  Clone ID: MRT4577_85144C.1
ctgtacagaaagacggccttataatccatcctctaacagtatttgttttgcgtttcaaaaaaaaaaaaaaaaaaaaaaagaaaaaaaaaaaaaaaaaaaaaaaaaaaagaaagaaaaaaaaaaaaaaacaggttgccggtccgagtcttcctccaatgggtttgggtttgggagtgggtgcacggctttttggacgggactccattgcctttggggggggggggtgggcccccgttttggaccacctatttttttttttcatttttttttttaaaggggtcctttgaggcgcggctttggttcccttttgggggggtttttggggggcttgctttccccttggcctaagttccggccggagagaaattctagtcgggacgcgtttccgccccaattcccccccggtagcttggcgggggaggcctggggggcctcagggggg

SEQ ID NO: 168380 - DNA, 1464 bp, Zea mays
  Clone ID: MRT4577_85145C.1
ggccctaggggccttttttttttttttttttcagcacaaatgttatcctgccgaaaccagcctggaaaaataggttactgatgtcagcgctatatatacaacgaataccagatcggttaatgcaacagttttacccaattttctgcctgacatcaacagattcacatacgagcgtaccgaaagtctagctagaaatagcagtgacaagcaaggcacagcacagacacaactccagcagattcacatacatgaaggcacccagcgatgcttcaacctgcttcttctcagacatctatctcaagacggccatggcctactacactacggtctggaattctttgtagattgcagcatgaggtacctgcaagtgtagaacccagcagcataccatgaatttaagagagcagcaagatcactgtcaagatttgggttcatgcccatatttgtgctttcctcctttccagtatcagatttgcttccttgggtgctaggctgtccagatatcgtacttctcataaaattaaaggcagcttcagcagtcatcattgcagccttatcaacttgatcatcattgctagataccatcgttggggcctgcatgaagtttgaaacactagggtatgcagtagttgcacctgggcattgatcacaagtcaatgatacgctgcagccagcagtaggtggcgtacaagcagagcctccacttggttggcctgctgaacagcaggagacagataccaggggaacgttccaattgcagcatgaggattgagtggtggaagagtaaggatctggtactgtggcactatagacaggaacttgctgctgttgggccgtagaagcatatcctgatgcttgataatttgaatagtttgtttgttggagttgctcaagaatgttccgactcttctcctcaagttcatagtattgtctcagcaattcattgtactgcccagtttgctggcttgagctccaatttccaccagcattagtagaagcatcggtggagagcgtcttagcctctgaaacatgtgtctctttgcctggatcagtttcttgaagaggagcatgctcaattgtctgtctgtcttcatagggctgttgttgtaactctgacagatcacagtgtgtgctgtcacagttggcatcttcctctccgcacacatccgctgctccagcagtaattggctcctcttctgcagtagcagcagcaagttcggtcttcccatcctcgcttggcgttgctcgcttgctcttgcaatgcatttctttcatgctgaacatggcgcggtcgaaggcgtccaccagcgcggagtcgtcccacagttcggcgcccttgcccatccccgaaccacgccgccgagctgtctcgccctcgcggaggctgcggcttctcttccttctcttggaacggaaaggcgcattcacgcctcccgaggtctcacccaatgaaaaaggaacagc

SEQ ID NO: 168381 - DNA, 214 bp, Zea mays
  Clone ID: MRT4577_85146C.1
ttcttaagcagtggtaacaacgcagagtacttttttttttttttttttttttttttttttgctactctcaatcaacccttccagatagtaattggctaattgcctaatcaaacatgggtcattttgaaccccactttatgctaggatgataggatcccttttatagtgtagctacatgctgatatcccgcgtactctgcgttgttaccactgct

SEQ ID NO: 168382 - DNA, 259 bp, Zea mays
  Clone ID: MRT4577_85147C.1
ataagacaaaattgaggtctaataagtcctgggagaagcaacattcattacgcatcctctttcttgtccaaagcgcaggattttttctgactttctcggcccacgttggacccagagacatccgcctcaagcgacttcttcttaggtggcagatgtggacgaccacagggcgtcacatcctggacagagtagggggagcgttcttatccacactcgaatcgaccgatggcgcccacagctctcgggcgtcggacttatt

SEQ ID NO: 168383 - DNA, 986 bp, Zea mays
  Clone ID: MRT4577_85148C.1
ctgctcctctggcctctgcggtgcctcctcccggtcccgagtcccggccatgtcgtcgccgctggaggatgtcagcgtgggcatggaggaggaggatcagcggcccctgaaccgggccctgctccaccggagcgccaccaccaacgcctcccaggtggccatggtcggctccaatccctgccctatcgagagcctcgactacgagatgatagagaacgagctgttcgaccagaactggaggacgaggcgcaaggcggaccaggtgcggtacgtggtgctcaagtggaccttctgcttcgccatcggcatcctcaccgggaagtgtgaagggaagcagaagcgagacaaatccccacccggctccaaaccctagccacctcccccgtccccccccttttcgtcccccagatctcgctggcgtctgctccgcctcgcttcgatgtgaccccaccctagggtttgagacggtgttgcggtgtgtgcgtgtgtcgcggcgattcgcgacgcgagtaggattcgaggtgtcggcggcggtgcgagcgcaaatgaaggacccggcgcaccgcacgaaggtggtgctccggcggctgccgccggcgatcgcgcagcaggccgtcgtggaccaggtcgatgcgcgcttcgctgggcggtacgactgggcctgcttccgtcccggcaatgccagccaaaagaatcataggtattctcgactttacctaaatttcaagcacccagaggatgttgttgagtttgctgaggtcttcaatggacacatatttgtgaatgaaaagggtgctcaatttaaagctttcgtggaatatgcaccatcacaacaggttcccaagtcaaatgtcaagaaagatggccgtgaagggactgttacgaaagatcctgagtacttggagtttcttgagtttatttcaaagcctactgagcatctacctagtgctgaaattcaacttgaaaggaaagaagcccgaagggca

SEQ ID NO: 168384 - DNA, 941 bp, Zea mays
  Clone ID: MRT4577_85149C.1
aaacccccgcctcggccgccatctcctctttaacccagacgcggcgggctcggccgcggcgtgggctggtcctcagtcctcttccgttcttcctcctcgctcccgccccctcgcgcccctcgcctttcagttttggatgccacggaggcctgccagtggtgggccaccgccgtacgcgcgcgacgatgccggtgaagcgttcggcgtccgcgctggcgctcccgccggtcggccgccgcgcgcgggcccgcctctgcatccgcctcgccgcgccgctctccttcctgctcctcttcgtggcgctgttccacgcccagccgctcctgggcgttccgcccgctgcgcagccgccctccgcggggcccggtaaggtcgccttccttttcctcgtccgcgcgggggtgccgctcgacttcctctgggacgccttcttccgcaacggcgaggaggggaagttctcggtgtacgtgcactccgcgccggggttccagctcgaccgcaccaccactggatccccatacttctatgggcggcaacttgcgaggagcgtcaaggtggtgtggggcgaggccaccatggtggaggcagagaggatgttgtttgccgccgcgcttcaggatcccgcgaaccagcgctttgttttgctctctgatagctgtgtcccactctacaatttcagctccatatatacttacctgatggcttcacctaaaagttttgtagacagctttgttgataagacggagaagcgttataatcaaaacatgtctcctgccattccaaaggataaatggaggaaaggatctcagtgggtagtattaatcagaaaacatgctgaagttgttgttggtgacaaaaacgtattaaaagtattcagaagacattgcaagatggtagtaaccaagagcttgtttagacgaaggccaaatgctagacaactt

SEQ ID NO: 168385 - DNA, 238 bp, Zea mays
  Clone ID: MRT4577_8514C.1
aaccttaatcatcgcactcgcacccaggtggctggatggtgaatactagaacaacatactcctaggggcgaagttttacgccatgacacaatggcaccatcagttcagtaagcttgcgccatctacaaactttaaactaatcacaattacaaatggaacagaaaaaacataccataataataagcccccgtctttgtacaggtatacatattttttaaccttttgtagaaactaccca

SEQ ID NO: 168386 - DNA, 1182 bp, Zea mays
  Clone ID: MRT4577_85150C.1
gctggttgtcagagcaggccttggttctcgggtgaatgtccagaatgtgctgatccacatgtactcaagttgtcaggatgttgttgcagcacggagattgtttgataatggtgagagtctggaccacttctcctggaactcgatgatttctggctatctaaagaatggccgtgtcgaagatgcaaaagcgttatttgatgtgatgcctgacaaggacaacgtttcctggagtgcaatgatagctggttgtgtgcacaataaccagtcatctgaggcacttaatgtttttgacagcatgagagcccatgaaatcaaaccagatgatgttacgctcgtgagtgtcatctctgcatgtagtaatttgtctgctctggagcaaggaaagttagtgcatgagtacattaggaaataccaatataacatcactatcgtacttgggactagcctcattgacatgtacatgaagtgtggatgcatggaggctgcactagaagtctttgacatgttggaagaaaaaggaacaccttgctggaatgctgtcattgtgggactggccatgaatggtcttgttacaagatcccttgacatgttctccgagatggaagccactggcactgctgtccccaatgagataactttcactggagttctgagtgcttgcagacatggtggcctagttgaggagggccgtcaattcttcaagttgatgcagaataagtaccagattgtaccaaatatcagacactatggatgtatggttgatctccttggacgtgctgggtatgtcagagaggctgaagacatgattcagagcatgccgatgtcacctgatgtcccagcatggggtgcgttgcttggtgcctgttggaagcatggcgatagtgaggttggggaaagggttggtaagaaacttgtcaagctggatcctgaccatgatgggttccaaactatgttatctaacatatatgcttcagaggggatgtggcagtgtgtaaaggacctaaggggttccatgaagcaacaacatgtagcaaaagttgcaggctgtagtatggttgaaccatcacattcttcatgagattctagaatgtgattgtattagaatgtagaatgcatagagtgtggtttaagttgaagtatatatggtcataatccaatgcttatctgcttagcctgtgttct

SEQ ID NO: 168387 - DNA, 168 bp, Zea mays
  unsure (1)..(168): unsure at all n locations
  Clone ID: MRT4577_85151C.1
attatatagtttttttnttggtgttttttatttttctttggctcagtctacttttacaaattcaacatccaatttaaccattatttacagaggggggctttttagtagttttgggcccctcgcacctgcccctnnaaaatcgccaaaccaaataatcctagcatcctt

SEQ ID NO: 168388 - DNA, 1114 bp, Zea mays
  Clone ID: MRT4577_85152C.1
cttttagtcttcgcatcattcccagatatggggcaaatgaagatttcacacatattgacacctaggccacttactgctgactaggtgcatacatggtgctccacattagctaggtgacctgattgagccaaagacaactttgtgggacttggtttaaccatttagaaccttagggaagaaagtgaatctgtagtggaacttcagggaagaattcacccattctttcaacattgttaatgaatgccatttttccgaaagtggtcttgaattatctggaatctccaccagtttcccgctaaattgttaactctgtgacataacacccaaaggaacaagtgtgcgagtcaaagaggggctagggtgctcatgcaagtatgggttcagtcaagttcaggctcgtgagtttgttcattgctgatactcccataaaaaacaggtagctctcgaccacttttgggcaagatttgattcggtcccaaggttgatatttctggagcaatgggtggagattagtttggcaccagtacctcactacctcgtgacagtggtcacatatttccaagtcggctggaggttacacgcaccctcgtcagagatggatgtaaatatctctagagaaagaagaggtctggttccgattgctgtttacaggttagaggtgcagcgtatttacaaagagagataagagttatcacttatcagattacctggtttgctaaataaaggtgaatttagctactagattatgagaccccgtgttttgacttctgcaatcgtggttcacgacagcagaaaggttacctaggagtgtaaaagtgacatctcattttgatgctatggttctgactcaatgggatgtgactttgtgatgaaaaaaaaaaaaaaaaaaaaaaaaaaaaaaaaaaaaaaaaaaaaaaaaaaaaaaaaaaaaaaaaaaaaaaaaaaaaaaaaaaaaaaaaaaaaaaaaaaaaaaaaagggggggccccccaattaggaacttctccaccccggaaataaattccgacccgggccttgaggggtaccaatttttcctttaagggggttttttaaaacttgggggaaaaaatggaaaaagttgttccctggggaaat

SEQ ID NO: 168389 - DNA, 1866 bp, Zea mays
  Clone ID: MRT4577_85153C.1
acctcctcctgctcctctggcctctgcggtgccggctcccggtcccgagtcccggccatgtcgtcgccgctggaggatgtcagcgtgggcatggaggaggaggatcagcggcccctgaaccgggccctgctccaccggagcgccaccaccaacgcctcccaggtggccatggtcggctccaatccctgccctatcgagagcctcgactacgagatgatagagaacgagctgttcgaccagaactggaggacgaggcgcaaggcggaccaggtgcggtacgtggtgctcaagtggaccttctgcttcgccatcggcatcctcaccgggatcgtcggcttcttcatcaacctcgccgtcgagaacgtcgcgggcttcaagcaccaggccgtttccgccctcatggactccgccagctactggacggcgttctgggtggttcgaggccggccggcggcatcctaaatccaaaccaaccccacacccccaccaaactaccgaagcggaagggggggaaaatccacgcgacgacgacgcggcgaaacgaagggaagggaagcaggagcgagacaaatccccacccggctccaaaccctagccacctcccccgtcctgtccccagatctcgctgccgtctgacccgcctcgcttcgatgtgacccggccctagggtttgagacgtgttgcggtaggggtgttctcaaggattcacgacacgagagagattcggggaggcgtcgacggtgcgagcacacatgaaggacccggcgcaccgcacgaaggtggtgctccggcggctgccgccggcgatcgcgcagcaggccgttgtggaccaggtcgacttgcgcttcgctgggcggtacgactgggcgtgcttccgccccgggaatgccagccaaaagaaccatagacattctcgactttaccttaatttcaagcgccccgaggatgttgttgagttcgctgaggtcttcaatgggcacgtatttgtgaatgaaaagggtgctcagtttaaagctttcgtggaatatgcaccatcacaacaggttcccaagtcaactatcaagaaggatggccgtgaaggaactattatgaaagatccggagtacttggagtttcttgagtttatttcaaagcctactgagcatctgcctagtgctgaaattcagctcgaaaggaaagaagctgaaagggcagctgctggaaaggaggcacctgttgtgacacctcttatgatgtatgtccgccagcaaagggcagctaagagtatggttcatagacctggaagtagacttagcagaaaacttgcaagtgtcgtaagcagttccagtcctaaaaggtcgtctgagaagcgcagatcctccacgtatgttgtacgagacaacactaaggagaaaccaacctatatcatggtgccaaagagagaggagcatacacaaagggaaaaagttgttgctggaaattcaggcgatgccacaagtgggggaacatctggatctggtcaggttgctgagtttaaaagggataaaattgtcatattgaaaggaagaggaaggattgattctaacacacctaatggagcaactcagcactcatcaacccctatcaagaatgtgccaccatcgcgttctagacaagaccagcgacttgaagccagtggaaaaattattaagactatactatcaaacaaggaagcccgcagttcaaatccttctgaacatgagcaggaaggtcacatgtttaatactgagaaggataagcggccaccacgggctttcaaccctcgtaccattgtgaaagatcaggtagttgaaaatgctgagaggagccattttgatgagaaggctaatcatctccatggctccgttc

SEQ ID NO: 168390 - DNA, 538 bp, Zea mays
  Clone ID: MRT4577_85154C.1
ttacgtacggtactggtactgatacgcgcgacgtgtgtcatgcaatgcatgcatatacaattctcacatgcatgcacattggtctgcacccatcagcatagtagctattgcacacctcacctcttctcttatgatatatattattacgataaacgtatgcagggggggcctttacaggttttattaataatatttgttgtcgttattatgctacttttactcatgatgttggaaattattgtaaattattacatactggtactatttatactacttcaaatacataaagaattacacttggaacaatatcatcactatatacaatataaaatacatatagaaatactgagcgtcctagacatttttcattttatttttacgaccatcatcattatttttattatttttacaaacaccatcttcttcttcctcttcttctatatacctactcattctaaatgaattcataataataacgttactggttactctaaatcgatctaatctatgtcaccagttcatagttatctagagagat

SEQ ID NO: 168391 - DNA, 895 bp, Zea mays
  Clone ID: MRT4577_85155C.1
ctgctgccggccgggacggttggtccacctcctcctgctcctctggcctctgcggtgcctcctcccggtcccgagtcccggccatgtcgtcgccgctggaggatgtcagcgtgggcatggaggaggaggatcagcggcccctgaaccgggccctgctccaccggagcgccaccaccaacgcctcccaggtggccatggtcggctccaatccctgccctatcgagagcctcgactacgagatgatagagaacgagctgttcgaccagaactggaggacgaggcgcaaggcggaccaggtgcggtacgtggtgctcaagtggaccttctgcttcgccatcggcatcctcaccgggatcgtcggcttcttcatcaacctcgccgtcgagaacgtcgcgggcttcaagcaccaggccgtttccgccctcatggactccgccagctactggacggcgttctgggtgttcgccggctgcaacctggcgctcctgctgctggcgtcgtccatcacggcgttcttgtcgccggcggccggcgggtcgggaatcccggaggtcaaggcctacctcaacggcgtcgacgcgcccaacatcttctcgctgcggaccctcgctgtcaaggtgcgccgtgtgtgttccgttcccatcctcctgccctcgccgtcgctttcgcttgctgcagtgcacatgctcccctcagcatttcctgatgccagctgcgcaaatgggttaacatccacactaatataatgtaacaagggcattcattcctccatccaactgcatgatctacgagaaaggaaagcaaccagcaagtaaataaacaatcataattagacttttctggcccgagtttactactcctactgcagttccccggattataaatctgggtgagc

SEQ ID NO: 168392 - DNA, 280 bp, Zea mays
  Clone ID: MRT4577_85156C.1
aacacatcattggtggtgccctcttttagattgctgattagatgaaactcaataatacagttggttggatgatgtatgcggccaaccagaaataaaaagttacatttccagattctaaaatacaaaagaaagtgtgctggtgacaagcacggatgacggatcatttaccgtagatggtgcaactgccaacatacgttgctactgccaactatgaagcatgttcaaaccgacgaaacaactgaaaacgacgaaacaacttaaatcgggggggccgttttaa

SEQ ID NO: 168393 - DNA, 2856 bp, Zea mays
  unsure (1)..(2856): unsure at all n locations
  Clone ID: MRT4577_85157C.1
gccggccgtctcggaggatgaatggtcaaaaatggatgtaactctaaaaaaacaaaaggtctggttcccttgttacaggttaaaggggcaacgtatagaaataagagttatcccttatcagattacctggtttgttaaataaaggtgaatccaacctattcgagcgacgaactaccaaagcggaagggggaaaaagcacgcgacgacgcgacggtgaaggggaagtgtgaagggaagcagaagcgagacaaatccccacccggctccaaaccctagccacctcccccgtcccccccttttcgtcccccagatctcgctggcgtctgctccgcctcgcttcgatgtgaccccaccctagggtttgagacggtgttgcggtgtgtgcgtgtgtcgcggcgattcgcgacgcgagtaggattcgaggtgtcggcggcggtgcgagcgcaaatgaaggacccggcgcaccgcacgaaggtggtgctccggcggctaccgccggcgatcgcgcagcaggccgtcgtggaccaggtcgatgcgcgcttcgctgggcggtacgactgggcctgcttccgtcccggcaatgccagccaaaagaatcataggtattctcgactttacctaaatttcaagcgcccagaggatgttgttgagtttgctgaggtcttcaatggacacatatttgtgaatgaaaagggtgctcaatttaaagctttcgtggaatatgcaccatcacaacaggttcccaagtcaaatgtcaagaaggatggccgtgaagggactgttacgaaagatcctgagtacttggagtttcttgagtttatttcaaagcctactgagcatctgcctagtgctgaaattcagcttgaaaggaaagaagccgaaagggcagctgctggaaaggaggcacctgttgtgacacctcttatgatgtatgtccgccagcaaagggcagctaagagtatggctcagagacctggaagtaggcttagcagaaaagttgcaggtgttgtaactagcagttccagtcctaaaaggtcttttgagaagcgcagatcctccacgtatgttgtacgagacagtattaaggagaaaccgacctatatcatggtgccaaagagagaggagcatacacaaagggaaaaaattgtttctggaaattcaggtggtatgcttgtaccaaatcaagaaattgctaatagtaataacaaagttttcttaattaaatctcgatgaatgtctaatgctaacaagtattactgaggatttttttagttaccacttacccctaactatagacctgctaaatgttctagacaatgcaagcgatctgaagctaatggaagaattattaaaactgttctttcaaacaaggaagttcgcagttcaaatccatctcaacatgagcaggaaggtcacatgtttaatactgagaaggataagcgtccaccacgggctctcaaccctcggactattgtgaaagatcaggtagttgaaaatgctgagagaagccattttgatgagaagaataattatgtccacagctctgctccaattggtgagaaggttgaaaggcatgccagaaacagagatagacctgatcgcagtgtatgggcacctcgccgctatgacaaatctccgcctgggggtgtttcacatgccttgtcgtcagatttttctcaaatgcagtcacattctggagataatgtctcacaactaacagatggtcatggagacagaaagacagacacaaggggtcatggaggtagccgtggtgttcctgttgaaaatggacataggcatgccaaccgtcgtggtaccccatgtgatccaaaggaaaccaaaatatctgctagcgtgcctgatggaaagaattcaaagaggggctctgctagctatggtgctcatgagagacaagtatgggttcagaagtcaagttcaggctcgtgagtttgtccattgatgatactcccataaaaaacaggtattgaagtcgtggagaagtcttggattctgcagcgcattcttctttgttagctgttgatcctgtgaagtatggtaacgaaatgtccaatggtcaaatgctaccatgaagtgcaatctcagatctgtcagtcgaagtctcagctgaaaagagagctcggctgatttgattcacagaaatagtgaagtaacataacccggcatgtaggtagctctccgacaactttgggcaagatttgatttgtgcccaatgttgatctttctggagcattggatggagattaggttggcatcactacctcattacctcgtgatagtggtcacatatttccaagacccctggaggttacacgcaccctcggcaattcgtcagagatggatgtaaatatctctagagaaagaagaggtctggttccgattgctgtttacaggttagaggtgcaacgtatttacaaagagagataagagttatcacttatcagactacctggtttgttaaataaaggtgaatttagttactagattatgagaccccgtgttttgacttctgcaatcgtggttcacgacagcagaaaggttacctaggagtgtaaaagtgacatctcattttggtgctatggttctgactcaatgggatgtgacttgtgaggttgttttgtcgcctggtgtgtgttttgctaccatgttcctccaaatgacccgggggttctgtagtgtcagggatgatgtgtttggtgtacagcatcaaaatgttttaaatcttaaaagtgatgttgccttgccttaaaaaactaaaaaaaaaaaaagggcggcccctctagaggatcccagcctccgaggcgagcatcgcgcgcatnagatgttatatagtgtcac

SEQ ID NO: 168394 - DNA, 286 bp, Zea mays
  unsure (1)..(286): unsure at all n locations
  Clone ID: MRT4577_85158C.1
gcaagaaaacacccagccgccacaccggcgcncacatttgaggaccgcagaccgggggccggggagaggaagccgcacgaacccagggccnccggcgagcnngccngcaccnacgccgcgcacagccacagcgacgagggcancgccaacaccgccgagaagaacgccacgaccgggaaggcagccaacagcaaggncgaggcccacggggcggggggccccgccaagcncccggagaagcgcaacgncgaggaccgcaacccccccgacggagcgggaggcggag

SEQ ID NO: 168395 - DNA, 291 bp, Zea mays
  Clone ID: MRT4577_8515C.1
tgatctatctaacaagcttcacgaccagtacaacacttatcttgcgccgacccaaagtcctgaagcctttttcacgacatctccgaaatcgctcataccgcgcattctgccgccgagtttcatcatctagcccatggtcgaagacaacagcgactcaacgaattgaacgaggccatcgagtctgcaagtttcgagatcattggcaatccgagcctcatcgatacacctcagtgggagcatggcatccagctctttcggaccaactcctcgactccttgttcaatactttgc

SEQ ID NO: 168396 - DNA, 296 bp, Zea mays
  Clone ID: MRT4577_85160C.1
cggaatccccgggcggaccacaggcttccaaatccttcctaataatcacttttgtcctgtttattattcaaagccaccaaaaatttttgagccgggattaaaatccttcctgtaggggaaataaaaaacctgcctagccatcctacaccctatttgaatttaccacctttttaaccaccttattccccttttaaatcaacaccatttaaataatatttccataacatttttttttcctcaaaaaaaaaaaaaaaaaataaaaaattaattttaataaataaaaaaaatataataaa

SEQ ID NO: 168397 - DNA, 257 bp, Zea mays
  Clone ID: MRT4577_85161C.1
ggaaaaaccaagggaatccccaaattgattcaagctccccttaattttttttttccggccttttacaaattacaagatcaggtttgggaatttccaaaaagcatttttttttaggacgggggggcgcccttacatgtcactggaacatttgacttctcacaggtccccagggggctttggggtcccttgaaaagaaggtaaccttggttttttaaaaaaagggtttcttgccttaggattatcccacattcccgggg

SEQ ID NO: 168398 - DNA, 691 bp, Zea mays
  Clone ID: MRT4577_85162C.1
cggacgcgtgggcgtgagatcggctcgaatccaatcctctccaataatacgcaccggcacccatttgcgccatgctgccgcggccggccaccacgacgagccaagaacacgcgcggcatccctgagccacccacccaggcttaccaaaacggattccttttccctcttggatccctgccgctcccaatccgcgtgcgcgcgaattctctgcttgcctcgcccaggtgagcttctccccccacccccacccctgccatcagtttcttccttttctaatccctcattattccccctctaccatcatcaatcaatctattggtttcgacgagatatgtggtggtgaattcggcgggtcttgagaggggaaagggatttaaaaaaaaaaccctgaaattttgtcagcggttccttggcctggctgcccgctttaataatggccgcgcggctggttggcttgccccaggccagatgcattgctcaggaggcaggagcgcttgggccgtgcgagctgcgggatttgggagatgcgtgcagttgaatgcgtgggattcgccgtgatttgtttatgctgatcgccctctcctcccgacccgtgctccctccgcgtccgctctctccctttttctcgtccccagttgccgccgagccaattcagcgccgctttactgttatataagccgcgcctccgcac

SEQ ID NO: 168399 - DNA, 350 bp, Zea mays
  Clone ID: MRT4577_85163C.1
ccatatcggtttttttttttttttcttgtttttcgtgtaccataaaacggcttcattatgggtttggtatgcgcaaaactcacaccacaagactttggcaatgatgcttgttgcgaccacactattaaagcataatcagggattaaccgggtttggtttgctgaccctaccgagccccaattgccacgaaagctcagcaagctggaagcatacagcagccgttgctaatgggagcaatcaccgagcttgcacagtaccaggctggggggaaattgttatagcaagagcaacggaatatctgatgggcccacgcatgacatcaaggacggccatgaccttcaggggggata

SEQ ID NO: 168400 - DNA, 524 bp, Zea mays
  Clone ID: MRT4577_85164C.1
ccagaaagccttttctatgatttgggttttctataaattaggacataagtaaaaggtggagacaatgggcaagaaaagcctagaaaggtcactataggccataaagcaatcattaactaatggacatttagtgtattagtcagcaatgctattacatataacttatatgacatattttgtatctttatttttaagtgtaagaaaatggaatttatggcagacagagcgcgtcgaaaacagagttgatgttagggtctcaggggggagcgagggctagggtgatgagtgtctgcgggacggggacaagtatcgcgtgagtgacaaacattttttactagtgtgacatagatcatatctttatttttaagtgtaagaaaatggtctttatggcttattaagtttatattttagtgtttaataaaaaaacttgactattggtgcataacaaaatatcgaaaagagagaactaggagggagcaagtctatcatacacgatttcagaagacaaaacgaatatgaactat

SEQ ID NO: 168401 - DNA, 364 bp, Zea mays
  Clone ID: MRT4577_85165C.1
tgtttttgtaagtctagttttactgcttggatgacttcccttgtttgcttgtgctctagagacctataatgcctgcgttccttttgccatgcctcctttggtgatttactgatgctatcatgctgtgaaatgacagtcttgttggcaaagaacacaacagtgggcactgtcctaaaggttaaagaaaaaaattatggtactatcttgttttaaaatatttcttatatttttcagtttgcgtaaaaacagctaagatctagtgtatgctcttataaccaaaatcaacattacgttaaccaaaagaacactgaagcatggtttgaggcatattccacgcgccgcaagatgccacacggttttagtt

SEQ ID NO: 168402 - DNA, 329 bp, Zea mays
  Clone ID: MRT4577_85166C.1
gaccttccaaaacataccctgggggactgcccatacacatgtaaataaaacaaaccgagaaaaaccatacacatatggacaatcacaaaacaagctagagcatatttaggaccttgcaagcagcacagcactcagtccatgtacaaacgaaagaatgacctataaaattcgcaaaaccaaccaaccaaagccacaggttgccattcgcacaaagatgaccagcaatggatcatgccaatcaatcaatcatgatgagagggataaaaacaagcacatatgattgactgatctcattctgcgggagaactggaagaagacacttattcaaa

SEQ ID NO: 168403 - DNA, 372 bp, Zea mays
  Clone ID: MRT4577_85167C.1
tagggcgcgaaggagaagacacatgtccagatgtgaaggtgaggcctgtgcaccaagaccacaaagtcacagataccatggtagccaacggagacgaagctagctcccttcctgtgtcgagattgtgggaaattgaagaatgaggatctgcgatgactaaacatttaccgggcggggactcgatgaatatgcgaaaacccttgatcgaaaggatgttgctaaggacaatctggacaagctttaggagatacccccaagaaacttgcgtctgtaattgaatgattatgaccctgctgactatcatagtctgggagaaaatgtacatccaaacactcctgagggtgcacatatacgaaatgagagagatgatgc

SEQ ID NO: 168404 - DNA, 491 bp, Zea mays
  Clone ID: MRT4577_85168C.1
gatctctgaaggatgtccattgatcattgcagattacatgataaaacagcgcatttgaccatgtattctggggaggggaagaccaagcttgtgctgcattttctcttgccaaaggcagcctgcctgatcggggcactgacgactaatgttacaacatgacttacaaaggctacaagtatccctaagatttacatgctacaaacaggatgtatgtttctgagcagagagccagagaccttttctgtctaaatatgctcatgtgagttacagccttaacaggagcaattcaatgaatcagcacgttctcttgttgctgttagatggtcgagcccatcagtccaacagtaactcgcctggaaggttgcccaccaagtgacaccgaagttagagatgcccatatcctaccgttcttagctccaaccatgagcctcaacttgctccacacctttctcacgtccacagcatgaggcacacattcaagcagctgggtc

SEQ ID NO: 168405 - DNA, 498 bp, Zea mays
  Clone ID: MRT4577_85169C.1
aaaaaaaaaacaaaaaaaaaaaaaaaaaaaaaaaaaattaaaaaaaaaaaaaaaaaaaaaaaaaaaaaaaaaaaaaaaaaaaaaaaaaattgggtcccggggcctttttgggaatctccgggccccctttttgggtggccctgggccaagcccgttcccttattcccaaaaggcttgtccgggttcccaaatgttttggggaaaacccaaaggcccgggggggggggtttctttgttccaaaacccctgggcagaaaaggaggctaaaaatttttttacaagttaaaaaccccccctttaagggggcaccctttggaaggggccctttctttaccccaaaaaatggttttgagccctggggaaaattttttgttgtggaaaaaaagggctttgcccatttaatgtgggcccgggttttaagggggaacgtaaaaatatttccctattttgaataggcccttttttcctgggtttgtagcccccgcaaaattgcttttt

SEQ ID NO: 168406 - DNA, 752 bp, Zea mays
  Clone ID: MRT4577_8516C.1
agcagtggtaacaacgcagagtacgcgggtttagccaaaccaattttgccagatttagaatattatggactatcaattaaaaatattgaaccctatgttttctgttttaaattttagagtttgagattaattatagaaactgaccaaaccttattaaattaagaaaaaatagttatgcttctgtgctgaacttaagaaaatttttagatattcaaaccccaattagacactgtttaaaaatactagacaccccagtattgaagatttaagtagggttgtctaataaaagccatttttgcccaaaacataagaaaatcagaaaggttttagaaaataatgaacagtgaatgtaattatttttcctagtcttctaaggtaatagagaacctagaaaaaataaagggacccctagtccagagcagattctaggtgaaatgttttattaagcattaatcaaactagaaaaacaattattagaattatgaaaacaatttaaaaattgttaataaaaatccagtggacttgtaaccactagaaccccactacaaaaatgataaacatcccagcccattattttaagtagggtaaacaaatagaacttggtattgagccatatttcaattaaataatgagcaaaccaaaaagtgtgcaatactgagcaaataaaatttttaccagattagtaatgaagtagatccccaaaaaaaaaaaaaaaaaaaaaaaaaaagtactctgcgttgttaccactgctt

SEQ ID NO: 168407 - DNA, 1407 bp, Zea mays
  Clone ID: MRT4577_85170C.1
cgtaggtcgttccaagaaaccaagaaagctcactcctcttccctctctctttcctctcttgcctccgtcgccatgacccaccgcctccttctcctgctcctgctgctccctttgctagcgccgcctgctgcgtctgcacgccagggcgcggggcaggatttgggacagtgccccgggctggagtacggcctgccgccgttcgccgccgctctccgggcaagctgccccgtctcgacggaggggtactcgccccccgaggaggttgttaatggggaagaacttctcaggttgttggatggcaaggaagagcacacagctgtccttttctatgcatcatggtgccctttctcagaaagaatcagaccagtctttgatgatctgagctcaatgtttccacgggttaagcacttggctatcgaagagtccaatgtcacgaaagccattttgtcgagatatcatgtccgtgcactaccttccataataatagctcgcagctcatacatattctgggcgctcagttcgaaagatctcgactctctagtcaacctttacactgctgctacgggtcaagaaccagtcgcatatattggtactcgcaagtggagggccacgcaaagcacagactatgctaagatttggaacagctcgattagtgaaacagtgaagcaagaaccctgcctagcattcagaatcctgtttgcttgcctgaagatattcatcttcttcttcccaaagttctttgctctcgtccaagacttctggacccaatactatgagcaaatcaaccttggaatcctcgccaaattgacccagctgcttgaatgtgtgcctcatgctgtggacgtgagaaaggtgtggagcaagttgaggctcatggttggagctaagaacggtaggatatgggcatcatctctaacttcggtgtcacttggtgggcagccttccaggcgagttgctgttggactgatgggctcgaccatctaacggcaacaagagaacgtgctgattcattgaattgctcctgttaaggttgtaactcacatgagcatatttagacagaaattgaattgctcatgttaaggctgtaactcacatgagcatatttagacagaaaaggtctctggctttctgcttagaaacatacatcctgtttgtagcatgtaaatcttagcgatacttgtagcctttgtaagtcatgttgtaacattagtcgtcagtgccccgatcaggcaggctgcctttggcaagagaaaatgcagcacaagcttggtcttcccctccccagaatacatggtcaaatgcgccgttttatcatgtaatctgcaatgatcaatggacatccttcagagatcagtgtcattttctgatggctttgaatttcacccactcggtaattctaaccttgtc

SEQ ID NO: 168408 - DNA, 160 bp, Zea mays
  Clone ID: MRT4577_85171C.1
gagacgcgtagggttttctccaaacagcaccgatgatgcgggggtttttcattatgcgcatccagaacaagagcatgccgatcatgaagctataccagatgctccggcgcttggtatgaggctgacgccgaaggatgatctgttcacatacaggctatgt

SEQ ID NO: 168409 - DNA, 506 bp, Zea mays
  Clone ID: MRT4577_85172C.1
gcacgagtgagatcagaccaatagagaaaaccatgctaaataagactcgaaccttcacagcagccccattagagactttactcggaggaaaagtgtgcgtagatgattttaataatcaattctattcacatcatttagaaggtccatggactgttggaataacaaaattctatggaggttggaatcgcttacttgagaagctaccagaaggatgggtttactgcgatgctgacggatctcaatttgatagttcattaacaccatatctcatcaatgcagtattaaatattcgattgcaatttatggaagattgggatataggagcacaaatgctaaagaacctttatactgagattgtttacacaccaatcgcaacgccagatggatcaatcgtgaagaaattcaaaggaaacaatagcggacaaccttctacagtagtggacaacacattgatggttataatagctttcaactattctatgttatcaagtggcatcaaagaagaa

SEQ ID NO: 168410 - DNA, 542 bp, Zea mays
  Clone ID: MRT4577_85173C.1
cacatgctggcattatatatgttttccctaaaaaaggtagtacaaagctatgatcagttgggaagagaagatcgaagctagtagcgctaatatattgatttgcctccttatttatcttcgaacgaggtggttcgttattctttctttcggatcattaaacgttcgatccagagcgctgtgttctctgctagctaattcagctgccccctctgagactgcgacgccgacgacaatatggcgtcgagcgcctccctcacttgggagatctccggcgccttccctccctgtgccggccagaattcgtctgttgccagaaccttgacttgcaactggaggaacttaacgtagctgatggccttctcgagcatggtgaccaggtcgaccttggtgccgttgggcaccagctcctgcagcgcccgcagccgctcgctgatccgctcgcgccggttcttggccgcgaggctctggggatctttggttggggctgtggacgcgagcttggccttgctcgccttcctgcccgcgccgcagtgcttcttgtt

SEQ ID NO: 168411 - DNA, 260 bp, Zea mays
  Clone ID: MRT4577_85174C.1
ggcaaaaaaaaaaaacccccaaaaattaaccttcaaagcctccccccgtcatttgagggtttctaacccccgtcaaatttaaacccccccttcttcacattgccccgataaaattttttaatggaatgaaccgttttaacatgacccccctccccttacaaaccttttattaaacctttttttttcaaccccccaaaaccaccgctttttgcctttccttaacacaaaaaaacatgggcgctgcccccttaggctttgga

SEQ ID NO: 168412 - DNA, 291 bp, Zea mays
  Clone ID: MRT4577_85175C.1
gagaggggccaagttactcctactgagctttcgcgcccgagcagcggtcgccgacagagacagagcatttccgcccacaatgaggagcctgtggcggagtctgttatggacaagatcgcggagaggttccaccccggatgactcttcgtcgtcgtcgtctgactcgcacgacgagaataaggggtcctcgttggcgtcgtcggcgggagccatgaaggccgagatctaccgacttttccgacgcgagaggccctcccactccgtcctcacgggagggacccctggcgctct

SEQ ID NO: 168413 - DNA, 237 bp, Zea mays
  Clone ID: MRT4577_85176C.1
ggcccgctttttttttttttttttcgggggggagggggggggcaatattgtttattcagagtactgatcatggtcatgggatcacacaacacccaaagcacacacacgcagtacatcatgtcatgagttatcacactatatgtatgcaaggactaggacctattcataatgcacatgacatacgtgggggggatggagattattggcgatcaaaggaactaaaaacaagcaagcaag

SEQ ID NO: 168414 - DNA, 379 bp, Zea mays
  Clone ID: MRT4577_85177C.1
attcggctcgaggaagttctcattcaatacaagaactagtgcatttaattctagacacaattcaaaagatcaaagcctctccaagtcccaaattcattccaaccacctagtgacttgagagagtgtgtgttcgtgttcatttgcgctcttgttgcttggatggctttcttgcttcctcattttgttcccaagtgaattgtaattaaagcaagattaaggagacccgatctttgtgaccacctcaacggggattaggttctttggaaccgaacctcggaggtgagcagagcggggagtagcactagcaaggggatgatgcgtctggcggcagggtggcaatgcacaatataagcacaaaggagtcgacgacgtggtcctt

SEQ ID NO: 168415 - DNA, 621 bp, Zea mays
  Clone ID: MRT4577_85178C.1
taggggccttttttttttttttttttctttttttttttttttttttttttttttttttttttttttttttttttttttttttttttttttttttttttttttgaaaccaaaaacaaggggtatattggatcatgggggggacaaaaaaacccccccggtggaaaaatggggaaagatttttttttctctttcacaaggacggaaaaggggggccttattgggggacaaacaaaaaagggaaaaagcaggggccccccaagggaatttgggcctggtggtccaaccggggaaaaggggacggggggccggaaaaatgggagccaaaaggtcctacgaatctacaggatcttcagaggggggacgagggtccctaaatttccgaggtccccattttttcgctcacgggggagccaaaagaaggcccccccttcctggaaaaaaccagggacccccccggggacccctttaatttctgggggatgaaggtgggggcttccaaaagcaaaaaatcttcccaaaagagggtggccccaaaaaaaggggtgaattggtctaaggtgaaaaaggaagggggtggaaacgggaaccgcactttattgggcagcatctcccttggggaag

SEQ ID NO: 168416 - DNA, 107 bp, Zea mays
  Clone ID: MRT4577_85179C.1
accaatctcttcatttggccaaagcgaatgatggcgaggagcctgaattactgaggcgtgcctccagcggcgacgccagcactcactctgatgcgatacctgcaaca

SEQ ID NO: 168417 - DNA, 334 bp, Zea mays
  unsure (1)..(334): unsure at all n locations
  Clone ID: MRT4577_8517C.1
attcataccccaaggccgaacgggggaagggttgttgccccagtctccgggcagcgcagcggggcccggagctcaggttcccatctggcttgggtcggttaggacccgctccgacgcgtgaggggcgcgcgagcntcgaccagtctgcgacccccgggtctaggtccgatccgcaccccgcttctgtccaaccaatcgccgccgagtctcgtcgcatcgacttctattcccccgaccgcgcccggacggcggtctcgcctcgccagaagaacccaggctgtagccgaaaccccaggtgtccgaaatccgaacacgcctggacggatcagattca

SEQ ID NO: 168418 - DNA, 535 bp, Zea mays
  Clone ID: MRT4577_85180C.1
ggggggggtttttttttttttttttttttttttttttttttttttttttttttcaaacaaaaaactagtttcatgtggaaccattttctaagttttcaagtaagttttagagagggcaacaagcccttttagctagctagctgcaaaacgaccttacacgaaaaatgtctccctgtccttttttttacctcccagaaactaaatgatgctagcccacctttttgctgggtttggaaccatcaccattttgctttccttttgcaccgccttcctccgcctaagtttttgactcggcaaactccaacaggtgtttaacttttccgtaccaaaaacagggtacggggacaaatccgatcacccctggaacgagggacaataaagccggctgggcaccttgaaaccagttcattacaatgaggggcaccggcatacccacggggtatcccaaaaatgccctgttgaagaaaccctttttgataccttttgagacatcaaagcgcaagggaagggcaacaaaaatgccaggttttacaat

SEQ ID NO: 168419 - DNA, 244 bp, Zea mays
  unsure (1)..(244): unsure at all n locations
  Clone ID: MRT4577_85181C.1
gtaccgatctctaattcccgcctcgacccacacatccgcccacacatgcatgctacacttaatttttttcttctacaactacattttaatcccgctcttttttaaaataccccccgccccctaaaaaatttnttataccttcctatacacttactaaacacaaacatatctatacttatttcacctcataaatcatttttgctcttattataaaaacactttaccaatactttcattaactatc

SEQ ID NO: 168420 - DNA, 647 bp, Zea mays
  Clone ID: MRT4577_85182C.1
ctcgacgcgtgatggatgcgcgtccagatccagcggcctcaccaagtcaccatcaccacccgcaccacacacgagcacacgcgacgactgacaaggcgaggggagcaatcggcggcgatgggcggcggcggcgcacatggcggcaccacctacaaaggctacaccatcccgcacaacaagcgctggcacaccgtcgccggcaagggcctctgcgccgtaatgtggttctgggttttctacagggctaagcaagatggtgctacgctcttgggtttgcagtcatccttgggagggacatgatgaccactctcatggtcatggacacgggcataaggcatcatcatcgtcatcttcacattaagttccttactggctgcggacgatgcttggcatgttccaacaactaaagtttgagttaataaattctatcaccctgcatgggactcatgttgtttgcaactggtttagcacgaactggtcttgttactattgtgctaatgtatttgattcgaagtttcagttaatatgctgtggaaaagaatctggtgcacgttgatgttctttatgatctgttgttcagtacattgctctgcttcgttgctacgttaagacttaagaatatatatatatatatatatactaacatc

SEQ ID NO: 168421 - DNA, 1556 bp, Zea mays
  Clone ID: MRT4577_85183C.1
aattcggcacgaggggtaccccggcccgccccggccgggagcggcctcagtcaccatcaccacccgcaccacacacgagcatacgcgacgactgacaaggcgaggggagcactcggcggcgatgggcggcggcggcgcacatggcggcaccacctacaagggctacaccatcccgcacaacaagcgctggcacaccgtcgccggcaagggcctctgcgccgtgatgtggttctgggttttctacagggctaagcaggatggtgctacgctcttgggtttgcgtcatccttgggatggacatgatgaccactctcatggtcatggacacgggcatgaggtagtaccatttgatcccttctatttacttggcattacataatgcgttcttttaacttgttttgttaatgaattgctgtttgactgtcgttaatttgcaattttattttcatgttacatttgatggttcttgtctcttcccataatttttttctagtaattttcttcatgtgctatacttttggaaagttgtttttcccttttgtttgcattgggcggagtgtgaccgataattcctagatattaccaagtgtctttattgggcatgtttgcttatatcgtccatgtttgagaatttatactttctagcagtatgtatactgttctgactggcaaccagtgttaccctaaacatttaaatggactaaaggtcacctactgtttagctatttattcggactaaatggacatttaaacagaataaacagtgattaaatgggataaacaaatgattaaacagcgtgcacgggctaaacggccgtgtacgcaaatagtgctggcaactaattcaaaactgcaggaaacagagagtgatttggttacattctataccagtcttatttaaaagaaggaaagctataaacagagaattgaaagtcctttcactcaaatgcaagttcatggatttcttattgtttcgtgtaggcatcatcatcgtcatcttcacattaagttccttactggctgcggacgatgcttggcatgttccaacagctaaagtttgagttaataaattctatcaccctgcatgggactcatgttgtttgcaactggtttagcacgaactggtcttgttactattgtgctaatgtatttgtttcgaagtttcagttaatatgctgtggaaaagaatctggtgcacgttgatgttctttatgatctgttgttcagtacattgctctgcttcgttgctacgttaagaatatatatatactaacatcagaaaaaaaaaaaaaaaatatgggcttaataaattcaaaactgggaaaattaatgggccttcgcaagcacaccgcccccggtgtgctctccatggtcttcgccgggcccaacaccaacggctcccagttcttcatctgcaccgtcgcgaccccttggctcgacggcaagcacgtcgtcttcggccaggtcgtcgagggcatggacgtcgtcaaggccatcgagaaggtgggcacccgcaacggctccaccttcaaggtggtcaaggtcgctgactgcgg

SEQ ID NO: 168422 - DNA, 228 bp, Zea mays
  Clone ID: MRT4577_85184C.1
ctgtccaacacatccagtgcatggcatctgtagctatctgcccgaaggctgccgcgatcgacgataacctcgtgcatgacgtgaaactcgctgctgactagactaggatccccatggttcactagctggtgctggacttcatgaacttccacgagctgtgcaagaacatcaacaccgatgaggccgacggctattctgccggtacccagcctgtcatcctgaacaccg

SEQ ID NO: 168423 - DNA, 163 bp, Zea mays
  Clone ID: MRT4577_85185C.1
aaggcccgcaaaagcgctggtttaattcaccgggaggtggcccgccctaaagaattaggagataagttactccacacaggctggttaaaaaagacgccgccaggcataacattttttaatgcctaccatttacatactccaaaaaatccaatctactggggat

SEQ ID NO: 168424 - DNA, 425 bp, Zea mays
  Clone ID: MRT4577_85186C.1
cctaaacttcttaaaccaatactttcaccacctcctaaaattcattatacgccggatctctttaacatattttccatccatttaacaacacataaaaaatcatcttcatcttcaaacgaccataatttctttaatagcttccactcttcacaaccaatacctatttcatataaaaaacatttctccaaaccatcataaatcaatacccattctacatctttaatttaatacttatttaaagactcaccaactcttccattatcctcaactccagctctttcccaactaaactctaataatgatatcattaatttattttataatctatgtttttcactccaatattgtattacctttctcttcccatcaacaacatctttcgctcatctctcatcagcaaactcttctaattactctctcaaact

SEQ ID NO: 168425 - DNA, 643 bp, Zea mays
  Clone ID: MRT4577_85187C.1
gcgggacggggtcgtcccgcttgcagggcgtgaagcgccgtttcccgagaagacgggctcaaggacagcgtggtggtctccggcgaaggagcgggcgcgaagggacaagggggcgtggacaagctccggtgaggacggcgctgaatcgaccttcgacccttggctcggggaaacgcgagcacgcagcgactcggggaagcgctggggatcggaagcgcggaccggcacggggaatgtcgagcgaccggcgacgacggggaggccccagcgaccgggtgggctgtgggcggcggcgaatctacccgccgaggtcgcgataaacaatgttatgtgcaaggataatattcttactaagagctgatttggtgattaggtatcccaaggggatccatgggggaggaatcccttccaattcaattttgaaaagtaagaggatttcttcccctagggatccccgatcaccaaattagtcctaagagcatctctaacgatgcctcaaactagtgcctcaaattaaaatatagggctctacacaggaaaaactactccaacagtgctctatttcataaaattttgtcaaaaaactatagggcaccctctcaagtgactcaaatatactacaccgtagtgggctgccctattt

SEQ ID NO: 168426 - DNA, 515 bp, Zea mays
  Clone ID: MRT4577_85188C.1
atacgacgagaaatggcatttttcactcatgggcttgacgaatgatacctatgtacaagcacggaagccaaactcgcaaaatattctctattagccggcagattaaacactcgacaactggttacacttgcagacaaacaacctgaccgaaaatcaagacaacaaaagtatgacacttatcggcaaggcacgggatgctatgctattcactgtcaatgcataccaagggccccttgtgatttggatttggctgccccaaatttactcccggatcacatgactattcttagtcttgaggaatgctgcattagatcttcttgtgcaagaccacgaaaccacccttgctgtaaatctcgaaacagacatcgacagactcaaaccaagatgttcatgttttagacccacgcccacttacctacggtagatttccaaactatgatgctactggacactcaaggaccctgacagacccactcggggcacatgacggcataacaattacaagcgcactcctt

SEQ ID NO: 168427 - DNA, 178 bp, Zea mays
  Clone ID: MRT4577_8518C.1
actaagacgcgtgggctacccatactagttcgaccagtttttgcatttgtcggaggttggccaccgcgacggatctggtatttggaggcactactgccctacgaggcatgtacaaagaccgcatgcttgacatgccagaccagagggaacttaaaaaaagacccataataaacagaaa

SEQ ID NO: 168428 - DNA, 710 bp, Zea mays
  unsure (1)..(710): unsure at all n locations
  Clone ID: MRT4577_85190C.1
gccggccgggtcgggaaaaaaaatgcattcccattcctttatttatctggacgtgcgtcgtcagcaagatggcaactactccggcgcagtcacgcgaccctgcttcccgtcccgagctcgacgctggcctgatatatagcattggagtttgttggacctttggtggctagtcccgtccaaaagaatcgcaactcgcaaggcagcagagagcgaaggaggccaaggccatcgctctcctagcctcggagacttgcctttgcatacacatccccccggagggcggtgtgagggcatggctgcaaccgtgaggagggctgcttcctccgtcctctctcgcttcctcctcacaaagccttcgccttcgcctgcttctgccgccggcaataagtccgctctcctcggagcaggggctgctgctcttcacaggttcagcaccgcaccggcatccgcggccgcggccgcagaggagccgatccagcccgcggtggaggtgaagcacacccagctcctcatcaatggcaacttcgtcgacgctgcttctgggaagacgttcccgacgctggacccgcgcaccggcgaggtcatcgcgcgcgtcgccgagggcgacagcgaggacatcgaccgcgccgtggccgccgcccgcagggccttcgacgagggcccgtggccgaggatgaccgnctacgagcggtgccgcgtgctgctgcgct

SEQ ID NO: 168429 - DNA, 1370 bp, Zea mays
  Clone ID: MRT4577_85191C.1
gccggccgggctgggagtcccgtccaaaagaatcgcaactctcaaggcagcagagagcgaaggaggccagtggccggagctgacccctgatcgcacgcgcttagcgcctgagggcatggctgcaaccgtgaggagggctgcttcctccgtcctctctcgcttcctcctcacaaagccttcgcctgcttctgccgccggcaataagtccgctctcctcggatcaggggctgctgctcttcacaggttcagcaccgcaccggcatccgcggccgcggccgcagaggagccgatccagcccgcggtggaggtgaagcacacccagctcctcatcaatggcaacttcgtcgacgctgcttctgggaagacgttcccgacgctggacccgcgcaccggcgaggtcatcgcgcgcgtcgccgagggcgacagcgaggacatcgaccgcgccgtggccgccgcccgcagggccttcgacgagggcccgtggccgaggatgaccgcctacgagcggtgccgcgtgctgctgcgcttcgcggacctgatcgagcggcacgcggaggaggtcgcggcgctggagacgtgggacaacggcaagacgctggcgcaggcggcgggggccgaggtgccatggggtggcgcggtgcgtccggtactacgccggctgggcggacagatcacggcctggtggcgccggccgacggcgcgcaccacgtgcaggtgctgcacgagccggtcggcgtggccggccagatcatcccctggaacttcccgctgctcatgttcgcctggaaggtcggcccggcgctcgcctgcggcaacaccgtcgtcctcaagaccgccgagcagacgccgctctccgcgctttacgtggccaacctcctccacgaggctgggctccccgagggtgttctgaacgtggtgtccggtgcaaaccattctcaagttcagcggcgtggaggaggtgatccggcgcgcgaacgcgacgccctacgggctggcggcgggggtgttcacgcggagcctggacgcggccaacaccctgtcgcgggcgctgcgggcgggcaccgtgtgggtgaactgctacgacgtgttcgacgccaccatcccgttcggcggctacaagatgagcggcgtcgggcgggagaagggcatctacgccctccgcaactacctccagacaaaggccgtcgtcacacccatcaagaaccccgcatggctgtaaatcacatcctccgtccttgcccgcacggcgctgcgccggttctcggagaacgtgacgaataaaacaaacggtttggttaaaaagacaaggacgacggaaaatgggtcaaaaaaaaaaaaaaaaaaaaaaactcgagggaggccgcggtacc

SEQ ID NO: 168430 - DNA, 314 bp, Zea mays
  Clone ID: MRT4577_85192C.1
gaacgagcgagcgcaccgagccaccgagcgaggaaccggacgagcgcccaagacgcaaaccgccccaccccgcgcgccgggcgaggcacgagggcagacggcacgacagggaccccgaccggaaagcgggcagcgagcgccacgcaagcaaggcgagcaagcacacccaaaacgcaccccaggacccacacacgacgccaccggcccgaacgacgcgcggaaccgagagcgaggaacaaccccccaccggaaacagcgaggaccacgacgacgccaagcgcgcaaagaacccgcacgaaagggaacaaaagccg

SEQ ID NO: 168431 - DNA, 263 bp, Zea mays
  Clone ID: MRT4577_85193C.1
gacagcagcgccctccccatcggcagcgccgccaagcgcctcaaggaggccgaggccgcagcgtccgcgcagcaccaccacgccggcgtggtgagctacgacgtcggccgcatcgcctcgcagctcggcgacggcggagccctggcggcggcgtacggcgcgcactaccacggcgccgcctggccgaccatcgcgttccagccgggcgccgccagcacaggcctgtaccacccgtacgcgcagcagccaatgcgcggcggcgg

SEQ ID NO: 168432 - DNA, 853 bp, Zea mays
  Clone ID: MRT4577_85194C.1
atggctctctatcaggtcaataagcttggcgtgccagtaagactttctcggtgcaaagattcagggcattgtcctggctagcttcaatgtccttcttcatcctctccgactcatcatcatccatgtttgacctgtcatacccatgggatgatactcccagaatatactttatctgttctttggtctgacccataatgccatgtgccctgtcatcgagctcgcgcatggtggagagaatcctttgcaggtcgccggccagggtgctcgagtactcgaggtagtcgtcgacgtacacgccggtccgagcgatcgccatgcctgtctatgattgctcgcgtctccgggcagggttcgatgaatcgatgccccggtttggggaactaggggtggagagacgaaccgtaacgggacgggacggtcctcttctcgctggcgtttccctcgatgtggggagcagtgggatgcgctcgtcccacaggcgaatattcaccgtagatgcgggacggggctgcccgcacaaaaagacgggacggggtcgtcccgcttgcagggcgtgaaacgctgtttcccgagaggacgggctcaaggacagcgtggcggtctccggcgactccggtgagggcggcgctgaatcgaccttcgacccttggctcggggaaacgcgagcacgcagcgactcgaggaagcgctggggatcggaagcgcggaccggcacggggaatgtcgagcgaccggcgacgacggggagtcggggaggccccagcgaccgggtgggctgtgggcggcggcggatctacccgccgaggtcgcgataaacaacgttatgtgcaaggataatatgtcaggtaggacg

SEQ ID NO: 168433 - DNA, 754 bp, Zea mays
  unsure (1)..(754): unsure at all n locations
  Clone ID: MRT4577_85195C.1
cgggggatctctctaccccaagttgaaagacattctccatgagttaaccaaacacgaaactaaacgtcgccgcacgtatccacactttcgcctctatacaaacaacacaaatcttttttaaaaaggatttctaacccgtttatttcgactcatctcaatcaaccgttgcctgccaaactccctctgtcgatcaacaccctcggccctttcccaactatcaccactttagtcgatactcaggaaacatcatcagcaatggcgccaatgaataatcagaatttgaattacagtagtaattacggcgaggccgctgcccagaaggtcaatgtccttgcctcttgctacctcgtcgactctgccgccaaccttaagggcctccactactgcactaccggggttgcaggggccgagtggtattcctgaggtcccttcctcaggattaccctcccctccaacaagcccccccctcgccgcattaacctcgtctaaccagctcgctctcttgcccaaaaacaagaagcgagaaatcccaggccggcgcctgggccgacgagggggggcagcactttcgatcagggaagaatgtgagagattcttttgcgagtccatgaaggcgacgttccacggtgagaggaattcgtccatgaatggctccggcctgtctggtgcttttttaccaacgccgccgtccgatgaccggcttnccgacacttcaagcctgtttccgatgacaagctatctgcctacgacatta

SEQ ID NO: 168434 - DNA, 4348 bp, Zea mays
  Clone ID: MRT4577_85196C.1
ctgctggaaatgctgttcatgatgaaatgctgacagcgatgttccaaacgtgataatgctaaattgctcgatgtcgaaaagaacacacagcgtttcatatcacaactacaaacgtttgtgaatctgaccataagttattccaagcaaggaaaatcagtgccaagtatagacagacagccaagagatgaagggcgagtctctaatgttaaactcgctttaagcaacaactccgagcgaccaaattgcgacaagttcttcacacagaacaacctccggatgaagatcatgcatgtcgagcaaaacgattaccccttgtatatcattccagcaggttccattctcgccaatggccttggttctacttggagaacctctcactgaagattcctgcacgttgggcaaaaccatttccccttgaatctcgtttctggtgtaagacccacacacgtgtaatgaaaccattcacctcctccacaattctcattgtcacaagcaatcatgtcaccatatgaaatctggtggcatatacagtatgtcggttcatttggatcaattgtttgatccacatccatagatgtacctgctttcttgctgctacctggagggggcattaaatcaaagtccatacccctttccctgtcccattccctctctctaaatttttttgatgcttgaggtgtactaaaaccaaacctccttttctcatccctgctaaccaccggaactggaggaaggactgtaggttcatctggaggtatcttcccttcatgctttaaatcttctgcaaactggcccaagtcttcatcaaggcgttttatatggctctctatcaggtcataagcttggcgtgccagtaagactttctcggtgcaaagattcagagcattgtcctggctagcttcaatgtccttcttcatcctctccgactcatcatcatccatgtttgacctgtcatacccatgggatgatactcccagaatatactttatctgttctttggtctgacccataatgccatgtgccctgtcatcgagctcgcgcatggtggagagaatcctttgcaggtcgccggccagggtgctcgagtactcgaggtagtcgtcgacgtacacgccggtccgagcgatcgccatgcctgtctatgattgctcgcgtctccgggcagggttcgatgaatcgatgccccggtttggggaactaggggtggagagacgaaccgtaacgggacgggacggtcctcttctcgctggcgtttggttggatgtgaggagaagtgggatgggctcgtcccacaggcgaatattcaccgtagatgcgggacggggtcgtcccgcttgcagggcgtgaagcgccgtttcccgagaagacgggctcaaggacagcgtggtggtctccggcgaaggagcgggcgcgaagggacaagggggcgtggacaagctccggtgaggacggcgctgaatcgaccttcgacccttggctcggggaaacgcgagcacgcagcgactcggggaagcgctggggatcggaagcgcggaccggcacggggaatgtcgagcgaccggcgacgacggggaggccccagcgaccgggtgggctgtgggcggcggcgaatctacccgccgaggtcgcgataaacaatgttatgtgcaaggataatattcttactaagagctgatttggtgattaggtatcccaaggggatccatgggggaggaatcccttccaattcaattttgaaaagtaagaggatttcttcccctagggatccccgatcaccaaattagtcctacgcgtgttttttttttttttttttcgggccggtgcaaaccattctaaagttcaggtacggccgacccgtgatgtccagcccgggactcccgtccaaggcagcagagaccagagagcgaaggaggccaaggccatcgctctcctagcctcggagacttgcctttgcatacacatccccccggagggcggtggccggagctgacccctgatcggacgcgcttagcgcctgagggcatggctgcaaccgtgaggagggctgcttcctccgtcctctctcgcttcctcctcacaaagccttcgccttcgcctgcttctgccgccggcaataattccgctctcctcggatcaggggctgctgctcttcacaggttcagcaccgcaccggcatccgcggccgcggccgcagaggagccgatccagcccgcggtggaggtgaagcacacccagctcctcatcaatggcaacttcgtcgacgctgcttctgggaagacgttcccgacgctggacccgcgcaccggcgaggtcatcgcgcgcgtcgccgagggcgacagcgaggacatcgaccgcgccgtggccgccgcccgcagggccttcgacgagggcccgtggccgaggatgaccgcctacgagcggtgccgcgtgctgctgcgcttcgcggacctgatcgagcggcacgcggaggaggtcgcggcgctggagacgtgggacaacggcaagacgctggcgcaggcggcgggggccgaggtgcccatggtggcgcggtgcgtccggtactacgccgggtgggcggacaagatccacggcctggtggcgccggccgacggcgcgcaccacgtgcaggtgctgcacgagccggtcggcgtggccggccagatcatcccctggaacttcccgctgctcatgttcgcctggaaggtcggcccggcgctcgcctgcggcaacaccgtcgtcctcaagaccgccgagcagacgccgctctccgcgctctacgtggccaacctcctcctcgaggctgggctccccgagggtgttctgaacgtggtgtccggcttcggcccgacggccggcgcagcgctctccagccacatgggtgtcgacaagcttgcgttcacgggatcgacgggcacggggcagatcgtgctcgagctggcggcgaggagcaaccttaagccggtgacgctggagctcggtggcaagtcccctttcatcgtcatggacgacgccgacgtcgaccaggccgtcgagctcgcgcaccaggcggtcttcttcaaccagggccaatgctgctgcgccgggtcgcggacgttcgtgcacgagcgcgtgtacgacgagttcgtggagaagtccaaggcccgcgccctgaagcgcgtcgtcggcgaccccttcagggacggggtcgaacaggggcctcagatcgacggcgagcaattcaacaagatcttgcggtacgtccagtccggcgtcgacagcggtgccaccctcgtcgccggcggcgacagggtaggcgacaggggcttctacatacagccgacggtgtttgccgacgccaaggacgaaatgaagatcgctcgggaggagatattcgggccggtgcaaaccattctcaagttcagcggcgtggaggaggtgatccggcgcgcgaacgcgacgccctacgggctggcggcgggggtgttcacgcggagcctggacgcggccaacaccctgtcgcgggcgctgcgggcgggcaccgtgtgggtgaactgctacgacgtgttcgacgccaccatcccgttcggcggctacaagatgagcggcgtcgggcgggagaagggcatctacgccctccgcaactacctccagacaaaggccgtcgtcacacccatcaagaaccccgcatggctgtaaatcacatcctccgtccttgcccgcacggcgctgcgccggttctcggagaacgtgacgaataaaacaaacggtttggttaaaaagacaaggacgacggaaaaaaaaaaaaaaaaaaaaaaaatgggtcatttttatctccctagagcatctccaacaatgcctcaaactaatgcctcaaatcgaaatatagggctctacacaggaaaaaccactccaacagtgcctcaattcaacaaattttgtcaaaaaactatagggcaacctctcaagtgcctcaaatatactacaccgtagtgggctgccctataatctagatttggggctttactgttggagcggggtgttttgttggtgccctaaattctataaaatttacttattttaaaattataaggcatttttataggtcacgttgttggagatgctcttaacaagcaccaccctagtcacgttttcatcgaactttaaaagcacgcgaattgctcagctctcaaaaccatttaaattacccattaggagaggttttccatggtgattttagcttttttttaattaatgtttggttgcaatgacaggacaggatgagatgagacgatctcttgtatctcttaaaaaaaaaaaaaaaaaaaaaaaaaaaaaaaaaaaaaaaaaaaaaaaaaaaaaaaccacccac

SEQ ID NO: 168435 - DNA, 352 bp, Zea mays
  Clone ID: MRT4577_85197C.1
ttgtgttttttttaaatttttttttgggttttcccccaaaaaggaaaagaaatattaaccgttccccaagcccatcttgattggccaagtaacccaaaaagaatcacataaagaggcacaatgcctccgggaccttgtaaccggaaaggttagccagggccccagacccatcaaaaacacagtatcgtgaatccggtttcaacaaagagcccaccagcatggggctcccagcatccagagccaaattgacaacttggcggaaccattgcacaacattcaccaaccccccgaccatcttactagtattcggatctagggaccctatctatccccctttcgcatattcatatgg

SEQ ID NO: 168436 - DNA, 1683 bp, Zea mays
  Clone ID: MRT4577_85198C.1
aattcggcacgaggttgttttgacaaatcctggatagctgaatttttatgacggtggctctctattttctgtgcaaaactcaaaagagggaaatcctcttcctgaagcacagaaatttcaagtcgcaattcctacccttgatcccaacataacggtcactggtctttattcgctaaccaaaagtgaatttccaaatatttcactgaagaaattttgtgctaggaaaaatgttgggcatttcatatcagagaacatgaaatgacctttgactggtggggttccaaatgagatgtcactgaacgaagatcatgctgttgaaagaatataaattgcaggctaccaagatggttctgtgagtatatgggatgcaacatttcctgttctaatgccaatgtttgtcttggatggtaatgtcagtctcatttgtatatttgtagtattacttgcattattcctcattggtttataactaacgggttaaccccaatcaagttgtaactattctttactacaggttgctgatgttaatttggatggagctaatgcttctgtatgatctctagccttttgttcattaagcatgactttagctgttgggacaacaagtggtctggttagatcttgtcagtcttacgaattggtcgaagggtggtcatttgtatcattttagaatatgtttttataccattttttgtagttgtgcatctataaactccaagaacacattgggggttcaagcttccattttgtgagtgaatttaagcaagaaggtaaatatttcatacggaacctgattatatatgcctaaagcttcacctgctgcctattccccaacaatgttgtcatctttgttaagacagttttatgccaatttcacttcttctcaccagcacgtacaagatgtctgtcgtgactggtcatctaacaagcagaatccataacatgcttctttggtagagagagacagtaaattggtactgtcacttacgtgaatgtttattattgaaatgaaaatacatttgattatgatcggacacttataaaaacttgacttgcggggctaagacaacctccgagcattgtgtgatagagaagacctctcatacatgccaaaacaaccttgcccacgtgagcgaccgcgacctggtccgggtcatagtcacaaagtttgtggatcgatagggttgaggaacatcgtacgctacgtgtgagagatttttacatggtgggaacaaaaatgaccttgcgtacccgggtcgagggtcgctaccactgtacccatttcttgtgactatggttttggtcttcgacccgtgctttggtgtggtggcaggcgaggggattttttaaccccagtctgaaatttgtgctctaatatactgctccgattgatatgttggcctgctaaagctattattttcagtttgcttgcatggaactcattatttttactagctctgttttatttaaacttatagtagcacatgtgtccattattgatattgattaatctagctcctatcattatgttcactatattgaattagttttgacaaaaaccctggtaagctggaatcacattgttttgtagatatttttcttcaatataaatgcttaaacttaacctgataaattcatctacatgctctttcaaatggcaagcccacttattgttgagtttta

SEQ ID NO: 168437 - DNA, 223 bp, Zea mays
  Clone ID: MRT4577_85199C.1
tttttgcatgccgttacctaggttagtcgactaccaccgcaaccaggtggggcctgacgttctggctgcacccgacacactactcgctgaggatgtgtacgactacgagctcggcgccacttttgaccatagaccctgcctacaggcttcatgcaaggttatctcgattcagggccaatgcgctgaccgcagcaacttgaccatgaacaacaacaatttggac

SEQ ID NO: 168438 - DNA, 468 bp, Zea mays
  Clone ID: MRT4577_8519C.1
aaaaaaaaaaatcctcctttttttttttttttttttttttttttggggggaaaaaaaggagagttttttttttttttgggttcccgaaaaaccctaagcaaacaaagggaaccttaattcaccatacaaaacacgcactcggacaaacaaatttattttaacacccgcactgggcacaaaacttgggcaggaacagagagagggtcacgccgggggtgtttattaaaaattaaacggggcacccattaaatcccccacacggacctgacccccaaaggtggggggataaccccaaaaatggggggaggggcccctacccgggttaaaaaagaaacgttaggagcccacaccaccttcatatggaggcgccgggggaatttctgagaagggagcccccctggaaaattcccgggtggggaggcgatcaaaccaaaacccggggaggctgacccggtggctaaagaaggg

SEQ ID NO: 168439 - DNA, 828 bp, Zea mays
  unsure (1)..(828): unsure at all n locations
  Clone ID: MRT4577_851C.1
gtcttcgctatgcaccacgagcgcctccgccgctccaacgctccaacgcttgagcgcctccaacgccactccaacgccacgagcgcctccgccgctccaccgaacaactccaacgccactccagctcttgcagcagtagaactctactgcagccagctacgacaccctgcgcctgccgcactaggtacatttgattctggtttctgccgcacaagatccgctacctcttggacccggacatctacaccgacggcaggatctccgtgcagggcatcgacgccgtgctcttcgcgccggacgacgccaaggccacgcagaccgtcgacccgaacaggaagcctcctaccatcgtcacccacaagaagaagatcaagctccggcgaggtcagtacctacctaccttcagatctggacctgctcctttgtgtcctccgtcgacctgaacaggaagtatcccaccaccgcattgtccttttttcaataatagcaccgaaatttacagttcgtaatatctagattggggaggtcattacatcaaaaaaaagattggggaggtgtgtagattaatttcacaactgatcgctagcatcaatcaatgccagttcatctattgctcaacctcagtattggccaacgtgaaaacatggaggtgaagtgaagcaagtggtagttgagcatatgctggntgggtggttgtcttcatgaacatctctttgatggctgataccattcctgggactgcaagccaacactgtcctttaacccatgacccatgagcaaacatttcttcttacaacagagcatgatgttagagaaatttggcttcag

SEQ ID NO: 168440 - DNA, 386 bp, Zea mays
  Clone ID: MRT4577_85200C.1
ctcacgcgttcgtcggccaggtctgccgctcaccggatctccaccgtgcttttccagtccccgcgcgcgagagcgccgccccgtgtgggccctagatacagaggggctggcgccgacgcaccctgctcaagggcataatcctcgatgatagcgcggttgggaagacttgcttgttgaaccaatatccgaacacgaagttcagccatcagtacaaggctacgatcggcgcggatttcctcaccaaggacgtacagttagaggacaggctcttcactctgcaaatatgggacagtgcgggccaggaaaggttatagagtctcggcggggcattgtaccggtgagcagattgatgaggactaggctatgatgttaattctatgaaatca

SEQ ID NO: 168441 - DNA, 289 bp, Zea mays
  Clone ID: MRT4577_85201C.1
tttttggggcaaccgccaatttttctaatcccttgggtttgggcccaatctttttttaaaaacagggttccaatcttatttgaaaacatgggataacctttttatcttgggaagaatgtcacaaaaaagggttttttaacgtcccccgagctgggggcaaggaaacaaaagaaaattcttttaattacacgggttttgcccttttttttttggaagttttttatgggaaaacaaagctttttcccccgaaaggggtgccccttgattggggcccaactttcaggggggg

SEQ ID NO: 168442 - DNA, 417 bp, Zea mays
  Clone ID: MRT4577_85202C.1
agcagtggtaacaacgcagactactcggtggttaacatctaacaagtacatatgtgtgtgtgagggagattgatgatcagcatctaatgtttgggtaccatgtgatggggacctacacacaaggaatgctactgctgtccctatcccaaaagaggaatgggtgtactatatatatccaaacaacgtacgcattgtaaattgagttcataatataatgtctgcttgaatagttaatctcaaaggagtgtgagcctagatatataataatcactttttgtagacgtcggttcaagctgtactatcaaatgcaaataacatatgttgtattgaaactcggttcgaaattaatgcaatcaaatcccaaaaaaaattccaaaaatgaaatgaaaaagtactctgcgttgttaccactgctat

SEQ ID NO: 168443 - DNA, 378 bp, Zea mays
  Clone ID: MRT4577_85203C.1
ggttctggggttgctttgggggttccaacaggttttatggtgcccccccgctggcccccctacaattctttttttttttgaaaaatgggctttacagaggcttaatcttgttgatttttttttttaccataggggcctaaagtttaaaaggcgttagtgggcccccccccaaaccgattgggttccgcaatggccgcgaatcccccccgtggggtcaaacgcatgggccgcccaactccttgtttttccccgggcttgggcgttttcccgcctgcactatgcccacggcaccctggtctgttgctccccccttttcttctacacaaacctcctagaccccttcaggggggggggcccctccccctcttcctgtggccc

SEQ ID NO: 168444 - DNA, 426 bp, Zea mays
  Clone ID: MRT4577_85204C.1
cgcgagcggccgccctatgacttgttttttttttattgccttatcgagtgtgaaggggcaacctaagctcattactcgcgaaaaattccaaagcatgttcccatacaatagcgatcgatcattgactgcgagcggcatgccaaacataattgaaagcgtgtatgggcacattcgtggctaatcgaattacaccagagttcaaagcttatttttggaattccaatgggggaacaaccgggaatttaataaccccctttcaaatctggggaaccaaattccccgaggggatttttggaatccccagacttcttgctttctgggacacatattaagtattttaaggcctgctcgggaaacattaacgccttttcctgggcgggggtcctgaactttttgattgcgagcgccgccctttttttttttttt

SEQ ID NO: 168445 - DNA, 1089 bp, Zea mays
  Clone ID: MRT4577_85205C.1
aattcggcacgaggctgatcctgaccgacgggggcggttcgtttgaaagtcagcagcgacaaatgcgacgcggggtggactcgccccgtctcctccttccgcaccccccttttccctccatccaatccaggccttcattgcctgagccgaacctcccatccaccacctcctcccttcgccgcccctggacctccctcccagcgagtcaatcgcccacaacacacgcggttcgttcttactggtttcccggagggaggtgtttttttcccattttctttgtgtgtgtttgcgctgctgccttcttatcaagtcttcttgcacgaccttctcttctctcccaattcggcacgaggcgatatttagactgttttcgtctgagattctttctgcctcctgcgttcttggtccccggccagcagtcggcaatatcgctctgtcgatcctcctgatacttcgtcttccattggttttttaatcccatgtgagcagcagcagtaagaagaggatctgattcgatcggaggagacctagtgacgccgccaaatcgaatcgaatttcttggcaacagcaacagtaacaaaaactagattctggattcgtcccattttttgcactagggaaataaaatgaggctggtggtacgcgtcatcgaggcgcggggcctcccgcccacggacgcagacgggacgcgggacccctacgccaaggcgcagctcgggaagcagcgggccaagaccaaggtgatgcgcaagacgctctgccccgcctgggacgaggagttcgccttccgggtcggggacctcagggacaacctcctcgtctccgtgttccacgaggaccgctacttcgccgccgacgtcctcggccaggtcaagttgcccctcaccgccgtgctcgacgccgacaaccgcacgctcggaacgcagtggtaccaactgcagcccaagagcaagaagtccaagctcaaggattgcggagaaattcgtctcaacgtttctctggctcaaactactctgaagagagacgacggcacctgcacattgggcctcagatgaccttgcatcaaattcagacaaatcaactgaattg

SEQ ID NO: 168446 - DNA, 203 bp, Zea mays
  Clone ID: MRT4577_85207C.1
ccccgcgtccgccccgcgtccgaccggcgtggcgttacccagctgtacaggaggcgatacaaagcaggaagtcaggcattctgcgttgaaatgtggcaatattgatatcttttttttttctctctttttgtacattgtaacggcaaagatttcttcctgacaaaacccaaaaattttataccaagtgaaatcgtactttactg

SEQ ID NO: 168447 - DNA, 381 bp, Zea mays
  Clone ID: MRT4577_85209C.1
tgctaagccgcagacgcagcacacacggacgccaggatagatagcggacagaggggagccacaccaagacaggatgcggacagagacggacaacgggaaggacaaggagagctcggggacagagaaggcgagggacggatcgcataaccagcgaggcacgactggccaggcaacggaggccacgcgctgcgagaaggagatggccaaggaggccggccgcgccaagaaggaccaggccaacgcgcgcaagcaccaggagaaggccgaccacacgagcaggccccgccacgggacaccacggcacgcgcgagccccttaccggcccgaacggtcacgatggcgctggcgctgacgacgaccccgagtacccgttctacgcaa

SEQ ID NO: 168448 - DNA, 283 bp, Zea mays
  unsure (1)..(283): unsure at all n locations
  Clone ID: MRT4577_8520C.1
tgtacccccctcattccttagacacaatttgcctccctcctagtcctcttttccccctgccgcactttctgtcgtgccaatccaacaaaagtcccctcttttactttcccctttcaccactctaaattacacttgtactttgcacttgacaaaagtgtcttacttgaaacataatagnatattttgtatgatagaactgggtctcttctacttgtcacttccataattaaggtattttctgtctacacttcattcaaatgaatagggttgccccttcttgcat

SEQ ID NO: 168449 - DNA, 1132 bp, Zea mays
  Clone ID: MRT4577_85210C.1
ctccacacgctccattaattcatgttatgaaggtcaaacctaacaaggtgaatttaataattggttctggtggaaagacaataaaaagcataattgaggagactggggtagatgctattgatactggagatgatggcacggtaaaaattactgcaagagacctaacaagcttagagaagtcaaaaattataatagctaatcttaccatggttccaaaagtaggagaaatatacagggactgtgagatcaagtcaatagctccatatggtgcttttgttgaaattgctccagggcgtgagggtttatgtcatatcagtgagttaagttcgggctggttggccaaggctgaggatgcttttaaagttggagatcgcatagacgtcaagcttattgagataaacgataagggtcaacttcggctaagctctcgagctttgcttccagacgtggattccgaatccaacataggttcaacaaaagaaaaggtgccacaaaaagatgatgtcataaaaatgacaacaaaaagaccaaggcgcaagaaacagtctgagccgtctggagctgaaaatgccacaacaaaggctcttgcgaaaagcgctgctgctccagctggttcaaagggcagtgaagcgtagtaggatgtggacagcttggtgccttaatcagacgattgactggccaagctagggatacatccttcaaccgactatatgatggtcatatggcatgagaaagagttcagacatgagggcacaactgtctaaacaggaatataatggagaagaattggttgatcgacctcgatgttagacaggtagagtgtctggttgatgcgttacacaaggcgtgcgcctatccagcagtaatggtgcccaggactggatcgtcgccctggttagcagaacagatcgcgtaaccaccatggaaacttgattgtaatcgccagaatagtttgtttacctttacctttgtgttgtaccgttctgtactaactacatattcttgccaatccggccaatgcaaactactgcgtgaagtaattagccaaaaaaaaaaaaaaaaaaaaaaaaaaaaaaaaaaaaaaaaaaaaaaaaaaaaaaaaaactcgagagggggcgccgtgtacccaaaa

SEQ ID NO: 168450 - DNA, 409 bp, Zea mays
  Clone ID: MRT4577_85211C.1
aaaattaatgaaaaatagattctctgttcggttgctcagtaatggtacaactgaacagaccctctcatctggttttgtgaactagccctaaggatcttattcagagtttgtttctccagacacagaatagcatgagacacagaatagcatgagatgtgtttggacaatgtattatcaaaatcagatccccaaaatctactgcgaaccaaacacagtctatgttttactgaggccattccaaaatggccacgtactggagacaaagcgtctacatgttactacggacaacagccagaggtatagaatgttggttgttgcctgccttgtgttcgaagcgataatgctttggatagagcccactagctcgtggtcttcctcttccccccatgtgcatcaatggcggtcggag

SEQ ID NO: 168451 - DNA, 516 bp, Zea mays
  Clone ID: MRT4577_85213C.1
aaaaatgacaacaaaaagaccaaggcgcaagaaacagccagagccgtctggagctgaaaatgccacaacaaaggctcttgcgaaaagcgctgctgctccagctggttcaaagggcagtgaagcgtagtaggatgtggacagcttggtgccttaatcagacgattgactggccaagctagggatacatccttcaaccgactatatgatggtcatatggcatgagaaagagttcagacatgagggcacaactgtctaaacaggaatataatggagaagaattggttgatcgacctcgatgttagacaggtagagtgtctggttgatgcgttacacaaggcgtgcgcctatccagcagtaatggtgcccaggactggatcgtcgccatggttagcggaacagatcccgtaaccaccatggaaacttgattgtaatcgccagaagtgttgtatcgttctgtactaactacatattcttgccaatccggccaatgcaaactactgcatgaagtaattagcc

SEQ ID NO: 168452 - DNA, 228 bp, Zea mays
  Clone ID: MRT4577_85214C.1
aggaccgatggagcagttagtttttggtcaaaacgagaattccggggtttgaagatgccacatatcatattttttttttatttatattcaaaccggggggttatttggacccccccccccccttggtttggcacttttttcatgaacccaatctagaattggcttagggaccagcatgttccttattccctgtttccaaaacaacacaagggaaggcatattatcaga

SEQ ID NO: 168453 - DNA, 837 bp, Zea mays
  Clone ID: MRT4577_85215C.1
cattgggtacctcgaggccggccgggaattcactactcaaatcacatttgaatctttaagcctcacccacacgaagtctctgacttgtgagcacctttgcgaattttccttctactactttgataccccactacgcattcgcctacctataccatggcacccgcgatcggaatcgatcttggaaccacatactcatgtgtcggcatcttccgagatgaccgcattgagatcatcgccaacgaccagggtaaccgcacaacaccctcgttcgttgcctttaccgacaccgagcgtctcattggtgactcggcaaagaaccaagtcgccatgaaccctaccaacaccgtcttcgatgccaagcgcctcattggtcgcaagttcgccgacgctgaggtccaggccgacatgaagcacttccccttcaaggtcattgacaagggtggcaagcctgtcatccaggtcgagttcaagggcgaggagaagacattcacaccagaggagatctcatctatggtcctgaccaagatgagggagaccgcagagtcctacctcggtggaaccgtcaacaacgctgtcgttactgtcccagcctacttcaacgactcacaacgtcaggccaccaaggatgctggtctcatcgccggtctcaacgtcctccgtatcatcaacgagcctaccgctgctgctatcgcctacggtcttgacaagaagacccagggtgagcgcaacgtcctcatcttcgactttgggtggggggtactttcgatgtctctctcttgacccattgaggagggtatctttcgagggtcaagtccactgcaggtgacactcacttgg

SEQ ID NO: 168454 - DNA, 336 bp, Zea mays
  Clone ID: MRT4577_85216C.1
cttcaggctcggcccgtaggaggagtttgaaaatccaaacgtactcttctgataattgaaatgaaggtggaatggtgacggccgagttgtgccgggtctcgtcgctggggagcgacgacaaggactgcgcgccatcctctgtcatggtgcacaattgtgagagtgtggacaggaccatgggggatacttacgagaggtagctgtggctgacttacctatcgtccgtgggggaggctactggctctccggagcgaatgagcgactctgtgtggtgaggcgcagctaatagggctcgaaccactgtgttgatgaggccccgcgcactgacggaacgct

SEQ ID NO: 168455 - DNA, 391 bp, Zea mays
  Clone ID: MRT4577_85217C.1
gacccacgacgtcccggaacattgcaacatacacacgacagaatttttgtatttaaccaacagcactaacaacaatcggggacggacaaaatcaccgcctgcttcgtccttaatgttgttttaaccgcaacgctacaaaccacaatgattactccatactgataacttcctacatcttccattcttacaccataccttccatcaattacttcaaaaccctatgaacacccagttctgcaaccctataggctacaacacgcaattgccgctagcgacatacatttaccaacttcccagaaacaataacaatatttatctcatttgccattataaactctaaccatgattcaccatcaacactacttatcacatctaagctgcttacatcatg

SEQ ID NO: 168456 - DNA, 235 bp, Zea mays
  Clone ID: MRT4577_85218C.1
ggccagagaatccaaccctggggaccacccatttcctatctgggcggccatggccctgcaggagctgcccccgtcacttacaagccagggcacccactgcccctccctggtcctgcaggccatctgggatgtgatgctactctagcaagctcagtttttgcagccaggcgcacgggggtacgctgccgctggctgccatcatcgactgcgaagggttcctcgttctcagctggct

SEQ ID NO: 168457 - DNA, 403 bp, Zea mays
  Clone ID: MRT4577_85219C.1
cgaccgatacgtgcagaaaggcctctttctagatgccgcccgggattatacacatccattgttccactacaaactgggattcatgaatccctacaccagtaatatcgtctgtacgacaacacttgaatcacaatcattgataaacatatcactattagacaattacaaacatgatgaccactttatccagttgctcaacacgcaccttaataacaattaagaccattttctacaactaacactgaattatgtatcaaactacaatggcttacagacagaatccctcttgaacaagctgtcatgtaacgctcagactatcagattctttgacgtcaccaatttaaaccctcatgagctcgattactgtgtccatatcaaatttaaagattttgaccatattttt

SEQ ID NO: 168458 - DNA, 287 bp, Zea mays
  unsure (1)..(287): unsure at all n locations
  Clone ID: MRT4577_8521C.1
ggacgacgagatactacgcgggggccgccctaaggctgggggtttaacacaaaatacaggagctatatcccccganagaccaacgataatgaaattccgccgcaagagcacagagccacggcatgagaagacgcagaagggccataagcactgccatcttccctaggagctaacaggcgggcttgctagtgaaaacaaccaggccgcgtcacaacggccgagaaatgaacctcgcttttcttataacaactgagtgagctaccccaagaacttgtgaaggccaatac

SEQ ID NO: 168459 - DNA, 694 bp, Zea mays
  Clone ID: MRT4577_85220C.1
gccggccgggcttgggatctagagtcaccatccaacttctatactctctacatagcattgtaataacaaaagaagacgcaaaggaccaaagatgcatggccctttcttccactcgcttctcctgctggtcctggaacgcgccttggttgtcatgcttcccaaaggccccacctacaatatcaacaacaactgcgaatgccaagtgagcgccgcggtcaccaagccggtggtacggcacccgacctgaacgctgtacctgacgcccaatggccgacgagccacccagctacctgtccggccgagtgccgggccactacggctgctacttcgacgggaatggcggcagatcccaaaacgttcactgagaaccgcgagctggactggatcctctctggctgggcgcatgctgacgctgctcgagctgaccattccccgaactgctcacttctacgacatctagttcatcgaggcctagagcttcacatgcgcttctcatagcttcccggaggtgcggctggactacactcgactatgcaagcctcaatccctaccaccacatccttgctatcagacccttgcatgtcgcgctcatgggcaccaccaagggatattgtgtccgcgatcggaatatcgtctagatgcatgacccactctaccccatttgcacaataataccgatcgagctcgccgatga

SEQ ID NO: 168460 - DNA, 254 bp, Zea mays
  Clone ID: MRT4577_85221C.1
aattcggcacgaggctcagagcctggaccccgccgccagtcatgcatccgacgagctaagacgtacatccggcgagcaactagcttccatctgctactcgttcgctgacggcgtcgcactccccaacagtctagagatcggtgacgccgtcgacgaaagcgtcactgtctacccagtggtctaattcaacaaacgctatcgttgataatgggtccctcgccagcgatcctcttacctgcacactgactaccatg

SEQ ID NO: 168461 - DNA, 245 bp, Zea mays
  unsure (1)..(245): unsure at all n locations
  Clone ID: MRT4577_85222C.1
ggcaagcgggccgncaagcncaggccgncaggcganacaacnacaagccnacagngccnaccccnccgccgccnagagagagagaggccagcgangacgaagacgacgccgccggcgnncgngnaccggancagcacggccgacgagngggcggagnnncagcgcacgggcgccacccnnggaggcgaccncgacagcnccaccggcngcanccancncagcgacccaaaccaggngaagangac

SEQ ID NO: 168462 - DNA, 477 bp, Zea mays
  Clone ID: MRT4577_85223C.1
ggaaaaaggcaaaggccgatttaaatgggggcaccccttttagggttaaaatcccgggcccaggacccggtttcatacgggggggaaaaatttatttaccccgaaaggaagcccgggttctaaactattaaaaggcgggtacaagggaggggacactttgggtgggaaaaatttaaatctaaaaaaaggcccctaaaaagggggaaaaaaccttaatcccggcccgggtcaaaaaaaccaggctatataggggccccccaaaggggcccgggcttggggacgggcaaaaactggccccctcggggcaactgctggggctggggggggttcttgcaggggcggccaccgcaaggggaaaactacgggtcccgcacgggttttgaaaaaaatccaggttatccatatggggcggggcaaaagctaccccaatagggggggggggggcgtcaaccccataaacttaaaatttaagggggg

SEQ ID NO: 168463 - DNA, 686 bp, Zea mays
  Clone ID: MRT4577_85224C.1
agcagtgcgagctgcactcaaagttaaggcatcagtcatcatttgcttcacctcttctggacgagctgcaaggctcattgctaagtacaggcccagcatgcctgttctgtctgttgtcattcctcgtctaaagacaaaccaactgaggtggagtttcacaggtgcttttgaggcaagacaatcactcatagttagaggcctcttccctatgcttgctgatccacgacacccagctgaatctaccagtgctacaaatgagtcagtgttgaaggttgctcttgaccatggcaaagcctcgggcgtgatcaagtcccgcgaccgcgtcgtcgtttgccagaaagtgggtgattcctctgtggtgaagatcattgagctggatgattagacaatcaggctatgatgttgtctactagggcacgtttttgccaatttttttgcctaggccgaaacttattggctatgtataatcctatagcgcttgaaaactgagcagtttttcctatggtgccatcataggatttgcttttacagttcaattatggtgtagttcgaaatttgctcgactaaactgcggtgtaacagttaaatgggcagatggaataatgtaatcatactgttccctaaaaaaaaaaaaaaaaaaaaaaaaaaaaaaaaagcggccctgcgttgttaccactgcttaagaa

SEQ ID NO: 168464 - DNA, 369 bp, Zea mays
  Clone ID: MRT4577_85225C.1
cccttcttccctttttggaccctcctcctctcttcaacctcttgcggctgtgccaatccccccctgttctctgattgatccatcgatctggtccctcctcgtccccccttcccctccccttgcttgcttgcttgcttgctcaggtaaaaaaaaaaaaaaaggagcaggaggagctgctgcactgcacaagcagaacccctccccctctctttgttcgcaagattctccctttcttgtcatatgccccgcaaaggttttgtttccactgtcttcgctccggccgagcaaagcacctgctgttcttgccacttccgatctctgtgtgccgccccgccgccttttttacgcccccccccaccccccaccccc

SEQ ID NO: 168465 - DNA, 241 bp, Zea mays
  unsure (1)..(241): unsure at all n locations
  Clone ID: MRT4577_85226C.1
attattgtttagttgttcacccatctagcggaggtggtcatttaaaaaggccatggcaaggttgttgataaacaaaactaatggncaaaatgaaaataaatgtaccaacggtgctgtcacgacagcattgcaacaaacattgcgacccaaatgggggtgattgcgtaatattgaacacattcaagggctcgtatatagtgaaaccattattctagtaaatgccacaaacagaaattaaaag

SEQ ID NO: 168466 - DNA, 266 bp, Zea mays
  Clone ID: MRT4577_85227C.1
cattactgtacagtctcatctgtgctgatagcaatacagcacctcaagatacggtgttatgtactttccatataacccagctgctttttgggcgcctaactcaattggtcctgggcgtagaacggtagaaggcgatagcagtatagcacccaagttcaaagtcctcgtccaggcaaatctgggtgcatatctcttaattaaaaagaaacctggttcacttgtttggaaacatgtttcgtgggaactgtggtttgatggtgtccatt

SEQ ID NO: 168467 - DNA, 507 bp, Zea mays
  Clone ID: MRT4577_85228C.1
gggaatgtgtcaaaaccaaaaagacaggtaaacacaataacaagcccaaatgctagcccaagctgaacaaacaagggcgaggggggggggggagcgcggaacaggggaggcggagggccaggcgggcgccagggcaaaccgggctcaaaccaatgaacacaaccctagagggggggggggacaaaagaaaagaaaaaaaaaaacaaagacccccaaacggaaaagggggggaactgaaaagaaaacaggggaaccaaagacccaccccaggacctccttaaaaaaaggaacgcaaacgcagagcgggtaaacgaaacatggccccagaaaggaggggaaccccccacaaaccagggggaaacccacccaacaagaggggggggacttcaatcggaggaagaggacgacccgggaaaacccaacccgcacccggaggggaacccccctttcctatagggagccgaataagagcttggcggactcatggaaaaagctggcaccaggggg

SEQ ID NO: 168468 - DNA, 1008 bp, Zea mays
  Clone ID: MRT4577_85229C.1
aaccggacgcgtgggcggacgcgtgggccgcaggttcttcttcaccgtcgggctgggcgcggacccgtgccggagccgcgtcaacggcacgtgccagggccccaacggcaccaggttcgccgcgtccatgaacaacgtgtccttcgccatgcccaggaccacctccctcctgcaggcgcactaccagcgccgctacagcggcgtgctcgcggccaacttccccgccgtgccgcccacgcgcttcgactacaccggcgcgccgcccaacaacacgttcgtcacccacggcacccgggtcgtgccgctcagcttcaacaccaccgtcgaggtggtgctgcaggacaccagcgtcctgggcgccgagagccacccgctgcacctgcacggctacgacttcttcgtcgtcggcacgggctttggcaactacgacgccaccaacgacaccgccaggtacaacctcgtcgacccggtgcagcggaacaccgtcagcgtccccaccgccggctgggtcgccatccgcttcgtcgccgacaaccccggcgtgtggatcatgcattgccacctggacgtgcacctgacctggggtctggcaatggcgtggctcgtcaacgacgggccgctgcccaaccagaagctgccacctccaccgtccgatatccccaggtgttgatacaatcacgagacattagtctgcagtggttttgatccgtgcaatgctcaatgcacgcgcacatggcggaaccgactcaaatcgattggcctgtggaacgcgaattttgtgatgatgtctggttttgtcgctgcactgtttcggagacatacaagatccataaaagcaagtttattggggtcatgtgttgttgcgccattattctttttttttttactattgtttcatcgcaacttttgtttttttaatgctggacattgttagtgcgtccagtgtgtaaggtatatatgttacatatataatgtatcagccgaccactggattggaccaaagaaaaa

SEQ ID NO: 168469 - DNA, 590 bp, Zea mays
  Clone ID: MRT4577_8522C.1
cgcagaaaagcagtacctcacggttgcggcctcggatcctgtgatggaagaaagcaagaccggccccggcggactgacggcccgtggcaaggggaaggcgccggccccgccgccgcctccgccgagccgtgaggaggagaacggcggtgggcaccgtcgcgggcagaggaggaaagtctggccgcgtggccgccgcgcggtcgtagctctcgtggcgatggtcgcggcggccctgtaccttctactcgctgacgccgtcgcggagccgccgccgggcgcctgggtgctcgtggcctaccttctctggatcgtcgggctgattatgcttttttcagttatgaagtgagattgatggtcggtgctggttggtgtggggactgagggccacgggatcgtttctttcagcctttctttttcttattatgtcttttccttttccttctccttttgtacatgcacttgcgccgtcttgatatgatcctgccatgcatgatgcatgcgctagattattacttgatcgagctaatttaaattgtctcttttaatttcattactcagctcttcaaatataataaaaaaatatcaatcat

SEQ ID NO: 168470 - DNA, 496 bp, Zea mays
  Clone ID: MRT4577_85230C.1
ggaaggacaaacatggggggatgttttaggggtagataaacggggggggacagaacaaaggcccaaaccatacccctaaaaaaagggtaagggggtccctcaaaaatgggccaaggggcccgagcatcacaaggtccttaaaaagactttttcccttttgttaaaaactacccaggggggaaagcaaaaagagggtccccaactgctgtttttagggggggctaggaacccttcctccggtctggggaaaaatggggttaattttgtggccgtcctccatttccaactaaaaaggggtttgttccccggaaaacctggggccataaaacaggaaagcaaggggatttatgtccacaaactggggggcccaaaaggggttaataaatttttttagggggggggacctttttatgcaaaaaaacacttattggcatcctgtcccttgaccttaagggggaggggggcgccgccctccgcgggcttcttaacccccccc

SEQ ID NO: 168471 - DNA, 156 bp, Zea mays
  Clone ID: MRT4577_85231C.1
gatcgataaggttctagatctgtagctttgttgtacgccatatgacgaggggacggggcaagattctctaggcagatttggttttagatgacgtaccaaggaacttctatatatgtggtcaaaggcttcatcgctttgtcataatattgtaagtct

SEQ ID NO: 168472 - DNA, 267 bp, Zea mays
  Clone ID: MRT4577_85232C.1
aagcatgctatatcgctgcaggcgtgtaccaaggggaacagtgctatgatcccagatacctatggccggagaccgacgaggtattcgcaggatgcggacacgccgaggcaggacgtatgcggttccttgtggagaggattaaccacctgaacgctggtgtcctgcatctacggtcccgccttcttgttgtgcgtgcccgggatgacggcgatatctctatctgctgggacataagggactgggacattggcaggctgcggttagagt

SEQ ID NO: 168473 - DNA, 218 bp, Zea mays
  Clone ID: MRT4577_85233C.1
aacacgcgtcctagacgaagcccgtcgagcacacagtcacgtgtaaagcatgcaaccactcatggcttggagctctaggagcaacgcgagggtacttattgaccttgcggcgctgctggtcagacttagcgcgctgagcagcgccgcgcacgttgatgcaagacgcgcccgtcatggaggctcggccacatccagccacgccggagcttctgaaacct

SEQ ID NO: 168474 - DNA, 109 bp, Zea mays
  Clone ID: MRT4577_85234C.1
gtcccttggagacgatgtgtggtgtaactaaatctgctgaatgtagcacaacagtgcctactgtgacacggcaaaaagaggtagcatcgagttcagaggaccaaagaga

SEQ ID NO: 168475 - DNA, 539 bp, Zea mays
  Clone ID: MRT4577_85235C.1
gccggccggtccgggcctgtcgctcgctctccctgtctccctgcacgccgacccgcagacgccgccggtcgccatgggtttcctcgaggtgctctaccgtgtaggagatgcgtccgcaacgccgtactacgaatacctgtcgtacctcgccgagactcgttctcgctggacgagtgagcggtggactaccgagctcacaagatctgacatatgacaacctcgaggaaaaggaacgaagacatattctgcccgttggagcagaggacagctgtaggaatgatactatttggtcaccacgttgctgcgggatgaccgtaccattgtggcgctgcaataaacagatggaaacttgcgctgctcttgaggcctccttctcattagtctactctgtcaatgcttttgggtctgtcccgaggagcatgattgacacgtgatatctagagcatgcaaatactgcaccatctctggatgattcctctctgggtgaccgatagcgaagtagtaccgtgagggaaaaaaaaaaaaaaaaaaggccccta

SEQ ID NO: 168476 - DNA, 1008 bp, Zea mays
  Clone ID: MRT4577_85236C.1
acgttcatctcatctgcccgtccctccacgggcccgcgccgcctccctccctccatccccgccgcatcgccggcggcctcagcttcgcacgctccgatggtgccgagattggtctcttgctagtgctggcggctcaacctgcagaccgcggcaccgccatggaggctccgctgacggtgcagattgtcgagttcaacaccaaggtgatgcaagaggagctgaagaagctggggctcaaggtcaaccaccatgaggccaacatcacgttcctcaagtctgagatctatgctatcgaagagtcgattgctgacctgacaattaaacgtggaaagaaggttgtagcttcaagtaatggtacatcagttcaagaagctgaacagcgtacaattgaaagcatatgtaatcaggacaagacagcagcttcgcttatatgccagctcaagaaacgtcattccacacaaatatcaacaatgccaatgatgaaagatatccttggtgttgtggctaccttaggaaaaacaaatgatgataatctaagcagcctactctcagagtacttgggaatagacaatatgcttggtctcgtttgcaagacttatgatggcataaagagtcttgaaacatatggcacagaaggcaacattgataagaaaagtggtattcatggactgggtggctcaattggaaagattctgcatgggaggtttaccgtgttttgtcttgaaaacataaggccattttctggagaagttgtgattgatgatccacaaagatatcttatgctgcgtaaaccaaggttgcctaacggggagtctcctcctggttttcttggtttcgcagtaaatatgatacttatggaccaggcatacttgagttgtctcacaccccatggccatggtcttagggagactttgttttacagtttgttttctcatttacaagtttataagactacagctgatctacggcgtgctattcccttcataaatgatggtgcggtttctctag

SEQ ID NO: 168477 - DNA, 523 bp, Zea mays
  Clone ID: MRT4577_85237C.1
ctccacttcctgtcttatacgtactacggagctagcgcccaatggatatgaacccttacatgctaaagactgcctgtccttttctgttcttatgcttactgcctctagcggtgaagagcctaaccccaaagttgccctatataatacctggctgctatcaaaaaactactatcactactgtacgaagcagagtatacttctgccaagtcaggcataataaacatccgaactatgatgaactatcaatcttacacacttcccagaaagacacaacgtcacacctttgtactaccctatgatatatgcatgatctaaccaaaactactttggtacagaacacttccttactattgctttgatcctttacaatgctaaaaactacaacacatccaagacaattttactgctgcttatccatatttacatttcaatcagtgctctgtccaaaactactcttttgctgcatggtaaactaacatgatatgcacatgcactgactacacttattatatgatacctaaag

SEQ ID NO: 168478 - DNA, 232 bp, Zea mays
  Clone ID: MRT4577_85238C.1
acccacattcatctttttgcagcatcatgcaattttcaccaggtcccctcctaatcgaccttgccaacacctacccaccttccatacctaatggcaccctccctgtagaatggcactaaccccggagggtgtcattattccccgcagctgtaccgctacccttcgacaggacctatccacttgtcatttccctatctccccttcctttctctccacttccttcctttttccc

SEQ ID NO: 168479 - DNA, 631 bp, Zea mays
  Clone ID: MRT4577_85239C.1
ttttttttttgggaacaaaagaatatgcatctacttccttctcctatctcaacaggtttcaataacaccctacactgtttatgttgcacacacctatctagaaaagaaagaaaaaaaataagggaaagccgattagttacatgggggaccgacaaggtgctaggcaaatgatctacaaaaatgctaccgggtgcaaactttttttcaagtgacaagcagaaggttgttttcatgcccattgttatgcacggtgggtcgcagcggatcattcttccaaacaccgtcaacgataaacttaatctcatatctaccagggtacagtctcagatttaaggaaaacatgccgttttctgatctttccaactttctctgcagtgatgtttaaaactagattattatatccttagaaatgagatggcaatgaggaataagaacatatgtggattatctttcaaatatatggatatcaccatgcaagcagagagttacactagcatcaatagatttcctacaccaaatatgacttgcaaaaattgactttgtatttgttgcttggaaacagaatcaaagtatgttctggttcaaaatctgctttggtccttaaaaggacggcaagcatggattggagaac

SEQ ID NO: 168480 - DNA, 310 bp, Zea mays
  Clone ID: MRT4577_8523C.1
acgcttccttccgcggactagatatttctgaggattcagagatggcaggaactatccaatccgttatggcgcgccagatctttgacagccgcggcaaccctacagtagacgtcgacgagtattgctcagatggaacctttgcaagggcagctgctcccactggagcattaactggtgtatatgaagctctggagttgagggatggaggatctgactatcaggggaagggtctttacaacgctgtgaacaatgtgaatggtgatattggacctgttctgatcgacaaggaccctacagcacacactgagat

SEQ ID NO: 168481 - DNA, 536 bp, Zea mays
  unsure (1)..(536): unsure at all n locations
  Clone ID: MRT4577_85240C.1
nctcgggccggccggggttcactgtattccactattatatcatggacaccgaaacgcgtgcgcagaggatcccacccatacaaccgacagtacgcgaatggtcatcccataagcacactaagcagcagcatccgacgatgcaaagatagggtttaagccctactgagacgcaattaagttaacagaaattatattatatgtaatcggacgggatcggattccattccctagcgaatagcggagcggggcgagtggaggaagaagattcgcgacggcaacgcgtttagcccaccgccgcgcgggcctgcctgatctccttctcctcgccggtgtggatggatgcatgccttcacgtgggcgcggtgcagccggcagccgcatcggcatcgcgttcccgtccctcttcctacgcatgcaaggggcccaccggggattggcgtggggcggacgccgggagcatcgaggaaggcgacggggccgggactggaccggacgtcggagcatgcgcgcacgtcacccgtcccggccgggcccgc

SEQ ID NO: 168482 - DNA, 628 bp, Zea mays
  Clone ID: MRT4577_85241C.1
ggccaacacagaaataagaagttacatttccaaaaaaaaaaaaaaaaaaaaaaaaaaaaaaaaaaaaaaaaaaaataaaaaaaaaaaaaaaaaaaaaaaaaaaaaaccaaaaaaaaaaaaaaaaaaaaaaaaaagtttttacttaaaaagggcggccccttaaaaagggcaaattctaaaaatatccataaaactgaggggccgaaaaaaacatgcattttaaaggcccaaattcaccctatagaaagtcgaataaaaattaactgaccaaagtttaaaaacttcgggattgaaaaaaccttggcgttaacaaatttaaaccccttgaagaaaaaccccttttcaccaattggcttaatagcaaaaaggccaaaaccaattgcctttccaaaaatttcctcaaacctaaatggcaaatggacaccccctgtagcggcccattaaacccggcatttttggtggttaccccaaaaggtacccttaaatttggaaggtccctaacccccgctccataagattttttcccttattttttccccacgttggccggctttccccggaaactttaaaattggaggctccttttaggggtcccatttaaggttttaaggaacctataccccaaaaa

SEQ ID NO: 168483 - DNA, 467 bp, Zea mays
  unsure (1)..(467): unsure at all n locations
  Clone ID: MRT4577_85242C.1
cggtcggcagccacatcagtatctacagggaccgcggaaaaccanctgctcctccagactcataaaatgcctaacaaagctgtactaccccgttcgcactacctacatactcatctactacacctgcaacacctttctcaccgactatgttcccacactgtttgataacttcagtgccaacgatttccatcatggtaatactctcaaccttgatctctgggacactccacgtcaaaagcattacaacacactgacaccacttagctatcctggacctgatctttttcttctggctttctcactgatcactaatgccatctatcataatgtttctaaaaattggatacccgaacttaagcattatccacctcttgtaccaattattcttccaaggacaaagcttgatcttctagaccacaagcagttcttttaggaccatcctgctgctgtccctataactactgctc

SEQ ID NO: 168484 - DNA, 1412 bp, Zea mays
  Clone ID: MRT4577_85243C.1
gccggccggttcggggttctgccatcctcccccccgcgcatccaggaatcatcgcgtcgtgctcaagccacccgggaagccgtcatcgcctcacgcaccttccttcgacaaccttccataggcgcaatcacaggaatccccacggcctcgccccagatccctaaaccccgcctcgtctctcatggaaagtgcgtcctctacgctcggctctctccgcgtccgcgacagcccgctatccatggaacgtgggtcctctgccctggatcgccgcgtcggccctcgattcgcgtccgcgacagcctaatcccgcacatggattgggtacccctctgccccgaatcgtcgcccccgcccggcatcagcgtccgcgtccgcgttgtggtgtccgcagtctccatggaaggtgatcccgcgtgtggattagcattagcagatgaagaggcggaatgttcttcttgggatagcgacgatgagtaccagaaattcatccaaaacatgaaccctccaagggtcaccattgacaacacctcgtgtccaagtgctacagtgattcatgtggacagcaccacaagtatggcatactgttggagctaggttcatggagacctaacctcaagctcatagtcacgtcggcatacatatccgcaagcagaggtgatcccttcaaggactggacgcactttcgtcaggaaagcaggaagacatggtcgacataaacctcagacctgccagcggttcgtcggcttcaggtgcagccgcgcagctggagcagaaatcaggcggttgctcctgttgagacttcgacagttttggtaggagagccattggtttctttccttttcgtcaaaatggaaagtgtccaccgatgaaggagaagccaaagcacaggagcatggtgctatgttcatggagaccagtgcaaaagctgggttcaacgtcaagcccctgttccgcaagatcgctggatcccttccaggactggacgcactttcgtcaggaaagccggaagacatggtcgacataaacctcagacctgccagcggttcgtcggcttcaggtgcagccgcgcagctggagcagaaatcaggcggttgctcttgttgagacttcgacagttttgtgtttagagaagctacaacagtactgcaacatcgagttaagtactttcagagagattgtgacgaagagtgttttcgcccagacgtccagtagtgatatactgacatccattcggagggccgcccgggcaggtacagatttgtttagcaagctatcatatgctaggatataactgtttgatacccaagggacaaaatctgtggaggtaagggcatctcccatttttttgatgaaacattagcaggagctctgccatatcatataagaagagcaagctagagtatcccagtttt

SEQ ID NO: 168485 - DNA, 171 bp, Zea mays
  Clone ID: MRT4577_85244C.1
ggccaaggaagtgacccccatccgtttattttagggcatggaaagccatccccttgaaaagtccctaccacccccaaataaaaatttatgcccggttgctttgcaacacaaactgtcccccccaaggatttttgagtatgacgttggttttgcccaaaaaacattttttgt

SEQ ID NO: 168486 - DNA, 327 bp, Zea mays
  Clone ID: MRT4577_85245C.1
ggggttctctttagatctcaagaaggagttttttttcaagtcaccggacaaccacaaaggtgaggttgatattactaggagtggcaaatgcctaacctacttacacaggattgtgtagcatctgcaccttaaacgtgagtccagtgatgctacggatgatgactaagaattaactgaagaaccgaccttctgtttgtatctcgccaaacaaacatttccatacctgctctttagcgcctacaaacacttatggagactcttgacttaaaccagacaatcacaatgtttgttccatacttaacttttgaatgtttgcttgccgttttt

SEQ ID NO: 168487 - DNA, 1143 bp, Zea mays
  Clone ID: MRT4577_85246C.1
aaatccaacgtccacagaaaagaaaacacgcacgagaccaaatccaacgtccgcagaaaccacactcccgtcgaggaggaggcgtcgacttcccatagtttccactccacttcgatcctaatcctatcctccccaaacactccaccaagaaccttttcccccctccaatagtccaagttactcggaggaatccatgtgcggcggtgcaatcatcttggactacatcccggcgcggcgccgggtgtccgccgccgacttctggcctgactccgaagccgacgccgaggactccgactcgcacgcccctgaccctgagagagccccgcgcccgcgcgggaaggcgaagcgtgggcgcaagaaccagtaccgcggcatccggcagcggccgtggggcaagtgggcggcggagatccgcgaccccgtgaagggcgtgcgcgtctggctcggtacctaccccaccgccgtggccgccgcgcgcgcgtacgaccgcgctgtcaggcgcatcaggggcgccaaagccaaggtcaacttccccaacgacgcctcctcctccagcgtcaccgcgccgacggcggcatctggggtggcggcacaggccccggccgtttttctcccggcgcccaaggtagaggcgcgcgcacaggtgtccgacgaggtcaagggagctgtccgaggacctaatggcctacaagaactacgtgaacctccacggcgtcccctagatggcggccggaaatgcagcctgcgagtgccaccaccgctgcccgtcccgacgagaagcgcaggtgccggcgccagcgccagccgggctgtggagcttcgaggactactactacccgccgtcactgtcgctcttcactgaataatgaacgcggtttgccgtgcctgtgttgttatctcttttgtatctgtggctcgcgagttgaggcatgtaaacaagctttgcagttttttttttaactccggtctgtgcttctcagcagctcgctgcggtgcagaggaatctgtttcattctgttcgtgattgaaactagttttacggttacaacgcgcagatggaggatcgtcggacactcggaccattgtaacaaggcttgcataccatttggaagattttaccatactgaattggcgacacgcatc

SEQ ID NO: 168488 - DNA, 367 bp, Zea mays
  Clone ID: MRT4577_85247C.1
ggggtcaaaaagaaagggggcccatattataaggggaggggttttttttcacatgggcagggttttttttggttgaacccaacggcccgttttcacctttaccaccctgcaattgggcatgggttggataatctccccggcaaaaaaaaatattcgggtctacatcgggggaagacaacgggtggagatccccactttaagctgttactacagggccatcattttaacatagagatgaaggccccccaagtcttggcccttaatgggggcatggagatccacacctgccaactggtatcacttttttagaaacagatttcggaacctctcatttgatttaaactcccctgcaacaacggggtttttc

SEQ ID NO: 168489 - DNA, 1209 bp, Zea mays
  Clone ID: MRT4577_85248C.1
ggagaaaaaaaaaaaaaaaaaaaaatcaaaaaaaaaaaaaaaaaaaaaaaaaaaaaaatttcagaagtttttccgtccgtggtctgccggcgagagcaggaggcggccacgcaagctccacgaagggaacgaaaccgacgccgagcccgagacggcgagccgttgcttcacgacacctcgctcgcttctcttccaggcttcgacctccacttccacatggccgctcccatccacgcgcgtctcctcccgctccccttgcacccgaacccaagccccagtctccacgcgagcggcacacgacgggtgccctggcccccgcgccaccgccgccgctgcctcgcgacgccgccgtcgcggaacgggagctcctcctcgccggagattgactggtgcccggtgcctccggaccagctccccgtgaacgagtacgaggcgctcgcggcctccctgcccttctcctgggcggcggggggcctccgcgtctactgctcccgcctcgcgctcacgggcgccgccgtcgcgctcttcgtcgggctcccggtcgccgccttcgggggccgcggcggggccggcggcgacgctctgcacctcgcgctcggcgccacggggtccgggatcctcgccgtcacgctcgctgtcgtgcggatgtacctcgggtgggcctacgtcggcaaccgcctgctcagcgccacagtggagtatgaggaaacgggatggtatgatggtcagatatgggttaaaactccagaagttttagctcgtgatcggcttctaggctcattttctgtcaagcctgtgctaaacagggtgaagttcaccttggtgggtctggcaggctccctgatcctttgcattcttctgtacgtgaacacggaaaccccaaaggaaccttatggaaataccggtggaaggtctatcccgggagtgtacagcgacgctgctgcaaggtcgtttgagcccgatgcattctgtggagaacctgatttgtcgtagcatcgtaaagcgtggagcatggaaggtttgtagatggcggtatattggtctcacagggtatatacgggggtttctgtacggggtttttgatccatcaaactagggtaatgtaaatatttggccacacccacactagtatcgatattttagacgcaagcctcttatgaaaatttatcctgatgggccacggtgaagtgaaagggtaaactgattgct

SEQ ID NO: 168490 - DNA, 261 bp, Zea mays
  Clone ID: MRT4577_85249C.1
tttttcccacaaatgaacccagtttttttgttttgggcgggattcaagggtttccataccccggaaaaaagtttccccaattaataatggggatccaaaaggggggtaaatcacttttgagagctgccaaagttttttctggacatcgtcggggccccccaaagggtactgggccactttttgttttaaagaattggttacgcagatacctgcccaaaaaggcttttacaaatttctggcggtttttttttgaaaactacc

SEQ ID NO: 168491 - DNA, 673 bp, Zea mays
  Clone ID: MRT4577_8524C.1
aggccggccgggccgggattacagctacacctccactccacggcacgcaaggagagaagagggtgagcagcaggtacctcacggttgcgtcctcggatctgtgatggaagaaagcaagaccggccccggcggactgacggcccgtggcaaggggaaggcgccggccccgccgccgcctccgccgagccgtgaggaggagaacggcggtgggcaccgtcgcgggcagaggaggaaagtctggccgcggggccgtcgcgcggtcgtagctctcgtggcgatggtcgcggcggccgtgtaccttctactcgctgacgccgtcgcggagccgccgccgggcgcctgggtggcctaccttctctggatcgtcgggctgattatgcttttttctgttatgaagtgagattgatggtcggtgctggttggtgaggggactgagggccacgggatcgtttctttcagcctttctttttcttattatgtcttttccttttccttttgaggtgtaaagataactggcgtttatattcctcctggtctccagccctttttgtacatgcacttgcgccatcttgatatgatcctgccatgcatgcgctagattattacttgatcgagctaatttaaattgtctctttaaattccaaaaaaaaataaaaaaaagggccctaggggc

SEQ ID NO: 168492 - DNA, 682 bp, Zea mays
  Clone ID: MRT4577_85250C.1
cctctgttatccattccgccactgttcactcccgagccactccgcagccctgctccaatggcgctgtgccggacggcgcccgccaactcctcctgcttccacccccgcgctgtcgccagctcgccctcctctctcagcgtgggccccaaggtcttcgtcgggttgaaggcccagaccaggctcggctctctagggttttggtcgtcgtgcccgaatgtcaacgcccggttctacaccgccgtcaaccggagggtctctctagggttgtcaaacaagagggctaccagggcacgtatttccatgatgcctgtcggcaccccacgggtaccgtacagaacacctggtgaaggaacctggcagtggcttgacatatggaatgctttatatcgtgaacggattatcttcattggggacactattgatgaagaattcagtaaccaagtactggcaagcatgctgtatcttgacagtgttgatgacacaaagaagattcttctatacatcaatggtccaggaggagatcttacaccatgcatggcgttatatgataccatgctaagcctaaagagtccaattggtactcattgcctgggctttgcattcaacttggcaggattcattcttgcagctggtcaaaagggttcacgtactggtatgcctctttgccgtgtttcacttcagt

SEQ ID NO: 168493 - DNA, 116 bp, Zea mays
  unsure (1)..(116): unsure at all n locations
  Clone ID: MRT4577_85251C.1
accacgcgtccgcgaggaaaatggactactacatgnaccataggattacacgcccaaggctcaggcagccggggcgggtgaatcaaacatggccacggacatgctcaagaagaacc

SEQ ID NO: 168494 - DNA, 396 bp, Zea mays
  unsure (1)..(396): unsure at all n locations
  Clone ID: MRT4577_85252C.1
gcgtccgcttttcctttgttgtaagatcttcacagcttcaattgaaatgtaatctaaatgaagatagttaagattcttcctgtgaatcaacaaatttagcatgttgtacccctgcttgcaaacttgcaagcctgcttctgcccagtcaagctcagtagtttggaagaacttagttgcttgggggggggggaacanatgcttcttcttctgggccttgggaggcctatgatgtagctcattgagcacataacacttcaatagcttctgataactcacacgaactttcacaggataagctggagggcaatgttccttgaaccactcagatacaagaggaatatgctttgnacgacgtgtcctaccagattttatgttaaaaggttttggagcaaaaag

SEQ ID NO: 168495 - DNA, 459 bp, Zea mays
  Clone ID: MRT4577_85253C.1
ggcggtgaaaaaacggggggcttttttaaaaaatacacccaaaccccccttcgggggggggggggggccggaaacattaagcaaaaccgagacccaaagttgaaggggaaaaaagggggacccggccccacttccccccccgggccagacgacgcccacttttttttgcccctgttacttgcaggccgcaccgggggggtcacccgaaaaccactggttttgtttccacacactttcccccacaccaggatggggaaaaaacccaaatttcgcgttggtctgaaaaaaaaacccctgccctgtgggggcgccccccctgggccaatgtcttccccacccgctgttccccccccttatgggccccccgggggaccggctaaattggtgggcttttttgggcaccttagagggggggttgggctttttggggtttttaagggccgggttgtgcgccccggg

SEQ ID NO: 168496 - DNA, 207 bp, Zea mays
  Clone ID: MRT4577_85254C.1
ctctgggcagcgtgcgcacgtagggtacctagctcgctctgctagcctaccatagctgatcacaaccggtgcgcgactggacgaagcgggagctactgcgacctccagcgcggaggaggcatgcactgcgaggcgcagcagcagcagaagcatggcgccatgatgactgcgctcgatgccgctactgccgcgaccttcggcgggacg

SEQ ID NO: 168497 - DNA, 229 bp, Zea mays
  Clone ID: MRT4577_85255C.1
tttttaaaaaatacggcctccatcatatctttaatttacttcacaaacttatattcttataccttcatcatccattttttgagaatttatacaaaaattttatttctcaacctctattaaacaccataactcaatttctccatttatcccttaaacaactttattacttcatttattaacaacctatttatcatatttaacaactcttcttcaattcaatcctttatta

SEQ ID NO: 168498 - DNA, 413 bp, Zea mays
  Clone ID: MRT4577_85256C.1
cggacgcgtgggcggacgcgtgggttttttttttttttttttttttttttttaccctagagtagaaataacgagtgcatgtagtaaattgtcatattgcatcagttgataagttggtatctccggtgcaacttgcttgagtagttgagttgttgccaacactcaacactccacttgaaccacatattcttaaacattactagaacatcgaagagacacactacgcttacacaccgtcgtggaagaataattgaatagccccaataccacagtgatcgtgatctataaaggacaacaacatgccgttcaaggccccatttaatattaaaaggttttttaagtttaactactaatggtttttcctaagtttttttcaacaaccattgcttttgccggttttttttttgggatttt

SEQ ID NO: 168499 - DNA, 529 bp, Zea mays
  Clone ID: MRT4577_85257C.1
ggcccccccaaaacaaaacaggggggccttccggggttacccaagaaaaaacattttcaaaactggcccgggccacataactttttccaaaaaaaaaaaaaaaaaaaaaaaaaaaaaagtaaaaaaaaaagccccatggggggatcaacccaagcagttttcccccctcgcaaaaaaggggaatttcaactcaaaaaacccagggcccccccccaccaaacaaaggggaaacctggccaagggaagggggggtaaagcagcaaaccccttggttatgctcagggtcactcccccaaacattttttttggttaacccccccgggaacaaaagccctgggggggaggggccttgacccaaagccccctccctgccaagggcccaaaaaaaagaaaagctaatagggaaccctggcctcccccccaaaatttaagccccgccttccccctaagggaaaccccaaattcttccggttaaaaaaaggggccccgcccaaaaaacaacccctccccccccaagagtaaagcattt

SEQ ID NO: 168500 - DNA, 263 bp, Zea mays
  Clone ID: MRT4577_85258C.1
cacaactgcatgtatactttaacgtgtgtcagtggaagggttctagcagggtttctcttcccttccgccgaaaatcatcgaggatctattcagggtggaactaactcacatcgaggtttgctcgagctcgctcagcacatagctgaacaaggtccggacgatcgctgttatctgcgtacactggtccaaattatttgcagttgtggtagcgaacaggaaatgtataatttaatcccaactgcatgtatactttaacatgtgtc

SEQ ID NO: 168501 - DNA, 426 bp, Zea mays
  Clone ID: MRT4577_85259C.1
atttatgataaatgataagatcgttttgttaattagaacatggagcgctaacccaagacaatagtgctaccataaggatggaatgagacgcccttggccaattaattaggaaagctattgtgagattaccttacccaaaaggggaagcagggaatgcattgctatagagtatagagaggttctcgggttgatcatgctacgatggctgtttggacgaggaattcctatactcccttctttctgaaaccgtagcaggttttctaaaactagtggaactttggaaaggcctcgtagtgctatcctaccatgtctacttggtagaggtttatgggattcatgaccttttagatgttggtattacgtcttgtgtaattatataccaatctttactgattttaaaatcttatattgagatttgcttaaatc

SEQ ID NO: 168502 - DNA, 469 bp, Zea mays
  Clone ID: MRT4577_8525C.1
ccggccgggacagaacagcgccacataggagcgacgtacgatgaatacatagtactacactgaactcagtattctcagtgcattaaagattacccgcgccagcctgtctctcagggactgatcccggtacaagctggctccgatggtgatgacggttacgaacacggggacgttcctcaaggagtacgtggagggataccctcgcgaggagcacaaggagctgctccatgccgcctgaggtgcccctccgtctgacgggcgccgagccgaccggatgcgtactcggcaggaacctctacctgtcctgcgagacctacatgcggcccaatatgtcacagcccgctgcggaagatctactacgaccgccttcgtcccgggcgacaccatcaagggctacggcgttgcgcgcgttatcgactgctccgacccactcctgccaccctgggaccccgtgtgggtcataaccgac

SEQ ID NO: 168503 - DNA, 169 bp, Zea mays
  Clone ID: MRT4577_85260C.1
caatcgcttatctccatctttacaacaatccaactatatattcaactcttctactttctaacatatatcatctccctaatattataactactaaaaatcatcctcaatgccaacctattcatccttatactatacattatcatctttatcacttctatcataacatcta

SEQ ID NO: 168504 - DNA, 320 bp, Zea mays
  unsure (1)..(320): unsure at all n locations
  Clone ID: MRT4577_85261C.1
aatagaaacccagcgccgcagacgggacgagaaggaacgctcacaagcgagagcccggaagcccccgcaaccaagcgcangaaaggaccanngcagcccagcagaccaacccagcccaaggaagcacacgcgncgnggacacgagcaangagggagcccgacaccaacaggggacagcgagacccggagcgaaggccacacagcangcaaaggaagcacggncagacccccaaccnggaaaagaacaccngggcaaaggagaaggacggccagcacagaagagaaccccccaggcaagggcacccaccaccaaagcagga

SEQ ID NO: 168505 - DNA, 558 bp, Zea mays
  Clone ID: MRT4577_85262C.1
gtctttgttttctcccggcatcgtcccctcttccccgtctcgcggtcgccgcccacgggcttcgattgatcttcttccggtgctggtggcaggtggacggatcgtgtccttgcttggccgcccacagcagcaatggacgacggggacctggacttctccaacccggacacgtacctgtgcccggcgctcggcactgacccgcccagcagctgctccatggacagctacttcgacgagatcctcaaggacacggagcaccacgcctgcacgcacacccacacctgcaacccgccggtgcacgacctatcgcacacccacacctgcgtccacgtccacaccaagatcgtcgcggcctcgcccggcgacgacactgcccaggttaccagttcctgtgatttcagatgcaacgatcagatgtactgcagccctggaatgcagggcgctgttagcggccaggtgttgggacaaggtgcctgtgaagtcttgagtatccaatgcgttggaagcaccaggtctgcgttcactaagctacctgtctgcggggggatggatgcagta

SEQ ID NO: 168506 - DNA, 368 bp, Zea mays
  unsure (1)..(368): unsure at all n locations
  Clone ID: MRT4577_85263C.1
gggccgctcccgggcttgctgcgcttctaatggtcggccgggcagccgaggcgagggggctcacttcagctcgctcctcgctctgccgccccgcccgtcgcggcgcgcgagggggtgggcataccatgggcggcgtccgcggccacagcagcgccgccggcgtctccgaggcggcggcggcttgggtgggggggggggcggatctccccttgcgcgtggactgggcgggcgcggcggcgcaatgcgcgtccctgtgggcgcacgcgcgggcgctgctggtcgtgccggcggngcggctcctggtggccctgtcgctggctatgacggtgatggtgcttgccgngaagcttttcttctgcgccgtgtgc

SEQ ID NO: 168507 - DNA, 671 bp, Zea mays
  unsure (1)..(671): unsure at all n locations
  Clone ID: MRT4577_85264C.1
cttcgtctcaactccctccatccaatccaccccctctcccccttctcgtcgtcgccgccgccgccgcccacccggggcttggactgtcctttccccgttctgctggactcctggcggtgtttatggtctctcctttccagagacatgctgtataaactgctagcttttctatgtaggactgcatctggttcaaactgctatactgctatgttagtatgtcactgagtttgtcgcccatgatgcttctatggtgtctgaggcgattcaagtttgttagctctaaagctgacaggacatcctcgtttactttgcctagtttccagacggtctatgatcaagtgcagaactgaaccggatcgtaaggagttgaacatgaacttgttaaaatctggcatatgtagatgcatggatcgcgaaatccctcgtgtaggtgcagtgtccctcttctgctatgtgcgagatctgagggaacctggattcatttattgtttgaatgtttcactgtttctgtcgcaagtaaataatttattgcatgggaagtttataactctagacctggtaaaattctgagtagcagcaattctacatcttaccctgtgatgttaccgaccagacactgcaagtttggggcagccgtgcagggcgttacttttgtttgngggtgtttgaaa

SEQ ID NO: 168508 - DNA, 1486 bp, Zea mays
  Clone ID: MRT4577_85265C.1
cctcgagccggcgggactgttcgttacatcccattggtgagtgggtgggtgggtgcctgggtggtgaggactggactcgttcggctcgggattcccctccgccgcctacgcgcccaacacgtccccgtccagattcatccacccttccccttcgtctccctccctccatccaatccaccccctctcccccttctcgtcgtcgccgccgccgccgcccatccggggcttggactgtcctttccccgttctgctggtagcagcaatggacgacggggacctggatttctccaacccggacacgtacctgtgtccggccctcggcaccgacccgcccagcagctgctccatggacagctacttcgacgagatcctcaaggacacggagcacctcgcctgcacgcacacccacacctgcaacccgccggtgcacgacctctcgcacacccacacctgcgtccacgtccataccaagatcgtcgcggcctcgccgggcgacgccgagtcgccgtccgagaacaacagcaacggcagcggcggcaacggcagcaacgccgcctctaagaagcgcccctcggggaaccgcgccgccgtcaggaagtaccgggagaagaagaaggcccacaccgcgtcgctggaggaggaggtggtccatctcagggcgctcaaccagcagctcgtgaagaagctccagagccacgccgcgctcgaggcggaggtggccaggctccgatgcctgctcgtcgacatcaggggcaggatcgagggggagattggcgcgtttccgtaccagaggccgccgccagcggccaagaacgtcgacctcgtgtccggtgttgaccagggagggttccttgccggggctgctgcccaggttaccagttcctgtgatttcagatgcaacgatcagatgtactgcagccctggaatgcagggcgctgttagcggccaggtgttgggacaaggtgcctgcgatgtctcgagtatccaatgcgttggaagcaccaggtctgcgtccactaagctacctgtctgcggggggatggatgcagtacctgctgcctgcttgccaaatgttcaaaacaagtgacggactcccggcagtgtttatggtcccttccttttcagagactgctgggacttcccgttctgcctcgaaggaacgctgtataaaccgctagcttttctatgtagggccgaatctggttcaaactgctacgtgtgtgagttcgtcgtcgccgatgatgcttctatagtgcctgaggcgattcaagtttgttagctctagagctgataggatatcctcgtttactttgcttagttctcagatgctctccgtctccgatgaagtgcagcaactgaaccggatccgaaggagttggacatgaacaggttaaaatttggcatatgtggtctaagaagacgctgagatgtttgtagcgaatctcaagttcaatgcgaaccctgttgcctatgtatattcacatcc

SEQ ID NO: 168509 - DNA, 354 bp, Zea mays
  unsure (1)..(354): unsure at all n locations
  Clone ID: MRT4577_85266C.1
gttcttcttcttttttctggtcggggtcaggaaatattttacctttacaaaanaaatggacacttaatggatgacgctcatgtgattttcatacaacttcgggggcgccgtcatgaaaaggcgtaaatgaggaatccactccgcgacaaatggcaaattttcaacatcacgaagggagaacaaaaaaaccaaatctttcacaaattcacaatatttttggcggtatacttcaacttccatgcaacacgtgtattagaacaatgccaatgcattggctccgggcctcctagactaacctgctggattcaatcttacagccttaaaagcttagcgcttacggcctcaggttatgaa

SEQ ID NO: 168510 - DNA, 858 bp, Zea mays
  Clone ID: MRT4577_85267C.1
attcccctccgccgcctacgcgcccaacacgcccccgtccagattcagttccacccttccccttcgtctccctccctccatccaatccaccccctctcccccttctcgtcgtcgccgccgccgccgcccatccggggcttggactgtcctttccccgttctgctggtagtgggtggatgcgtctttgactgcccggcgcccgcccgcaccccgcagcagcaatggacgacggggacctggatttctccaacccggacacgtacctgtgtccggccctcggcaccgacccgcccagcagctgctccatggacagctacttcgacgagatcctcaaggacacggagcacctcgcctgcacgcacacccacacctgcaacccgccggtgcacgacctctcgcacacccacacctgcgtccacgtccataccaagatcgtcgcggcctcgccgggcgacgccgagtcgccgtccgagaacaacagcaacggcaacgccgcctctaagaagcgcccgtcgggtaaccgcgccgccgtcaggaagtaccgggagaagaagaaggcccacaccgcatcgctcgaggaggaggtggtgcacctccgggcgctcaaccagcagctcatgaaaaagctccagagccacgccgcgctcgaggcggaggcggccaggctccgctgcctgctcgtcgacatcaggggcaggatcgagggggagatcggtgcgttcccgtatcagaggccgccggcggtcaagaacgtcgacctcctgtctagtgttgaccaggaaagcctccttggcagcgctgctgcccggttgccaactcctgtgattttagatgaaccatcagatgtactgcacccct

SEQ ID NO: 168511 - DNA, 503 bp, Zea mays
  unsure (1)..(503): unsure at all n locations
  Clone ID: MRT4577_85268C.1
catgcttaggtgggtggtctctcaacttgaggctctaccaactgagccgttgctcgattcccgatggttaatgaaaatttaagcagtatgtgagggagcttttgttgatggagaaatttggtggtttgctgaacaagcatgaagttgtcttgtgcatcttcctttgaagaaggcactttggttcagagctattagaatgtccagcttctctgcgagacggttggctaagatcttggcaacaagcttcgcaaaactgtggatcaagctaattggatggaaatctttaacttgatcagcatcttcactttttggaatgagagtgaggaaggctgaattaagcatccaactatccaaggattccgaactttatcacactagaaagccactagggctgccaaaacatctgacttaataataggacagcagcatattaacttatgtggtagcttttaccaaatgtcgcttgactttgnttaatttttatgttaatctatgacttttat

SEQ ID NO: 168512 - DNA, 740 bp, Zea mays
  Clone ID: MRT4577_85269C.1
tcttccgggggcgcccaacacgtccccgtccagattgatccacccttccccttcgtctccctccctccatccaatccaccccctctcccccttctcgtcgtcgccgccgccgccgcccatccggggcttggactgtcctttccccgttctgctggtagcaaatggacgacggggacctggatttctccaacccggacacgtacctgtgtccggccctcggcaccgacccgcccagcagctgctccatggacagctacttcgacgagatcctcaaggacacggagcacctcgcctgcacgcacacccacacctgcaacccgccggtgcacgacctctcgcacacccacacctgcgtccacgtccataccaagatcgtcgcggcctcgccgggcgacgccgagtcgccgtccgagaacaacagcaacggcaacgccccctctaagaagcgcccgtcggggaaccgcgccgccgtcaggaagtaccgggagaagaagaaggcccacaccgcatcgctcgaggaggaggtggtgcacctccgggcgctcaaccagcagctcatgaaaaagctccagagccacgccgcgctcgaggcggaggcggccaggctccgctgcctgctcgtcgacatcaggggcaggatcgagggggagattggtgcgttcccgtatcagaggccagcagcggtcaagaacgtcgacctcctgtctagtgttgaccaggaaagccttcttggcagcgct

SEQ ID NO: 168513 - DNA, 234 bp, Zea mays
  Clone ID: MRT4577_8526C.1
atgcaaagggaaataaatgcgtttagattttgaatttttggaaggaaccaaacccagggtgtgggtttttatattaaggtgttcaaaaaataaatttaaacacaagtgggaaagcgggagactttttattttaaaatttgtaccaaggtttaaaggttattttttaaaaatttttgggtggaaaaggacccaaaaaggatttttcccccttaaagaaaattagtttgggggggg

SEQ ID NO: 168514 - DNA, 495 bp, Zea mays
  Clone ID: MRT4577_85270C.1
actcgataatggcgccctcatagcggcatgtgttgcctacaaataatcacatatattgatcgagatccatcttaaaggagaaaaaaaaaaaaaaaagaagcggaaactaaaaaaaagctaaaaaagcacgaaccgatgaattaaaggagagaacatgatacccctgtgagaaaggtgtacgccctgcccacgatcacactgaagctgggaggcaaaggctacaagctgtccggagaggactacacgctcagggggtcgcaggccgggaagaccctctgcctgagcggcttcatgggcatggacatcccgccacccagcgggccactctggatcctgggcgaaatcttcatcggccgctactacactgtgtttgaccgagacaacaaccggctgggcttcgccgaggccgcccgcctctagttcccaagccgtcagcgtgccagcacagaaacacaggacagacccggaggatgaggcccccggccccccagcgcc

SEQ ID NO: 168515 - DNA, 1924 bp, Zea mays
  Clone ID: MRT4577_85271C.1
aaaaaaaaaaaaaaaaaaaggggcctacgcgcccaacacgtccccgtccagattcatccacccttccccttcgtctccctccctccatccaatccaccccctctcccccttctcgtcgtcgccgccgccgccgcccatccggggcttggactgtcctttccccgttctgctggtaggtaaggaattcctcttctggctccgacggattctctcgctccgtttgtctctggtacaattcgttcgctgctgcgagccctcgaatccgtttgtatccggagcagcggcggagtagtaatactagtacaattccttagtcgtgttcccaagtgggtggatgcgtctttgactgcccggcgcccgcccgcaccccgcagcagcaatggacgacggggacctggatttctccaacccggacacgtacctgtgtccggccctcggcaccgacccgcccagcagctgctccatggacagctacttcgacgagatcctcaaggacacggagcacctcgcctgcacgcacacccacacctgcaacccgccggtgcacgacctctcgcacacccacacctgcgtccacgtccataccaagatcgtcgcggcctcgccgggcgacgccgagtcgccgtccgagaacaacagcaacggcaacgccgcctctaagaagcgcccgtcggggaaccgcgccgccgtcaggaagtaccgggagaagaagaaggcccacaccgcatcgctcgaggaggaggtggtgcacctccgggcgctcaaccagcagctcatgaaaaagctccagagccacgccgcgctcgaggcggaggcggccaggctccgctgcctgctcgtcgacatcaggggcaggatcgagggggagattggtgcgttcccgtatcagaggccgccggcggtcaagaacgtcgacctcctgtctagtgttgaccaggaaagcctccttggcagcgctgctgcccaggttgccaactcctgtgattttagatgcaaccatcagatgtactgcaaccctgggatgcagggcgctatcagcggtcaggtgttgggacaaggtgcctgtgatgtcgccagtatgcaatgcattggaagcaccaagtctggatccactaagctacctgtttgtgggggtctggatacactacctgctgtctgcttaccaaatgttgaaaagaagtgatggactcctggcggtgtttatggtctctcctttccagagacatgctgtataaactgctagcttttctatgtaggactgcatctggttcaaactgctatactgctatgttagtatgtcactgagtttgtcgcccatgatgcttctatggtgtctgaggcgattcaagtttgttagctctaaagctgacaggacatcctcgtttactttgcctagtttccagacggtctatgatcaagtgcagaactgaaccggatcgtaaggagttgaacatgaacttgttaaaatctggcatatgtagatgcatggatcgcgaaatcccctcgtgtaggtgcagtgtccctcttctgctatgtgcgagatctgagggaacctggattcatttattgtttgaatgtttcactgtttctgtcgcaagtaaataatttattgcatgggaagtttataactctagacctggtaaaattctgagtagcagcaattctacatcttaccctgtgatgttaccgaccagacactgcaagtttggggcagccgtgcagggcgttacttttgtttgggggtgtttgaaaacatctcattctgtttggtgttgactgacttgtgggcattattattattaagggctagtttgggaaccctgttgcctatgtaaaaatatctactaaccatggatatggatcgctattacacaaacatatacgggtcgcacaacgactggtaacctgctagccccgtaattaa

SEQ ID NO: 168516 - DNA, 206 bp, Zea mays
  Clone ID: MRT4577_85272C.1
agaaaacctttaacattgtttttgctaaacttttgcaactactaaaaacccaaaccggaaccttgaaaaaaccaactccttcggttatgcgagggggaacattataatcagttacataggcccctgcccacattggcccaagatcgacctccgggccccgtcagccttttaacttttgtcattccctggtggccgcacaggccctt

SEQ ID NO: 168517 - DNA, 1697 bp, Zea mays
  unsure (1)..(1697): unsure at all n locations
  Clone ID: MRT4577_85273C.1
tacctcgaggccggccgggggtaccgccggacagggccaacacgtcccaaaaaaaaaacatccacccttcccctttctcttcgtctccgtccgctcccggcatcgtcccctcttccccgtctcgcggtcgccgcccacgggcttcgattgatcttcttccggtgctggtggcaggtggacggatcgtgtccttgcttggccgcccacagcagcaatggacgacggggacctggacttctccaacccggacacgtacctgtgcccggcgctcggcactgacccgcccagcagctgctccatggacagctacttcgacgagatcctcaaggacacggagcaccacgcctgcacgcacacccacacctgcaacccgccggtgcacgacctatcgcacacccacacctgcgtccacgtccacaccaagatcgtcgcggcctcgcccggcgacgacactgccgactcgccgtccgagaacaacaccaacggcagcggcggcaacggcagcaacgccgcctccaagaagcgcccctcggggaaccgcgccgccgtcaggaagtaccgggagaagaagaaggcccacaccgcgtcgctggaggaggaggtggtccatctcagggcgctcaaccagcagctcgtgaagaagctccagagccacgccgcgctcgaggcggaggtggccaggctccgctgcctgctcgtcgacatcaggggcaggatcgagggggagattggcgcgtttccgtaccagaggccgccgccagcggccaagaacgtcgacctcgtgtccggtgttgaccaaggagggttccttgccggggctgctgcccaggttaccagttcctgtgatttcagatgcaacgatcaaatgtactgcagccctggaatgcagggcgctgttggcggccaggtgttgggacaaggtgcctgtgatgtctcgagtatccaatgcgttggaagcaccaggtctgcgtccactaagctacctgtctgcggggggatggatgcagtacctgctgcctgcttgccaaatgttcaaaacaagtgacgttactggactgctgtgagtcgttggtagaatttgttaatgaatgttcgtactgctcagatcttgcaatggaacttattcaagaaaaaaaaacaggatatgatgtcttattcttcaaatagtcctaaggactcccggcagtgtttatggtcccttccttttcagagactgctgggacttcccgttctgcctcgaaggaacgctgtataaaccgctagcttttctatgtagggccgaatctggttcaaactgctacgtgtgtgagttcgtcgtcgccgatgatgcttctatagtgcctgaggcgattcaagtttgttagctctagagctgataggatatcctcgtttactttgcttagttctcagatgctctccgtctccgatgaagtgcagcaactgaaccggatccgaaggagttggacatgaacaggttaaaatttggcatatgtggtctaagaagacgctgagatgtttgtagcgaatctcaagttcaatgcgaaccctgttgcctatgtnaaaaaaaaaaaaaaaaaaaaaaaaaaaaaaagaagaagaaaaaaaaaaaaaaaaaataaaaaaaaaaaaaaaaaaaaaaaaaaaaaaaaaaaagaaaaaaaaaaaaaaaaaaaaaatagaatgggggcccccccccc

SEQ ID NO: 168518 - DNA, 283 bp, Zea mays
  unsure (1)..(283): unsure at all n locations
  Clone ID: MRT4577_85274C.1
ccgcaggaccggtccggagttctttggttttacccacgcgnccccttcnaccctgcgacttctccaggccccgttcttttctgtttttcaagagccagccggtgggtggccggacatccgcacggngagcgccacggccactgttcgccgagcgcgcctcggctgctgacgccgccaacagggatgccgagctcaaggccttgcgcgagaacagggctctcaagataattaccgggcttcagaacttacacaggtgccttctatcaaaggttggcacagaagc

SEQ ID NO: 168519 - DNA, 491 bp, Zea mays
  Clone ID: MRT4577_85275C.1
gaaccaaactcctcctaacgctttttttaacatccattcaggtacaacgacgagttcactacgacatacaggtgccatcaactcaacacaaacaaattttcaaatcagaaaagaagaaacacagataacaggtactcaggtagcacttccgtatacaagcaagcaaacattgggtcctccacttcaagccgcggtcacctcgtccacgagccgctggaactcggccatggccgcgggcggcagccccagcaggacgcggacgccgccgccgccgcccccctcctccccgcacgggaggaagagcgccacctccttctcggggagcgccgcggggccgcacgccgcgggcgggccccacccgaagtcggccgcgcggaacggcagccgcgaccacgccgtgatgagcagcgtcgacgccagcgacggccgcgcgcgcgtcgcctcgaagtagtccaccgcggaccgcatgtaggcgtccgtcacggcccccg

SEQ ID NO: 168520 - DNA, 721 bp, Zea mays
  Clone ID: MRT4577_85276C.1
caactctacccctagggtcttttgccagtttagtcggctatccatacttgcctcaaaactactatgtaccaccagcagccttccagcaagcgtattcaagtaatggacctttccatcaatctggtggtgctgctgtgcctggatctgctatgaaatattcgatgccacagtacaagagtggccttcctgtcacaagcccaccacagcattcatcagcagtctctggttatggaggctttggaagctcaagtaatataccgaattttggccaaaaccagagtgcctcccctgccacgactatggggattgatgaagctttaagttcacagttcaaagaggccaatcactatatggccctacagcagagcgacaactcagcgatgtggcttcatggagctgctggttcaagagctgtttcagctgttccacctggtaacttttacggcttccagggccagagcgcgcagggtggcttccgcgaggtgcaacagccctctcagtatggtggccttgggcacccgagcttctaccagtcgcagaatggtatgcagcaggagcacccgcagaaccctgcggagggaagcctgaacagctcccagactgccccgtctcagccatcacaccagatgtggcagcacagctactaagatgtaggtctgcttctgtggaagaagcaccttggcatgcgccgtgaagcaaacagaccagctgagctgccttc

SEQ ID NO: 168521 - DNA, 293 bp, Zea mays
  Clone ID: MRT4577_85277C.1
gagacgacccacgcgtgcggtcagccgctagtaccacgtcgtcgtcgcgtttgcagctttttttatctgagttagccggcggatccgatcgttgcgctttcagtgtgtgtgcctgtgtgtccgtagagatggccacagcttacgctcccatggcaagccaggtgatgaagaccactctcggaatgcactccaggccgatgggcctgtcaagcgctgcttctctcacgaggcggcccggccggttcaccgtcaaggccatccagcccgagagaggcaactgtacctaggttggt

SEQ ID NO: 168522 - DNA, 368 bp, Zea mays
  Clone ID: MRT4577_85278C.1
aggacccggggcgttcgcatggtctacaacttctacatcatttacacgccttacacggcgattggacctgggttgcgtgcgcgacggctccaacatggtgctttggaaggggagcgagggcacaaccaacgctggtatatcgctccctggcgaatgtgctggtatgcgggtgcactggtcctcaccttgatactggatctttgaacgcatattcacctgtggagcagcaactactgccgtgtcggtagagtaaaggtgtcggtgatcgatcgtatcgatctttgttgatgggtgctcctcctctgcgcgtttgcgctgacgtccaggtcgttgtgaggaagtcagctatgttcgagtgagacgggcat

SEQ ID NO: 168523 - DNA, 687 bp, Zea mays
  Clone ID: MRT4577_85279C.1
ttgggactctcgaggccggccgggacatcgtcaccgtcacagaaatcagtcaagatgcagattttcgtgaagaccctgacgggcaagaccatcaccctcgaggtcgagtcttcggacaccatcgacaatgtcaagtccaagatccaggacaaggagggcatccccccggatcagcagcgattgatcttcgccggcaagcagctcgaggatggccgaaccctctccgactacaacatccagaaggagtctaccctccacctggtcctccgtctccgtggtggtatcattgagccttcgctcaaggctcttgcctccaagttcaactgcgacaagatgatctgccgcaagtgctacgcccgtctccctccccgtgccaccaactgccgtaagcgcaagtgtggtcacaccaaccagctccgacctaagaagaagctcaaataaacgattacttcatggatgtggcgtctgggatttggcatttgggggtcgatggcgaggacagaggagagctttcttttgttcacacgaggctggttttttattaaaatagcatgtgcagctccggcaatacattctagatgatgcccaaaaaacgataaaaaaaacccggagcctgtcccggccagacccctcaaaagaaataaacagcattcaagcttgaaaaaaaaaaaaaaaaaacccgcggcc

SEQ ID NO: 168524 - DNA, 348 bp, Zea mays
  Clone ID: MRT4577_8527C.1
tttttttttttttttttttttttttttttttttttttttttttttttttttttttttttttttattgggattaactggctttttcagggttcgaacagggccagaaattggggcccggagggcccgtttccttgcaaatcccaaacctcactggcggaagcaaaaactatgtggcaaccttcagttttttgaggtcataagggctgtaacaaaccacccaaattttttttcaccacagacaaggtttaatacatcctaacacaaaacccgggtttcccgaagcctttagtggtctcccttggggaagtcggggttgtcaaccaaaaccactttgcaatcatattgttc

SEQ ID NO: 168525 - DNA, 336 bp, Zea mays
  Clone ID: MRT4577_85280C.1
ggaggcagagactacatgaataaagacaagcttaaaaggacaaatgccttccttcttgcacgagctctgaacggagatgataatatatcggtggtacatctccacaaccttgacgacgacatataagacgatgcacaacggggagatcacttatttggcggctaggtgcttgatggccttgatcaggttttggaaggtattccagatgacatgaatcccaaagatcatagtgttcttgcctatggtgatgtcaatgtactcactgacatgctggacaacattgcgattgttgagcccatacacaaagatgaatcttatctggctgtccagaataaa

SEQ ID NO: 168526 - DNA, 1701 bp, Zea mays
  Clone ID: MRT4577_85281C.1
acatctccacgaccgcgcggagagccgggtggagtacccggagcccatctacgtgtcccgggacgaggagtctcgaggagggcgaagaacgagatgctgtcggagggcgcgctcaaggcgctgctccataacttcatgccgctgctggtgagctccgtgtcgccggacatccgcgacttcgccggcttccacgacgtggacaacctcttcaaggagggcctccgcctgaagcaggccctgcaggaccagctgttccagaagatccccttcgtgcgcaagatccaggagaacagcgagggcctcctctttctttttccgcccttccgtgtggcagaggacaagtttgcttggctgcgggacgacgagttcgcgaggcaggcgctggctggcatcaaccccgtcaacatcgaacgtcttcaggcgttcccgccgatgagcaagctggacccggccgtgtacggcccgccggagtcggccatcacggaggagcacatcatcgggcagctcgacggcatgtcggtgcagcaggcgctgcaggacgacaggctgtacatgctggactaccacgacatcttcatgccgttcctggaccggatcaacgcgcaggacgggcggaaggcctacggcacgcgcacgctcttcttcctgacggccgcgggcacgctgaagcccatcgcgatcgagctgtgcctgccgccgatgaccgacgggtgcgcgcgcgccaagcgggtgttcacgccgcccgccgatgccaccagcaactggctgtggcagctcgccaaggcacacgtctgctccaatgacgccggcgtccaccagctcatcaaccactggctgaggacgcacgcggccatggagccgttcatcatcgcggcgcaccggcacctgagcacgatgcaccccatcttcaagctgctcaagcctcacatgcggtacacgctcaagatcaacgcgctggcgcggcagatcctcatcaacggcgacggcgtcatcgagtccgggttcacccctggccgctactgcatggagatgagctcgttcgcgtaccgggagctctggcggctagaccaggagggcctccctgccgatctcatcagaagaggaatggccgtggaggacccgacgcagccgcacggtctccggctgctcatcgaggactacccgtacgccaccgacgggttgctgctctggtcggccatcaggcggtggtgcgacgcctacgtggccatgtactacccgtccgacgagtccgtgcagggcgacaccgagctgcagtcgtggtacagggaggccgtgcacacggggcacgcggacaagcgcgacgcgccgtggtggccgcgcctgtcgacgcccgcggacctggcgtcgctgctgacgacgctgctgtggctcacctcggcgcagcacgcggcgctcaacttcgggcagtacccgctgggcggctacatcccgaaccggccgccgctgatgcggcggctggtgcccgccgagggcgacccggagtacgcgcacctggtggccgacccgcaccgcttcttcctgtcggcgctgcccagcctgacgcagaccaccacgttcatgaccgtcatcgacacgctgtccacgcactccgccgacgagcagtacctcggggagcggcctgatgaggcgtggacggccgacccggcggcgttgcggcgcacgcctgtagatcacactatt

SEQ ID NO: 168527 - DNA, 556 bp, Zea mays
  Clone ID: MRT4577_85282C.1
tcgcgatctagaactagtccctttttttttttttttttttttttttttttttttttttttttttttttttttttttttttttttttttttttttttttttttttttttttttttttgggaggatcaacaggggggggggctttaattggatcacattagccaattttacaaacccccatttgttcaaattaaagaaacttggggggtgaaagaagttttaattaaccgagagaaagaggggggggggaacccgggctttgcatttttattttcaactagcttggcgtccgtccgtccctagaaacgacgcacggttttatttttacaacaaacaaccaaggacgggggggaggccggaaaaatttcaaccgacgacctttgggccgggggggcccgtgggcgcggggttttcggaaccggcccacccggggggagcgtccgaggaccccccctttttgggctttccctgggacccggcgggcccgggggggggccccttggccccgacaggttcaggggcaggagcacctttttcacggggttaacggggaggggt

SEQ ID NO: 168528 - DNA, 1191 bp, Zea mays
  Clone ID: MRT4577_85283C.1
gcacgctcaagatcaacgcgctggcgcggcagatcctcatcaacggcgacggcgtcatcgagtccgggttcacccctggccgctactgcatggagatgagctcgttcgcgtaccgggagctctggcggctagaccaggagggcctccctgccgatctcatcagaaggtacacaaatcaactggaacatctatgaagttgtagtgcttcgtgcaatgcagtgcatggaaaactggaaatacgagccgcattcaggctgacatggtgttcccttgtcacagaggaatggccgtggaggacccgacgcagccgcacggtctccggctgctcatcgaggactacccgtacgccaccgacgggttgctgctctggtcggccatcaggcggtggtgcgacgcctacgtggccatgtactacccgtccgacgagtccgtgcagggcgacaccgagctgcagtcgtggtacagggaggccgtgcacacggggcacgcggacaagcgcgacgcgccgtggtggccgcgcctgtcgacgcccgcggacctggcgtcgctgctgacgacgctgctgtggctcacctcggcgcagcacgcggcgctcaacttcgggcagtacccgctgggcggctacatcccgaaccggccgccgctgatgcggcggctggtgcccgccgagggcgacccggagtacgcgcacctggtggccgacccgcaccgcttcttcctgtcggcgctgcccagcctgacgcagaccaccacgttcatgaccgtcatcgacacgctgtccacgcactccgccgacgagcagtacctcggggagcggcctgatgaggcgtggacggccgacccggcggcgttgctccatgacgatgagtttgctcgacagacttactccatggcgctgccgccatcgccaagatccgcccattccctccaagcttcagtgtagaccctcttatggtcccaaatccgcccctgacagtaagcaacctaactcgacgcgtggcaaacatgtcacggagccacacaacatcgatagatcgactaatcccaccactcagatccctcgacgcgccagtggatgcgccgctgggtatggcccccctcgcgtagctgccgtcgctgaggcccacgtccacctgcgcacagccacacaacacagtcagtccagatccaacgtaaaatacaaaagctgag

SEQ ID NO: 168529 - DNA, 108 bp, Zea mays
  Clone ID: MRT4577_85284C.1
attcggctcgaggactgggctagggagattgcgaaaccggacgaaggcagggaacagtgcgagtgatcagaagaaaacggcgaggcacaacagggagacggaactaac

SEQ ID NO: 168530 - DNA, 404 bp, Zea mays
  Clone ID: MRT4577_85285C.1
actaacgcaaattcacacttggaagcttttattacgtgaattctggtcggatgcaaatgggagtaaaactcatggacctcgaggttttggcctattggttttaaacagcttgtagaacctcctggtttcaacaaagtaactggtaaaagcccactttttttaaccatttgccaaccctggggtcaatagctttttagaatcctctttgcttttggggcgggggggcgccttgtcgggttttttggccgtgtctatgtccttttggctcaggaaactaggttggtttgttgaaaacagcagcctttcccacatcctggcggatatcctcaccttgttttttttaggaggtaccctttgaaatgggatttatgcatgcctggcattaaccattccgactgtaaagg

SEQ ID NO: 168531 - DNA, 473 bp, Zea mays
  unsure (1)..(473): unsure at all n locations
  Clone ID: MRT4577_85286C.1
cgtcccccccaanaannaannctgacttcctctcccgatgacgaggtcggggcgggcggtcgctgcatcacctccgcccctttctctctctctccccctggtatacatcgaggagagggctggcccaccgactattaatccgagcgagccttcctttggagctccggtccccccaacccgcctacgacctcaatccgggtattcctctcgaggcgaagcctgacttaccgagaagataaggcggcctaccgcgacaggggccagagctccctcaggtgccgtgtcttcttcagactcttcacagaggacgggcactgctttttttgtatgtatacacccaaggacattagtggatccaccgccccccctatgtactcctctacctccaatatgtggataggggtgtaatctagggtctggagtggggtatagatctcaggaggtgagaaatctgccgggaaactcctgagaac

SEQ ID NO: 168532 - DNA, 508 bp, Zea mays
  Clone ID: MRT4577_85287C.1
gccgagttctttatattatcacaagtctagccctccgcgaaccaccgcgaggtccacgccgcgggcgagccgtccaaatccgcgcgataagaaccaagccagccttgctgtgccgccgtttcgcccttccgctgccgcaccacctccttatataatacaccaaagagaatggtgccgctccgcttataccgccacctgatcccgcaactggcagctgcagccaggtcgccctccgcgcccaaggccgccgcctcctgcgctccccgccggatcccgccactgccggccctcgcaatggcggcctacggcaccggtgtttgcgcggacagcaagctcctcttcaggcagctgttcgagaaggagagctccacctacacctacctcctcgccgacgtcggtgaccccgagaagcccgccgtgttgattgaccctgttgacagaacagttgatagagatctcaatcttatcaaggaattaggcttgaaactcatctacgctatgaatactc

SEQ ID NO: 168533 - DNA, 211 bp, Zea mays
  unsure (1)..(211): unsure at all n locations
  Clone ID: MRT4577_85288C.1
tggcttgggacttttggcttgatttatttgcttgtttatgtgcttgactataggtcattttagcgacggggccggcgtcntaataaacggtcgggcggtagaaataagtcaaaaatacgcaatatacgttaccgctacatcgatttccaaacccatatattactatcacactcgccagcattaatcatacgttcccccttcgagaactaac

SEQ ID NO: 168534 - DNA, 424 bp, Zea mays
  unsure (1)..(424): unsure at all n locations
  Clone ID: MRT4577_85289C.1
gcgagcggggagnagagaccgagaagnggagcggccangaaagaccagngcgacgcgngcgagggcgcggcngccacggnggngngcngcgccgacgaggccgcgcngngcgcgcgcgggggacgcagggccacnccnccaacaagcncgcgagcaagcaccagcgccacccgcacgaggcgcncnccgccaagcncccgcgcngcgacgncngccaggagaaagcggcgnncaacnncngcgnggaggaccgggcgcncnncngccaggacngcgacgagcccaaccacgnnccgggcacgcccnccgggaaccaccagcgcnaccnggccaccggcaaccgcggnggccccgccccggcnnccgcccgcagcgacgccngcgacgcccacgacnncgaccaccacgccccgcccaaggcacc

SEQ ID NO: 168535 - DNA, 479 bp, Zea mays
  Clone ID: MRT4577_8528C.1
ggccaggaacaagattattcaagagacgtgaatgaacaacattgaggctggaaatggctattcctttaaccttttggctgactgaggagcaaaaacaaaacgggggggaatttgccttaaacacaatcccacgctaggtggtatgttccccactaccttgtgttggggtggcaactcctttaatggactgggggttgcaaaatatttagccctgttattgccagcggagagggtcctctttttgtgaactctcgaaaaaaacttggcatggagcgctctggggttgctcccacccccaaaggatacccagcccctgtcccaaacttggagtccctccacccgaaggggatggaacccctttgcccggggaagggcccaccacaaggggcccaaaatccattggaggcttccggagggaatacccaatcggctcgcatgatccctttaaggccgtctgtttggacaccagggaacacctg

SEQ ID NO: 168536 - DNA, 1458 bp, Zea mays
  Clone ID: MRT4577_85290C.1
cccacgcgtccgggacgctgactccctgcccaacaacatcaaggatttgctacacgagcacactgttgcagacgatgtcgcaggaagcaagtgcctggtggtgcgcggttgggcgctacacgtggccatcctggcccatcctgccagtgacggcttcatggcgctctgtggatggggctccactctggaggttgttgcagccggtcttcccatggctgcctggccctttttcgccgaacaatttatcaacgagcagctcatcatggacgtgcttggtattggattgtctgtcgctgtgatgaagccaattgaaaatgttttgattgccagtaacatgggtggtgctgttgtgatgatatatgctcctgttttttggtcttgcctgacaagcttcacacttggaatccatggtcagatagttggggttctatgtttgccatttctggtaattcaactgaatatcagtatagctgtccagcaaaggttcttgtgggatccaggtggtgatcagtgttgcttactgaatttgtttattcatggcttgggggacttgcagatgcaacaagctagtctgtcttttgtcacgaagacaggatggctggtgattatcctttccttgctgctactccaatgggacaagccaaaccttcggggtcttaacaaatccaagtgcattcagcgtggcttccgtcgatgctatgtacatgcttgtccaagcaggtggtctgactggcttccgtcggccgagttttggtataatagctcgttccattctgctaccggtcgatctccttttgaggacttatcccacgcgtccgctcgccatttctgtattacttcatgtgatggtccctcagctggcctaaatgcattcttgcaagacaaactggttatgaccaaactgttacagcaacatcttttgcgcgccaagcaatagatgaagtctatggatgataagcaccgcactgagtgtgaatttgctgttggagatctgaaggccgtgggtgtgctaacgtcctggtatctccgttgctgcctgccactgactctgcttggcacattcatgaacagatattggagcgacatctggtcgtcccaaccttcctcgttggcaacatgggaagacttggaagcactcaagcacacctttcctcaggctccagcttgggggcaagctggttctcatggaggagggaatgtcagtatcccttcatcagtcactggaggtcaggcagagcatgttcgaggagatgcagcagataatgaagctacaaggctcgcaggccaagcaccaaggtttataggccagaatgggctaaatagttgctaggccggcctgtgtgccggagtataatatataagccaaacttagggcagagaaggggatgaaatgaacctgactctgaattctactatctactatcgtctccctgttcttcaaaaaaaaaaaaaaaaaaa

SEQ ID NO: 168537 - DNA, 374 bp, Zea mays
  Clone ID: MRT4577_85291C.1
gactgaggaaggtttgggaggttttttttcaatcctcaaggaacttgaaaattcggaatagtttacaggccaagacagcttgaaacgaaagcttcaaatggttcaaacagttgttttagcaacaagttaagacgatgttcggtactcatatacatagaccttcagttgcatgtgcgacatccaatactttggaaatacaggatactatacgacctttatattgagataaatggtcgttcataggaggagcctacagtactatatgagctccatttctgggtgggtaaacggacacgcttcattcaccatttcctttagtatttactttagtgaagggattaaccataagacctggttttgtttaagccagcggg

SEQ ID NO: 168538 - DNA, 164 bp, Zea mays
  Clone ID: MRT4577_85292C.1
cacgcgtccggctcttcactattcattgtggaagcacatgtattattagtacatgaacttttctttgataaaaaataatacaaaaaatagggaaaatttatataattcaacataatattcttctcccattaaatatatctactttcaaatttacggcccgccct

SEQ ID NO: 168539 - DNA, 485 bp, Zea mays
  Clone ID: MRT4577_85293C.1
ataaggtaagcaggtacgcgctccggaaccgccggggaaatccaggcgtgcgcccaaccttttttttatggtgtatttgacccaccgcttcatcaaccagctctccaaggggtacacaccgatcatgcagttctgagtcaccccgttgcccgtagtcaaacgcgcggccaccgatatggcaaagctatccctcaagaccaacgacccggcgcttttccaccggccgaggttcgcaatcggcaagtacacacagtacgactgctccggccttctgagggctccttttgagccgaacctgcgccaggaacccaaaaatcggcgccaacgagctgtttagcgccacgccgctcgagtccttcacagcacattctcgacaaagaggtgcacgtgaagctccgacacctgcaccaaacgactgggcgcaccacgcggcttacagaccacctgcaaacgttgccccctcggcgtgaactccagcctagatc

SEQ ID NO: 168540 - DNA, 275 bp, Zea mays
  Clone ID: MRT4577_85294C.1
ccgaatcgctagtcgaccgactgatggcgatagacacaatatgggggccatatacttgggccggcctgggctaacaaaagctaaaaagaatttttaagaagatagggaatcttacgctcctttagctggtgaacctaggtctcaacctgcagcatgccagtccatttttcaagatttagaccgcatacatattcttaatgtaatcctaactacctaacttaaaacgaataaataaggggtttttccttttgcatctttttacgcaaggatccaaa

SEQ ID NO: 168541 - DNA, 504 bp, Zea mays
  Clone ID: MRT4577_85295C.1
attattcttcctcacctgacgcgcgtctctcagttgggtagatctccctggcccttggcgtacgagcccctgggttagctcgccctgccttttctgctcacccaatctaccttttcgttcatcctggatagagatccttctatgcgcatgttgcatgcattctctctaacaacgcctctgtgctctccccgtacagcttgctcatatggtcgccgatatacctgctcgccactgtcagattcctcccagtgggggatcagcctcaacgacgtgtactcatcgagaacaagtggctccatggcatagtactcccccctgcctgcgcgcaacatcgtgctcgaggtgaccccagcttgccaacaccaatacgactcctctggaaccagcgacactgctccctgtgtgcctactactcgaggtcctgattctcctgagatcacctgctacccatgtgcgacgaggaactactcgtaatgccgatcgttgctcacttcccaatgacca

SEQ ID NO: 168542 - DNA, 383 bp, Zea mays
  Clone ID: MRT4577_85297C.1
gaagcgaaggggcccaacccaacctttattccccgtatatataaaaaaaaaaaagcccgtccacaaaaacccgacccgatttttgaggggcggtccactaaacccgttcacctgtggagagactaaacaaaaaagggaccccccccccttattgcgcgcgggagggccccaaacaagcaggaaaaacagcccacgtgcccccgtacatgcatgcccattgcacacacctacacttactaacacccccgaacggaaaccccccaggaggcgacaacctttcccccgatggggcttttgaaataaccccccaagggggggtttttaacgaactggcaaaaccacccctgttgccccttgggggtggagccacaccacccggaggg

SEQ ID NO: 168543 - DNA, 1911 bp, Zea mays
  Clone ID: MRT4577_85298C.1
atgcagggcgtcactgtgcactccccctccacttcttcgcgcggaagaatccgcccgcggcacggaccggaagcttcgcggtcgtcttctctcctgttccaggcgactgcgtttcggcgattcgcgacgaggcgacggcgattcgggcgcgctagcgtgccggtccgcgtcggagctgtggacgacgaagccgaggtggtcagcaaggtgctccgttcaagaccgaagacgaagagggcgcaaatccggctccctccagcacagttacgaatggcatcctcgaaagaagacaccatgaagtctttggttaaagtacttgtcgactgtgccgaggatgccacaaaatcccttcgtggattagtagatcatgcattagaccacatgcatgacgaagagatattagctagaaccctctttgccatgaaagaaaaacttgatttgcttcaccaagatgccttagaggcaaaagtccaagcttttcctgaaattgctaagtacgagggggatgacataagtgttcaaccgacatctccttcgacccctccaacagttactgaaccatctgtcgacgaagaggagttctactgcccggatgtgagtgacgagtggtacttcagcgactcagatagcatggaccctgccagcaatgcgacatcgtcgcaggcgatgtcgaatccctcaaatgcccagcaatttccaccaccaccccccttatggccaacgggctacatgcagcagaatccagtcgattgcaacatcatgggaaacattaattttcctagtcctggtcaaggtccaactacaatgtgggctccaattcagccagggaacactagttcccaatcaaccatgatccctgcttcccaatctgcactatattggaatcactacatgaattttgtgaggaaccctcttgggtcggtgggaatgagtccatacacagattcttatccaccttcactatcaagtacaccgttgcagggttcgaacactatacctcaaatgcctgtacacttggagtcagatgctgaacacagtgttcaggacatcaatagtcctgagaaaaatgcacctccagttcaaaaacaaaagaaatctaaggaacaaaactttacagccccagaagacagactcctttgtactacttggttgcaaataagtagtgaccccattgtcaatactgggcaaaggagggagggtctctgggccagaattgaaaaaagagcactcagcagccgatgggacaagataagggctgatgtcagtaaattctctggatactacgccagagtcctacgagagaaacaaagtggtctaagtgacgacgataagacatcgaaggcagccactttgttcgctcatgaggagggcaaaccatttcattttatgcactgctggcatcaactgaagggggaacccaaatgggagagcatatgtcaaggacactcgtttagaggattacatgcaagatcaataccttcgtcggggtgtccatcagtggaaacaccggagactgacagtggatccgctgggctctcaggaaaaaggccccgtggccgtgattacagtaaagctgagagaaagaaagctggttcttcttcgtccccggagtacttaagccgattacaagaaattactgagaaacaaatacagaggtccatagaaaagggggaaaaaaaagaaatgaccactgaagaagacagggagatacagaagaagagattggacttggaagcccaaaagttaagcattagacaaagggaactcaaacttgaagaactcaaatcggcagaacaacgtttgcagatgctgttgtcgacaaacgaagaagatgtagatcctgaagtttgggttgtcatgaaggaacagaaaaaaaaattgcagcagttcatatttacttttgagcaatga

SEQ ID NO: 168544 - DNA, 487 bp, Zea mays
  Clone ID: MRT4577_85299C.1
tggttctccatcatcaccacccccaacccgatcttcagccatctggccggaaagacgtcggtgtggaaagccatctcggcggaggtgctgcaggcgtcgttcaacaccacgccggagatggagaagctgttccggtccaagaggcttgactcggagatcttcttcgcgcccccgtccaactgagcaaataggcggaagcccacggtggagtgctctcgtcaagtcgtcatggttagattagcttagctcgccttaataaagagagaatggtggtggtcctcggctcactgcttcttcagtagcttcagtcgtttcgtcggtcggttgtcgtgtccgttcgtcgaactgccaagttttgttaattattattaatgtcaccctctgttttgtctaggactagggctggaaaaaacttaagccgcggctggttcaggctcgcgagctatattgttttaattaatctataaaataataataaatattatat

SEQ ID NO: 168545 - DNA, 1086 bp, Zea mays
  Clone ID: MRT4577_8529C.1
cctaaaaggggggttccccttttcccattaaggtggggcaaattttttaaaagggttttgtttggggctcttttttatttacccccccggggaaaagggggtttttccccaacggattaaatttggggaaccccgggtttttcccctttcccggttttttaaacacgggccattaattttaatttgggggccccaaaaaaaaaagatttttttccaagcccccggggtttaaacttgggcccccaaaaagggccccccccttttttttttttttttttttttttttttttttttttttttttttttttttttttttttttttttttttttttttttttttttttttttttttttttttttttttttttttttttttttttttttttttttttttttttagagaatttttatggaaaaagattatcggtgctctttacttacatcactattgaaaattggacatctcagcatccgagcgaatgtaaaattaacccagttgtgttatagttgcatttctgttttacctaaagtcttcacttcaaatttagcttgggctgaggctagaaactgttctagctaatcaatgttaatacaaaatttagctggaaccgccaacgaacgagccctaaagcattagatcgatatactccatatacatacactggtttgcatgcgatcatctcctatgaagcttacatatcctcctccttttgaagtagctacgtgatgtcgtgatgcgccccttaacactactaagagatcatctgggcagtggtgtataatcatccaagttacttattgcaccttttcatgaggctggcagctaaggcagcaccttttcatgaggccagcattctcttctccctgtcaaccttccaccattggatgaattattactgtgctggtgcctcaaacttttgaagcatatcacaatgtggtgtctggtatgacaagccccattggcgacgctgcagctcgaccctacaattctgggggattatggaataataatccctcttaacatgccggtccactggtggttggtaaaggctttggcggggatactgctcctcaaaattagacatt

SEQ ID NO: 168546 - DNA, 266 bp, Zea mays
  Clone ID: MRT4577_852C.1
ttcggaagttcttcgtcaactgcccagtgccatggctcgccttcgagataggagcattgccaaatgtcgcatatcttcagctggagttcgctgcgacgctgccaacccagaccagggctccatcgggcatcgccaacatccacaggatcacggacattgctctgtgctacggggaacactacgccaatagccccagcgtcaagatcatagtggaggccgtaaagaaacagatcgtcgagcattgcaacccgatcgacctctacatc

SEQ ID NO: 168547 - DNA, 238 bp, Zea mays
  unsure (1)..(238): unsure at all n locations
  Clone ID: MRT4577_85300C.1
tcgctcgaatttgcaggtcttgatccgagatccgtcgatttccatcgggccgcataccgtcggtgtcaccggtcacgctgctggtntttatgcatgtagcaggggagtgctgataccgccgaggcgcccttaggatgatattcagagcggggtctttgttcgggtgaatttggtgttagtgtgctctaacngncacggggccctgaaggtggacgtacctgaggaagagggggacgcg

SEQ ID NO: 168548 - DNA, 1914 bp, Zea mays
  Clone ID: MRT4577_85301C.1
gccagatgcagggcgtcactgtgcagtccccctcgcctgcttctcgcggaagaatccgcccgcgccacagagcggacacttcgcgctcctcttctctcccgttcgacgcgtctgcggaaggccgatttccggcgaggcggtggtgaatctaccgcgggaaggtcgcgtcggcgccggtccccgtcgggtctgtggaagacgaagccgaggtgctcatcaagcaggtccggtcgcgaccgaagacgaagaggccgcaaatacgagtccgccgaggttcgtcgcgactgcatccttcgtttcccgctccgagcatcgacgccttcctcggatccggacatcttcgcttcgattcctcttctttcggtcgaaatcttcggttcttcagcacacttgcgaacggcatcctcgaaagaagataccatgaagtctttgcttaaagtacttgtcgactgtgccgaggatgccacaaaatcccttggtggattagtagatcatgcattagaccacatgcatgatgaagagatattagctagaaccctctttgccatgaaagaaaaacttgatttgcttcaccaagatgccttagagactaaagtccaagcttttcctgaaattgctaagtacaacagggatgacataagtgttgaaccgacatctccgtcgacccctccaacagttactgaaccatctgtcgatgaagaggagttctactgccccgatgtgagtgatgagtggtacttcagtgactcagatagcatggaccctgccaacaatgcgacatcgtcgcaggcgatgtcaaatccctcaaatgcccagcaatttccaccaccaccccctatatggccaacgggctacatgcagcagaatcctgtcgattgcaacatcatgggaaacattaattttcctagtcctggtcaaggtccaactacaatgtgggctccaattcagccagggaatactagttcccaatcaaccatgatccctgcttcccaatctgcactctattggaatcactacatgaattttgtgaggaaccctctagggtcagttggaatgagtccatacacagattcttatccaccatcactatcaagtacaccgttgcagggttcgaacactatacctgaaatgcctgtacacttggagtcagatgctgaacacagtgttcaggacatcaatagtcctgggaaaaatgcacctccagttctaaaacaaaagaaatccaaggaacaaaactttacagcaccagaagacagactcctttgtactacttggttgcaaataagtagtgaccctattgtcaatactgggcaaaggagggagggtctctgggcgagaattgaaaaaaggtacaatgaacaaaggggagaatttccttgtagacttaacagagcacttagcagcagatgggacaagataagggctgatgtcagtaaattctctggatactacgccagagtcctaagagagaaacaaagtggtctaagtgacgaggataagacatcgaaggcagcaactttgttcgctcatgaggagagcaaaccatttcattatatgcactgctggcatcaattgaagggggaaccgaaatgggagagcatatgtcaaggacactcgtttagaggattacatgcaagatcaataccatcttcggggtgtccatcagtggaagcaccggagagtgacagtggatccgctgggctgacaggaaaaaggccccgtggccgtgattacagtaaagctgagagaaagaaagctggttcttcttcgtcccctgagtacttaagccgattacaagaaattactgagaaacaaatacagaggtccatagaaaagggggaaaaaaagaaaagagcactgaagaagacagggaaatacagaagaagagattggaattggaagcccaaaagttaa

SEQ ID NO: 168549 - DNA, 491 bp, Zea mays
  Clone ID: MRT4577_85302C.1
ggccgcccttttttgtttttttttggatatagcccgtaccataccttatctgggcttactgaccatcaaacaatacacctttctgggatgatctccccctaggccacaacaactaacccctaacactgccgatgttcaccccgacacttgtgacaagcaccatccgtgaaaacacaaattaatgtccatgcattcgaggggaaggactgctgagacttaatcactattgaatgggggcggttacgcttaaatcacagggttactaaagataatttacgagggagaaagcatcttgcaaggcaccgaggaaggagcggtttgcatgctcgatccgccatcacgatcaggttgttctcataaacacttggtggtgctggcggcgccaccttttcagaaacttgcttatccccaacggactactggggtggtccgttcttctcctctaccaacgactacttcgacggtgtgtctgacagcatcggcgccccctc

SEQ ID NO: 168550 - DNA, 102 bp, Zea mays
  Clone ID: MRT4577_85303C.1
tgaattgcctaggtgctcgaggcaagttctgtggacgtttgatatgagacgtttcacaaaggtgcaccagactggggatgtctcacttctaccggacgtatg

SEQ ID NO: 168551 - DNA, 234 bp, Zea mays
  Clone ID: MRT4577_85304C.1
aagaaaaaaaaaaaaaaaaattaaaaattaaaaaaaaaaaaaaaataaaaacggaaaaggggaaatactaaaattaaaaacaaaggggctgccgttctagatgatccatgcttacgtacacatccatgcgactgtcatagcatcttctatggtgtaccttaaattcaattcattggacgtctttttccatcgttgcgactggaaaaaccctgtctttcaccaaacttaatcgct

SEQ ID NO: 168552 - DNA, 293 bp, Zea mays
  Clone ID: MRT4577_85305C.1
ggtgccagtaccggaggccggtgctgtccaggaacaggtactggaccccgtagccgacgaggccgaacgcggacttccccgtgtactcgtcgcagctcaaggagctgaagcacatcacgcaggtgcagctcaacttcctggcgttcgcgtcggacgcgggcaagctcttcgggtggttctccggggtggcggcgctgtacctgccgctgtggctcgtggccttcgtcggcgccgcgttcggcctagacggctacggggatcagtacatgtaacaggaaagcgctggaatccgg

SEQ ID NO: 168553 - DNA, 306 bp, Zea mays
  Clone ID: MRT4577_85306C.1
ggcgaattaacttaaaaatggccagcacttcccatactttaattttgagagtacaagggcccccctcaaggagctagctggggcttattgcccaaatgattgggcctcccaccccgagttccttagggcaaaaacggcccggccgaatgattggccaatcattttctggggaattaaacagacagggggcccccgcctggatttcgcaggggcttttttttcaatactttatcatgtgtagatgaaagcgactgaatttgttacatttcccgggttttaaggcaatacttttttttcgagtttgaa

SEQ ID NO: 168554 - DNA, 295 bp, Zea mays
  Clone ID: MRT4577_85307C.1
cggacgcgtgggaaaaacaacaaaaatagaaaaagaaaaatttatgatttaggatcgaggaaaaaacgcacaatagggcgagtcaagtcgtgaattgcaggaaccagtgaaccctccgttttcttaccccgaatagagccccaaatccttctttcgaagggcacgtaagcccgggcgggtcaccatgggacactacaaacaccccacggcggggcgcgggacaagcagtgtggccgtcttccatgatttcctccctaaagagaaaggtcaacaaggatctggccggtcggacgat

SEQ ID NO: 168555 - DNA, 155 bp, Zea mays
  Clone ID: MRT4577_85308C.1
ctggagctccccgctaggcggcgctctaacagaggatgcccggctgaggatttcgaacgaggcttgctgctgctatgttagctatgccgggggatgagccatggcagcacggactctgggctggggaggacggggtttacgggggtgtggctatg

SEQ ID NO: 168556 - DNA, 202 bp, Zea mays
  Clone ID: MRT4577_85309C.1
tcggaagaagcataacttcatcaagctctatgtgctcagggtgttcatcatggacaactgcgaagagctgatccctgagtggctgagcttcgttaagggtattgatgactctgatgaccttcccctcaatatctctcgtgtgactcttcatcagaacaagatcctgaaggtgatcatttagaaccttgttaagaagtgtgtt

SEQ ID NO: 168557 - DNA, 1958 bp, Zea mays
  Clone ID: MRT4577_8530C.1
gccgatgctcttcgtcccgcgccaagtcgtactcgccgcctcatcacagccccgcgccgccgcctcttccgccatggccaaggaggaatccaagaaggagaagaagaaggccaaggccaaggtggccaatggagccgccgccgccgccgccgccccggtccctggcgcgagggccgcggtggtcgcctccgtcgccgccttcctcgagtccgctgggctctcgcgcacgctcgtcgccctccaatccgaggccggcctcgaggccggtgcgtgggggtcgtcacaggtgaacttggaggagctggttgccagattcttagagtcgagcaattcaactcgggcggctgccattctgggaagcgatgagcaagacaaggaaaatgatgatatagcaggagaagttggcaaggaaaaaaagaggagcggcacagaagccggtgagcctgagagcaaggcgatcgagcctttagctgaggaaaagccgactgaaaatatggacggtgaggctaaagagaagaaacaaaagaagaagaaagacaagggtgacccttcagctgcgaatgctgctagcgagggaacaactgaaattgtgaagaacgccgaccagaaggacgatgaggccaaggagaagaaacagaagaagaagaaggacaagggtgacccctcagctgcgggcgctggcagcggcgaaacaactgaaacagtgaaggaggatgatcataagcttgatggcaagaagaagaagaaaaacaagaagcagggaaaggatgatgatgtcgaagctaggctggaaaaggcagaattagcaatacttaacaagtttgaggcagcagaaaagctcaatggaagagaggtagaaccaaaaagtcagaatgacagtgctgatgactgcagtggtgctgtggaaaggaaaaagaagaagaaagagaaatcatctgccgggacttcagagaagactgatgcaggaagtgcacctgctgaggctgatggtgccaagggaaagaatggtgctgtagaaacagtcaaggatgataatgagaaaaaggccaaaaaaaagcggaagaagtctaaccctgaagaaactgttcaggtggaaggtaaagaggctgcagggaaagattcagtcccaaaacaagatgatgcgaacaagagtgtaatggagattgaagaaggtaaccaagggaagtcgtcaaatgaaaatgcagttgctggcaaaaaacggaagctagaagaagttgaaggaagcattccccctgtgactgggaaagaagattgcccagccaacgaaagtctaagcaatggttttgcagaagataaaaaagccgaaagcaacacaaaaccaagcaaaaggcagaaacattcatctgagcccaagactgtgaccccatttcaacgtattaaggtggacgacgtcagatttgcagatgacaggcttcaggataactcgtattgggctaagggtggcgcagacaccggttacggcgcaaaggcacaggagatccttggccaagtcaagggaagggggtttaggcacgagaaaaccaagaagaagcgtggcacctacaggggcgggcaaatcgacctgcaaacccactcgatcaagttcgagaattcagacgacgagtgaaatggtgagacctgggcttccccaaaagatggaagcctatacagtgttttagcagttgaccgatttctaccgccgttattgcctgatcaggcctggtgctggtgggaagaagcgatgcgatggatggtgcatgcaatacaacacggtaccagctggattaaagtcagttgcggtgtgccattatttgttagattgagcgacgtgagaaatcgtcgaaattttgtttgcttgttgggctcactgatttgctgattttgctacagcttatgcgacgttaacgttgctacactgcgtgttatgagtttgcccgtgctcttgattcctcttctag

SEQ ID NO: 168558 - DNA, 827 bp, Zea mays
  unsure (1)..(827): unsure at all n locations
  Clone ID: MRT4577_85310C.1
acttccacccaaatctaccagccggcataacaaccgcgacatgcgatgtccgtctgagttatcatcacagtcgagatgagtcaatcttcatgcacgtaccaagatggccgaaatatcgcactctcgcgtctgttcggctagagggacaaggcaccacagtggggtgccagaaggagtgtagatgcgcgatccggactcaaggcgtgcggcctgaaagatgcccaccgtcgcgagcgacattcgcagacgctagcctctaagagcctgcccacagtgacgacagagtcgcgcacgngctgcctgcatagcggccgcgcacatacacttgccccagcacgatctctcgcagtcatctgcgccgctgagataccgtctgctaacctgtgcgtcgcagacatcgttcgcctgcgtacaagcaactatagaactcgcactgcgtagatcgcggtcaccatgcacagactcagccagtaccgcgaactgacgaccgaactcacataagctgtctcgcgagcctgacaccatcaacaccctacgcgtgttgtccaacattcatccatacgctactgcccaagaaaggcgcagcataacagtaaacgtctacttccgaatacagcatcccaggagttctaagcgagcgtgccggtggttgcaaatactcatctgacttgactcacaactgggagctccaacatgcatgaatgccccacgaacatcaagctgcgtagaatagtaggggtacggtgtattctatcattggttatgctgaagcagtgtgatgcaaggttaatcatacgatagctaggggatcgagggcttactggatg

SEQ ID NO: 168559 - DNA, 174 bp, Zea mays
  Clone ID: MRT4577_85311C.1
gtttatgtgtatcaaggcacataacatctgaaaaagcagcagtagaaaacaaagacctcatacatgggtctcggaaacaaggaccacatgcagataaactgaaacgcagcaccgtccaaatcggaaggcgagaaatccaaggtgcaggtaagccccacaaagaacctaaaaatg

SEQ ID NO: 168560 - DNA, 347 bp, Zea mays
  Clone ID: MRT4577_85312C.1
ggttcaaaaaaacaggggatacttccagaacggggataaatgacaatacacctaacttagaatataatacacctcatgacaagctgaaacaaatccgtatatgcgaactaaactagaattacacacaggatgagctaaagtacatgaatgggaacaaaattaaactattaagcgattataatataaaacaccacaaacatcttttcaaacaaaatatgggacatttatatcataaactatgacgtctaggctaaatatgatgcgtgttttatataccaaactgcagacactaaatcgaaaagcggtggcttttataactttggttgtcaaacacattagttaaaaat

SEQ ID NO: 168561 - DNA, 314 bp, Zea mays
  Clone ID: MRT4577_85313C.1
ggggcgcccacgtcagtaggctcacacacgccaccacacctctcccgcttccactctgctcgtctgacatctggtcccgcccttctctttcgtagccctatagagtcccgactatggccaccgtcgcgcagtcggtcgacgagaagctcgataagcttcgcgtcgaggtcgccaagttcgaccggattcgccagaacgagatgtccgggttcatctgccttggggtacgctgcctcagcgcggaagcgcaccagatcgagtggagcaggatccccaccccctgctcatgaggcgggtgggtgccctgggatacc

SEQ ID NO: 168562 - DNA, 327 bp, Zea mays
  Clone ID: MRT4577_85314C.1
gggggacccacaaaaaaattcgggcttaaaagggggagggatactactttgggtttttaccttccactggaacaggggcaaaatttttttttctttgaaccccctttgtttccaaggttaatttcctagggggtgggggcatacttaccctggttaattagggattaaaaaattgggggttacccataaatttaaccctggcaaaatttggggggccccccgggggtgataattctggcaattttttttttggcggggatttattgggtccttttattttgaaaaggggggggggcttccaaaatgggggttttctccaaataaaaa

SEQ ID NO: 168563 - DNA, 527 bp, Zea mays
  unsure (1)..(527): unsure at all n locations
  Clone ID: MRT4577_85315C.1
aaggccaatagacatgtaggggcggggtctccaccgattttttttttttttcctgacaggtggacgtggtcttggcatccacgccaatgagaatgtgagggcggggcctgaatagacgcaggaaatggcgacggccgcgggtctgtgagcagcgggggcggggcctggttgtggcccctccttctcccgtccccaagttccctgggtgggaacggggtcttggggtccctggctgggtggccagaccccgaagccagcgctgggaagggctgcggatgcccgggtcagaggaaggggcaggtccaaggacacgcgggtctggtcctgggcaagaaccgccccctctccgggcctgcttcagtcttcctttgcagaacaacgggccaggccccttccctctgcccccgggtgcttgaagtctagccccatcctggtccaatgcgctcttggtagcctnctttcccagctgcccgcccgccgncatgccgnccttactgcccctgcgcctgtgccggctgtggccccgc

SEQ ID NO: 168564 - DNA, 588 bp, Zea mays
  Clone ID: MRT4577_85316C.1
tttttttttttttaagcaagggtacataattcatgaatacattcgtcctaagttctcataacgaaacaacaaacaccccatgctattagaaaatccatttgtttcccttttccgtcatctatcctcttatgaacggattctttttttttaaacaaaaatctatttatggggaataccctcctccggctgaggattgataccaacaacctcagcagcagtaggcttcttctcggccgtaatatcatccttcatgaaggggaaggtaagaacctctctgatagtatgattgtccgtcaagaacataacaagacgatcaatacccattccccaaccaccggtgggaggtaaaccatattcaagactggtacagaaattctcatcgatgagttgcgcttcatcgtcaccttgtgacttctggcgggcttgttcttcgaaacgcagacgttggtcgaaggggtcgttcaattcggtgtaggcgttgacaatctccttcttgcagacgaaggcttcgaaacgttcgcagagaccgacgttttcgcgatggtatttggcgagaggggacatcatttgagggtggcccatgatgaa

SEQ ID NO: 168565 - DNA, 252 bp, Zea mays
  unsure (1)..(252): unsure at all n locations
  Clone ID: MRT4577_85317C.1
ggccgacgcaggcgtccgagcggtnnnnncaaaaaataaacacgtcgctcattatcgtgcttcattcaatccggggcggtccgttcttgcgcgcaccaaccgccactcacatcttatccttcacacctttcacactcttttcactcagttcgagcaaggggggcagctagcgagccacgtgctgcagtcaagctagtgccaatggcgagggcggtggcgatgcttgcggccctggctcttgtcgtggtggat

SEQ ID NO: 168566 - DNA, 267 bp, Zea mays
  unsure (1)..(267): unsure at all n locations
  Clone ID: MRT4577_85318C.1
cggcgaggcgccgcgacgcagagccacacccacgcccaaccgccgccgcagccggcgcaccccaagcgggcgacaccacggagggagcgcaccgcgaccgacaccggccaagccggcaccgaggccggaaacgcgcgccgggagcgcgacggcgacgagcacggcaggcgggccgagggncagaagcccggggacaagaccaaagggggaggagaggaggcacgcagcacccacagcagcgagaccggcgcggggaagaacgccccc

SEQ ID NO: 168567 - DNA, 1666 bp, Zea mays
  unsure (1)..(1666): unsure at all n locations
  Clone ID: MRT4577_85319C.1
cctcgggtccggccgggataccattgtgctgttctgtattcccaaattgccaccctgttctgcgtactcgtcgaaacgacgataaccacacgtctcgaaaccctaaggctgccccaaattgttatcccaaaccctagacctaaacggctccatgctgtgagaccaccaacagtgtccatggctctggacgccccggtggagcgacgggacgaggtacagatcgcgatggggaacggaaacggcgtggcgccgtctcaaccgtcgcggccagccggtcggccaacggctgctgcggcggcagcgccatacgcggacaggcggctgcggctgaacccaaatgcggatcacaagccggaagactacagcgacgtgcgcggcgagtacgcgccggccgtgtacagcgcactcgagcggcatctcccacccagcctcatcgatgccgaccgcgatgtcaagctacacttcatgcgggacattctcgcgcgctactggccgcagggcgagcgtaacaaggtgcaaaggcacagagaatataggcagaggatactccacctttacaagcctcttcatgaagaattatacaatatgcatccttcagtgttcttcttaccaacattccttgaagcagttaggagcaatacagaagaatgctttagaagtattatgactgagccaattcctggtgtttattcgtttgctatgttgcagcctactttctgtgagatgttattggaggaggtagagaactttgaaaaatgggtccatgctatgaaatttaagataatgaggcctaatacaatgaacaagtatggtgctgtccttgatgattttggcctggaagctatgctgaaccagttcatggaacagttcatagctccaatttctaaagttctttatcctgaggttggtggaggaacattggactcccatcacgcttttattgttgaatatgggaaagacagggatgttgaactaggttttcatgttgatgattcagaagttacattaaatgtttgccttggaaaacaattctttggtggtgaattatactttcgaggtattcggtgtgagaatcatgtgaattcagagacacaacatgaggaaatgtatgactacacacatattcctggttgggctgtactccaccatggtcgacacaggcatggtgctcgagctacttcatctggtctcagaataaatctgcttttgtggtgccggagctctgtgttcagagagatgaagaaataccagaaggattttccgagctggtgtggtgaatgccagcgcgaaaagagggaaaggcagagtcagtgtgttaaagcaacgaagatggcctttctcaggggttctggaggtgcagcgatttaatttgtcgtaggtcatttatgttatatactgttttgcgtcatactgaacttcatcgtttaggacttgacaggggcattgtatcgatggccagctttgtgctagtgcgtttattggtgcgatcccagttgtatgtaaatgtaaacattgaccaaatgcagccgaaagaaatgtaatagcgggtcataaactgctatgaatttggatacttttgttgccaaaattgataaattggaacgccaatagcttggcgtgattattgattaaaaaaaaaaaaaaccncgagggggggacccgggta

SEQ ID NO: 168568 - DNA, 426 bp, Zea mays
  Clone ID: MRT4577_8531C.1
accggtattgcctgcccggccggacccacgcgtccggagagtggaaaccagcatcagcattggagcaactgaggctaccctgatattgaacttggttatgcttcatgctgtttctacataccttgctgacgccacaatgctcccttaatgctaacacgctcctatagctatcattattgcgccataccttccatacattatagctccaatatatgaaaacccagctattcaaccatatctgcttcaacacgcactcgccataagcagcatacctaaatcgcccttgtggacacaacatttgtcaatcctatctttagcgcatgcatcggaacataccatcatggcacaacatcagtagcatctcgtgctacctctgatcaactcaagtagctctggcaaacctttctacatactgtcagcaacgac

SEQ ID NO: 168569 - DNA, 280 bp, Zea mays
  Clone ID: MRT4577_85320C.1
gcgggattggctccgggggcgcggcgaggagagacatgaggctgagctggatcctgacagtactgtccatttgcctgagtgccctggtcacagccacaggggccgaaggcaagcggaagctgcagattggagtgaagaaacgtgtggatcactgtcccatcaagtctagaaagggagatgtcttacacatgcattacacgggaaagctagaagatgggacggagtttgacagcagcctaccacagaaccagccctttgttttctcccttggcactggcca

SEQ ID NO: 168570 - DNA, 103 bp, Zea mays
  Clone ID: MRT4577_85321C.1
ctagacacgctcgttaccgtgctgggaaagacgttgatgagggaataacatacctgggcacaggctcagcagcagcatgcctcgtcttgatgcgattggaggt

SEQ ID NO: 168571 - DNA, 376 bp, Zea mays
  Clone ID: MRT4577_85322C.1
tttttttctttggtacagttttatttttatcctcacaatcaaacaccagagtcaattgaacaccacgcgatgtacaacagactgcctacttttttcttcagtttttgtgctgtctccgtgttcatctagtctagcaagcaagttatacagctaatttgctcatcacttattacaatatcgatcacatcccacaccaaacacactgcacgcacatgaactgacaaccggtatggttaacttgcagccactccagtgaatcctgaagaacctgactgactggcaagaacatcggtggcgctagcagggttgataaccctgcagttgcgcctgatctcgccctgcgtcccggaaaaaaaaaaaaaaaaaaaaaaaaaaa

SEQ ID NO: 168572 - DNA, 684 bp, Zea mays
  unsure (1)..(684): unsure at all n locations
  Clone ID: MRT4577_85323C.1
gccggccgggccgcgctcgtccttgagccctacccatagatcactgcaaggagtgtgcagtcctgtgttcacggtggagttaccctctcctttgccccaaagttaaattgtccagagccaagaatgccatcctctgtgtggtgaccaaactcagcaagtcactgacctcgccgtgaccagatcctacggaagcgcctccgggccctcacccgaaagatgatgatgaaattaaaaagatggctgaagctatcatggatcaagttgtcaatcaactcctgaacgaagctgcggaagtagtacttagggaagactaagtgctattgtaaaaacatctgaaatgtaatatgtgtaatatcttgtaaccctgaatgtaatatacttgtttttatggttcaaaaaaaaaaaaaaaaaaaaaaaaaaaaaaaaaaaaaaaaaaaaaaaaaaaaaaaaaaaaaaaaaaaaaaaaaaaaaaaaaaaaaaaaaaaaaaaaaaaaaaaaaaaaaaaaaaaaaaaaaaaaaaaaaaaaaaaaaaaaaaaaaaaaaaaaaaaaaaaaaaanngggccccctggggccggggcccttaaaaaaaaaggggcccccccgggggggggaaatttaaataaagttttttcaaaccccccccccccgggggggggccgggaccccatttcccccaaaagggg

SEQ ID NO: 168573 - DNA, 449 bp, Zea mays
  Clone ID: MRT4577_85324C.1
tttcttggcaccctcatttgagcgtgagcattggcagggttacccaggtcccagtcacttcaaccacactcttctccttcatattgttaagcagtttcaccgttctcttttgtttagctcggcctccatagcctggagttctttctcctttttctttagatccttcttccttttgaaggtaaaaacttttgatctcacatcctgtatattgtgatcagctcactatgcatttctttgacatgaacgccataggattcaataacctaagcttatcgattggagtgcagcccagatcaattttacataatggacagtgtcaagggcgttaagccttagggtagcaggacctcggctccggagttcgtagccgcgatccgtggttggggggaggcgaggttttgcccctcagcacacccggccggtttggagaagagaaagagagctcgtgc

SEQ ID NO: 168574 - DNA, 250 bp, Zea mays
  Clone ID: MRT4577_85325C.1
ccggccgggctcatcacctcattatttgataccaagctcaaataatgatctcactgatgcaatatgtctatgggagatgcaggcccgccgaggctctcgtcggcccagctggagactctcgatgctataacatcctcatgcgctggcgtcctcccggccgccgcgcataactgcggctgacagccacacgtctgctgcagtaagtcacgctactgttgaacgaccgatgaatactgcggagacgggtgac

SEQ ID NO: 168575 - DNA, 583 bp, Zea mays
  Clone ID: MRT4577_85326C.1
aaaacaaaaaaaactggttggccaatcaacctcgggaggccgccaaaaatagcaacccattaagtccgcctgccaaaaaaagcatcaaaaggcgggggaagaaaccaacggtagggaagctaaggaagaaaaatcaaccagctggggacagcatccgcttccgttaattggacccatggttcctccatggggtgtttgggcttccttgctaataacaaacaaccagcattttttttcatccaaccgaataaaaagccccttgggggccgtttggttgaaacattcattgaaggaggggggccgtccaattcctgtccatttagggccgaaaaagaatcattgagttcttcctttgaccccatggatacaaaaccgattcctggtgggcgcccagtttttttgtggtaaacaaccttagaataaacaacttttccttgctggttgaacaactgccccagcctaaagtaatcaactggccagggaaggtggccaacataagctctgaaggcgggggcaaattgtttttgaggtctttccttgcgagggcccctaaaagaggccctgtttacattaaaaagcctcc

SEQ ID NO: 168576 - DNA, 713 bp, Zea mays
  Clone ID: MRT4577_85327C.1
gttgcccacttcgaatactcgtgatggaaggacccatataagatctagtctggacatccaatatctctcctctcatgatccacattccccagcctctcgtctgattggatgcctgcctgcgctgccgtgagatacttgagtgtagtcgtcgtggaactaaacgcatcctcctgacgtactagagcctgctgaaactcacgcccccacatcatgcagtgctcttcctgcctcaagatgttgaggctccttgtaatgcacaattagagagacgcacactggaccgtccctaagcggtgatggcagagctgatttgaactatcatatacgcgtcctattagaccgttcactgccccacaggtttcttacaacatccaagatgtccatgctataatcttgggctttggaagtatatgccttgacattctcaaagagccctggagccctgctgctacaatttctaatgccctgatcgccatctgatcgctggtgtgcgacccccatgcggataaccgtcttgtgcgggagattgccctcctgtcccaaatccaccgacctacgtaccagtagactaaccggtaatggacgcagaggctcacgatggagttacctccgctttcctgctctgctgtcactgatcgctctcctggatttaaagctggcctgacggatgcctgatccatctaggatcatcgcattgtaatgcagtgtatgta

SEQ ID NO: 168577 - DNA, 245 bp, Zea mays
  unsure (1)..(245): unsure at all n locations
  Clone ID: MRT4577_85328C.1
attcccgagccaggccacgcgtacgnccaccccttctcttaaaaanaatgctatctaagacccgtactacacacaaaaaaaatgtcgctgcttgatactaatgctgcgcaacgactntatatattttccctacctctccttcatttcctgtctcacctcttccacggactaccactccctccacaacgccttcaatacctacggctaggtcctcgactccaatatcatcctccatcggtagactc

SEQ ID NO: 168578 - DNA, 777 bp, Zea mays
  unsure (1)..(777): unsure at all n locations
  Clone ID: MRT4577_85329C.1
cgaagactactttgccagccccgcacattctagaaccgctgttcacaaacctgcccgccccaatccatccgtccccagtgcaagtccgcttggcacgtagnaagtacttgcataggtattccctggcaggagtgctggcatgccccaccagtggcgagagaagcagatagcgaacattgttagcaaggccagcacggccgcagcaccggcacctgccagtaaacagatcaagaagccgttgctgctgccgcgtgagccgagcgcaacaagccatccgctgcgaccttccttcagcaagcttatgagaaagttccctacctgacctgatcatggcacatgctcacgcttagctacagctaactgtgcagatcaagaacacgctttcgcacctgggatcgtgaatacgtagcgagagaggtgatagatgcacgtgcagcccctgagtgtcaatactggtatgtttttgctctcaaatgtaaatacgatagaagccaaactgctagttgggtaggtaggaaatattacaagctactccctcctccgtttcattttagttatcgctggatagtgcaaaattaaactatcccacgacaattaaaaagaaacggagggagtactgtacaatctaaatactacgttgtagtttttaagcactagatacacctaaaaactcttttatacaactcaatgtgtctaaattttgtatcttatccattagaacctctcaagatacaactcatttatgttggttgtatgaatagaaccgaatatagactt

SEQ ID NO: 168579 - DNA, 404 bp, Zea mays
  Clone ID: MRT4577_8532C.1
gcgggaaaaaacaaaccgggaccttaatttcccgggcctccgggggtcccaaattttcctttttttttaaaaactggaaaatggattccccaaccttaagttccccttttttacaaaaccctttccaaaattttacccggcattatggctgcaccaaaaaaataaaaactgggccggggcctttttttccctttttggaaaattttacccaaatccctcccccccctttaaaaattaacccctcccccctccagctaaagaaatcaccccctttcccccccggggggggggaaaaccgggaaattaaaaaaaaaaccaatttctttggtccccctcctttgggcaaaaaagccctcccgtggaaaatcccacccggttccccggttggactttggaaatttttc

SEQ ID NO: 168580 - DNA, 912 bp, Zea mays
  Clone ID: MRT4577_85330C.1
caaccggcccaaccccgtctcgggtcgcccggcaccggcacccctcgcctaggtttaggcatccgaccgccgcagcgtccccgccacgaccacgagcgaaaggaggtcgccggaagagggggcgcggagatgagcgggagcgcgttcaacgcgttcaagtcgcgggtgccggtggcgtggagtccccggctgtacatcacgctggtgcggggcctccccgggacgcggcgcctccaccgccgcacgctcgaggccatgcgcctccgccgctgccaccgcaccgtcgagcaccgcaccacgccgtcgctcctcgggatgctcacccaggtgaagcgcctcgtcgccgtcgagaccgaggagatgtacaacgcgcggaagcaggccgaggcggagaggcgcgcgcccagacccccgctcgtcgtctcccaccagccacagccgccggctccgaagccggcagccgccgccgcggtgggtgccgctaccactgcgcagtagcctctgggcatcagaagcctttcatcacagttcagcggcataataattgatttgcctgtgtttgggtctgctggttttcagacgatcgctttgggtcttcttgctcaacgagatctagcaacggatttgatcgatcttctcaagatcgttgtgtggtgcaacctgcattgaccctgtattttagattgttttatatgaactaggcgcacggttttccaatgcttttgtctagaatcaagtccaatgatttggtttaaattactaaattctctgtaaatgctcttcaagatgtgtaggcggttaaggcttcttgcgtaattgaaccagaggattgctagcgtctaaagttgctcggttgtgattgttggttcttagcgaaaggatttatcttaaaaaatattttatcaatctggg

SEQ ID NO: 168581 - DNA, 329 bp, Zea mays
  Clone ID: MRT4577_85331C.1
tccttttttaaaaaaaacatttatttttcatgtgggggaaattataaaaaggttggcgacactaacccccacgagggcccaagcgaagcaacaaactgcattccacgatgacaacaagttctcgcggcgagcactggcatctacatctggttaaaaaggccacttgggggagggcagggtatgctggtcagggtaccagccggaccaccgatatgccgtacggaatgtacaaataagcatgagcactttacactaagccctacctactgatacgtgggataccaatcccggaacgatagggtcccaagccaattgaccatcactcaggg

SEQ ID NO: 168582 - DNA, 801 bp, Zea mays
  unsure (1)..(801): unsure at all n locations
  Clone ID: MRT4577_85332C.1
attggtacctcgaggcggcgggaacggtccaccccgcctcagattcccggcgccggcacacctcgcctaggtttaggcttccgaccgccgcagcgtccccgccacgaccacgagcgaaaggaggtcgccggaagagggggcgcggagatgagcgggagcgcgttcaacgcgttcaagtcgcgggtgtcggtggcgtggagtccccggctgtacatcacgctggtgcggggcctccccgggacgcggcgcctccaccgccgcacgctcgaggccatgcgcctccgccgctgccaccgcaccgtcgagcaccgcaccacgccgtcgctcctcgggatgctcacccaggtgaagcgcctcgtcgccgtcgagaccgaggagatgtacaacgcgcggaagcaggccgaggaggagaggcgcgcgcccagacccccgctcgtcgtctcccaccagccacagccgccggctccgaagctggcagccgccgccgcggtgggtgccgctaccactgcgcagtagcctctgggcatcagaagtctttcatcacagttcagtggcataataattgacttgcctgtgtttgggtctgctggttttcagacgatcgctttggatcttcttgctcaacgagatatatcaacggatttgatcgatctcaagataatcagttgcatgaataattgacttgcattgaccctgtgttttagattgttttatgtggactcagcgcacggttttcaatgcttttgtctagaatcaagcccaatgattttggtttaaataaaaaaaaaaaaaanagcggcc

SEQ ID NO: 168583 - DNA, 273 bp, Zea mays
  unsure (1)..(273): unsure at all n locations
  Clone ID: MRT4577_85333C.1
cactgtttggttgcctggggaaaggtgtgtcgtccccttcagctgggaggcttgggaatctcaagtctccctgagctttgttgggctctccgcatgagatggctgtggttgcagaaaacagatttgggtcggccttggnnaagtcttcccatacaggtcccaaacaaagctagggcttttttctctatggctcttgtttctatggttggggatggttcaaacaccttgttctggaatgatagatggctgcatggcactcaaatcgctgatatt

SEQ ID NO: 168584 - DNA, 476 bp, Zea mays
  unsure (1)..(476): unsure at all n locations
  Clone ID: MRT4577_85334C.1
ggccgccaagaagnacnngcaggactccaanaacacnacggacaagtttttttttttcgcccaccgagaacccaccgccgcaagccatggtttacttatacccgccgcaacaatatctcttccccgtacgcgtcgtacccgtggtagccttaccgttacccctttttctccaccgtacgggtacaatgctgttttcccacaaccggcgatgtacaactacgcatcacagccgttagctacaccggccatgcatggcggacgtatggggatggggctcggcctatggctcctacgcagtgccgtcggcgggatgatgctcggagaggccatcgatgactattaaaccgacgcctcttattattccgcgttcaaccatgcattggcattctatatctatgttgtcttgcactcatggagattatctgcctttgaaattcttaattaatacgaaactatgaaatacaatttgcattttg

SEQ ID NO: 168585 - DNA, 1941 bp, Zea mays
  Clone ID: MRT4577_85335C.1
ttttcacgccggcggccgttattctcccaggccggagagacatggactcggaacccgatgtcgagcttcggggccttgacatcgacgtagaacttgacccggaggaccttcagccgtcggtgcccctcaaaaaggtccccggcggcgacctcttcgaggcggcgcgggccggggattgcgaccgcctcgccctcctcctcgacgccggcgccaacgtcaacgcgcgtgaccgttgggactccgtcgcgctctattacgcctgcctggcgggacacgccgaggccgcgcggatgttgctcgaggccggcgccgtctgcgccgagcgcaccttcgacggcgaccgttgccactacgcggccctcaacctgcgcttacgctggctgctcaagtcgttcgaggccaggccgccaccgctcgcgccgctccccaccgcgctgcgggcgacgttccttgcctgccctgccaaccgcaccgctttcctcgagatgctccaggggagcgccggcgccgaatccgccgccctcgccgcggccgccggatttggcccaaaggatgatccatcaagtgcttgccttttccctccagatatcacattctatgtggacagaaagcctgttgaagcgcatcgggtcatcctttgtgcccgatctcctttcttcgaaaagaagttcaagacagactggaaagacaggaaggaagtgagattttctaaccaaaagttgtattttggcgccttatacagcctcatccatttcttctattctgatagactcgaggtagctgttgacgacatggaaaatttggcgcgtgcatgcaaagtttgcaagtgcgaggagttgcaaaaagttttggataaagaagttgtgcatcagaagtatgcggagtacaagtcagcaagagaactggatatggacagctcacagaaacgattcatcttacaagcgcaatccttgcctgaggaagatcgccttccatcagccttgcagcgtattctgcagacttgtctagcaaactcaagagaaggttactgtagtgaggaatcaaatgagatgataaggaactcagaggatgatgatcttgcagatctttatattaaagtaggtgataaggttttccattgtcatcaggtgattttggcctcaaggtcagagtactttagagccaggctatctcgaactgttgattttcttgaaggtaactgtggctttgaagctgctcagaatgttccgcttcttgaggagcatgacataagtgcagaagcatttgaaaagatgctcgaatacatgtatactgataagctagagcatttggaccctggccaggctgaagaactatttgatgttgcatcaaggtacctgctgtttccccttaagcgggttgtagctgatatgctgctgccatatctcgaacatgtttcgcctgcagaactgtgccactggttgatgatgtcagacatatacggtgtcatgaaaataagggagtatatcttggatatcattgcttgcaactttgagatgtttgcagccacccgggagttccgggccttgctcttgactcttccaccaccatccggagatgactcactacggacaacacgtcccagtgcacctgggactggaggcaacaccgaccaaggcaacattcttgatgatttgcgtgagaagtggctagaagcagagggtgccgagctcgacgagagggatgagagtgcagctctgttcgacaagcgactggagatgcttatgctagttgcagagaaagaagccgatgatgaagacgcttgagtttcgaagagtacgtgtgctagggtagcattgtttttgcattcttcactgcgcagttgtttaggtttgtgagttacaagttcatcttttgttgtatgaacttcaaacagatcagttttgacccatcaagtatccagtgagcaagtatttatgaacg

SEQ ID NO: 168586 - DNA, 1124 bp, Zea mays
  Clone ID: MRT4577_85336C.1
cccacgcgtccgcaaccggcccaaccccgtctcggattgcacggcaccggtacccctcgcctaggtttaggcttccgaccgccgcagcgtccccgccacgaccacgagcgaaaggaggtcgccggaagagggggcgcggagatgagcgggagcgcgttcaacgcgttcaagtcgcgggtgccggtggcgtggagtccccggctgtacatcacgctggtgcggggcctccccgggacgcggcgcctccaccgccgcacgctcgaggccatgcgcctccgccgctgccaccgcaccgtcgagcaccgcaccacgccgtcgctgctcggaatgctcacccaggtgaagcgcctcgtcgccgtcgagaccgaggagatgtacaacgcgcgcaagcaggccgaggcggagaggcgcgcgcccagacccccgctcgtcgtctcccaccagccaccgccgccggctctgaagccggcagccgccgccgcggagggtgccgctgccactgcgccatagcctctgggcatcagaagactttcattacagttcagcaggataataattaaactgcctgtgtttgggtctgctggtctccagacgatcgcattggatcctcttgctcacaagatctgacaaccgatatgtctctagatcgttgtatggtgcgacttgcattggccctacacaacgactgagggcatagtttcccaatgcttttatctagaatcaagttccgtggtttggtttcagttaccaaattccttgaaaatgctttttaagggcttgttcggttgcggcttgcgcctagttcgaaggagattaccttcttttaattttgactagggagggatttaattgtctctaatccccttcgatcgagacgtaaccgagtaagccttaagatatgtaggttgtggcttcttgtgtaactgaaccagaggattgctagcgtctgaatttttcgttgttcggagtagtagtttacagtctgaaaggtacgaggatgcgggatgcgggatgcgtacggttggaagctattggggcgatgctggagcaaataaagtgatgcagtttgcttgcaaaaaaaaaaaaaaaaaaaaaaaaaaacccacgcgtccgcggacgcgtgg

SEQ ID NO: 168587 - DNA, 219 bp, Zea mays
  unsure (1)..(219): unsure at all n locations
  Clone ID: MRT4577_85337C.1
acgcaataattttactaatcaaatacttgttgcgatatattcatccaattccactcacgcgtcctgagcaagcaacaacaatatgttccggccgacaaacaaaaccaaaaaaaaaacacactgaacccaataatcccactccacaaaaacttttatctcaagccattcgatcgatcacagncgtgtcgttctgcagacaccattaatacccagaaccat

SEQ ID NO: 168588 - DNA, 1441 bp, Zea mays
  Clone ID: MRT4577_85338C.1
agatatcacattctatgtggacagaaagcctgttgaagctcatcgggtcatcctttgtgcccgatctcctttcttcgaaaagaagttcaagacagactggaaagacaggaaggaagtgagattttctaaccaaaagttgtattttggcgccttatacagcctcatccatttcttctattctgatagactcgaggtagctgttgacgacatggaaaatttggcgcgtgcatgcaaagtttgcaagtgcgaggagttgcaaaaagttttggataaagaagttgtgcatcagaagtatgcggagtacaagtcagcaagagaactggatatggacagctcacagaaacgattcatcttacaagcgcaatccttgcctgaggaagatcgccttccatcagccttgcagcgtattctgcagacttgtctagcaaactcaagagaaggttactgtagtgaggaatcaaatgagatgataaggaactcagaggatgatgatcttgcagatctttatattaaagtaggtgataaggttttccattgtcatcaggtgattttggcctcaaggtcagagtactttagagccaggctatctcgaactgttgattttcttgaaggtaactgtggctttgaagctgctcagaatgttccgcttcttgaggagcatgacataagtgcagaagcatttgaaaagatgctcgaatacatgtaagatcctattgtaatatgctttaccactattgttttgttgttgctgttgctgttgctgttttctggcttactttttacttgtaaaacttaggtatactgataagctagagcatttggaccctggccaggctgaagaactatttgatgttgcatcaaggtacctgctgtttccccttaagcgggttgtagctgatatgctgctgccatatctcgaacatgtttcgcctgcagaactgtgccactggttgatgatgtcagacatatacggtgtcatgaaaataagggagtatatcttggatatcattgcttgcaactttgagatgtttgcagccacccgggagttccgggccttgctcttgactcttccaccaccatccggagatgactcactacggacaacacgtcccagtgcacctgggactggaggcaacaccgaccaaggcaacattcttgatgatttgcgtgagaagtggctagaagcagagggtgccgagctcgacgagagggatgagagtgcagctctgttcgacaagcgactggagatgcttatgctagttgcagagaaagaagccgatgatgaagacgcttgagtttcggagagtacgtgtgctagggtagcattgtttttgcattcttcactgcgcagttgtttaggtttgtgagttacaagttcatcttttgttgtatgaacttcaaacagatcagttttgacccatcaagtatccagtgagcaagt

SEQ ID NO: 168589 - DNA, 1599 bp, Zea mays
  Clone ID: MRT4577_85339C.1
accggcccaaccccgtctcggattgcacggcaccggtacccctcgcctaggtttaggcttccgaccgccgcagcgtccccgccacgaccacgagctaaagaaggtcgccggaagagggggcgcggagatgagcgggagcgcgttcaacgcgttcaagtcgcgggttccggtggcgtggagtccccggctgtacatcacgctggtgcggggcctccccgggacgcggcgcctccaccgccgcacgctcgaggccatgcgcctccgccgctgccaccgcaccgtcgagcaccgcaccacgccgtcgctcctcgggatgctcacccaggtgaagcgcctcgtcaccgtcgagaccgaggagatgtacaacgcgcggaagcaggccgaggcggagatgcgcgcgcccagacccccgctcgtcgtctcccaccagccacagccgccggctccgaagccggcagccgccgccgcggtgggtgccgctaccactgcgcagtagcctctggtgagctgctcctcgagtcccgatttcgtcctggtgcggtctggttttccattttgtttgtttgtccattcaagcgtttgatgcaatgactcaagtcagtgcgcgtagattggcagtcaatatacacaatgaaatgtcttagtttcctggtgggttattatagttcttccttagttctccatgtaacaaaatggaaggtgcagctctaaccacattagagcaactccaagagttagtctaaaattattagcctctcttggttgttggtgtgatttgctagagtatccaagcagctgatgtggatatatcaattattatttctaattctttggcaccctgctttgggagcactcatccagtcaggtcaatccagccccagctcctcagatttgaatgcctaggattagtgctgcctggctgggacaggcttcctagggcttgatccaagaaaggcatgcatcatgctttgaattttgtaattgatatgagaggaaatttcctacagtgttttgacatgttctattaactggcatagagtaatttaccatctgttctatgccattgcccattgcttttcaaaattggacacctgaatgccatcaccgtcagcttgatgatgccaagtacagtaacacatggaagctggaaggataacagcttcttcacgcgatggttgaatgatggggatttcatggagggcatcattcatgcaactgtacagtaacacatggaagctggaagggtaacagcttcttcactcgatggttgaatgatggggatttcatagagggcatcattcatgcaactgattatgtatatgaggggatcagttttgactgatggtataatgggaaaccctgagttatcgttacttgatccctaatattttactcgtggtgatcttgtagggcatcagaagcctttcatcacagacgaccgctttgggtcttcttgctcaacgagatctagcaacggatttgatcgatcttctcaagatcgttgtgtggtgcaacatgcattgaccctgtgttttagattgttttatatggactaggcgcacgattttccaatgcttttgtctaagaatcaagtccaat

SEQ ID NO: 168590 - DNA, 300 bp, Zea mays
  Clone ID: MRT4577_8533C.1
tctagcgtcattctgtgtaacctcgagtacgcgctgcagctgcaggacgccatcccgcccgagggcgctcggcagggcggcgacggggacgaccaggacggcgccgctgcggcgggcggcggtcgcgctttcgttccctcgggcggtgccttgtccgtcacgtccacggcctctgccgcggacttcttctctctgttttcctccttgctctacattgtccgtcgctcgctaatcattcctctgttttcttcccgctcttctatctgtttctttaattctccttcgtcatcgcttttctcg

SEQ ID NO: 168591 - DNA, 347 bp, Zea mays
  unsure (1)..(347): unsure at all n locations
  Clone ID: MRT4577_85340C.1
tgcgggccgctcgnaggcnnggccggtttccantnaaaaaaaaaaaaaaaaaaaaaaaatttaaaaaaaaaaaaaaaaanagttggccccagacacgcattcgactcccgccgccagccgcttcacgcttccgctccgtcgcatacgcctcaagcctccggcgccacctccaccatggccccgaagaaggagaatgcgtttccgtttcgtccatcccctcaaagttcgggggcgacctccaccatgagacaccaaaaaaagaaaaggcccccccgactacaacgaaaccggccaagtccggggggggaaactaaaaaaaaaaaatgtggcttgggggaacaataggg

SEQ ID NO: 168592 - DNA, 410 bp, Zea mays
  Clone ID: MRT4577_85341C.1
gtccgcccgcgcatgccactggatgagtgcttccgaatacaacatctttatttctcctgccttaagtgcacaaacggggaggagacaccattgatatgtggattaacgctcttaagatctatacaatcccagattactaccttgctctcttgagtactggcacctgtaaaccaaaagacgagcttgatgaaattcttaggggcccaaaggacttccgagcacatgaggcccttgattatagactatccgatacgatattacaatctgtcgaaggttctttcaaaccaagtgacctaaccgttcacctagcccaggcacaagcgatgcaccagtcaggcaagcatacagcttatgtacctcaaatatagagcactccaaccgaacccacgtacatactacaataactgaac

SEQ ID NO: 168593 - DNA, 428 bp, Zea mays
  unsure (1)..(428): unsure at all n locations
  Clone ID: MRT4577_85342C.1
gcgccgccgaacgccgggggggggggggggtccnccncatcgatgccggggcgcgggaccttccggatcaagaagaagctggcgaagaagatgcgccagaaccgccccatcccctactggatccgcaagcgcatttttccgctgcgctttnacaacgccaagcgttggtgggggggggggaccaaactcngcttcttatctccctttttgggggggggggggggggcccttctaggggggggaggttaactttggttttatcgatgtctcttgtgtttctgtgagctcgcaaacgggtcctgatagcttttgttatgattctggtgacgctggggggattgatgctgctatgctgttctctgggttccttgctgcctggcgaggctnaattaaagaacctctgggaccctgaaaaaaaataaagaagg

SEQ ID NO: 168594 - DNA, 736 bp, Zea mays
  unsure (1)..(736): unsure at all n locations
  Clone ID: MRT4577_85343C.1
gaacttgaacagcacgcaagaatggaggcggaaagagctggagcgtgtctccccctcccctaccaggcgaccaaatccatgtgcgtgctgctcctcgctgctgcttccactgctgagcagcagccataccaccaccgccgccgcacgtggtgctgcttctgctaccgcctctcctccaccagcggcggtgctgaccgccacggccgacgaccagcaggctctgctcgccttcaaggacctcgtcaccggcgaccctcacggggtgctgacctcatggacccccgctggcaacacgaccgccggcgtctgcagctggagagcgntgggggtgccgctcccgccggcggcgccctggccgcgtcacctcgctggagctggcgtccgccaacctgaccggcaccgtctcgcccttcctcgccaacctgacgttcctcggcacgctcaacctctcgcacaacttcctgtcgggcaacatcccccgggagctcggcttcttgccccgcctctcgtacctggacctccagcacaactccctgcaggggcgtggttccaggatccctcgccggcgcctccaggctcctggtcctgcagctggagtacaacagcctcgtgggcgagatcccagccaacctgagccacctgcagnaggctggaggtccttggacgtcggctccaaccagctctccggttgcgatccccgcagtcgcttcgcctcgctctcgaggctcacgtacct

SEQ ID NO: 168595 - DNA, 336 bp, Zea mays
  unsure (1)..(336): unsure at all n locations
  Clone ID: MRT4577_85344C.1
ctcgaaggcgggcgggacgggggttcttcctttccttgcggcgacgactgggacgaacgncccccgcgcgtgtgcaggggagnaccccggcaccagattgaatttgtttttaccggacccgtgagtggagggggagatgaacgggggcaggaaagtgggccatgtctcaggngaggagagtgcacagaccgagaggagaatcatcncagggtccggccaaatccgacgcctcagagtcccggaggctagaggtgcggtcggacagggtggctgcaggaggggagtggggagacggagaaataggatcgagggtggccgttggtgacgcctcctaag

SEQ ID NO: 168596 - DNA, 858 bp, Zea mays
  unsure (1)..(858): unsure at all n locations
  Clone ID: MRT4577_85345C.1
gactgaggtgcgctgtcaggataaggtgtaagacgatccccgcattcggggcgcatgcgatacggtcggttggtaaggcgatttggccgaggttgctatatgacaaagtttgcccgagcttagcctcgggcgagcaggggtgcgcccgttgcctgaggaggccctcgggcgagtcatgaatccatccaggactactgttcttacccgaggccgggctcgggcgagacgagatcgcgtcccttggcagacaaggctttaactttgaaccacgcttaccggtctttacggctcgttttcaagatgttctccagccatgcttaggagtattgggggtacccttaattacggtacctgacactattgatataaggaagactataggactcaagtttgatctttggatcacttgaaagggattgaaaacaacccttgtccaagaggacaccacacatggatgtaggcgaccatttcagtcttggtcgaaccacgagataaaatcgcatgtctcacttgtgcatttactttcgtgcgatntttgttgtgtcctaagttctccaaattcacttgtgatattgctctaagtttaatttacatcttgaaagagcaatcaagtgaagaggactttctctcttcttctcgcttcagacatgngtttagttttgcgctaactcctagttttagaacaagtttgtgttttgagttgtatttttgtaggatcacctattcactccctctaggttctctcaattggatttggagttggtctcttctgttgagtctaccgaagagatggacctcaaaggggaggggcaaggtgaccaacgagaagggggacgatccccatcgacgacaagccca

SEQ ID NO: 168597 - DNA, 230 bp, Zea mays
  Clone ID: MRT4577_85346C.1
ctcggaattcggctcgaggattaatacaacccgtgacatgttttgggccccatctaccaaagcgacgggcgagccttctttggctcttggagcctcgatccacagcgctatgactaaggccagaggtgccatgctgtaggactataggggacgcacccacccgcgaagacccgacgacacatcccatatggaccttctggaccccatgcactggcattaggagctctagg

SEQ ID NO: 168598 - DNA, 341 bp, Zea mays
  Clone ID: MRT4577_85347C.1
tccttctcgctgacaccatcaacgagcatgggggcatccttgctatgaggacagactgccccccttgtttgcaccactcttcacgctggccctgccctctttctgtatagggccagcctgcttctctactcctactgcgctctgtccctcgggggggtggccttctgtctctctccttctagcgcatcaggcttccccttctgcctcctgcgttctgactcctctttatggcctgctgcttccgtttcgtcgcgcgtggccgtggtttgctgcttgcgctcctccctcctctctccgctgcgttcggcgctgtttcttctgttccgatcgctgttttttct

SEQ ID NO: 168599 - DNA, 418 bp, Zea mays
  Clone ID: MRT4577_85348C.1
cccacgcgtccgacgagacctcggccttctgcaacttcaccaaggaaccggctgccgcgctccccgcgttcgcgtggctgcgctgcgacagggaggacgtggaggactgcgcgagcttcctgcgcggccacgggatcctgacgcggagcgggagccagttcggcgcggacccgaggtacgtccgggtcagcatgctcgaccgggacgatgcctacgacatcttcgtcaagcgcctctcctccctgcactgaacaggccgggtcgggctacacgcatgcatggcatggagatgggaggaggatcgatgccatgccgcccggccggcgtcggcattgccggtccgtggaacagtgtgagcatgagccatgagtagtagagggcagcagtgttggtacttggtaggaccaagggcaggagg

SEQ ID NO: 168600 - DNA, 257 bp, Zea mays
  Clone ID: MRT4577_85349C.1
gttgtttacttgctcgcttggatctagtggctgaggagctgcggcgttggactggtctagtggccatgcatgatgtcgccacgtaggcgacgaaaggtgagaggtgccgtaagactggtggctcgcgcagagcgacaagacgagagagagacagcgatgccacgcgagaaagaaggcagaagagctctagtaccacgatagaagaagtccgatacgagagcgcgcaagactcactctatcacctcgacgcagaagca

SEQ ID NO: 168601 - DNA, 337 bp, Zea mays
  unsure (1)..(337): unsure at all n locations
  Clone ID: MRT4577_8534C.1
cgcgtcgcgtgcccgcgtccgtccgctcggccttcggctcgcgctcgggcctgcccgctgcgtttccgcgtctgtctgtgcggcggcgtccgcccttccgtggcgtcgcctggtcacggcgcgcgcgccgggcgctgcccagcttgcgactcgggcggcctcggcgccgtgtttgtggtctggcgcggcgtcctctgcggcggcctgggccgcggttctctggttcgggccgcctgggtgggtggtcgccccgtccggtccgggtcctgtcgcgcctcgcggcgccgtctccgngtcgggttgtttgggcctgccgcccgcctcgggtggtcggctc

SEQ ID NO: 168602 - DNA, 297 bp, Zea mays
  Clone ID: MRT4577_85350C.1
attattattatttttttttattttagtcttttttttgggttagaacgaaaactacccaagggtattatcacgatacaaaaaaagaccgaacccaataacatgtcatgaatatcaattgaaaccctttccaaacatactaataggttttgattaaaaaggccccaaggaaagatcatggtgaaccatatctagaaagccaagaggtctttttacacaaaaattttaatcaaaagcgcaaaaaaagtgtgaccatctaaacaactaaccatggaagtataaaaaccaaaaaggaaaatg

SEQ ID NO: 168603 - DNA, 350 bp, Zea mays
  unsure (1)..(350): unsure at all n locations
  Clone ID: MRT4577_85351C.1
anaanaaannaaaaaaagggacggtacttatgacgaaaggggggataatgcaatctaatctacaaaaaatccatgtgtaggggacacccaaaccaggaggccattgggtacggaccccaaacccgtaaccgggggggaaaaaacaaccctgattggggcggaggggaaaatatcccaaggccgggacaaggcaataattttccaacacgctatgggggcttcaatttttgggaaaagaacaccggggaaaataatttttgggacacccttgaaacccaaagggcccccaattcttgggtgaagggggggcctcaaacggggcccatttttttgggggccccctagcaatg

SEQ ID NO: 168604 - DNA, 471 bp, Zea mays
  Clone ID: MRT4577_85352C.1
cggacgcatggggcaaatgtttggagaaggcagccaagcttgatcccaactgtatggctacgtagatttgctgttgctgtccaacgaatcaaagatgcagaaaggtctcaggatgcaagcgaccagctttcatgggctggcaacgagatggcttcagtgataagagaaggagaatctgttccaattgaccctcccattgcttgggcagggcttgccatggctcacaaggctcagcatgaaattgcagctgcttttgttgctgaccgaaatgaattgacagagatggaagagcgggctgtgtacagcttaaagcaggcagtaacagaggatcctgaagatgctgtccggtggcatcagctcggtcttcatagtctctgctctcaacaatataaactctcccaaaaatacctaaaggcagcagttggtcgttctagagagtgtagttatgcatggtcaaatctcggtatttcg

SEQ ID NO: 168605 - DNA, 341 bp, Zea mays
  Clone ID: MRT4577_85353C.1
attcggctcgagcggtcctgatgaccgattgttatggcgcatgggtcacgcccctggtcttgctggactgtcatgatgaggagatgcatgctgcggaggtgctcgtgatcatgaccgtcgagtccgaccgccacacgcccatctttggagtgcctaggatcactggttgcagtaggacgaaggccgtcgcgtaagctctatgacgacgtgtcttgtccactatgtgatcgaagatactacgcggtcggatatcagacgaagtatagcttgtgtttgtgacggtggagcctttggtgtttaaggagacattagtctcacacacaatgatactgtgtgagcat

SEQ ID NO: 168606 - DNA, 628 bp, Zea mays
  unsure (1)..(628): unsure at all n locations
  Clone ID: MRT4577_85354C.1
ggaccctcgaggccggccgggtagaattgattcagcggaaattaagaatagtcatgtgaaaggggaaaatgtgattactgaaaagcctgaaggtgaagaagcacaaaagcttgaaattgaaccagcagagaaagttgccgaagaagcggcnggacactggaaaaatcccaagggcccctactgactactgaattagaaaaagaagagaatgaggagaaaacagatactgtgattctagatgctaatgggggagtcgagaaagagaatcctaatgctgctgcagaaatgtaatggggttatttggagctgtgcacagtgaaacacttcaacatttgtcatactgttgtgtaagctgtagaaatgtactgtactgttgccccatgacttttgtgatgctattttagttattttgtggccttatggatgactgtagtctcgtattttatctaaagatttggttttacttgctacctaggattaggaaattaaatgactcttcttattttagtttagattaggacatctgattttatgtagtgcagctatgtagattgtagacttctgtgacacatttgtgttttctagtcatttaaatttcacattcaaaaaaaaaaaaaaaaaagcggcc

SEQ ID NO: 168607 - DNA, 515 bp, Zea mays
  Clone ID: MRT4577_85355C.1
ctcgaggcggccgggccgggattcccagacgcagtcggctgtcgcagactggtagtacccgacacgccgccaccgcatcctcatatcaccgccgagcagataccacaccactctactgacgcccgacgagcagggtaacattttccctcggccatggataacgagaagactcacatcatcattgtggacattgggcatgctaactgtggcaagtcaaccaccactggccacctgaactacaagcttggaggtattgacaaggcgagtgattgacaggttcgacaaagaaggtgccgacatgaacaagcgcgcattcaagtatgcagtgggtgcttgacacgctcacggctgagcgagacacaggtattacaattgatattgacctgaggaagttctcgaccaccaaaaactactgcactgttattgatgacccgggacatcgtgacttcatcaaaaatatgatcactggcaattcccaagctgactgcgctgctcttatcattgactccaccact

SEQ ID NO: 168608 - DNA, 476 bp, Zea mays
  Clone ID: MRT4577_85356C.1
cgggtgatgatgaattgtgatggctgtgagcaactctggcagctctgtcgaagcctgttgttgaaaaaaaaaaaaaaaaaaaaaaaaaaaaaaaaaaaaaaaaaaaaaaaaaaaaaaaaaaaaaaaaaaaaaaaaaaaaaaaaaaccattcccaaaaaacaaaaaaaaacaaaaactactaacccaaaaaaccacctgtccccaatttgccatgctccccattccgggaagccgtaatcactcttatctctaccttggctccctctccccctttttcccccccccccccctgcccgccctccccccgccccctgcccggcctccctaggggccggccaaggtttcttcccccctttgcctggggggcttctaaatgacccttatttggcgcgctccttgtggcccccctcctggcgctcatcccccccctccccttggtggccctggtcttggccagctgtacccttggcctcttt

SEQ ID NO: 168609 - DNA, 1011 bp, Zea mays
  Clone ID: MRT4577_85357C.1
ttgggtacctcgaggccggccggggtatccctccaccagtctacgacctagcgtcgccaggcataacagtattagaccttgacctcgatctcctttccgatgagcaagcaaagatggcgccggtgagggtgttcgggacggcggacttcgtgaacgctgcgagggttatggcttgcctggaggaagttggcgtggagtacgaggtcgtcgaggtcgactacgcggccatggagcacaagggcgcccagcacctcgcaagaaacccgttcggccaaatcccagcgtttcaggacggggacacgatgctctttggtacgccatatacgcttataatccgatcgattcgatcgacacatctcactaccacagaaacgctagctagctagaggttgctttgtttttttttctattgcttgtatctctttgaacaatttctccagaatcccgagcaatcgccaagtacgtgctccgcaaatactccaagtcagctcaagtcgacctgctccgtgagggcaacccggaggaagccgccatggtagacgtgtggacggaggtcgaggcgcacacctacctacccgccatcgcgcccatcttctacgagtacgtggtgtaccccgccgagcatggcaccacgcccaaccaggaggtggtggacgagagtgtggagaggctcaggaaggtcctcgacgtctacgaggcgcacctgtacaagaccaagcagctctatctcgccggggactacttcagcctcgccgatctcaaccacgtcccgtacaccttccacctcatgaggacaccgcacgcgtcgctcttcgaggcgtatcctcacgttaaggcctggtgggagagagttatagcacgcccgtcgctgcagaagctcgccccggatatggtgatcaaagcctgattgcacgtacctttgtatcatcagattcttccttggggtgtatatatgcaaggggtacctttcttgcaaaataaataaagaaataaataaatccgatcacaatt

SEQ ID NO: 168610 - DNA, 153 bp, Zea mays
  Clone ID: MRT4577_85358C.1
gcgggacgtgctggcttctccctggttcggcgacatgatagtcgcggcggacgacggcagcgcggcagtgctccccctctacaggcactgcgtgcacccgcgggtcccgcagatggccgtcgtcgggtacgccgagagcggctccagcatcta

SEQ ID NO: 168611 - DNA, 175 bp, Zea mays
  unsure (1)..(175): unsure at all n locations
  Clone ID: MRT4577_85359C.1
cccacgcgtccgcccacgcgtccgggccaagnacgtaagaagtcntntaattnnattgggatcgaataaactccttattggggcctctcttcattagcacgctcaccagcttgtaatctgccgcatctaagcaaagacttcattcacttattgactgatttgtacgcctcttgaa

SEQ ID NO: 168612 - DNA, 158 bp, Zea mays
  Clone ID: MRT4577_8535C.1
gagaggatcagaacgatctgcacggacatctgtcaagcccgagacactgacatcgatgagctctccaccgcgatgatcaggtacaactgccacttcattaagcacaactacgcaatgctcttaagcgccaggtacatccggcttcaacaccacaacat

SEQ ID NO: 168613 - DNA, 345 bp, Zea mays
  Clone ID: MRT4577_85360C.1
aaaaagtcaacggtgacatatatttatgaacagagagagtacaacttagctacgctaaaatatacaccacaacctcaaccttaccaagactacaaccaaagttcaggcaagactatacatcacacattccacaactaaaaagatattgacatctacagactccattacactatttacgcaacaacactgaatgcttgtgctcccttggcgaccttaataaagacatcctccaaggtggtgtcgaccaggccccaagcatagatgctgaaccggcgtttcgcactctcgacggcatggaatacgtctgcaaccttcacctcctgctttggcagctcgaatttctgg

SEQ ID NO: 168614 - DNA, 227 bp, Zea mays
  Clone ID: MRT4577_85361C.1
gacgacgccggatgcactcctacataagctaataattctgctagacgaatatttcatacactgcttccaccacataagacaaaatgtcagactctgcggcgaatcaacagctccactgacccatcattccgacaccgacaacgctcaccaccgaaccctgcccactctaatatgttgcaccccatctacctactttcaccgcacacccactgtcacatattaccgat

SEQ ID NO: 168615 - DNA, 324 bp, Zea mays
  Clone ID: MRT4577_85362C.1
cagctcgacgcaagaggcgccttccaagctttgaaggggacaattcctcctgatgaaagtagcttcaacacattggttcatggctggtgcaaagcaaggatgctgaaggaggctcgcgaaacaatgaaggagatggagcggcatggtttcagtccttcagtaacgacttacacctgcctgatagaagcgtactgcatggagaaagattttcagacggttgatggtatcttggatgagatgcacacaaatagatgcactccaaatattatcacatacacaattgtgatgcatgcgctagggaaggctgggaggacacaagaagct

SEQ ID NO: 168616 - DNA, 253 bp, Zea mays
  Clone ID: MRT4577_85363C.1
tatcaaattgatttccaataacattttcacacaacatattaatccgccttgcataaaatgtcaagtttctgcatgcttcttgagtagagataaagtcacattacattgtcgttgcttctcacacagcctgcgttccagtgaatgaaaacatggactgccatcttgcattaatagaataagccaacgcgcgtgtgagaggtcacttctcagtattgacgcgctcttttcgctttctcccataacatgactctct

SEQ ID NO: 168617 - DNA, 815 bp, Zea mays
  Clone ID: MRT4577_85364C.1
ggtggtccccaaagtttctatccaccttctcgttttcccatcaccttttaccttcctccctgcagttcctgaaactctcggatgtgaaaggcatggggacactggagcccctctcaaacctctcctctctcaccacattacaattgcttagttgtggagaggatctgaaatgtcagggcttgcagtctctccttactactgggggccagctcaatgaattaaaagtcgctggcagccctagattctttgctgattgggatcctaattctggacgggctttgaaggatgctgagggaggtgaagagcagcagacacagcatgtttcatccacactgcatgagctctggacagatgacatagcaggacttcttgctgcacccatctgcagattcctctcttcctccctcaccaagctgcaacttcggggggattggtgtgaagggatggagcggttcatcaaggagcaggaggacgcccttcaactcttctcctccctccagaaactagtgttttggaatttcaaggaccttcaacaactccctgcagggctgcgtaaccttaccagcctcaagatattatcagtcaacctctgtccagccatcttgtccttgcccaacgatggcctcccggattcgctggaaatgctagatgtctacaaatgcagcgaggagctaaacagcagtgcagggggggttggagggaaccatcccaagagtccatatactctgatccaaggacaatgccatggagttcccttgtacattcttctagccttgtagcgctcttcccttcccattcaaacacatgcatgacac

SEQ ID NO: 168618 - DNA, 212 bp, Zea mays
  unsure (1)..(212): unsure at all n locations
  Clone ID: MRT4577_85365C.1
cggntgtcaaacaattacctcccttttccaccgtttacgctcgaactccacacaaggggcgtgatggtcgatttcgccgctctcttggtacacaatctgatctacttctctcagacaagcgtctgctgcgtctgccagacaccaacgttatatataccggatacctgctatataccaggtgcgctatctctgccatcatagtattaacacat

SEQ ID NO: 168619 - DNA, 1088 bp, Zea mays
  Clone ID: MRT4577_85366C.1
actccatagggcgattgggcacgagctgccgggccgggccatcgccatcgccatcgccatcgcgcaccgcctccccgtgtcccctccttctcgcccggcaccgtcgagctcggctgtggaaacagaacaaacccatcaaccatggcgaactcggcgtcggggatggccgtgagcgacgagtgcaagctcaagttccaggagctcaagtcgaagcgaagcttccggttcatcacgttcaagatcaacgagcagacgcagcaggtggtggtggacaggctggggcagccgggcgacacctacgacgacttcaccggctccatgcccgagagcgagtgccgctacgccgtcttcgacttcgacttcaccaccgacgagaactgccagaagagcaagatcttgttcatctcctggtccccggacacctcgagggtcaggagcaagatgctgtacgcgagctccaaggaccggttcaagagggagctggagggcatccagctggagctgcaggccaccgaccccagcgagatgagcatggacattgtcagggcgcgagctctctgaagaggaagacgcgcatccgctcgcgcgatcgccatgcatgccccggaacgacagaagctgtttgtcttgcatcgaccggcggcctctgcatgtacccgtgtgccgttttttgcaccgccggtgccagtgttctcttactccatgtaaactactctagacagtgctcggtgagtacagctgctcggtgagtacggtgtcacagtcactccgtgtaggcagtgccatttcgaagacaatattgcaaaatttaactaacttggttttacaatgcgtttggttggaagtattcctccgggtcactaataattcatgctttgtatatacatgacgtggtcgtggtctatggaatatagcttaaaccattactagtataatacgttgtaacaacacatcaatcatatttgatttatatctaaaaaaaaaataaaaggggcaacctccagtggtgaccagataagcctgcgcgagggcggagtacaacctgcttctctacacgctggcaatccatgtcctcggtgctctctgaa

SEQ ID NO: 168620 - DNA, 1112 bp, Zea mays
  Clone ID: MRT4577_85367C.1
cctcgctcgtggccggtgagtcgtgatctcccctctctcgtccgtctggtcctcctgtccagaggcgttctctctccctccccctttcctctggtcatcgcacccgtctccccgctctgactccgcccgcgccgccgactcccggcacggcccccaggcttcatctccgccgccgtcgccgcctcgctccgatcgacccccgaaacgccggaaaccgtgggcttcgtgtgatgacccgtggccgcggctagggttcgccgggcgtgagtcagtagcagatcggcgaagagaacaacgccaaggagacagatggatctcaaggatagcctctccaaatttaagcaacagcaggagagatgccagtcatcactggcgagcatagctgcttcgacctcaaagccaaagcacagggcccaacctgcgcatgctcccaacgtcccagcaagaccatcacaacctattaagttttcaaatgacacagaaaggctgcagcacatcaattcgattaggaaatctcctgttggagcacagatcaaacttgtcatcgaactgctttacaagacaagacaagcttttactgcagagcagataaatgaagcaacttatgttgatattcacggtaataaagctgtctttgacagcttgagaaacaaccccaaagtaagctatgatgggaggcgtttctcttacaagtccaagcatgacctgaagggaaaagatcaactgcttgttttgattagaaagttcccagaaggtcttgctgttgtggaagtcaaggatgcatattcaaatgtattggaagatttgcaggtgaccttaactctcctcatcagacaattgagatgtttctgaacacgatgtgacgcagatctgttcttaaaggtgtccaactagttaacagcaacaatgctgctaaaataataactccaagttagcagcactacatggtctataatcacaaagatacccagtgtggctgagtttagtcagtgagcccattattgccttttcaagacatctgttgtgctgtccagtgtccactaatgtgcttgaccagccaagctaaatattctactccatatatttaaacgtagttgcataatcttgagtat

SEQ ID NO: 168621 - DNA, 416 bp, Zea mays
  Clone ID: MRT4577_85368C.1
acggggccgagaaacaggaggggtttgacaccgcttttttgattccaactgcggttaaaaactcgggtaaaaacccccccgggggcttaaccagaagttttcccggatttttcccgggacaggaaccaaaaaggagtggtttcaagaaatttcccaccaaattggcccccaccggggtttggtgaggggcttcttgacaccctccaggggacggaaaacgggtggccccaaggggcttgacaaaaaactcggattataaccgcaatagatccgcgttaaagcgaaaacttcaagtacccttaaattaactggccccaaaaccgccggaaaaattaaagggactctttgggggccccttcctttgaagtttgatttgactgaggaccagtaagagcaaaatttgggcttaaagaccc

SEQ ID NO: 168622 - DNA, 590 bp, Zea mays
  Clone ID: MRT4577_85369C.1
cgagtacatttgtagataattagcccattttaacctctctaaacctctcttagacggactccaacagagcagctaaatagatagacaaagctaaaatagctgcccacgagctactgtagcagcacaaaacacttttcaacagggcagccaaacgagccagccaaaaaggatgaaaagagagagaaaaatcataatagcttgtactgtgtgtgacagctattttctttttctgtgtctgagaacattaccccaccatctactttatttgttggactatactaccgctgtctttttgcctgtgccgttgaaagcgtgtgccatatgactggaatgcttgaatggctgttcgatttgcatggcctgtgttaggagtcgttcttacagaacttattcctttaaagcaacactttggtaaaagccgcgacatcatagtgaggatgagtcgcacacgggaggtgaatagaaacaagaaaggaaacatgtaggcatggaaaatatcgagaagctcctctatgtgggctacttaaaaaaatctatagtttatttaatataaacactgaaacggaaaattacgtgtttggtccatctcc

SEQ ID NO: 168623 - DNA, 425 bp, Zea mays
  unsure (1)..(425): unsure at all n locations
  Clone ID: MRT4577_8536C.1
cggacgcgtgggtggccatgagagtagctccttcaatgtttcctctggacataaccatatttgacccattcactgagattccagttgatgttcttctgttccaaatatgcatcccattcgctattgaacatttcaagcctcgtgcaaccattaaagctcttttacatcattggttttctgtggttggttggggccttggcttaaccgatttcttactgccaaaatctgaagaaaacggtgggcaggaaaatttgaatgcaagggcagaaagaagagacagaggacatggtgggagggaaatggtcgccccacaggttgaacaactcatgatacaacatgttgccgcagaagataatggcaggggggattcaaatgaagccaatgatgtaactgaggactctgatgtagatgaccagngagactct

SEQ ID NO: 168624 - DNA, 447 bp, Zea mays
  Clone ID: MRT4577_85370C.1
gggggcgaaaaccccaggtgtccgtcaacgggcacaaagggttgggtcaccaaaaccaccggcaaagtcggagggatggtgtttacaagcgccgaaatccccccgtgaaccccccccatgcaaaaaaaaaacacatgtttccaagtctacaccccccccctccaaaaaaaaaaagaactcatttctgccaaaaccccggaccatggccagacccggcgggggccccaaagggtgatccgcgggcattggacaggccataggggcccggggcccaaaaccccccccccccggggcccacccagggtgcgcccccagggaaaaccgccccccccccactgtcagccccccaggggccccacctgggggggcacccgggggcgggaaacaggcaacaggcccccccccaccgggtaaaaaaggccgggccccccggccccgtgcccgact

SEQ ID NO: 168625 - DNA, 567 bp, Zea mays
  Clone ID: MRT4577_85371C.1
ggccgcttttttttttttttttcttcttttcttattttctttgttttctttgtttgtttatgtatatttttatttatttttctttgtttttgttttcgtgtttttattatcatatttttgtttgctattttttattcgattgtatatttttagcatcgctctttaactttattgataaaacagaacggaaactgagatgctcgtcttacagggcagtgggcggacctaggaaaggggtacactagaccggtcgaaggagagacgaacaaagcttcgtgaacatccgagcgccacatggggcgcccagcaagaggaccatgggcagaaagggcggcgcccaggtgccaaggggggaggggccggaggaacatcgcatctggggaaaagccagctggtgcaggccggccaaccacggcagcagagaaccagccggtcggttcacgaaaaaaaccgggcgatcgtcgccttcgggaaggcaagtatcccacagacggcggacaagatgaaaagggaccctgtgcatcaggaggcatgggaaccagcggaagggaggctgaacaagctcca

SEQ ID NO: 168626 - DNA, 555 bp, Zea mays
  unsure (1)..(555): unsure at all n locations
  Clone ID: MRT4577_85372C.1
tttttggggggnncncgccttaattcctaagncctttttccctgncccgncngcccttggctgtctgnccccagnnnnnggggnnccctccnnnggcttttttttnnngctcccannnccactccgtgtgagcggntnttnntcatgatncatnactatnnntccgnccttcaaagcttttggccgnggccctctccactngcngngcttcctgaacctcttctgntacagcggngntcttccgttctggcggcgcctctggttctcgctctggcgggtggngagcctctcttccatctccgagtncttcttctcccgntctcttcccttnccctccnncncngnnnnnnnagccnncttcctcnctctagcctgttgcgcttgccccctgntcctcaccaaccctctncggcgcttgtgctccttgtcnncntggcttcngcccccncctcncccgcttgcctgcgcccnggcccactggccaagggcgcggcccgcgcccccncccccgggcccgcctccctgccccacncggcggctccccgccnctcccgg

SEQ ID NO: 168627 - DNA, 699 bp, Zea mays
  unsure (1)..(699): unsure at all n locations
  Clone ID: MRT4577_85373C.1
atgtctatttttgtttctctatagtttgtagcattgcttatatcgggacttgcatgatttttatcattatgctatgcctatactgagatttgagctgtttgttttgaggcatcgggtgatccatgaccttcttccttctcattttcatgtttgctttgaggattggaatggattgatccatgaacacttcattcttgaatcttgacaaagcgcatgatttgtagaagcatgagagatggagtcatcattgtgtgtctatggcagtaaagtacttagaaaaatgacctattcctaaatccaaaaacttaatctattttatccaagttaagcctcagtgcatgtgacaaacagtatgctgcattcttactgctttcatttgtgggaggaatttatttccaatatgttatgtttttttttatattttgctttgctgacaaacagtatgctgttttcttactgctttcgtttgtgggaggaatttatattcaatatgttatgcttttttatttttctttgcttcaaggtaaacttaaggaactttttaatgtatagggctgcaaatgtcttttcttgtgcatacttggttaacatgtctcggccagaacatcgccgtatacctgtaaaacatcaaaaggcacctntggttcagtggtcttagaggggccatggcttttgcacttgctctccaatctgtgcatg

SEQ ID NO: 168628 - DNA, 224 bp, Zea mays
  Clone ID: MRT4577_85374C.1
ggagaagatcaacgcgctgcccaccatggagatcaagagcggacgcctcgccatgctctccgtgatgggcgcctgggtccaggccgagtacaccggcacctgaccgatggacaacctattcgaccacctcgacgaccctggccacgccaccatattccaggactttacccgcaaatgaggagtcgaacttattattagcattgtggggagtgctaccacacatg

SEQ ID NO: 168629 - DNA, 318 bp, Zea mays
  Clone ID: MRT4577_85375C.1
tctctgctttcataaacacaccttgcgtttctctcttgctacaacctttcttctatgaggtccttgatattagccctggttgcgcttctttcccttttattgagcgcaacaaatgcgttcattattccacagtgctcacttgctgctagtgccattattccacatttactcccaccagttacttcaatgggcttcgaacatccatccgtgcatgcctacaagcttcaacttgcgcttgcggcgtgcgtctttcaacatccaattgcccaattgcaacatcaatccttggcacatcttaaccttcaaaccatcggaacg

SEQ ID NO: 168630 - DNA, 544 bp, Zea mays
  unsure (1)..(544): unsure at all n locations
  Clone ID: MRT4577_85376C.1
caaaaaatgtgtttatacttcaaactctgatggatactattgcaaaattgctgctcacaacatgcaccgccccttttcaactaacatcatccaganaaaactatacagtgcgtgtaaatgctgatggaaagttacccgatcgctaaactaccaattgtaaagttgcctcttccagaaatgttctccgtgtgtgcttgtcgaaattccatggccatgcatatgcgcaacaaggggggagcatgcttttcaacatctgtgagatttctaaactgtatttctgagcagccagtttccaagaattgttgtcctttacaagcatagctccctaagtcttggagaggtgaatattcgccaggcagcaaacattgtctgagtctccagcggctttcatgtccctctactcaatttagtgcgcgagtcatgtcaatgagccatcattttacatctcgagttccctcaagcaaaaggcctgcccatgtcatgaaaaccgacatttacatggccacatcatcatgttgttaggggggtggctgctgctgctact

SEQ ID NO: 168631 - DNA, 1050 bp, Zea mays
  unsure (1)..(1050): unsure at all n locations
  Clone ID: MRT4577_85377C.1
gagtaagtatcaagtagagaagcatcagaacacaagatcaaagagtcttgccacgtccgcacccttcacaacaagacgaatattaactacaaaaacaatcttgctcgacgtatggaggaaaagaaaaaggaaaaaaggagaagattacatgtgatcctagagatatatacgaacaggcatttggactaattcagaactcaagtattgctctctagcagaatcaacaatagctttttacgcagccatggtttgaaaccgcctgaagatttggctatcaccacaccaatcttgtgggctgtttcctagaagccagtagcaaaaaatgtgtcagtaacaaatcgtagcctatctacaagagcagatctcatcgtgttattttaaatccaagcataaccaaactttaaccaacgtaataggtaccagtttggggataaatatcgacctagtcatgtgaagattacacaacttcaaatgttttgtgttttcgacatgcaaaatcatcataagaaaacatggcgtatggctcactgagattaccctaaaacctcactgattcttaagaaaaggaagatttcaacctgggacttgactgtattgattatgttggccatgtctggtttttctactaatgaaagagtgaattttattatttctgaatataccaaaggctgcattgtctgttcactttttctaccatggtagcctgctttgcttttcactgcaaccagggctcatcccatgttccctcctcatgttttcccctgttcattttgtttgcacataacctttccccttcattttagtggttggtccagncaccatactcgcatgacagtcnnaggggaataatgcacaatgcaattgtttttaacgcttgctatnncaatcnctagttttnctatgtttgaaaaatannaacatgtgggttaatggctgcaagatcccttatatgagacaataaattcagtnnatggtacaantgtgcctccataagcatgttaaggttctctcctgttatttgggtatatatatggcttcatnctttttttn

SEQ ID NO: 168632 - DNA, 1529 bp, Zea mays
  Clone ID: MRT4577_85378C.1
gccgtcggggaggggctggcggtcaacagggcgtacaagcgatgcatcacgctgctcaggtcgctctacgccgcgctccgcttcctcccggcttaccgcgccttccgcaggctctgcgcgtctggccaggtgtacaactactgcatgggccaccgcgtcggctccttcgccgcgcccttctcccgcgccgaggaggcggccatgcgcaccaaacgcctcgcccccgtcgagacccagctcggccgcctcgtcgtctccgtccagtacctccccagcctcgccgccttcaacttcgaggtcacttccctcgcgtccgccgcgatcatcacggattacgtcggcagccccgcggccgagcctatgcgtgccttcccaccttcgctcacggaggccaccggctcgccctttccgcagccctcgcggcgccccaacagctgggcgtcgccagcgccctggccgcacacgcttgggcaaccggctaaattctcgcctccgccggcccattacgcgtcgcccacgccctcgccaccgacgtttggctatctgcactcgcggtttagcggtgagactgcaccaatgaccataccgcaggcgggcggtggcaggggcactgtgcaccatcggaacatgtcggaacccagtagagccttcatgtttcctccaccttcgccaaagaatgtgcgaggggaggcagggatgcaggagtcaccgacagagatcaatcggtccttcaagagggcggatggcatccgcatgggagatctctatgcaaacttgccgtctggttctaagattaaggacactaaggatgaatctggcaggttctctggtgtcttctcttctagtggttcaccaagacatggtttctcaagaagttcaagcagattgtccatgcaggatgatactgatgatgcagattttccttttgctgtggatgatgtttatccagattcacgaccagggagtagtggtggaaaggacacgggggatcaggctggttcgtcatcccataaatcccaagatgctgctgttgggtatctcgtccacctgctgaaatctgcacgtccactgagagattctacctactcatctcatacatcaaggggtgaatctaccgaagcaggaagcaccagctctttcttgtcccgcaggacatccgacgcactggaggagtttgaatctttcaaggaaacaagggagaacctgctagcacgtagtagatctcggctgcaagattcattggataagccctagtgttgatgcagtctgtggttcgattcctcaaaaggtgaagggtccaaactgtagagtaaagatcatatggcgaggctgggtaaactctttatttcagactagtccgtgtgtaaatagctaattaactggcgcttgattccgaaagagaatacacaggtcgccgttaattctattgttggaaacttgtcattcttaaactcaaagcaggaatatcgtgtgcctttgttcatagtgtttgtttacaagtgaaatcaacatgatgatctatctttatc

SEQ ID NO: 168633 - DNA, 363 bp, Zea mays
  Clone ID: MRT4577_85379C.1
tgttgacgcgtgggcggacgcgtgggataagagcggatagaagagtggcaactccctgaagatcactagattaagcttggaattgttggaataatagatcccttccgagtaggagttttggatattgttggtctatgataagcagctggcataaatgcgcacatggttactgctgattatctccatactgcatgatactctgatttggatgtgcattaaacttgaagatcccaatgagtcagagtctgttataattgaaggaaaaacatttccgccagctgtcacacttcggtaaggtattgttgcttcttgaaataaccatagtgatggtgaggtctccaccaaattgataaacttttactt

SEQ ID NO: 168634 - DNA, 268 bp, Zea mays
  Clone ID: MRT4577_8537C.1
agcagtggtaacaacgcagagtacgcgggggatatggatccatggatcggatcatcggagtcatggagggagaggcttttgctctccgctgtatgaatatcatagtagctctttttgtagatagcagtggtgagaatgagatggcaactaaaaagccatctctgtgtctgcctgctgtaatctcctctcaccaggccatgaatctggttcttcgtaaaaaaaaaaaaaaaaaaaaaaaaaaaaagtactctgcgttgttaccactgct

SEQ ID NO: 168635 - DNA, 555 bp, Zea mays
  Clone ID: MRT4577_85380C.1
ctcggccccccccccccccccccccccccccccccccccccccccccccccccccccccccccccctttttttttaaacaacggacacaaagcgaccttgcaataaaaaacccaggggggcaacaacaaacgagacgaacgaaaataacccctttggactagggaaaacatcccgggagcaaacaggataatttggccgggcggcccccaccgttaatttcctccatttcccgggggagttgccgaacccccccccacggttgccaccgccgaagcccccccccccaccaccgtagcccccgccgccaccgtagccgccgccgccaccgccgaaacccccccccccattacggggccccccaccgccgtaacccccccctccacggccaccaccgtagccgccggcgccgttttcaagggcgggggggaactggccctttttaacggggatgttggggccccccaattctttgccgttaatgcccttgagggggttccccatcgccccctccggggaaaaggggacaaaacccaacccgggggacctttgggttt

SEQ ID NO: 168636 - DNA, 448 bp, Zea mays
  Clone ID: MRT4577_85381C.1
aaaaggcccgggaggctttttggagcaacaaacccttttacgaaaaaaggggggaggtaaaactttaaaaaacttgggttaaccctaccccaaaccccaagggcattggcaccctttttacctacaggttaacccaattttccgaaaaacccagaaaaaaaccctttggcccaaggaaaacccccccaaaaaatacaaacccacggaggaggggtgcccaccacccttagggactacagttacaaaactacttcctaaacaggcccacgtatttccttttgggacccagtggggtaaataataaaaataaacccgggagtccggaacctgaccttggccctaaacaaaaaacccccctttttttcaatcctaaaatcaggggggggggggaaacaaaaattaaaaggaacctcgcaggggtttgtaaacaaaggggggctccaaaagt

SEQ ID NO: 168637 - DNA, 494 bp, Zea mays
  unsure (1)..(494): unsure at all n locations
  Clone ID: MRT4577_85382C.1
gcactgcgcaggccccaagtgcttgaggaccggcgggaccgcaacccggtggccaccgtcatgctgctctccgatacccagcagcagcagtcggcagcaccggaaaactcgtcaaggaagcagtttgggcggccagctgtggccccagcaacgcgcttcactcacgtggagatccccatcggccccggcgacccacctcctcttgtgtccgagtgcgaggaggagcctcccgtggagcacgcgttcgccaagtgccttggcgggctggtgagcgtggtgatgcaagaggtgcagctggagctggcgttcctgacgggggagattacggcggtgtactcgtgcgggcccgggcagcaggccgtggcagtctccggtggtgcggnggtgagcgtgcggctgggcgagatgtacgcggaggaggagcgcgagctgctggtggaggtgcgcgcgccgctgggcagccacccgcactcgctgtncgtgcggtgcacgta

SEQ ID NO: 168638 - DNA, 233 bp, Zea mays
  unsure (1)..(233): unsure at all n locations
  Clone ID: MRT4577_85383C.1
gccggccggtttcgaatctcctctggncttccgccatggttcagcccgtattcctctcctctctccgctcccgcctctgctccgcgccgccgccgccttaccatcacctccagtccagccgcggataccacgcccagctcggagcctcgcgagaacacgtatctgcaggaggatgctgcccacaaaaggctcaaattatataagaacatcgtgtcacacgtctcccacatctg

SEQ ID NO: 168639 - DNA, 107 bp, Zea mays
  Clone ID: MRT4577_85384C.1
attagttcagagaatagctagtctctagattctgtgcaacccctgttataaccctaaaattgtagtgctagcaacactacaatcaggttcgtatagcctggcgcgtt

SEQ ID NO: 168640 - DNA, 334 bp, Zea mays
  Clone ID: MRT4577_85385C.1
ccggccgggaaaatatacaaaatgactgtcattcacatcgtcctcttcaagttccgcgccgacgtagacgaagcccaccgtcaaacattcatcaacgaactcaagactctcaaaacactatcatgcgtcaaagaccaacgtctagtcgtaggcggaccgtccatcacagatcccatcgctcgtagcaagggctatcaaatctgcctgttgagtttccatccgagcccttctgcgttggtcgagtaccaagcgagcagcgagcatcacagggtaacaagtcagtatttatggccgtacgctgaagatgttacgaggctctattttaggcgactgt

SEQ ID NO: 168641 - DNA, 529 bp, Zea mays
  Clone ID: MRT4577_85386C.1
gtggggggggggggttttttttttttttttttttttttttttttttttttttttttttttttttttttttttttttttttttaaaagaaaaacaacaatcgataactaaaaaaggacaagcccccagctttttttcacaccattttttttgggggggggggggggccctaataacacgggccgtcctgaattaaaaactaacaaaagcccgccggtcttttaactctggggttcgttgttgatcaaacccaaggctcaacgggaggatgggaaaacggagttggctttggctgcccccaccctggagggggagggggggattcccgcgggggaggggggtacccccgcccccgcttgctgtgctcaagccccggggggtactccggcaccgggggtttgctggggtcaagccccggggggtaccccggcacccgcaggggtgccttggggaaatgaactaacaagggctttttgatcggggagcaaaaaaacccggacccccactcccgggacgggtagggcattttgc

SEQ ID NO: 168642 - DNA, 277 bp, Zea mays
  unsure (1)..(277): unsure at all n locations
  Clone ID: MRT4577_85387C.1
tagtcatacggcttctccttgccgcatagaactggtgttagcccgtctgctntgggccctcttccagtcacattcgaagtggtctcggtcgagtgttaatgcctcggcatctgatgtgtctactgtaaacagagaagtgcttctatggtcgtggtatagtcgcgacaaaatgatctcccggaaggccttgcgacaagtcaaggaggtgacacaattaacaggtcgataccgtgataccgctgatgtggagactgctcatgatcttaccatgtggtct

SEQ ID NO: 168643 - DNA, 311 bp, Zea mays
  Clone ID: MRT4577_85388C.1
tcggtctactgatacagtccaatctacaactaggtttactggtctcccaccggcgacgtctacgtagtttgaaccactgggcttttgatctgttccgtcaccctcgcttggatcctcggcggcggctccctcctcgtctacaacaccagcgccctcttcggcttatgatattcaatgcatgcgcttcttgcgattcgtcgtgtaaaatcatggtgtctgtctataatctaacctccatggatgctcatccttcgtcatgtaacaattattcagttctacttcttcattacattatttttgattcttttata

SEQ ID NO: 168644 - DNA, 1727 bp, Zea mays
  Clone ID: MRT4577_85389C.1
ccggccggggaatgggtaaaaaatggatgagtatgcgagtttgctatcaaaaaaaaaaatagggagcctcgaggcccggcggggacccccgcgagacctgtccgaatcgcgcccaggtccctcgctgggagtttcgccgagggccctcccgcctcccctagattcacgacggagatggcgtccgagctcacctaccgcggcggcgggacgtccacggccgccggcgccggcgccgggggatactcaccgaagccgtccaagccgctcgcgtggctgccccgcgcggcccgctacgccgtcgccgagcatcgcccgctcttcgcgctcgccgggatgctgatcgccgccgccgtcatctccatcgcctccccgtccgcctcctcctcctcctccacctccacctccaccggcggcgccgcctcgtcctactccaacaacaacaatccgctcgcccgcttccccgtcgagcccgcccaccaccgcgacgtggccacgcggcacttcgtcggcggcaaggtgccgctgggcctcaagcggaaggcgctccgcgtcctcgtcaccggcggcgccggcttcgtcggcagccacctggtggaccgcctcctcgagcgcggcgacagcgttatcgtcgtcgataacttcttcaccggccgcaaggacaacgttcttcaccacctcaacgacccaaacttcgagatgatccgccacgatgtcgtcgagcccatcctgctcgaggtcgaccagatctaccacctcgcctgcccggcgtcccccgtccactacaaatacaaccccatcaagacaatcaagaccaatgtggttgggactctgaacatgctcggattagcaaagaggatcaacgccaggttcctcctcaccagtaccagtgaggtctatggtgatcctctccagcacccgcaggtggagacttactggggcaatgtcaatcccatcggtgtcaggagctgttacgatgagggcaagcgtacagctgaaacgttgaccatggattaccaccgtggtgccaaccttgaggttaggatcgcacgtatcttcaacacatatggccctcgcatgtgcattgacgatggccgtgttgtcagtaactttgttgctcaggcactgaggaaggagcccttgacggtttatggtgatggaaagcaaaccaggagtttccaatatgtttctgatctggttgagccgcgccaaggagttcctcgggtgggagccgaagatccccctgcgtgagggccttcccctcatggtctccgacttccgcaagcgcatcttcggcgaccaagacgctactgccaccaccggaaaccagcaaggttaggatgaaggagcgcacatgacatggaaatttttggtggccctgcttctagctgcttggttgctctctccttactgacaaaagctatgggccacgtagttcgttgggaatgtgttactggaatacctcggctgatgctgtaatgccattctttttttcccctgtattttttctttctcagttctctcagtccttagctatacaaaaaaaaagttcagttgaacagttggagataaaccaggatgatctaattctttgttgagagcatagcatcatatatatggtataaatcatgtcattttgcaaatgtatgtattcccttctttggtgggtctagctctttgttgaagctaggcgtaggatgcctatcctggtctcagaaactagacttgag

SEQ ID NO: 168645 - DNA, 581 bp, Zea mays
  Clone ID: MRT4577_8538C.1
agcagtcagcagtgaccaactcgaagcttgcgttcttgtagtagaggtcggcagcaagcggtagagcgagaggtcgagaagatgaagagcagcactctgttggcgatcctagttctccaggcccttctggtctctacggccgtggccaaaggacctgcagggccgaagaagcagtgcgccgccacctgcaagaactgcgtccccgtctccacggacaagggcgccaccaagtacagatgccgcgacttcctccccgaaaactgcggctgcaagatccactagactcatccacagcggcacagccgatggatccttccatgctcctccgtccgtccgccttgctacaagcaggcagccaccaataagctagctcttgttgttgttttgcatgtttgattgggtgtcccttcccagtcgagatggaataatgtcaggcgcacgtacagacgtgttattacgatatttctcccctacaaataaaaactcgatctgtggggttaacactgtcccctagtattacaattaaaaaaagatgttatcacgcatgttaagaaaacatctgaatccctatcttagaatag

SEQ ID NO: 168646 - DNA, 520 bp, Zea mays
  Clone ID: MRT4577_85390C.1
ttttttttttttttttttttttttttttttttttttttttttttttttttttttttttttttttttttttttttttttttttttttttaaaggccggccaaagtttgtccccccaaatgaaaaacccccggggggggggttttgaaaaataaaaacccaacaggggggggcaagcagccccccctggggaaaccccccccagacaaacagggggggggggcccacaaataaacccccccggttttttgccctttttggagggccgggggaaaaaacttttcccttttaagcgggaaaaggcccttttggttttgggggatccaaacccccttgggtttttacaaggagttaagtagccaggggggggccctttttccccataaaaaaattttttgggcggggggtccccagttcctttcgaaaaagggggtaaacaaaccagggggccccttttttttttttaaaagtttcttcaaaaggggcgggtttttcctcagggggggaaaatttgttgggggcc

SEQ ID NO: 168647 - DNA, 3057 bp, Zea mays
  Clone ID: MRT4577_85391C.1
gccggccggggagccaccgctcccccgcccataaatacctcttcgctcccgccgctgccgctgccacccccgcgagacctgtccgaatcgcgcccaggtccctcgctgggagtttcgccgagggccctcccgcctcccctagattcacgacggagatggcgtccgagctcacctaccgcggcggcggggcgtccacggccgccggcaccggcgccgggggatactccccgaagccgtccaagccgctcgcgtggctgccccgcgcggcccgctacgctgtcgccgagcatcgcccgctcttcgcgctggccgggatgctgatcgccgccgccgtcatctccatcgcctccccgtccgcctcctcctcctcctccacctctacctccaccggcgccgacgcctcgtcctactccaacaacaacaatccgctcgcccgcttccccgtcgagcccgcccaccaccgtgacgtggccacgcggcacttcgtcggcggcaaggtgccgctgggccttaaacggaaggcgctccgtgttctcgtcaccggcggcgccggcttcgtcggcagccacctggtggaccgcctcctcgagcgcggcgacagcgttatcgtcgtcgataacttcttcaccggccgcaaggacaacgttctgcaccacctcaacgacccaaacttcgagatgatccgccacgatgtcgtcgagcccatcctgctcgaggtcgaccagatctaccacctcgcctgcccggcgtcccccgtccactacaaatacaaccccatcaagacaatcatatcctgtctctgcgaattccttcagttcagttccgctgcgttcatttcccttcctggtcgaatgatttccgctttatgcctcgatcgcgaccgcttccagggggcttctccatccggtcgcaagccagacttgttccgtagaggagagccgtacttgcgaatgcttgattgccggcttatcgccggctttccccccctcttcgccttcttccgcaagcgcatgctccgcgagcaagccaccgatgcacccctcaacgatattctgtcaagctttgtgcctaggatgaggacaggatcttgaaattctttattacctatttccccctcccatgtgcattgacgatggtccgtgttgtcagtaactttgttgctcaggcactgaggaaggagcccttgacggtttatggtgatggaaagcaaaccaggagtttccaatatgtttctgatgtggttgagggtctgtttaagctgatgtaaggcgagcatgtggggccattcaacctgggtaaccctggcgaattcagcacgcttgagcttgccaacgatgtcaaggatcgagttccgcacaaacaaccagatcgacttgcacaagcaccacccagacctaagccgagcaacggagttccgtcggtaggagccgaaggtccctctgcgtgagggccttcccctcatggtctccgacttccgcaagcgcatcttcggcgaccaagacgctactgccaccacacgcggaaaccagagaggttaggatgaaggagcgcacatgacttcgtaccattttactttgcttcatgatccgttaatgaaagcaaaaagtaagcgcacggtgcgcatggatctgggttagttatgtactttgcttacttctgacataaagggcgcatttcaattttcaacaacacaaaagttgacgtccaagtggcctttgccttttccactttctaagcaacttcgcttactgttcacttcacgaaatttccttatgctttacttgttttgcaactgaatgtggagtagcaatgtgacaaagtgaaaaagggtgtctggctgattcatttagtttctgctcgttttgctttcttgagatggttcgtgttagccttaacctttgtgatagcacaagaccaatgtggttgggactctgaacatgctcggattagcaaagaggatcaacgccaggttcctcctcaccagtaccagtgaggtctatggtgatcctctccagcacccgcaggtggagacttactggggcaatgtcaatcccatcggtgtcaggagctgttacgatgagggcaagcgtacagctgaaacgttgaccatggattaccaccgtggtgccaaccttgaggttaggatcgcacgtatcttcaatacatatggccctcgcatgtgcattgacgatggccgtgttgtcagtaactttgttgctcaggcactgaggaaggagcccttgacggtttatggtgatggaaagcaaaccaggagtttccaatatgtttctgatctggttgagggtctgatgaagctgatggaaggcgagcatgtggggccattcaacctgggtaaccctggcgagttcaccatgcttgagcttgccaaggttgtccaggacaccatcgaccccaacgcacggatcgagttccgcaagaacacccaggacgacccgcacaagcgcaagcccgacatcggccgtgccaaggagctccttgggtgggagccgaagatccccctccgcgagggccttcccctcatggtcaccgacttccgcaagcgcatcttcggcgaccaagacgccgcggctgccaccaccggaaaccagcaaggctaggacggaagaggagcacatgacatggaaatttttggtggccctgcttctagctgcttggttgctcctctccttactgacaaaagctatggccatgtagttcgtcgggaatgtgtcgctgaaataccttggttgatgctgtaatgctattctttctcctgtattttttctctctcagttcgctcagccattagctatacaaaaaaaaaagttcagttgaaccgttggggataaacctggatgatctaattctttgttgagagcatagcatcatatatatggtatagctcacttttttttgtttgcttttgcaagtgtgccctgccttggtgggtctagttctttctttgttgacacgcggagaatgcctatcctgctcccagaaactatactagaacaaagaaacacagttcttaacaaaaaaaaaaaaaaaaaagcggcc

SEQ ID NO: 168648 - DNA, 423 bp, Zea mays
  Clone ID: MRT4577_85392C.1
tggcttggaacctttgggctgatttatgtgcttggtaaagtggagcttggaccgtagccttcctggcttacttggttgctatactagttatatgttgatgtgttgttagctgttgtatgagggggtttgcgacgttgaagaagacgggtgcgaatcttaaggtggaggtggtttgtgattgttgtcttgttgtggaggttgattgttgtgattgttaggagtgtgttaaggaggagtagcatcgggttgaggtcgagggttttaagctttgtgtcgtgtgttgttgggaggaggatgttgagaagtgtgttgaggttgtggtctgtaaggctgagaattgttgatctgttgaggtagaggttgatgttgctgttgtccttgtactggtgttgcttaaagttgtagtgtgtaaggtgccttgtg

SEQ ID NO: 168649 - DNA, 292 bp, Zea mays
  unsure (1)..(292): unsure at all n locations
  Clone ID: MRT4577_85393C.1
tagtcggcacgaggccaccggggcgccaccgancacacatacacactcaccagcaggcagcagcagctagccaagctataccactagaaccagagcacaactcaaagcaatgccgccgcctcctcctcctccgccccactcccacgcttcccatcccgcgccgcatggacgcgagcgncagtanggcgggggcactctgttcggcgagcgggcgggggcgcgacgatggacctgggcgggtcggtggtnatcgacccgggcncctcnnagctgggcctgctcggcggggggg

SEQ ID NO: 168650 - DNA, 324 bp, Zea mays
  Clone ID: MRT4577_85394C.1
ccacgcgtccgctcgccggctcggggacgccgccgctggagaccacgggcttcgcgctggcgccggggcagtcgcgcgcgctgtacgcgccgcaggggtggtcgggccgcttctggggccgctccggctgcgacttcgacgccgcctccgccaagggctcctgcgccacgggcgactgcggctccggcgaggtcgagtgccgcggcgcgggggcgtccccgcccgccacgctcgccgagttcacgctcgacggcgccggcggcaaggacttctacgacgtcagcctcgtcgacggctacaacctgcccatgctcgtgcgggcca

SEQ ID NO: 168651 - DNA, 564 bp, Zea mays
  Clone ID: MRT4577_85395C.1
attgaaaacaccaactcctcgttgtcggacaaagtagatctactacgatgtagcaactatggcgtactcctccttctccaaagcgctcgcacttgtggcgctcatcttctccatccttgtcaagaatggctcgtagcgctatacctgacaacttcaccgactccgacttcgcctgacgatccgcaactgggaggctgccatagacacctgatacggcgacgcccaccggctctggccctgactacaacggaggggcctgcggaggcaagaacgcgaatgtgacgaccattcatctcgcgatgacatcaagcaggaaccagaccctgttcaaagacggctagggatgccattcctgctaccagatactacgccagaaacaccctgcctgctccggtaacccacatacggtgatgatcactgagatgaactactaaccggtcgtcaatgcaccatcttcgacctcagcgctacggcttttgtagccatggccaaggacgaacgcaacgacgagctccaccacgccgtgatcattgacatccagttcaagactgtgacctgcaacta

SEQ ID NO: 168652 - DNA, 580 bp, Zea mays
  unsure (1)..(580): unsure at all n locations
  Clone ID: MRT4577_85396C.1
gggaataccggactacacagctcgcagccgtgtttcactcttgaatcctctctcggtgttccgatggtccgcacgaagctcacataaaggaagtcgaccggcggcgaggtcccccggaagtacatggctactaaagttgcgcgcaagtcgacgccggccaccggcggagggaagaagcccgaccgcttccgtgccgntgccgacgggctccgcgagatcaggaagtgccagaagagactggaatgatctcggaagataccttacagagcctcgggcgcgagatcgcgcacgagttcatcactgctctattccatcaacaatccgacgtgaaatgtatgtttaagnttcccttgttctatatgtagtagctatttgagctcatagtcaattgcncagtgtttgtctgtgtaatgtttgatactgccattaaattcttcttgcgttggatgaactacaagnaaagagattngctgcatgcggnacaatgataacagnagncaggaggcaaacacattcaggatggaagnaaagagattatttggcttttccacaaaaaaaaaaaaaaaaaaagggccctagg

SEQ ID NO: 168653 - DNA, 839 bp, Zea mays
  Clone ID: MRT4577_85397C.1
aatctcctccgctcttctcccccagccgctttgccgccgcccgccgcccgccgtcccgccgcccgcgatggaggccctccacgaggagatgcccttcgacctctccttccacccctccgtgcccctcgtcgccacctccctcatcaccggcgagctccacatgttccgctacgccgacggtttgccgctggagaggttgttcgtggcaaaacctcacaaggagtcatgtagggctgttcgttttgtggactcaggaactgcgattctgacgggatctgctgatatgtcgattgtcgcttctgatgtagaaacaggcaaagtcattgcccgtttggataatgcacatgatgacgccataaaccgccttgtgtgtcttactgaaactacagttgcttcaggcgatgatgacggttacattaaggtgtgggatactcggcaacgatcttgctgcaacacttttcaccgccatgaagattacatatcagatatgacctatgtagctggctcaaatcaaatattggctacaagtggtgatggaactttatctgtgaacaatctccggggtaacagagtaaagtcacaatctgaattttcagaagacgaactcctatctttggtggtaatgaagaatggccaaaaagttgtttgtggaactccaagtggaactctgttgttgtattcgtggggacattttaaggactgcagtgaccgttttctggggcacgcgcagtctgttgataacttgctgaagctggatgaagaaactctgatatctgctgcagcagatggtgtgatcaggttagtgggtatcttaccgaatcagatatacagccgctagc

SEQ ID NO: 168654 - DNA, 1286 bp, Zea mays
  Clone ID: MRT4577_85398C.1
gcgagttcgacgatgacttcgacgacgacgacttcgatgacgacgaggactacgacgacgagggcttcgacgacgacgtctacgacgagcccaagatgatgaagcccatggccgtgccgccgccggccggcggggcgacaagaagggcggtggtggcaagaagggtggcggcgggagcgagatcccggtgcagatcaagggaaacaaccagggcggcgggcagccgcacaacgcaaagggaggccccccgggcggcgggaacccgctggcccaggggaagaaaggcggcgccgttggcgggccgatgggcggcatgctgcctcagcaggccatgatgaggcctaacatgctgggtggcgctggtgccggcttccccggtacggcccagatgggcggcggacctatgggcatgccgatgggccacccgcacatgggtatcatgcagcagggcggaggcggcggcggcggcggcgtgccgggcctggggttctaccagggaaatgccaacggcggcggcggcggcatgcattctggcgcggagatgcttcaggccgcggcggcgtccgggaaccccatggcccagcagcagtacatggccttgctgcagcatcagcaacagcagcagatgatgctgcaacacgggaacggcggaggagcagggtacccggcaatgggctacggctatggccggccaccgatgatgcattacccaatgcccccgcactcgcaccccgagccatacaacatcttcagcgacgagaaccccaacagcacctgctcactcatgtgatcagcatatcgtctcttgctgccctgttccaagtaaaacatctgaaggagctcaataccgctggccgccggcggacgtccgccatggttgaagcgccgtccgtgaatcaatcataaatcagtgtgcttggttggggggatgatcgtagctagaatttgccccttttcctcctcccgtttcacctttttctctacgcttattttcgccttcctttcagaaaaaaaggaacttccttgaatgcgaagtttggtatagtaattatgaatagtttccataagggaggagatggtgggggccttcttcatagccaacccacccaatagggggtgggtgggtggttcgcttgcgtcttcttccattctactagcttcataaaaggtggactgatggaagagcaaagttgtcaatctcagtaaaatcagtgtgcatatgtcgtggttccttttctgaccatatataatatatatatgtaatggtaataagttctgtttacggt

SEQ ID NO: 168655 - DNA, 502 bp, Zea mays
  unsure (1)..(502): unsure at all n locations
  Clone ID: MRT4577_85399C.1
caagaaggacgaaaacagacggaagacggcnccagaaagcncnggcaagagngaagnccanggctcagnacccgngaagcaagagacagnaccagaggannnncactggcgngncaaaanagcaggagncncaggctannngcaagaaaagagccggaggagncagcggaggaggacangagngaanncaaggaacngngggangacgangcaccnancccgggnnannnnnaggggggaaaccngnnnngngggannnannncncngnagaaagcnccgnngggcnngagngcnacngaannganggcacaaanggcnganaacccaaagnagcgnngcnggngcangaacngacangnnnggannnggacnnaggngnggnannncnnnggccgaaagcacagnagaanannancnacaggggaaggagccnngnannnacngngngaaancggngnaaagagnnnganancaaaaaaaaaaaaaaaaaaaaaagggcgg

SEQ ID NO: 168656 - DNA, 581 bp, Zea mays
  Clone ID: MRT4577_8539C.1
gcacgagggtctctacggccgtggccaaaggacctgcaggtacgtgtgcttgccgagatttcatctagctggctactagcttgattggacgaaataaagcaagtacgtacgcatgatgctgctgcgcgcagggccgaagaagcagtgctggtgcggcgagtgcaccagctggtcgggcgtgtggacctgcgacgacctcctcaccaagtgcgccgccacctgcaagaactgcgtccccgtgtccacggacaagggcgccaccaagtacagatgccgcgacttcctccccgaaaactgcggctgcaagatccactagactcatccacagcggcacagccgatggatccttccatgctcctccgtccgtccgccttgctacaagcaggcagccatcaataagctagctctttttgttttgcatgtttgattgggtgtcccttcccactcgagatggaataaaataaatgtcaagcgcacgttaagacgtgttattacgatatttcccccctacaaataaaaactcgatctgtggggttaacactgtcccctagtattacaattaaaaaaaaaaaaaaaaaaac

SEQ ID NO: 168657 - DNA, 1113 bp, Zea mays
  Clone ID: MRT4577_853C.1
gcacgagattttcccgtcggaaacaaccctggccttaggaggccaggcgattctccgccgcctcgtctcgtcttcgctatgcaccacgtccacgagcgcctccgccgctccaacgctccaacgcttgagcgcctccaacgccactccaacgccacgagcgcctccgccgctccaccgaacaactccaacgccactccagctcttgcagcagtagaactctactgcagccagctacgacaccctgcgcctgccgcactaggtacatttgattctggtttctgccgcacaagatccgctacctcttggacccggacatctacaccgacggcaggatctccgtgcagggcatcgacgccgtgctcttcgcgccggacgacgccaaggccacgcagaccgtcgacccgaacaggaagcctcctaccatcgtcacccacaagaagaagatcaagctccggcgagttcatctattgctcaacctcagtattggccaacgtgaaaacatggaggtgaagtgaagcaagtggtagttgagcatatgctggtggttggttgtcttcatgaacatctctttgatggctgataccattcctgggactgcaagccaacactgtcctttaacccatgacccatgagcaacaatttcttcttaacaacagagcatgatgttagagaaatttggcttcaagcgcaaaattaggttgcttcgtgggagtgatgcatggcctgaacaaatgatatgagcaaatttgacaactgcagttctgttatggtgaatggtgattgtagttcagtttcagctctaacctatgaaaaattgaatggcagttgcactaatctgttggtggaatgattttcccagtaatttcctggacaagcagatcactgagaaccatctaccttatgagaaatgatgccttgtatggttcagtatagttcttgtattgctggtttaaattaattcttgtatggcagttgcactaaactgaatggcagttgcactttgagatattcttctattgttggtttaaaaccatggtgactttcttgtatgcattctgtatgcattcttgtttaaaacctggttgcttatgtatgcattcttgtatgccgtgt

SEQ ID NO: 168658 - DNA, 798 bp, Zea mays
  Clone ID: MRT4577_85400C.1
gccgttgaaggaccactttaagtccgtcaagttcgccctccccgaggacagcttcgacgacgacggtggcagcgagttcgacgatgacttcgacgacgacgacttcgatgacgacgaggactacgacgacgagggcttcgacgacgacgtctacgacgagcccaagatgatgaagcccatggccgtgccgccgccgtccggcgggggcgacaagaagggcggtggtggcaagaagggtggcggcgggaacgagatcccggtgcagatcaagggaaacaaccacggcggcgggcaaccgcacaacgcaaagggaggccccccgggcggcgggaacccgctggcccaggggaagaaaggcggtggcggtggtggcgccgtcggtgggccgatgggcggcatgctgccacagcaggccatgatgaggcccaacatgctgggtggcgctggtgccggcttccccggtacggcccagatgggcggcggacctatgggcatgccgatgggccacccgcacatgggtatcatgcagcagggcgggggcggcggcggcggcgtgccgggcctgggattctaccagggaaatgccaacggcggcggcggcggcggcatgcattctggcgcggagatgcttcaggccgccgcggcgtccgggaaccccatggcgcagcagcagtacatggccttgctgcagcatcagcagcagcagcatcagcagcagatgatgctgcaacacgggaacggcggaggagcagggtacccggcaagaggctacggctaggccggctcgaggtcccaatg

SEQ ID NO: 168659 - DNA, 391 bp, Zea mays
  Clone ID: MRT4577_85401C.1
cccacgcgtccggaataagctaaggataatgatgaagatgcatggccttggagatctaccgtactggactatatcctattgctattttctactgttgtcgctgctctatgtgctgtccttcatgctgtttggttctgcccttggtttaacattcttccgccagaacaactacggcatgcagtttgtgttctattttgcttacatgaatttgcaaatttcgtttgcatttcttatgacaacatacttctctagtgtgaggacagctactgtgacaggaaatctgtacatatttgtgtctggccttctgtcacaattcatgttcagaccctatgttgaagatagtaacatcttaagaatctggatcacgcttatggaacttctacctgcattt

SEQ ID NO: 168660 - DNA, 304 bp, Zea mays
  Clone ID: MRT4577_85402C.1
tattgacggctgaaccaacagccacagggacatatgcacccacactggcgcctagagatcacgaatgcatggcggaccgatccaatgatacatgcaccacacaagcacaaccgaaccgacccaccatgcatggcggtgagccaaataagaccagacgatggcgcatccttatttttgacacgcccatgcacaaagcagcagtaaagacagggtgacatgcatgctgccgcatacgaaacaacgcaccatgatcagcaggtggcggggctgcacttgcagcttgtacccttgctgcagccgtggg

SEQ ID NO: 168661 - DNA, 731 bp, Zea mays
  Clone ID: MRT4577_85403C.1
cctcgaggccggccggggacagctccaaaaatgaggtcgacccccacgagggtacccgacagtacgaggagaggaaataacccggaagagagccactcgaggagatgagagcgccggcctacagaggtgggtgggactggcgacgtacttctcgcctaggacccgagaggcgctgcaccgtacagcgaccaacctgttcctcgccgtagaccgcctgctgctgctgctcgtcatcaaggagcccgactacgaccagatcgaggccatcctctgggaatccaccggaatccccgatgattcccctctcgaagttgtctgactctattatcgcgcagaaatatggagcacaacccgacatggtaacctcggacctcctgcacgctacacctacccacaatgaaattatcgtcgatgtgaaagccctgcgggcagatctgcgtgcaaagctctgccaagatatccatgacaccccgatgagctgcttggctataggaagcagctcccttggtaaactcctcaggctgctcttacgaagcgacagagattacgtcctgagcaacgccacctgccctgacaccgttgacaagacatcgagcaccctaatgttgatctcatccccgaaatgcctgacaattgctgtggatataataaaagatggatgtcctcgtgaagaacatgcacctaggttcaagatacctgaaacatgtcgaaccgggcaatcctattgtaca

SEQ ID NO: 168662 - DNA, 288 bp, Zea mays
  Clone ID: MRT4577_85404C.1
gcggtactgttgttggtatcaagttcaaagatggcattgtcctgtgtgtcgagagagctgctaacctcaaagatgatgcttgaaggatcaaaccgaacgtatccattcaaggcaccgtgactctggcttggatgttgctggactatcagcagatggcatcaaattgctcaaggaccagatcacaagctgacattgattaatagggtaatggtgaacccatttctgtgaagtactaggcttatcgacttacacggtatactcatttttacactgctgtactggtggatc

SEQ ID NO: 168663 - DNA, 242 bp, Zea mays
  Clone ID: MRT4577_85405C.1
cgcgcgggtgagccggtgaccctcctacttttcgccaccctgctggtatatcccgcctgtcgtccacgccatggccgccgaatatacactgctctccctgccatgccgcctgccctcgccgttccctccgccggtgcctactacaacccgccggctgcctttctcctcttcggctgcagcatccaccttccctctgagcccactcttctggggctctttatccacgctcactttttttcttt

SEQ ID NO: 168664 - DNA, 377 bp, Zea mays
  Clone ID: MRT4577_85407C.1
cagactcccgacagcaacatgcgtgggaagtgaacatgaactctctgtaaggtcgacgagtacaggacaacttatgtacaaggtaggatgtgttgaaacgtcggcgcacagaagagggccagaaaacctgctcgtatgaacagaactgtctgacagagcgaatggaaggtccacgactcaagggtggacctgaaagacgcataccccctaatatgactcggtggcagatcgagagaacgaagtgctacagccggggcaatgacaccccaagatagcgggagttggtcaagcacatgatcactgttaccgacgcaggatggaagcggtgttatgagcagtggctccaccacggaggttgaatgaggctggaatctcca

SEQ ID NO: 168665 - DNA, 433 bp, Zea mays
  Clone ID: MRT4577_85408C.1
ccgggaaaaaccccaaccaatttttgggttttttttgggaaccccatccccctttgggggcccccttttcgggtcccccccattgggaaccaaaaaagggcccccccaaccatgggttgctcctgtgggaaggcaccccccaaggggttacccccccctgggggataaagaaaccgtggcccctgtggtaggcccccaccaaagttccccccaaccagttggttaaatggaaatagttgttccaagtaggcaccagggtttcccccacctagctgagaaaaacctggtccaattggtggcaccacccgtggtggcaccacccgttgttgcaggtttttagggccattgcccaaagcgagcgggctaaataaaaaaaattgttcctgttgtaggtaggcaaaagggtccaccatggctagttacctgacccctg

SEQ ID NO: 168666 - DNA, 289 bp, Zea mays
  unsure (1)..(289): unsure at all n locations
  Clone ID: MRT4577_85409C.1
caaggtccggaatgaccgaggcgnnctatactttcttaaaatataaanagacttttatctcataagcaacatttaatcaggggcaatggggattttttaattttattttcaaactataatgtatacaacaatgaaacacatattggggttattattttactcacaataccatcataatcaatccaatccttttattccaattatagtatataacaaactttttgagttaacataaattctgatgtcagcttatctttgaaagaccactttcaaggttcaaggcaggata

SEQ ID NO: 168667 - DNA, 574 bp, Zea mays
  Clone ID: MRT4577_8540C.1
ctcggccgggatctcagcagtgacgaactcgaagcttgcgttcttgtagtagagtcggcagcaagagcggtagagcgagcggtcgagaagatgaagagcagcactctgttggcgatcctagttctccaggcccttctggtctctgcggccgtggccaaaggacctgcagggccgaagaagcagtgctggtgcggcgagtgcaccagctggtcgggcgtgtggagctgcgacgacttcctcaccaagtgcgccgccacctgcaagaactgcgtccccgtgtccacggacaagggcgccatcaagtacaggtgccgtgacttcctcccggaaaactgcggctgcaagatccactagagactcatccaattcaaccatggccgcgcgccacagcggcacagccgatggatcttccatgctcctccgtccgtccgccctactacaagcaggcagccacaccaataagctagctcttgttgttgttttgtatgtttgattgggtgtcccttcccagtcgagatggaataaaataaatcatcaggcgccaataagtaaaaaaaaaaaaaaaaaagcggcc

SEQ ID NO: 168668 - DNA, 513 bp, Zea mays
  Clone ID: MRT4577_85410C.1
ggataaggatgagggctacattgaataacttgcaagattaaatcagcttgttatattttacaaaaaaaaagaacctaaaaagttgggagatttgggcgataaaagaaaaataaagcaggcattgaatggtaaaaagtggagcaaagcatagttttttccagaaggttttatctaaggggggagatttggaccagacgccgctgccgctatatccctcctcgctcctgctccaccttaccgtggctgtttacatatcttaaaaaaacactaattgttatggtatacttttgttagcatcactaaaagtggatgtttacatatcttagaagatatagttaggtgtctgtttgttgctatgacgatcctctgggggtgaaatgggcgggagtgaaacctaggaggcaaactcgacaccgaaaagggcagcagcgagcggggtgggaccgaaacacacaagcgggtcaagggccccaaaggggcacaggtgtggacctaaaatttgctaatgacctg

SEQ ID NO: 168669 - DNA, 1173 bp, Zea mays
  unsure (1)..(1173): unsure at all n locations
  Clone ID: MRT4577_85411C.1
gtagaagtgtcttctcttttttctcttaataaagcttggacgtgacaattctcttgccgcgtctttaaaaaaaatattcggataattttgtggactacaaagaccggaaaattattctttcttcaggcagtgaaaagaagcttgaagaggctgcccctgggcttattttacggaagagaaagtctgctgacgagtcagttgccagcgaggcaaattcatcttcggttgaaagtgaagcatcagttgctgatgctgtggcccttctgcttaagcataaacgtggtctacaaacctcagaagaaatggagaatgagactgaaccatattctagcaagaccgaagggaagaagtcgaaacaaaaacgtgtattgggcccagcaagaccagatttccttgaagccagacaagactctgaaacatgggtgccacctgaaggtcaaactggtgatgggcgcactgcattgaatgaccgtttgggttattgaaaagctcttccagcaacagttcccttgtggagaagtgcagtatcgtgcctatggttttgagcctgtttggggctccatattctgtgaagacaacgcaatagaagctaagaatgcttattctgttgatggcaagtttggtgaaggaactattcattgactttttagggcgctagtgggactgtagctcggctaatcctctcacactctaagggtttgttcggttattttcaatctatatggattggaggggattgatataaattgggagagattttgagtactaggaattgaaaccccatcaattcctctcaatccatttcgattgtggtagaaccgaacatgacctaaagaggatatttaggctataaagaggttcaatgtgttaaggcctattaggtctaggcctactgcacccacacacatatatatatatatatatatatatatatatatatagggaagaggtaatggaagccctgggcttcccctactaatggaagccccagccaggacgcggtcaacccagcacccgcgcagccatgcagtcancagccagaaatccaggncgataagcgcgtaaggcaatatacgaatgcatatatatatggataaagatgcgtaaaccatgcataaaggaatcttttgacgcccgaaacacgtggaatgaatatgacaccgtggcagcgtt

SEQ ID NO: 168670 - DNA, 630 bp, Zea mays
  Clone ID: MRT4577_85412C.1
aattcggcacgagggtccgctcctcctccctgccgtccgtgttcgtctccacggcgctcgcggacgcctacgccaaggccggccgcctcgacctggcgctgcaggtgctcgacgaaatgcccagcaggaacgtggtctcgtggaccacgctcgtcgcctcgctggcgcgtgctggccggcggcacgacgcgctccgccgcttcgccgagatgcgggcctccggcgtggcctgcgactcccacgcctgctcggcggctctcacggcgtgcgccgacgcggggctgctgccacgcggccgcgaggtgcacgcgctctgcgccaagctcggcctcgacgccgtgcccttcgtcgccaacgcgctcgcggcgctgtacgcgcggtgcggcgatgtcgaccgcgcgctggccgcggtcggccgcatgggctcgcacgacgttgccgtgtgcacaacgctgatcgcatcctacgtccagaccggccgcacggaggaagccatcgaggcgtttgtgagaatgcttcgcgatgagtcgtcaaattctgcttcaccaaatgagtatacgttctctgccgtattgccgcgtgtccaatatggatcgtgcatatcttggagagcagttacatgcacaagct

SEQ ID NO: 168671 - DNA, 480 bp, Zea mays
  Clone ID: MRT4577_85413C.1
cgagaagcactccgctgtgctgcgctacctccgagccatcaaccccccggtgagaacctccaaacactgacactgttaacgccaccaagcactggatctgcacaattgcatgacctggagcacactctggacaatgacacgtggacttactaggctaaaagatagatggcaaacatcactgaagaaggggagccattaccgaagccattataaaaggtccaaactctagagggttctacaacaaacgctgtcctagggagtaatctgacaaacagtggtcaaataagcacgaaagcttgctgtacatggggttataacaaacgatataaaaggtgctgaggagctttatgagaagaacaactctaccaggtgcatcgttggttagctatctcttttgccaaactctagcaagctctttcgcgggccacacctgtatatgaagctcgcatttacgtacagcactatgagcgagccctatgt

SEQ ID NO: 168672 - DNA, 289 bp, Zea mays
  Clone ID: MRT4577_85414C.1
agtgaatttgttattaagcatttgattttctgtgaccttaagtatttcctgaagatgaagcaaaattttaatctggcaattatgaaaaagaaatattttagctctgaaggatttagtagattctgttagattagggaggccttacagactgactttacttaaagaggacgcgtcactcgctgtcagtgtggtgtgggctttatttgcttaaataccttcatttgtatagtacgtctcacttgaaattgctttgtatacattttgtacaaatatttataaaatgttttgt

SEQ ID NO: 168673 - DNA, 585 bp, Zea mays
  Clone ID: MRT4577_85415C.1
ccggccggggaactcctcttctccctgcccgcttccagtttcgctcgcatcggcttgtacgcctacgtgtgacacctccacggtgcccctgcataagcagaatgttcctccgtcatccatcaccccctccatgtgcggaggtgagaattcgatcactgacagcttgcccaacgacgatcataatgtcaaggtaactccgctgcgctcttcgatcgggtcacctacgatatagctgctctccgacgtgcccaagtgacagcatattaccccatccactcctatctgagagcctcactgttagtggatccttgacacgatgggccatcaacgatctgctgccaaaggggatcataattcttctctgtggtcgttctagtctactgctatacggccgggcaaccaacacttgacgggctgtctgcgtcttgcggcctctctttaatctactcgagttggtgttcctatcatattcacttcattttggtcgtgcctctataaatcttactgtcgtgctgtatgccgtatatgtttgagattattgcactattgtaatgacgtgcctgttttatcacatttaaggacatg

SEQ ID NO: 168674 - DNA, 1013 bp, Zea mays
  Clone ID: MRT4577_85416C.1
ccccgctcattttttctgaaggagaaatatccatcttcttgttgttttgtactgttggatactttagcatcattctcatactactaggagtgtaggtaaggagtccatacacgagtttgtaaacaccatgtgtaagggagttcaccaacgtgatgtgcctcacctacaggggtgttgctttgtcaccacccttgtgccttgtccaggtgctacttaccagcctcttattttgtttctgaattcaagatcttatgctggtcctacaagtaatattaaagcacttccctccctgttggcattaaaacctctggcgtggttgttgtgttgtactgttgtttatactaggcgagcatcacttccaatttgttgtagtagcgttttcttgctacttcatggatcttgggtctttggttgttgagttatttgcttcagcaattgggcttctgacttagagcttttggttttgtaggcattgatggttgtcttgaagaagatgatggtgggctcttcccaccactagcagctatagaggaaggggaaatctgtggctgacaagggcccgccgccgcaactgtggtggcagagaaggtggtggcacagttagggcagccacaagaccccatcatctgggcgaggcggtagcatcatacttgtcatcatcctgtcacatagctttggatttgaagcatgaggagaagcattgtgggggagaagcttcagtgcaacattgttgttgtatagggattaacatcctcaagatcacttggaaaactttcacaaaaaactcgtaatgcaagcatatgttttattggaaaagttttccaagctgaatttctgaaagcctcctcactgctttagttatgctgaattggaatttgcagctaggggtttctcacaagtaaatttcttagctaaaggtggattttggtctgttcattgacgtgtcctttctgatggtggcgttgtttgttagctacaaaatcatcaatcaaagattgtaattatattgcgtc

SEQ ID NO: 168675 - DNA, 346 bp, Zea mays
  Clone ID: MRT4577_85417C.1
atgaacggctcgaccgacgcactccgtgcattcggcctcagctatcggggctgtgggctatgacaagcgcgttgagatcacagtctgtgaggaacctgactttgtggacctccatggcaggcttttgcatggcctgttcaggtcccagaacgactatgatctggatgttacacggtgcactatcatgtacgagctataccacaatgatgttgactactaagttctatgcgagtgaagcttgtgcatctatgctctgaagattgtcgtcagcacctgcggcagtaccaagctgctggtgacaatttcaaggatgctagaacttgcttaaaagcgtgctatgcctctt

SEQ ID NO: 168676 - DNA, 695 bp, Zea mays
  Clone ID: MRT4577_85418C.1
acaagatgctcattcgcatcgccaccttcctccctcctcccctcgccatctccgacccgacttgcggccaatggcggaccagctcaccgacgaccagatcgccgagttcaaggaggctttcagcctcttcgacaaggatggggacggttgcattaccaccaaggagctgggaactgtcatgcgttccctggggcagaatcccactgaggcagagcttcaagacatgatcaatgaggtggatgctgacggcaatggaacaattgatttccccgaattcctcaaccttatggcccgcaagatgaaggacactgattctgaggaagaactcaaggaggcattccgtgtgtttgacaaggatcaaaatggttttatctctgctgctgaactgcgccatgtcatgaccaaccttggtgagaagttgactgatgaggaggttgacgagatggtccgtgaggctgatgttgatggtgatggccagatcaactatgatgaatttgttaaagtcatgatggccaagtaagttgcattaccatctgagggaagcttcagtaatcagaccaaaatattacctatccaggtgccattttgtgagatggctatcgtattaaaccgaaaacgataacactgctgtgtcatatgttgtaggcaatgattgtttgccttgaagattttatagatcctgctctggtctttcc

SEQ ID NO: 168677 - DNA, 201 bp, Zea mays
  Clone ID: MRT4577_85419C.1
accaccatgggcttaggggaaatcattttcaccataccggcatcaccattcttcaggaactggggctccttctcaagctccttgccagaccgcctatcgatcttggttatgagctcagcaaacttgacagcaatgggggaggggtggcagcccagcactgggccatagccattgccaatctgcccaggggggttcatgatg

SEQ ID NO: 168678 - DNA, 722 bp, Zea mays
  Clone ID: MRT4577_8541C.1
cagacgcgtggtgtacgaactcgaagcttgcgttcttgtagtagaggtcggcagcaagcggtggtagagcgagaggtcgagaagatgaagagcagcactctgttggcgatcctagttctccaggcccttctggtctctgcggccgtggccaaaggacctgcaggtacgtcgtgcttgccgagatttcatctagctggctactagcttgattggacgctgctagctcgtttgtatacagttcatcttcgcgtatatatatgtgtgcggggtgtgacgaaataaagcaagtacgcatcatgctgctgcgcgcagggccgacgacgaagaagcagtgctggtgcggcgagtgcaccagctggtcgggcgtgtggacctgcgacgacctcctcaccaagtgcgccgccacctgcaagaactgcgtccccgtgtccacggacaagggggccatcaagtacaggtgccgcgacttcctccccgaaaactgcggctgcaagatccactagagactcatccaattccaccatggccgcgcgccacagcggcacagccgatggatccttccatgttcttccgtccgtccgccttgctacaagcaggcagccacaccaataagctagctcttgttgttgttttgtatgtttgattgggtgtcccttcccagtcgagatggaataaaataaatcatcaggcgccaagaaaaaaaaaaaaaaaaaaggccccta

SEQ ID NO: 168679 - DNA, 188 bp, Zea mays
  Clone ID: MRT4577_85420C.1
accgaattccctgcgaatcctctcccctcgcctcctcgtctccccctaagggattctccgagaagaatccccaaaaaggccctctcaacccaatttaaggaaccctggagccaaaagaagcttggttccaagccccccaaggaaccaacctccggaaccaaaaacgggggctccttcggaaccccggg

SEQ ID NO: 168680 - DNA, 327 bp, Zea mays
  Clone ID: MRT4577_85421C.1
ggcttgttctgctgctccggataggattcagattcgtgaggtcttccgaccttcgggggcatgatcaagcgtaccgagactgcccatttctgataggaccatactcgttgcatgacccggaggctggcctgagctgctgacatccactatttctacaacgaggttattaactacggcgaggctgacgagctcaatatcatctgaactcggtagagacatactcagaacccatcaaatccgaaagtttctgcactgaggagggggcgcgaacctctataaagggcatgatccttgaggggcatgtctgctgctatattacagtgctct

SEQ ID NO: 168681 - DNA, 2054 bp, Zea mays
  Clone ID: MRT4577_85422C.1
cattgggtacctcgaggccggccggggccgcctattatcgtccagatcggcggaccggcccggcaccgcctctccaaaaaaaagcctaaaccctcctcgacgtcaccagcgtccgcccctatcgccccccttcggccttccccactgtactctccaatctcgccgccaagcctcaccgcaccatggcgaccttcaccgcggcctcctccctctccctcctcttctcccacccgcactcccactcccgccaaccatccgcccaggggcccaccgccagctcccacctccgcctgcatccgcgcgccagccgcgcgcgctgcgcctcttccgacacgacggccacgaagcaccgccgcccagcggaggagaacatccgcgaggaggcggcgcggctccgaggcccggcccagggtttctctgcgtggtacgagcccttcccgccggcgcccggcggcgacccgaacgagcgctactcgctggacgaggtcgtctaccgctccagctcggggggcctcctcgacgtgcgccacgacatggaggcgctggcccgctacccggggtcctactggcgtgacctcttcgactcccgcgtcggccgcaccgcctggccctacggctcgggcgtctggtccaagaaggagttcgtgctccccgagatcgactccgaccacatcgtctccctcttcgagggcaactccaacctcttctgggcggagcgcctcggccgcgagcacctcggcgggatgaacgacctctgggtcaagcactgtggcatctcccacacgggctccttcaaggacctcggcatgacggtgctcgtcagccaggtgaaccgcctccgccgcgcgccgctctcgcgccccatcgccggtgtcggctgcgcgtccacgggagacacctccgccgcgctctcggcctactgcgcagccgcgggaatccccgccatcgtgttcctgccagcggaccgcatctcgctgcagcagctcatccagccgatcgccaacggcgccaccgtgctctctctagacactgattttgatggctgcatgcggctcattcgcgaggtcactgcagagctgccaatctaccttgccaattcgctcaacccgctccgccttgaggggcagaagacagcggccatcgagatattgcagcagttcaattggcaggtgccagattgggtcattgttccaggaggcaatcttgggaatatctatgcattctacaaggggtttgagatgtgccgcgttcttggacttgttgatcgcgtgccacggcttgtctgcgcacaggctgcaaatgcaaatccattgtaccggtactacaagtcaggttggactgagtttgagccacaaactgccgagactacatttgcatctgcgatacagattggtgatcctgtatctgttgaccgtgcggtggtcgcgctgaaggccactgacggtattgtggaggaggctacagaggaggagctaatggatgcaacggcgcttgctgaccgcactgggatgtttgcttgcccacatactggggttgcacttgctgctttgtttaagcttcagggtcagcgtataattggccctaatgaccgcactgtggttgttagcacagctcatgggctgaagttcacgcagtcaaagattgactaccatgacaaaaacatcaaagacatggtttgccagtatgctaatccaccgatcagtgtgaaggctgactttggttctgtgatggatgttctccagaaaaatctcaatggtaagatataaagttatatgattaattaaccctccaaactgtttttttttgttttttcgttccaggaattttattcctgagtctttcaactttgtttggtgaacatggtatggtgctaaaatctagacctaataccttgtagtactagttctggaggctcttttggttgtaggtcgaagtggatagagctgttccttgtactttatctgtttcatgtaatatgaataataaattatggtctaaatatttgaataaaaaatcgtttggaatgacccaaaaaaaaaaaaaaaaaagcggcc

SEQ ID NO: 168682 - DNA, 2972 bp, Zea mays
  Clone ID: MRT4577_85423C.1
gcgttcgattagagtgcctgcccgcaagtatgttgagttctatggtggtgcccatgtccaatcctcttcccatgctcacccttaccatcatatgcgccactttgtggctaactggtggtgctggtggcactggtaccgacaccggcggcggcggctgcatcccatctgagagggatgctttgctgtccttcaagaagggcatcacgagcgacaacaccagtcgcctaggctcatggcacggccaagattgctgccggtggagaggtgtcacctgcagcaaccgaaccggcaacgtcctcatgctcaatcttgcctacccgagctatccatatgatgactcgtactacacagatgtatgcggcgattacagaactttggttggtgagataagtccctctctactcttgctgagacaactagagcacatagacctaagctggaactgcttgttaggcccaaatgggcgtatgccttcattcctgggctccatgaagaacttgagatacctcaatctctctggagtaccattcaaaggtagcgtgcctcctcagttaggcaacctatctaggttgcagtaccttgatcttggcaattcatatgtaggatatggcatatactcaaaggacattacttggttaacaaacctacctctgctgcagtaccttggcatgcgttctgtcaatctctcagggatagctggtgattggcctcatatactgaatatgctaccatctttaagggtcattagtctctctttctgttggcttggcagtgcaaaccaatcgctcgcattttttaatctcacaaaacttgagaagcttgatctctcgttcaacaactttgatcacacatatatatcgagttggttctggagagcgacaagtctcaagcacctagttctgaaggacaccggactgtttggtgaattgcctgatgcactaggaaacctgacatcccttgttgtccttgatttatcaagtaatgggaacatgacgataacacaaggcttgaagaacctttgtggtttggaaatccttgaccttacctacagttcgataaatatagacatagcagagttgatggacacattaccactgtgcacaagagaaaacttacagttacaggagctccatctggggtacaatagtttcacagggatcctgccaagttcgatagggtacttcaggagcttacgtatccttgatctcacggataacaatctcagaggaagtgtacctactgaaattggtacccttacaaatttgacctctttggatctaagcaataacaacctcggtggagtaatcacggaggagcactttgtaggtctgatgaacctaaaggaaattgaactgtctttcactaatttgagtgttgtagtggatgctgattggatccaaccattcaggctggagtctgcagggtttgcatctatccatttgggtcccctgtttccagtttggcttcaccagcagctccttcaaatcacttacctagacatttcaagcacagggttggtgggaaacattcctgattggttttggtcattttcaaaggctgcttttcttgacatgtcttacaatcaattaaatggtaacttgccggcagatatgagtgacatggcctttctaatgctaaacctctgttcaaacaagctcacaggacaagtaccaccgtttccaagaaacatcacaatgttagacatctctaacaatttattttcaggcatcatgccacaaaatttatctgattttgaaaccctatattttctcatcctaagcaacaacagtttatcaggaacgttcccagcattcctgcagaactgtaggaatatgattttcttggaccttgcatggaataatttatctggaaggttaccttcttggatatgggagctgaagggtttacatgttctacgtctaagccacaattcattttctgggaatattccgtctgaaataaccagcctttcttatctgcaatacttggatctatcaggaaactacttttctggtgttatacctccacatctttcaaatcttacagatatgaccatgaacgcagtggatcattcattcaatattgaatttgaaaaatatacgattcatggtggagtcgatcaattcaatgatatatggttagtagtgacaaaagggcgacagcttacatatagtcagggagctatatatttcgtaaacattgatttatcaggcaactgcttaacaggtgaaattcccttcgatatcacagcccttgatgccttgatgaaattgaatttgtcatcaaaccaactgggtggaaagattcccaacaagattggtgccatgaggtcgttggaatccctggacctctccaacaacaagctttttggtgaaatcccatggagcttatcaaacctgacatttttaagctacatgaatttgtcctacaacaatctgtcaggaaggataccctcaggccgccaactggataccttaaactcggacaacccgtcacttatgtacataggcaacagtggactttgtggacctcctcttcaaaataattgttcaggaaatggtagcttcatgcctggttatcacagaagcaataggcaaaagttcgagcctgcatcattttatttcagtcttgtattggggcttgtggtagggctgtggatggtgttttgtgctctgttgttcataaacacatggagagttgcttatcttgggctcctcgacaaggtgtatgacaagatctatgtgtttgtagctgtaaaatgggcaagtatgactatgagtgcagcagctgcagaatgagagcacacaaccaatacaatgtaagtactgcgtgtgagttcgtccaaataaagaccatgttctaattaatccttctgttagctgtaaaccataatacttttttggactcgaacactacatgtgtaactatattgttttggcagatttatatgtttatcaatatattgctttttc

SEQ ID NO: 168683 - DNA, 705 bp, Zea mays
  Clone ID: MRT4577_85424C.1
cccacgcgtccgcaaaagggcaacaacttaaatatagtcgggaaattgcatattttgtaagcattgatttatcaggcaactacttaacaggtgaaattcctttgggtatcacatcccttgatgccttaatgaatttgaatttgtcatcaaaccaactgggtggaaaaattcccaacaagattggtgccatgatgtcgctggcatccctggacctctccatcaacaagctttctggtgaaatcccatggagcttatcaaacctgacatctttaagctacatgaacttgtcctacaacaatctgtcaggaaggataccctcaggccgccaactggataccttaaacgtggacaacccgtcactttgtggacctcctcttcaaaataattgttcaggaaatggtagcttcatgcctggttatcacagaagcaataggcaaaagttcgagcctgcatcattttatttcagtcttgtattggggcttgtggtagggctgtggatggtgttttgtgctctgttgttcataaacacatggagagttgcttatcttgggctcctcgacaaggtgtatgacaagatctatgtgtttgtagctgtaaaatgggcaagtatgactatgagtgcagcagctgcagaacgagagcacacaaccaatacaatgtaagtactgcgtgtgagttcgtccaaataaagaccatgttctaatt

SEQ ID NO: 168684 - DNA, 370 bp, Zea mays
  Clone ID: MRT4577_85425C.1
ctttattctttcgtttattaagggggcacgattgtctatacaggttctgatgccgtaatttatactaaatgtagttagcgggaccaactgcgagcgtcttacagtgcaaacgaccaaggtattaacgaaaaagtattgagcattcgacacggtaatagggaaagataatcgcccaagtcgcacaggtggagtacgattgcatgcggaaccactgatgtaggagccagttcacataaatgtgtgaaaactgtaccgcaccccccaacaaaacggtaagaagtcgccgtcgactcggatcagcctgtgggttatattgacagggggcctgaatcccatgaaggttcatgaccgtagccgcatcattggcgag

SEQ ID NO: 168685 - DNA, 426 bp, Zea mays
  Clone ID: MRT4577_85426C.1
atgaggcaatccaaattagttgtgacggagggagccattgacgaaggtacttttggtgccgaagctgagcaagctgatattaaagaagaagaaaatgctgatgaggaagaagaagattatagcaccttgatcccatcaaaacccagccacctagattttgagaaatctattgtatctgaagctgatgtgtccatgatgatgaagttgggctacttcagagaagctgaaagaaaactaattcgttttgccggagaggaaaccactccgatgtcgaaggatgatgaagtggtagttttcaaaagctttttcagagcaggattacattttcctttgaacgagatgattggagaagttttggataattctgagatttttcttcatcagctgacccctaacgccattgttaggctcaacattttcatctag

SEQ ID NO: 168686 - DNA, 322 bp, Zea mays
  Clone ID: MRT4577_85427C.1
attaaaaaaatgaaacgcacgggtcattcatgcaacgtaaaagataccatgtccaagagacatgtgctgccagacatctatatatgccaacacttattacttttagttcgcgaaacaaaatcaagttgtagggacggatatagaggctgggactacaggttgtagggggtaagatagattgctgtacatgtacaataccttgtagaggaatcagctgatgtactggctgacctcgatgagcttactatgctggacgaagaggacggtggccgggatgacgactacgctgtggagccccggggcgagggtgtagaacccgaac

SEQ ID NO: 168687 - DNA, 348 bp, Zea mays
  Clone ID: MRT4577_85428C.1
cgcgggccgcctttttttttttttttttagtattaatcactcaggctaaatcatacaccagcgccccaactgacaaggactttgggcacacctacctgcatacaccaacaaccctataaacacacataccttagcacaaatactgacgcgcacagacactccacagctccttccaaaaccacctctctactcacaacatctcaacaacacaaccaaaccactactttctttcacctctactacacatcatttatcactccaagacacccccaacaaacctaacaaagcttttgatacctaagttgccttctaccatcatatagaacctacaattatccgagctatttt

SEQ ID NO: 168688 - DNA, 241 bp, Zea mays
  Clone ID: MRT4577_85429C.1
gtccaatcgtccgcagactttatgttcagggcaaggaaggaaatggcgctggcatcaactctagctttgctgagcaccaggatgttgatggaagggcaactgatgatgatttagcatggacagttgcacttggttcccccttaacggttgctactacttaggaacaggaatacgagagtgatatctttggagagcgaggcattttgttgcgcgcagtccatggcatcaaggaggctttgta

SEQ ID NO: 168689 - DNA, 567 bp, Zea mays
  Clone ID: MRT4577_8542C.1
tgggaccctcgaggccggccgggccggactcagcagtcagcagtgaccaactcgaagcttgcgttcttgtagtagaggtcggcagcaagcggtagagcgagaggtcgagaagatgaagagcagcactctgttggcgatcctagttctccaggcccttctggtctctacggccgtggccaaaggacctgcagggccgaagaagcagtgctggtgcggcgagtgcaccagctggtcgggcgtgtggacctgcgacgacctcctcaccaagtgcgccgccacctgcaagaactgcgtccccgtgtccacggacaagggcgccaccaagtacagatgccgcgacttcctccccgaaaactgcggctgcaagatccactagactcatccacagcggcacagccgatggatccttccatgctcctccgtccgtccgccttgctacaagcaggcagccatcaataagctagctcttgttgttttgcatgtttgattgggtgtcccttcccactcgagatggaataaaataaatgtcaagcgcgaaaaaaaaaaaaaaaaaaggcccctagggcc

SEQ ID NO: 168690 - DNA, 673 bp, Zea mays
  unsure (1)..(673): unsure at all n locations
  Clone ID: MRT4577_85430C.1
aattcggcacgaggctaccttctctgtcgatccctcgatctccagacaaccccgctcgcctctctccctgctccggtccccgcccgcctctcgctcgcgacaactccgccgcagcacgcggcggccgcggcgagatgctccgcctgcgggcgttccggccgacgagcgacaaagtcgtgaagatccagctccaccctactcacccctggctcgtcaccgccgacgccaacgaccgcgtctccgtctgggactgggagcaccgccaggtgatctatgagctgaaggcaggtggcgttgatgagcgtcgcttggttggagcgaagcttgagaaacttgctgagggagatgattcaaaaggaaagcccaccgaggctattcgagggggaagtgtaaagcaggtttccttttatgatgatgatgttcgcttttggcaacattggcgtaattgctctgctgctgctgaggccccaactgcagtcagtcagcagtcttccacgttcattgcacctgcaccttcgacacgaggaaggcactttgttgtcatttgttgtgagaacaaagtcatatttttggacttggtgactatgcggggccgtgatgttcctaaacaggagcttgacaataggtcacttctttgnatggaattcctctctaggacatcttctagcgatgc

SEQ ID NO: 168691 - DNA, 1151 bp, Zea mays
  Clone ID: MRT4577_85431C.1
cggacgcgtgggtcttaggctgtaagtgtcatttcaaatatagatttcagactcatacaaatcggacgagcattgaataagaaaagaataattttatatttgcatccacagtcgcagttgctggttgctttgctccccacatttgtcgacggtcgccgtcgccggttcctcgtgcaacgcaccgcgctaacgatggccgagacggtgggcttcgcgagcggcgacgcggcggcgtggcgcgcagcgctggccgcgtacgaccgccgtctcgcggccctagacaaacccgacctcgtggccgtggactccttttaccgccacgacctgcccgcgctcctgcgctgccgtgacccggatcctttcctcgccaagcccgagctggtgcgcctcctccagtggaagctctctcgcggcaagtggagaccgaggctgatggatttcgtcaagggcttggacgacgccgtggtggagtcggcgtcgcgcaaggcgttcgcggctttgcccgacctcagaagggccatcaccgagcttaccgtgctcaagggagtcggacccgccactgcgtccgccgtgctcgctgcgtatgcacctgatgtcgcaccgttcatgtctgacgaggcgatggtagcagccttgggcaattcaaaggagtacactctgaagcagtaccttgcatttgctgataaattgcaggcaaaagcgaaggaactgagcataggagaagaaagtttcacaccctcagatgtcgagagagcactgtggagctcggcaattgcgtccaagtcaccaccaagcggtaacccaaagagggaatcaaagatgcatggcaagaggaaaagatgatttacaccgcgcttctttattgaggctaaaagggttttagtagctgcgggtcttagattcttagttgaacacttgtttttgtaacctgcggaatggaatcctttggtggagtataatttgaaatccttagttgaccaaaacactttatttcctacatgcctaccagtgaccctcgctacatgagctcggatgcatcgtgcatgtgtatttcaagactaatgcacccgttgttgctattgctgaaaatatgtgccggtctttttgaacaccaaaaaaaaaaaaaaaaaaaaactcgagagtacttctag

SEQ ID NO: 168692 - DNA, 847 bp, Zea mays
  unsure (1)..(847): unsure at all n locations
  Clone ID: MRT4577_85432C.1
ggccgcttttttttttttttttttagaacacctgatgctgcggccgcttttttttttttttttttagttaataatatcataatcaagtagtcagcagttcaataaacatttaaaaacacagataccatcacatcaaacccctcaacgacgttaactaaatctaaatggcactttaagccaaaagttaaggcaactttactggtaaactttaagcgacaagttccagattcacagaacagattcacggaaccaacagcataccgttcagaagagcagccagacagggcgccatgtggccgtcgccttcactcggccttgtcggcggcggcctcctccaccttctcctccaactcgaccaccttctcctcgactttctcctccaccgcggcaggctcctctggtgcggacgccttctccgcctccgccgcagaggcaggcgcgggaggctcctcctggtcggggtcgcgggcggtgtcggtggagctggagatggcagcgcggaggcggcccattaagggcctgaaagcggtctccacggtgacccaggccagcgcgagcccccctgcgacgatcgccgccctcttcagggcgctaccctcgcgctggcctccacctcctcccttcgccatgggtgctcgcgggtcgacggtgacggatggggtggcgcgatgcgcgtgtgtgatgggggtcggtctgtggccgcgggcactcgggatttggaattgggggcgggggggttctgtgcgcgtgtgggggcgacggcggggggcggagaggggaaagcttggcctttgcactcgcccgccggcaaagaaggcggagccgaggagagnactggccggctcga

SEQ ID NO: 168693 - DNA, 806 bp, Zea mays
  Clone ID: MRT4577_85433C.1
acagattcaacttcaatctaatacttctctaacgacgaaggaaaaaaaccgaccagagcgtacatggacatgaacgcaacttcctatgttttccaagtcactatctgatttgcatttcagcataatggttagtggcttgatgtgcaccatggttccttagttctcagcctggacaaacgttttttgcacacatgctaatccaatataatttgcatgataaacgtttaaacacaggttttattttaaacgatcttggattcgatcccggctaacctcaagaacccgttcagaagagcagccagacagggcgccatgtggccgtcgccttcactcggccttgtcggcggcggcctcctccaccttctcctccaactcgaccaccttctcctcgactttctcctccaccgcggcaggctcctctggtgcggacgccttctccgcctccgccgcagaggcaggcgcgggaggctcctcctggtcggggtcgcgggcggtgtcggtggagctggagatggcagcgcggaggcggcccattaagggcctgaaagcggtctccacggtgacccaggccagcgcgagcccccctgcgacgatcgccgccctcttcagggcgctaccctcgcgctggcctccacctcctcccttcgccatgggtgctcgcgggtcgacggtgacggatggggtggcgcgatgcgcgtgtgtgatgggggtcggtctgtggccgcgggcactcgggatttggaattgggggcgggggggttctgtgcgcgtgtgggggcgacggcggggggcggagaggctcgtgc

SEQ ID NO: 168694 - DNA, 688 bp, Zea mays
  unsure (1)..(688): unsure at all n locations
  Clone ID: MRT4577_85434C.1
tggttaataatatcatatcnaagtagtcagcagtccaataaacatttaaacacagatcccatcacatcaaaccccctcaacgacgttaactaaatccaaatggcactttaagccaaaagttaaggcaactttactggtaaactgactgaaattatagtccaaactctgcactatccatgacagcgacaagttccagattcacagaacagattcacggaacctacagcataccgttcagaagagcagccagacagggccccatgtggccgtcgccttcactcggccttgtcggcggcggcctcctccaccttctccccaactcgaccaccttctcctccaccgcggcaggctcctctggtgcggacgccttctccgcctccgccgcagaggcaggcgcggggggctcctcctggtcggggtcgcgggcggtgtcggtggagctggagatggcggcgcggaggcggcccattaagggcctgaaagctgtctccacggtgacccaggccagcgcgagcccccctgcgacgatcgccgccgtcttcagggcgctaccctcgcgctggcctccacttcctcccttcgccatgggtgctcgcgggtcgatggtgacggatggggatgcttggatggggtggcgcgatgcgcgtgtcggcgcccatgatcccgcgggggctgggcggacgcgggg

SEQ ID NO: 168695 - DNA, 335 bp, Zea mays
  Clone ID: MRT4577_85435C.1
cccacgcgtccgcccacacgtacggtcacttcgatcgaaaataatacaaacgagaaggaccctaactataaacaaaccaaaaataaaataaaaccatcctatacatcctaatcacaaaacaactacgcacacttctggctagacaagttcaccaccgcacggatacaaccacatagactaccaccgttctgacctacaagtgactatctcttgccctcttaccacaacttctgacactggctaaaactccacgctcaagtacctattcggctagttcaacatccacattaagcctcttcgcggcatactccatagggactgtccacctcttctac

SEQ ID NO: 168696 - DNA, 667 bp, Zea mays
  unsure (1)..(667): unsure at all n locations
  Clone ID: MRT4577_85436C.1
gccgggtcgggaaagcnnttccctctccgccccccgtcgttgcccccacacgcgcacagaacccccccgcccgcaattccaaatcccgagtgcccgcggccacagaccgacccccatcacacacgccgacacgcgcatcgcgccaccccatccaagcatccccatccgtcaccatcgacccgcgagcacccatggcgaagggaggaagtggaggccagcgcgagggtagcgccctgaagacggcggcgatcgtcgccggggggctcgcgctcgcatgggtcaccgtggagaccgctttcaggcccttaatgggccgcctccgcgctgccatctccagctccaccgacaccgcccgcgaccccgaccaggaggagccccccgcgcctgcctctgcggcggaggcggagaaggcgtccgcaccagaggagcctgccgcggtggaggagaaagtcgaggagaaggtggccgagttggagaaggtggaggaggccgccgccgatgacaaggccgagtgaaggcgacggccacatggcgccctgtctggccgctcttctgaacgggttcttgaggttagccgggatcgaatccaagatcgtttaaaataaaacctgtgtttaaatgtttatcctgcaaattatattgggttagcatgtgtgcaatttttcac

SEQ ID NO: 168697 - DNA, 789 bp, Zea mays
  unsure (1)..(789): unsure at all n locations
  Clone ID: MRT4577_85437C.1
ctcgaggccggccgggaacccattacccatggcgccgcatcgcaaagctcgcgccagccagcctcagcagccgccgccctcggactacgagacagatgtcataccttcggtcgacgtgcccctccccccgccgcgttctaacgaagagcttaacttgtcggtcctccgccgccagtatcctgcccttacgtcaattgagcatgtcaccccctatgctgctctctacactttcaacctcgagacgcagcagtgggagaagatgggcgttgagggcaccctctttatctgccagctgacaccctcgcccttgggcgccgagcgctactgcgccattatcctcaaccgcagaggactcgacaacttctacgaggagctcaccagcagcgatgaaatggagatctcggatccctatgtcatcattcagggcgagcaagtgtacggcatctggatctttgccgatccaccgccctcgtcgacggcaaactgccgccaggaaacggccgctaagatgatggccgtcgccgacagggccaaagcaagccgtgctgctctccacggctcaccagacgctgtctcttccacccccatgggccgccagctgtcgttgagagagctctttgggcagcagcgtgagcaagatgccgactttagcctgcaccaccacgatagtcacccaatgcccagcatgcaccatccaccacagcagcaccagcatcagcagcagccatacatgacccatgccagccctgcacaaccagacgtgntaggccagctgntcatgcgcgcaaa

SEQ ID NO: 168698 - DNA, 703 bp, Zea mays
  unsure (1)..(703): unsure at all n locations
  Clone ID: MRT4577_85438C.1
tcccggcccgggaaccaccgaaaggccannnttctcagaaggctacccggcaaaacctggggacctggacgaattnaccggcccaatgttcccccccgtccgcgccagtatagaataacatgcccatgggcgccgtngcgacgtaccgacngnntcgtccantgtnncggtgggcatgcaaggtcgaaagtccgttgccgggcgcccggcgcggcaacgacgggaccgtgagaaacgggcgacgggcgcccgtgggngaggggaaaaagggcaaccttggcccacggccggcaccgtcggtagcaggaccaggaagcaaaaggcgggccgggggaccaaccgttcctcctgggggctggagttaagattcggccggggcccttggaaaaccggggttgccggaaggctaaaggcccaaatcagaagggggccaaaggccgtcggggcctcccgcccccaaataagtttcggttcgccagggcccggcccacccccaggcaggggccccggccagaccaccccggaaccggccccgtggttggcgtcaagttcttcaagccgcctggtggccgtggcccccaaggaaggaccctccaccgcaggggctggacaaggtaaaaaatttttttgcccgtcaacctggccggacctccagagccaatttacaatagcattaaaccctgaatcttgggctctttttttt

SEQ ID NO: 168699 - DNA, 259 bp, Zea mays
  Clone ID: MRT4577_85439C.1
ccttgtttttttattctggggcttcatataaaatcggcgggaacaaaatccaaaggacgacactcatcgtgcaaaaactttccgatataacctaattgtgttagtatccattcaagtctattggtgtaaaccgatactagttgcataacaagcccaatacgaaagcatgctcttatgctacaattacaaaaggagggaaaaacccaaacgagagtcattcactgtccacttgaaatacttcttgtactctcccaaggac

SEQ ID NO: 168700 - DNA, 790 bp, Zea mays
  unsure (1)..(790): unsure at all n locations
  Clone ID: MRT4577_85440C.1
actcctataggggattgggattctcgaggccggccgggtcggactcgacggcgtcaacactggtgccacaggtggattcatggacggcaactacgttatcattggctggcaaatcgctgccattgttggtgcttcttcttacgcctttgttatgtccgccatcattgccaagatcattgacctcatccctggtcttaagcttcgtgcttctgaggaggccgaactccttggtatggacgatgaccagcatggcgagttctcctacgattacgtcgaggttcgccgagacttccttgcctggagccctcagcgtggcgagcctgctgagngatggtgatgtccttgagcccactcatggtattcatgagcatcagtccatgatgaaccccagcgagtcagacgacgcccgcaagactccttctctcaacacacctgatgttatcgcgccagacgccgtcatcaacgagaagcatgcttaaagttgcaatttgtagccttgtccttgcgagccatgttagccttgtttctttgatatagagggttctatttgtcacgagagtaacttctctctttttttggttttgggtatattttttgggatacggggagtagcaggcagaggcgttacggattgatcaagtcgtcgacgtatataaatgccctttattgttttgaatacccgacgtnagatggtgtatgggcttgggaaaagcgacacagntcattggatacgtacatataatcatgcaatctgacattacagatagtcactgaatcagattatttcctc

SEQ ID NO: 168701 - DNA, 1797 bp, Zea mays
  Clone ID: MRT4577_85441C.1
cattgggtacctcgaggccggccggccggccgggaagggatttgtctctatcaccagcgcacggccgagaatacttcctcttcctccttcccacgatggccgccaccgccatggccgccgccgccgccgcctcgcgggccttcctgcgcccgcaccgttgcctcctcctcccacacacccatccgcttcgccgccgtctctccaccaacgctactgcttccgctcccgccgccaccgccgcgtcgcccggcgtcgtggacgtgctcatgaagcgaggactcgtcgaggccatcacctcggaggcgctcgccgcagcgcgtccaggggagctcaaggtttactgcggcttcgaccctaccgccgagagcctgcatctcggtaacctcctcggcctggtcgcgctctcctggttccgccgatgcggccacaccgccgtcgcgctcatcggtggcgccactggccgcgttggcgatccctcgggaaagagttccgagcgcccggagctcggcatagctgccgtcgagggcaactccgacgccattaagtccctcgtcgcccagattctcggccgcgtcccggagcctgcccaccgttcccactccggtcaaaaagagttgtctttggacaattcagcgaattcgtcacagacaatgggttcttttttgatcctcgacaactacgactggtggaaggacatcacgctgctggatttcctgagagaggtgggccgttttgcacgcgtgggtacaatgatcgccaaggagagcgtcaagaagcgtcttgcgtcggaagacgggatgagctacaccgagtttacctaccagctgctgcagggctacgacttcctttacatgttcaagaatatgggtgtcaatgtgcagatcgggggcagcgatcagtgggggaacatcacagcgggaactgagttgattaggaaaatcttgcaggttgaaggggcgcatggactcacattcccacttttgctgaagagcgacggtaccaaatttggaaagacggaggatggggcaatctggctctcttcgaagatgctttctccttacaagttctatcagtacttctttgcggtgccagacatcgatgtcatcaggtttatgaagatcctgacgttcctgagcttggatgagattctggagctagaagactcgatgaagaagcctggctatgtgccaaacactgttcagaagaggcttgcagaagaggtgacgcgatttgttcatggcgaggagggattggaggaggcattgaaggcaaccgaggccttgagacctggtgctcagacacaattggatgcacaaacaattgaggggatagcagatgatgtgccttcatgctctttagcttatgatcaagtgttcaagtctccacttattgatttggctgtttccacaggtttgctcactagtaagtcagcagttaagcggcttattaagcaaggtggtctgtacttgaataacgtgaggattgatagtgaggataagctggttgaggaaggtgatatagttgatgggaaggtgctcttgttgtctgctggaaagaagaacaagatggttgtgaggatatcttgactactcttatttgttctttataacttattttagccattgaggagaaaagtaacggtgttgcgtcttcaaaactcaaatgagctgtctatgagcatacagattgttataaaaaaaaaaaaaaagcggcttttttttttgctctactaattttgttcatgagaactttttgtgtgctatctattggctttgagaaaaaaaaaaaaaaaaaaaa

SEQ ID NO: 168702 - DNA, 317 bp, Zea mays
  Clone ID: MRT4577_85442C.1
ataaagagggcatccccctgaccagcagaggctcatcgttgccggcaagcagctggaagatggccgcacgctctctgattacgacatccagaaggagtcaaccctgcacctggtcctccgcctgaggggccgcatgcagatcttcgtgaagaccctgaccggcaagaccatcacgctggaggtggagccagtgacaccatcgagaacgtgaaggccaagatccaggatacagagggctcccacctgacagcagaggtcatcttgccggcagcagctgagatggcgcacctcctgatacaaatcagaagatcacctga

SEQ ID NO: 168703 - DNA, 624 bp, Zea mays
  Clone ID: MRT4577_85443C.1
tttccccttccttgtttgctgaagtccctggtgtggaccgtggagtctcagggcagaagcgcatgcgcacgccaatcggcaatccaccaaagattccgttctcccagtcgcctctcccagtcccagatctcgttcactcgcactcgcgcaaccccgcggccccgcgcctaatggcatcctgtggcgccggcgacgccgcgtcagcgcagtcgagggccagtatctcgcacgtcatcttcgatatggacggacttctcctcgacacggagggcttctacacggaggtgcaggagaagatcctagcgaggtacgacaaggtgttcgactggtcgctcaacggcctcctcacccccgagcagttcctcgaggagcgcgagagcatgctccaagcgctcttcccatcctgtaccaagctgccaggagtactacgattggtgcatcatcttcatgacaacggagtaccaatggctgttgcgacaggatcccataaacgccattttgtactgaagacccagaatcaccaggaaatgttttttcccctgatgcatccacgttgccatgggcgatgatcccgaagtgaaaggctggaaaaccaaccccctgaaaatttttcttggctgctat

SEQ ID NO: 168704 - DNA, 294 bp, Zea mays
  Clone ID: MRT4577_85445C.1
cccggactacctctgggggggccgtctgcgtcatgacggtgtccttgtggcctggctgcccggcgtcggccgcatgtaccacagggctgcttgcgctgccccctctgcgggggcgccctctttctcttgggggttgtcggggcatccattctcttctgtcgcctcacttggcccgttgtgcgtcaggatcgtagcttgtcctgggcttccttggaactcctttgggtggcaagccgcattgtatcgtttgccatgattaatgctcctgaagtgtttagcgcctttgctggcccc

SEQ ID NO: 168705 - DNA, 244 bp, Zea mays
  Clone ID: MRT4577_85446C.1
ggggcccaacttttacacatgttttttttttaaggggcaaatttggtaggccacatgcccaacgttgacgtattgggctttttatgttctaaggtgaaaagggctaggaatcatttaggggaacaaagccccgaattcttgaaccatcattaccgggggggaaaaggccacccttttggggggacaacccaagatccaggaaaggtccagggggaaataaggaatttactttggaaagttagca

SEQ ID NO: 168706 - DNA, 248 bp, Zea mays
  Clone ID: MRT4577_85447C.1
ctgttcattccttaagggccctgcttcccttaataagtaagtaagtaggtctacggccctaaatatgcaaatgagagctgaaggtttttaaaaggtagaaaggaaaagggcaagggcttccacccctgctttaaaatgatttatttattctactgcttgtatttcttgtggagagagtaaggatagaaccaacaaggggctgagtagctgagaaaggggccacccaagagtgaaacatactttatacc

SEQ ID NO: 168707 - DNA, 317 bp, Zea mays
  Clone ID: MRT4577_85448C.1
aggacaaaagaaggggggtgatgattatacattgaacactggaggaatataaaatctcttaacaattagtgagaatacataactcaatatttatgcagcgtaaatgcttggagagaaaaaaaaaccattgcaattccagaatgaataaccctgcagatgatataaaactagaagattgtaagaacataacattgacaaagtgaaattttaaaatcgtattaaagataggcttatagtttatagatatagcgtcttaagatctactggataacaagtttactgtatttaaaaaaatattaaacttttaaattaataca

SEQ ID NO: 168708 - DNA, 405 bp, Zea mays
  Clone ID: MRT4577_85449C.1
cttatataaaaaaaagcggacacacacggaactgaaaacgggacgggggagtcaacactaaactcaaccaaagctgaaaccaacgaagaacggccgggaccatccaactaaaccccaacccaacgcaagccggccgaggcaggagaacgagacaggaccccctaatccttatcctaaactagatcttaaaaaaaaaagtaacattgctgaggttaatgtaaaggaccgggccgcgatgcccccaaaaaagaacccatagaacgctcagcgccagaaattgaactgtacaggatctgcaccaactttggccagatgacggggccggggccaaggaattggcacccaacaagtcaccaagtacctgtccctgggactgggacttggagaagaattcagggccttggt

SEQ ID NO: 168709 - DNA, 815 bp, Zea mays
  Clone ID: MRT4577_8544C.1
cggacgctggcgaactcgaagcttgcgttcttgtagtagaggtcggcagcaagcggtagagcgagaggtcgagaagatgaagagcagcactctgttggcgatcctagttctccaggcccttctggtctctgcggccgtggccaaaggacctgcaggtacgtgtgcttgccgagatttcatctagctggctgctagcttgattggacgctgctagctcgtgtgtatacagttaatctgcgcgtatatatgtgcggggtgcatgtgacgaaataaagcgagtacgcatgatgctgccgcgcagggccgacgacgaagaagcagtgctggtgcggcgagtgcaccagctggtcgggcgtgtggacctgcgacgacctcctcaccaagtgcgccgccacctgcaagaactgcgtccccgtgtccacggacaagggcaccaccaagtacaggtgccgcgacttcctccccgaaaactgcggctgcaagatccactagactcatccacagcggcacagccgatggatccttccatgctcctccgtccgtccgccttgctataagcaggcaggcagccaccaataagctagctcttgctgttgttttgcatgtttgattgggtgtcccttcccagtcgagatggaataaaataaatgtcaggcgcacgtacagatgtgttattacgatatttctcccctacaaataaaaactcgatttgtggggttaacactgtcccctagtattacaattaaaaaaaagatgttatcacgcatgttaagaaaacatctgaatcccaaaaaaaaaaaaaaaaaaggccccta

SEQ ID NO: 168710 - DNA, 425 bp, Zea mays
  unsure (1)..(425): unsure at all n locations
  Clone ID: MRT4577_85450C.1
gtgggttggatgnntgttgntgttgttgttggtnggtganngggtttattatggttaggtggntnantgatggggggggggggtgttgttgttgttgnngttgagtggtttgtagggttagatgtgnnaaggattgttggtgtaattgggnaattggttgttgtaaggggtttttttgaagngttagttgtagnntgtagggttggggggttggatgttngaagnnnattgaagtatntggtgggaggaantgngggataatgggattaggagnaagggagnantgtggaataatgagngnatttgttgngtttattaaaagggnaagaagnnggaggggggttantgtnttggtagnnattggtgttaggttgttgttagtgggtttngtttggggggttttttaatgggnnaaatattatagg

SEQ ID NO: 168711 - DNA, 145 bp, Zea mays
  Clone ID: MRT4577_85451C.1
caggatcctcagcaacgggctcttcttgcacactgaaagacgcgagacgaagagatggcgtagtagtggacggaaggggcttgggagtgttctggacggaaggggcggcagcctggatctccagcgtcctaggctagtagcggct

SEQ ID NO: 168712 - DNA, 371 bp, Zea mays
  Clone ID: MRT4577_85452C.1
ggctccgaatatctcgacattcaactccctcgtcttcggatactgcaggcacggagaccttgctggggctagtcgagtgctcaaggccatgctggggcggggcatttcaccaactgcaaggacatacaactattttttcacggtctttgccaggaatcttagcatcgatctgggaatgaacctctacgtgaagatggtcagcaatggctacgcgccagaccggctcacttaccaccttctgatcaagatgttgtgtgaggcgaaccggcttgaattaacgctgcagatgcttcaggagatgagaaacagtggttttgagccagatcttgcaaccagcaccatgctgatacattttctttgccgacgccatc

SEQ ID NO: 168713 - DNA, 773 bp, Zea mays
  Clone ID: MRT4577_85453C.1
gggcaggcaagcagagggtggttccaggaggaccacatggcgagtaggttccttcaacgggcaccaagctggccagcggcacagcgaccacgcggaagacgacgacgccacacatgctgcgtttgacgaatatagatacgcaccatattcgccttcagattctccgagccctagcgagagttcatccctcttcagcaactccgacgcagggtcgcacagcaccgacagcagcgagagcacgaggaactcgacaagcaccgaggagtacgagtacgtgttcggagccgctgatcagatgtaccgcgtggggggggggcacctgtggagggtggctatccgacgtattcccgttcgaggtccagcttgaacgccagctcatcgggccgggaggcatacagcgcgggtacctacgctgagcacaggactcagggcggcggtcccggtgggctttgggttgagggcgacgagagcccgtccttgttatacactgacagaagtaaacagccgtcgaacagtacgttaagagaccagtataggcagttagataggagcgaacatgaccctggacaaaccaggggcggtgttttattgagaagaccatctagggacaggaccgcccagacattttattgatgttgcagggtttgggctgtagtctgtagagaaataaatagtgtaatgtagcctgtaatatgtatctcgctgcaaacatgtaaaaaagggggagaggaatgtcgtagttcataaaaaaaaaaaaaaaaaactcctcgtgc

SEQ ID NO: 168714 - DNA, 412 bp, Zea mays
  Clone ID: MRT4577_85454C.1
tgatgcacattgatcagatcatactatgcaacggatgtggtgttgacaagatctctcaactgccactttcatctaaggagagagattccgcgtaccgtaaacagcctccatgcacgccacaagcttttcgaagtgtacatgatcattgggcgcaaagaagcgatcacgggaaaacatgacaagatcatggtcactttatcactatatacaacgaagctttgatgtgtgctgccaagcctctgccagtggagggtggacctgactctagccctgagaggaaagaatagggcaaagaaagtccatacccagaatgccctcctctagctgggattccgaaccttgctcgcatgcttgcaaagaaggcgtctgctacacaaaatctatatggctcgccacgtccgagcttaaagat

SEQ ID NO: 168715 - DNA, 108 bp, Zea mays
  unsure (1)..(108): unsure at all n locations
  Clone ID: MRT4577_85455C.1
ggaaatattcgtacttaccagttcaatgcgaatgaacaaattcgtcanactcagnactgctgcatatctgatgcctacagaaaattttgggaacgacagactacagta

SEQ ID NO: 168716 - DNA, 392 bp, Zea mays
  Clone ID: MRT4577_85456C.1
gccggtccgaatcccggtcgccccgcgtccgccagctgctctgccgtgtccgtgcgtggtcgccttgcccgcgttggcttgagtatgtatatgacgtagcttacacctacccaggctcaagaggagtatgacctgggcatcttctgtgttcacacactctaggtttagggggaccacccactttgaggttgattaacttgctcaagaaattttgggcgtatgatggccagttgtggtggaaatttagctgattattttatttatgattctttggattttttttagctttttttgttatgaagactttgtgatctgtgcattttaatgaataatgatgctatttttgtctttaattcaaaacactttattagttatcagttatgctttgaaaa

SEQ ID NO: 168717 - DNA, 427 bp, Zea mays
  Clone ID: MRT4577_85457C.1
gactggcccatgcacgcatacgtggagctcgtttaaacgggcgccccttttttttttttttcattaaaaggcctggagaggatggcgttaaaaaaaccggcgtttttttaacggcccaatggtccggaaacaaatattattgtgtgacctccccggtcttagaattatccgaggttttaaccgatgactggtgagaccggtttttcccaaccccgaacccaccccacaggacacccatctgtataaaacggcatcggcagccgcagcaccccccgaagcaaacggatcgggtgtagaaacaccaactgtggcccactgttcttagaaacggaactctctgtcgaacccacgggactgttgtaacgtttgggcgaacgcccgggacttgcggatataaacataactgacactgggccgagcatacttt

SEQ ID NO: 168718 - DNA, 377 bp, Zea mays
  Clone ID: MRT4577_85458C.1
ggaccaaaaaaggggcaatttatttgtataaattgcttgaccaagggttgcttgaaatccctttaaaaccttaaacctttgaaatttaggaatcccggaaaagggttaaataaaacaccaaaacccccctttgtctttcaataccctagggacccaaacccccaaaaaacatacatacaaagttttttacccaaatagtagcctgggaaaataataagcgaaatagggaaaaacaatacccttcacaggggaattgctttctcgagggaaaggacaaaaaaaacaggcctgggtttctcattctcaagggggttggcaacccggggagcggaacctttgaaaaacctaacgaaaaaggggtctccaaattgggttgg

SEQ ID NO: 168719 - DNA, 473 bp, Zea mays
  unsure (1)..(473): unsure at all n locations
  Clone ID: MRT4577_85459C.1
ggccagacaagccaancgaagccgaggaacgaccanggacnccaccggcaccggagcaggggggaaggggaagaagggagcggccgggcgcaagggcggcgggccaaggaagaagncggngncgagggccgngaaggccggncgggggggggggggggccgcancgggcgccacnngaagaagggccgcnacgcgcagcgngncggcaccggcgcccccgncnaccncgccgcngnccnncgaaaccncgccgcngaggggcnggagcncgccggnaaggcngccagggacaacaagaagacncgcannannccgcgccacgngcnncnggcganccggaacgacgaggagcnngggaagcngnngggcggcgngaccancgcncacggcggngggcnccccaanancaacccngnncngcngcccaagaagacggcggagaaggcgnccagnggcgggagcaaggaggcaaa

SEQ ID NO: 168720 - DNA, 560 bp, Zea mays
  Clone ID: MRT4577_8545C.1
ctcgaagcttgcgttcttgtagtagaggtcggcagcaagcggtagagcgagaggtcgagaagatgaagagcagcactctgttggcgatcctagttctccaggcccttctggtctctgcggccgtggccaaaggacctgcagggccgaagaagcagtgctggtgcggcgagtgcaccagctggtcgggcgtgtggacctgcgacgacctcctcaccaagtgcgccgccacctgcaagaactgcgtccccgtgtccacggacaagggcgccaccaagtacaggtgccgcgacttcctccccgaaaactgtggctgcaagatccactagagactcatccaattccaccatggccgcgcgccacagcggcacagccgatggatccttccatatgcatgctcctccgtccgtccgtccgccttgctacaagcaggcagccaccaataagcaagctcttgttgttttgcatgtttgattgggtgtcccttcccagtcgaggtagaataaaataaatgtcagactcacgtacagacgtgttattacgatattcctcccctacatata

SEQ ID NO: 168721 - DNA, 1069 bp, Zea mays
  Clone ID: MRT4577_85460C.1
cattgggtacctcgaggccggccgggccagcaagagtgacgctgaaacctcgccaccagccgataaagctccacccgaaatctctagccccgaatgctacagcgatctcgtatccactcgtccagcgagaggagggtgggtgcagccgctggtactgtaccagaactactggctgacccccggcaggctccagcacatcatccccgtgaaagagctctacaagcctcgcgccgacgacatcgtcctcgtcacctacccgaaatgcggaaccacctggctgaaagctctcgccttcgccatcacgacccgcagccgccacgctttcgccgcccaccctctgctcgcccggcaccctcaggagctcgtgccgcaccttgagctgccggccctggcgggagacctagcggacgtcgagaagctagctgccctccccgaggcttctcgcgactcacctacccctttccctgctcccgccggacgtgtccggctaccgcgtcgtgtacctgtgccggcatcccaaggacgccttcgtctcgtggtggttcttcgcgaacggcatgctgcgcagaggcggaagagagaggaggagtccccgagcaggtggcgaggctgtgcagcttcgaggtgctcagcggcctggagaaaaaccaaaccggaggtgtcgcttttggaaacgatttagtcattggcaagtctacgttcttcagggaaggcaaggtgggggactgggaaaaccacatgaccaaagagcagggacagaggttggatgacgttttggaggacaagcttaagggatctggtctcgtgttttgattaattcatatagcatgttgtttgtcatgaataatcattcgctcacacatgtagtggtattttatgtaattggatcttttttttttctacatagattacgttatggtaatgcagaattatggtgtagctcgatttatcatgtgcatctgtatgtaaggaattgaggtcctttctggtgaaaagtctctgatggcgcagccccgtcacaaaaagatgcgagcggaaagttcaacaaaaaaaaaaaaaaaaaggcccc

SEQ ID NO: 168722 - DNA, 675 bp, Zea mays
  Clone ID: MRT4577_85461C.1
gttttaccgctttataaccatggttggccttctgttgactgttattgatttggagtctcctttatgtatgctctcttctagagtgctaaaagggcagacccagtgccataggcttccgtgtgagcgttaaaactgagacaagcagttccccacaaatgtggagaggctgttttggacccgtgacttggtgagatagctctcaccactgcatcaggcctgccttactctcttctagagtgctagtttataaatattcgtgatgtttagcttttacactttattgtccgaagttttgcactgaccgtggattgtcttttgggctgtgcagtgtgcatgatgtgtacctgaaggttttgcttatttggctgatatttttaaatgcctgtgactgataaatatctcttactatttctgattgtattactattagtatgactattggcaacatgaatcaggtaccgatgcaacatggtatgataagctgtcgtaaaagaaaactacaaattttgtgtgcctcggtcagagactggaagttgttgcaagccgcaacggtctgttcgtactttccagggtgtttcaacgtcgaaaaattaccattgttctatggttcagaggctatagaataaatcatggcacaactgaaattcctggactagggtgtatacacgtttgttt

SEQ ID NO: 168723 - DNA, 191 bp, Zea mays
  Clone ID: MRT4577_85462C.1
tctgtcacgcgtcctaccactcgtcctggaacgtgtgtcaactgcatgcaaatggctgcaataaatcctgttcctgattgctttagaatcatctctgcttcacacaactgcagcggcttatcagcacgagcttgcggccttgttagccttcgatcccacatacgttgctgatacacttaaggatcgtgcat

SEQ ID NO: 168724 - DNA, 531 bp, Zea mays
  unsure (1)..(531): unsure at all n locations
  Clone ID: MRT4577_85463C.1
ggaatttccggctcgacccacgcatccaggcgacgcgcggacgcgtgggctggacgctgtgggacgcttgtcggcgagctgccttacaacaacgcaattgcgccaattgctaacaacacatccttggcacaaatctaaccctacaaactcattgcaactgcacaacaacaacaacnagtttctgccatcacttgagnctcacctagccgtggtgaacacctgtcancctacttgcaacnagcagctgcttgcattccaacccacttgctcttggcgaacgtagctgcattaccagcaactaacaaccagcttgcaacagtttaatgccagtgctcaagtcaactagctcatggtgaactcctgccgtctacctttacaactactttcanntctagcccgctttcgcggtgggcaaatgcaacctaacgtacctatncaacaacagttgcttgcaaccaaattgtaccaagctctgactcagnctagcttgtggcaaaaccctgcttgcctacttacaacaagttgctttca

SEQ ID NO: 168725 - DNA, 348 bp, Zea mays
  Clone ID: MRT4577_85464C.1
gacccactcctccgttcaagagcttcctaaatgaaacttttattttgatatatgccaaaaaaaaaaaaaaggaagattttaaaaaaaaagaaagacaaaaaaaaaaaaaaaaaaataaaaaaaaaaaaaaaaaaaaaaaaaaaaaaaaaaaaaaaaaatgcctaccatatctaaataatccaaacttacttaccccttctttcaaacttcatacctctccaataatttcccctaaatccaatttattcacctccatttaacaccaatctaacttttaaaaccttacctttacctaatttaatacatctccacaaaatccccttttccccaactttttttaaaccaaaa

SEQ ID NO: 168726 - DNA, 203 bp, Zea mays
  unsure (1)..(203): unsure at all n locations
  Clone ID: MRT4577_85465C.1
tagctcgtagatcggctcgagagtnggaacatatgatagagacctactgaatgatgaattctacattggcttaaagcaaagaagatcaactgagccatggatatacgtctgatattgctcggagtgagttgataggccgcggttaggcagagctatggacaaaaagttcttgtccagtgtgaggagcttcgctaaccacaatg

SEQ ID NO: 168727 - DNA, 459 bp, Zea mays
  Clone ID: MRT4577_85467C.1
gaccctcgggtttgccgggaaaaaagaagatttaaacttacaaataagccaaagatctcttaagaataacctaaagcagtagcctatgggttccttacctttgacatccggatcacttattcctacagcaacaattgtagtgatgggatttgagctattgtgccgatggtctgtcatcaaattttattctttttttattaactcaataactgtaagcaaatcagaactattaatctgatacatggaataggtatattcaccttccattatagttacgaaacgatggaaatggggatcaaagacaccatcagcatagcgtactactggtccataatctggtgtcagtggtagtggtgaattatctgaaaccaacaaagcaaggaatttaaaaggccagttaaagaatatcatgacttacacatgaatttgataataaaatgacatccctttattagttat

SEQ ID NO: 168728 - DNA, 326 bp, Zea mays
  Clone ID: MRT4577_85468C.1
agacaacttgtttcattgtttcttgtagatatcgagcttctcttgcaccacaaggtcatggatgtcttgcagctgcggatcaagttcccgctggagctcaagctgtattcgcggaagaactaccctgacctcgtatagaattgcatcggccgccatgccaccacttgactctgcttgaacccgtacaagaagtgcagtcccgagttcttcaaggccagagtagggtccggctagaccggccacaggtgcagctgctgtggctactgaatgagcgacccctgctactgctgatcacatcgatcgacgaacatggatatgaatattat

SEQ ID NO: 168729 - DNA, 400 bp, Zea mays
  Clone ID: MRT4577_85469C.1
ggggaaccggaattttgggggccctttggttttttccgggagctttttggctggggaaccctttttttcaaaagaaaaaaaaaggggttgggccctttggggccttaacccaataatccccctaaaacgggcctgtttgatttcctgggattttaaaacaggttggtggaaaaccctccagtttcctaaagggcccccccccccccccccccttttttttttaaacccttgtttttgggcccccccttttttaggcttttggcaaataccaaattttccccttcccccaaaaaaaacccccaagtttaggcgggggttacattttcccctttttaaaaattggccggccaagttggtttttttaaccccttgcctgtaaaaaaaattttaaggggggccc

SEQ ID NO: 168730 - DNA, 320 bp, Zea mays
  Clone ID: MRT4577_8546C.1
cagacgcttgtaccactgaaagcaacggttcagactttcaacactggtgaaaagccagtagctaaagcagatcgctgtcatggcgaccgctaatggtgatgcaaagggtactggtgccactcacggttacagtggaactgttccaagccgacggagcttacgactgacgcccgatggaacttatatggagccgttgctaggaggcgtgacttctgctcgttacctaaaaaccacatattatggagatgaccagctcaggggcacaatgtgcatgggatgatggatctgtttatgcaaatgggcaatctagaacaaccaca

SEQ ID NO: 168731 - DNA, 192 bp, Zea mays
  Clone ID: MRT4577_85470C.1
acgaacaaaccacacaccccacctacccttgccggaccggcaggcagggggacatggacctcgccctcctggagaaggccgggctgggcctgttcgccgcggatgtggtggtcatcggcgaggccaaactgagcggtaagcggtactgactaccaccggggccagtgggtgcccacgtggttgtaaattgta

SEQ ID NO: 168732 - DNA, 264 bp, Zea mays
  Clone ID: MRT4577_85471C.1
cccctttccctttttttttagatcttcgaacaaatggacactttcatttatcttgggggtttccgcttgctctccttaccctctaccaacccacgaaccccataagtaatcttgtacccaaacattcactcacctctagatacgacaaagccttacttcatgaacctgctgtccctgttgagaaaaccaccaacgccaccggaagagccaccagaggcaccaccaccggtgccacccttcaagttcatctggagagccatcttt

SEQ ID NO: 168733 - DNA, 380 bp, Zea mays
  Clone ID: MRT4577_85472C.1
gggtaaaaatttcaattttccagcgggaagaattctaccctcgccatgaaacaaagtttcaaactttcaataagaaagctcagttctttctttttgggggtaaatgccgcaaaagccaaccccgggttacaagaaacccaatcctaaataaattagctaacaaatcaaatggggggcaactgggaacaacaaccgatcaagcggaccaagggggctgccccggatttacccccgtgggggggtccaccccctggatttttcataaaaccacccccgggtctcccagggggactgggggagcccctcaaacatcctgaacacctcccccattgttgggcccccgtctggggacttggcccggcacaccatgggtatttgca

SEQ ID NO: 168734 - DNA, 227 bp, Zea mays
  Clone ID: MRT4577_85473C.1
cggagaagcatgcaaacctcactacacaggaaactgctgtgcacatcgtgtacattgaccacctccacaacaccaacactgaagagttcaacattactaccatcaatcacatactgtttaaaaaacacttgaacagaatcgcagtgctctaccactacaataacgcacacagcaacattcttcacgatgatgaccctatatcatgtcataagatcctaaagagcaac

SEQ ID NO: 168735 - DNA, 2738 bp, Zea mays
  Clone ID: MRT4577_85474C.1
caaatactctcatactggatattttgaaaaagaagccatggacagctacttcagcatgccaacaggataatttgactttcattgatccagggaggctcattgaaatcaagtcttctaatcctggaaaaagaatatgaaaatgcaattaacacaagaggcgagctagatgagcgcatgtttgctaatgatgaggacagtttacttggcagtggaagcctttcaggtggagccattaatttaccaggcacaaagagaaagtatgatgttatggcctcacctgcaaaatcaatatcaagcccaaatccaatgtctcctccacgtttttgtctatctcctaaaggaaacagcttttgcaactcaaagatggctcctagcactccagtgagcacagccatgacaactgccaagtggcttcggaatacagtatctccccttccatcaagaccttctggggaactattgcgcttcttctcagcctgtgataaggatctaacagatgacattgcacacagagctgggattatacttggagccatattcacgagcagttcttttggtgaacgaatctgtactagtatgcgaagcgcaagtaggatggatgctatctggacagagcaaagaaaaatggaagctcttaagctatattatagggtcctcgaatctatgtgtagggcagagtcacagatcttgagtgggaacaatcttacatcacttttgtctaatgaacgtttccatcggtgtatgattgcatgttctgcggagttagttcttgcaactcacaagactgtcactatgatgttcccagctgtgttggagaagactggcattacagcatttgacttgagtaaagtcatagagggttttgttcggcatgaagatacactcccaagagagttaaagcgtcatctgaattctcttgaggaacggcttctggaaagcatgtcatgggagaaagggtcatcaatgtacaattctttgattgttgctaggccagtactatctatcgaaataaatcggttaggtttactggctgaaccgatgccatcacttgatgcaattgcagcacatcataatatctcaatgggtggcctgccgcctcttcccttccagaaacaggagcgtttgcaaagtatcactttatcagccactatcagcataatgcctattacatgttcctgaagtgttaaaagcagtatttctttgtttcttttacacttttcaatcacgcgaataagtgattgaaccccctttttggtaattgtgtttcctgtagataaagatgaaatcaggtctcccaaaagggcgtgcactgagaggagacatgtgccggtggacagcaattcatttcgatcgccagtgaaggacagtattaaattgaagctaccacctcctcttcaatcagcttttgcaagtccaacaagaccgaatcctgcagcaggaggtgaaacatgcgcagagacaggaatagctgtgttctttagcaagatatcgaaactcgcagccattagaatcagaagtctctgtgaaagactgcaactttctcagcaagttctggagcgagtatattcccttgtccagcaaatccttagccaacagactggtctcttcttcaacaggcacattgatcagatcatactatgcagcatatatggagttgccaagatctctcaactgcaactttcattcaaggagattgtttttgcgtataggaaacaacctcaatgcaagccacaagtttttcgaagtgtttatgttcattggcccccaacaagccataatgggaaaacaggagaagatcatgttgatattatcactttctacaatgaagtatttattcctgctgtcaagcctttgttagtggaggttggacctggtgctagtccaaagaggaaagaagagggaaaagtaggtccatacccagaatcccctcggctagctcggtttccgaaccttcctgacatgtctccaaagaaggtttctgctactcataatgtatatgtctcgccactacgatcatcaaagatggatactttactctcaccaagcccaaagagctattatgcatgtgtaggcgagagtacctatgcgttccaaagcccctccaaggacctgaaggctatcaacaaccgcctaaatagtgggaagaaagttagcggacgattgaacttcgacattgtcagcgatctggtcgtcgccagtagcctcaacggcgttcaaaatgccaagcccgcagccacggaagtggttcccaccaagacacctgtgaagtgcgagccatctgaatcgtgatctactctgatgctgcatcaccaatccagtgtaacttattataaatggttaggtgtcagatgctctgatttaggagtgtttgaatgcactagagataatagttagttagctaaaaaatgttagtggaattagctagctaactattacctaatttgctaaaagtagttgatagctaaaatattagctagactgtttagatgtctcaattttagcagctaactattagttctagtgtattcaaacattcccttagatattaggtggccttatttctgtttgtatttttgacatgtaaacatctttgtgagcagctctaccatctgtaaaatataagaaagctgctctaagagctcccataacccaactctctttgtaagagatagataagtacgatagtcatgtaactttataagttttgaaaaggtctgtaaatacaaatgatcattgtc

SEQ ID NO: 168736 - DNA, 703 bp, Zea mays
  unsure (1)..(703): unsure at all n locations
  Clone ID: MRT4577_85475C.1
gtaccaagattgccgatatacctccggatgaatactcgtggagnaagtatgggcagaagccaattaagggttcccctcatcctaggggttactacaaatgcagtagcgtgaggggctgcccagccaggaagcatgtggaacggtgcgtagatgattcggcgatgctcatcgtgacatatgagggcgagcacaaccacaccagaatgccaacaactcagtcagcacaggtgtagagaactcatcatcatcgccgcacctccttccgcaagtgctaccagcacggggtcaggtcaacaatgatttgtgcggagacattttcagctgtcgttgagatgtttggccctgctgctactatccacatgatttgtagcgagaatggagtgggtggtgagcacaagattttcttctctcttatggaggttatcccaatgatgacgaggaagaacaagccattagatagataggacagctgagctgttggtcgggattagtgtgaagaggtggaaaggaaagataaaagttggcgggaatgagacagttgtgtaaacttagtagaatggggaagtagagatagtgctgttcttcttggactactctgattccgttcctcactcactcacctgtatcaagatagcgtcaaaactgaaaagaagtgcacagaggccgccttttgctgttatagcaattcattcgttcattgtcc

SEQ ID NO: 168737 - DNA, 1739 bp, Zea mays
  Clone ID: MRT4577_85476C.1
acttgctcttgccttctgttcttcacccgtttcagattttgaatcaaaggttttagtccttaaggtgctgaagaagtgtgtcaagctgccagttctagctcatcatctagtaaaagagtctggcattctgttgtggttattgtctgttatttcagtccgtagcgaagtgtctgacggttctgaaagctcctgttctagagtaactgagttagcgttggaggtagtcaatggtttgatatcatcaagattgatcacagattggctccaagaaaccgcccttgagcagctctcaacaatatcatcatacctttctgttctaattaacaatgccaaattattgaaaggaaatgttcatttgttgacttcagctctaagtgtgattacatcaacaatgaggttgtctatgaaaaggaagatataccaaccacattttaccttgtccctccatggtgtatttaatctgtgccaaactattggtggtagctcaagaagtacagagcataagcttgtaatggaacttggtatcgatgccattctgatgaatggtcctataccaattttatctgaaatggtactttgttcgtcatgcaccgcctttatttcacaagccactaaaagtcacattttttgtatcattgtcaatgtgttgtctggccaaggattatgcgagatgttatatgtaaatctttgttttgtttcacaggataagtcaagaatatcaatggttgtttcatgggcaacttcaagcatcttctggttgtactctaaccaaagatcgctgttggaaatatcctcgtccgagccaccaagaaatgagtctctactttcaaagattttgcgcttgttagccgcttctgtaatacttggaaagatatctagcatctttcatggaaagagtgtagatcttgcagggaacaccagtgaaactctttgctctttcttggacaatgcatatgaaagggctgaaacggcaaagagttgcagtgtgaatgatactctagctgtcattatactacaccttcaagaccatatgccaaagaacagattcggcttgagatcagttattgcagccctttgcttgttgcttcttgacagatccagtaagcaagtgaacaaacacctggccaacaaccgagggaaaattgaaatgctttgctcaaagataggctgcccggctgaatcaaatcctgcatggagatggcattactatcaaccctggaaggattctgctttgcagcgcacggggatggagcgactggaagaagagcaggcctgccgaagcctcctggtcctattttccagtgccttcagtgcctgcctgtcagagttcccggtgttgtccctagatgatgttgagaagtctggccttttccagtgggaaagagacttaatggctaaacaatcttccacttagcagcggacgattgatcttgtttagaacttggaagaagagaatgcttcgaccctcagctggattggatggatgaacctacggtgctgcacaagccgaaccggccctgcgcccctgcctaacaccaatatgttggacacttccactactgttcttcacttcccatttgtataacgggacctgcattattgtagcatgggtgcagcgtttcctatgtaatttctgtgacattaccaactcacaatattgatttcatctgaaatgtaacatattttttcacagaagtgcttgcagcccaaacggccgtgcctgtttgtaaaaaaaacac

SEQ ID NO: 168738 - DNA, 554 bp, Zea mays
  Clone ID: MRT4577_85477C.1
agcgcacggggatggagcgactggaagaagagcaggcctgccgaagcctcctggtcctattttccagtgccttcagtgcctgcctgtcagagttcccggtgttgtccctagatgatgttgagaagtctggccttttccagtgggaaagagacttaatggctaaacaatcttccacttagcacgctgaagaactaggatgacccacatttgagctgtgtgtacaatcatgctcgtacgattgatcttgtttagaacttggaagaagagaatgcttcgaccctcagctggattggatggatgaacctacggtgctgcacaagccgaaccggccctgcgcccctgcctaacaccaatatgttggacacttccactactgttcttcacttcccatttgtataaggggacctgcattattgtagcatgggtgcagcgtttcctatgtaatttctgtgacattaccaactcacaatattgatttcatctgaaatgtaacatattttttcacaaaaaaaaaaaaaaacaaaaaaaaaaagcctgtttgttcaagggcggcc

SEQ ID NO: 168739 - DNA, 156 bp, Zea mays
  Clone ID: MRT4577_85478C.1
gttgtgttcacaataagttccagtgccgctccgatccaggtgaattttgtctaacagaaatagaggctatttgaccgcgctaccgggaccctacatgataacagtcgactggccgaaacagaggcgccacggactcgggaaattcatatgtgagca

SEQ ID NO: 168740 - DNA, 378 bp, Zea mays
  Clone ID: MRT4577_85479C.1
accacgcgttcgcccacgcggtcgacgtaagtgaaatgacctatataatgcaactgtgcgtgtaaaaaactaaagactaaagaacaaccaaacagacagaaactgcaaggcaagaacccaagacacgcaaagcaagcagcagaccaaacagattagaccaagagaacgagacaagagcgggggatggtgaagcggaccgaacttacttacctgcccgcgcgcctgcacacctctgctatcggggcaccgaaaggcaagtcggtgcctgctgagtgacaagaaggggcgcgtgaaaaccgtggaggagcgcaccaaagagagcgtgtacatacacaagattgagagggagcggcaagagaagatgaagacgaggctcga

SEQ ID NO: 168741 - DNA, 552 bp, Zea mays
  Clone ID: MRT4577_8547C.1
gccggccgttttcgggagcagtgacgaactcgaagcttgcgttcttgtagtagaggtcggcagcaagcggtagagcgagaggtcgagaagatgaagagcagcactctgttggcgatcctagttctccaggcccttctggtctctgcggccgtggccaaaggacctgcagggccgacgacgaagaagcagtgctggtgcggcgagtgcaccagctggtcgggcgtgtggacctgcgacgacctcctcaccaagtgcgccgccacctgcaagaactgcgtccccgtgtccacggacaagggcaccaccaagtacaggtgccgcgacttcctccccgaaaactgcggctgcaagatccactagactcatccacagcggcacagccgatggatccttccatgctcctccgtccgtccgccttgctataagcaggcaggcagccaccaataagctagctcttgctgttgttttgcatgtttgattgggtgtcccttcccagtcgagatggaataaaataaatgtcaggcgcaaaaaaaaaaaaaaaaaaggccccta

SEQ ID NO: 168742 - DNA, 592 bp, Zea mays
  Clone ID: MRT4577_85480C.1
agctccacgacaaattttgcagcccactttgaaaaggggaaccatagctaaccgaccccccgaacaaagaacgctcccccgttagaagaaagggggaacacaaaacggctaatcagaaagaaacacagcggcaccgggcacagcgagaaccaaaccaagacattataaaccgcacaaaacaaagaggaaaccgacacccccacccgcaagagggggcggctactcggcaccacacaatggcctgtaaaagagaggcgaaaaagggaggttacccccctccaccacaaaaaactagaaccaacgcaccggggggggatgaaaacactatgtcgcccccccaatacacgacccccaacgaagcaaagggggaaaaaaaaacgcatgatgccctctaaaaaaagaaccacaaaaacccccgggggggaggaaaaaaaaaagggggccttatttctttaaaaaaaaaaaagaaacccggccccccaaggaacaagaagggcggcccttctcttacgagaaaaaaagaggccaaatcccaaacaacaaatatgggggccctgactgttcttggaggtaaaaaaaccttagcccccca

SEQ ID NO: 168743 - DNA, 531 bp, Zea mays
  Clone ID: MRT4577_85481C.1
atgctctcggtcgaacacggtcttactccctctttgccggctaaatcacgagctgagggtagcctatgaaattggggggtcccgaactcttgctcgaacctcaagaacgctgtgacacccctcccgcgcaatgagaactcggggtcgttccaatcgtagacgtcgctggcggcctcctgatgcctgcggctgcggcagcactaatggagatgctgacacgtgctgaagatatagtgcgcccagatggagctcgagcggacggtgccggggtgcacctgagccaccgcgccgacgccgtcgccgtcacacgacaaggtcgcggccctgctggcggtgaacatctccatcgagaacccgctgtggctgaacgaacacttcatcttcaccttgacctccatggggctaacggtcgcgacacatatgtggcaccattaccttacggcgcccgcctgctccgccattgctgctgagcttctagcgctgtaatttccccgcaatgcagctactctagaaattgtttgttggggggtg

SEQ ID NO: 168744 - DNA, 269 bp, Zea mays
  Clone ID: MRT4577_85482C.1
gcaagatcgtcagaccgatccagcctgacagctttggggagcgagttggagcctgtaccttgcttcgattcagtccctggcgccatgcctgcgtgcacctttccagatacaccagtagtaactctggacctaaactcgaatctatatctgccgtggattatgcgtagaagctactcataattttagtagtatctagttacagcattgttattaatctattgatgtgtggaggcattatgcagcttgcattgaagagtccaaggcgatgc

SEQ ID NO: 168745 - DNA, 1046 bp, Zea mays
  Clone ID: MRT4577_85483C.1
ctcccgagtcccgacctcttgtttctctcgctcgcctccctcgtccgcggtccgtcgccgctccagatccagcctccagcccgccggtgtcttctgcgccgtagtcggcggtcaggtcgtcgggtatggtgaggtcgtccatgagagcggacatgtcctcgacaccatagccatagcctgccgcgccgttcgcggccgggagcgccggtggtaaagacgcggcggctgggtcgacggcgtagaatggctggaggagctgcgtggcgttgtcgcccgaggtgaggtccggggagaggtagggcgtgacggaggagcccggcgggaggtccgggtaggcgaagttggtgcgcgcgtgggagccgcggagggagcgcgcgacgcggtcgtgtccttggtggccgggtcccggatctccgccgcgtaccggtcccacgaccggcgccgcacgcccaggtaccgcgtcgtgttggcgtccgcctggggctgcgccacgagcggacgagcccacgaccgcagaacgcaccgtcgctgctcgcctgcgctgcgctgctccgatccaaatccaccccaagggaacatctaccgccggccgactcctgtgtctggcgtgtattggaccacgaccagcaggcagcagccccgcgcacgagccaagatgcgcacgcctagcgcgacggcggccgagatgtgcgtttatcaggaactgaggaggcgtgtcgtgcctggaccagcacggcccgacggaagcccgtcgtgctttagggtcatactagaccttacttctactcgctaggtccggtaagacatgacctgactctattttgtgctagctaggcccgactaaccgaggcccgaagcacggcgggctcgtgccgggccggcacggcacgacccaacttgcagcactaatggtaacgatcatttctcaagcgctgtgagccgcagtaaatttgaaatgagcaaggacaacagaaagggcaggaggagagccaacggacaatgtacttctgtacctttataaaattcgataagcgagcccacggggc

SEQ ID NO: 168746 - DNA, 478 bp, Zea mays
  Clone ID: MRT4577_85484C.1
attcggctcgagctccagcctactgctgtattagaggctggagagttgaaaggaccccagagtaaggaagaaaacgaggatccaatgtctgagttctgagctgctatcacaagatagatgagacgggatcatgctgatgatacaaggctaaaggcgcaacacgtacaatgatgacatggtggattgatgctaatatgcggggcggggacagtcttggtaataatgcgaaggctgagtatgaggaccgaggtctgaagcagaaaatgcccttccgaagacaggcgcaagacaggaaggatgcatgactctaattgccgctatggttcaagctgaagaagacttatctgcagaaccaggatgaggacacctgttgataatgtgaacaagtaggcccaaagaagtatacctggtgaataatatatatggggttagctaccagtatttgcaccgagtgaaggaggcctcatagacattccat

SEQ ID NO: 168747 - DNA, 670 bp, Zea mays
  unsure (1)..(670): unsure at all n locations
  Clone ID: MRT4577_85485C.1
cttccttccctggactccccccggttgtttggattttagaaagtttctcccgttcgttccatccttctggtccattcagtactcagcatatccgtttgcctccgatcgagcaagaatatatacgcagccgccggctcgtgccagacatggagcacgcgatgccgacgatggccgcggagtccgagggcgcgaccaccgacgacgacgtgcacctctccccgaccagcgtcagcagcggtggtggaggaggaggaggaggaggcccccccagcgtccgcttcaagatactctgcagcttcggcggccgcatcatgccccgcccgtccgacggcgcgctcaagtacattggcggcgacacccgcgtcctcgccgtgccccgctccatccgcttccgcgatttgaagaagaaggtggaggagatgttcaagacggatgtggcggccatcaagtaccagctgctctcctccgacgacctcgacgtgctcgtgtccgtcacctgcgacgaggacctggcccacatgctcgacgagtacgaccggttcgaggcgaagcggtcgccgtccgcgtcgccccgtttccgcgtctacgtcttcgtgccgcatcaggtctccgcctcgtcggncggcgncgncgtcggcggccccgtctcctcttcgcggcacgtcagcta

SEQ ID NO: 168748 - DNA, 217 bp, Zea mays
  Clone ID: MRT4577_85486C.1
aagccggaaaatccatggcccaattttttttttacccccacgggggcccaacacattacccgttattttaaaaaccccaaccgggtaagggtagttttaatatcccctaacccggtgaagagcctccccccctgctcaatttgagctccaaaagggccccccaataaaaggccccatattatcacaacaaaggggcctcttttaaaacagaaagggg

SEQ ID NO: 168749 - DNA, 221 bp, Zea mays
  Clone ID: MRT4577_85487C.1
atgaagctaaggattcagatggccgtccggatgaagaggttgcagatgagtattggggcaaccatttagctcgaaatgactctatcatagttgatatctgccaggttagttttgaatgaatggtcagtacaagtcaacattagtttgccccatctgcaagaaagtttctgtaacatttgacccgtttatgtatttgtctttgcccctgccttcaacaacaa

SEQ ID NO: 168750 - DNA, 608 bp, Zea mays
  Clone ID: MRT4577_85488C.1
ggccctagggacctttttttttttttttttccgccaaagaaggcaccatatataataaaagagtgtatagagataaatgtcataatataatcagagtacttattacatagcggaagacttacaaaataaaggataaatataaaaccaactaaggatcgtccttggcgcaagaaagtcaactgggagacgccacctagatcgaatcgaactcctcgatgtggctcctcttgaaccacttgttcttctcctgggacttgagattccaggtaccaggatgatcttcaggtgactcgtgacctcaagcttcaatggacgacgagacggaacaggttgcagcaatcgggtgcctcacggtggtggccaaccccggcggtcgatgcgatgcccgccagtctactagtcccggtggctctccaaatttttgttcacgcacgccgaaggatcccgccacggttcggccagattgatctcctccgcacaacccatcactgctagcttgtggattggtgatggcggctagctagcttgtttagcaggctggagagtatgacggtgtggttaaggaggccatcaagacgatgctttattggccgattcatcgggcccgg

SEQ ID NO: 168751 - DNA, 654 bp, Zea mays
  Clone ID: MRT4577_85489C.1
aagggctcaaggctagctaatctatatagcgtgtctcctgcccagacgcccgtggcgtccgagaagagtggccccggggcccgggccggccgtgtgcccctgcgctggtcgagaagatgcgtgccggtggcggccccgccagccgggcgctgcggcgccgtcgtccatggcgagagcgtccgccggccagccggggtgaattgcgttcgtgccggtgtgatcgactgcgtgagtgagactggggtgctgtgtgtgtgtggtgtgtgttcaggtctatccgagagcaagcgctcctgtaggcctgcctgaccgcctgaggctggaccggcgagcggcgaaccggccggccagccggagcagtaccacggggttggccgtctccgtgactccgtgtgaccgtgtcagaagagcacagcagccgggagtccgggacacgaggccggctgccggtgacctcatcaccctctgcaatctgcatcactcactgggcttctgatgaaaaggaggacaaaacagggcctttcagcttctgcgccgccgctgcatgctcatgttctttcttccgtcctctggcactggcagttcagatccacccccctgcaatgtactactagtactctactcttgcaattttcccagctggtcttgctcccc

SEQ ID NO: 168752 - DNA, 182 bp, Zea mays
  Clone ID: MRT4577_8548C.1
gccttctgtaagcctatcgtatctggtgtgaggcaagcactgcaaatttcaaacacagcctgtgttttaaactcctctaaaaagcaagattctcataccaatggtgacattctgatatacgcaaagcggaggttggaattaaatgacacctgggatatgtcacacggccgccgttgctaaca

SEQ ID NO: 168753 - DNA, 482 bp, Zea mays
  Clone ID: MRT4577_85490C.1
cccacgcgttcgcccacgcgtacgcccacgcgtccgcctcattacaagtcttcatgagagccgacctacactacagtaccttggaaaacagggcgaacgcccatccttcgatccgacagcctaccgatagcttactactgatctttctgtgagagacatggctacgtccacgataaccatctccaccagtattctgatagtggcggctgcactggcaaccttggcccgggccgagtgacccccacctgttctcgaagtgtaaggagacgcacaggtaccaggtccatggtgagagctcccgagatggtaatcctgatcaatggctagttccctggacccacgatcaactgctgctcaacatcaacctcagtggacaacatgatgaggacacttgccatgcgctccttgtcacctgcaacggcatgcactacaagaagaactcggcgatggacgagatgccaggcacgcagtgaccatagcgc

SEQ ID NO: 168754 - DNA, 316 bp, Zea mays
  Clone ID: MRT4577_85491C.1
ggcggacccaggcgtccgtttttttttttttttgggaagggaagcattttttttggttcgttttcaatggaataataacgcagggttggatccatgggctggatgaaccccggccggccggaattaattttagcccgccaacagaggcaactagataccgaaataaaaggggtaaacaccatgatcgatcgattaattatgacaaaaacccgtccaaacatgcttttataaccgattttggatccatgataataacggaaggacttcgttgatggacggaatgcctcgggtgggcgtgattttttagtatcggaac

SEQ ID NO: 168755 - DNA, 500 bp, Zea mays
  Clone ID: MRT4577_85492C.1
tcggaccaaggcggtccggaaaaaaaaaaaaaaaaaaaaaaaaaaaaaaaaaaaaaaaaaaaaaaaaaaaaaaaaaaaaaaagaaaaaaaaaaaaaaaaaaaaaaacttgttttttatatggtggggggccgtttaaaaaaaaaaaacttaattaacgcgggctgccaaggaaaaattttttttttaggggggccaaattaaattaattgggcgggcgtttaaaaaacacgggaggggaaaaaaaaggcggtacccaacctaattaacttggttgaaaaaaacttttttttaagcgggggaattaaaaaaaaggaaggcccgatcggcttttcctaaaaatggccaaccaaaatggaaaaaggaaaggccccctctttggacgattaaataacggggggggggggggttacccccaggtaaacggttattttggctggcgccttaccaccggcccgttcgtttggtttccttcctttgttggcaaggaaggcgggttttc

SEQ ID NO: 168756 - DNA, 1716 bp, Zea mays
  Clone ID: MRT4577_85493C.1
accgaatactagctcatcttagagatatggataatgaggtgaagagctttctcctcctcaatatgtaccttcaagtagcttggtgccttcatgcaattgatggtgaaaacccatctgaaacatgtattgatgaacttttatcaaagcaaagctcactttttgatcaactctattattatttagtggtactgcccacttatcagaaagaggggaggagcaccactgtactttcatgcagagtctgcatcattactgcagaaatgtggtgcttgtttaagaagtcaaaatattcttcgacaagactagagagtttgggttatttcccacagccagatatggttcagaagttctggaaactatgtgaacaacagctcaacatatcagatgaaacagaagatgaagatgcaaatgaagaacatattgaagacacaaacagggatgctgtcatgattgcagctgcaaagctagtgcttgctgatacagtatcaaaggattatcttggtccagagattgtttctcactatgtatctcatggggcaagtacgacagagataatcaaacatctaattacttctctaaagaaaaatgcaaactttgacatgggaactctattttttgaggccttgaaaagggcatatgaacgttacatggcccatgttcacgacggagaaaaccaaatcttgactggcaagtcttattcagaatgtcaagatcttgctagtcgtcttgcaggatcctatgttggggctgctcgcattaaaaataagtcagatatcctgaagattatccgagatgggggtttctttttgcttttggtgagcttccaaaccaattgttgttcctcgaggctgctcttctgccatttgtttctaaacttcaagcatcagatattccagatatcttggcagatgtagagaagaggattcaacatatcaatacgactggagatcaaagtgtttggcgcccattttttatgttcgtagagcacctacgtgacaaacatgcaaagaatgaggttttgcatgaggaagaggaaaaacctgtgaggaaacggggccgtccaagaaaagttagagaggtaccagatgtaccagatctacgcggtgctcggcatgtacgtgggaagaaactttttagagatgatgggcacaactctagtggtgaggaatctattggtgcatctgaccatcaggatcacggtgaagatgacgacagcaacggcgatgcagatcagcccttgatcaacacgatcaggtcttccgccgccaagctacggtccttgaagatctctcaacagggaccaagcagccaaaaaggggtccctggcccatccggaagcaatagctgagaggactgcatgcagtgcccctcatcgtcggtgatgatttccagacattgactgaccgattcaagcagcacagggggctggcactaacatcagtttgacgaggacaccattccacgcggagctgcagtcatccgctgtttagctgcttgttctaattgtgtaagcgctgtatatgatttgcacttgggtgctgtgactccctttgtatgcgggccctccccctttccctccctatgttctcagtgtatattaccaaatcatcttcatgtgtaataatatttacaggagtaggttgatggattcatgggactggctatcgtgtgttatcttgacatggctgagggcctcttccaggttatttcgttttt

SEQ ID NO: 168757 - DNA, 419 bp, Zea mays
  Clone ID: MRT4577_85494C.1
caaagggttatcccggttcgggtacccttccccccccctaattcaatttacaaattacccttaaggcccaaaatttttttaaaccccggaattcccgcccgggtcctgaaagggtaccaagtttccctttaatgagacgttttaaagcttggcgccatcacgggcaaaactgtttcccgggaaaaaattttatccggtcaaaattccacacaaaataccacccggaaacaaaaaaagaaaaacccggggggcccaatgagggggccaacccccatttattgggttggccccacttgcccgtttccaatcgggaaaaccttcctgcccctttttttaattaattggccaaccccccggaaaaagcggttttcttatttggcccccagggggttttttttttaacccccgaaacaggcaaa

SEQ ID NO: 168758 - DNA, 539 bp, Zea mays
  Clone ID: MRT4577_85495C.1
gccggccgggccgggatccctggcacttcacatcccagaatctcgtcttgcagctgagcagagttgctccatcgattagtatcacacacttcgaaccatgcagacgatgagtgccgaccgtaggatcagcgcgcctaccaaactctcttgcaaggctgccagtcgtcgagcacaagtgccggcgccaaacgtcgcaaggggaataagagatgaagtgcaagctggcaggcgccgaggtttccgcggcgaccgtgtcgtgggagtacaccgccgacctcctcgcctgtaactgcgacgcctccgctcagtcggagtgccctgtgatgaactccggcaggtgctacggggtgatgctcttccgggagtaccacgacgacgagtgccctgagggatcactccgcggtgtcctgggacgacagacatacacgactatcaccgcgacaagaacatctctccgcaattccatgtgctgcgcttctacacagagctcgtgacgagggattgctgaagcaacggatgcgccatcctcctgtgtgact

SEQ ID NO: 168759 - DNA, 611 bp, Zea mays
  unsure (1)..(611): unsure at all n locations
  Clone ID: MRT4577_85496C.1
ccagtttcctattgtatatggcctttttcgtgtttcccctcagcggcgtgtcncgttacgcttacaaccgctctgctttgacacagaaccgtgaacgatgtaatgctgactaaggctgacctggggaccctataccagttgggatttggtaccgtttgaccacgtgattctggattccatttgtctggctatctatcgttgcacgagcttggttcgaaagcaacattacaaaagcactagtacaagtttccaacacggttgcgttatatgctaccgtgaaggtcttactgcatcaccgaaggtttgactgaagctgggagtatctccataatttgctacgctactcctatgcgtattgaccacgttatgattgcgtagaatgaacacgttatgattgcctaggatgacgtttgcaattagtttggtgaacaaataactactatggccgcttctgggaacaattgggatctgattgcatctattagtggtaaaaattaattatctaagagcaactccaagagactagatatatggttttgtaaaagtaaatttatctaatattaaaagaaaattgtatccaatagactcgtaaacgactctttaaatttagt

SEQ ID NO: 168760 - DNA, 286 bp, Zea mays
  Clone ID: MRT4577_85497C.1
caaagaccgcggctggaacgacccgccacaattctcctatgggctgcagactcagactggtggaaccaaacgcactcctcgtactaggatggttgcggacccacaggttgtgtttggctagagcttccagagacttctggagcaacgtctagtggatcatccacatccttcaagtagagcttccaggcctgcacccatggggagctgtcctgcttctggtgtggacgcccagatctcgagtcatgagtctgagactcgaatagaggagtgctagaactctggaaca

SEQ ID NO: 168761 - DNA, 2033 bp, Zea mays
  Clone ID: MRT4577_85498C.1
ctctctctctctcctcccctcccctccctccccctacgctcctttctctccactcggtcgcacgcaaacgcaaatggctctaaaaaaagtccacttccaaacctagactagactcctcaccgaggcgacgacgcaagcagctcagcgcgccgccgctgccccgtcccgtcccgtcccgcgccacgccggcgcctcccaccccgtgcgcgccggatcctcgttccacgcgccgcggcgccgcccctggaccggtcgagaggagcggagatccatccatccggccgtcggtcggtgtcgtcgtctgtcgttggctgtaatgaaaagctgggcctgctagagccaggagttttcgttgcaaatctgcgtctccgctatgggttcaggcaacttgatcgtgaagaaggtggtaaagcacagctcttttgatctggacattcagctcgataagagttggatggaggacgttacctgcccgatctgccttgattaccctcacaatgcagtcctactgagatgcacatcttatgagaaaggctgcaggccgtttgtttgtgatacagaccagacccgttccaactgtcttgagagatttaaatctgcatatgaactgccttccaatgcgaaagtttcatcttttgccatgcctcctctcgatagcatcattcatattgtgccatcgaacgcaaacaaccgccccagctgccctctgtgtaggggtgatgttattggatggattgttattggtgaggctcggcggcatcttaatcagaagaaaaggtgctgtgaagaggattgctgctcgtttgtcggcaacttcaatgagcttcagaagcacacgcaacaaaagcatcccgattcacgcccttcagagatcgatcctgctaggcaagttgattgggagaatttccagcaatcttctgatatcgtagatgtcttgagcacaatacatgcacaagttccaaacgggatagttctgggagactatgtgattgagtatggggatgatgacactggtgaggactatgaagtttttcgcggagtcaggactcactggtggtcatgtatttgtagaagagcgagggaaagaaggggcagtggaaggaggattgggaaccaagctaatctagaaaattttaacatcgaggttccagcacaatctgttgaattaagggaaattagatttgatgaaattgatgatgaatacatagtcacaggggccattcctagtatggcaacacctggaagaatggctagtttccattacagggacgcataagtaagacgttgatgcatagaatctgcggttacaaattgatgcatagggtctgcagtaaaaaaggatagatgttttgcaattttccgatcaacgtaacgttgtaactccgctcatttggattccttttccaccggcccgcggtaccgccgcagtttaaacttatctgtgcataaaaaaaaaaagtagtagcaacagaagtggtcgtttaaacaggcctcatcaccctagtttctattttgtaatatttagcacccatccatataggatgtggtgacagttcttttttccctcccaattttgctcacatctgttgggagtaatgctattgcaaatgtgtagtactaagaaccaaaggtccttaaaaaagacaaaacacacacagttgcacaaagggctcatgatattccaaacaaaatccttaacatagatgttctacattgcaaaacatgaaagacgagcataagtatgtccttgtcatacatctatggtcccaacttgagctgttcagctgtatatatatatatatttaatcatatcttactctttggcatgttccttgtcgcacctggtggtgttaatgtgcattgatgaatgcttcatctggatcacattatttattctgctctatataatcagtatactatctgttggatattatatttatcttttaacggaactctgacaaaatccaatgcctcatatgcttctgtggatgtagggacacaagatacggacgttgatgcatagaatctgcagt

SEQ ID NO: 168762 - DNA, 270 bp, Zea mays
  unsure (1)..(270): unsure at all n locations
  Clone ID: MRT4577_85499C.1
ccggccgggncggggtcctcggnactacatggatgcacgactccacatccaaccaccgcgagcgaacggcgaagggtcttcatcggccgccgcacgtggcgctggacagctcgggtccggccagagcccccgacccgttggcgccgagactcacagtctgcttcgtggtcgacgacaccttggccgtagagtgggnagcagaaccgggagtggtgtgtgctgccacgctggcttgctgctgaaatgaacctgaacgccggaagccctgac

SEQ ID NO: 168763 - DNA, 2474 bp, Zea mays
  Clone ID: MRT4577_8549C.1
ataatgtgttctcgtttgtgagaaataatgtgtgttatatgtctgattttttgtactaacttgtgattggtagtactatggatgtggatgatatagttgatattgagaatgggtccaatgagaatgaagtgcaagccccaattatggaggatggcaattctcgcagcgatggcctaagttgctgcgtttttttaattgtgttgtttgtaatacaatagaatccaatagagtcctagctgtaggtgtacaggaatatatgtaaccctagtgggccaggcccataacacaggagctcttacacccccccccgcagtcgaaactctagccactgcagatgttgaggctggatcgaaactccgtgaacaccaccgacgggagccccttggtgaagacgtcagcgaactgggaggtggtcgggacgtgaagaacgcgaacagcgccacaggcgacccgtttgcggacgaagtggagatcaatctccacatgcttcgtgcgctggtgttggacggggttggtggagaggtagacggcgctgacgttgtcgcagaagacgagggtgctcgtggccagcggactgtggagctcgtgtagtagctgacagagccaagccgcctcggccacgccgttggctacggcgcggtactcggcctcggcgctggagcgggagacaaccggctggtgcttcgacaaccaggagacgaggctgttgccgaggaacacatcgtagcccgaggtggaccgacgcgtgtctggacagcccgcccagtcgacatcggtgtagacgcgaagttttgtggctgaggaccggcggagaaggagcccgaagtcaagagtgccccgcaagtaccgtaggatgcgcttcatcgcggtgagatgcggctcccgagggtcgtgcatgtggaggcacacctgctggacggcgtaggcgatgtcgggcctggtgaagatgaggtactgaagggccccggcaatactccggtagccggtgggatcgacgaccagggggccagcggcggaaagtttgccttgcgtatccaccggggtcgcgcaagtcttgcagtcagccatgccagcgcgttcaagtatgtcgacggtgtactgccgctggtggagaaacaggccctggggacggcgctcgacagtgactcctaggaagtggtggagcgcccccaggtccttcatcgcaaactcctgctggagacaccgataccccttatggtcgggtgagtagccgaggaagacaaagcgagtggagcgaggggcgagcttatgaggagcagtggatgcgagattggggtagcaagcgcacccgaagacacgaagatggttgtaagagggatggatgccgaagagagcgaagtaaggagtggggtgggcaatcgccttggtggggagatggttgaggaggtaggtggcagtggcgagggcctcagcccagtaatgagtgggaagagaagcctggaaaagaagagagcgcacgacatcgttcgtcgtgcgaatcatacgctcagcgcggccgttctgaggagacgtgtaggggcatgacatgcggaggtggacgccgcgagagaggaagaagtcacgggacacattgttataaaactcgcgcccgttgtcacactggatgctccggatggtgcgaccaaactgagtggagacgcaggcgaagaagtgagacagggtgggaaaagtgtcggacttctgacgtaaaggaaaagtccacaggtaatgggagaagtcatcgagaatgagtaaataatacttagaaccagaaatgctgattacaggagatgtccatacatcacagtgtatcagatcaaaagtgcctgctgctctagaagaggtggggaatgggagcctaacatggcgacctaactgacaagcatgatagaggtgctcaaaagatcccctacaacctgaaccagaggtgctgctggagagcttggacatcacatcgcgaccggggtgaccgagacgacgatgccaagtgacagaagaggtggccgtctccacggacaagggcgccaccaagtacagatgccgcgacttcctccccgaaaactgcggctgcaagatccactagactcatccacagcggcacagccgatggatccttccatgctcctccgtccgtccgccttgctacaagcaggcagccaccaataagctagctcttgttgttgttttgcatgtttgattgggtgtcccttcccagtcgagatggaataatgtcaggcgcacgtacagacgtgttattacgatatttctcccctacaaataaaaactcgatctgtggggttaacactgtcccctagtattacaattaaaaaaagatgttatcacgcatgttaagaaaacatctgaatccctatcttagaatgtatttggtttggcttaaaaaaaaaaaaaaaaaaaaaaaaaaaaaaaaaaaaaaaaaaaaaaaaaaaaactcgagactagttctctcctcgggc

SEQ ID NO: 168764 - DNA, 672 bp, Zea mays
  unsure (1)..(672): unsure at all n locations
  Clone ID: MRT4577_854C.1
gcgtaagcaaagccatgttggattagctcttgaaagttatgtggagtttanaaagatcccaaaatacagaaacacttgaaactcttaaagaacataagaggcaagaggatcaattttctattagcaagtgtcaggctgaatttaaaaggaatggatggattaacagcagtagacaaatcaaatgctttggagcttttcgtatctgtgccaaaccgagaaattttcttaacaacaacagagcatgatgttagagaaatttggctcaagcgcaaaattaggtgtaaaatggtagtgatgcatggcctgaacaaatgatatgagcaaatttgacaactgcagttctgttatggtgaatggtgattgtagttcagtttcagctctaacctatggaaaattgaatggcagttgcactaatctgttggtggaatgattttcccagtaatttcctggacaagcagatcactgagaaccatctaccttatgagaaatgatgccttgtatggttcagtatagttcttgtattgctggtttaaattaattcttgtatggcagttgcactaaactgaatggcagttgcactttgagatattcttctattgttggtttaaaaccatggtgatgactgttcttgtatgcattctgtatgcattcttgtttataacctggttgctt

SEQ ID NO: 168765 - DNA, 205 bp, Zea mays
  unsure (1)..(205): unsure at all n locations
  Clone ID: MRT4577_85500C.1
ttacaggaagcgaacagtggaaagcgcatacaggaccgtaaacagaatcctcactatggatgggctcattgaggacattaagcatcggcggtattatgagaagccatgccgccagcgacagaggtaaagctatgaaaggtgccgtcggatctacaacatggaaatggctcgcatgatcaacttctngatgcgaaagaatcgggca

SEQ ID NO: 168766 - DNA, 1503 bp, Zea mays
  unsure (1)..(1503): unsure at all n locations
  Clone ID: MRT4577_85501C.1
ctctctctccctccctacantcccttcccctccccgcctttctctccactcgtcgcactcaagcgcaaatggctctaaaaagtccaactccaaacctagactagaggcccctcaccgaggcgacgacgcacgcagccgagcgccactccgccgccgccgcctcctcctcgtccccgtcccgcgccgcaacggcctcccccaccctgcgcccgccggccgcccctcgacgggtcgagcggagcggggaacccatccgtccggccgttggtcgctctcgctcgtctggtgttggttgtaatgagaagctggacctgttaggccgaagagttctcgttgcaagtctgtgcctcagcgatgggttcaggcaacttgatcgtgaagaaggtggtaaagcacagctcctttgatctggacatacagcttgataagagttggatggaggatgttacctgcccgatctgccttgattaccctcacaatgcagtgctactgaggtgcacgtcttatgagaagggatgcaggccgtttgtttgcgatacagaccagacccgctcaaactgtcttgagaggtttaaatctgcatatgaactgccttccaatgtgaaagtttcatctttagccgtgcctcctcttgatagcattattcatattgtgccgtctaacgcaaacaaccgccccagctgccctttgtgtagaggtgatgttattgggtgggttgttattggtgaggctcggctgcatcttaatcagaagaaaaggtgctgtgaagaggattgctgctcgtttgttggcaacttcaatgagcttcagaagcacacgcaacaaaagcatcctgattcacgcccttcagagatcgatcctgctaggcaagttgattgggagaatttccagcaatcttctgatatcgtagatgtcttgagcacaatacatgcacaagttccaaacgggattgttctgggagactatgtgattgagtatggggatgatgacactggtgaggactatgaagttttccgcagggtcaggacgaactggtggtcatgtattttctgcagggcgttttcaagatcttcaagaagtcgtagaagatccagagcaagggaaagaataggcagtggaaggaggaatggcaaccaggttaatctagaaaattttaacctcgtggttccgacacaacctgttgaattaagggaaattaggtttgatgaaattgatgatgaatacatagtcacaggggccattcctagtatcgcagcaccgggaagaatggctagtttccattacagggatacaagatatggacgttgatgcatagggtctgcagtaaaaaaaggaatagatgttatgcaatttaccgatcaacgtaacgttgtaactccgctcatttggattccttttccacctgccctcggtaggtgctgccgcagttcaaacttatctgtgcataaaaagtagcaacagaacctcgctgttcgtttgaatccgaactcgtcattctagttt

SEQ ID NO: 168767 - DNA, 1586 bp, Zea mays
  Clone ID: MRT4577_85502C.1
tccaaacctagactagactcctcaccgaggcgacgacgcaagcagctcagcgcgccgccgctgccccgtcccgtcccgtcccgcgccacgccggcgcctcccaccccgtgcgcgccggatcctcgttccacgcgccgcggcgccgcccctggaccggtcgagaggagcggagatccatccatccggccgtcggtcggtgtcgtcgtctgtcgttggctgtaatgaaaagctgggcctgctagagccaggagttttcgttgcaaatctgcgtctccgctatgggttcaggcaacttgatcgtgaagaaggtggtaaagcacagctcttttgatctggacattcagctcgataagagttggatggaggacgttacctgcccgatctgccttgattaccctcacaatgcagtcctactgagatgcacatcttatgagaaaggctgcaggccgtttgtttgtgatacagaccagacccgttccaactgtcttgagagatttaaatctgcatatgaactgccttccaatgcgaaagtttcatcttttgccatgcctcctctcgatagcatcattcatattgtgccatcgaacgcaaacaaccgccccagctgccctttgtgtaggggtgatgttattgggtgggttgttattggtgaggctcggcagcatcttaatcagaagaaaaggtgctgtgaagaggattgctgctcgtttgtcggtaacttcaatgagcttcagaagcacacgcaacaaaagcacccggattcacgcccttcagagattgatcctgctagacaagttgattgggagaatttccagcaatcttctgatattgtagatgtcttgagcacaatacatgcacaagttcccaatgggatagttctgggagactatgtgattgagtatggggatgatgacaatggtgaggactatgaagttttccgcggtgtcaggactcactggtggtcatgtatattctgcaaggcgttttcgagatcttcaagaagtcgtagaagagcaagggaaagaaggggcagtggaaggaggattgggaaccaagctaatcttgaaaattttaacatcgaggttccagcacaatctgttgaattaagggaaattagatttgatgaaattgatgatgaatacatagtcacaggggccattcctagtatggcaacacctggaagaatggctagtttccattacagggacacaagatacggacgttgatgcatagaatctgcagtaaaaaagaaaagaaaagaaaagaaaggaaatagctgttacgcgatgtaccgatcatcataaccatcgtacccgccccgcccatttgaattccttttccgcctttcctcggtaggtgctgccgccgcagttcaaacttatctgtgcataaaaaaaaaagtagtagcaacagaagcccgccctggtcgtttgaaacaggcctcatcaccctagtttctattttgtatatatttagcacccatccatataggatgttggtgacagtttattttttccttttaattttttggaatgcgtcttggatttggatgtagcgcacgcagctttacataaaaacctggaaac

SEQ ID NO: 168768 - DNA, 343 bp, Zea mays
  Clone ID: MRT4577_85503C.1
gaggagggaataggccaatctagaactattctattacaacatttctcagatcttcggactcgtttcgaggtaaatggtcaaatcaacttatgtggtttttcccctgggaatatgcacctgctgcttcttcttctgttgcaaggcatgatatcggtatcgaaactctactcggatctggagaaaagggccctgctttcgaaagtgaggggagtcaagctattcgaagaacgggaacaggactactttcggatcggaaagggagatggtcttgctttgctctagcgtgagtcacaggaatccctgctcgtcatcaatcattatcgggatctgggcctgaaatcac

SEQ ID NO: 168769 - DNA, 770 bp, Zea mays
  Clone ID: MRT4577_85504C.1
atctctgaggcctaagtcctttgctttttagcttctttgtttggaatgattttttggtatttttttctgataacgaagtaaactataatataaaagtgaccctctagctttcatcttttaactatggtacaaatcatgttttgcatttatatgcattgcttgttctaatgcgaataattgaacccaatggttcaattggattggaagaggctaggctcagtcatttctgaccagaagggatgttagttgttttccttccattatgaaaggattatcaaaaccatcttgagtcgattaaatttctttggtttcaattattttttgctgcttataacctgtccaattcatttctgttcttttcctgttcttttgggccaatgacttgaattaattgtccgtaccatctgaaggcaagcagttgcttgtctattgctgcacttatctctgaggcctaagtcctttgctttttagcttctttgtttggaacgatttttggtattttatctgataacgaagtaaactataatataaaagtgaccctctagctttcatcttttaactacggtactaatcatgttttgcatttatatgcattgcttgttctaatgcgaatacttaaacccaatggttcaattggattgaaagacgtagatgctacgtaggctcagtcacgttagatcagaaggggatggttagttgttttccttgcattatgaaagggttagagctcaccttcactgactaactaaggaagcctttgagttgattta

SEQ ID NO: 168770 - DNA, 358 bp, Zea mays
  Clone ID: MRT4577_85505C.1
cgcgaataaacgtggctacgtaatctatcgtatgaatacttgtggtattacacgagctgagagtatgatcggggcacgaggacttaaaaaatgtatgccactctgatttacttaaaaaaaaaaaaaaaaaaaaaaaaaaaaccccccaaaaaataaaaaaaaaaaaaaaaaaaaaaaaaaggggcggcccttcaaaaggatccaagctaacaaaacgcggccatccaaccaaaaaaacccaactatatgtgccacctaaatacaattaacttggcccccttatttacaacaccctaaacaagaaaaacacccccccggaacccaactcaaaccaaattgaaaaaaacccccctttccc

SEQ ID NO: 168771 - DNA, 701 bp, Zea mays
  Clone ID: MRT4577_85506C.1
cattgggtacctcgaggccggccgggacgagcctgtctctgatcagcccatccaactggtaggacgcaggcgatggactcgtctcgtcccctcagctgtgtctctctgcctgctcgagacctcgtacgactgaatgatgccatgagcgtctgaatgcgttctgagagtacttccgatcaacgaactatgtcaccaatgggggcagggaacccactgtccccttgcttatctgctggtgctcctgctgacagaccctcagctggtatttgtccctagactcgtgtggacagacgacttattgcccttggtcgtgccagtagcgcaagttgctaacgccctgatggaccttgacatagcccgcaaagttctaaagcgcaaatagtgtggtcactcaatcgtgtactggttaaccttacatacccattgtagggatcccttctacctgatgttactcgacctccttcagaagttgtggccggaaccctgcctgtcaagagctgtaccggggagagtaaacaatacccttatacctgcctggttgctaaaaaaagaaaaagagcgtggcttctggatcacgctactgtgacttgatcgagggtatctcgcctcgttagataacacataggctgaggctttttatgcgtgatgttatatctgcattcatgtttgcactacttatgagacgacgcgatgactgttgt

SEQ ID NO: 168772 - DNA, 1389 bp, Zea mays
  Clone ID: MRT4577_85507C.1
gaaaagatgaagctctaagattgatgaattggaacaacagtgatcctcatttcagacgtattatcctcttgcttgttcgtcctcgtccggttcttcgccctcgccgcgcaggactaccaatccaaactggcgacgaccctgctgccaccccacagcagatttgaggagcggacgcccgtttaaatggctattggagtcccatccatggagctccaccgctcctcaccgttgctctcgggtggccgaggaggaaatacatgcctacagaagaagcccttctttgtccaagcaaagagactagtggggatggagaaagcaagtacgaggccaggaacacaagagtctggacagacaaagaaaagagcacccctggttcgtggaactgttagcccacctcttccagtaccaggaaacatacctcggcctccttatgtcggcacagaatatgtaccagagatagcaaaagagatacaaatgcatgacaaagagggcattgtccacatgagagctgcttgcgagctcgcggctcgtgttcttgactatgcaggaacgttagtgaaaccctctgtaacaacagacgaaattgataaagcagtgcacaagatgatcatcgatgctggagcctatccatcaccacttggatatggtgggtttccaaaaagtgtatgcacctcagtgaatgagtgcatgtgccatggaattcctgattcacgcgagctacaggatggagacataattaacattgatgtcactgtctacttgaatggttatcatggggatacctcaaaaacatttctttgtggagaagtcgatgaagccagtaaacgacttgtgaaggttactgaagagtgcttgctcaggggcatatcaacatgcaaacatggtaccagctttaagaagattggcagaagaataagtgagcatgctgagaggaacggttttggtgttgtggagtgttttgttgggcatggagtcggcagggtatttcactcagaaccaattatctatcaccagaggaacaacagaccgggccagatgattgaagggcagactttcacaatagagccgatcatatccatggggagcatcgagtgcgacatgtgggacgacggctggactgccgtgacgacggacggcagcttggcggcgcagttcgagcacaccatactgatcaccaggaccggagccgagatcctcaccaagtgctaggaggaaaggaaatcgcatgtgcccgatagccgacggtaggtaatctgtattcgtgaggtggtgaggatgcttgaggtgacctattttgtctcgcaaaatgggcgtgctacagaatagtgaagaaaagggttgagagattgcaaatggcaggtttgggcaaagagggccaagttctaggcc

SEQ ID NO: 168773 - DNA, 730 bp, Zea mays
  Clone ID: MRT4577_85508C.1
gggtacctcgaggccggccggggcagcactgtgttcccttatccacacagccccaccgaggtcacctaaaaaaagtcctcgtcatctggaagtactgccggcatcatgatcagcagcagctcagcagtttctcctatagatagctctgctgcaccggctacctagttcgctctcctcgtcagcattaagcaacgagtgctctgtgtgtgactgagagctgagaccagagtgcaggagagctggtttcgtcatcagtgcagttaagctgctcgtttccagtccagacaggtccagagtcttgccaggtagctagccaggaaagggtcaggtacggtgatccattcatggcggaggaggtggccggaggaggaggaggagctgttggtgcgccgtcgtcgtccccgcggcgcgtggtggtggcggtggacgagagcgaggagagcatgcacgcgctctcctggtgcctctccaacgtcgtctcggcgggcaaggccgccgtggcgccaccccccgtccgtggtgctcgtccacgctcggtccccgcgcccgctctactaccccaccatcgatggcaccgggacagggtacgtgatgacccagcaggtggtggactgcatggagcagtacatggcctccgccgccgacaccgtcgtcaccaaggccaagaccatctgcaccgccttccccgacgtgggggtggagacgtgcgtggagaagggcgacccggcga

SEQ ID NO: 168774 - DNA, 685 bp, Zea mays
  Clone ID: MRT4577_85509C.1
gcaggggaaagggtcattttctaaacatgcaacacaatatctctcaaaatctataaatccacaagatctgacttaacatcataaacggagtagtacagaacaagttgcaagacgcaggatatcgatagcttggtattgttccatccttgaacgagcatggaattacagcctccttcctcttctaccacccttccggcgggtgctgtcagtggggaccggggtaacatcctcaatgcgtccaatcttcatgccagaacgtgcaagagctctaagcgcagcttgagcaccaggacctggagtttttgtcttgtttccaccagtagcacggagcttaatgtgcagagcagtaattccaagctccttacatcttacagcaacatcctgagatgcaagcatagctgcataaggggatgattcatcacgatcagctttgaccttcatgccaccggtgatgcggacgagcgtctccctcccggacagatccgtgacatggatgaaggtgtcgttgaaggaggcgaagatgtgcgcgacgccgaagacgtgctccccctcgcggacggcggggccgagcgtcacgttctcctccttgggctcgcgggtcttcttcctccctgacatggcggcggcggcggcggcgagaggaggaggaggctagggtttggagtggacaagaagatgaagctgc

SEQ ID NO: 168775 - DNA, 373 bp, Zea mays
  unsure (1)..(373): unsure at all n locations
  Clone ID: MRT4577_8550C.1
aaaacaacgggattcattatatatctccatctactatttaaaagctcactctataaaagaagggtttggtatgaccatatgtacgattggctggaaacaacctaatagccctgaagtttgattgcccaacaaactgaaaccattgatgcacccacagtggcgcaattttacaaactcatttcagggcggcacctcgataactaatacaaggtatttttcctccaaaacattttaccgttaccaaactaactcgacgcacattttttatggggggactggcacctggggtctatcattgaaagttgncgaggcccaggtccctcaaggcaaacgaagcaacatttttacagtttttgggcagcgccattgcctt

SEQ ID NO: 168776 - DNA, 245 bp, Zea mays
  Clone ID: MRT4577_85510C.1
cacaagcacacgctcaagcacaatcactctagcaatgccttctgatgctgtccagcctagtgacgcctagctactgcaggcacaatccgacatatgacggatcactctctcctacctcacgcccttgtcactgaagtgcgccgtggtgcttggcatccctagggcgatctaccgccatggcggtgctgcctcagccgctgagctgatcacggcgctgtctctccactccgcttagctaccgttcc

SEQ ID NO: 168777 - DNA, 367 bp, Zea mays
  unsure (1)..(367): unsure at all n locations
  Clone ID: MRT4577_85511C.1
gggaaanccggggcggaccacaggcgtccggcttgggttggggacggggccgcccggccttaaggaataaactaactcttgccttaatacgtatcaatagccggggaggtccgtgtttgtggtaggttttacgcgacctaagttggggggcaggttaaaaccccgaccgggctggaagaagcatcgttgggtggacaggttaaccaaccagcagaaacgtaatcaaaatcaatggacaacaagccgttgcctaattcaaaaggcaagccccttgcccccggaggagccccgggggggggcttgcttggggcggccggcttccaaccggggtggaacaacaacttgttcaagttttaaaaggccaagt

SEQ ID NO: 168778 - DNA, 380 bp, Zea mays
  Clone ID: MRT4577_85512C.1
ggctaaaagcatgcaaaggctacatgccgggttattatgggtataaaaattaatggggggcacgttacatgacaccacattacatgcatgcccggaacgtaggttgggcacagctagccaagggggttacttaatactaccacagttcagttctggcaagccaagggggtttaaagagctttgcttaacacgccttctggcccctgcagtagcggagggggcagaagccgggggcccacccgccgtcctccttgacccactcgttgctgcaaaggcggtcggagatgccggggaacgaggggggctggttcttgcccatgcccccccgggcctccgcccccttgtggggggggggcccgccgggggggggccgggccccc

SEQ ID NO: 168779 - DNA, 346 bp, Zea mays
  Clone ID: MRT4577_85514C.1
cgcgcgtgtgttcctatgctgggcctgctgccactccccctcaacttgctcgggtattcccctattgaaattcgggactgacgattgcacgcgaggaagctataagaacgggctggggtgctctacctgacgcaaattgcgccgctctcctgtcttgctgcacactcgggggatcgcctgatgaatgccggcagtgcttggccctcgtcttctgcctgccttcccatgtatttcaacttacatggatccatatggcaacaccacgaatacggtcagtttctgtgggaacacttgccacactcgctaggtggaaagtcatttacctgctgtgacctcaggctgtata

SEQ ID NO: 168780 - DNA, 305 bp, Zea mays
  Clone ID: MRT4577_85515C.1
aattccttggtcgacgagctatatgtcggcggccgccctgggagtacttgtgggggtacatttaggttgtctgtggtcgtagacacagacgacggagccgtacgcgggccttctcatgcagacgaccacgtatgtgagacactaggggtgcgcgagtacgctctaacgctgacggcgtgcctgccggcgttatagcactcataagtgttggaatacatggccctggcggcgtggcagaagtcggggatcagatgaaggtgttagcttccatagtagagttgggacggtcgagccgaattctaatg

SEQ ID NO: 168781 - DNA, 184 bp, Zea mays
  Clone ID: MRT4577_85516C.1
gatgatagactccgcgaccgcgcacaacaccggggggtattatagagcggcaggagagaacgccagcgccataggaacaagcgagcccctccccggagcacgtctcggcggcgacaaagactacgaccgaggaggcgaccgaggcccacggtgccgccgcgaccgcacaggcccacacgatcgg

SEQ ID NO: 168782 - DNA, 499 bp, Zea mays
  Clone ID: MRT4577_85517C.1
ggtaggcagtcaaaaaggccgccactccagcacgccagggtgacagagcagtgcagatgcaggagctctaaaaaaacatgcttcatcaccgcttccaacgagctcgtcagggtcctggccaaccccacaggcgtcctcaacccgtcggcagcgtccctcctcgcgccgcgctgcgtctgcgctccgagctggaagctagcggaggcgtcgctgcgggtggccacgcggggctgggtgttagccgctgcacaggcaactaccgtgctggcatcagacgacgccgctgtagcagctgtaagcagatgttcaagagtgttccaagcagaagaacgaagtgcggctgcgtcggcagaggcacgacaatgtccgagttactggaccagagtgggccatgtaagcgtgagttgggctagaccattagagaagtataaaggggaacaactgtaggggcatcaaacaacaaaaagctaaaccgcaattgccttcgtcgcaaaaaaaa

SEQ ID NO: 168783 - DNA, 180 bp, Zea mays
  Clone ID: MRT4577_85518C.1
taaaaaattcggttgcagtcggggtacacagtttacacattctaaacaaataaaaaattcggttgcagtcggggtacacagtttacacattctaaacaaaaaaattttcaactgcacaggtggctgcttcagcaatgtgtccgttcacaacaaataggctttcttcttgtcaaatggtta

SEQ ID NO: 168784 - DNA, 429 bp, Zea mays
  Clone ID: MRT4577_85519C.1
gggacagaaaaaaaccccccaacaaaaggggggcaggaggttaagcaggcgccgaaacaaccaaaatgggcccaaaaggtcggggatggtgggccacaaaaaagctcaaagcccaccccgcccgaaacacttttaaaaagggaaaaaaaagcaggggattgcaaacgggagggccccaaaatctggagggttttaaaaacaaaactgcccttgcccgaaaaaaaaatggggaggggggtggggtggagcccaaccaaaggacaacaagggggggggggggggcaaccaaagggcagccttaatattttaaaaaaaaaaaaaacaccccagggggagggggccccaactaaaacacggaaatcaaccaagaaacttttgggggaaccccttggagccgggatacaaacgcagggatcttggccccctggg

SEQ ID NO: 168785 - DNA, 1157 bp, Zea mays
  Clone ID: MRT4577_8551C.1
cgctgtctcacctttgagcctggcggcgattttgctatatgaccatcgccggtgtattggggtgctaccctatacagatgcggtaaaagcgaaagaagaatccgatccgcttctccacgccgaacccggtaaggccgccgccgcttctcgaatggcctcaacctcctcctcctcgcctcagccgccgccggcggcggcggcagcgtcgcccggggcagcttcctcgcccgaggatcgccgcgcaggtggaggccgcggcggcccgcccccggtcccgccctatgtcaaggcggcggcggggtccctgggcggcgtcatggaggcgtgctgcctgcagccgatcgacgtcgtcaagacgcggctgcagctcgaccgcacgggggcctaccggggcatcgcgcactgcggcgccaccgtggcccgcgccgagggcgtgcgcgcgctctggaaggggctcacgcccttcgccacgcacctcacgctcaagtacgcgctgcggctcggctcaaacgccgtgctgcagtctgcgttcaaggaccccaccacgggcaaggtctccgcgcacggccgcctcgcctccggctttggcgccggcgtcatcgaggcgctcctcattgttacccccttcgaggcaagattaaacatctctctgttcctgagtcgctctttaactatcttgccctggctgcggtgctgtgcatcctatagcttacactgatcgtccaagaaccgtttgccgtttagacaccaatcgtttatactttattagatgtttcctgttgaataaacaacttgcttcctttatctgaaagaaggtcccaacgtgagagagaggttacgtttagattaccaatgtaaaagcggcatctactgtatagataaagaatggttataattatttattcttgtgtcgaagtggtgttggatgcatttttgccagcttgggattaaagaaaagacagccatgttctttgcagcaaatttgaagtttactagtatgttaccctgatgcagtcaaacacatttgaccaagaagttgctgtcaatcacctgtttctcgtttagggttaacttgattatgactgagaatgaagtaatttgttttcttatcatagtcatgatgtttggttgttcaatggaaacactattttttaatt

SEQ ID NO: 168786 - DNA, 589 bp, Zea mays
  unsure (1)..(589): unsure at all n locations
  Clone ID: MRT4577_85520C.1
aaccacccaccaccaccaccgctcgccgccacccacaagaatcaatcgtcttcccgtgatcccattccgtcgtaggctcgtactagatggaggggtgtgaccggatcaggggcccgtggagcccggaggaggacggcgcgctgcggcggctggtggagctccacggcgcgcgcaactggacggccatcggccgcggggtgcccggccgctccggcaagtcctgccgcctgcggtggtgcaaccagctctcgcccggggtggagcgcaggcccttcacggccgaggaggacaccgtcatcgcccgcgcccacgtccggatcggcaaccgatgggccgccatcgcgcgcctcctccgcggccgcaccgacaacgccgtcaagaaccactggaactgctccctcaagcgcaggctcggcgaccttggtgctgacggggtcaccgagggtgatctggacgagcggccgtgcaagcgcgccagcgtcacgcccgagagcacctccggatcggggtcggggtctggctctgggtcggaccgcagcgacctcagccatggnggtgccttcgggcttggccaggtttaccggccggt

SEQ ID NO: 168787 - DNA, 437 bp, Zea mays
  Clone ID: MRT4577_85521C.1
aaaaaaaaaaaaaaaaaaaaaaaaaaaaaaaaaaaaaaaaaaaaaaaaaaaaaaaaaaaaaaaaaaaaaggaaaaaaaaaaaaaaaaaaaaaaaaaaaaaaaggtttgtccctgggccggaaccccctttggggggatttttgcaaatttccttccccctgggggccgtttgggcttgcttttagggggcccatttcgccttttggggggtcgttttacatttcaggggccgccgttttccaccggggggacggggaaaaccttggcgttccccactttattcgctttgcggcttttccccttttggccagttggggtaataccaaaagggcccgcccctttcgcctttcccaaaatttgcccagcctgatggggaatgggcccccccttgtatgggggctttaagcggggggggtgggggggttacccccaggggg

SEQ ID NO: 168788 - DNA, 1156 bp, Zea mays
  Clone ID: MRT4577_85522C.1
aaaaccgaaaacccaaagcttcgaccctggtggggttcctcgcggaggagcgagagaaattccccatcgatcttggtttcctctttcctccctctccgcggcatggatcccgccggcgcctctccggcgccggctcccgccgtggaagagcccgtaagcgccacctccattttcgacacccttggcgcggaggtgctggcggtcatgtccccggtctccatctgcatggcccttgtcgtgctcctcatctccctactctcgccgccgtcctccgggtccgcgtcgagctcaccccctccagtcacagctgccactctcgtctacctcgagtcccctaacgactccccgggccagaagctcctcggggcgctcctcgacgccgccgtcttcgtcgccctcgttgccgccgtcacctttgtcctcgttgcgctctactacttccgctgcacgggttttctcaagaactacatgcggttctccgccttcttcgtcatcttctccatgggaggcgccatcgtggccgccgtgctccggcgcctcgcggtcccgctcgacgcgcccaccgcgctcctgctcctcttcaacggcgccgctgtcggtgtcctctctgtattcgcctccgccgtccccatcctcgtccgccaggggtacatggtcgcgctcgccgtcatcgtcgccgcctggctctccaggctccccgaatggaccacgtggatcatgctcgtcgcgctcgctctttacgacctcgttgccgtgcttgcaccccggggaccgctcaggatgcttgtggagttggcctcctccagagatgatgagctgccagcactcgtctacgagtctcggcctacagtcggcccagtcacaagttcttcctcttacgcttcagccatggggtctgtggagatgcaaaccatggcagattctggtcagatcggtagcagtcaatatgagcaggaggaagatgccagccctgccttcgtgcaaatgagggatcttgtgagagtccgatcaagcattggtgagatgaaaagatcaagaggttctgtgctccaaatgggagaccttgaaagggaggtaccagtgatttcagcagaactgacagccaaccaaggtggggagttcacagcatgccatcattcaaattgaacatcctgac

SEQ ID NO: 168789 - DNA, 327 bp, Zea mays
  unsure (1)..(327): unsure at all n locations
  Clone ID: MRT4577_85523C.1
ccctttttaacaaataccaaaaaangggcattttgggttttttttttttttgatgtcaaccgctaacaattcctcattcacagtaaaattatgtgcataaaccattttcttaaaaatcatatcgagcgtgacaaaaaatatggtcgggattcttctattccacacacccctgtttaaagtcttaacaacacttgtaacaccaaactacaatacccccttaaaaaaagtttattatttcgtaggacctcatgaaaaattcttcacattatagtgcatccactcctttttttaacccgtggcgtgccatttttcttgtacctcctttgg

SEQ ID NO: 168790 - DNA, 617 bp, Zea mays
  Clone ID: MRT4577_85524C.1
gtacatgcgggaagcctacgacactgggtacgccttttttttatcctatggaggccaatgctgatttggcagtcccacctagagaaccattctgctgtagtcgctaatttttttgttgactagccaatgtggatgacaaaatgatgaggcaggtcggaacgtcatgcctgctttagctttcttgggctacaatcttggtttaagatctgtgtagccattaaaactttgttatgtcacttaagtcatgaaatcctgtatgcaagacttcgacaaggactatatcacctggaattcttcaggaatcaggagtactccctccctctgttccaaattataagacattttagcttttcgcgatattttttttactttatatttagctagacacaaaacctttagtaaaagatttcaaaacataaatgagagttgaagttgtccactgatttctttgagatcttcaactgcattagatgactgacaacactatatagctgctacacatcattgtttagtgctatttcacttgtttcttgtttgttgtattgatagtttgctctgtttttacttatgtctaacatagtaacattgtctattatttccttgcaggctcttcgtct

SEQ ID NO: 168791 - DNA, 375 bp, Zea mays
  unsure (1)..(375): unsure at all n locations
  Clone ID: MRT4577_85525C.1
gcagacgggaacaggaaagacttttaccatggaagggactgagagtaataggggtgttaactacagaactctggaagaactgttcaatattgcagaggagaggaaagaaagcgtcacatatgacttatctgttagcgttcttgaggtttacaatgaacaaatcagagaccttcttgccacgtctccatctaaaaagctggagatcaagccaaacagtgaaggacaaaatcatgtccctgggttagtggaggccaaaattgagaacataaatgaggtttggaaagttttgcaaactggaagcaatgcaagggctggtggttcaaacaatggtaatgagcacagnncagncgctcccactgcatgctatgcatcacg

SEQ ID NO: 168792 - DNA, 792 bp, Zea mays
  Clone ID: MRT4577_85526C.1
ccggccgggcaccgtaccattatggctagttcgtggatggcggcgccacgacctctcctgttgtcgctgctggtcgccatgctagcggtggccgccgacctgtgcccacccaaggacaagtggtgcaagccgccgcaggagcacttcgacctcagcatgcccgcgttcctccagatcgcgcaggagaaggccggcatcgtgcccatctcctatcgcagggtggcatgcgcaaagcagggcggcatccggtacaccatcaccgggaacaagtacttcaacatggtgacgatcaccaacgtgggcggcgccggcgacatcgcggcggtgtcggtgaaggggagcaagcgcgtcaagtggacggagatgaagcgcaactgggggcaagtgtggcagaccgaggaggacctcacctgcgagtcgctgacgttccgggtgatgactagcgaccaccgcaaggccacctcatggcacgttctccccgctgactggaagttcggcgtcacgtaccaggcgtccaagaacttctaagtagccactttccctcctcttcttcaacctgcatgcccgcaagcagccatgcagatgataacatgcatcatgcgtgcatattcattctttcgctcatgcactccgatacggtgccggagttaaaaaaatgtggatcaatgtgcaaattcaaatgacatcttaaccagttgtgatcaatctgaaccgctaaaaaaaaaaaataaaaaaaacaaaaaaagaaaaataaaaaaaaaaaaaaaaaaaaagataaaaaaaaaacaaaaa

SEQ ID NO: 168793 - DNA, 1081 bp, Zea mays
  unsure (1)..(1081): unsure at all n locations
  Clone ID: MRT4577_85527C.1
gtacnncctcgaggnnccggccggaaaaaaaaaaaaaaaaaaaaacccgccggcgggatcaccgtaccattatggctagttcgtggatggcggcgccacgacctctcctgttgccgctgctggtcgccatgctagcggtggccgccgatgtcgccaacgccggccacgccaagcccctgacgcctggcgggcgcgtggtacacgacaaccacggcaagttcacggccgggccgtggaaacctgcccacgcgaccttctacggcgggcgggacgggtccggcaccacggcgggcgcgtgcgggtacaaggacacgcgcgcgcaggggtacggcgtgcagacggtggccgtgagcacggtgttgtttggcgacggcgcggcctgcggcgggtgctacgaggtgcggtgcgtggacagccccagcgggtgcaagcccgacgtggcggcgctggtggtgacggcgaccgacctgtgcccgcccaaggacaagtggtgcaagccgccgcaggagcacttcgacctcagcatgcccgcgttcctccagatcgcgcaggagaaggccggcatcgtgcccatctcctatcgcagggtggcgtgcgcgaagcagggcggcatccggtacaccatcaccgggaacaagtacttcaacatggtgacgatcaccaacgtgggcggcgccggcgacatcgcggcggtgtcggtgaaggggagcaagcgcgtcaagtggacggagatgaagcgcaactgggggcaagtgtggcagaccggggaggacctcacctgcgagtcgctgacgttccgggtgatgactagcgaccaccgcaaggccacctcatggcacgttctccccgccgggtggaagttcggcgtcacgtaccaggcgtccaagaacttctaagtagccactttccctcctcttcttcaacctgcatgccagcaagcagccatacggatgataacatgcatcatgcatgcatattcattctttcgctcatgcactccgatacggtgccggagttaaaaaaatgtaaatcaatgtgcaaattcaaatgacatctgaaaaaaaaaaaaaaaaaagcggcc

SEQ ID NO: 168794 - DNA, 1185 bp, Zea mays
  Clone ID: MRT4577_85528C.1
gccggccgggaaaaaaaaaaaaaaaaaaaaaaaaaaaaaaaaaaaaaaaaaaaaaaaaaaaaacactactccttttggcgaggcgattggccgccgccggcccggccgggaccgtaccattatggctggttcgtggatggcggtgccacaacctctcctgctgtcgctgctggtcgccgtgctagcggtggccgccgatgtcgccaacgccggccacgccaagcccctaacgcctggcgggcgcgtggtacacgacaaccacggcaagttcacggccgggccgtggaaacccgcccacgcaaccttctacggcgggcgtgacgggtccggcaccacggcgggcgcgtgcgggtacaaggacacgcgcacgcaggggtacggcgtgcagacggtggccgtgagcactgtgctgttcggtgacggcgcggcctgcggagggtgctacgaggtgcggtgcgtggacagccctagcgggtgcaagcccgacgcggcagcgctggtggtgacggtgaccgacctgtgcccgcccaaggaccagtggtgcaagccaccgcgggagcacttcgacctcagcatgcccgcgttcctccagatcgcgcaagagaaggccggcatcgtgcccatctcctaccgcagggtggcgtgcgcgaagcagggcggcatccggtacaccatcaccgggaacaagtacttcaacatggtgacgatcaccaatgtgggcggcgccggcgacatcgcggcggtgtcggtgaaggggagcaagcgtgtcaagtggacggagatgaagcgcaactgggggcaagtgtggcagaccggggaggacctcacctgcgagtcgctgacgttccgggtgatgaccagcgaccaccgcaaggccacctcatggcacgttctccccgctgactggaagttcggcgtcacgtaccaggcatccaagaacttctaagtagccactttccctcctcttcttcaacctgcatatgcccacaagcaaccatgcagatgataacatgcatcatgcatgcatattcattctttcgctcatgcactccgatatggtgccagagttaaaaaatgtaaatcaatgtgcaaactcaaatgacatcttaaccagttgtgatcaatctttataaattcgtaataaattcatcttagcctaaaaaaaaaaaaaaaaaatttgcggcc

SEQ ID NO: 168795 - DNA, 369 bp, Zea mays
  Clone ID: MRT4577_85529C.1
gtaagctcggaattcggctcgtggctttccgaacgcagcttcgttcgtctggtgcagggccgaacaggcagggggaccatttaccagagcgtgcgtcaaggcgaacggcgcagagtgtggccacctgatgatgacactgtggtgctgaatggtgccatgacactgccctggctgcaagaagaacgcagggaaagtgatgacggacatcgacggcgcgcaggacgtgacgatggacgcgtcggaccacaaggtgactgtgactgttaccgaagacgcctacacgttgatgacggggctgtacaggtccggcatgagaggagtgccctgtgagatacacgcgccccacaagaacaagcagcccgctccgga

SEQ ID NO: 168796 - DNA, 398 bp, Zea mays
  Clone ID: MRT4577_8552C.1
ggcgcgggcccggatcggagctgccggcggtgaccgcgcgcgcctgcatggcggcgtcccgcagcgaccgcagcgtgcgcacgttggcctcccagaagccgcagcgctcgaagggcagtccgtgcttgcggcagaggtcgcgcaccaggggcgccacgcgccggaggtggcaccgcggcagccgtgggaacaggtggtgctccacatggaactgcagcccgccgtggaaccagtccatccacggcgggcacgccacatccagcgtgttccgtgtctgtttctggaaccagtcgtcgccgcggggccgccccacgtacgtccccaccgagatgtggttgagacagaaccatcggacaattcgtatacaatcaaaaaatattggtatccatcacttatcc

SEQ ID NO: 168797 - DNA, 1343 bp, Zea mays
  Clone ID: MRT4577_85530C.1
cgaattcgcggccgcgtcgactggttcgtggcatgatcgagacgaggctggttcgtggatggctgcgccccggccgggaccgtaccattatggctggttcgtggatggcggcgccacaacctctcctgctgtcgctgctggtcgccgtgctagcggtggccgccgatgtcgccaacgccggccacgccaagcccctgacgcctggcgggcgcgtggtacaccacaaccacggcaagttcacggccgggccgtggaaacccgcccacgcgaccttctacggcgggcgggacgggtccggcaccacggcgggcgcgtgcgggtacaaggacacgcgcgcgcaggggtatggcgtgcagacggtggccgtgagcacggtgctgttcggtgacggcgcggcctgcggcgggtgctacgaggtgcgctgcgtggacagccctagcgggtgcaagcccagcgcggcggcactggtggtgacggcgaccgacctgtgcccgcccaacgaccagcagtccgcggacagcggcgggtggtgcaacccgccgcgggagcacttcgacctcagcatgcccgcgttcctccagatcgcacaggagaaggccggcatcgtgcccatctcctaccgcagggtggcgtgcacgaagcagggcggcatccggtacaccatcaccgggaacaagtacttcaacatggtgacgatcaccaacgtgggcggcgccggcgacatcgcggcggtgtcggtgaaggggagcaagcgcgttaagtggacggagatgaagcgcaactgggggcaagtgtggcagaccggggaggacctcacctgcgagtcgctgacgttccgggtgatgaccagcgaccaccgcaaggccacctcatggcacgttctccccgctgactggaagttcggcgtcacgtaccaggcatccaagaacttctaagtagccactttccctcctcttcttcaacctgcatatgcccacaagcaaccatgcagatgataacatgcatcatgcatgcatattcattctttcgctcatgcactccgatatggtgccggagttaaaaaaatgtaaatcaatgtgcaaattcaaatgacatcttaaccagttgtgatcaatctcaaccgctaatgcattgcacacaccgaatgaagctaccatccactgctggaacaggctgatttatcgaatacttggcaaaaagccaaattcttagcaaaaaaaaaaaaaaaaaattgcggccgttttaaaagaaccaaattttcctccccggggttggaaaaaaaaaactttttttttggggcccccaaaataaaatagctggcccgggttttaaaaaggccggaa

SEQ ID NO: 168798 - DNA, 773 bp, Zea mays
  Clone ID: MRT4577_85531C.1
gaaatgacatcggggatgaaggagctaagtgtctttcagatatattagttgaaaatgtgggtatccagaaactcctcctgaacagtatcaatattggggacgagggtgccaaggcactttcgaacatgctgaaaaagaataactcaatacgtattctacagttcagcaataatgcaattgaatacagtggttttgcaagtattgcagaagcccttttagagaataatacgatacggagcttgtatctcaatggcaactatggtggtccccttggtgcatgcagcctagctcaaggaattctagggaataagtctttaagggaaattcacttgcatggtaatgggattgggaatgagggaatacgtgagttgatgtctgcattatctgctcacaaagggaagatcacagttgtggatattggcaacaacaacattagcccggaaggtttacatcctgtagccgagttcctcaaaaggacaaagtccttacagtggttcagtctctacatgaacgatattagtgatgagggagctggaaaggttgctgaggctctgaaagataacaaaacaatttctaccatagacttgggtggcaataacattcactccaaagctgttagtgcaatagcggaaactttgaaggataatgcagtgctgacaacactggatttgagctacaatccaattggatcagacggagtaaaggctttgtgcgatgtcctcaagttccacgggaagatccaaacccttaagctcggctggtgccagataggc

SEQ ID NO: 168799 - DNA, 156 bp, Zea mays
  unsure (1)..(156): unsure at all n locations
  Clone ID: MRT4577_85532C.1
ctcgactcctgtgaggtatggtgctgggtgcagatgcagtgtgtttgcgctccagnaccttatggacagttgtgtccccaaggaaggatgagaatagctactgaagtcctaaagagcaaacctaaatcaagccattggcacacaggcatagacaga

SEQ ID NO: 168800 - DNA, 296 bp, Zea mays
  Clone ID: MRT4577_85533C.1
tagtacgtagcagcagcagcagcagcatggccgccgcccccctcccccctcccatcgccgccgccgccgccctcccgcactagctacccctcccccgccgccactagatccgtccccttcctctcccggacgctccctccggcttcagcgttgctcctccggacagggtccggcggacttgatcctgacgacgagggcgacttcctcaatctgtcaagagtctcaattgttgctccatgtcggcgagcgacggcgcggcggtgtcggtcgtcgaggggaagctcgcggagctcacc

SEQ ID NO: 168801 - DNA, 637 bp, Zea mays
  unsure (1)..(637): unsure at all n locations
  Clone ID: MRT4577_85534C.1
gggatccctgccctctaataacagcagcagcagccgccatggaaggcagcagcaagaagctccagccgttcctcctcacgctgctgctggtgctctccaccgccgtgacgcccatcctctcgctgtcagtgccaacatcaacctctacctgccactggcgctccagctcctcctcacctgcggcaagacgccgccgccgggctacacctgcaccgtctgatctggactagctggcagcccccggcccatgcgtccatttatccgtgaacatgggttttggagtgagctagcatccagttcatcggtcgtttgaagagagatcgacatgagaggatgtcgtctgcttcgtcgttccaagctgaagaaggcacgccggaggaggaagagagtaacaacggccgggtcgatcagctaacgatggatcgatcattttttccccatatttattgtgttgcgtctgctgtagtttctaattttctagatgtgctttcggtttggtctgtagaccctgcagcttgatttggttaagtttgatttgatgcaagggaaatgggtnggcggttgattgctaataattcccgttgatatttgtcatgcgtacgtgaacttgataacaaaatgcatgatgtcttctctt

SEQ ID NO: 168802 - DNA, 455 bp, Zea mays
  Clone ID: MRT4577_85535C.1
ggggaagggccccccaccgcaaaaaacaagcccgggttattttttggcggggggaacaaaaccccatgcttccaaaatttggacaaagctcccaaaaaacaacacaaaaatcgccgatcacatgggaccccaaaaagcccccaaagaaagaaaccccccagtaaaagggaaccaggcaaaccaaagggggtggggtgagcccaaaacccccccacaaaaaagggttcacaagggaccccaaaaacatcctttggccccaactttttcacaccggggaaaaaaaaaaatttggcaaacttggagcttttgaaggtaaccctggccaccttaacccaaaccaccaccttggtttttatgccttaaaccccggaaaggttgcctcgggacaaaatccccttgacacaaggagcataccttacgggggaggaaaccctgaaactcaccccgcaggggtt

SEQ ID NO: 168803 - DNA, 710 bp, Zea mays
  unsure (1)..(710): unsure at all n locations
  Clone ID: MRT4577_85536C.1
gccctctaataacagcagcagcagcagccgccatggaagccagcagcaagaagctccaggcgttcatcctcacgctgctgctggtgctctccaccgccgtgactcccatcctctcgctgtcagtgccagacgacgaggtagcctgcgactgcgataaacccaagaccaagccctcccacccgtcgccgtcgccgaagcccaagaatcccaagccacccaagggcagcaccgggtacccagcgccggggcaccaaccgcccgtgtgcctctgcaccaccatcaagctcaggctcctcaacatcaacctctacctgccactggcgctccagctcctcctcacctgcggcaagacgccgccgccgggctacacctgcaccgtctgatctggactagctggcagcccccggcccatgcgtccatttatccgtgaacatgggttttggagtgagctagcatccagttcatcggtcgtttgaagagagatcgacatgagaggatgtcgtctgcttcgtcgttccaagctgaagaaggcacgccggaggaggaagagagtaacaacggccgggtcgatcagctaacgatggatcgatcattttttccccatatttattgtgttgcgtctgctgtagtttctaattttctagatgtgctttcggtttggtctgtagaccctgcagcttgatttggntaaagttgatttgatggcaggg

SEQ ID NO: 168804 - DNA, 588 bp, Zea mays
  Clone ID: MRT4577_85537C.1
ccggccggggaaggcggcgcccccggacgacgccagccagcgcgccgcatccttcctcctcgtcggcgcggcggtcgtgggtcttgtcgccgctcgtcagctcgtccgcttctttctcctagtggtggtcctccaggagcgcgcgcggcccggcggtcgcgtctacaacgcccgcctagtagaggacaacgacgccgttgatgtcgtcggcagcgttatcatcggcatcctcgacaacccgctcgtcgtggtggtccggcagcttgtccttcctctgcttaatgagggggaccgctgctcgctcttctactaggacggccggaccgtggagaacagcatggttaagaggatcaatctggtgttgaacaagattctcctccacgacaccacgatcctgcagtatcttcatgatgatgctgagaagatctccttgctggaagatattaacaagctcatgaggatcttccatgaggccagctcgtatgacgacaagatgatattgtattggcattttgcaaatctgcaattattctatgacggctgccgatgatagctttttctcgtccactgctatcatgacgatcctta

SEQ ID NO: 168805 - DNA, 748 bp, Zea mays
  unsure (1)..(748): unsure at all n locations
  Clone ID: MRT4577_85538C.1
aaagtgcgcactccgatcctgccctctaataacagcagcagcagccgccatggaaggcagcagcaagaagctccagccgttcctcctcacgctgctgctggtgctctccaccgccgtgacgcccatcctctcgctgtcagtgccagacgacgaggtagcctgcgactgcgacaaacccaaggcgcccaagccgtcgcacccgcccaagaccaagccctcccacccgtcgccgaagcccaagaaccccaagccacccaagggcggcaccgggtacccggcgccagggcaccaaccgcccaagagcccctcctaccccccggtcgtcggccctcccaagggccccgtcacgcgcccgccagtcacgcgtccgccggtcgtcggccctcccaagggccccgtcacgcgcccgccggtcacgcgtccgccggttgtcggaccaccggtgacctacccgccgatcaccggccctccaacaacgccgcctgttgtcggaccaccggtgacctacccaccgatcactggcccgcccgcgacgacgccagcggtcaccggtccgcccgtgacctacccacccggtggaggcggcggcagctcgacgccgtgcccgccgccaccgaggccgaagccgacgccggtcgtcgccgacgtgctcggcggactcgctgaagctgcgcgcgtgcgtggacctgctggggcggctgatgcgcatcnggctctgcgaccacgtggtgaacaagtgctgcccggt

SEQ ID NO: 168806 - DNA, 909 bp, Zea mays
  Clone ID: MRT4577_85539C.1
cggccgggggtgcggccctcgattatgggcgggtgcactccgatcctgccctctaataacagcagcagcagccgccatggaaggcagcagcaagaagctccagccgttcctcctcacgctgctgctggtgctctccaccgccgtgacgcccatcctctcgctgtcagtgccagacgacgaggtagcctgcgacagcgacaaacccaaggcgcccaagaccaagccctcccacccgtcgccgtcgccgaagcccaagaaccccaagccacccaggggcagcaccgggtacccagcgccggggcaccaaccgcccaagagcccctcctaccccccggtcgtcggccctcccaagggccccgtcacgcgcccgccaggcacgcgtccgccggtcgtcgggcctcccacgcgtccgcccacgcgtccgcccacgcgtccgggggctggtggagctggaggcggccgtgtgcctctgcgccaccatcaagctcaggctcctcaacatcaacctctacctgccactggcgctccagctcctcctcacctgcggcaagacgccgccgccgggctacacctgcaccgtctgatctggactagctggcagcccccggcccatgcgtccatttatccgtgaacatgggttttggagtgagctagcatccagttcatcggtcgtttgaagagagatcgacatgagaggatgtcgtctgcttcgtcgttccaagctgaagaaggcacgccggaggaggaagagagtaacaacggccgggtcgatcagctaacgatggatcgatcattttttccccatatttattgtgttgcgtctgctgtagtttctaattttctagatgtgctttcggtttggtctgtagaccctgcagcttgatttggttaagtttgatttgatgcaaa

SEQ ID NO: 168807 - DNA, 538 bp, Zea mays
  Clone ID: MRT4577_8553C.1
cccgtgttcacgagtgaacagagtagagtagttgtatgggcatgccccattccagctccctccaccacttcctccgccacgtttccttccctccggacccgcaccttctccccaccgtgttcaagtcatgcccgacactgccgctcgcccgcgctctccacgccgtcgccgaggtcagcggcctcgcgcgggaccccttcgtcgcctcctcgctcctacacgcctatctccgcctcggtaccacgggcaacgcccgcgccttgttcgacggaatgccgcgcccgcagaggaccgtcgtcggctggagcgcgctggtcgcggcgcacgcggcgcgcggggacgccgagggcgcctggcgcctgctcgaggagatgcggcgggatggcggcgtggagccgaacgtgatcacctggaacgggctcgtgtccgggctaaccgcagtggccgtgcccggacgcggtcgttgcgctggcgaccatgcacggtgaagggctcctgcgtcctgacgccacgggcgtctcgtgcgcgctgtctgctg

SEQ ID NO: 168808 - DNA, 666 bp, Zea mays
  unsure (1)..(666): unsure at all n locations
  Clone ID: MRT4577_85540C.1
ttgggaccctcgaggccggccgggaaggccttgacagatcggaggaacgcactccgatcctgccctctaataacagcagcagcagccgccatggaaggcagcagcaagaagctccagccgttcctcctcacgctgctgctggtgctctccaccgccgtgacgcccatcctctcgctgtcagtgccagacgacgaggtagcctgcgactgcgacaaacccaaggcgcccaagccgtcgcacccgcccaagaccaagccctcccacccgtcgccgaagcccaagaaccccaagccacccaagggcggcaccgggtacccggcgccagggcaccaaccgcccaagagcccctcctaccccccggtcgtcggccctcccaagggccccgtcacgcgcccgccagtcacgcgtccgccggtcgtcggtcctcccaagggccccgtcacgcgcccgccggtcacgcgtcccgccggttgtcggaccaccggtgacctacccgccgatcaccggccctccgacgacgccgncctgttgtcggaccaccggtgacctacccgccgatcaccggccctccaacaacngccgcctgttgtcggnccaccggtgacctacccaccgatcactggcccgcccgcgacgacgcccccggtcaccggtccgcccgtgact

SEQ ID NO: 168809 - DNA, 382 bp, Zea mays
  Clone ID: MRT4577_85541C.1
acggctcgaggttgaaacataaatcgatatcaaacgaccaaagctcgaaaatggcggaattgactcgcacgttgcccgcatcatggtatcgtagcccacctctgtatcagttggaaagacgagctgtatttctgaagtcatggtacctgatcggaccggtcgttagatttttgaatgtggatgaaaaagtcagctacgaaatcgcgcagcagcaaatctatgctgtacgaatttctgcaaccacagaatttccggggaatgatgaactgaaagtgtttgaagccagcactgggaaccaactaccaagccatgtaactccaacaggactattattcgcagcattgagctcgtctgcgccctcattccatgaattcttccccga

SEQ ID NO: 168810 - DNA, 1536 bp, Zea mays
  Clone ID: MRT4577_85542C.1
cattgggtacctcgaggccggccggggtgcactccgatcctgccctctaataacagcagcagcagcagccgccatggaagccagcagcaagaagctccaggcgttcatcctcacgctgctgctggtgctctccaccgccgtgactcccatcctctcgctgtcagtgccagacgacgaggtagcctgcgactgcgataaacccaaggcgcccaagccgtcgcacccgcccaagaccaagccctcccacccgtcgccgtcgccgaagcccaagaatcccaagccacccaagggcagcaccgggtacccagcgccggggcaccaaccgcccaagagcccctcctaccccccggtcgtcggccctcccaagggccccgtcacgcgcccgccagtcatgcgtccgccggtcgtcggtcctcccaagggccccgtcacgcgcccgccggtcacgcgtccgccggttgtcggaccaccggtgacctacccgccgatcaccggccctccgacgacgccgcctgttgtcggaccaccggtgacctacccgccgatcaccggccctccaacaacgccgcctgttgtcggcccaccggtgacctacccaccgatcactggcccgcctgcgacgacgcccccggtcaccggtccgcccgtgacctaccctcccggcggaggcgggggaagctcgacgccgtgcccgccgccaccgagcccgacgccgacgccgtcgtcgcctacgtgcccggctgactcgctgaagctgggcgcgtgcgtggacctgctgggcgggctggtgcatatcggcctcggcgaccccgtggtgaacaagtgctgcccggtgctggagggctggtggagctcggccgtgtgcctctgcaccaccatcaagctcaggctcctcaacatcaacctctacctgccactggcgctccagctcctcctcacctgcggcaagacgccgccgccgggctacacctgcaccgtctgatctggactagctggcagcccccggcccatgcgtccatttatccgtgaacatgggttttggagtgagctagcatccagttcatcggtcgtttgaagagagatcgacatgagaggatgtcgtctgcttcgtcgttccaagctgaagaaggcacgccggaggaggaagagagtaacaacggccgggtcgatcagctaacgatggatcgatcatttttttccccatatttattgtgttgcgtctgctgtagtttctaattttctagatgtgctttcggtttggtctgtagaccctgcagcttgatttggttaagtttgatttgatgcaagggaaatgggtggcggttgattgctaataattcccgttgatatttgtcatgcgtacgtgaacttgataacaaaatgcatgatgtcttctctttgcgtgaaaaaaaaaaaaaaaaaaaaaaaaaaaaaaaaaagtgagaaaaaaaaaaaaaaaaaaaaaaaaaaaaaaatactataaaataaataaaaataattaaataaaaaaatgggggggccggcccttttgaattt

SEQ ID NO: 168811 - DNA, 399 bp, Zea mays
  Clone ID: MRT4577_85543C.1
cccacgcgtccgatatattataatttatagtataaaataatgtttgtagtgaccatactaaactgctggacactaacatgacaaatcgccggacagctggttattagctagagccagcgtttggagagttgtgcagttgacgaggcttgccaggatggacacactcagtttattgttgttggcggtgaagtaccgaaggttgcctccagcgcacagccctccagggatagcaccgctgagctggttattgtctagagccagcgttttcagagtcgtgcagttgacgaggcctgccgggatggacccgctcagtttgttgttaatggcggcgaggtacaggaacttgccttcagcgcacagccctccggggatagcactcgtgagctcattgtaatcagg

SEQ ID NO: 168812 - DNA, 379 bp, Zea mays
  Clone ID: MRT4577_85544C.1
cggacgcgtgggatgcagttgcggtgtgtgattccagcgcaacagcaaatcacctgtacatgacggttgatgggactgagttcttgaaaacagaaaatgtgtttgatttgcagttcattcctgactctagggagttcaaacatcctgctcgagacgccgatacagaagcacctccgagttacaaggaacctgattttgagactcgtgctttgcaacatagcagagttaagctcacctgggatgatgatgaacctgaacgtaagaaagtcttgaagctaaagttcaatgatgatcagctagatgagcttaacatgtatttaacaagtgatgacagcgcgtcagataatgaaagtgtagacgattctgaggatgaatctct

SEQ ID NO: 168813 - DNA, 597 bp, Zea mays
  Clone ID: MRT4577_85545C.1
gcccctgacaatcgacagatatttttgagtgcatgcaatgatgatagagaggctgcattgatgtggttgagggatgagatggcttagcaggtgcatttgcttagaaccatgcttcaatgggaggagcaagttccccgtggcacatctttgacagagaaaaatctcggtgcaagcacctgcacaaaaccaatcctgcgtgaggtggccataatattctggcctaatggcaggattataagaatgggcactggtagcacagctgctgacgctgctagaagaatgggcgttgaagtgaagctgctttgggctaatggccaactagtgctgccccaaatagagcttaaggttggggatatagttgaagtgaggatacagatgcaagcaccagtttccagtaaacagagcttaagtttctgacctgcagaccaatttatttaagtatgttagttgaatcagtgtactgttttttttggatattctgcattcttgaagttaaaggatcagaacttgtttctgaatgcagaaatgttttctctattatattatcttcacacttgggttatgagtaaatgtttacctgcatcagtagttgttgac

SEQ ID NO: 168814 - DNA, 301 bp, Zea mays
  Clone ID: MRT4577_85546C.1
gaacagctgcaaaaggccggggcccatttacatataggcctgaaccacgtatggatgggatggttaggactgaactgcccggcccgtttctttggggagaggtcacgaattttggcgtccggtgggggtgcgggtcccggcaggtgcgggggtgtggaacacaatggtctggcgcggcgtgggccggttggtagcttaagaccctgggccgagcttggtggtgttcacccagggggcgtggggccccgggtcccgtagcttggcttgtaggttctttaggggtccctttgtgggggcgttg

SEQ ID NO: 168815 - DNA, 1545 bp, Zea mays
  unsure (1)..(1545): unsure at all n locations
  Clone ID: MRT4577_85547C.1
gnaaaacgtggaccacatagtgccgcctaaagaactcatcagacatcagcaagctatctgactggagcaggtactctagcacattactaagcccacatgctgaagatgaaccgacgacaactctgagcttgcagaaagggaggcatgaggaggtgatgatttcttaattaaaacttgcatagcatgctctacaacacattgcgaagtcacaaaagaggagaaggtgatagcatataaggtgttcaaggaccctgacaatcgacagatattcttgagtgcatgcaatgatgatagagaggctgccttgacgtgcgtccgggatgagatggcttagctgtaagcgttggaagcctatgctaggcttcataaaaggtttctgagaagtggtggtgtgcacctggacatggtgactggtcaacaaatctggagaggtacacactatgccaggatgggatatttcataagcaagaccaatttgggagacttttacctacatttattcaaataattgatttggcggaagaggaagaggaagagtattggatggttgtatctgccatattcgagggaaaggaaacttgcagtctaccatctgaatcgagttatgctgataaatcatcatctgaacctccaagttctactccattaagcgaccccatcaacaataaggtgcatttgctcagaaccatgcttcaatgggaggagcaagttcgtcgtggcgcatctttggcagagaaaagtctcagtgcaagcacctgcacaaaggcaatcctgcgtgaggtggccataatattctggcctaatggcaagattatgagaatgagcactggtagcacagctgctgacgctgctagaagaatgggcgtcgaagggaagctgctctgggttaatggccaactagtgctgccccaaacagagctaaaggatggggatatagttgaagtgagggtatagatgcaagtaccagattccagtacaccttcctcagggttattgatcatattggttcctcagttcttgccctatcttggcaatgcatcgaacctcaattgtacagtccatttgtcgaaatgaatcgaagaaagaaggattaggtccagtaagtgttgtgtcatacaagagttcactgtgtacataagaaactgcaagtataaaagctgtctgtccagctgtgcttctccttgcccatagttacagtggtaatgtaaatttccgtaagtaaagatgtagtaatgtttagttagtggtccacatttcagcgtgaagttatgaagtgcagtagcgctgcaagtttttttttatatatgtccaaagtagatgtctcatgctgcctaaaaaaatgtccatgtcccgtaatttggcaagccaagatcttcaacgttgtttggtttctgacctgcaaaccaatttatttaagtatgttaggtgaatcagtgtcctgttttttttggatattctgcattcttgaagttaaaggatcagaacttgtttttgaatgcagaaatgttttttctattatattatcttcccccttgggttttgagt

SEQ ID NO: 168816 - DNA, 173 bp, Zea mays
  Clone ID: MRT4577_85548C.1
tggaactccatccaaatctccaaagggaacgacattgccctgctcaaactggctaaccccgtcgcgctcaccgacaagatccagctagcctgcctccctcctgccggcaccattctacccaacaactacccctgctacgtcacgggctggggaaggctgcagaccaacggggc

SEQ ID NO: 168817 - DNA, 679 bp, Zea mays
  Clone ID: MRT4577_85549C.1
ctcgaggccggccgcaatgggcaaggcgtctacggcgtctaccgttgctaccgccgacggatcatcgctgcgctctctcttgccgacgccgcgacttacagtcgtgtccgacctcgacgaactcctcggatgctagcgcgagcagtccccacaaaagcacctcccgctcgcacagctcgcgggttgcgaacccatatcctctgccgcgcctgccctctcacagcctctcgcggctgttgccctccggggcctctataaggatcgacaggtacctgaacaggaagacaatgacgctcataaccagcttgcagatgggatcttgaaatgctctccgtctgccgagaagcagacgcagtcaatacacatgtccgcacatgattattgaggatgacatgatgtacatcctgggaggcggcacgacggagggcagcttaccgcaaggagacatgaaggctgagaggatctctgcactaccttggtgaaggatgcttctgcgatacctccgccgagcatgcgtaagcaccgtcgctgtggcatacattcatcgcggcgtattactgtgaaatgacaagcatactggtctctggactctctgatgagagggacgaaaatgagcgcacggactctgtgctgtcgctgtgagcaacggagatgtccaagacatcctgatgaggtccag

SEQ ID NO: 168818 - DNA, 354 bp, Zea mays
  Clone ID: MRT4577_8554C.1
cttttaagcggccgccctctttatttttttttttttttttcacaaaaatttaatgtgtgcctaaaactacaagggaagggtttccattcaatcaaggccttaacaagatttttaggccatttttaaaaaatcatagaaaattaaataaatggacttctaaactagaaacaaagcaacatatattcactaactgaataaagcacaccatatcaaatctacaaaaacaagcttgctttgagtctagggtcccaccaattttccagcaccttatgaatactacatgtttctttctcccaaaaagcaaaaacctgttgaagaaaaaacaataagttttcttacaccaaataattctat

SEQ ID NO: 168819 - DNA, 854 bp, Zea mays
  Clone ID: MRT4577_85550C.1
ggccctagggcccttttttttttttttttttggcgataactgcatgaatttgttcacacttagcaaattagcatatgcccaaaattgagtcagttatagctacagatatcccaaatctcaagcactgccctgttgtgaaacatattagcatacgcccaaaattgagccaaactcgcacttagccaacataggctctctccacttagcgaaaattgagccaaactcgcacttagcaaatatcacaatgtttttttttggttatcctactgctgctgacagtgacagtgcctttccattgcttggctcgaggagcacacgatctggaatgccgggctcactttgatgttgaggtgatgaatagtagaaatattagcataaaattgtgtcaatcagcaacccacaaaggccaggcttgaagttggttgaaggaccggctcaaggattccccctcgaggcctgcatccttctgttctcttccatgtaccatttcttcagcctctcttgagcgaccaccacctgtttgtcccagtcggtctttactgttatgaagagaagcacgatagtctggaccagcgttccgagcagcattccgatccaaatgcccttcacatgaagccccaccacgtagcctaggactgcgccaagaggaatgccgatcaggtagtacgacgtgacgttgacgtacgcgactacgccttgccaaccggcaccaacagcgacacctgacagcacgggctggacgctgttgagcagtatggagaagaccagcaggggcgagaggtcggcgacggctgcggccaccgcttggttctcggtgaatatgtaggcgaggctcccgcggaagaagaggaggc

SEQ ID NO: 168820 - DNA, 777 bp, Zea mays
  unsure (1)..(777): unsure at all n locations
  Clone ID: MRT4577_85551C.1
tgggaccctcgggccggccaggcccacaatctcgcagtcctttcttcctccgacctccgcagcgaatcggaattcggctcagggttccgccgcgcctctttaaccaggcgccgctcgccagggcctaggctggtcatggaaggaaacgccgcagccgggaagaggtcccggacggagacggcgaacggggctgccggcggcgggaagcgctccaaagtacgattgggtgcccgtttggtgagggatgtcgttttctgcactttgtccctggcggttacccggcagttgcaaaaatgctcaatctaggtagccctgctgtatctgcgccatcaagaactcatgtggatcacgccgctcttactggcgcctctcattcagcttcgtcaggcaagacacgcatgtgcaccaagtacaatactacagaaggctgcggatttggtgataagtgccactttgctcatagcgaaagagaacttgggaaaccagcgtacatgccttatggagaacctcctatgggcggtcgatttggaggccgacctgaacctgtgcagccagctgccatgggccctccagcaggaaactttggtgcctcggcgactgccaagatcagtgtggatgcgtctcttgccggtggcataattggtaagggcggggtcaacactaagcagataagcagagtcacaggcgtcaagctctgtatccgcgaccacgagtctagccccaacctgaagaacattgagctggaaggcaattntgaccagatcaagcaagcccgcg

SEQ ID NO: 168821 - DNA, 455 bp, Zea mays
  Clone ID: MRT4577_85552C.1
ccggccgggaacggaatactggccacgcccctgacgttgtcaagacatctgctgcttccgcgtgagaggacatgaagacgaggccactttgggccgccctgatgacccatctgcgactactactaatctcctccgacgtagcgtgcctggcacaaggctctacggccggctatcatccaggataggacgagttcagcccttccccaccagcatcaaccggcacgtggtgatctggaagtgtacggccggctgctgatgactccggcggagctgctactcttggaagtgaagctgctatcgacggaggagacagctgatggtgctactaagatacttctactacgacactcaccgacgatgtccccgtctatctcagggaggcattagggcgcacacgtaattataatgcttgcgctgtgatcgctctcgcttgcgcgaaagacacgcatcaagag

SEQ ID NO: 168822 - DNA, 973 bp, Zea mays
  Clone ID: MRT4577_85553C.1
taattcggcacgaggccgcctctcctcttctcccttcgaccctcgccctgttcaggcttcccgctacgccgactcctattccgctgctccgcttcctccgcctccaccttctcgtcgctcgcctcttaccacgcctccttcgcccgccggatggccctcgccggcatccatccgcaccaccgcatcgcggtcggggtctccggtggaccggactcgatggcgctgtgcgtgctcgccacggcctggaagaaggcagcggggaggaaggccggtgatgaggaggatcccgtcgcctcggcattcgtggacgggctcctcggagttgtcgtcgaccacggtctgcgccccgaaagcgccgacgaggcgcggctagtgcgtgaccgcgtccgtggcatgggtgttgagtgtgagattgctaactgtgagtggccgtatggccctccaaagcaagggaaggtgcaagaggctgcccgcgaagtgaggtaccaaaaactattggacatttgtataaagcaacagataggaatcttgcttattgcacaccattctgatgaccaggcagagctctttgttctcagactatctcgccaaagtggggttttagggcttgctggtacagcttttgtgtctcagttgtttgcatctaatgtaaaatatgatggggagagctttcgacgttatggcatacttcttgtgcggcctatgcttgagttttcaaaagatgacatgtataagatatgtcaaggtagtaatcaaccctgggtggaagatccaacgaatactagtatgaagtatgctagaaaccgaattcgggtgtccttaagaaaattatccacccgaaggtacctttctctcaggagttcataaactgataagcgcatgccgattgacacgggcatgtgttgattgtgcttgcaatacaattgcaaagcagtcggtgtcaatatcggagtatggatatgctattatagac

SEQ ID NO: 168823 - DNA, 402 bp, Zea mays
  Clone ID: MRT4577_85554C.1
tcgcgacaccacccccacagcaccactgcttactgcatatacacaaccgcaaccatgggtgtcccattcgaggctcttctgccctatgctatcatgactggcttcttcgccttcagcgcagtgtcggtcggaaagctcaaggagattcagaacggaggaaagcggacgcgacggggtatcgatgcatgggacaggcaaatgatggaacgcgaccgccgactaacaggcttcatgcgtggccagaccgacaaacccgtcgcccccgccggcttcgaactcaacaacccgtggaggtgcgagcaacgattcttctaggcccatgtacttctctagcacccccacgacgcactatgtcgagcgacacggacccggtagatattaagcaatcaattcttttctact

SEQ ID NO: 168824 - DNA, 306 bp, Zea mays
  Clone ID: MRT4577_85556C.1
atgaccctcatcatcaagcgcttcaagaccgcactaagagcacaaggagtactcaaacaagaacaaggcaaagggaaagcgttcctgcttcaaggagacgaaagacatgagaagaaggaaaagaagaaggtctacaagaaggcgaagggcgaggtgcaccttggcaaagagtgggactcggattgctcttcgactgactccgacgacgaaggactcgccgcctcggccttcaacaagtcgccgctcttccccaacgagcgccatacttgtctaatggcaaaggaaaagaagcttaagaagtattaa

SEQ ID NO: 168825 - DNA, 249 bp, Zea mays
  Clone ID: MRT4577_85557C.1
aaaagaggtgtgagcactctgtatttgtacaggtcgccttccaagtcatttttatgcataataatctaggttgctgcataataatctaggttgctgcacaatggcactctaggttgttttttgcacaagtagcagtggcagcacaagctagtgcatctgctgtatagatatttgtgggccaattgtgggtaaattcatgaagccatctttcaccatgaccctgtgctaaaaccataatgtttttataac

SEQ ID NO: 168826 - DNA, 344 bp, Zea mays
  Clone ID: MRT4577_85558C.1
atcccaaagtcacattttgaaaagagaatgcctcacaaatttgaatcaaaccctccaggaggtgcacagatcagcaatttgaaaagcagtgcacaaattatactacccacgctgtaatgtaaagtcgacaccaattagtattttttaaaccaatatccatcatcgctttagcataagccatgagcacttatttcatgagattattatcatttcttggccatacccatcaacaaattattatttttgcagacgaggaagattcaagtgtgagtctgcttcttaatctgacccctgttagcttcattcacctgggaacttcttgggttaaaggcattgcactcctt

SEQ ID NO: 168827 - DNA, 193 bp, Zea mays
  Clone ID: MRT4577_85559C.1
gaccgttgccgccgttgcggatgatcgtcgtgtgggagagcaccaagggacgcgtagagatggccttggtcgcacgcacatcggtgtgcatactgaattcagatctggatcgcgcgcgcaaagtcaagagcaccgttccctgctaccgatggacggcaactacttcttaatacattaacaaagagtgagggac

SEQ ID NO: 168828 - DNA, 154 bp, Zea mays
  Clone ID: MRT4577_8555C.1
atctgaatctccctagcaatctctagcatcagattctagtgccaaacaaagctctagcggccttgttactgtcccaatagcccgtacgaaacatacagcgacaaaatctaatggccgccaggatccaaggaagcaactggccaccaaggccgca

SEQ ID NO: 168829 - DNA, 170 bp, Zea mays
  Clone ID: MRT4577_85560C.1
gacggatatcttcattgcctctgaggctcacgacaatgctgtaatgtgaggtgaacatgccttagtctcggccttgacaaacgtgcttcttcttcaccggtgccgcttcatggattatcatgctgccaaagcgctcccgtccatcttccggtccgtctccatgggaggag

SEQ ID NO: 168830 - DNA, 108 bp, Zea mays
  unsure (1)..(108): unsure at all n locations
  Clone ID: MRT4577_85561C.1
tcgcaagtacttggccagtccctctactgtttccaaatcntggaacatgcnttcagcgggcatagggacttcttctgtggctcatcgaagtgggatgaaacattggaa

SEQ ID NO: 168831 - DNA, 770 bp, Zea mays
  Clone ID: MRT4577_85562C.1
gggaccctcgaagccggccaggacttaccccgacggggtcgacgggctatcaagaaggcccgtggcctaggtcaatggcccacattgcacttggtgggtgcgttggcttaccatctccccaagtgggagagtagaaaataaaaaaaaaaaaaaaaaaaaaaaaaaaaaaaaaaaaaaaaaaaaaaaaaaaaaaaaaaaaaaaaaaaaaaaaaaaaaaaaaaaaaaaaaaaaaaaaaaaaaaaaaaaaaaagaaaaaaaaaaaaaaaaaagggggcccccaaaccccacttttggtccccccaagagggggaaaaaggcccgccggggaaaacaagggaaaaaacggtccccggggaaaaaaggaaatccccccaaaatccccaccaaaaaaaaacccggaaaaaaaaaggggaaacccgggggggccaaagggggggaaaaacccccctaaagggggggggagcaacggcccccttcccaggggaaaaaccgggggggcccgggcgaaaaaaaaaccccccaaccccggggaaaagggggtcagcaaatggggggcctttccgtttccccgcccacggaacgaagggggcgggatgatcgggggggggggggggaaccaccccacccaaagggggaaaaacgggttcccccaagatcgggggaaacgccgggaaaaacacgggggccaaaaggcccaaaaagggcccgaaccccaaaaaaggccccagcccgcggcgattcccaaggggccccccccccgggggagaatc

SEQ ID NO: 168832 - DNA, 141 bp, Zea mays
  Clone ID: MRT4577_85563C.1
ttctttggggggccgccgggaaagccacgacatcataaaagttgtgctcgctaccaagaaaaaagaaggatgaaagtaaaattgtacgctggatgcctgttgctgaaacgacatcagcacgacaccagcaccaacttacgc

SEQ ID NO: 168833 - DNA, 631 bp, Zea mays
  Clone ID: MRT4577_85564C.1
cctagccgccgccgccgtcgctgctcttcgtcgagatgggaggcaagtgcccgcaccgcaaggtgaagaagcgccgcctctcgcacaagacggcgcgccgcggtaagttcctcctcaaggccgacgatgccgtctacgacgagctcgtcaagctggccgaccagggcaaggacgctgaaggcaaggagctccccgtcgacgaggacctcccaggcatgggacagttctactgcctccattgcgatcgctactttgctagtgaaagtgtgaaggatgaccactaccgctcaaagcgccacaagaaaagggtcaaggtaatgtctgggccagccccacacacgcaacttgatgctgaacttgctgctggaatgggaaagcctgacaatggcctgaagcttatgtccatgtgaaggaacctcttgttattagtacttgttccgtgttttcgttgctgtcgtacatctgaagctgctttgctcagtattagcagagttagtagatggtttttattgtgcacaagacttttgaaaggtggggcttgatcaggagggggagttggttttagagaggtgtcaggggtcaatgtttgtatcatgaaatcatttaccgacccatactagtaatgatgatg

SEQ ID NO: 168834 - DNA, 323 bp, Zea mays
  Clone ID: MRT4577_85565C.1
gaatggagcaacgaaggtaagcaatgtgaggagagatggacagccattacattaatttatagagtcgacgatgatgatgctgcagccaaaagaaagatgaaaagtgaggaagaaggcaggcagctgcacgccgccgacagccggcggctattcgcagtcaacagatgagacgaacatgcgtcacctcaatcgtcatattttcagtcacttaattaattacgtatttagtataatataatacctacggtacggctgacgatgccaaggtctttccgttcaaaatatcatttccttccgaatttattaatcaagctcttttcatc

SEQ ID NO: 168835 - DNA, 1011 bp, Zea mays
  Clone ID: MRT4577_85566C.1
cgggcgcgctcgcacgcggccgggccgggcccagacaacctcttctcctagccggccggcgttgcatcttctcttctgttctccacgacgcagttcggctgccagacaaaaaccctaaccgccgccgccgccgccgctcttcctcgagatgggaggcaagtgcccgcaccgcaaggtaaagaagcgccgcctatcccacaagacggctcgccgcggcaagttcctcctgaaggctgacgatgccgtctatgacgagctcgtcaagctggccgaccagggcaaggacgctgaagccaaggagctccccgtcgatgaggacctcccaggcctgggacagttctactgcctccactgcgatcgctactttgcaagtgaaagcgtgaaggatgatcactatcgttcaaagcgccacaagaaaagggttaaggtaatgtctggaccggccccgcacacgcagcttgatgcagaactcgctgcagggatgggaaagcctgacaacggcctgaagctcatgtccatgtgaaggaacctcttgctggtactggtacttgttccgtgcctttgttgctgccgtacacttgaagctgctttgcgcagtaagtaatagcaagagttatagcagacgggtttttattagtgtacgcaagactttcgaagtcggtgtgagttgttttagagaggtggcagaggggggggggtgtcaatgcatgtatcatgaaaccatttaccgacccataccagtgatgatgatgatgatgatgatgatgtatcgtatcatttggcctcagactgcgctcgtgtgatgtatcatgtatggtagtaccacaaagacagatggatggacgcgagaggcgcccaggccaggacagccgcgcctgccagcttccgttctgtgccaagattttccaagatctgtgtctgctgtacagtacctgtgctctctatggctctggtttcgtcggccgatgatgccgatggctgggtcgtctataataattgcctatttcgcgt

SEQ ID NO: 168836 - DNA, 218 bp, Zea mays
  Clone ID: MRT4577_85567C.1
aggaccgaaacggattggggtaaactaaagaatggtggcggacaatcccttaacacaaataaaaatgaagacatgctgtgggtttccaatattttgatgtcagacttagaccagcacaggcgaaatctccaaacatttcgttccactcgtccctgctgttagatccgatcccaccaatgctctataacccgttcctgtctttcttggacctgttcttg

SEQ ID NO: 168837 - DNA, 446 bp, Zea mays
  Clone ID: MRT4577_85568C.1
gctgctcgagcccaagatggccctcagcatgatcctccagcggttccagttccggctgtccccttcttaaaagcatgggccgtacactgtccttgttgggcatcctaagcatggcgctccaattattttcaacaggttctgactgcccttgcatgcacatcgtcgatagttgtcagtatgtcacagtgcaaataaactcgtatgaataatattgtgttaggaaacgcgtctagttctgtgtatccgattttcaaggtggaaccaaaacatcagggtgtaaggctatgtcccggaaaatgagtcacatgcgagctcgcaaacaccaacagagtccacatgcggatatacatatagaactgtgaagaagaataatgtgctttggaagaaactttacatatacacgtgaataatctttacaccatcatgttcttgttattatcgcttgt

SEQ ID NO: 168838 - DNA, 1318 bp, Zea mays
  Clone ID: MRT4577_85569C.1
gcgtccgcggacgcgtgggcgtgaacagagagacctgaccctgaggcaggtgaggaggtccagggagcaatgggtttcggcgtagtgcacctcctcgacgcggtgttccgccgcatgttccggtcggccggcctccgcccgggctcggccacggtgaacgccgaagacgacacggtcatccactactgggcccacccgtccctcctccgcccgccgccctccgactccgactccgagcagcggcagccggtggtggtgctgatccacgggttcgggccggacccgacgtggcagtgggcggcgcaggcgggcccgctgtcgcgccacttccgcctggtggtgccgacgctgctcttcttcggggcgtccggcacgcgcgcgcccgcgcggtccgacgcctcccaggccgccgcgctcgccgcgctgctcgcgggcccgggccagcagcacctcccgggcctcggcgccggccgcaccgtgcacgtggtgggcaccagctacggcggcctcgtggcgtaccacctcgcccgggagctggagcggcaaggcggcggcgttcgcgtcggcaaggtggtgctgtgcgactcggacgcgtgcaagggcgccgaggacgaccgcgcgctggcggccaggagcggcgtggcggaggtggcggagctgctggcgcccgccgacacccgggcgctgcgccgcctcatggcggtctgcgcccaccgccccgtcaagtacgtccccgagtgcctcctccgcgacatgctccggagatacttcgcggacaagagggaggagaagatggcgctcatcagagggatcgccaccggagaaggcttcgagcttgtgacgctactgcaggaggtgctcatcatctggggagagttcgaccagatcttcccggtggacaaagcgcacaaggtgaaagagaagctcggggagaaggcgacggtgaaggtgatccccaacgcggggcacctgccgcagcaggaggacagcaagctcttcaaccgagtcctcctcgacttcctgctgcgcccttcgtccaccgccgcctgacctccaacggcagcgcccaagccaaacagcttagcttgctcggctgccttcttctttggttatccattatcatcctgccgcgcgcgtttccggcgttcttgtttgtttgtagagtggaggaggcgctgccgccttctgtttttgtttgagggtggcaatgtgcagatcctacctgtttggttgtgctgtgaaaaaaagttgctgtgggctgtggaaaaagattttatcattattttatcattaatgcccttgtgtcagatccattatc

SEQ ID NO: 168839 - DNA, 227 bp, Zea mays
  Clone ID: MRT4577_8556C.1
ggctaggcccgagctgactgaattgcgatgcccccgccaagggctggccccgatcccaaggactcgtgcctctcgtcctgcgatgtataactgatccgatccgggttcctaatgccgcgaccagttgttgtcaatctcctagggcagcctgttatggatctccggcgccaacagcgtcggctagtaggtgtgcgagccgacggggcccgccccgccgcctcaaacac

SEQ ID NO: 168840 - DNA, 547 bp, Zea mays
  unsure (1)..(547): unsure at all n locations
  Clone ID: MRT4577_85570C.1
ctgaggcgtttctcttgactatcaaaatacataataataatataataatccggtccataacaacgccggcaggacctgtcttgggtgacaatacaagcttttatcatcagctaaagctaggtccccagcggaaaaactatttacaaaaatgtcctccgccctctgtcgaacatgaaggttctcttctaagctttcctctacgggcaaaaggcgacgaaagaaagaaactacaggcagtcattttttcagctaaaaactccggcggctaggcctccatctccgccggcggtgggcagttcaagtcaagatcgaacgcggcggcggccttctgcgtcgacacggcggccggcggcgatggcgacagatccacgaccgacgaggagtcggagtcgctctgcgccacggccgccacggtcaccgtcggtgccagcttgagcatgtggcaccctgccgccgcggcagcagcggcctgcccgaagaaaagtacgggtgcgtcacggggtagctgntgaaagggaaccgtacggcggcggccgccgtgcccgtg

SEQ ID NO: 168841 - DNA, 355 bp, Zea mays
  Clone ID: MRT4577_85571C.1
gcaatcaacggcgtgttttgttgcttacaagccgacactggtgccggtggctgcattggtgcaggtgccaattcatatatagaaaaatactgatgaagccgcagacgcatccggattgcagccgcaccgaacaagctgcaagtactctttcttttacgtctggcccacctcccaatctccatcatggggcctatgcattatctcgcctcggtctgcacaatagtcatctcccgggcccgctggccagcgtgccactgcgtatctgtcgtggacgccacacggtcactccggccgcaaattagacgcatgccaacccgcattactcctccctctgctatgctactccactccagag

SEQ ID NO: 168842 - DNA, 617 bp, Zea mays
  Clone ID: MRT4577_85572C.1
gggagaaatcgaaccgaggctgcggtgcaatccaagctgtgcccatttatcttatccgggttcaattggcaatcttacgatgacgctattagtggtagctgacatcaatcttatgaccagcctttttaggacccagtagaagtgcatacatgttatttgttcatcactcgacgcaaactgtacttaaaacttacttctaccattgaacaatttgtgctgctcttgtctttacatatcggctaatggatttatggtgcaaaacttgtatgatagctgttgttatagtttggctttggcacagatgttaacatacggtattcttcttttactggacggaagcgtttgacggaatggttcactgaaatcccataatgtcttgtgtcccattctttcttcagacatagaattgctcgttgtgcttctggaggaatacaattggtctttattattctggaggaatatagtaatcttgctttgttctaagcctccaatccattttccatgaatatcccacctctcaaaaaaagttatatttatgttagtactctgaaattgttgctcctctaaaaaaaaaaaaaaaaaaaaaaaaaaaaaaaaaaaaaaaaaaaaaaaaaaaa

SEQ ID NO: 168843 - DNA, 508 bp, Zea mays
  Clone ID: MRT4577_85573C.1
gagctctctagtcggcggccgcatccacggccggtacagctggcacagcactgggtacgactggaagaagatgacccacgacggcaggcccgactccagcagcgtcagcagcctgatgtccgacatgatgatctgccgcagcttcagcggcagctggctgtccctgaaccggaacaggatcagcgtgtcgctgtactgcgcaggggccacgaacgggacctccgccgccgccgtcgcgcgcgcccacctgctgctgctgctcctgctcctagtcggggacggggagctcatcaagatgccgtctgcagatcgaccgtccagctcgtcgtcgtcctcgtcctcgtactcggagacggccgtgagcgaggaggaggagcacgtccggcgcagcgcgctgctgcactcctccagctgctcgcttgggtccctagtgcgtgtgcagcgcggagaggtagcccctcagagcccgcgcctcggaggcgcggtccatgaaccacaggtgcgtgca

SEQ ID NO: 168844 - DNA, 1445 bp, Zea mays
  Clone ID: MRT4577_85574C.1
ctcgaggccggccgggggcctttttcaccacctattcagttcgggatgcatgctcactcaacgcaggccaattccctggccatccttctctggtattataattcggaggcacttgttggaatcactgcccttggtgccccactgctcagtaaacatgagaaagagcatgtttacccattgccaactcagtgtgatacattggaagcattgctttgagtttttagacaatgcactgtcggtagattgcttccagtcgggtgcgcctaaatgggatcaatcatctgacacccacaaggtatcttcagctgaagataaattggttgcgctgtgccgatttcgtcgagctcgaggtctctgggaaaaatgtgatgagaaatggagtcacgcctacaaatgcattgttgatgctcatcttcatgcattggaagaagtttgggagctcttggtgcctgatccaactaaaaccgaaggacagagtccagaagattcatctacagagcagctgtttatgttagtatctctggctgcttggggaggtacaaatgtttctcagactttgaaatttcaaggccaacttcagaatcattcagttctgatattgattgatagtggtagtccatatacattcttgcatgagaagttccgtgcatggttccagcatgtggatctggtggttgctccattgcaggttcgcgtggctaatggagaattgttacattgccagcacaagatactgcagataccgtggcaaattcagactttcaatcacataccggtcacgatgatcccttcaaatttggactgttttgggtggtgcacatcggatgcattttacaaagctgctgaaccatgtgggattgaggaggaccttcaacgtcggcgtgaaggtggtgtgccaccaaggtttctgattatagatgatggttggcaagagatagttgactattatccagagacgttgcatcagatgtttgttgcgaatgcaggttccagtttcaagctaccagggaattctgtgaaagactttcttgactctaaaactgcttgaagatacatgttttgggaacaaagtttcagaacaagcttcttgaagtaatcgatgcaagatcctgcatgtgtttagattctgcgtcgacttgagggcaagtcgaattttaaggaggagggaatgttacaccgccattgtcagatactccatagaaggaagtccgtcctgagtgggtactaactgcagccttgttgttgcggtcctatctaggagtaagtctctagcgtgtgaggctgtgtccctcggtcaccggttggtgagccatgttcctaagtagtcgtatatatgttgttggcttgggcagtaggaaggacaggtatgaactttactctgaatcaatacaatctgtccctgtttcctctccacacttatcagtgctggacataacccgcctttt

SEQ ID NO: 168845 - DNA, 463 bp, Zea mays
  Clone ID: MRT4577_85575C.1
aaaaaaaaaaagcccgggtttaggatatatatatatatataggatcaaaccatatcatcggggaccaattaatttgggggtccagcagacccaatcgggtcaaccaacatgcttggggacccacgttcatgagcccaaaaactggcgccaaacatgcggggggggggatagcaaaccgaaaaacttgggttttttttttttctcacacaccaaaaaatacctatgtttgggagccagctcggcctcacttattattggtcaaccccccccccaagctaaatagataaaaatcatttccatgggcgtcgaacgatgggaacaacagttggaggggtcgcacttgcagctgttacccgagccgaaggggggggcgggcttcccggactccgccggggccttgacgaacttgggcgcggccttttttttcggggccaccccgaggaccaagggggcctgcgcgggg

SEQ ID NO: 168846 - DNA, 848 bp, Zea mays
  Clone ID: MRT4577_85576C.1
acaaaagctgaacctcgaggcccctagggggattttctgttttttttttccaggatcaggattacaattgcattgcaaatttagtataataataatatatataagcatccagtccaccaatccccagtctacaatacactcacgcctaaaacacacgacacgacgctttgaaggtccatcttgagttgagcgcgcaacactagctcactttaggggtcgaccacaaacaaaataaagcgcgctgtcaagcttgaagaaatgagaaaccaagggtggtagtagcgtactatatagttagctatcactagacctcaacttgatggagaaccaccgggatgagctcatcagtgttagtgtggagaatagttgcaggagtagttgatgggcacgtgcagacgagtaactcctcttgcgaggggtcagctgcgttggggctttcacctgagcggggtctcaggttatcttctccaagaccaagtagagagcggtatgtacaaggaattcctccggggcctcaagttgccattccctaccatcaccagctttcgctccactccccatggcctcacccttcaaaccgatgccgtcggggagagcacgatcgagccgagcgggccggaaaaacggggcacggagcggtagggggcgcgctcggatcgatcccggacgacgacgcgcaagataccgactgggcgaggcgagcacgaaaccctagccccgaaggcggccgcaggcccgccccgcgcccgcgggggagaagggggaaaagggcagggcaaggcaagggaagaggcagagcagtgccgagacgaaactgagaactgcgtgataccccggcccggccggcc

SEQ ID NO: 168847 - DNA, 386 bp, Zea mays
  Clone ID: MRT4577_85577C.1
gcgtgggggttttttttttttttttttttttttttttagagagagaaaacagggcttaaacagagcatgaatcaacaccgtaacaagactgcagctagttatccataattcctaacataaccaacaccaacagttaaaatacaagtcctggcctttgtgggggcaaggtcccttctcacatcaaaggatgagtggtacacacgctggcaaatggcaatgttctcctccctcacaatacccaaaggaaactactgccctgatgcgagacagaatggtgaagctttggtgcaattcacaggtcctccccaggtgcgattatgatcctctcgagataaaaaaaaatcttccataggtgtatctgcaagaagcttatccaggaagctact

SEQ ID NO: 168848 - DNA, 449 bp, Zea mays
  Clone ID: MRT4577_85578C.1
ggggggaaaaaaaaaatgtcgggttaaaccaaaaaaagaacccgggaatcctggtctaaaagagggtttacttagcccggcgaaagggaacccaaaaaagcatacttaaaaaaaagggaggagaggcggggttaaaaaaaaaggccggaaaaaaggacccccggggaggcaactgttttccctcccgttaagggggccactggaaaaatttggcccttcgttcccgggtggtttcccggaggggggcccttgcaccccttgggggggaaaaaagcctgggccttcctccaaaaaaaaaccgggaatggggggcgcctttgccgggtccaaaaaaaaaccgggcagggcggccacctttggcgggtccggaatgggaccgggaaaaacgggaaccttttccctttccaccaccggggccaccacgggggtcataacggccacgggggggg

SEQ ID NO: 168849 - DNA, 467 bp, Zea mays
  Clone ID: MRT4577_85579C.1
ggaccccaccccaaggttttttttaaagaagggcccgggggggcttttttccaaacaaaaaaggggtttgttaaagggaagcttgcccacacaagggccccaaatttttgttataaaaaggcccatttttgaaaaagcaaacaccccaaaacaggctgggttttttccattccccggtgggcggggcacccgtttaaagcaaacggttttataaagggggggaccttttggaaaaaggggcttttaataaaaccaaaccaccaggccttaaaatgggggggggggtcaaacacaaatgcctggggggttcccaacaggccaaaagggacaaacccctggttaaagtcggcaaggctaaaaaaatttccaaaaagggtcttgcccttgggaaggggggccttgaacacctttaacacctttttaaatttttaagggtttaaacccaactttttggggggggggccccc

SEQ ID NO: 168850 - DNA, 662 bp, Zea mays
  Clone ID: MRT4577_8557C.1
gtcgatttcgtttgaagatcctgcaaatctgtcatctgtcaagtgcctgcagtttttgcgttgtgaaacggagtccctgccaggaaatctaaaatctctctcaagtctggagagtcttcatatagggcgttgccccaacatagcatctttaccagatctgccatcctccctccagcgcataactatatgggattgtcccgtcttgaagaagaactgccaagaacctgatggagaaagctggccaaagatttcgcacgttcgttggaagagctttctacaaataccgcactggcttccttagagttgccactttgaaataaatgagaaggcaccttgacgtcacccctcttctcttgaagctccagagttcaggctcaagtcagaagccaatccgtcgttaatgctgccgtccccgcggttccctgtttttgccgcttgtattgctccgctatttcagttgctatatcattcattccttggttgtgaacaagtgccaatatgtatttctctgacagaatgaagtgataactgactggctagggcttttgttttcatgtgcacaattgctatatcattcatgtggcaattagtataaatactccaggcaatgcaatagagaagatagttcattttcctgcaaaaaaaaaaaaaaaaaagcggcc

SEQ ID NO: 168851 - DNA, 252 bp, Zea mays
  Clone ID: MRT4577_85580C.1
actagaacactcccaacctctccagttttatcattttttttcacgattttcaagggggcttatggaagatttttgattttctcaaaaaccccaaaatccatacttacctcaaccccacatgaacccaacaagattgcacaacgcacatatcacaatctcttataaacaacatcaccctcacaaaatccataaacaaaaatcactaaaaacaaaaacaagacaacatggcccctttgaatatcccaaaaataa

SEQ ID NO: 168852 - DNA, 540 bp, Zea mays
  Clone ID: MRT4577_85581C.1
gaattgtagcataaaaacaaaatgatagcacaggatctcgtgttgtttatagagttggaagtttggtgatttcctgagaatattactgtcggccaggccacctgttaacaccaaccattctgaagaaaaaggatcatcaggattttttttcttaagagcaaccagaagccccaaagtgacaactgctgaaactggtcgagagcaaacaggaaaaggaaaccacccaagcctgcagaatagttggtgtttctggcacgccgccttactaccctctgctctgcattcatacgccacacgttccctcacagttttgcaagcaaatctaccaaaaaaaattcaagatgctagtgctaatgctaatacgagatattacagagaatagcccctggtttctgacaggcgacaggacaaacaggcactacacatctgtgtccaatctgtgagagagattttgcatgctttcctgcagtctattgacaattagggatgaaagtggtaatccgaactgttagaacaaatttaatattttaaaatagatat

SEQ ID NO: 168853 - DNA, 229 bp, Zea mays
  Clone ID: MRT4577_85582C.1
ctcggtaccctggttcacctgacggcggcggtgccacctcggccgccgccgtctcatagtagtactagctggtggtgacctggccgccacgtgcatcttggacaggaccgacatggccgtcttgaacattctctgaccacaccgtgccgggcttaacaggcgtcctcctcggggggccgaggtgccgggcgtagtgcttgaacgcgccaccggtgggtctgagcgccgg

SEQ ID NO: 168854 - DNA, 540 bp, Zea mays
  Clone ID: MRT4577_85583C.1
gatggcttcatttattgagcgatcatagtcatctgcattgtatgacaaattcaaaccttgtaataacagatgatgaaattgaccaaataatcaaaattataaaactaaaaggacatattccaatgactacaaccccaatccctggtcttgagtagagtttcgtttgctagaatgtgtggattcttttgtgtattcctgtttttggccaccgtaaggggtgcctggcttagtactggtcctgctggacctttttttgtacatcttcttaatataatgatgcgcaattctcttgcgtgagaaaaaaaattgcattctgacactagatttcagataccagcgaaaaatggttcagaaccaggaaatttaggatcattccaccatacctatacaatgtttgtatcaactttccaaaaagttacaacaaaaagctttaatattcactttacgtgtgctgctacacatagctgaggatgtgtgtggcgttactgcattgtattatactctttttcttcttaacacaatgatctaatggttgaaatc

SEQ ID NO: 168855 - DNA, 334 bp, Zea mays
  Clone ID: MRT4577_85584C.1
atgctgctctatgtggctgcctttgctttccatgcagccacaaggctggcccgcaggtgcgggttcaggccaccatgcatcctatccacgaggctggaccgcgccctccatggaaacttgtcatggttctacgaggacctggactgtatcatgcatgagcccgaggtctcgtctctggctcattgcaagagccaaggccggcttgcacggtacagcgatttcattgaataatgccttccatcatgcaacttggagctggtgccctataagaggccgtgtactatcaggcttcaacaattagcaggttgtcacttgctagcggcacaacatcatt

SEQ ID NO: 168856 - DNA, 381 bp, Zea mays
  Clone ID: MRT4577_85585C.1
cgagggtgcgcccccatggaattttgtgccctaccgtgaatcatagtagtgccgcaccgccattcctagtgttccagagaccagccagacaaacctctcgtggcacctgcgtgccctcctgcagtgacacgccaacagaagcttgctccatcggctcgcgtcggttacttatccctgttcaccagattcgtggagcgaggtcacgagtcacctttatgagcaagttggtacctggaatctcatgtcccaggtcaagaacaggttctcgatgatgaggcgcatggaggattctgctatgagttctttagacgtactagccgttttatcccaaaaaacttttggttgctggacccttacttccttttatgttatttttattta

SEQ ID NO: 168857 - DNA, 373 bp, Zea mays
  Clone ID: MRT4577_85586C.1
gatcggggtcgtggcctctgtggcgatgaacctcgcgtggcttgcgatgtacatccgccagcgctacggggagatcaccacggtggaggcgtcccgaggcaagccgccggtcactcaggactccgtcgtcatcctcgatcacggcgacccggtcatgtacgaggagttctggcgccgcgagggagacagcgcctcgatcctgatccccgcgtggcagacgatgagctacttctccaacctcggcggcatctgctgcttcctggagcctggcctcgagcgcgaggtgcggcgccttcaccggcttgtcggaaacgccgtggtcgatggataccatgtgatcgtcgggactgggtccacgcagctgttccaggcc

SEQ ID NO: 168858 - DNA, 160 bp, Zea mays
  Clone ID: MRT4577_85587C.1
cccacgcgtccgcccacgcgtccgtgcagatccgtctttgggttgtgatccatttaacatggctgcctgcgttctggtgccagcatctgggggtgttggattactgtatcgttatttggttccggtttgttggccggatttttacaattgcttatctggt

SEQ ID NO: 168859 - DNA, 883 bp, Zea mays
  Clone ID: MRT4577_85588C.1
ctgtcaaacgagtgctatggatattgcatgcctcgctttatatgcatccaggattaccaccaggcctccaccacttgtatgaagttacccaaatctattcacaacctcagattttacaggtttacaaatagaggttcacaaaacaagttcaaaaaatacaaacaggttcacaaacgcagaacatgagatcttcttttgattatgtgccatcttttttatcatacgaacgcttgagcatgttatcacgtgggtttcaaaagttgcaactactccacctcgcaaattttccttggactgctaggaggtcctatgattgctccatcctggctagcaggacctgtgactgcagccccttggctcctgtgactgctccaacatggcaaatttgccttggactgctctcccctggcaaccatgctccggtatcaggactacgagagtgacgacaaatgacagcgaggaggcagtgtgcacatgataggaataacaatcatgtctcctgcttcaactccaacccccataccaatgtgtggcacattcatgcgcacaacctccagtaaatcatgcaccagtaggtgcattgcagagacccttgacaaagtggccttggagcttctcctagtcatatgtttgggttcgatccaatcacgttgaagtatcttagatcatgacagccatgtctggttgctcctttgattttgtaaaatctagaatgatgtccactgtcattttctttgccttgccatatgggttgataggattcaaaattatacgatcacgatactcattaatcttgatatgagattacacatagtagagaacccgaatattgcagagtgatgagaatgaactaaataaaagcgcaacgcgtccgcccaccagg

SEQ ID NO: 168860 - DNA, 2519 bp, Zea mays
  Clone ID: MRT4577_85589C.1
gcctattgcgcaagtgtgccctcgtcttctttgatgctatacttattttcagttcatgcttggaagaccatcttaaacatttacaacaagtgttcgagctgttgtccagagatgcctggaaggtgaagatgaacaagtgttcttttgcacaaaatcaggtttcttatttgggacatattgtgtctgctgctggtgtcgctacagatcctgccaaaatccaagctatagctgactggccaaaaccagcaaatgtcaaggaattacggagttttctgggccttgctggatactataggaagttcatccgtcactttgggatcatttgccatcccttgcatgggctgctcaagaagggagttgtatacgtttggacggacgatcattccacagcattccacaccttgaaagcagctctagcatcagctccggtgctggccttgcctgatttttcctctcagttcactattgaaactgacgctagttcttttggaattggtgctgtgcttatgcagaaagggcatccattatccttcttgagtaaagcactgggccctaaatgtcgcggactttcagcttatgagaaggaattcatggctattcttgtagcggttcagcagtggcgtcaatatttgcagcatggcgagtttattattctcactgatcaccagagtctgtcccagctcaatgagcaacggttgcatactccatggcagcataaaggtgttcactaaactctttccgctccaatataagatcatctaccggcaaggccattccaatcgggtagcggatgcgttatcccgtcggatttctccagagattaatgctgtttcggaggtcgttccacaatggctcactgatgtccagaacagctatagtcatgatccggctgctcaatccttgatggccaaattagctttggatccttcggctgtgcctcactttactctcactaatggtctgctgcgttataagggtcgtatctggttggggaatgacaaagttctgcagcaacgactggtggctgctctccatacttcaccaattggaggccactctggcattcctgttacttatagtcgcctcaagaatctctttgcttggaaaaatatgaagaccacagtccaacaatttatacaaacttgccagatatgcttacaggcaaaaccagaccggtcagcataccccgggaaacttcaacccttaccagttccatctggggcctgggaaacgatcacaatggattttattgatgggctcccttcatcaggccatgccaactgtattctagtggttgtggataagtttaccaagtatgctcactttatccctttatcacatccttacactgccagctctgttgctcaagtgttctttgtcaacgtgtacaagctccatggtcttccttctgccattatctcagaccgggatccagtctttaccagcaacttctggcagcatctattcaaaatcactggaaccgatctgaaactcagctcgtcctaccacccccaaacagatgggcagaccgagcgtgtcaatcaatgtttggaaacctttttacgctgtttcaccagtgcttgtccaaaaaagtggaaggattggttgtctgcagcagagttttggtacaatacaagcttgcattcatccctcggttgttccccatttcaaacattgtatggccgacagcctaggacccttggtctcactatcaatgacgccggacgcgtgggcttgtgcgcttggctgcaggaacgctcagtgatgcaggagcttattcgtcagcatcttctgcgcgcccagtccagaatgaaacgacatgctgataaacacaggtcagagcgtacatttcaagagggcgattgggtatatctccggctccaaccatatgtccaagcttctgttatgccacgtgcacatcacaaactgagttacaagtttttcggtccctacaaaattctgagacagaattggacaggtggcatatcgactggcattacctgcttccagtcgcattcatccggtggtgcatgtgtctcaacttaagctcgctaaaggattcaaagatccagaacctcttccactacctgatgatatcccagagatcagcgttccattgcagattattcagtcccgaggcatcaccaagggcagtcggctcgtgcaacaggtcctggtgtcatggtccgggcttcctgctgaattggcgacatgggaagatcgcgaagcacttcaacaatgttttccctttgctcctgcttggggacaagcaggtcttccagagggagggaatgtcaaggacttcgatatgtcggcccaccaacaggagaccaatgtgcctcgaagacgcacacatcgtgttcgacgcagcaaccctcgcgtgtatgggcccgagtgggtctagagtccagttggtctggtgtaggcacgacctgggatatataatccttgtactgtgcctgaggacggcaagcaaaaacatattccggtaataatagactgcctagcctcctccgtcc

SEQ ID NO: 168861 - DNA, 289 bp, Zea mays
  Clone ID: MRT4577_8558C.1
aatgaacttggcgcttacatacagaatcagacctctcttcatctccaattgcagtagtgtctactccttgtgcgcttgtgctagcaagtgatgctacacaagtacacattccaagctgttgatccgctctccccgtcgtacgactacctcccgggccacccacggccagacaccaagcacgatgcaggtgaaccttgccgtgccgcgcgcctcttcggggcgccacgtggccgccaaggagcgcaaggccgggcgggtcccgccatcatcttcaagcaggagaacggac

SEQ ID NO: 168862 - DNA, 353 bp, Zea mays
  Clone ID: MRT4577_85590C.1
cgtgggcggcgacagcatccagcacactaatctgttttaatgcctgaacaaccatcgcccaacgaaggcgggctacgcgttgctgctgcgtccgttgagatctcacccgagccaggtctcgaggagacagcactaataatgtggtaggggcaccgttgacggggctaggtttcactaccggtacgacgactggggatgggtactgtgacatcactgaacacgaatgcagtctcggctttttggaggtagcgggagctggctctattaatagaagacagttgcttccaaggcaccaagacaagcagggtacatgtggtcccatatactgtaggtgctaggaagaatacaaaccc

SEQ ID NO: 168863 - DNA, 383 bp, Zea mays
  Clone ID: MRT4577_85591C.1
accatgaggggcaaaaacatgttgaattatactggtgcccccgccccttataatcttgttaaacttcgcatttcagaaaattgcatctcttccatatggggaaacaaaagcacacagcctatcggctaaataaactaaatccttttcctccgggacataaaggctccttgacacaccttgccctcacgggcggtcccctatcccccacacctatattggggatgctgttcttacccccgataacggtccaaaggctgccaaaccctaccgattgacacgaccctgggactgacctggctgtccccatacgcgcgtaacctgctttggctggtaccaaattttctttagtccagaacatgccccttcccccacttttaacccat

SEQ ID NO: 168864 - DNA, 166 bp, Zea mays
  Clone ID: MRT4577_85592C.1
cctcaatggcaacctacggggcatcttttaaagccaattgtgctctagataggctatttatcaactatgcagtccgtgcaacctactccattgatactggccgcacaccgatgattaatgacccttgatgaggctgtcaagtacaacagctccttgaacgcatttc

SEQ ID NO: 168865 - DNA, 474 bp, Zea mays
  unsure (1)..(474): unsure at all n locations
  Clone ID: MRT4577_85593C.1
ctgaaaatngggcgacccacgcgtgcgcggacgcgtggggtttgtctgccaaaaaaaatgcatactattaatgaggtagtaagatttcgatgcaggttacacttaattagacccataatctttttatcatcaagacctgtgcacttttgggtttcatttttgactgttacaactcttgggtcttcaccaatgatctttagtgccaaagttatgtgcatctatgttctccaatccccaagatgcttttaagtttctctctttcaattgtcgcacaattacttcgttcttttgatgcaccagtttattgttgagaatgttgaaataatgcttttcgctcatatatttaggttcattgaatttggaaatgacggtggacctgcagcgaagaccttgaagccaaagttcaatttgttcgtcaagctagtgtccaagaatactggactggggctgccgcatatggatataaaaactgtc

SEQ ID NO: 168866 - DNA, 347 bp, Zea mays
  Clone ID: MRT4577_85594C.1
tatatttactttattttcttactactttgtttaatattgattttcctttttgttttctttatttttatttattttttttttaaacccacccaaaagcctgcgtaggggtaaacaccaccccgtttaccccccccccatccaggggaaacaccacttggccaaccctttcccaattggaatggcgttttttgaaaaaaaacatccctttgttaagtaaaaacccccttttattccttaaaattcccccgagcccctaaaactaattattgctctataaaaataacccaagggacattattttttaacccaacccttgggaaaagggcttacccatttaccatatttct

SEQ ID NO: 168867 - DNA, 369 bp, Zea mays
  Clone ID: MRT4577_85595C.1
tgaaaagctaagtgtttggcagtctataataacttttggtggccagaagctgtaaaaagctgaaacaaacagggccgataaatctgtacaatcaacatattgtgaattctgaaccttttcagaacatgtttctagcagtgctcctgcagtcatatgtgacaaaatttagagatgtgatgtatctgttgttccttttgtacgtgaataatcatgttataagctttatgttgcatgaaagtaatttctttgtgcataactttaacataaaatgggatagaacatcaagaatgtatcagttccctgtgagaaacactcatgaatcaatctaagagaatatctttaagtttcgaagtttatatgcaagtatcg

SEQ ID NO: 168868 - DNA, 360 bp, Zea mays
  unsure (1)..(360): unsure at all n locations
  Clone ID: MRT4577_85596C.1
gacggacgtcttcattgcctctggggctgaggacgatgctgaatgtgagggcacctgccttagtctggccttgaacacggcttcttcttcagcggtgccgctgcatggatcatcatactgtcaaagcactccacgtaccatcttacggtccgtctccatgggaggagggcattgctgatcacaactatacgatgcatggtccactgtggtgcaagattctttctaccttttggagttgcactgacagaagttagtgctcaaggctcgntcaccaggcctaaatgcgaaaaccttatttctacgccagcttcatgaccaacaatctgattccctgttttgcaaatgaaagtgtttgcgcga

SEQ ID NO: 168869 - DNA, 416 bp, Zea mays
  Clone ID: MRT4577_85597C.1
acccacgcgtggcgattgtattgtcagcatgcgaagtgtgtgatgtatttcaatggactcatcgagatcgggcggcctgtagctactccataatgcttgtcaatgccggatgaaagtcgcatgccatgtgccaaggcacggatctcatactcgtacttcgcacactatgggtactgacaactgccaaggtcttttcggctgcaatgactagctaccacatatagtatgatagtgttgttagcgtgttcagagccattgcatcatgctggtatttgcggcttaaatcctgatataatggttactatgttcatgaacgaccccatatactggaccacctagaagcttgaattgactattgatagaatacgtgaaacgggttcataggattttacgcgtgcatcaagcatgcgaaagat

SEQ ID NO: 168870 - DNA, 334 bp, Zea mays
  Clone ID: MRT4577_85598C.1
cggacgcgtgggttcctctgactaaagcttgagattgagagctttcgaaacccggattcgtggagctaggagatgtatgcactgcaactctagatgggcattcgacaatgctggcaaactatgtttcagcgtgattctgcccggtataaaagccaactatggtcttgatgagtcgtcagggacggggaggcacatcatgaacgcctaccttgattccaaaagcttagtaattatacatatgctgtatcattgtatgatgcaagtgtgagaaactacttttatggctgtgtgggtgacgtatacaattattataataaaatgacggtttgggttg

SEQ ID NO: 168871 - DNA, 623 bp, Zea mays
  Clone ID: MRT4577_85599C.1
cctcgagccggccgggaactgatacccgcagagacaggagccctcatactcttccatctccgcgactcgaagttttccccaattcccccccctctccaatgctcccaccggcgccgctcccaccagacgacaacaacaagagagagcgtctcccgacccacatcggaacagcgtgatcatacacgtcaaaaacggctgctaacattagtgccgccaccacgatgtccttcctgatgatcgacagacggccgatgacaacaccatagatcacagatgatgacgtcttcaacatcttcttcagaatgactgctgctaagaaccaccccccccgaagcgtctttgatcgacaagcccctgctgtcaacgatgaggggactgctgcgaaccaccagctcttccaccctgatgagcacatcatcggcgaggaggatgacgctaacaacaacttccgtcgtcactactacaccgttgagaagaatattgatcagcggcgtcatcacagcctcaagaatgttgacaactgtagcgctctccaccagttcctgctcttctacgacgctggtggtggaaccacggtctgctcttgttgctctcctcctcgagcagctgccggctgatgacta

SEQ ID NO: 168872 - DNA, 541 bp, Zea mays
  Clone ID: MRT4577_8559C.1
cagagtccctgcctagaatctaaaatctgtctcaagtctggagagtctttctatagaacattgccccaacataacatctttaccagatctgccgtcctccctccagcgcataactatattgtattgccccgtcttgatgaagaattgccaagaacctgatggagaaagctggccaaagatttcgcacgttcgttggaagagctttctaccaagaccgcaccactttgaaataaatgagaaggcaccttgacgtcacccctcttctcttgaagctccagagttcaggctcaagtcagaagccaatccgtcgttaattctgccgtccccgcggttccctgtttttgccgcttgtattgctccgctatttcagttgctatatcattcattccttggttgtgcacaattgccaatatgtatttctctgacagaatggagtaataactgtggccagagcttttgttttcatgtgcacaattgctatatcattcatgtggcaattagtataaatactccaggcaatgcaatagagaagatagctcat

SEQ ID NO: 168873 - DNA, 156 bp, Zea mays
  unsure (1)..(156): unsure at all n locations
  Clone ID: MRT4577_855C.1
ctatttnnnnnnnnnagagnnnnnncaanatagaaatcttactcaattcttgcacagctgagggtgatataaggccgtcagatgcacagaagagccatgaaaaaagctggtggcccaaatttcttatatcacaaacatacttggctaagaacaccg

SEQ ID NO: 168874 - DNA, 215 bp, Zea mays
  Clone ID: MRT4577_85600C.1
tggccccatgccgaacgcgttaccgcctttgcgggtcgaccgacacattgggtgaccaacttcgaacccgagcgtgagttcaacctgaagcacataaccccgatgctgcttgatgacttacgctaataagtccgtgttctgcaattgacgaatcataggccatcttcggccagcggacctatattactgagtccagggccaaagacgaactgttt

SEQ ID NO: 168875 - DNA, 367 bp, Zea mays
  Clone ID: MRT4577_85601C.1
aattcggcacgagggcgcactggactctcccagatctgctctgattcctcatcagtctcagggcttcagccaatcgtctgctaattaatttccttcccctgttggcatgttccatcccgaattaatccccacttaatttatccgcacattctctaactctgaatcatttccaaatcagccagtcttaatttcttgctacgcttggtgattttttttttgttggcatcacgcgcatccactttgacgaaagctggtagagtgacaggtctctgtctctcacctattggcacatcgtttcctccgttctggaactggaagctggaaggtgaagttatcttggacaacagcagcacaagcgagctgtgga

SEQ ID NO: 168876 - DNA, 173 bp, Zea mays
  unsure (1)..(173): unsure at all n locations
  Clone ID: MRT4577_85602C.1
gcgtggggctttcttataactaaagaagccacaggacatcagacaaaaactttattattgaactataactcataaaaaatctaaaagactgccccgtcgtcccctctaaaggtccaattccattacactctcaaacattactaatttttggtgtcgtttggcccaccttncct

SEQ ID NO: 168877 - DNA, 397 bp, Zea mays
  Clone ID: MRT4577_85603C.1
gttccggtattgaattgccgggtcgagcgacccgtcaggtacgatcggacaccagctttgaccgtctgacgtgccctgcgctacggtcccgttgctacatacggcactagcccgcatgtggggggtgaggctgtcctacgtaacggccctatgactgagggcgcgcctgagaacagcgactacaccaagtgctacaacatcctgggggtgccgaattaggcgttcgacgacgacctgaagaaggcctaccgcaaggccgatatcaagaaccacccccacatggtcggtgaccccgagaagttcaaggagctcacacaagcctatgaggatttgagtgatccagagaaacgggagatttatgatcagcttcgtgaagatggcctgtatgaatgaatgg

SEQ ID NO: 168878 - DNA, 211 bp, Zea mays
  Clone ID: MRT4577_85604C.1
cgtccatttttttttttttttttttttttttttttttttttgggccactccaacatgcattttctctgtaaattgggtagggacacgctggtgcatttacagtacgtacgggcacaaccaccatttttacaattacaaacccaaaaactacaagctcgactgaagattcaccgggtaaaattggaacgtgcgtggaatcgaattacctgac

SEQ ID NO: 168879 - DNA, 339 bp, Zea mays
  Clone ID: MRT4577_85605C.1
ctgggaggagaagggcaaactctggcatacacaaattcaacggctaaacacgtctgtctccaggcaagcacactcactttaagcatttctcgtcaagcaaggcctccccctaaaaaggctcctggtcctcaatcatcggattggcacgctccttctgggcctgatcaaaaattgccaccttagtccactcctatacctccatggtatatacctcattcattacaaacttgggaacatactagccactggagagccaaagggcccttaccttcaagggtggctcatagcctataaccaacattttctcaaaagcatgcttgggggacaaggtcatccgct

SEQ ID NO: 168880 - DNA, 197 bp, Zea mays
  Clone ID: MRT4577_85606C.1
acggcttcctcccagttcacctgttgggcctccgagtggactgggatgaccgctggatcaacgatgtggaagacagctacgggcagcagtggacctatgagcagaggaaaatcgtggagttcacctgccacacagccttcttcgtcagtatcgtggtggtgcagtgggccgacttggtcatctgtaagaccaggagg

SEQ ID NO: 168881 - DNA, 463 bp, Zea mays
  Clone ID: MRT4577_85607C.1
ccctcgcgtccgcggacgcgtggggtaatctccacagctagctcacgcacgattcccacactagctataggcagctaggctactgtatatagccagtcaccaccaaagtgtgaagtgtgtgtgcgtgtagtgcaagctacctgtaatatatatacgcttgaggcgtcacctcacctagctagctagcggctgcttcaaagctctatatgagcttggttgttgcggcgccaatggcgatcgtcgagttggccaacgcccagctgcagcagcaagccgcagcggcggccaagaaagacggcggcggccacgagctggaagatgggggcggcggacgcggacacgagcacgacgtatgggtatgagctgcaagcggagcgagcagcagcagagctggtgaggtcgtcctcgtcctacgactacgactacggcgccctgatgaaaggcgtgaggcacctctcggaca

SEQ ID NO: 168882 - DNA, 511 bp, Zea mays
  unsure (1)..(511): unsure at all n locations
  Clone ID: MRT4577_85608C.1
cgaacagtcttgttcctcccccgacaaataaatagatgatgacggtataagtctttataaatcataaacttacaatgcagaatcataatagggatacttagatcgctgcctttggaggccatcctcatcatgcagtgttgggacctacatctacatctacctctacctctcctagctggtgtcagtgcccttaccactgtcgttggttgcctatttatcagccgtctcattcgtggcttcggtggcatcaacgccaaccgtcctagtcttgtcattgtcgaccttctccgcatggttggtatggtcgttatcgttattggtaccaacatcattgcacgcaatggtggcctcgcggtcatcaatacgcccctcagcctctcctagccatttctattacctcncttacngccaaacnngtcagcaattattactggcttcctggttgcccttggccgtagcgcccntcgtcaatgtgctcggcggcccccgttcccatctcagtatcatgttt

SEQ ID NO: 168883 - DNA, 151 bp, Zea mays
  Clone ID: MRT4577_85609C.1
aacttcacttcgtccgctcaattcatcaactccacaactctcgcgcgcgagtctccaaacaatctctgctgctccagccttctcaacccaaaaccacctcggccccacttcttctctctcccacccactgtttgcccaacccataacgacc

SEQ ID NO: 168884 - DNA, 4625 bp, Zea mays
  unsure (1)..(4625): unsure at all n locations
  Clone ID: MRT4577_8560C.1
gccggccccggcgcaaccggcacccaacacatcaaaatacccatgttccaccgctatcctctccaggtgaccagtcagcaggaagcagcacccccgttctcctccaaaactgaagccacatagtccatcttcaagaataaagctccgcggcctcgtgctttacttcacttctagctccatgctcccatgttgtcctttacttggagaaaactaccaatcaccgcactttcgaacccgtcccacgttttcgcacgttcgttggaagcggtttccaccaacaccgtcctggattccttagatctctccctttcaaataaatgtgcaggctcgttgagctgtaccctcttctctttaagctccagagtccagggttaaatcagaagccaatccgtcgttaatgctgccgtccccgcggttccctgtttttgccgcttggatttctccgctataacgtttgcaatatcatccatttccttcgatgtgcacactaaacaatatgcttatcctagtatggaaatgggtcatgagatccgccaactataagccactgaactgccacagttcgaactggtgattcatgcgactcagtatagacactacaggggcatactggaggaatggctctggcgtctcaaagaagcctaatatgatgccgaggacttgttggacgagcatgagtacaatgtccttgagggcaaggccaagagcgtttggcgtctcctgctgggagagcatggaagctcctccactgcaactactgtcatgaaacctgttcatgctgctatgagcagggcacggaacttgctccctcaaaacagaaggctaattagcaagatgaacgagctcaaagcaatcctgacagaagcccaacaacttcgagatcttcttggtttgccacatggcaataccgtcgagtggccagctgcagcacctaccagtggaggaatggggaagtccaccttaacttccaaggtctacggtcgcgacagggatcgtgatcgtatagtagattttcttctcggcaagacaacaactgctgaggcaagctcagctaagtactcggggttggccattgcgccttccgcctgctacagcgcgcccaccttagcacagtatgtctataatgacaaaaggatagaagaatgctttgatatcaggatgtgggtgtgcatctcacgcaaacttgatgtgcatcgtcacacaagggagattatagagtctgcatgcgcgggagagtgcccacgtgttgataatctcgatactctccagtgcaaattacgtgatatactacaagagtcacagaaattcctgctggtcctggatgatgtttggtttgnnnnntctcataatgagacagagtgggagttattccttgctccattagtctctaaacagtcagggagcaaagttttggtgacttctcgaagtaaaacacttcctgccgctatttgttgtgaacaagaacacgtcattcatttggaaaacatggatgatactgagnnnnnggctcnnnnnaaacaccatgctttctctggagcagaaatcaaagaccaactgttacgcacgaagctggaagacactgcagtggagattgctaaaaggcttgggcaatgtcctttggcagcaaaagttctgggttcccgattgtgcaggnnnnnggatattgctgaatggagagctgctctaaagtttggagatttaagtgatcccttcacatctctgttgtggagttacgagaagttagatccacgtctgcagaggtgcttcttgtattgcagcctttttttactgttcggattgtccttttttagagctagcacgtggagcagaactaatgccgttgaaccttgatggagacctccacatccgtggctgcattcttgcagctgattcgttcattaatggcttgccacatctgaaacatctttcctttgatgtctgcagaagctccccatccttatcgattggccacctgacctcccttgaatcattacgtctaaatggtctccctgatctttactctgttgaaggcttgtctgccctgcaccttaagtacctaactctacaagatgttgcaaacctcactgtcaagtgcatctcacagtttcgtgtccaggaatcgctcacggttagtacctccgtattgctcaaccacatgctcatggctgaaggatttacagtcccaccgaatcttgatctttcatattgcaaagaaccgtcggtttcatctcgttacaacagcnnnnntttgccagaatctattggtgagctgaagcacctccggtatttgaacctcatcaggacgttagtttctgaattgcctagatcattatgtactctctaccacttacaattactttggttaaaccacatggtggagaatttgcctgacaaactatgcaatttaagaaagctacgacatctaggagcgtacgtgaatgatttcgcgattgaaaagcctatttgccaaattctgaatataggtaagttaacgtcgctacaacacatttatgtcttttctgtacaaaagaagcaaggctatgagttgcgacagttgaaggacttgaatgagcttggtggcagtttaaaagtgnnnnntcttgagaatgtcattggaaaggatgaagccgtagagtcgaagctatatctgaaaagtcgccttaaagagtnnnnnnnnnnnnnnnnnnnnnnnnnnnnnnnnnnnnnnnnnnntattctagaaggtctgagaccaccaccccaactgagtaagctcacaatcgaaggttacagatctgatacatatcctgggtggttactagagcgatcctattttgagaatttggaaagttttcagcttagtaattgcagtttgctagaaggcctaccaccagatacagagctccttcggaattgctctaggttgcgtataaactttgttccaaatttgaaggaactatctaatcttccagcaggccttacagatttatcaattggttggtgcccactgcttatgtttatcaccaacaatgagctaggacagcatgacttgagggaaaatataataatgaaggcagccgacctggcatctaaacttgcattgatgtgggaggtggattcaggaaaagaagttaggagagtactgtttgaagactatgtatctctgattcggtnnnnnnnnnnnnnnnnnnnnnnnnnnatatcaaagcatcttcaaattattggaagtgttctggttnnnnnnnnnnnnnnnnnnnnnnnnnnnnncatcaaggcatggctcttttgccatgagcagaggataagattcatttatggaagggccatggagatgccattggttctaccgtcaggactctgtgaactttctctttcttcatgcagtattacagatgaagctttagctatttgccttggtggcctcacttcactgagaactttacaattgaaatataatatggcattaactacacttccatcagaaaaggtgtttgagcatttgacaaagcttgatnnnnnnnnnnnnnnnnnnnnnnnnnnnntcaaatcactnnnnnncttacgtgctgctccatctctttcctgttttaactgttgggattgtccttctttagagctagcacggggagcagaactaatgccgttgaaccttgctagcaatctcagcatccttggctgcattcttgcagctgattcgttcattaatggcttgccacatctgaaacatctttccattgatgtctgcagatgctccccatccttatcgattggccacctgacctcccttgaatcattatgtctaaatggtctccctgatctttgctttgttgaaggcttgtcttccctgcaccttaagcgcctaagtttagtagatgttgcaaacctcactgccaagtgcatctcaccgtttcgtgtccaggaatcgctcacggttagtagctctgtattgctcaaccacatgctaatggctgaagggtttacagccccaccaaatcttactcttttagattgcaaggagccgtcagtttcatttgaagaacctgcaaatctctcatccgtcaagcacctgcacttttcatgttgcgaaacagagtccctgcctagaaatctaaaatctgtctcaagtctggagagtctttctatagaacgatgccccaacatagcatctttaccagatctgccgtcctccctccagcgcataactatattgaattgccccgtcttgatgaagaattgccaagaacctgatggagaaagctggccaaagatttcgcacgttcgttggaagagctttccaccaaaatcgatctggcttccttagagttgccactttgaaataaatgagaaggcaccttgacgtcacccctcttctcttgaagctccagagttcaggctcaagtcagaagccaatccgtcgttaatgctgtcgtccccgcggttccctgtttttgccgcttgtattgctccgctatttcagttgctatatcattcattccttggttgtgcacaattgccaatatgtatttctctgacagaatgaagtgataactgtggctagggcttttgttttcatgtgcacaattgctatatcattcatgtggcaattagtataaatactccaggcaatcgaaaaaaaaaaaaaaaaa

SEQ ID NO: 168885 - DNA, 297 bp, Zea mays
  unsure (1)..(297): unsure at all n locations
  Clone ID: MRT4577_85610C.1
ggcggcctatggttttattttttttacaaattcacaataataggggagtgggatatacgtggtgcgggcacatccacgctacatatgcaaacnnnaagatttccgtggatggtacatcatacagacacgaggacacgacaggaggggggtccacaactcatgggcgggtaggatggatggatggatgggcaaacggggatgcgtggtggagctgggcgtgcanaggacacgtacgacgggacgagggagggcggactggcacgctaggtgacacgcgcacactggaggcatggatgg

SEQ ID NO: 168886 - DNA, 945 bp, Zea mays
  Clone ID: MRT4577_85611C.1
atgccaagtgataaggccccagggccagatggttttacaggaattttctttaaggagtgctgggacatcatcaaagtggatgtgctggaggcctttcaccaactccatgccatgaatggagctgatttcaagttcttgaactccgcaaatatcgtgctcattccaaagaagccagatgctaagtcagtgggagactaccgccctatcagcttgatccacagcatagcaaaaatcttctccaaattacttgctaaccggcttgccccccttcctgaacaacttaatctccaaatcctaatctgtcgctcctttctttggaaagggaaggccgagtcaaatggtggtcactgcctcgtcgcatggccactagtttgcaagcccaaagccctcgacggcttaggtgttctcaaccttgacaagttcggacgcacccttcgctggctttggaaggaatggacgagatacgttcacccatggaaagatttggaagtgccttgtaatcgggtcaacagattgctctttagcgcctccactactgtcacaattggggacggtaagacagccaagttctggcacaatagttggctcgatggcatggctccaaggaatatagccctgcacctcttcgacctaatatcgagaaagaacaattcggtttcccgcgaacttagcagagagcattggatcaaaacactgagaagtaggatcacttccactgttcaaattgaggagtttgtctctctttggactagactttgtgatttccagctgcaacctgactcaccggataccattgtctggaatcggtctcttgatggtatcttttcagttaaattggcctacagagcacagttcattggttcgtacagtcaccttaatgctaactttgtctggaaggcacacgcagaaccaaaatgcaatttttttgcttggattctcctgtag

SEQ ID NO: 168887 - DNA, 187 bp, Zea mays
  Clone ID: MRT4577_85612C.1
cttacattgtatggtgtctagaatgttttgtttatatcaagcttttgatagctacatctttaattaggtaaagaatctaatctgctactatgaatttataagaaagaaaagatctgcttctttgtgttatctttgttggtgactctttccagtcatatgtagccttttttttataccgtatgttcat

SEQ ID NO: 168888 - DNA, 653 bp, Zea mays
  Clone ID: MRT4577_85613C.1
ttgggtacctcgaggccggccgggctttttcttcgccgtcggttttcctactgaggcttgtaaattaaatagcataaaatatgccgccaaaattcgatccaagtgaagttaaattagtgtatttgaagtgtgttggtggtgaagttggtgctacttcctcactagctcctaaaattggtccatcgggtttgtctcccaaaaaagttggtgatgacatagcaaaggccacttcggaatggaaaggtctgaaaattacagtatgcttgaccattcagaacagacaagctgccatttctgtagtaccctctgctgcttcactggtcattaaggctttgaaagagcctccaagagatagaaagaagcagaaaaatattaaacacagcggcaacatcacctttgatgacattttggctattgcacgcaccatgagacccagatcgatggcacgtcacttagaaggtacatgcaaggaaatcttgggtactgcccaaagtgttggttgtaccgttgatggtagaccaccacatgatttaattgatgacatcaacagtggcgccttggaagtgcccgctgagtaaactttttttttatgtttggaaaaaaaaatataaatatctatgaaactacctaaaaaaaaaaaaaaaaaagcggcc

SEQ ID NO: 168889 - DNA, 301 bp, Zea mays
  Clone ID: MRT4577_85614C.1
taaaaaaaaatattaaaaaaaaaaaaataaaattaaaaaaaaaaaaaatttaaaaaaataaaagggaggtatttaaaagggggaggatcctttattcttactcaaacttacttcacgatattttttatataaagtcatctaaaatataataaactggcctaaatttaatatagtcgtaatagataaaaccttgtggtaacgcaaataaattcatttgaaaaacattagtctttttaaaagaatagtttcattttctaaaaaggacaaaaagaaatggccctttgtcaacagttgtttaaaa

SEQ ID NO: 168890 - DNA, 955 bp, Zea mays
  Clone ID: MRT4577_85615C.1
ccggcaccgcgcgcgcgcgggaaagcgagaccacgaggccagacgacgcataaggttgaaccataacatagatctgcccaagcccttatcaagttgaggtgcacggacacctgcagacaggatagccgcaatacgcacatgcatgtggcctgggggacaggttgctcttatctatcggcaagctggagctggagatgctagctgctgttgctgcgtgcatgcgttgttcttctttagccgtgtcaggcatggacctgactagaaaccaaccgaattcctgagtttcttctctttttccccccttcgcgtacgtacctgcgttgcgctgcgcagggcatgtgacgcagccatctcgaacttaacgagagcgtcgtgcgccgacaccacttcgtgttcgtggctgtagactctctctgcgccggcctgtgcctgtttccacggccaccggtcactctcttcccgaggagctagctagctagggctgtcctgatccatttgcagagccgccatgccaggtccagttcaccgcgccgtccacttgcgtgaattgcttgctcgtataggcgcgcggaagtccggagagtacgtccggataataatctttcctctcggtttgttccttgccgacgatcgggtagagaagacaacttgacgcctaacaccatctcattgttaccgacgacatgaaacgtccacgtgacaaggcgacagatgagccatggcaatgagattgaagacggcaatgaagtgatcgagcatccatgtagagtgcttcccaaaaactttatttaccctctcctgatacaagatctctgggggcaatagttttggagacctgctctcttgtttgtcggtgcacgcgaatgattaggaagaagtatcatacgcacgacgctgtaggcaggaagcagggacgaaactagatgctttggttgtcccggccggcccggccggc

SEQ ID NO: 168891 - DNA, 422 bp, Zea mays
  Clone ID: MRT4577_85616C.1
ccatccccgctccaattcccccaccccgcctcgccggaaccctaaccctagccccgccgccgccgcccccgccacgactacatgagggagatcctccacatccaggggggtcagagcggcaaccagatcgggtccaagttctgggaggtgatctgcgacgagaacggtatcgaccagacgggcaaggacgcgggcgactccgaccgccagatcgagcggagcaacgtctactacaactcaggtcttgtggcggcccgctacctgcccctgcgccgagtctcatggaacctcgaagaccgccaccataggactcgctgagctccgggtcctacgggcagatcttccgccccgacaacttcgccttcggccactccggcgcgggcaacaactgtcccaagggccactacacccaggtcgccgag

SEQ ID NO: 168892 - DNA, 1455 bp, Zea mays
  Clone ID: MRT4577_85617C.1
atggatcctaagggcaaggagattgttatcaacgacaaggaggagatcctcaatgtttatgagccaaaaggtgacaagatcaccgactcaggctcaaacaacaaaaggaaggatgggaagaagaagaggtgcatcaagaagataatatactacgatagtgacacctcctcttcttcaccaagggacaacgacaacggagattcctcgtcgaaaaataaaacggttaatcaaaactattcttttgattattctcgtattccttacaattcaaatgcacatttgttatctattccacttggaaaaccccttcactttgatggagaagactattctttttggagtcataaaatgcataatcatctattctctcttcatcctagtattagggaaatagtgcaaagtggaatgcattttgatagtagcgataataccgtatttattaatgagcaaattcataagaatacccaagctactactattttgttagcatctctatgcatggatgagtacaacaaggttagtggcttggataatgccaagcaaatatgggataccctcaaaatttctcatgagggaaatgatgccacaatgatcacaaagatggaatgtggaaggagagctgggtacaccaagatgacgcccgaggaaattctcagaaaatttgtaagcgggtgcatgatggtgaaggaagcaaggtatgttgatgacattaccaacggaccactgcccctctacgagccgcagctcgttgcactcaaggcaacaaatagcaaggaagtgctaccaaacaaggtggcacaagtggaggttgccgcgctcaatgacgaagagatggcgcttatgattaagcgcttcaagaccacattgaagggacgcaaggagtaccccaacaagaacaaatcaaggggaaagtgttcttgcttcaaatgtgactatagtgatctctttaagggtttagatagatcaaaagtagataaaattaatgagttaattgatgcccttaatgagaatgataggttgttagaaaaacaggaagatatcctttatgaagaacatgataaacttgttaatgttgaaaaatgtcttgctatagaggttaagaaaaatgaaatactttcttctgaattgtcttcttgccatgagtctatttctagccttaagagtttaaatgccgatttaaatgctagaatagagaaattgaatattgctagttcatctgtggagcatgtttctatttgcaatagatgtaaagattttgatattgatgtgtacaatgatcatgcttctactatttatgcctacaccattggtagacatccttgcattaacgatggacttggtttccaaaagggaaccaagaacttaacgagccaaagggcctccaacctcaccaaggagaaagggaaggcaccctttgtgggggacagatatcccccgggtccactagaaggataa

SEQ ID NO: 168893 - DNA, 233 bp, Zea mays
  Clone ID: MRT4577_85618C.1
ttttggacgtgatccgcctatccaagagggggggctataaaaaattttggggggaataaaaaacttgggacttcatttggattgcctgctgctagagattgccttctaggacagtcagtcttccgatgctcacggtgtcttcttactcccaggagttaattatcgaaatcgacacttttataggtatggaaagaaccgttctctttcaagaacaccacttaggagatttggga

SEQ ID NO: 168894 - DNA, 560 bp, Zea mays
  Clone ID: MRT4577_85619C.1
acccacgcgtccgatcaagcacggccgcgacaacgacaaagcgaagctgctctgtggcggtccagaaacaccttcctgggtctcttcgcacagcgacaaggcctaccacaacggctactgggtccaacccaccgtcttcacaaactgcaccgacgacatgaaaattgtgcgcgaagagatcttcggccccgtcatgtctatactcacgtataagactgttgaggaagtcgtcgagcgtgcaaacgccaccgacgtgggtctcgcggcaggtgtcttcaccaaggatcttaatctcgcgcataaagtcattgctcagcttgaagctggcatcacctgggttaacacgtggggtgagagtccggctgagatgagcgtgggtgggtggaagcagagtggtgtgggtgtggagaatggcaaaaaggggttggaggcttgggtgcggaataagagcacgcttgtggagatgggcggaagtgtgccgactgttttcaccaagttgcaggttggggatggatcaaagctgtagtgctgtttagatattccatgatatttccctgcgg

SEQ ID NO: 168895 - DNA, 271 bp, Zea mays
  Clone ID: MRT4577_8561C.1
tgtccagcagactaccctcccaattatatgttcattttgtatattttttggtcgggggaaaaattcacctgcagtaaaaaaacctttgaccatttttatgtccattggatactttcctttttatcatcttaaaaaaagataactagtactaatcattgtagtggcctaagtgtgatttaactcttgaagtcacaccctccgaaagatgagtagaaaccagcaccagcacagcccagatcatttgtttcctctccttttcctcatttattcc

SEQ ID NO: 168896 - DNA, 386 bp, Zea mays
  Clone ID: MRT4577_85620C.1
gtgaccctactttagacgagtagcgtggaatactacgatccaaagctctctctagtcgcagggcggatccatgtctaagaactacccgaccgtgagcgccgagtacagtgaggctgtggacaagggcaggcgcaagcttcgagctctcatcgccgagaagagctgcgccctgatcatgctacgtctcgcgtggcactccgcgaggacgttcgacgtgtccactaggaccggcggtccattctgctcgaagaaacattagtcggaattggctcaaggcgctaacgctgggctggacattgagaggcggttgctcaagctcataaaggaggagttaccaatcctgtgttacaccgattaataccagctctagagagttgtaggctcaa

SEQ ID NO: 168897 - DNA, 408 bp, Zea mays
  Clone ID: MRT4577_85621C.1
gcgtccggctgatgatacgctgcttgcttacatctccgagaccagaccatcttctgattcaccagtccagactaacttccatgaagtcccaccatcaggagaagggctaccactttattctgattttttctttttttactttttctttctcctttctacatcttctttcctttttctttcttcttctatcccttctttttctcttctcttttctctttccttttttttttctctcacttctttttctctctttcttcttccctctttctttcttttttttactccctcttcatttttttctttcccttcttttttcctcttttcattttatctttcttttttcttactctctcctcttctctattcttatttttttattttctctattttcttttttctttttctttc

SEQ ID NO: 168898 - DNA, 684 bp, Zea mays
  unsure (1)..(684): unsure at all n locations
  Clone ID: MRT4577_85622C.1
tcgaggcctgccgggagcagaccgatgggaggaagcacgngcacgtcgatcgacgaacgcgcagcatgccggcgctaacgataggctgaggcggccgcaagctgcagttggtctccagccatctggatgatagggatccactgactgcgtaggcgaggggtacgccattagtcatctatcacccagcgcgacttcatagcgcgggcgcacgatggacatggtggggatggcggggcacgtcaaggagatcgagaagcgtggggcgaagtggctgcgcatgtcgagctgacgacgggcagtcccacaggcagcggaccaaggtcggggaggcgcacggtggcaatgcgctacagaagcaggcgccgatgaaggtgatgctcaggatcactcgtgaccgggcgagggacgccatccaggcagctggacatgtgggaccaacacgagaaggacgcggcggcgcggagcatgccgagcggggcgctccacgtgaggcatgaccgacaaggccgggaagctgagctacttgtaccctgacagcaaggcgcggaacatggacgaggtgctgcagcgctggcgactcgctgctcaccgacgccaagcatgggagcaaggtggtgacgctcgacaactggaagcccgaggagtgcgccagcatcacgctcggcgtcttcgacgaggaggaca

SEQ ID NO: 168899 - DNA, 130 bp, Zea mays
  Clone ID: MRT4577_85623C.1
ctcgagccgctcgagccgttcagactatcacgagctgaagtacaaatccaggtcgcagtttagtacaccggtgatcttgaaagatggccaaattagtttaatgggtgagggctccccaagcattgttggg

SEQ ID NO: 168900 - DNA, 333 bp, Zea mays
  Clone ID: MRT4577_85624C.1
gcgagtaagattatacccctgttttttgcgtagagaggaaagtcgtgtggcgcgtgctaggagtgagatggaggggatgaatcgcaaatccttgatgctgtcgcgaaatccaagtctatttagtgatggtaagctaatttattattactgttgattgaattattagatgaatggaatggatatgtatagcgggtatatatgcatcatgagttagcggaactacctcttcgtggatagtgacatgattgtattcatgagtataggtaaaataagtgatgacggtattgttgttcgaatctgcacgtatagttttgattgtgcaactaattgagt

SEQ ID NO: 168901 - DNA, 321 bp, Zea mays
  Clone ID: MRT4577_85625C.1
caggagaggacagcccagcgcgcggcatgaaagccaacccccgcgaaaagagctcccgccgcaagcgccggaaggcgcactatatggccccgtcctccggccaccgcgtgctcatgcacggggcgctatcgacggagctccgccacaagaacaatgtgcgtaccatcccgagccgcaaggaccacaaggggcaggccgagcgcggcacctacaagggccgcgagggcaaagaggtgcaagagaaccgccgtcgctgggccatccacgttgagcgcatcaccccgcagaaggcgaacggctccaccgacgaacgggggcagt

SEQ ID NO: 168902 - DNA, 513 bp, Zea mays
  Clone ID: MRT4577_85626C.1
cattggtacctcgagccggcggggaaatttatggagcgcgactacaactcagtgttcaaatccggtctggcgaaatctatccaccacgcccgtgttttgatccgacagcgccatattcgtgtcggcaaacagattgtcaacgtcccttccttcgttgttcgtctggacagtcaaaagcacattgacttcgcactcaccagtccgtacggtggttctcgcgccggtcgtgtcaaacgaaaacgcgcaaagaaagccgatgccggtgaagacgctggtgaggaagacgaggaataagcgtatcgtccataatgaagccccccaacttgatattgccattaagcatgaaaatccgacgatttcgctgcattgccgctgtcgtgtagatctatcactagtcctgaattgtagtagactcaatcgttgttcttgttgccctgctagggtccttcacagagcagttgaaactatgaaatcgtctttgctacccccaaaaaaaaaaaaaaaaaagcggcc

SEQ ID NO: 168903 - DNA, 230 bp, Zea mays
  Clone ID: MRT4577_85627C.1
gggtgcgcgcctaattttttttggttttcatggcttaaactctcaaaagtggaaaaaaagaataagttagatgcaactcactgaaactggtagaggtagaacatcacaacctgtacatatggggaaagtaaaatatactatcatcgccgagccttaatggaattcattcttaggccagaacccgcggattcagattccgaagtgcttgccattctaaaagacctggctta

SEQ ID NO: 168904 - DNA, 659 bp, Zea mays
  Clone ID: MRT4577_85628C.1
ttgggtacctcgaggccggccgggaacagttctctactcgttacatcctagcgattcactgcacactaccaaatcacgagaatgaatcgacagtaaatggtatctttgccgcactcgcgaccgccggcgccagggccgctgctggacttctgaccgtctgctcctcgcccgcactgtggcatcgtgtgccggagaagggcgcggtctacaactaccactccatccaccacctggagaccgtcaagttgatcctccgcttcctccacatgctcctcaagatggacaagctgctcatccacggcaccaccgactgcaacacagactattgcctccacatcatcggcgatgactgctggaactgctggcacgttctctttgaagtgaatcccctcgaccgagagctggccagagactgaatcgcttagatggagaaggacacctatgacgaccagactcacctgagaaagatcatccaccatcgctcggatctggggaagaaggagctggagaaggctctgaataccctgcaggaagatctcacggaaaaagatttcttcagccaaggccgcctcccgtgcctgaaggtatatctggagccctataagagctcgctgctcaacaacagagaatgtatgccggagtctccatacacgaggctg

SEQ ID NO: 168905 - DNA, 832 bp, Zea mays
  Clone ID: MRT4577_85629C.1
gacccaaaaaaatcctttgttttttaatatgcaaatttgtaacctaagaatatttgtctctctctctccctttgtattctctcaatcaaaattgattatggccagtcatgaagcatgcttctatgtttcttcacaaacgaataattctatagttgattactttgtaatggaatcaacttttgaaccaattaggaaaggtatattgtgttagctaacaggaaactaagttgatatttaagaaagctgtaacatggttatctcagaggcgctggctacaaaatgtagtcaaaagaataagttaataatgtagaaatttttagaaaaggggccttttttttttttttttttctcatcatcaagatctccaatattcaaacgcaagaaaacttacctgtactggtaaatctgagatgaagcaaacagtatcactaagaaatgcttttctccatgatggaagaatcacactccgtaaccgggaatctactattgcaaacaacctgtcatcactgtacgcctagcaggttgcgtcaggcaacgactctagctggcggagcgatgcggtggctcatgtcgaagctggaacacaaggtgatggtggccacggccgaccgcgtcatccgcagctacgtcggcaccaagtcgcagtgcaccgccctcaccatgctctcgaggctgctcattgactctaacccccttcgccatatcggtgcgccccctctctacctctcgcagagattgccaagcgtcgaatcaaacggaagtatccagagacagtgggagcaggggagcaaaggagctatcaatcgttgattgacgatcagacagttcaatt

SEQ ID NO: 168906 - DNA, 759 bp, Zea mays
  Clone ID: MRT4577_8562C.1
gcacttttctgttgcgaaacaaatccctgccgagaaatctaaaatctgtctcaagtctggagagtctttctatatacgattgccccaacataacatctttaccagatctgccgtcctccctccagcgcataactatattgagatgccctgtcttgatgaagaattgccaagaacctgatggagaaagctggccaaagatttcgcacgttcgttggaagagctttccaccaataatcgatctggcttgattagagttgtcactttgaaataaatgagaaggcaccttgacgtcacccctcttctcttgaagctccagagttcaggctcaagtcagaagccaatccgtcgttaatgctgccgtccccgcggttccctgtttttgccgcttgtattgctccgctattttagttgctatatcattcattctctgacagaatgaagtgataactgtggcaattagtataaatactccaggcaatgcaatagagaagacagttcattttcctgcacttgtgcttgtggatggtgtggcagacaagttcaccatggaaccagttccagtaatgtgtgtgctacagtcaaaataggtcttaattctctgctacgtacagtcaaaacgtgtctgctacagtccgagtgtttctggagattcgttgttggcggatgatgagctacatttgtacagtatggattgagctcgaggacttgttcatctccttgctctattaccagttaaaagctgattgcttgttctctagt

SEQ ID NO: 168907 - DNA, 283 bp, Zea mays
  Clone ID: MRT4577_85630C.1
gatccgcaggcgcagcgtggcgatcgttgtcctctacagccatgtattcggctcctggcagagacttggggatggaaccgcacagagccgcgggccctttgcagctgcgattttcgccctacgttttcaacggaggtactatactggaattgctggagaagattttgcaattgttgcttctgatactcgattgagtgaagggttttcaattcatacacgggatagccccaaatgttacaaattaacaggcaaaacagtcattcgatgcagcggttttcatgga

SEQ ID NO: 168908 - DNA, 358 bp, Zea mays
  Clone ID: MRT4577_85631C.1
ggaagctataggagctagccttcttctcccgaacctcccaccagcgggggcgggggtatgtgaaaacccaatgttctaaccctacatgatccaacaggcaatcacagctggcatcttacctgtatcacccttgttcttgcaacaattatcagccctattacatcatctaccttaggtgcatttattggcacaaaacatcatggcacatcaactacaacacttgttgccctttgtccaacttgctttgacaaacccaggatttctctaccaacaacacattattggtggtgcccttttttacatagcttatgagatgtaattgattaactaagttttttgcatgatgtttgttgccaac

SEQ ID NO: 168909 - DNA, 447 bp, Zea mays
  Clone ID: MRT4577_85633C.1
atgggggtggtgaagggaaagcccccattggtagaaaaaaacccacaaccccttggggttatcctgcgcttggaagaagaactaggaaaaggaaaaaatatagtgatagttttattcttcgtcgccctcgttgggatcctagaggacgaatataggactctagagaaagactcagaggaagaatatgggagcctagagaacaaatataggactcgagagggagagggcgaatatgaaatcctagaggaagaatcagaagaagaatatgggagctctgaagatggctcagagaaggaatatgggactttagaagaagactcagaagaagactcagaggaagactcagtaggacttgggttcaagctttccccagccccttttcatcaatggactcctgacgtctacgaaggagtgtggttcgttcgacaaattcctacctctatctga

SEQ ID NO: 168910 - DNA, 533 bp, Zea mays
  Clone ID: MRT4577_85634C.1
aaaaaaaaaaaaaaaaaaaaaaaaaaaaaaaaaaaaaaaaaaaaaaaaaaaaaaaaaaaaaaaaaaaattttaaaaaaaaaaaaaaaaaaaaaaaaaaaaaaaaaaaaccccaaaaaaaaaaaaaaaaaaaaaaaatgttttttcctttgggccgggccccccttaggggggttttttggaattttccttcccccgggggggggttgggccttttttttggggggcccatttccccttttggggggtgtttttccatttcctgggccgggtttttacaacggggggttgggaaaacccctgggtttccccatttttttccctttggaaaccttcccctttttcccggttgggtttttagcaaaggggccccccccattcccctttcccaaagtttgccccccctgattgggaattggcccccccttttacgggccctttaagcggggggggtggggggtttccccccagggggcccctttcttttgccggccccttagcccccgtccttttggtttttttcctttcttttttg

SEQ ID NO: 168911 - DNA, 952 bp, Zea mays
  Clone ID: MRT4577_85635C.1
gccgcggctcgaatcgaattccaacacggcgccgagccgatgagaaagccgcatcttccccagcccacttgtgacctaccgatctagacccgcgcttgccgccgtcgagtcgccggccaggccagccttcaccttgtcaccggcgaaatccacggcggtgaggcaaccggcagttgagagtgcgcctacagttggggggcggagatggggaagaagcagcacagcaaggaccgcatgttcatcacacggacggagtgggcgactgaatggggcggcgccaagcagaaggacgtcggcacaccgttcaagcgcctccccttctactgttgctcgctcacgtttcttccattcgaggatccagtgtgcaccgtcgatggaagcgtctttgatttaatgagcataatcccataccttaaaaagtttgggaagcatccagtaaccggagcaccactcaagcacgaagatctgattcctctcacattccacaagaactcagatggagagtttcagtgtcctgttctgaacaaagtttttacagaattcacacacatagttgctgcaaaaactactggaaatgtcttctgctatgaggcaatccaagaacttaacatcaagccaaaaaattggaaagagttgctaactgacgagcccttcactcgcaatgacttgataacgattcagaacccaaacgtggttgatggcaaggtccttggggaattcgaccatgtcaaaaagggcctcaaacttgaggatgaagagttgcagcggatgaaagatgatccaacctataacataaatatttctggtgatcttaagcaaatgattaaggaacttgggacagaaaaaggaaatgaagcttttttgcagggaggtggagggctgaaagctcaaaaggaaagagctgcggctcttgctgcaattttagcaaggaaggagaaggatgacttaaaag

SEQ ID NO: 168912 - DNA, 453 bp, Zea mays
  Clone ID: MRT4577_85636C.1
cacgcgcaggatgacttcttttactgcaccggagggagtatatatatatatatatatttagacgacgatttccaacatcggaacttatcttcctactaatatccttcctagaatctcgatttccaacatcggaacttatcttcctactaatatcctttctagaatcttgccaagtgcctggaatcgtaacggccgctccttccgtagggggtcgaaggaccaattccatgcctatttgcaccgtccgctttcctcatctttcgatgtttcgatgagctactgtccaggtccagattcactttaggagggttcttgaaacagaaggatgcagcaactttcttgagatcaagttggtggacatcaaaaatgtctttcatagaatgcgagttgtacgacaaaaggtaggacctgtaggcttccttcgctgactggtttaagaagtagttcccaccg

SEQ ID NO: 168913 - DNA, 229 bp, Zea mays
  Clone ID: MRT4577_85637C.1
cccacgcgtccgatcttgttccttgaggaccagacttagaagcactattatccctgcagcttgcctcttcagtatactccatccgctgccccgcttctcctcatacatatatactctgtcaaatccaacttgttccataactcttgttctccatcgaagaacagacgacatactctctctctctctctcttggtctctctctactctctagacagtcgtttaaaggtgc

SEQ ID NO: 168914 - DNA, 302 bp, Zea mays
  unsure (1)..(302): unsure at all n locations
  Clone ID: MRT4577_85638C.1
agagggggtagcgacaatgtctccaagaccacctggcgcgagggctcctaccgagatcagggaatatcaacgtgtgcggggggatccantccgagccctctccctgcgatgcttccattggttttttatttcattccaatcgatttggcggggtatatgcaatggaggatgggcgggatggacaagatatggttaaggggagggtgtgattcagggtgggcatatatttcttgggcttgaatttggttaatctaaatagattattttttatccaatccaaatttccaatggcttggcatatc

SEQ ID NO: 168915 - DNA, 420 bp, Zea mays
  unsure (1)..(420): unsure at all n locations
  Clone ID: MRT4577_85639C.1
ttntcacaatgattctacattgtcatttttccagctatttatcatcggctcttgtgaaggtgcgtggcctatgttgggtgtataaagagtctaacttaatatatccgttctttgcagtcgcacacttcatgtgacgactggtatattatgctaatatatacgtcttcctctcacacgccatttctcccttttgacatattgaagtaaaacctgctagccacttggaggatccacagattatatgatgcgctataaaagtactctccgtgttgaaatgtttagtctccatcctcggtgcataacacggttttgctggacagtactgtgcggaagagtacaatagacataagcgatggtattccaagcagatggcttttgggtatttcatagtctgacaaatttcattttcctgttaataaa

SEQ ID NO: 168916 - DNA, 705 bp, Zea mays
  Clone ID: MRT4577_8563C.1
tttttttttttttttgaactctgactgtccaggttatagttgagtatctacatatctgcgtctttcaagattgaaatcaaatttggaggaactctgactccccacccacccacacacacaccaaaaaaagccaaaggaaacatagtgtttcgtgctccgtctctggtcctacagcaacaaatacctgaccagcacaaatggaaatttacacggtctggctcctacaccagcaagtcatcatataacacttaatttgatccatcaggtttgcgccatggaagcaattttgaaatgttgtgctcctctgctagaaattcttcatatgtctagctgttaatttgatgttggacttttgaccaacttgtcaggtacaggttaccaaacccaacaacctgttcctctatgatcaagccgaggaaccaattcaacacatatttgtctcctgcatatttgctcgacaagtctgtacattaaccttttaagaagctacattccattgcagctgcaccataaggttcacggattcatttctcaggttggtggtggccaccagaggtggtttcactctaggttggggtcgtggtcctgtggatttcttgtcaggcgcgcgtgtttgtagctcattaggctggtggttaagtgttcgtctctaaggaatttacctctttttcttcttgatataatgatacgtagctctgttgcgtg

SEQ ID NO: 168917 - DNA, 174 bp, Zea mays
  Clone ID: MRT4577_85640C.1
tcggttatatctgctcctatggccgctacaaggggcggggtggataatacagggggtgcacgtatagtccattaaattgctgcagatgccttctacaaacatgagatgtctgtattacaagcctgaaactcaaagtcgacccacaagtgtatacattctgaaacataaaatctc

SEQ ID NO: 168918 - DNA, 388 bp, Zea mays
  Clone ID: MRT4577_85641C.1
attagatccaacagataaaggacgatggctctccacaaggtaattcaaaatcataagacttcttaagcttcctagcctctctacaagagcttatttggcgaccagtttctggcaaggctccccaggtgggaacgcttccctttttgccccgcacctcttaccaattgtgtagccggcatgtgaaaacccaagtcttcaaccctattggctccaacaggccatcgcagcttgcatagtacctttatcacccttggtccttcaacaaccaatagccctattacagcagttacctttggtgcatttaatggcacaaaacatcttggcacaacaactaccacaacctgtgctaggaaaccttgctgtccacttttaacaacaacaggttctt

SEQ ID NO: 168919 - DNA, 589 bp, Zea mays
  unsure (1)..(589): unsure at all n locations
  Clone ID: MRT4577_85642C.1
cggncgcgtggggnaaattcacaagccgctcaagtcatcagccatcgcttccgtaagttcatcgttgttgcgctgctcatcgaccatcgccatggccagccattttgttctgtatgcatggttgacctatgtgataagatgaaagagaaatatttgccacaattcattgttgcgagtgtgttgtctgctttataatgtttatcttttccaataagcatggttaattgacttgtattttcacctaaatatagatgacacggaagaaaaatgttttatgttcaccttagtagatagggggggtcaaatgacctagatagattatggtaaccataagtatcttttttcttgctccagtaattatcatcaatcaatctagcatggtatcttttgttacttgcattttggagcctaccagacatgattctatttggtaatattactttgtagccccttagagctaggagagcatatccatgatctcattttggttgtatactctataaatttattgcaattttgcattcaggctgcgttagtattctgctagccttttctattctctcttaccactcacttttcatgttgaact

SEQ ID NO: 168920 - DNA, 296 bp, Zea mays
  Clone ID: MRT4577_85643C.1
tttgttaaacccaggacctctgaccttcggctcggtggttaagctccctaccacgtacacctggcctgtccttcgcatgtctgacgcgccaatccaatgtactgccagattgtatagcaatgacaagccctgtccctttcactacttgcaatgatacatttacggaatctgccaagaaaagaataaaacgcagttgcatgctctctacatacagaatcctgttaaacatgccacgagctgaccacaatcacttgtaccaatttcaagaagctcatacatatttactaacactaata

SEQ ID NO: 168921 - DNA, 129 bp, Zea mays
  unsure (1)..(129): unsure at all n locations
  Clone ID: MRT4577_85644C.1
ctcctttcctttggtgtgactgtctcgagtgnancaccctnnaaaccataaaaccagggttgggtcccacaggctgcctcttgggcgagggtgctacactcgtggctggtccttgcttagggttcggag

SEQ ID NO: 168922 - DNA, 344 bp, Zea mays
  unsure (1)..(344): unsure at all n locations
  Clone ID: MRT4577_85645C.1
gcagnncaagagaaaggggcncacnccnaggggggggggcgaccnnganggcaaccagcacgngaanaacgncaaggacaacggnngganncnngagagagcncccancgcgaaccnggagaagcacgagcncgcaagcangacgcnggannacaggaaggagngcggacgcgacagcgngcngcagncgcncaccaccgncgcgggngaaagccgagacggcgacgcagacnccaccanccagngcgaccaccngcnccagcgggaaacaggagccgananngngaaggcgcacacagagnggcgcccgaagcgggcgcanggagaggggacccccaaggggg

SEQ ID NO: 168923 - DNA, 423 bp, Zea mays
  unsure (1)..(423): unsure at all n locations
  Clone ID: MRT4577_85646C.1
cattgggtacctcgaggccggccgggttcagncttctacacagtcgaacttctcaggccatcttcaccagcagctccagaggctggacggcccgctcttgtttggccacgcccacgccgcggcggcgatgcatcccgcatccgagaaccagctgaccgcatcggcggcgttacagctctgggacgggctccggcactccggcatgaaggagaagggcaggagctgattgcacattcttcaatagtaagatgatactctctcaactttttatctttgtcgcccgtaatgtactcaaattgtcatttcggcatgattaccttcttcgtggcgctcgaggtagcctcgtgcccataacgtcaaactgtcttgttgtgttccagtcgacctgacgggtgtcagtacttcaaggcgtcatttgctcac

SEQ ID NO: 168924 - DNA, 1411 bp, Zea mays
  Clone ID: MRT4577_85647C.1
ttgggtacctcgaggccggccgggcacactcccctcccggccgagcgagagaaagcaacgcgactcccctcgcctttttagagagagaaaccacggctgccggcccccagcgagctagagagagaaaaaccaaggccaaggagcacagcaccccgtacgtccccagcaggagagggagagacagaagggtgtgcgaagggaagaagaggcggtgggagaggagggcgacatggagaggccggcaccggtgaggaagtctcacacgtcgacggcggacctgctgatctggccggagggggcgccgcaggagtcgcccgccggggccacgccgccatccaaccgccggccgcatcagccgtcggaggcgctcaggaaggtggtgttcggcgggcaggtgacggaggaggaggccgagagcctcaacaagaggaaaccatgctctgctcccaagtggaaggagatgacaggaagcggcatatttgctgctgggggcgaggctgaagaagatgaatctgccaatgcctctgcaacttccatccggaccgctccaaagaattatcaggcaattagcactataagccacatctcatttgccgaggaagaaagcatctctccgaagaagccaacttcgatagcagaggtcgcaaagcagcgcgagctaagcggcacacttctgagcgaggacgacagcaagatgaagaggcagatatcggacctgaaatccaaggagctgagcggccacgacatctttgcccctccggaggatccacggccacgcaactcagagaacggctcgacctcgcagaccccgggcaaaaatgcacacgtaagcaacttcaagttcggcgaggccgacgaggacggcatggtgaagaccgcgaagaagatccccacaaagaaattcaccgacctcgcgggcaatatcttcaagggcgacgagaccccccctgggacggcggagaagcacctgagcacagcgaagctgaaggagatgaccggcagcgacatcttcgcggacgggaaggccccctcgcgggactacctcggcgggatccgcaagccgcctggcggggagagcagcatcgcgctggtttaacagcaacagcaacctgatggacatagcagcccctacatcattcgtttctttctcctcgccgtcaccgtcttaggagtgatcttttgttcttcttctttttcctttcctttggaggactgatcgattggaacccccggcttgctttcctgttccccgtgacttgcgccagattttcgttgtcgatcccctctgatggtggtgttgtgtgggcatgacaacaacgatggttatctctaatttaacattgatttggcttggctccaaaaaaaaaaaaaaaagcggatggcgtacctgatgcaacaacaacccagtggt

SEQ ID NO: 168925 - DNA, 278 bp, Zea mays
  Clone ID: MRT4577_85648C.1
ctgacttcacaagagttatgagccttgagttgtgtactggcattactatgctgcgtatattacaaggagggtaaattgatcaggcgaggaagccgcgctggaccttgtgaagcaggtgtcgacgctgctaccaagaattaggcacattgcaaacagacgcttgtgcgatacagcaaaaccacatctccaggctacgggcttggtactcatcacggcggacatgcatacggtgccgagctacactgggccgcgattctaccgaattgacgacataggac

SEQ ID NO: 168926 - DNA, 250 bp, Zea mays
  Clone ID: MRT4577_85649C.1
ttcgtatctgatccgaattcgaagagaatatgaaaacaaatgtagaacaattaatatccatccgtatctgattacacccctacctagacgtatggtttcattataacgcatccatattcgattacacacctagacgtatccgattacacgcatagatgtatgttttcattataacgcacagacataggttcaactccatttgttctaaattataacctataaccatctatttctaatttgtaagatgttt

SEQ ID NO: 168927 - DNA, 270 bp, Zea mays
  Clone ID: MRT4577_8564C.1
tcgagctacctagctagctgatccatatctcgatcatgtcagtggcttagcctaccgccggagacgaagctgctacatacggccggagaagaagacgtctctggtggctcatatcacagtcacaccgatgtgcatttcccttttacctctttgccgcatcttgttcccttcttttttttttctttatttattctgggtgtataaggggaatttgttttttgtcatttgtttcttgatagtagtaattcgttggccgagtgttattagtag

SEQ ID NO: 168928 - DNA, 1079 bp, Zea mays
  Clone ID: MRT4577_85650C.1
tgcatgcagtgttgcttactgctgctggtggtcgccatctcaccaactatgttggagtactgcaaactgaccgtagccatcaaaatgctccccgtaagcgctcctggtctgtgtatgtttcggcaagttctgcgaaaccatgctctgctcccaagtggaaggagatgacaggaagcggtatatttgcagctgggggcgagggtgaagaagatgaatccgccaatgtctctgcaacttccgtccggacggctccaaagaattatcaggcaatcagtactataagccacatctcatttgccgaggaagaaagcatctctccaaagaagccaacttcgatagcagaggtcgcaaagcagcgcgagctaagcggcacgcttctgagcgaggacgacagcaagatgaagaggcagatatcggacctgaaatccaaggagctgagcggccacgacatctttgcccctccggaggatccgaggccacgcaactcggagaacggctcgacctcgcagactccgggcaaaaatgcacacgtaagcaacttcaagttcggcgaggccgacgaggacagcgcggtgaagaccgcgaagaagatccccacaaagaagttcactgacctcgcgggcaatatcttcaagggcgacgacgagccccccgggacggcggagaagcacctgagcacagcgaagctgaaggagatgaccggcagcgacatcttcgcggacgggaaggccccctcgcgggactacctcggcgggatccgcaagccgcctggcggggagagcagcatcgcgctggtttaacagcaacagcaacctgatggacatagcagcccctacatcattcgtttctttctcctcgccgtcaccgtcttaggagtgatcttttgttcttcttcttttttcctttcctttggaggactgatcgattggaacccccggcttgctttcctgttccccgtgacttgcgccagattttcgttgtcgatcccctcagatggcggtgttgtgtgggcatgacaacaacgatggttatctctaatttaacattgatttggcttggctcctgtttgttggttggcc

SEQ ID NO: 168929 - DNA, 1272 bp, Zea mays
  unsure (1)..(1272): unsure at all n locations
  Clone ID: MRT4577_85651C.1
accctcgggccggccgagcgaccccgcaccttccttccattcgactccacactccactcccagcctcgcctcccctcgcctttttagagagagaaaccacggctgccggcccccagcgagctagagagagaaaccaaggccaaggagcacagcaccccgtccgtccccagcaggagagcgagagacagaagggtgtgcgaaggaaagaagaggcggtgggagaggagggcgacatggagaggccggcaccgggnaggaagtctcacacgtcgacggcggacctgctgatctggccggagggggcgccgcaggagtcgcccgccggggccacgccgccatccaaccgccggccgcatcagccgtcggaggcgctcaggaaggtggtgttcggcgggcaggtgacggaggaggaggccgagagcctcaacaagaggaaaccatgctctgctcccaagtggaaggagatgacaggaagcggcatatttgctgctgggggcgaggctgaagaagatgaatctgccaatgcctctgcaactcccattcggaccgctccaaagaattatcaggcaattagcaccataagccacatctcatttgccgaggaagaaagcatttctccaaagaagccaacttcgatatcagaggtcgcaaagcagcgcgagctaagcggcacgcttctgagcgaggacgacagcacgatgaataggcagatatcggacctgaaatccaaggagctcagcggccacgacatctttgcccctccggaggatcccaggccacgcaactcggagaacggctcgacctcgcagactccgggcaaaaatgcacacgtcctgacctctgactctgaactcaccctcatcataattacatgaaccaaaccaacccagttacaaaaaagctgcagtgttgcttactgttggttgtcgtgctcgcaacaggtaagcaacttcaagttcggcgaggccgacgaggacagcgcggtgaagaccgcgaagaagatccccaccaagaagttcactgacctcgcgggcaatatcttcaagggcgacgacgaggcacccgggacggcggagaagcaccacctgagcacggcgaagctgaaggagatgaccggcagcgacatcttcgcggacggggaggccccctcccgggactacctgggcgggatccgcaagccgcccggcggggagagcagcatcgcgctggtttaacagcagggacaaacaaccagatggacatagcagcccctcccctacatcattcgtttct

SEQ ID NO: 168930 - DNA, 1409 bp, Zea mays
  Clone ID: MRT4577_85652C.1
tccattcccatcctcgcctcgcctttttagagagagagaaaccacggctgcgcacagcgggttagatagagagagagagagagagagagagagaccaagaccaagaccaagaccaaggccaaggagcaccgctccccgtacatccccagcaggagagggagagagacagagaaggttgtgcgaagggaggaagacgcggcgggagagaagggcgacatggagaggccggcgcccgtgaggaagtcccacacgtcgacggcggacctgctggtctggccggaaggtgcgccgcaggagttgcccgccgggtccacgccgccatccaaccgccggccgcaccagccgtcggaggctctcaggaaggtggtgttcggcgggcaggtgacggaggcggaggccgagagcctcaacaagaggaaaccatgctctgctcccaagtggaaggagatgacaggaagcggtatatttgcagctgggggcgagggtgaagaagatgaatccgccaatgtctctgcaacttccgtccggacggctccaaagaattatcaggcaatcagtactataagccacatctcatttgccgaggaagaaagcatctctccaaagaagccaacttcgatagccgaggtcgcaaagcagcgcgagctaagcggcacgcttctgagcgaggacgacagcaagatgaagaggcagatatcggacctgaaatccaaggagctgagcggccacgacatctttgcccctccggaggatccgaggccacgcaactcggagaacggctcgacctcgcagactccgggcaaaaatgcacacgtaagcaacttcaagttcggcgaggccgacgaggacagcgcggtgaagaccgcgaagaagatccccaccaagaagttcactgacctcgcgggcaatatcttcaagggcgacgacgaggcacccgggacggcggagaagcaccacctgagcacggcgaagctgaaggagatgaccggcagcgacatcttcgcggacggggaggccccctcccgggactacctgggcgggatccgcaagccgcccggcggggagagcagcatcgcgctggtttaacagcaggggacaaacaaccagatggacatagcagcccctcccctacatcattcgtttcttcctcatcgcccgtcgccgtcgccatcttaggagtgatcttttattagggagttctttttttttttcgttcattggaggactgatcgattggaacccccggcttgcattcctgtttcccgtgactttcgtcaggttttcgttgttaatcccctccgatggtggtgttgtgtgggtatgacaacaacgatggttatctctaatttaacattgatttggcttgggcttacctgatgcaacaacaaccgccagtggtgcgttgtctg

SEQ ID NO: 168931 - DNA, 381 bp, Zea mays
  Clone ID: MRT4577_85653C.1
ctgatccttaaggccgcctttttttttttttttttttaagccatttatttaaccgggaggatttacctatccgcttcatgacaacatatatctctcagaatgacatacccaattattgaacaactacatgataagagttatcactagtcagcaaattggcagactgactattactccttgcttgcacacaatgacaaaggaaccaaagacccactgtaagagcacagtacaatatatgtactacataatgtatagctcatctgggccgtgaccgtgaacccaccttcagcttcacggccaagtataggtcatacttttgtgcggctgtccttgtgcacgccgtcttaatggcttgaaccaccctggatttatcactcaata

SEQ ID NO: 168932 - DNA, 143 bp, Zea mays
  Clone ID: MRT4577_85654C.1
acaggagatcaagacgaatgccctactgcattctgggcggtctgaccgcatacgtgaccgcggacgggtgaaagggtatgggcaaaggcatgtgcgatactgtcgaccagacagggacgaacagttccggctacaggccagat

SEQ ID NO: 168933 - DNA, 684 bp, Zea mays
  Clone ID: MRT4577_85655C.1
ccggccgagagcaggtctacttcctcctcgctcgaggagccaccgcctatacctgtagtgcggggaaacaaggcaggaaggcaggtagtattggagtgccttgctgatctaggaagaggatgaattgcaagaactccctcctctgggccctcgacctcgcctcctccctcctgcaatgcgacagatccgacgacaatgacgatcagctcctcaagggcatcaacagctacagggcctcgatcaaggtcccggcgctgtccgagaagaagaaggcgcagtgccagagcgagaactcgagaggcacctcaaggagatatgagtgcaccaacacgacgggcgccaacaccgtcatggtgatcaacgaacaatcccaggagtaccccacgaaccctggaccgatgccgcctaaacgggctcagtgaccagagacgaaacacactaatgtctaccagcgtgccgaggctccatcacgtcgaggaactgggcatctactgcgaagaaaacagagaatacgttttgctgctggataggcagcaatacaggaaacggaaagtaaaaccagggcaaatgggtcatggtcctggtcatgatcagctcgagatccagctagtagaagtcgtgtccaaaggtgctgaactgggctttgtcggtgatgctcacgatctcttgtctagcatgtgagct

SEQ ID NO: 168934 - DNA, 219 bp, Zea mays
  Clone ID: MRT4577_85656C.1
atgggacaaagccctgagtacgaaagtgtacttttgcaagtcttacccgtcaaaataaaagactctcaaggatatgctggccttaagggagtcaaggttaagtcattacatgagtctagagttctttctaccctagttcaagcacttgacctatactatccaatttcttatcaacccttcttattcactggaatgctatgtgtgatcaaggtaaggtaa

SEQ ID NO: 168935 - DNA, 319 bp, Zea mays
  Clone ID: MRT4577_85657C.1
gcaatcacccagagggtgatctttcttaacacaccccccaaggtggactagctcacagtcaagatgatgatcatgtaccacaccgtgtcagctacacactgtgatatgtaccataacaccatggacatcatcattagtgagttcaggtccctgtcctctcgtgtgctcatcaccaccgaccttctctccctttgaatctacgtccatcatgtctaacttttcatcaactactaccttcctacccatccaaaaaactaccttcacctcatcatccttaatggtctcttttaaaagaaaggttttccattaacttctttac

SEQ ID NO: 168936 - DNA, 1041 bp, Zea mays
  Clone ID: MRT4577_85658C.1
gccgggttgctgatcttcgacgccccgccaccccccacaccgcacacacggatagcataccataccaatctttgaggtttcatcaacaatcaatacaaaagcacacggtcgagaggatatgaggatagcaagaatcgcgatggctatggaggacggcggcggcgcgtcgtcgtcggtgcagcagatgcagccggcggcggccatggcgtacggccgcgtcgagccgccgccgttctggtccacgccgacgccgtacctcttcatcggtttcgcggttgtgatggcgctcatcgccgtggcgctggccatgctcctctgctcccgccgcaaggaggaggaaggccggcgcgccgccgaggcggctggggtcatgtctgtcgtgcgcgtgttgacgccgctcgacagggaggatgccatgcctaaggtgctcgtcgtgatggccgggcacagcgcgccctcgttcctcgccagcgccgcaccgtttgccagcttcactgaggctgccgacggggccgccaagccccagcacggccgtggcggcggcggcaaggagggcgccgccgccgtgtaggcttccttacccagccgcgtgcaagagacatatcgaaaccccctaaaagctggatcatcggagaagggcgaaaaaaaaactaagggcttgttcggttagctctcaatccatgtggattgagtgggattggatgggtttgaatcccaaacaagtcaaacttcttcacaattttttccaatcccattcaatccatgtgtattgggaataaccgaacaagcccttagtggcatcgacttcccggtcctctggacacgtcacaaatagtaggcgataattcaaactgtggttttttagtgaaaatacaactatgccgcaataattagcattcccacagtagaattgtacaaaacattatctagcaaatgcctgaagtttagtttgtaatgtcttggtaatgagaacatcttgtgcaatttctcctcaaaaagaaatatctaatgctacactgtgaaggcatggatgttttggtt

SEQ ID NO: 168937 - DNA, 212 bp, Zea mays
  Clone ID: MRT4577_85659C.1
accttcgtagacccctgggttctagatccttagctttcaccctttgctaatacttattcgaggtgatttttttgcaaccaaacaagtaataaatattatttagcacttttatctatttacaaatatacaacagcttatacactctctgcaaggggcagcaatcagagaggtgatgttacctgtcctacgctttgaagcccttattgaaactc

SEQ ID NO: 168938 - DNA, 340 bp, Zea mays
  Clone ID: MRT4577_8565C.1
aacatttttaaaacttgcggattaacggctagggtgcgatctctcttttggtgccggatcatgccaagatgacaactgacaagttttctttgtcagggcaacatagctctcagggagggctcacccaaatctttcaatgctcatcaactcacacatattggaatgcttggctattcttatattgaaagagtagtaaaagaagcgtcaactctcacatgagaaatagatttacgtatgatactgatgcagcatcacatacttggatgcgccacgatggatgacagaaaactatacaaaagcgctgttcagctggtagaatacctcattgactcaaactgtt

SEQ ID NO: 168939 - DNA, 1051 bp, Zea mays
  unsure (1)..(1051): unsure at all n locations
  Clone ID: MRT4577_85660C.1
ggtacgcctgcaggttccggtccggaattcccgggtcgacccacgcgtccgagctgccgggcattcgtgtggtctcgtcgtcagcgcagctgggcctacacacaagcaaccatgtctaagggacctgcagttggcattgatctcggcaccacctactcctgtgtgggtgtcttccagcatggaaaggtggaaattattgccaatgaccagggtaaccgcaccacaccaagctatgttgctttcacggacacagagagattaattggggatgcggccaagaatcaggttgcaatgaaccccaccaacacagtttttgatgccaaacgtctgatcgggcgtaggtttgatgatgctgttgttcagtctgatatgaagcactggcccttcatggtggtgaatgatgcaggcaggcccaaggtccaagtggaatacaaaggggagacaaaaagtttctacccagaggaagtgtcctccatggttctgacaaagatgaaggaaattgcagaagcgtacctcggaaagactgttaccaacgctgtggtcacagtgcccgcttacttcaatgactctcagcgacaggcaacaaaagatgctggaactattgctggcctcaatgtacttcgaatcatcaatgaaccaactgctgctgctattgcttatggcttaaataagaaggtcggagctgaaaggaatgtgctcatttttgacttgggaggtggcacttttgatgtgtcaatcctcactattgnagatggaatttttgaggtcaaatcaacagctggagacacccacttaggtggagaagattttgacaaccgaatggtcaatcatttcattgctgagttcaagcgaaagcacaagaaagacatcagtgagaacaagagagctgtccgccgtctccgcacggcctgcgagcgggccaagcgcaccctctcctccagcacccaggccagtattgagattgattctctctatgagggaattgacttctatacctccattaccccggctcgatttgaggagttgaatgctgacctgttccgtggcacac

SEQ ID NO: 168940 - DNA, 519 bp, Zea mays
  Clone ID: MRT4577_85661C.1
ggccagcaccgttctcccgcagagacaggggcccgcggactcgcctggctgcgcgactcagagctccttccatttactagcgccgccgctgcagctccaccccagttgcgctcgacaccatgagggagtgcatgtccatccacaccggccaaggcggcatccacgtcggaaacgcgtgctgggagctttactgcctcgagcatggcattcaggttggtgcccagacggcgggagacgagaccattgggacttgggcgatgatgctgtgaacatcttcctccgtgagactggtgatggacaagcaagtcccccgagctgtttttttttaccccgccccgcctcccatcgatggggagaggactgccaccgaccgccagctcttccatccagaacaggttatcaggggcgaggcggatgcgacgaactacttcgcgcgggctcactacaccactgggaagaagactcctggacagggccttgatcccatcaggaagcttggcgagaactgcagtgcccccc

SEQ ID NO: 168941 - DNA, 529 bp, Zea mays
  unsure (1)..(529): unsure at all n locations
  Clone ID: MRT4577_85662C.1
gcccacgtccgggcgacttgccggggggttagcatcagcttcaccctgagcctcaccctaggcccttgcgaaagcatctccattcttccctcccttgtttccggactggtcttggaatcggtcctgttcttcgggctgaaatggggaacgaaaggtgggaaacgcaatgagcaaccagtgcgaggacctgttcaagcttgtcctgatcggggacacctccgggggcaagctctgcttccttctccgcttctctgacgactgctacgtgggcagctacatcagcaccatcggagtccactctaaaatcctcacgggcgaggcggagggcaagaccatcaagctgccaatttgggacacaccagggcaggagcggatcaggaccatcacnagcagcgactaccgaagagctcacgggattgtcattgctgacgacatcacggtcatggagagctagaacaacgtgaagcagaggcttcgtgagatcgaccgcaacgccaacgacagcgtatgcaagctcctctgtggtcac

SEQ ID NO: 168942 - DNA, 500 bp, Zea mays
  Clone ID: MRT4577_85663C.1
cggcacccctttggagaaaaaaggggggatcgctacaaggggggcagctacagagggattacactacacgggggggtaacacacgggggggggctcaggcccacaaaaaaacagcccatcctgggcgatacccgccatctttttcgaattcaaaaagggggcgcgccccccattgccgccccccaatggggattttatctcgctattgctacgggacggccgccgctagccattaggcccacgtcgccggaatcgggcgggcaaccacggggggggcgggggaccaaacaagccgcccaaacccgggggggcccgacggcatcccccccgccgggaagctcaccgggaagctttgtttttcgccggccctggtgaagctaaagggcgacggctcaccggtcaccgacaccggggggccgggggggggggccctcgcggccaccttgtacgtcccgggcggcccaaagatggtaaccgtgggggggggcttccccgggccc

SEQ ID NO: 168943 - DNA, 350 bp, Zea mays
  Clone ID: MRT4577_85664C.1
ccacgcgttctttacgcgtccgcccacgcgtccgcgccagtcccttccaccgtcgggtcgttgccggagaacactccggcgagcaacgtcccggtgaatatgcccgccaacaccaacacagcgacaggtgcagcggcgccggtccctcccaccgccgggtcgttgctagaatacaccccagcgaccaacgtcccggtgaccatgcccgccaacgccaacgcagcaacaggtgcagcggcgccagtcccttccgccgctgggtcgttgccggagaacactccggcgagcaacgtcccggtgaacatgcccgccaatgccaacgcagcaacaggtgcagcggcgccagtccc

SEQ ID NO: 168944 - DNA, 217 bp, Zea mays
  Clone ID: MRT4577_85665C.1
cagcaataaacttacaggggaagaacaagggctacacattgttaaagacctacatggatgtgacacaaatctagggctggcttaacttcaaagcttacctggaaattgatttccaggtttttacaacgttctcaagcccttgatgcactactaaactaggcaccggtgggctctgatccccgcgactacatacactatactgctggtgtggaaagga

SEQ ID NO: 168945 - DNA, 350 bp, Zea mays
  Clone ID: MRT4577_85666C.1
gttgaaaattgtggaaggaagccccttggcgaagatgttggtgaactgcgaagttgttgggacgcagagaacgcgtacatcgccgacaacgacacacttgtggatgaagtggaggttgatctccatgtgcttcgtgcgctgacattgcacgggattggtggagaggtagaccgccctgacgttgtcgcattagatgagggtggcgcacgtgaggggggtgtggagctcatgaagaagctaacggaggcaggaagcttcgatcggtgtcggtgtagactaccagcttagaagtcagagagggttaaaggaggcagaagtcgagggagacgcggaggtagcgaagaatccgc

SEQ ID NO: 168946 - DNA, 706 bp, Zea mays
  Clone ID: MRT4577_85667C.1
attgggaccctcgaggccggccaggcccccaaatatctgcctgtatcgcctgctccgaatccaatgcgcgcccgtccatgacactgctcacttggagcccgcggaggatgtcaccgcccgcaacatccacgacatggtcacaacctatccaccaaaccaagtacaccgctgtcgaatgcaccttcgacaaccccatgcgaacgctcaaagcgcacgaactcacgcccaatgacccacagatgtctgacgccggcttaatgccattcctctccctccttcacggaacacatgacaccttccacttcaccgagaaatggaataataccagctccactgacaagattaacctgaacatacaccacgcagtacatgcgacggtccactaccacagcacgatccaataaaatgatgacacaatgctgcgcctactaaaaatcactaactaccccactatctagcaagttatgtgcaacttgactaccttgctggccactatgcacaaatacttgctatcatgtgacttcctcacatgaaactgttaacatacatcgtggacctatatatatacactaatgcactcctgtacgccttcagcatgcagttacgtacatatatatagccggatcacccaatgcaatgtcgtgaatgtggaacatagcaataccatagagtctaccggttttatgctctaacgccgagcattatg

SEQ ID NO: 168947 - DNA, 267 bp, Zea mays
  Clone ID: MRT4577_85668C.1
atggcgaatcttggttctaaagtgagaagagaagttaatgctcgaattgcatccgtatcacggatgatggagcgtctagaaactagtggaaatagcagaacgagtgatagaccgacaacatccacttttgaagttcctcctgctacaaaatcatccaatgaaagggttacagagagcaactcggatgctgctattgctggtggtgagctgatgaactgcaaacaatgcttatggagatggttaagcaagacattaggcaccaattaa

SEQ ID NO: 168948 - DNA, 549 bp, Zea mays
  Clone ID: MRT4577_85669C.1
ctcgaaggaaacatggcccaccatatatttcgtaaaacactttgatgttccaaaagataagcagcatcgtgagctctgcagtaacactagtcaaattttacgtaacttgcgtggttctcttcctgcgacggaagcaaacactgcccgagacatagacagcgggacgtcgagatggccgacggggaggacgccgccgccgcgcgccgccgggccgccatcacagactaccgcaagaagctgctcaactgcagggagctagagtcgcgcgtcggcaccggtgagtcgtcccgctcccctccccttctgccctcacccactttgctcggctccagtctccctagggttcggagggcccgattcccgtgtctcactagggggatcatggctgtatgtgcgggatctagctggaggtttggatgccgagtagtttttgtgtagattcactggccatgccgcggcgtactcggtgatttcaaggctttactagggagggtgatgatttccttcgcggctccttcggtactagaccgtgaccagtggcgttgggcg

SEQ ID NO: 168949 - DNA, 426 bp, Zea mays
  Clone ID: MRT4577_8566C.1
cgggcgcgccagtcgaccgcagcaaccccgcctggcattaccgggcccacagccgggatactcgccacctctgcgccccaccaaccctctagatggaaggcgcgccattcctgccatgattcctgtcggcgcgatgcccatgcccgccctgagctccttcacccgacctcatgttcttgctggccccgtcttgcgtcccccccatgcccgcccagaatatcggcggtgcaatgaccatgcctgcccttaactacagatgccctcctttcaaacccgccgccttcttgtatccccctaaacgagctagcataacgcgagtgggtgtgacttccattgccggcatcgagcttgcatagtaggcggccgagctccatagcatgcggggggacacaggtgatgccgacaacccaaccccatgcccatgca

SEQ ID NO: 168950 - DNA, 247 bp, Zea mays
  Clone ID: MRT4577_85670C.1
agaataattcatttaagaatgtattctgatactggaatcctacttgctcaagacattaacacataactgtattacctgtggaaatacacatttcctcaaagccaactcactaataaagcaagaaaatttatatcaaaacaacaatgattaggtttgactatgcaattgtgagttgatttctaaataacaaaggtatggtgtttttcatccttttggttaaacatatatcctttatatatatgacatt

SEQ ID NO: 168951 - DNA, 425 bp, Zea mays
  Clone ID: MRT4577_85671C.1
ggtaaggcccaaacattataaggagaaaagacgtgtgctacaccaaacggaaggaaacggggttacaacttagggagagaaaaggcaggttcgggcaacaaccaagatgggaggaagcccaagctttaaacttaaaaaaaagcagttcaaaaaagcctccataggcgggcaggggggggcatcatctaagccaggagggggttttcttgggctggaatatgactgcatacacagggactcaaaaaccgatgccaaccgttcccagcagggaaagggtcaccttaaaaccctggggcttaatcctgggaaagttatacatgggctgggaatggatgaaataaggctaataatgggcatgccctcccattttcttaaggccgggggcatggaatccacgaaaagttggtttggacccctcggacccg

SEQ ID NO: 168952 - DNA, 867 bp, Zea mays
  Clone ID: MRT4577_85672C.1
cggccgctcgagccggcgggcgggatttcccaaaaatgtttctcaggaaaaccaaatcgtacttgttgaaaccctagcgccatctcgccgccggcgatgtccgcttgacggacgcgccaccgagaaagcaccaaactcctccgagccctcccctctctctgatccgtcgcccgcccgcgggatccggatcgtcttcagccatgtcaaaggccagggtctacgccgacgttaacgtggtgcgccccaaggagtactgggattacgaggccctcgccgtccagtggggtgagcaggatgactatgaagttgtgcggaaagttggaaggggcaaatacagtgaagtctttgaaggtatcaacgtcaacaataatgagaaatgtgttattaagatcctgaagcctgtgaagaagaagaagatcaaaagagagatcaaaatactacagaatctctgtggaggtccaaatattgtgaagctgcttgatattgtcagggatcagcattcaaaaacaccaagcttgatctttgaatacatcaataacacagatttcaaagtgctatatccgacattgacagattatgacattcgctactatatctatgagttactgaaggctttggattactgccattcacaaggcattatgcaccgagatgtgaagcctcacaatgttatgatagatcacgagcttcgaaaactccggttaatagactggggccttgctgaattctaccatcctggaaaggagtataacgttcgtgttgcatcaaggtacttcaagggacctgagcttcttgttgacttacaagattacgactactctttggacatgtggagtcttggctgcatgtttgctggaatgatattcc

SEQ ID NO: 168953 - DNA, 1481 bp, Zea mays
  unsure (1)..(1481): unsure at all n locations
  Clone ID: MRT4577_85673C.1
taaacttagaaaccttgnaactctggaaaaggaagaaagctgacaaaaaaataaatgagttaatacaagagtatacagacctgaaggttgcttcagagacaagggcaagccatgattccaaactactgntcannaaagagatgatggggggggaaacagcttgaggaaaaactgtctgttgcactaactggttgtagcaaagatcaagaaacaattgttgagttgaacaaggagttggatgctacccaaatgatgctagagaatgaacttaagtccatggtagctttaaaagattcaattcgatcatctgaagaggctctaaagacttcaagaagtgaggtttccaaactttccaaggagcttgaggaggcaaatgaattgaatgaggacctggtatcacaaatttctaaactccgagaggaatccaatgaaatgcaagtagatctcactaataaactaggagaggcagaatcactatctaaagctctgtcagaagatttggcttcagtaaatgaaatggttcagaagggacaagaagaactcgaagccacctctattgagctggcatctattgctgaagctcgtgacaacttgaagaaagaattgctggatgcgtacaagaatttggagtcaaccacacatgagcttgtcgaggaaagaaaaattgtgacagccttaaacaaggaacttgaagcgttagcgaaacagttgcaggttgattctgaagcaagaaaaagtctcgaatcagacctggaggaggcaacaaagtcactagatgaaatgaacaatagcgcgctgttactgtctaaagaacttgagagcactcattctaggagtgccactcttgaatctgagaaggaaatgctacgcaaggctctagctgaacaaacgaaaatcacaaccgaagctaaggaaaacacagaggatgctcagaaccttatcacaaggcttgagacagagaaggagagctttgaattgaggtgtagacatcttgaagaggaattggcgttagcaaaaggtgagatactgcgcctaaggaggcagattagcacaaacagttctcagaaaccaagagcaagaggaccaccagaggccagtgaaactctgaaggagcaacctgtgaatgattataatcagaagaccagtggagttgttgctggaactccacagcctgtgaaaaggactgtaaggagaagaaaaggtggcgcataaacatgtgtgtgactgtgtgtattggaagccctagccagagccatcgttttcccataccttcctatttagtaatttcattgttactcatttttttcaaaaaaatggcatcctttgcaaaatagcatcaatagctattcaagtgttatttacaccccccccccccccctagtatttcagttagtcgatgtattttgtttacgttttttgaaaattgaggtctgtatgtgtataaatgagttattgaatggccaacacgatgaaattaaggt

SEQ ID NO: 168954 - DNA, 462 bp, Zea mays
  Clone ID: MRT4577_85674C.1
aaagataaacaaaaccaaaggcccataagacaaaattgggtggggggtaggagttggggggggaaaaagactaattaagagaaaatttcaattcaaacaaaaaaaaatcattttcaagggtcccaaggggggcggagaattttatatggattgggtgggttttcctttaatggggggtggcattcggggggggttggataagcaccgccggccccactaccacttttttttttattggcaacgccgggaacacgtggggggtgttccccagggggccgactttttgggcccgatttggatttttgggtttttttttaaaaaccttttttttctttttctcccccttcttaataaaagaaaaaaaaataatcgtcttcaactatgtttcccgaaaaaaagagggcagcttggggaataactcgcgcacgtaaaaagggaccgatttcaaaggcagggcttaaa

SEQ ID NO: 168955 - DNA, 608 bp, Zea mays
  Clone ID: MRT4577_85675C.1
aaatgctacgcaaggctctagctgaacaaacgaaaatcacaaccgaagctaaggaaaacacagaggatgctcagaaccttatcacaaggcttgagacagagaaggagagctttgaattgaggtgtagacatcttgaagaggaattggcgttagcaaaaggtgagatactgcgcctcgtcgtcgagattagcacagccagttctcagaaaccaagagcaagaggaccaccagaggccaatgaaactctgaaggagcaacctgtgaatgattataatcagaagaccagtggagttgttgctggaactccacagcctgtgaaaaggactgtaaggagaagaaaaggtggcgcataaacatgtgtgtgactgtgtgtattggaagccctagccagagccatcgttttcccataccttcctatttagtaatttcattgttactcatttttttttaaatagcatcaatagctattcaagtgttatttacatcccccccccctagtatttcagttactcgatgtattatgtttacgttttttgaaaattgaggtctgtatgtgtataaatgagttattgaatggccaacacgatgaaattaaagtatctgcacct

SEQ ID NO: 168956 - DNA, 361 bp, Zea mays
  unsure (1)..(361): unsure at all n locations
  Clone ID: MRT4577_85676C.1
gtcccttaattcccgtttcggcgcgcgccttttttttttttttttttttttttttttttttataattttttttttttggaaaacaaacantatcacgagctggaactcaaaagtgtagggtgagaaaccacgtttaaaccacnaacatatcaaagggttattttgtgctactgataattcgactatagcttgcaatacattttttagcaaaagcaaactctgacccacattttctggccccccatttacacgtaactttttataaaaaacttccttatgtcctccacaatcgcaatgggctgccctttttttaacttgaagaccctttctaatacttaaagctcggtggctgtcgtgtccc

SEQ ID NO: 168957 - DNA, 114 bp, Zea mays
  Clone ID: MRT4577_85677C.1
ggggggccacagttttttaattttagaaatgggtaaacacgtataaagatgaacagactgttcatgcatcattattgagagggcgaaccacagacccctactagttattatata

SEQ ID NO: 168958 - DNA, 651 bp, Zea mays
  Clone ID: MRT4577_85678C.1
ggtgagaagtacggattgatgaatgtgagctcgatggtccacacaaaggagaatagggacactactctaaacttggaaccttcaccagatctgctgaccaaagtgccatctctagtagaaagaaaggtctccaagcatcccccagtactcaagttgaaaaggactatggccaccaagacaaaaagtcatcttgtggtcaaaggagcttcaccgactccagcaactccaaatccacttcctccggtgctggtgctcaactattaaagtctttggggtttgattcaagatgagtacgtgttgctatctttgttgaatgaaccgggtacgaggatccccacggggataaaatccccgctcgagttgggtacaggaaaaaacctcccatgtggctcttcgagaaggcagggaatccccgccccctcgtggggacgtgtttgggggatcaaaccccaatgggtaattcctcgtagccatctctacatgtaagtcctattcatgtcatgtgagtgtttaattttgtgacgttttctatcatacgtggaggcatgttgtggcatttttaggagattgttaatgatgaaaaaagagtgccacaaaactatgaccatgaatgatatgtctctaatttatgatgagaagtcacaagacgtc

SEQ ID NO: 168959 - DNA, 287 bp, Zea mays
  Clone ID: MRT4577_85679C.1
caaaagttcaaacacagaagccgcaaacatatgggcccgcccaacataaaggaaagaaaaacagccctaccacaagaaggcacggcacaaaaaaagaaaaggacacaaaaccaacccactaaaaaaaaacccagggcagccacaaaagacccaaaccccaaaaaaggacagcccaaccccaagcctaacaaaccaaaagagcgcaagggcagacaccccggacctagctcatggaggcccggcacagccacgggaattcaatgccagcccaaacgccccaaaaccga

SEQ ID NO: 168960 - DNA, 730 bp, Zea mays
  unsure (1)..(730): unsure at all n locations
  Clone ID: MRT4577_8567C.1
ggccgcttttttttttttttttgtgacaacaggatataccttattttaacacaacttagttagaggaaaagttccatgggaagaacacaaggtcgaaaatggagagaacaaagatgttagaccaccaaactacattgttcaggaccttcttaagcatgtatttttttgataaacagacttgagaggggctacccttaaatgcctcattgtagatcctccaaggaataactactgtggagagctagctcaggactgatttttattggatacggttctatgcacaaacgaagtgtcgtccagccactcatagatgatggcatcattcggtgcagtgacaagctccactttgtgggccttgtttaggtcattagatagctggtagaagctgtccatatgccacataagccagagagaccaatatgtagcgaatgcaatggtgatgaggaacgacagacttaacagtgattaatcttgcacactaaagaaccttaatagtgccattgaaaaatacattgttgtcagggagctggctcaatctcatacactatgtaaccaaccagatcataatctccaggctgcaagaacgttgctcacaactaattaataagggtaaggcgtgcttgcacagaacaggtaactgnaagcggttgaagaaattctgaacaggtaaagcgtctggccatacatattatgggcaaataaggaagatgcgagagcttgaatgaacagc

SEQ ID NO: 168961 - DNA, 288 bp, Zea mays
  Clone ID: MRT4577_85680C.1
gggggccaaagaaaacatgtttttttcgtttacataaaggtgggctacttattacgttccccccgttttttgtcggggcccgtaaagaattttccaaagttcccagctttttgaaaggggtccccccccaaagaagttttttgggttgcggggttcaccagggggcccgggttcctgggtgttttagggctccccctccgggctttttgggttcccccaatccataagggggtgggggggggttaaatccttttttagtcttttttaacttgaaaggggttttatccc

SEQ ID NO: 168962 - DNA, 219 bp, Zea mays
  Clone ID: MRT4577_85681C.1
gacgtcgcatgcacgcgtacgtaagctcggaattcggctcgagcttactactctccctcaaactgtaaacactgcttcaccagttcgctgcttctcctcgtgctcacaggcgcgtcgatccggagggcgcctgtcgacgtcggcgggaacgtgggcccgagcaggagcgggactggggaccttgtagctataacccggtggtacttcattgatgtggga

SEQ ID NO: 168963 - DNA, 392 bp, Zea mays
  Clone ID: MRT4577_85682C.1
acctacgagtgagaccaactgtcaacatcaaaagcaccattatggacccacagtggcccctaagagatggcgtcctcatacgctccgtgctctttatgcacgttctgataccgacaccattttctcacagctctcacaagctcctatagcttccctttttcccatacacctcataaaagctgtctacaccatatgtgaacacccatttcttaacacatacacgatccaacacgctctcgcacctggcatcacacctatatcactcgtggtcctaccactatcatgacccatattacaggaattacctgatgcgcaccaattggcacaaaccattacggcacatcatctacaacaacatgtgctagcaaaccttggtgactactcgtagctac

SEQ ID NO: 168964 - DNA, 484 bp, Zea mays
  Clone ID: MRT4577_85683C.1
aacccacccgtttttagttaccccttccttttttggggtaaatttaaacccccccccagtttaaagggggtttgttaaatcaaaaacccccagaaaaatttggggggttttacagaaagaggggggggcaaattataaaaaaacctcccccccccccgggggaaaagaacaaacaatacccgctttttgaaaggcggaaaaaaagggggccatttggggtgggggaggcccctgaagggaacaacttttttgccggaaaccctgggggggcctttgaagaaaaaaaggccggaggaccctttttttttccccccccccccccctttttgaaacggggggggggtttaaaaaacttttttaaaaagcggccgggctttggggttttggctaaagaaaaaaaacgcgggggtgaagaatttggggggggttttggccagaacctgcccctcaaccctggggagaatttatggagggaccctccttt

SEQ ID NO: 168965 - DNA, 1198 bp, Zea mays
  Clone ID: MRT4577_85684C.1
cattgggtccctcgaggccggccgggcttactcggttcttcctactcccgatccatccgcagagggcggtgtcggcctcctctccacccgacagcttggccggcgacgagcaccaccaggacaccagatttgactattttatgagttcacaagccacccagcatgaagtttttagaatacacccccttcgacagtataaatttgttcctcgagcagctcgaccttggtgattgtacaatcagagggaaccttgaggccttctcatgcaagcacactgcgacagaccgccggctttcaataagcctagaacatgagattcttgattaccttggcaagtcctctgatagtgacccgtcttcaccagtggagcacttggcctccagatcaagccggaaaacattgatatatctagttctcactcttggccacatatatccagattatgatttcagtgctgttcgggcacacttgttcttccaagaagaggagttggaaagtttcaagcagatggtagacacctacttatctgatgcctctaggcaatgggcagccacaaatgaaggcagttctcttctggacagtatgactaaagcaattgatgaggttatcaaaattaaagagtgtgacatctacagctataatccagactctgacgcagatccagttcttgagaaaggggccatatggtcgttcaactactacttctacaataggaagctaaagcgagtcgtgagctttcgatgttactgcactagcaaattatcaggagatgacttcttaaccggtgttgcgtctgatggtgaagaggaagatgccttgattgacatggacatatgactgaccgtgttctgctcgctacctgatgtgcgtataatatagagcatgtatgctcattcctggtagggaacttttaatatgacgcacttttaccgttgcctgtaaaaaccatggcacggtttagcgttgtctgtatatgcggatttgagatttggtgacgggaaactaccaatcccctaggcttgaactgccacggtaattcggtactctgttgtttgctagacctgcaatgaataatgttgcgccaactgaattgttcaaaataaacaatagtaaagtcccctatctggaaaaaaaaaaaaaaaaaaaaaaaaaaaaaaaaaaaaaaaaaaaaaaaataaaaaaaaaaaaaaaagcggcc

SEQ ID NO: 168966 - DNA, 547 bp, Zea mays
  Clone ID: MRT4577_85685C.1
gatatcaaacattaatatttacatcacatacagatgcatggttcctttgctagctaaccaataagcccgagtaactgatgtacacgcgcagagtatcaaaacaattgtggtctgcaggacgcgtaccacactcttcttttttcatctttaatcacaaaaacagagagcaaaatgctggatcatatatcgtattcaagctagcacgaagaaggagctcccagattcacgtgtgtacgtctgactgactgtacctgcggacgtaagcagctaaaattagaagccaagttggcgaccgaccgaccgacggcgtttcattaggcagaggcggtctgcgacgacgacgacgacacggccggcgagccagagcaggcgtccccgctgcgccgcgccccggagcagctgctcgactgcctctccggacgcggacgcggtcgcggtgcgggcgtcaacgtcgtcgccacggcgcgtacaccatgtcggcggttgttgtcgtcgtcgttccgacgcgtcgccggctaggtgcacctgctgctgctgcggctgcgct

SEQ ID NO: 168967 - DNA, 315 bp, Zea mays
  Clone ID: MRT4577_85686C.1
cgacccacgcgacccacgcgtgcgtttgctgttcgggccgcggctctaacaggtgcgatttcggccgcgtgttgccgtccgtatggacacttcatccttgaccgaactatgagagcccccgactgcgttcacctgtgcctggagggcacccctgcacacgttgtctggcgctgtagactgctgcgggcgacaacatcgggtcgaccgacgaccgactccaggggcagaggtatacttgaggtacgttgaaagcgaggggaatagcacccaccacatgatgactgcggctgaatcgaatggcctctgttaacacca

SEQ ID NO: 168968 - DNA, 1164 bp, Zea mays
  Clone ID: MRT4577_85687C.1
taataactcatggccggccgaatgtggcaaacgctcgaagaggggagaggagacagcggtcctatgtccgtgtggtcgtgcggactgcggacttctcttcctcattccatccccgctgccccatccggccatcccacagcgaatctcccaaaccccggctccctcgattcccaatcccacccctgccacgaagagatcagatgacggcgagctgctgctgatcgagtgcagtggaatcggaggcgatgcgggctagccggccggcggtgcaccctgtggaagcggcccctccgccgccggccgcggcggcggaggggccggaggcccaggtggagggtgccgcgcacccgcgcggggtgcggatgaaggatccgcctggggcaccagggacacctgcggggcttggtctacgccttgcgcaggccttcttcgcagccgctgcgctcgccgtcatggcgtccaccaacgacttcccgtccgtctctgccttcagctaccttgtcgcagcagccattttgcagtgcttgtggagccttttgctagcctttgtcgacatttatgcacttcttgtcaagcgatcgttgagaaatgcccgagctgtatgtatatttactatcggagatgggatcacaggtacaataaccttgggcgcggcatgtgcttcagcaggaatcactgttctcatcggtaatgatctcaacatatgtgcagagaatcactgtgcaagtttcgagaccgccacagcattggcttttataagctggtttgcgctggcgccatcctgtatcttgaatttctggtcgatggcctccagatgataaatataggatgttataaaacatagtatttttgaatggtttctggacaaggtcgctgcttatggtagcagcaaagcaacgcggtgccgtaaagctaattgtaatacccagaaattgttgaatggctgtggaatgtagcacgtggtcgaattgtctgtacaaaatacggagaggccttctttggatctgaaaaaggcttctgaatcttgccagtccttcctttttacgttaacatgataaacctgtgtggtttgttgtatagaacgatggcatgcctaaatggctcgagatgattgtttttatgagtcttgttggcatcacgcatataagtttatttaacccttgt

SEQ ID NO: 168969 - DNA, 123 bp, Zea mays
  Clone ID: MRT4577_85688C.1
tgcatcaaggtgatcctactaagtaccatcagcaataaatgttcaaagatgcacttccagatgcggaaattcaagaagtggatgccgaataagaatgccttctttgggatcaccagtgatggt

SEQ ID NO: 168970 - DNA, 340 bp, Zea mays
  Clone ID: MRT4577_85689C.1
atctcggtttattcctcttttggaaccccaaactaaccggccacgtgctacaaataagtggctgggggataaacccgccaccgcagtttattttacgaagatctaccccaacagacaacagggcgttgcttctatcaatatttacactttctggaactaccaaaagttggaagcctgcccaaaatcctagtaatggaaaacctaaatcgttttgattttctgaatatgaatctactgaaggcatacttagactgacaccacttgttaacaaatttagcattgatcgtcacgaactggtgattaatataaatgatgccaccaatgaatacctcaacaaaca

SEQ ID NO: 168971 - DNA, 301 bp, Zea mays
  unsure (1)..(301): unsure at all n locations
  Clone ID: MRT4577_8568C.1
cgtccgagacagggaacctgacnttgaatacactgaacagtttttataccgcgactgaatcacctgtcgatgttgtaatttaacctgtgacgacacgtcacccctcccttcaatcatggatggatagcagcaacatcaatactgtcgagatccctgatgggctacctccaactccttctagaagcaagaaggacaagctttctgaagaggaaatgcttgcgaataaggccgaagcttctcataggcgcatgatacaagtggaaaatgccacttaaaaaagtgatgcggaagctataaagaa

SEQ ID NO: 168972 - DNA, 169 bp, Zea mays
  Clone ID: MRT4577_85690C.1
tatgggaaagcgcctccgccgtcgccgcactgagttctttatagatagattgataggagaggacatccatgctcttgtctgcaacaatgaaactggaatgtgcaaggatggtgttcggtggcgaggttgatgataagctgttaatatttctcctacagtattgctaaat

SEQ ID NO: 168973 - DNA, 561 bp, Zea mays
  unsure (1)..(561): unsure at all n locations
  Clone ID: MRT4577_85691C.1
cccacgccgtccgcttcacccggnagttcgtggaacaagttgcccggcgaggaggtggcccggcgatggacgccgaacgtgngtgnngtcgacggcaggggtctgtgacccggggcgtggcgcctctgcggcgggccatggnnagttcgcttctcgcttctctgtggaccagcttctacgggcaaggggcaagggtcgtacgagaatcgccaaacccatgagtgggggaggtgacgaaccantggtactgtccttcgagggaacttgaaccctggttcaagtgggcggtgcagnnggcaccgcccaagggtccttgataccatgtggccaaacggcagcgagggagatgggaggttgcttgtggacccgtcgacgtgcttgngccgggccaaggcgggacgttgtggttcgcgttggtcgaggaggttgttgtngtgcgccacggcaccaggatcgttgccgacgcgctgctgcaggacgccgccggccagcagtttgaccttattgttgaacccggtgggatgcctggcgtgaagacgacgcttgcagacaaagtggagc

SEQ ID NO: 168974 - DNA, 422 bp, Zea mays
  Clone ID: MRT4577_85692C.1
gcccgaaaaccccaaagccggaagtccaggttcataaaccccacaatgtaacagggtggaaaatctggcttggttaaaaggggaaaaggggcttcaccggctgggaaaaggcaaagggacaaaaggatccgcctacgggaactttttaacaaaaaccaggggggggggttcatgggggacaaaggaattggaatcggggggaagggtaagggccctccaaagggcctttaaaaaggaaaacaaatttaagggaccccgctcccggaaaacctgaaggcccacctccgagggggcggcccccggaattccgtaagggaacccggaaggctcgcactagagggggcccttggagggggggaacagaatttaagcacgatggcgggatgccctgggggaccagccactgaaaaaaatttggcttt

SEQ ID NO: 168975 - DNA, 1734 bp, Zea mays
  Clone ID: MRT4577_85693C.1
ggcagaacgtccggccgcgccctgattgtccagccatcctcaggcagcttcgagttccacgacgagagcaccggcagccgcacacgcgtttgtctcctcgccggaccttcccggcaccgccgccggctctccctcacggtccactacactccacagcaccgccgtcgcacaacgacatggcctcctccgctacctatctcatgctcgccagcgcccacgctcccctcgctcctctcataaggccaccgccgatggcccttgtcgcgagaaccgccgcaacctccatcactaggcgcgaaagagccagtgtccctctgttagtcaaccccgctgcgtgccggccgggactgcggcgccgtggctgggcccatatctgcagagactcgtccctccagggcccttcgggcgccgattctcctgctcaggagcaagaggatctgaagaagagcgaggcggtgtcagaggctgcggctcggattgccggaggcactggcgggacgttaagcgactggagcacgtcggtgctcatcttcgggatctgggcgggactcatgtactacgtcttcctgctcgcgcctaaccagacaccataccgagacacatacttcttgcagaaacttttaaatctgaagggcgacgatggctttcgaatgaatgatgttcttgtttctctatggtacattatgggcctctggccactagtctacagtatgttgctccttcctactggtagaagttccaaaagcaagattcctgtgtggccattcctggttctttcatgcatcggaggagcatatgctttgattccttactttgtcttatggaagcctcctccacctcccattgacgaagatgaaattggacaatggccattaaaatttctcgagtcaaagttaactgcaggactagtgtttgccctgggcattggactgatcatatatgctggcaaagctggtggcgacgattggaaggaattcattcgatacttcagggagagcaagtttatccatgccacctgccttgattttactttgctatcagccttctcaccattttgggtctataacgacatgacagcaaggcgatggaaaaatggttcatggcttctgccgcttgcactgataccttttgtggggccctcactgtatcttctactgcgcccatcactttcttccttgctggaagcatctgcttcagcatctgatgagttcaaaaaataattggtatctaactcagaactgatggagaatttggttgtgagcacatgacatgggtagagaaatggttatctggcaactgcatttgttagcccaaatgctatgtcaattgctgatttggaggaaatccacaattttgcatgccacctccctgttcaaaatgaaaggacccaatgagatcctgacaatgaagatattgtcagtattatcatcacctgggtgcctcacaaattttgtcagtgttatatttatgtgtaatccacaattttttaatcactgatgaagcagtgtaagtatgcaacaaactactaggatattatacttgtatacataggtggttcagagtatagaatattttgctcctgttacagtggaacgtaataagccaaagtagtatcactacacctttgaagcacgaatttcttcgtgtgtcgccctccctcccgtgctaataatgcagtgtatgtatgcaacaaactactaggatattatatttgtataaatggagatgaaatcc

SEQ ID NO: 168976 - DNA, 2021 bp, Zea mays
  Clone ID: MRT4577_85694C.1
aacctctcctatgttgatctttcaagcaattttttgcacggctcactgcctatgggcattggtgatttgagcgcgttgacattgctgaaccttcgtcagaacaactttactggcgaaatcccaagaacaatcaccaaacttaagaatctgttatacattgacttatcaagcaacaatttcaatggtagcatacctgatggcctccctgatgatctggtcgaatttaatgtttcctacaactacctgtctggctctgttccaagtaatttactgaaattcccagattcatctttccatccagggaacgaattgctcgttcttcctcgctctgaatcattaaatggttctgacaaatcagatgaggcaagacacggcttgaagcgtgggattctatatgcattgattatctgtgttgttgtatttgttactgggattattgtgcttttgcttgttcattggaagatcagtagctggaaaagtagggaaaaaggtactggccaaggtaaacatgtgggtcaagtccagagtgctcagagaagtgcagaaatttcaacaactgaaatgcatgatgtagcattagaatcgtcaccttctgcagagtatggagctgtttcattgcctggcaaggaaagacgacatgaagcccaagatgcgccaattgatgctgcttatttcaacgaaccagcaggtagtagctcagcccgtaaagacagcacaaagtcttcgatgccttctttatcatcgtcgcctcctgatgcacgctcccagcatcatcactctatccttagagtgcactctcctgataaactattgtgagatttacatcttttcgactatgcagttgtgttcacgactgaagagctctcttgtgcccctgctgagataaaaggcaggagctaccatgggacatcctacaaggctacacttgacaacgggtacatgctgacagtgaagtggctgaaggagggctttgctaagagtaagaaagaattttcccgtgaaataaagaagcttggcagtgtaaggcaccccaatcttgtccccttgcgtggctactactggggccccaaagagcatgagaggatcatgatatcagactatgcagatgccacatctctgtctacctacttgtctgaatttgatgagcggaatctcccacccctatcagctggacagcggctgaacattgcgattgatattgcccgctgtctagattacctgcacaacgagcgggtgattccacatggcaacatcaagtcgtctaacgtcctgattcagaactccactccatctgctctggtgactgactacagccttcacaggctgatgactccaatcggcatggcggagcaggtcctaaacgccggcgcgctaggatattcccctcctgagttttcaagcaccagcaagccatgcccatctctgaagagcgacgtgtatgccttcggtgtcatcctgctggagttgctgacagggaagattgccggtgagatcatctgcatgaacgatggcgtggtcgacctgaccgactgggtgaggatgctggatctggaggagcgtgtctcggagtgctacgacaggcacatcacgggtgttgagagctcggaaggcgccccacaggcactggatggcatactgcgcatcgcgctccggtgtatccggtcagcatcggagaggccggaggtccggacggtgtttgaggatctcttgtccttatcgtcgtgaccgtagttattggtagtgtacatctcgtacttgcatcagcttgtggaaacttggagggtatactaacaattgctaggatttcggggtgatcaggtgatgtgtgtggtctccttgagcattcattgtttgggtcgctctttctgggaatagttgattcgtttttagttagtccacaattttagcactagatgattgtgagaataatttttgtgcattgtgatttcagacactagaaaggaaaataaagatagtcttattgatttgttgcacaaaaaaaaaaaaaaaaaaggccccta

SEQ ID NO: 168977 - DNA, 357 bp, Zea mays
  Clone ID: MRT4577_85695C.1
cggagctctacgacatcgccttcctactctttggcggcccgactaggcagacctacattggggaaagcatcgtgatgctcggcggttatgtcgaccgctagcatccgatgtacctcttattcgaccttaccaaagtttaccgctcctactacgaactctgtaacctatacatgagcgcacctgcactcgacttatattcataggagtacgttggcgtgcctcacacatgatgacttgttatcagacaagcattgcaacattacgatgctacattctctttggatcctgacatgaaccacactagactaaatcaaatttaccgcagtctaagctcaatgttatgtttacctgttacca

SEQ ID NO: 168978 - DNA, 650 bp, Zea mays
  unsure (1)..(650): unsure at all n locations
  Clone ID: MRT4577_85696C.1
gccggccgggccgggattgcctatctaatggatcgcacactaacaatctgaagtcaaacatctaccagcgactcacacagcaagagcagcacacactgagctactaccaagcagcacactactgctcggagataggcgagctccatgatctcctcgcgagttctggcggcggcgcctcagggtctgccagcacctcggccgacacaactcctactacgccgacacctgctccaacaacaagatccaaaccgaccaccactatgggaacgacggtggccagaccgtcgaggtgcacgacaacaggagaaaagagaagatcaacgcctggaacgaggacgtccacaagcacagggagaacttccacggatacaggtaaaatgatacagaccagngatgactggatctcaccacccgttgagcgctagcctgcgtgcaaccatgtgatgcttcgtgatctgactgcgtgagcctcgctatcatactcggctatggtacccgcatcgactacaactccagtagcgaatcaccacaaaaagatatcgaccggaagaacatctcgtcatactacagaaaacaagggaatgctataagtagctcctgtatagactactgtatcagcaacaagaatcaatgctacacttcatttaata

SEQ ID NO: 168979 - DNA, 380 bp, Zea mays
  Clone ID: MRT4577_85697C.1
ggaaaacttgatgctgactggttagaacatagacggcctatagcacgaaggaggcctaaacggcattgccaccctttacaaacggatggttgattccttgcctccaaagaatccctagggaaccataaaagatacaacctatgcgttggaggcataggggctacatcctctttgtgcatatctatttttcaccactggtacaaccggcccatatgtattaaaacaacggcctgtaaatgacctcactaggcgcgaaacattcacgcggaagaacatgaaagcgtccagactactcattgctagacagaaacttaaaattgactaacaaacacatgtcacatgaccctggaacaggccccggcttgaactcccagaccttt

SEQ ID NO: 168980 - DNA, 345 bp, Zea mays
  Clone ID: MRT4577_85698C.1
atctccccttgtcctcttttaaaggggatattccccccacacgggggggcgataccagggcccccgggcccgcccccaaggggggccaaaagggggccaaagccggccccggggagaaagaaaaccgcccccacagccacacacaaaacacggccccaaacgcaaaaaggaaaaacccgggggccccaaagggaagcccccacacacccaaaaaggggagcacactcccccctttgcagagacgaaaaacgccccccccccagcgaaaaaaaaaagccccccacccccgaagagaaagccgggcacctagggggcacaacccctttcccaatcacacacacaccc

SEQ ID NO: 168981 - DNA, 280 bp, Zea mays
  Clone ID: MRT4577_85699C.1
gaaggtcatcggcaaagacgtgattgcggcgaactggagacccgatgccgcttacactggcaacggccaacattactagacttgggattgccttggattcatgcggcacagcgggctatggaccttgagcagctagctaattaaggaggcagcatgcaccgctgaccttatatactactgagacttacagatagtgtatatgtgatgcttacgttcgggttcatgatcgaattccagagagtggtaaacaagcgaaacgttacatcgcaaccttaaatag

SEQ ID NO: 168982 - DNA, 356 bp, Zea mays
  Clone ID: MRT4577_8569C.1
cgtccgaaaagcgagatcttgcatcagcgagctaactaagcaagtatgctaatcgagcccgaggcaacgagccgatcgtcaagcgcatgatagaccactacccacgggctccatcaaaagctggacagtggagatcgcatcgcctgtcgccgcgctgcgcctcttccgcgccgccgtgatggacaggcacaggctggcatccaatgtcgccgcccacgtcatcaccagcgcccatgccgtggaaggcgatggcggcgtcagcagcgtcaggcagttcaacgtcaactaatccatgacgtgcggcatccttaaggataagcgcgacttcctggacgtagacaagtgcgaatgtacat

SEQ ID NO: 168983 - DNA, 364 bp, Zea mays
  Clone ID: MRT4577_856C.1
cggggtagtcaaggaaaacttcatggattaatagggatcacaaagttccacatttgttgatgatacaatggataaccatggaactgggtaacttttaacgatggttcagttaatggccattaagcatattcttctttgttgcctttgcatgaatgattgacatgccctcaagaccatcgataatagatagtgaatcatttgcaacccacgcattctgccttgttctacatcttgttcaccaaccgcccctttttggactggtgcttcccatagggtatggcagaaagcgagatattctaggctcactagtgcctggcatgtggtactgaagaactgcatagtgggcagagcctattttgtctag

SEQ ID NO: 168984 - DNA, 362 bp, Zea mays
  Clone ID: MRT4577_85700C.1
gtgaacacatttacaaatttaaactttacatggatgattttaatttagttttaaaacaacatatattaaatcaagtatgtctcgaattttgtctattgttttgcttgtgatcgccttgtttggtgcctgctctcaagctttcctttataacatcactgtattcaccggaaataagtttgattccgctactggttctatcaaagtcaccgtcaatggaaacaacaatcgtcgcaccaacgaattccgcatggttaacaacaacttcattggaagcaactacctttattcaaacttgactgatttgccattcaatgtgcaagaaatccaatctgctaatgttcgattcactttgaccaacacct

SEQ ID NO: 168985 - DNA, 371 bp, Zea mays
  unsure (1)..(371): unsure at all n locations
  Clone ID: MRT4577_85701C.1
ggcatcgacgagatcgacctcangggtaatcggacgtggatcaaagtcttcgccatgcacaacgcccacgagcgcatcaccaagctcgagaacatgcgttggcggatctggcacctcacgcgtaagaagcaggagttcgagcatagtggagaccccaagggtcattttcaggcactgctagctctagcgatggatggtttagagaaaggaaaggctggcactgctggctcaagcgatggagggtttggagaaaggtcgttgttggtgaatgtggtgcggattatgataaacttcagttctatctggcagatgtacaaggtaaaaaggaaaacctgttgttgtagggattcttcagcaaggtgggcggtgga

SEQ ID NO: 168986 - DNA, 665 bp, Zea mays
  unsure (1)..(665): unsure at all n locations
  Clone ID: MRT4577_85702C.1
aatttcggcacgagggaaagccgttggcaataccgtcttgcaacccgttccctgcccccggtctacttcccaagaaatcagtactggttttcctcaaggggaaggtccacttcaagacctgcttttgccctaggcctttggaaatatacttcaccctttgtcacctcctcaaaaaaagagcaccttgtgctcaagccggctttcgagaaagcctttgacatggttgagcatgagttgattttccaggtttctgatccacaaaggcttcagcccctaggtggatcaactggattcggagcatccttcaatctggcaatcttcagtgttacttaatggagttcctggtaagtccttccattgcaggagaagtgttaggcaggggcgatccttctttcccccttttgtttgtcctggcagctgaccttcttcagagcatcatcaataaagctaggatgcggaatcttctcaagctaccttntaccggatattggtgagcaggatttcccgattattcaatatgcagacgacactcttctgattntgnaagcatgccctaagcaacttttcttcctcaaggcaatactcaactcttttgcctcttctactggcctgaaggataattataatanatcaanatatgttccctattaacatgtccccgataa

SEQ ID NO: 168987 - DNA, 885 bp, Zea mays
  unsure (1)..(885): unsure at all n locations
  Clone ID: MRT4577_85703C.1
cattgggtacctcgaggccggccgacacgttgcgtgtggtatggtcggcttcccgatctattgtgcccattcaccatttctcccgtcactttccccaccgccgccacactcgactcctccgcagtgtgccgccgccgctgtctactaccagattcgtcggccatccctcctctcccggcaatggtacgaccaaggaagagctggccgggcctttcccctgctgccggcggccccaatctcactcgcgcggcagagatgaaccgctcggtgccccggcttcctgcctgcttctacaacagcggcaacctccggatcctcgccgacagcaacgtccaggacacctcaccggtgggcactcgacgaccattcaccccccctgctcgtgcttcacccacaacaagcacattcagttctctcaacactggatcttcaccgtcgttctctgaactgctgcacagttctgatggttttatgcgatacatggtggaagagcaaccacaaaattgctcagagaatgaacacctagttggagcaacatcacatgttattcagattgatgataaacctgatgaaattaggaaggagacaagactaatatggaaatcagatgaagatgttagagtgatgagtgcttggctgaagcattccattgatccattgagtggaaacaataaaaaaggagataagtattgcgaggatgtggtgaacgagtacaatcttactactgagaaaatcagatggaggactaaaactcaggtaaaggagaggtggcacaaattaaatagatggacaaacctattcaatgattgntggttgaaagctagngatatatacactagtgggtattcggaccaaatgtggattgataaagctcacaagttctat

SEQ ID NO: 168988 - DNA, 270 bp, Zea mays
  Clone ID: MRT4577_85704C.1
cttctagattattcactaggctatcttacttacaagatatctggaaaacaagttcttagtgtctacacatgtttcagatctctcttttgagctatgccatgcatgaactttctagtatttaacaggcttacagtcacttcctaagaccagatacattggactacgtaccttgttattttattcttattcataccatcaaacttatatattatatattctatttcctagctagttatccagctttccatgcttaatatgttattaatggtt

SEQ ID NO: 168989 - DNA, 223 bp, Zea mays
  Clone ID: MRT4577_85705C.1
aaccttaacatcgttaactcttatcacatgacggagactgagtgatcttgtgattccgaaatctcatattcaatgctccctctatttctgtactgcgcatccagcgcccgacgagaacccgacatgttcgacccgatggctttccctccaaaaccacattcagggccttcgcgccgacggcgccaacatccaagttgactttggccacccttccgagcagcaa

SEQ ID NO: 168990 - DNA, 453 bp, Zea mays
  Clone ID: MRT4577_85706C.1
aacctcgcgtgtgtttgggccggcactcactctccccgattttccgccttcctattccaggccccgtgcgctagatgatcgccatgtgtgggccctacatgctgtgggattatgccgcctgacgctgatgaaggttatcatccttggcgatggtggggtctggaagacttccttgatgaactaatatgtgaacaagaagttcatcatttagtataaggctacgatcgaggacgatttcctgatcaatgactaccacatccaggacgggatcttcattctgcttatattgtacactgctggacaggagaggatttagaggatgaccgttgcattctaccgtatagcacattgttgggagctattctatgatgttgactctatgaagtcctttgacaacctgaacgactggctagatgaggatctaattcaggctatcccatctgatactgataa

SEQ ID NO: 168991 - DNA, 151 bp, Zea mays
  unsure (1)..(151): unsure at all n locations
  Clone ID: MRT4577_85707C.1
agcgcgaaggcatttacgcctntggccgtaccccggaaaatgggggaccaccggcgattcggcgccgtgagcgtagacatgattaaagncagcaaccggcctaatgcttgccgagcctgacgccatgcatgatcccccgtgcccgtacaac

SEQ ID NO: 168992 - DNA, 310 bp, Zea mays
  Clone ID: MRT4577_85708C.1
gcgggaacaaaccacactgaaagaatagtggggagtggcagtattcgtctagtagatgcagtcgcttacatgatcacttcgaaactgtagggctccagcatcaaatcattttacatgacgaagaaaatcggcaactgttggagaagaccaacaaaaataaagactgcactgaagaagcatggaatgcaaaagacagacaagaatcaagccaataaagcaaggggagaggagatggacaccaaggcaaggactaaagcacctacagggtacatttctgcgtgtctgttaagtcgctggagcttcctttttt

SEQ ID NO: 168993 - DNA, 439 bp, Zea mays
  Clone ID: MRT4577_85709C.1
ccagcaacccaaagttgactaggagacgacggcctagatctctcacgaactcatcgcaacatcctccatgcgcctcatcctgcggtacctgttcttgacctgggacttgagattccaggtaccaggatgatctgcaggtgacacgtgttctcgctgtaggtataaggatgcccggtaccacgggtcacggcgaactgcggatccaaggcgaaggagtactctgatgagcaatccgcgcgacccggcgacgatacagagctccgattcgccagatacccaagcgatagtgtggtccgaagctctcggaccaagccccaggcacctaataacgacgggagtgcgggatggctatggcggcggaccagattctctttccctgcggtagcactcttcttctcctgtagacatggtgacgctaatccaaggcagagctcgattc

SEQ ID NO: 168994 - DNA, 102 bp, Zea mays
  Clone ID: MRT4577_8570C.1
tagacgcctgggcggtcgcgtgggagcaactggcattggaacactgttgcaagatttgtgatgggcactgtacaggctctcctcaaggtgccacctactatc

SEQ ID NO: 168995 - DNA, 367 bp, Zea mays
  Clone ID: MRT4577_85710C.1
gaaacaacgcggaagttttaaatgtgttttgatgtgatcggaatgcaacttgacccaaagcaaatatgaccctattgagctagtgcttagcaagaatatgcatgcgccaaacacgcatatttgacataaaatactgatcacatcattcacatactggccatgacgtccaggcacgctacatgacagtgatgacacacactacatcttgcccgacagctagctcggctctcaccagcaattcgagggaggctacaaacattgatggatgatcagagcttcttctgaacgttcttgagatatcgcgcgaagactatcgacgagcccagcttgacaactctatacatgcgcttgaattctgctaatgata

SEQ ID NO: 168996 - DNA, 609 bp, Zea mays
  Clone ID: MRT4577_85711C.1
taaacccttctctccgcctcgccaggatgctccgccgcgccgccccctccgccgccacggcgctccttcgccgtgccctctccaactcgccacggccacgctcctccgccgcggccaccgcagtcgcgtcctcctcggccgtgaactccatcctcctccgctccctcaaggagcactacctcgaggtctccaaaatgacgcccccgcccaagatcagcccgcccaagccctacaccatcgtcaagggcgccctggaccagacctcgggccccgtgctccgccgcagctacggcgaggccggcgaggagatctccatctccgtcgccaggctctccaacatcatgccccccggtgccgactctgattccgacggctccgacggcgcaggcggggtgagcgggtcaatcagccagctcttcctccacgtcgacatctccaggccagagagcagcaagtcgctgcagttcctgtgtggattgtaccctgacgccgtggggatccactccgtctgccttcggtcgaagacgtccgcgtctggggcggtggcggtggccgcggcgacgaagggcggtggcgagtaccagggtcgcatcttccaagagttggatg

SEQ ID NO: 168997 - DNA, 385 bp, Zea mays
  Clone ID: MRT4577_85712C.1
ttttcagtgggcgcgatcgggctgacttagtcgaagtcttaatcgtcaccgcccctgacatttggaatggcggctgccgccgtttgaagaggatatgccgctgacgccgccaggagggatcacatcgcgagctcgcctctggccagggtaccggcacaggcgacatcgctgtacatgctgagccacagtacgccggcggcgccgagcgtgctcgtcggggacgcgtatcgctccgcatgactgtcgtgctgttcgtcctacgttaggaagctctcgcgcgtggccagtagaatgtagttagtgcgtgaacaggtttcggagatcgagcccgggtcttcaactggcgctgatgctaaacagtacgttggccatggtgcgtgcgatg

SEQ ID NO: 168998 - DNA, 234 bp, Zea mays
  Clone ID: MRT4577_85713C.1
caaaaactacatttttctcaaccttcaaagtcgatccaaagagggccatttcgagtcaagcttggacccctaaagatccagcaactgacctgaaatataggcacctaacatgctccgaagcaggatccaccaggtgatgaattggaagctttatgctcagcaaattgtgaatgccactagagctatcaagtcaacgaggctcaggcaagcgaaagaggaggcttatctagaaat

SEQ ID NO: 168999 - DNA, 416 bp, Zea mays
  Clone ID: MRT4577_85714C.1
gcgaacctatcttgtgagtatggttcatcttatacagatgatgatatttgagtaaactggtcagatcaacaaactttgtggggtgttcatttagaataggggtgtttggcactgctctgagtttcagctttaacatgaagctatggactgtggtgtataatataaatgtaaatggttttaaaaaatattttagtctaaatgaaaaacaaaatgacttgtctaaatatattctaaaagtttgtaactttaggttcatgattttttgaagctcctaatgacctgcttcatcaacttcaccaaactttatgaagttgaagcaggcccaaacaagtgtttgaatacactagagctaatagttagttggctaaaaaattgctagtggaattagctagctaacttactaaaaatagctaata

SEQ ID NO: 169000 - DNA, 204 bp, Zea mays
  unsure (1)..(204): unsure at all n locations
  Clone ID: MRT4577_85715C.1
tgagtcgtattaaacggagggngcgctggtggcgtcgttggcgatacagcgttttttgagcatcagatgatacgtgaggagactggtgctcaaaagctatccagatggggtgatctggattcaatgtatgcgaaatcaaatcgccgaggattgacttcattgccgatgggcgcacaggtttggagattccaaggagttgtgcat

SEQ ID NO: 169001 - DNA, 789 bp, Zea mays
  Clone ID: MRT4577_85716C.1
ccttccgcccgtcactctcgtcctctcccctcttgctgtgtcgccgcgcgtggaagacgttatcgccttcgccttcctcttcctttccctctccctgaatcctgatttctattcaccttcttcccctcctccgggcggaaggcaaagacctacacgcctatccctctccctcccgggtcccggcttccccttccctgctccccagatcgattcacccagcgggaaaagcggcgcgcagtggggtgcagcaggcgcagcgggctcggcgggcggcgagcggctagccgcgacgggcggccaatctacagcggaaggcggtgggcggctaccggtggcacatcgacctacggaaagtagaaagggttgcaatctagcacatattacacatcagtggctgataagaaactgcatccagtggatgtaaatttcattggatttgagttttggttgagatggcagttggattgacatctcagctgttccaaagagtaactgctactgacatcttttgccaaaggaacaaatttaggagttctgagatgaggagttctcttcccttgccatccacctcgtttccttcagttgctgataggcgagactgttggggtcgcaatgtgttagagagtagctgcatgcccatgctttatacacctcgcagatatagatctttgggctttagatcttttgccttgccaattccctttgaaggaaattcctcttgtcaagaacacatcattagcactaactaggtcatgtgatgctttacttgcaaatcctgctacctcactt

SEQ ID NO: 169002 - DNA, 595 bp, Zea mays
  unsure (1)..(595): unsure at all n locations
  Clone ID: MRT4577_85717C.1
ccatgccagacttgcaaccggtttcctcccaatgaaagtctttatcatagtctcgaagttcctgggccgatagggtcgaggaacgggatcgaggaacctggtacgctacttatgagaggtttttacatagtgggaacgaaaatgaccctgcgtacccgggtcagggatgacgtttccgggtcgagggtcctaccactatacccgtttcttgtgactatggtcttgatggttgttcacaacaaaaatatctttggatgctttcacctttcgggacatgatgtttatttaatattgtaataaggcatttggaaacttttactgatcttcatatacacaaggaaaatgcaactacctcagtcagtcctcaaaagaatgaaacttatttggcgtcataaaatatttgtcttttttttaaaaaataaatttagtcgaactttgaatggtgtgctggagttgcatttttttgtgtgatggtggtagtagtcngtaagacatatttggattttttatcggtggtgtaagtctctgcttatatcccaaaccatgagaaatagctgtaaaatatgtggtctttctaccttttatataagacact

SEQ ID NO: 169003 - DNA, 411 bp, Zea mays
  Clone ID: MRT4577_85718C.1
gtacattggacaccccagtagccctggtggtgcccaaacaagtgtagatggttttttcttgcacagagttagacccctcgagatggagtcaatgttgataaatgtagaaggcaagctagttcagagatctgttgttcagcagcatggaacgggagccatgtgaacctcacgactttcagtttctgttccattatgtcgtaccgccgaacaaaggccacataatgttgtgttttattgtattcattcagttcaaaaaaggtacattagatttttgtcattttgtctgtttcaacatgtttgagtttgtaggtagcctttaccatttacaaacagacaagagttcactatcaaatgcagagtgctgcctagagatggcaatgggtaaccgattggtttttaccctattagggt

SEQ ID NO: 169004 - DNA, 1145 bp, Zea mays
  Clone ID: MRT4577_85719C.1
gtggcgctgcacggtagccgtgcaggccgcgctctgcctcgcgctctacgcggccttcagcctcggcgagccgcagctcatcccgcggggcggggtggacgcactcgggcggggcgcgcgcggcggcggcgtcgccttcctcagcgtcgctggcggcgcgcgtgcaaaatatgaagtgaatgcactcctaagcatgggtgggtctacagcaaagctttatgaagtcaagttcgtgctggatgttactcaactgggagcggatgatccactctggcaaaatggttccatgtacttccaggctctgaacatcccgtggtactccacttcatcacatgggcggacggttggtaactttttgaagaaagtgaagatgccctacgatcaggttctagatattattggtctgggcacatggcctctgcaggaacctctacattcggcggtggcaggataagcacttcttacaggggacaaattaaatggttggatcgattactagcactcactgaaagcaattggaagttgttggatataatccattacttgtttgcaatgggaaagaaacaacaaagctcgatgtgccatttcaacatatttttgcaaaatatgaagtgaatgcatacataagcatgggcgggtcttgtggctacttccatcgagacaactcgatactgtacattggacaccccaggagccctggtggtgcccaaacaagtgtagatggttttttcttgcacagagttagacccctcgagatggagtcaatgttgataaatgtagaaggcaagctagttcagagatctgatgttcagcagcatggaacgggagccatgtgaacctcacaactttcagtttctgttccattatgtcgtagcgccgaacaaaggcgtgacataatgttgtgttgtattgtattcattcagtttaaaaaaagctgcattagatttttgtcattttgcctgtttcaacatgtttgagtttgtaggtagtctttatcattatttacaaacatacaagagttcactatcacatgcagagtgctgcccaagcagggacgagaagttagttaatacattacttttctttatctgctggttctgtgccagttgatctctcaaaaaaaaaaaaaaaaaaaaaaagcggcc

SEQ ID NO: 169005 - DNA, 272 bp, Zea mays
  Clone ID: MRT4577_8571C.1
agacgcccaaggctgaggccgagttccggagcatggggtctcggatgtcccagccttttgagtcctatatcactgcgcctcccggtaccgccgccgcgcccgccaaacctgcgaccccagctacacccggagcgccgacctccccagcagaacaccgccttttgaagacctgctggagctgtcgcgtgcttactgggttgggcgcaatgggggccggcggatacgtgtactgggtggcacggaagcccatgaagatcggataccccccgagt

SEQ ID NO: 169006 - DNA, 330 bp, Zea mays
  Clone ID: MRT4577_85720C.1
atttctgggcagcgcccctcatcaccacagaagctttattattgtagctataccctatatcatgcaaaccttacaggagggcaccacgcaatgatcgggtggctggttaaacgctgcagccttggtcctaccacgttggttcgggcggtctgccatttggtgccgcttgtggagaggtgtgctctggcgtcaagagcactagggggcacgagtcagatccgcacacactctgtggtatgaatcactaggggactactgctcacaccagctagctgtctgattggtcctagttgccgctgctgactatactcatgatagtgcactgctgcc

SEQ ID NO: 169007 - DNA, 176 bp, Zea mays
  Clone ID: MRT4577_85721C.1
gattcttcatcgcaatccaacagacattcttgggaaacatgcttagcataatgatgttccgaacatggaccgaataggtaccagtactgtaaattcagctggattacccctaaataaaatcttgacacctccctttgacaccatctcgaacgaattgttgtttctccatccattcc

SEQ ID NO: 169008 - DNA, 214 bp, Zea mays
  Clone ID: MRT4577_85722C.1
aaaacgccccccacggccggggtgtggggagaaaaatatacgccgctggcgcacaaaaaccaaacttccaaccccagaaaaaagactacaattattttttaacgggctaacataaccctcacacgggaatcggcatgctcatgaaaattacaaaacatcaagctcagttggaacgactaggcttggcagttcctgtgacatgtccttgggaaaa

SEQ ID NO: 169009 - DNA, 213 bp, Zea mays
  unsure (1)..(213): unsure at all n locations
  Clone ID: MRT4577_85723C.1
ggacgggtggtcaaattcatggttcctcccacattttactactatgacggcntnaggcgnncganccttttatatactcacgggggcacacataaattattgccataagctatgggtgctggtggatagggatgaccaaagcgttctgctccaaatcttcaccaagccagtgtgggacaggccaacgctgttcttggagaacatccaaaggat

SEQ ID NO: 169010 - DNA, 227 bp, Zea mays
  Clone ID: MRT4577_85724C.1
attcggctcgagcgctgcttgtttttttgtacacaacaccatcagccctcaccgagcatgattataacaaacagcccgatcggttcatagatgcggtacgggatgctttctgttcttgaaacggcgagctgcatacttgattcaagcatgctgcccaggaatccagggggcatgcgcctagcacacggatggttccgttgcaagcacaaagggctggacggagccat

SEQ ID NO: 169011 - DNA, 530 bp, Zea mays
  Clone ID: MRT4577_85725C.1
caggcggccgccccagcgtcgaaaaacaaccatcttctttcaaaagcaataagttgatattatcacatgggcccaggagaaaacggcagcagactacaaccaggagactgtaacagatgaggccatgatattgttagatatcaatgtgaagtgcaaagaattcctggattattataatgaacttcagccaacgaccttggatgcataggatgaactaacagaggacaaaactcacacaaccatggatacagacgtcaatccaaattctgcttcagtttgtaacggctcttaaaattctacttccttttgtgaaggtggcagtcgtgaaggtggccatgaacaaaaaaatccaaacacttttgtgagagaaagcaggtcaaaaaggcgggctctgtataaagcttgcatagatttggcttgtacaaaaagtgaaaatgatacatacaaaaaaaatcataggaaacagggctgctttggcagaattatcaagcaaatatctgcgtcaaaaaaaaaaaacacaccccccccac

SEQ ID NO: 169012 - DNA, 530 bp, Zea mays
  Clone ID: MRT4577_85726C.1
ttttttttttttttttttttttttttttttttttttttttttttttttttttttgttttttttttttttttttttttttaaggaaaaaaatggcataaggggccccgcccaaccaaacgcaagaaaggggatctttttggtccggattggattacgtaaaaaaacgctgaaccaaacactaaaaacctttgatcaaacaaaaacctacattgggaaaaacggggctaaaacaaaataaaaaaggggggacaaaaaggggccttaaagaaaaaataatgcgttaatggggggcagaactcaacttaaaagggcaacaacttccggggggcctaaaaacgggggactaattgcctaaggaacctcgccaggaacttcaacaaagaaaacagggcataccttgtttatgccaagccattttgtcacgcaaggggcagggaaaaaatgcttgcagggaagggtcatcggcaaatttcctctccgggaccccattgggaaaaaaaaacacctttaagggggggtttttttccttg

SEQ ID NO: 169013 - DNA, 381 bp, Zea mays
  Clone ID: MRT4577_85727C.1
cggtaccggacattcccgggctccgaaacgccgctactgtacggacgcggggcttggctgctcgaacgcaccgcccgggcaaaaaagggagagcccgccggatttaaccgggcacaccgaacgcgcagctcctccgggccaggggcctggacagaatccatgcagccgaggtcccgcattcggggccgcgacccgccgccgccgccgccgccaggaggacgctaccgacaccgatccccgacccctgcatcaccgcgccaccagcgccgcccacgtgatccgacccctgcacagcggaagaggcacaagtacaagctgaccccgccacggagatgcgaggaggatcctgtacttaacgggtgcaacgccgctgccgagagg

SEQ ID NO: 169014 - DNA, 757 bp, Zea mays
  unsure (1)..(757): unsure at all n locations
  Clone ID: MRT4577_85728C.1
cctcgaggccggccgggngaaatgcatttgagattaagcactataattgcagagtttattattccttatttttttgtcaacttggccatcaatttaccccttttgtgtgtatgcaaatggacctagctatctattatgtactgttatgtgttattctatgttttcagcagatggaaataccttttttgttgtgataaaccttactttgtgtagggctgctcccagttatgtggttacctgcagttctgtttttcagtaacgattaacaatttaattagatacgttacggtcacttaccacgcatgctaaatgctacttaccacgcatgctaaatgcttgaaacttcaaatcagaataattgcagcaaatttggtgactgcacctacatatttcattgcaggtactcacccaggatcaaggaaatcacggttatcaggcacaagaaagtgaggagagcaaagttgtactacctgaaagacaagcttccccgcttttcaacattcaagtgaaatcagatatgctgacagaacgactttttccaccaccatctcgatttctcttaaacctttttttttcacttccctatcgatatcatcatatttcactgtaatctctgngtatcagatgtgtaatatctacagctttatatcatacttggcttagtgcaatgttttgtttgttgtcagtgtacaaaattcatactagcaccttgntatttatgatttgcaaatacnagggtatgtactcttgtgcgttg

SEQ ID NO: 169015 - DNA, 338 bp, Zea mays
  Clone ID: MRT4577_85729C.1
taaaaaaaaacatgtgtgactacggccaaaaatttaaagagctgagccataaaaggtcgggttgtatgggggtgcaggcttacatcaagatggattggctgcaggcggtgttcgatactgcgatcgtggtgcgtggcgctggcgctggtgtgtaaactggtggtgctgtgcacactcggcgcttacgaaggcagtcgcatccctccgctggccgttgtgcgcagcgcggtgctgtcggaaaaagcctgccatgagatctactttgtagctgtgggcgagactctattcagaattggccgccacttctgtaaccctcttattctggagcggttcccgca

SEQ ID NO: 169016 - DNA, 718 bp, Zea mays
  Clone ID: MRT4577_8572C.1
ttgggaccctcgaggccggccgggacagagtacagagaaccggaggactgagaccagaggaggagacgtcacgcctgcgcggctgcgcccaccatggacgaggatgagtttcggcgcatgctcgacctcttcccggtcgtccgctcccgagactactgctgctccgatcctggaacatccagcagaggaaccagacagcgatcacgagttcaggaggcaactacgggcgataataaggactcgtcctgtgcacaagattggagcgacaaaggcagagttcttctgcaagacattcgaagaagttcatgagaaacttgttcacagagagctgaatttggatgctgctaagaagttcctgagcgcatatgagagctgatgatgaacaataggtagatgctgctaaagggtcggtagttgccaatgatctggaaatttgttgatgctgttgagattttgatcacaggcaaacttttaacaacaggtagatgctgttgagcgcatactgataccgcctgattggttcaccctcgcccgtagccagctcgtatgcagccaggctgtccggttatttgggccgtacaagtggatgcacccaaataacttatgttacgtttactcgtgcagccccacgtctttcacgtgcatgcaattaaacatatgctcaataaagtcaacagatgtgatggttcagaataaaaaaaaaaaaaaaaaagcggcc

SEQ ID NO: 169017 - DNA, 328 bp, Zea mays
  Clone ID: MRT4577_85730C.1
ggggaaaaacactcggaagaacttgctgtttcccccagacaaagggaccccaccggggccaacccaagagttgttggttgcccaggcccccagccaacccaatgcgggtgggaaggagacctgattaaccccctccccccttaccacccaaatggatttggttctggggggggggcacttttaggttgcgggccctgattggcccccgcggggtatataacacccgcttttattttctggccccaaaaaagggcttcccccaagtgccccgcccccccgacccacaaatctgggaaaaatttgtgttgccatcactccggcccatggg

SEQ ID NO: 169018 - DNA, 402 bp, Zea mays
  Clone ID: MRT4577_85731C.1
gcatgttatgttatgcgactgtcggagtttagtacatgcaatatcgtcacatgcatgctggcattttgttttaaaaaaaaaaaaaaaaaaaaaaaaaaaaaaaaaaaaaaaaaaaaaaaaaaaacaaagaagaaaaaaaaaaaaaaaaggggcggtcgggcggggggagccaaggtgtagtacgcctgcctgccgcgggcaaagctcgtcaatagggcccccctagggccacccaacaggccgtcgtttgcccacggtttgcccgggaaaacccgggcgaacccccgctgaacccccctggagaacatcccccttacgcccgctggcgccaaagggaaaagggccgaaccggccgcccctccccacccttgcccaacccggatggcccatggggcgcgccgg

SEQ ID NO: 169019 - DNA, 1323 bp, Zea mays
  Clone ID: MRT4577_85732C.1
atgcctcgcccccgcgaaatcctcctccaccgagccgcgccgaaaacctcgctcgcgtcgaaaacctccaccgcgtccgattccccacgatccactcccccactgggctgctttcctacaagggtcgcgatctcctcggcgagatccacgctgctctccaagcaaggacagcttcgtccgacctcagtgcccgcggggaccagatactggtccactgcgtcctccacggcagccaagaagaaggcgaagaagaagctctcgacttctcgagctgggccctttttggttccaaatccccctggcctctccatttcctttcccctaattggttataaaaagtcacttagtggccctgccgccagatctgttggccaattgggcatagaaattgagctggacactcaacttgcccccatctctgagattttgcttggactggagtgtacaggacctcatttctctgattggagcgttgtactaaagccaccttttccttttccacaggtatctataagctacattgagactgcaacagtcaccaagaagagatacaatgatctgaagcgggttctgaggaggatgcgctacttgaggggttcaggtgcaagaaccaaacatgtgacggctttctactgcccaactcagcttatatggtgggttggaatcaccattgataccatcctggctgcactcctagtgactccacgaggtcatttccctagcgctgacgtgagctacaatgcctactgcaatgctgcttgtgtttggtgtttcttacgatgcatctacattcagtcagataggcccttgcttgggtgcaggccggcgagcagcggcgaaggcgaagacgaagacgacaactatgggatggagattgggttgcccatggacgtgcagcatgtggcgcacatcacgttcgatagcctccatgttgtagcaaagttgctgtggagcgtcgaccacctcgacctacagctcaaagaaagcataccatattcagaaacccagtactcatttgagaagaagattgtagttccaagactagcttattccaatatgcgtcagtggcattataatgcatgcactgggaaaaagattgatttaccctataacttgcccgtccacataccatggttttcagtcatctacgatagagaaattaagggacctaatccagtattgtgtgctaatataaggaggagagatgacttgctttcatgtctgcatgacatgatggcatgtgacgcagcggtctctgctccgcaacccttgtcatggcctggagttggtgttctaggaaggggcacaattttattagggtag

SEQ ID NO: 169020 - DNA, 326 bp, Zea mays
  Clone ID: MRT4577_85733C.1
gggttataacaaaattattggggaaaccaaaattgccccggggtttaactgggaaaaaaaacacgggcaccaaataaattttaacattggcccccaaagttttctccaaaacgggaaaaaggctttaatttagattgggggaggggccccaaagggggcaattttcttttaaaattggaaaaggaaattcccccggggaaaaaaaaattggccaacctaacccccccaaagcctccgggggtaaccttggggaaataaaaacaggggggggtcaaacttaggggcctttgggattttctgggaataccccctttttgtttttgggg

SEQ ID NO: 169021 - DNA, 577 bp, Zea mays
  Clone ID: MRT4577_85734C.1
gcgaacaaaaaccttgctcattcttctctcgtatcgttccatagtgggaggcaaacaaagggaacaacaggggtcccaacacctaatccaaaggtagaacggacactaacacggtgacagaagcgaacggctacacgatactatagatagatgagataactcggccgaagccaggatgggcccacacatcaacccctccagccgtcgacgacaacggcgtagccgtcaccaccaccctcgcgccgaccgcagtacccgacagcgacttcgtggccggcgcacgaccgaacaatggcacccgacgttgaacacagggagggaaacattcttttggcgtgccccatggttaaaaagttctctacaaaagatatatgtggacacaatcaaggtaaggcttatgttcagcgaaagatccggaaaagaatgggtgataagtaccccaagcttgaacctttgctaaatgacttgctgccaaaaaagtcacctatgataggggagaaatgccaaaatcatcttaatcttgcagcgccgaataatgtaactctattagccaatatacgagaaggaccttacatgc

SEQ ID NO: 169022 - DNA, 535 bp, Zea mays
  unsure (1)..(535): unsure at all n locations
  Clone ID: MRT4577_85735C.1
cgaggacagtcggctaggtgagatctggtggtgccacgacgtggggggcggcgaggggggagtggtcgtcgtcctcgagcgcggggcagcgggcagctgccgcactgctcgtgggcgccgccgtgggggggtccgtgctgggggggggcgcggggggggtgtgcgacatgagcaacgagcagttcatgtggtgcgggggggggggggccaanacgacggacccgccgggcgcgccgtctcaggcgtgctgcgactcgctggggggggcgggacctcaagtgcctgtgcgggtacaagaactcgccgtgggatgggggtgtacaacatcgaccccaagcgcgccatgggagcttccgggcaagtgcggggtcgccacgccgcccgactgctagcagtgtgctanccaagccaagccaagcaggaggggccccgggattgctagcggtacgtgtctgtgtgtgcatctgcancaggggcangcaggggcccctacctacgtgtctctttctctctctcatcttgggaccggacctat

SEQ ID NO: 169023 - DNA, 617 bp, Zea mays
  unsure (1)..(617): unsure at all n locations
  Clone ID: MRT4577_85736C.1
ggattccaaacatccctacgagctaccagaacgggaggcacctccctcctcaagcaacatggcaccgtatgcangaagttggaaaagcaccaccgccaccagctgggcctcgcaggtagtaccaggagcagctacccgccaggcggtactgagattccgccaggtgcactgaggcctcgggcgactgcatgtggctacccaccgcgcgaaaacgattacgaccattccatgaatgatgaaaaggagcacaaacacaaacaaaacctgggcgaggcaggggccatcgccgccggcggcttgtaacacgtctacaaaaacagcacgaggncgagagataagaccgcgctagacacgccgcaccacgcacaagatcatacgatacagtcgcggcggcagcatccgttagatcctgaggatttgccttgcatgatcaccactgaaataaacagaccacaacgacgacggagacgccggccgctataaaaaacccactctttcggctgattgatcctcacgtatcatctgtcctatcacggtactacacgtgcatgagagagtcatatctagaccccgccgtgactggcacacatacgtatgtatgcactcgagtgatgcac

SEQ ID NO: 169024 - DNA, 755 bp, Zea mays
  unsure (1)..(755): unsure at all n locations
  Clone ID: MRT4577_85737C.1
tttttttnnnnnnnnnnnnnnnnnntttgcactagtgatcaatctgcaggaagttcagcgaggacactgaaactatgactgaaagtgagtttctagacacgaactacctattacatttacaaataatgttgggaaaagttctagagattcaataaccaaaaaaagaaaaacactggggagccatgcgaccactatgtttttctgcccgtctgctcggttcccccgcccatccactcggctcccccgctagtccgctcgtgggcgattgccgccccctaggccggccgggaggtgcctcctcctccgtcccaccctcgccggcgatcttcacgatcccggcgccctcctctgtgtcgccctcgccggtgatcctcacggtcccagcgtcctcggccgctgcgacagagccatccctcagctccgttgagcctggctctctccctgaggcacctcgttccacctccttgtctcctcgtggcattcttcaccggtcggtgggtcattcaaaggttgaacggtggcaggaggctagtccgcgttcgatcgggaattgcagcatcgatagccgatcggttaagcatcatgctggtcctaagtccttcctagataggcttgcgaaacgcagactggatcaccctgatcgttgtccgctttgtgatcaagatgatgagtccattaatcatttattgatctccagtgtgttttctagacaaaaaaaaaaaaaaaacaaaaaaaaaaaaaaaaaatttgcggcc

SEQ ID NO: 169025 - DNA, 320 bp, Zea mays
  Clone ID: MRT4577_85738C.1
tgtgctgaacctcgtccttacgcagtggtaacaacgcagagtacgcgggcatgctacggtgactttgttgtaatctggagttggaatatcgttgtttcgcataaatttcgatgatttgctcaagtaaacggtttgtttggttcaaaaaaaaaaaaaaaaaaaaaaaaaaaaaaaaaaaaaaaaaaaaaaaaaaagaaaaaaaaaaaaaaaatttttttaaaaaaaaaaaaaaaaaaaaaaaaaaaaaaaaaaaaaaaaaaaaaaaacaaatttgcgcttaccctttttaatggggaaattttcggaattccctctaaacg

SEQ ID NO: 169026 - DNA, 427 bp, Zea mays
  Clone ID: MRT4577_85739C.1
acaaaagaatttcacttttaaatattgcaaaactttttgtaatgtttgaaatatatgctagctcaagtgaccatcctcaataagaagtataggagagttacttagacttataagaagaccgagcccaccggcacttaacaccatcaaccgcagcacaaagttatgtcctgggataaacactacgttagtgtttgttagacgtcgatcacttgacgatcggcttttgttctgatacttgctcagtctatttgtcttcaggttgatccgactgacaacatcgtcttgcggagatgtccaatctctgcattatcctggggtcgacttgggtcgtcttctgcatcacgtgattaattatcgtaccgttgaacgacgacgcaacgatggcttcttagtttagacgttttatcaagcgtttgacggacgctgc

SEQ ID NO: 169027 - DNA, 653 bp, Zea mays
  Clone ID: MRT4577_8573C.1
aacccatcacattctgttgactttattgagcatatgtttaattgcatgcacgtgaaagacgtggggctgcacgggtaaaggtaacataagttattttgaagtcatttgggtgcatccactcgtacggcccaaataaccgtctctggacggcctggctgcatacgagctggctacggacgatcggtgaaccaatcaggcggtatgctcaacagcatctacctgttgttaaaagtttgcctattgttcatcatcagctctcatatgcgctcaggaacttcttcgcagcatccaaattcagctctctgtgaacaagtttctcatgaacttcttcgaatgtcttgcagaagaactctgcctttgtcgctccaatcttattctccgcagccatcttcaatttctgcataaacatatcttgtgcaccagacgagtccttattatcgcccttagttgcctcctgaactcgtgatcgctgtctggttcctctgctggatgttccaggatcggagcagcagtagtctcgggagcggacgaccgggaagaggtcgagcatgcgccggaactcctcctcgtccatggtgggcgcagccgcgcaggcgtgacgtctcctcctctggtctcagtcctccggttctctgtactctgtagtcaggccg

SEQ ID NO: 169028 - DNA, 1166 bp, Zea mays
  Clone ID: MRT4577_85740C.1
aggtaccggtccggaattcccgggtcgacccacgcgtttgcaacaagcttggcgagggtggctttggaccagtatacaagggtaaactcgaggatggaatggagatcgcagtgaaaacactctcgaagacatccgcacaaggtcttgacgagttcaagaacgaggttttgctgatagccaagctccagcaccggaatcttgttcgccttctcggatgcagcattagcggacaggaaaggatgcttgtttacgagtacatggcaaacaagagcctggacttcttcctgtttgagaaagacactgtggtgcttgactggcaagtgcggtatcgtataatagaaggcatcactcgaggtttactctacctccaccaggactcgaggtacagaatcatccatagagatctgaaggcggccaatgttctcctagacaaggagatgactcccaagatttcagactttggcatggcaagaatatttggcaacgaagagacggaaattaacaccttaaaagtggttggcacatatggttacatgtctccggagtacgcaatggatgggatcttctctgtcaagtcggacgtgttcagctatggagtactattgctggagatcgttagtggcaggaggaacaggggagtgtattccagttcaaacaaccaaagccttctaggccatgcatggagcttgtggaacgaggagaagagcatagagctagcagatgagagaatgaacggacaattcaactcagacgaagtgcagaagtgcgtcagggttgggctactgtgcgtgcaagagaatccagacgaccgtccgctgatgtctcaggtgcttctgatgttagctagtcctgatgccgcatcactgccgactcctaagcaacctggcttcgcagctaggagagttctaatggaaacagacacatcatcgaccaagcccgactgcagcgtgtttgacagtgcgacaaccatcatgcttgaaggtcgatagaagttactcgatcactcgcctcagaataagtgtcgtgtcagtcaagttttttttaaagttttgactaggtttgtagaaatattagcatcttcaaataagtttattaaaaatagatttaatgatctatctatcatatatactataaatattaatatttttatatatttagttacattt

SEQ ID NO: 169029 - DNA, 818 bp, Zea mays
  Clone ID: MRT4577_85741C.1
ggccgctttttttttttttttttttctgcagcggaaaccttattaccaaattttacaagttacaacaagtttacattgtatttatcagagtgggtacaaaagaatttcacttttaaatattgcaaaactttttgtaatgtttgaaatatatgctagctcaagtgaccatcctcaataagaagtatgggggaggtacttagacttataagaagaccgagcccaccggcacttaacaccatcaaccgcagcacaaagttatgtcctgggataaacactacgttagtgtttgttagacgtcgatcacttgacgatcggcttttgttctgatacttgctcagtctatttgtcttcaggttgatccgactgacaacatcgtcttgcggagatgtccaatctctgcattatcctggggtcgacttgggtcgtcttctgcatcacgtgattaattatcgtactaatattaaatcggctcggacgtcacggcaacgatcctaggttcacacaattcatcgaataccgttgaacgacgacgcaacgatggcttcttagtttagacgttttatcaagcgtttgacggacgctgcatggacttcaccctgggcgaacgacaacgacgagttcgtgacaaagcagggaggtgaacacggtggagctgaaagtgaacgggtcaaggatcttcatggaagaagaccaaggaggaccagccaacattatcaagcattactgttgtgccatgggggcgagccgggcagaatccgagctattaggcacaacatgggatagcgaccagtacgacgacggccgacctcgggggtacc

SEQ ID NO: 169030 - DNA, 297 bp, Zea mays
  Clone ID: MRT4577_85742C.1
gaaagtaaatgacatgcatgggggtgaaggtgatttgatctatttgagagatcaggtatggagtaaaaattgagcactcacctgccaactgttgagtacctaccgagggcctcatagcatagagaaatgactgaataattctctgctgataagctgattcgacagtcagaaatgttcctcaagcaagtggttcttcgtcagtggatagattcgttgcacgcatagaaaacatgagactgacctactagccgatgcagaagacctgcagatcgtgattagatgcatcggttcattgac

SEQ ID NO: 169031 - DNA, 642 bp, Zea mays
  unsure (1)..(642): unsure at all n locations
  Clone ID: MRT4577_85743C.1
gggtctcttcccaatgtsgcgtctcgctctcctcttcctcctgcctctcctcctcgccaccggstcaccacggcgtcaccgagcccgccacccctcccgcctctcctcctcctccdaamavmactccancgnnnnnnnngnnnctcgccgkgctcctcccgrtgtwcggcctgcccccgggcttcttcccctcggccgtctccgccttctcgctcgccwgccwcggcbgcctcyccgtcggcctcgcggggccctkcttcgtgcycttcgggtbtctckccttcttcgtgcccckcgrtctcgggggttctccgcttcggctccctctcccacctccygggcctccbggtccgccgcttccttcmtcttgttcyncgtcctccgcgtcdtggtcgtccttcccccgcctccgcgctwcgtcttcctcgtcctcsggtggctctcgccccacccccctgctgcggkcttcccgtcgctccccgcctkcctggkctcccggtggtgccgcctcccctccgcgcttgccgtcgccgccvartggttccyggscttctttkccccattttygggggttggggtgggccttcsmtttggctscygccgttggtggsttcccttccttcgcgtcttcsgcggccgtgt

SEQ ID NO: 169032 - DNA, 298 bp, Zea mays
  unsure (1)..(298): unsure at all n locations
  Clone ID: MRT4577_85744C.1
ccagcaaagngnaaacccagnnngccngnggctgggaaccgganaccgnaccaaaagcacaggcaggggcccaccangaaaaaaaaaaaaaaaaaaaaaaaaaaaaaaaaaaaaaaaaaaaaaaacgggagcgagggacaacccacaaagaganagaanacagnaacanggaggaggagaggacacaaacanncccgaccaccaaagcggacgnngaagccgaggaggcagggaaaccccaagngncagcggcagcgggcaacccggacancaacagcaagggggagacggggcagac

SEQ ID NO: 169033 - DNA, 657 bp, Zea mays
  unsure (1)..(657): unsure at all n locations
  Clone ID: MRT4577_85745C.1
ggggcacgtgctgatcgcgctgggcgcgccgcggtccctgtacncggcgtcggtggtcgtcgggtctgcttcggcgcgcagtggccgctggtgttcgccatcatctcggaggtgttcgggctcaagtactactccacgctctacaacttgggcggcatggccagccccgtgggctcctacatcctgaacgtgcgcgtggcggggcggctctacgacgcggcggccgcgcagcagcgcggccgcggcaggatctgcctcggggtggagtgctaccggcggtcgttcctgatcgtcacggcggccacggtggtcggcgcgctggtgtcgctggtgctggtgtggcggacgtggacgttctacaggggcgacatatacgcgaggttccgggacggagacgagggcccggggcgggacgggcgcctgccggtcgaccagaaacgggaggaggaggagagggagaaggcggcggccaacggcaggaaggcgtgaggtggtgagcgggagcgggaaggcatggtcagggacgacgacgggtggggtgtacatgtacatgtgaatatagtacttttttgttttgcattcacccgtgatgaccgacccttgttacctttcaaatttaaatagcctaaaaaaagccttcttgtccgtttcccctgc

SEQ ID NO: 169034 - DNA, 327 bp, Zea mays
  unsure (1)..(327): unsure at all n locations
  Clone ID: MRT4577_85746C.1
atgaaacaacatcattgcatcaaggggggcaatatacatgtatgcacggtggcaaactacaancaaatactaatattaaacccacaccatatattacccgttccaactcataattcctcatctattcttaacacctgttcttcaaccactcctccttataacctcttcattacttatctcttctgataatcacctactcctctttttaaaatatttttcctttactatatatttttttatatttttatttcatacattatttttttcctatcttatctatatatatactttcctccctattatcactataataatatctatatacaa

SEQ ID NO: 169035 - DNA, 503 bp, Zea mays
  Clone ID: MRT4577_85747C.1
atcaggagcggggcacatttattaagctactatctttactttggcgtatatcattgaattgcatacactaataacagcgaggcttcttaatcgtctgaactgtaggagttgcaaaacataaaagaaaccctcctgggcgtttattattttcataatggggggccaatttactaaggggttcacatacttgattatggggcaatagacctctcttagatcactttttatgcacacaagatatcactcaccgctcaggatggggtcaatcaatggttagatctgagcctggtcttcgattgcatacataatccaacaacatatggacacctgcagacaccatggtgacacgcttatgcgcaatctgaggtccctcgactgcatcctacgagacgccatagggatcaggagacaccgtcctggagaaagatcaccgtacacacccacaaccccttggccgtcctacaatgctgcgggcttgaactgctactacatccgtcggactc

SEQ ID NO: 169036 - DNA, 467 bp, Zea mays
  Clone ID: MRT4577_85748C.1
ggggcccaaaaaagcctgactttaaagggggcctgggcccactaaaagggaaaaaaaagtgggcctttactccctaccccggtaaagtttttctttaaactccttttcccaatggccctttttcccctttttggaaaaaggggggggcccaatttttttttttggattttttttggttttggattcgaggccaaacccaaccagggactgatctcgacgggggtcctaaaaacaaccggtactggtaaaaaattcccccgaaaattgacaaaaaagggcttcctaaaaccccattttaaaaaaattggaaaaaaaccccccccttttgctccaaattttttatttctccaccggttgggccaaaacccgaagttaccctgggctgaaattaccccctccttgggtaaaatccaagggtcccgggggtcgggccaccaccccattgggggggggtggtccaagaaaaa

SEQ ID NO: 169037 - DNA, 542 bp, Zea mays
  Clone ID: MRT4577_8574C.1
agagaaccggaggactgaggaggaggaggagacgtcacgcctgcgcggctgcgcccaccatggacgaggaggagttccggcgcatgctcgacctcttcccggtcgtccgctcccgagactactgctgctccgatcttggaacatccagcagaggaaccagacagcgatcacgagttcaggaggcaactaagggcgataataaggactcgtccggtggacgagatatgtttatgcagaaattgaagatggctgcggagaataagattggagcgacaaaggcagagttcttctgcaagacattcgaaggagttcatgagaaacttgttcacagagagctgaatttggatgctgctaagaagttcctgagcgcatatgagagctgatgatgaacaataggtagatgctgttgagcgcatactgataccgcctgattggttcaccgatcgcccgtagccagctcgtatgcagccaggctgtccagagactgttatttgggccgtagaagtgggtgcactcaaaataaatgttgcgtttactcgtac

SEQ ID NO: 169038 - DNA, 465 bp, Zea mays
  unsure (1)..(465): unsure at all n locations
  Clone ID: MRT4577_85750C.1
gacccgcnggcgccgcgccnccgcccccggcgccggggagancagcnccggcggcacgcgngaaggacnacnncaaggcgncnngcngacaggaagagngcaaagnnccagaagaacancacaaagaggggnncngngccngagaccacggngaaaaagagcaangacnacccggggggaccnagaggggggggagncnncanncnngnggncannggancanccnngnnccaganaancaggacagcgacaagcggngggcgggccngaangcacggagcgaaaaccagaaaccgaacggnccgggagccgggaggcangaaangngcacagcagcaaaccggaccacggagacggagggcgaacgacacaacaggccaggaagcagcagcaaaagagaacaaacggacgccgnaaccaagcaaaggcagaaaacgggaaagaggaggggagaaaccgcaagcc

SEQ ID NO: 169039 - DNA, 109 bp, Zea mays
  Clone ID: MRT4577_85751C.1
ggagggtcagaaccctggccgctttccatgtgtgttctctgtgactcagacagtgtcgataatgcttgtggctggagatcccgagcacctccaggtgccgctgctccaa

SEQ ID NO: 169040 - DNA, 2168 bp, Zea mays
  Clone ID: MRT4577_85752C.1
cattggaccctcgaggcggcggatcgaagttctaaagaaaacccaccttaacaccgccgcgagagtcgccgcctcacctcagctcctcggacttggccgcgacgcgcgaaacctgaccgcaccaaacgcgggtcgcaatcgcaacgcaccgcgcggcgctgccgcatcgagagttttttttttgccgttctgcttttagggttagcggcccgccccggtgatcgcgggagaagggagcatctgtcgccggagtttggtgagtgcctggtctgccctggtgccctggcaccctgcatcggctgtcgttgtattttgtcttcccacgaccgactcagagctccctgatctcaagatctcgatagctgcgcgctgactttgggttggagccgtgcgtatcgatccaactccatccgccgggcaaatttgagtcagaaggaaggatatccatcggcgcttctgaattgggaggacgcagcgcatacgagattcgatgagattttgttgggacacagtttcgccgtgaattggttaggagccgatttggcaacagggaagctctcgaatgggagatccagcggcggcagtggcggcggaggggagatggtgagcggaagctttagccggagcacatccgcgcggctcacgtcgaggggtggagtcgggagcccgcgtgtctcgactcctggagccgtgcaccggaactggtggccgccggcgccgtcggggccgtcgttcgatcgcgtcgtcttggcctttttcctggcctccgtcgcgctcgtgctctcctgcgctctctacctctacgtattccggtacttgggccggagccgtgtggtcgcggagttcgccggcgagaatctcgagtcctgcgacgtgttcgacggcgtctgggtgccggatcagaggcaccccttgtacaacagttcgcagtgcccatttgcagagagggggttcaattgcctggccaatgggcggaaggacaccgagtacctcaagtggcggtggaagcctcggggatgcgatttgccgcggttcagtgcccgggctctgttgcagtggctgagagggaagagggtcgtgtttgtgggggactccatgagtcgaacgcagtgggagtccttcatttgcatgctcatgacaggggtggatgatccagagacggtttatgaggttaatggcaaccagatctcaaagacaatccagtttttaggagtgagatttgagtccttcaacctcagtgtggagttcttccggtccgttttccttgtgcagcagatccctgcgcttcgccatgggcgcagaagggtccgtgccatcctgaagcttgataagttggatggtttaagtcaggaatgggtgaactcagatgttcttattttcaactcagggcattggtggactgccagcaaattatttgacatgggttgctattttgaggctggaggtgtgcttaaactgggaacatccattaacgctgctttcaaaatggcattggaaacttgggcttcatgggtgaaagagagaattgatttaaggcgaacacatgtattcttccgtacatatgaaccgtctcattggagtggcttaaatcaaaaggtgtgtgaagtaacacaacaacctaccgctgaggccaatggaaatgacaggagagaatttggggatatacttgctggtgttgtggcaaatatgagtgtccctgtgacagtactaaatgtgactttgatgggggcctttagaagtgatgctcatattggactttggagtcatcctaataccatactagattgcagccactggtgccttccaggagttcctgatgcttggaatgagcttgtattttcccaccttttgactaatggttggcgagtgccggctagctgactattgacatggtgtgcccttttgtgcaatttcgcagtgtcctgcggtgccgtcgaggttggcttgagctgtggccgccgcctgttgaggctcccccgtttccggttacagctgctccgtgttttagttatataaatatacttttataagtaaattataagtcgcctagctcattatttttagctttatcgactttagctcctccgtgtatgatagcaggggccaaaaccccttaaaattataccaaattaaacttaagttaagaagtaataagccatgttcctctg

SEQ ID NO: 169041 - DNA, 884 bp, Zea mays
  Clone ID: MRT4577_85753C.1
cccacgcgtccgctttgaaacaatggtgattccgtagctctgctgagaatgactccaacacaatctgcaaacaaatgatcagctatatcattgttcttgatacctatttggagatccagtccatccattggtgtatctgtcacaatcttgcaagaatagagaagagtgctgaaaaacaagcaaaatcaggtgcagaaaatgctgggtggtatgagaaatggtgggagaaatatgatgccaaagtctggacagaaaaaggtgctcacaaatatggaaggttgaatgagcagtcctggtgggagagatggggtgaacattatgatggccgtggatttgttttgaaatggacagataagtgggcagagacagacttaggcaccaaatggggggacaagtgggaggagaaattctttgcaggaattggttctcgacaaggggagacatggcatgtatgtcctggcggtgaacgttggtcaagaacttggggagaagaacactttggtaacggaaaagtccacaagtatggaaagagcacaaccggcgagaggtgggacttggtagtcgacgaggagacatactacgaggcggagccccattacggatgggccgatgtcgtcggagactcgacgcagctgctgtccatacagcccgtggagaggccacccggcgtgttcccggccatcgacttcagctccgcgccgccgccgaaggacgctccgccgggcatgcccccttctcctctggactgagtgaattaggcctgccagcacagacggatttttctgtctatataggctccagattttgcctgtaagggaacagcattctttgtaggaagttgacggaaccccgttcctgcgttcattggttggctcatctttgct

SEQ ID NO: 169042 - DNA, 579 bp, Zea mays
  Clone ID: MRT4577_85754C.1
gccggccggccgggctctttcaacgtatatttcatcaacatgagtgctgatttggtttgggccattgtcaagaacaacaattctttccttgttaagcgtcaaaacgttcaattctcttctgaaccttccaacttgttgaaccttaactccttcaagtactctggtctcgccaactacaagaacgctgccatcatccctgctgctcgtggtgtccgtgtcactttgcgcaaggctaacaaggaacaatcccctgccaagtctgccaacactgttgtcattgccaagactcgtcgtcaaaccgccaagtctgttgctaacttgattgctcgtggtaacaagtacagacctgaccttcgtgctgctgccgttgcccgtgcttctgccatcatctcttctcaacaacccaagaaggaacgcaaggttcgtgaagccaagggtgttcgtgctcaaaagaactaaataaaactcttttgtttgctttccagaaaaaaaaaaaaaaaaaacaaagacaaaaaaaaaaaaaaaaaaaaaaaaaaaaaaaaaaaaaaaaaggaaaaaaaaaaaaaaaaaaggccccta

SEQ ID NO: 169043 - DNA, 1242 bp, Zea mays
  Clone ID: MRT4577_85755C.1
caggactccaacacaatctgcaaacaaatgatcagctatatcattgttcttgatacctatttggagatccagtccatccattggtgtatctgtcagcatgtgtcggactctagcccaacctttgcttaagccttacctgccatatgtgtcagtttcttgtttgatgtccttccaaaggtagaacttagaacaattgtacacgggagacactgatatggtttaccttgtccaatacagcaatcttgaaggaatggggaatcaacttgctggacgaagccgtcaaggagtctggaataaatgaaaaacaagcaaaatcaggtgcagaaaatgctgggtggtatgagaaatggtgggagaaatatgatgccaaaggctggacagaaaaaggtgctcacaaatatggaaggttgaatgagcagtcgtggtgggagagatggggtgaacattatgatggccgtggatttgttttgaaatggacagataagtgggcagagacagacttaggcaccaaatggggggacatgtgggaggagaaattctttgcaggaattggttctcgacaaggggagacatggcatgtatctcctggcagagaacgttggtcaagaacttggggagaagaacacttttgttacggcagcatccatgcaaatgattttatcttacatattgatactagtagtaaatatttttggagtcgactattctgtcgctaattctggtacttcacaactaaaccatatatatctctgtcttggatttcagaaaagtccacaagtatggaaagagcacaaccggcgagaggtgggacttggtagtcgacgaggagacatactacgagtaagactttttgttccgccgatcgattccctgaaacgtctcctggacgctaaaatcgctcccacgcgtcactgtcaccggactgcaaacatttgaaccagggcggagccccattacggatgggccgatgtcgtcggagactcgacgcagctgctgtccatacagcccgtggagaggccacccggcgtgttcccggccatcgacttcagctccgcgccgccgccgaaggacgctccgccgggcatgcccccttctcctctggactgagtgaattaggcctgccagcacagacggatttttctgtctatataggctccagattttgcctgtaagggaacagcattctttgtaggaagttgacggaaccccgttcctgcgttcaaaaaaaaaaaaacaaaataa

SEQ ID NO: 169044 - DNA, 1298 bp, Zea mays
  unsure (1)..(1298): unsure at all n locations
  Clone ID: MRT4577_85756C.1
atatatgggggacgctccctcgccattctccatccgaacaaccttcaaagatctaataaaacccatagaaacttctctcgtttctctctccttggccccgggtagcgaacccttatcagtcgctctcgttggctcggagcagcgatgcgcaccgcctgcctccgccccaaccccgccattggtataaaagcctcccctccgcctccctccttccgccactggatataaggaattaggtgcggagaaatctgggaggaatgctgaaggagattcttggtgggagaaatggaaagaagttctgtaccaagacgaatggagcaatcttgcaagaatagagagaagtgctgagaaacaagcaaaatcaggcatagaaaatgctgggtggtacgagaaatggtgggagaaatatgatgccaaaggttggacagaaaaaggtgctcacaaatatggaagattgaatgagcagtcctggtgggagagatggggtgaacattatgatggccgtggatttgttttgaaatggacagataagtgggcagagacagacttaggcaccaaatggggggacaagtgggaggagaaattctttgcaggaattggttctcgacaaggggagacatggcatgtatgtcctggcggtgaacgttggtcaagaacttggggagaagaacactttggtaacgggtacgtgacataataatgttctggtgtagcacagcacgtattatttgactggaacctgggttgtatttagactgcagacttttcaaacatcttatcggtgtattttagtccctgtttgtttccttccaggattatataatccagcttatggattatataaggagctattgacctgcttatagattatcataatctaagctatctagattacataatccaccgaataatctgtgttgtttatttacctatcaacttatttaagctggattatataatctagaaggtaagcaaacatggccttggagtgcagaatttcccagcatcatcatgcaaatgattttatcttacatattgatactagtagtaaatatttttggagtcgactattctgtcgctaattctggtacttcacaactaaaccatatatatctctgtcttggatttcagaaaagtccacaagtatggaaagagcacaaccggcgagaggtgggacttggtagtcgacgaggagacatactacgaggcggagccccattacggatgggccgatgtcgtcggagactcgacgcagctgctgtccatacagccccgtgagaggccaccncgcgtgttcc

SEQ ID NO: 169045 - DNA, 249 bp, Zea mays
  Clone ID: MRT4577_85757C.1
ggcggaccacccgtccggcggaaatacataaaggaagattggtggcctattccttttaagtccttaaacaataaggttgcacaatagattttaaggaaatgaaaatgaggataatttgaatggtgataataacaataaaggcgattatttgaagaactgaccccttgcccttggttcaaaatgttgtccgtggataatgtggctggccggacactgaacctttttggaagattttttgttgtggttgtt

SEQ ID NO: 169046 - DNA, 696 bp, Zea mays
  unsure (1)..(696): unsure at all n locations
  Clone ID: MRT4577_85758C.1
ggagaaaagngacaggacggggaacaaggaannaggnacgcaaacgaggccaacagaagggaggaacancctctgngatagtgtagtcatattgtcaaagtgtttaatcagtgtgattcttgtgcatgagcatgcaaatttcggggagactatgatgaatgtctttgtttctttgctctttaaattatgtttattccttgcatctgtcacagactcgtgacttaagaaaagtggctggactggatataagaaattaggtgcagagaaatctgggaagaatgctgaaggtgattcttggtgggagaagtggaaagaagtactgtaccaagatgaatggagcaatcttgcaagaatagagaagagtgctgaaaaacaagcaaaatcaggtgcagaaaatgctgggtggtatgagaaatggtgggagaaatatgatgccaaaggctggacagaaaaaggtgctcacaaatatggaaggttgaatgagcagtcgtggtgggagagatggggtgaacattatgatggccgtggatttgttttgaaatggacagataagtgggcagagacagacttaggcaccaaatggggggacaagtgggaggagaaaatctttgcaggaattgggtctcgacaagggaggacattgcatgtatctcctggcagaaaacgtttgtcaagaacttggggagaagaacactt

SEQ ID NO: 169047 - DNA, 253 bp, Zea mays
  Clone ID: MRT4577_85759C.1
caacatcttagcacgcaatgggagccaatattttatggctccattgaattcttgctcactgagcaagcgctgacacctcgactactattacacaatggtcacaacaatacctatttgcgtcgacagacatgggattttaatacgctagtatacaatcctacatggcacaagaggccatccttgccagcattttaccagcattaacatgaaacgtgccacaaccatgtgctgtattgtaacaaccatgcttagt

SEQ ID NO: 169048 - DNA, 643 bp, Zea mays
  unsure (1)..(643): unsure at all n locations
  Clone ID: MRT4577_8575C.1
ccccgcgtccngatgatgacgaanaanaatcaacgtggatgaagaagacacctaaattgactgagaatggcattcaagacaagatagcaatcaaccaaatcaatgctttctagctcattgggatgtcctcctgccttgatctatccggattttttgagaaagaggatgcttctgaaaggaaaatcagattcgcatcaaattatcccccagcttacttgtttgagaagatcgagagcattgtcagaaaaatgggtttccaggtacacaagagcaacggcaagctaaaagtgagccaagattgtaagggactagcaaattcaagagggaaagagtcattattaatttctgctgaggtgtttgagattaatgaatccctttacgttgtcgagctaaaaaagtcatctggagactgctccctgtacagaaagttgtgtgagacgctctcggaggacttgggcacatgcaaaagccagcaatttttaaagcaggattctatcagacaagagatagtgtattggccatgcacctattacagatgtgctctctgatgccttttgtcatgaaaccttaagaggcttagactatgacaaattggcaactgacaatgtatcgaactccaaaggataatatgnatggtgtaaac

SEQ ID NO: 169049 - DNA, 215 bp, Zea mays
  Clone ID: MRT4577_85760C.1
gttctctcgggcatgcgagcgtggcggcggttccctcgggcgtgcaagcggtggtgatcccgagggccaacggcggtgccgccctgaggcaggcgacaggcggtggcgttccaccgggatcaagcgacggtgacgctcccggggcatgcgggcaagcatcatcgtcgctcccgaatcggacgagttgcagcggcgcaccccagacccagcggcaa

SEQ ID NO: 169050 - DNA, 363 bp, Zea mays
  unsure (1)..(363): unsure at all n locations
  Clone ID: MRT4577_85761C.1
cgctgaaccgcaaccagngggagncgcnggngngccnggngcagcccaaccngnccaagggcaggaagaagaacgncaagcggggcncccncaacaccnncaacgccaaggagnaccgggccacgcncgagnncaacngggcgcccnnccncgncgagnccaacncngacaaccccaacnnccacagcacaaggaacggancaacagncccgagaggancgaggcgcacgccaggaacnggaaggacgnngannaccncancnncaacaccaacancnggnggangaacaccgccgacancaaagncaggagaccgaacncgaggnannggncngagaacgacgaggnncccaggaaagaggc

SEQ ID NO: 169051 - DNA, 243 bp, Zea mays
  Clone ID: MRT4577_85762C.1
atttcccccaacccaatcggccccaatctccgctctccccactcctttcacatttcgcgaaactgtaagtggcggccggcggacaccggcgaggaggcgacggaccgacggcgcactccgtcgaggggacgcggaagacgtattcggcaacctacgagccaaggaggcgacgcggtgcggcgctgaacaccgtgccggaggcccggagcggcgggcgcaaccggcttggccgggcggtgtccg

SEQ ID NO: 169052 - DNA, 556 bp, Zea mays
  Clone ID: MRT4577_85763C.1
aaaaaaaaaaaaaaatttaaattttaaaaaaaaaaaaaaaaaaaaaaaaaaaaaaaaaaaaaaaaaaaaaaaaaaaaaaaaaaaaaaaaaaaaaaaaaaaaaaaaaaaaaaattttttttaaaaaaaaaggggggtggccggtttttaaaagacccaagtttggcgcccttttaatggcacatcctatcttttttttatgggcaacacaaaaaaattttcagggggggaccttataaaaattgggggggggaaaatcttttttttcaacaattttaaacccttagaggcaaatccctttttccctgtttgggaatattattattagcccttgggggtttttctttcaaaatttcgccccatctttatttgaaaatggccccccctttttagggtaaattaacccccttttttgtgaggttttccccccgggctaaccgtttttttttccaaggcctaaccccacgttttttaaaatttttaacattttttttttacagtttttaactttttttccctaaaaatttaaaaagggggctttttttaaggttaaaaatt

SEQ ID NO: 169053 - DNA, 402 bp, Zea mays
  Clone ID: MRT4577_85764C.1
cagcccatggatgtttggtttactcaaggagaaagtgtgaggaaagccgacgaatcccgtggacttcttaatgctgatgtcgaaaatcgtgatgtttccaattctgtttctggagagaggaaaacagatgagacaaatatgatgatgagctattatgaacaaatagtgaatgagagaagagctgggttctggggccggtgcatggaaatcatataccagactagcgcaggtgcaacaatgttgactgatgtcacatattggggccttcttgtgccatttttctaccgtgacaagtttgggttagctttgttcactgatggcatgcactccttaaatgctgtttttctacttattgacacacttctcaacaacatgccctttccctggtaccgaatggctttc

SEQ ID NO: 169054 - DNA, 783 bp, Zea mays
  Clone ID: MRT4577_85765C.1
atccgcacgtctccccaactcaaaatactaatcgccgacgcatcgtgctcccatgataagcagtagcgtccaatccaggcgacgccatgaagcgcttcccccgagtcacgagctcccgtcgcaagaggcgtaaggtgaacttcacgatcccgccctctgcacgccatgtgctgatgcccgtggggatatcgacgcatctccgtcagaaagactatgtgtcgatgcgtaccgattcgcaaggaagacgaccggcaaggcgtgcacggcacctacgaaggctcgtgaggcgaaagtgctgcaggagaaccatagaagctagtctatccgcacccagtgaatcgctgccagaaagtgaattgctccgccgtgaatatcagcatcctgatttcctaggacatgggaacatattggatgcttgacaccgactgcatagatatcctctagagcctaggacggagtgcgttactttgatatgaattacagctagaactcgcgggaagattccgatgtctacctcttctggtgtacattgaggccgtggagacgatgctcgtggatagatgtgagacattatacagctattggctcacatgaagatgtattacttctaggtatcttgcacattcgaagaaatatgtgatctaacccattggaatactggcagtctagcaactgctgagtatggaactgcccttgctgtttacgctctcttcattacgggcgagatgtacacaaagccctttgcaccgaaactcgtacatttatacagggatccagacttac

SEQ ID NO: 169055 - DNA, 199 bp, Zea mays
  Clone ID: MRT4577_85766C.1
cttttctacaatcacaaagtccataaaaaacggggtgcgtgcattctatctttttcggcgccactcatccattcaaatcaaaaggtttaagaaagttgttgccttatatactaaacacagcctattcatcaatgcgccattgatgtcatcaataattgcctattgtgttcactccacacatgacatgacttacacaaga

SEQ ID NO: 169056 - DNA, 196 bp, Zea mays
  unsure (1)..(196): unsure at all n locations
  Clone ID: MRT4577_85767C.1
tggtaccgcctgcaggtacccgggtccggnnaattcccgggntcggaccccacgnccgtccgcgtgtacgcgatgcgggctagctcgctagcctgaagcatgaccggcaggagctctgggcagcgtgcgcacgtggggtacctaactcgctctgctagcctaccatgggtgatcaccaccgaccgagcgacgggag

SEQ ID NO: 169057 - DNA, 374 bp, Zea mays
  Clone ID: MRT4577_85768C.1
gtaaaacatctgttctgttatccatcatgaaacattgttttttttgtgcatgaaaatttcagtcattgccttttttggagcggggttctgaaatagttcgtagaatacacatttcatgggtataaagctttttctatgcttaaagctatctcttctattatagatatagatatcttctataaaggtaaaacgaattgagtcattgctaaatgttcttgcatcttagatctaagttagacatcagtagatatggttcctatctgggcacctggctatagggctcaacacatccagggggctgggggcagatccaggaattagataagccctgctaatgagcttatgatggtgacaaccgataactataccatttt

SEQ ID NO: 169058 - DNA, 283 bp, Zea mays
  Clone ID: MRT4577_85769C.1
tttttttttttttttttttagcaggagaatggctgcagctgcgcccaaagaggccttgctcaaaggaacaaatcacaaatctctgggatccgtcaccggcacccctgcaaccaaatacatcaacttccttttcgcaaggaaccaaacgcattcaactaactatacatcacactggagcaagtattatgtacagttccatctcttgattcccttttcaaattggggtatacggtggacaaaaaaacatatagatttggtataacaaattgtgcatcggcgcatg

SEQ ID NO: 169059 - DNA, 771 bp, Zea mays
  Clone ID: MRT4577_8576C.1
tcgaagccgcgtggtcttcttttttgtttttttattctaaaccatcacatgcattgattttattgagcatatgtttaattgcatgcacgtaaaagacgtgaggctgcacgagtaaacgcaacatttattttgagtgcatccacttctacggcccaaataacagtctctggacagcctggctgcatacgagctggctacgggcgatcggtgaaccaatcaggcggtatcagtatgcgctcaacagcatctacctgttgttaaaagtttgcctgtgatcaaaatctcaacagcatcaacaactttccagatcattggcaactaccgacccttaagcagcatctacctattgttcatcatcagctctcatatgcgctcaggaacttcttagcagcatccaaattcagctctctgtgaacaagtttctcatgaacttcttcgaatgtcttgcagaagaactctgcctttgtcgctccaatcttattctccgcagccatcttcaatttctgcataaacatatctcgtccaccggacgagtccttattatcgcccttagttgcctcctgaactcgtgatcgctgtctggttcctctgctggatgttccaagatcggagcagcagtagtctcgggagcggacgaccgggaagaggtcgagcatgcgccgaaactcatcctcgtccatggtgggcgcagccgcgcaggcgtgacgtctcctcctctggctcagtcctccggttctctgtcgtctttttgcccggaggccggcctcgagg

SEQ ID NO: 169060 - DNA, 392 bp, Zea mays
  Clone ID: MRT4577_85770C.1
gaaatatgttgaggcttacaagataaccaataatttgctcgatagtggaagatatcgcattattgtggacatgaatgctggtctcggcagctttgctgctgcactagagtccccaaagctatgggtcatgaatgttgttccaacaattgcaaatacttccactttaggtgtaatctatgagcgtggattaataggaatgtatcatgactggtatgtactattaacctatttgttatattgctctcctgtatttctcgaatttttcaatttacatattatgtttgatttactatgcaaaattccgaaatcatttttcagcatagttacattctacttctatattctgtttaactttttcttatgctgttagtaaatgtatttgctttgagaaa

SEQ ID NO: 169061 - DNA, 384 bp, Zea mays
  Clone ID: MRT4577_85771C.1
cccacgcgtccgcccacgcgtccgcggacgcgtgggcatatatgatctagtctgtgtgtcggtgtgtcgaaaaacatgtctgtgattttgttatatgaatgtaacgcgcaatgaaacatacaggactagctgcttgcttgacgatgcgtttgcgtgtatccgtataaattaaaggctataagccacaataaaaaggattatgacttaaaagcgttcaagaaataaaaacacacaaaagaaaatataagccaatggcatttaaaaccaagcgcgatgaccaatttgtgtgaatcaacggaatcctctcgaactaggttgaaattactataaaggggcggccattttaaagggtcaaacttaactgtcttacgacggactatatta

SEQ ID NO: 169062 - DNA, 295 bp, Zea mays
  unsure (1)..(295): unsure at all n locations
  Clone ID: MRT4577_85772C.1
cgagtacggctcccccgaggagttcctctcgcaggtcgactacttgctcggcaagcaggcatacggcggcaagaccgactccgagggcgggttcgagaccgacgccgtggccaccgcnaacgtgctggagagctccacccccgtggtggacggcaagcagtactacagcatcacngtgctgaccaggacggcggacggcgacgagggcggcaagcaccantcatcacngccangtctccganggcaagctctacatctgtaaggcgcnggccggngacaagcggtttttnaaggg

SEQ ID NO: 169063 - DNA, 1140 bp, Zea mays
  Clone ID: MRT4577_85773C.1
cggtggtcgcgttcctggagagcacggccggcggggtctcgtacacgggggacggctggctgcacgagtgcgccaagtgggacgccgagggcggccggttcctggcgtccaccttcttcggcggcggcgtggcggaggtgcgcgccggcgagggcgaggagcgggtggtcgtggcggaccccgacgcggccggccgggtcgcgctggggctcgcggtcgacgcgcccaggcgccgcctgctcctggtgtactgcgatcgcccaccgcgcttcggatacgccgcgctcgccgcctacgacctcggatcgtggcgccgcctcttcctcacacgtcctcgacgtgccaggcgagtcaacgttccccgacgacgtcgccgccgacgaggaaggcaacgcctacgtgaccgacgccagtggaaacaagatctggaaggtcagcccgagcggcgtgctgctgggcgtcgtcaagaactccacgttcgtgcagcgaccagggctgcggcacaacctcgtcggcctcaacggcatcgtgtaccacccgaacggctacctcctcgtcgtccacaccttcggcggcgacctcttcaaggtcgacccgaagacggaggccgtgcacgccgtcaaggtgcaggggtcgctgggccgaggggacgggatggagctgctctccccgacgaggctggtcgtcgccggcacgccgagtagccggctggtggagagctccgacgactgggagaccgcgcgcgtcaccgggcagtacgtcgggccggtccaccgggtcgggtcgtcggcgacggtgaaggacggggacgtgtacatcaaccacattgtcgggtttgggctcggcaagaagaagacgcatgtccttgcgagggcggtgttctcgccgttggccgcagagagttgacggcggccggccggaccctccgtcgcgggatcaccaatcgctttttgcttaaacggcagttcatagttccactcaactccatgagagttacaggctatatatacgtatttcggtgtgattctgtgatatatagatgcttatgcttttgtattgacacgttgctcgaagctgcacgcttcttctgtttgatgcaagcaaaacatgtactacatggtttcgatcggatcaaaaaaa

SEQ ID NO: 169064 - DNA, 380 bp, Zea mays
  Clone ID: MRT4577_85774C.1
caagtccaatttctacggatgggggccatgaaacaaggccatactgtaaatggcaaaagcattaagcaaatccaacaacttcaacgacaaatggatccccatcaacattccgaaaaggcttgggtgagatatctacggtgtgccgcatgaaattcgatcttttgttcctctttgggcggggggcaccattataggtgctacccacaaagtcgatctaagatatacaaaacagatgggtgttgttcggctcttagttggcgtaacaaacgtcgacaagatcccagaatcggctgacatagtggtcgaggaaagcttgtatgaaattttctttaaaattgataaggttcgcaaagatggagtttggtcagaatattattacc

SEQ ID NO: 169065 - DNA, 163 bp, Zea mays
  Clone ID: MRT4577_85775C.1
gaggacgatcgtgtttcgtcagttggtgatttatgatagtagggccgtgccgatcggtcttaccatctggtgctcaacctgattggcgattgggacgcgccctgttgtggcacatttagcgcggcggatgtggtggatactgcgcattgtgtctcgttttctt

SEQ ID NO: 169066 - DNA, 301 bp, Zea mays
  Clone ID: MRT4577_85776C.1
gtgactaggtattagagctttcactgaagatggcccatctataggacagaggtgcatttaatcctgatcttagctgtcatgcggctcccgagcagagattatatgcagtctgctgtcaatagctcctgccgatatgcctaacatgcataatactgtctacactaaatttaataaactactacgatcgtggacaaaacttgcgagctacaaacatggagtgcgggacatatgtaccgcgattatactttatctgaaaggtcgaatcaatcattttacaaacaaaatcctctgatcccatgga

SEQ ID NO: 169067 - DNA, 752 bp, Zea mays
  Clone ID: MRT4577_85777C.1
ggccgcttttttttttttttttttagcaaacaaaactcctcattcctatgcgaaaacctattatacaccaagcaaaacgagcagtttcctgattacccgtgctccccaccatcgtgctcgcccctagtagtcgcagtgatatcatgagaaatagtgcttttccaattgtttcatgcgccctatagctccgcctcttgtccaaacacagtcatggagaatcggacacggctaaccgcacatcgaggggaatcttgcaaaggttaccactgggcagcggccacctggaacggaaaatttgtaaagggtaagagaagtagtaattcaatacgcttgcttatgcggagaatcggcgcataaccttggcgataacgtggagagcgacaacgctgaagatgaagacaacggacagtgtcatgacgacaacagggtcgaccttcagcccgggggactcatcggtgtacagcctcagcatggtgcttgagctgccgccggcaccagcagcccttgtgctgctcggtcgcaggttggcggtcttctcagcacggtcggcggctgccttccttcgcatgacggtcgcaggaccacctgggggctttggcgacgcagggcgtgcggttgttgagcctgaagaggccgcgttcggtgaggtggcgcggggggcagacatgatgggcgatttgaacggcaaccggtgcgagatggacagaaagtgggtgatggaaaggtcgtgggaggctataggccccggccgg

SEQ ID NO: 169068 - DNA, 322 bp, Zea mays
  Clone ID: MRT4577_85778C.1
gatagacgagcaatggttgatctctgcaggctgtagatgctgctttataactggcccacatacactctctcttgcagaagaatcagtatcaatatatgcggcgggagggacatcttacccttggcctaaaggtggtatcttattcataggagtgacagacccctgtttatgttaccgatattatgtacagaatatacatattataatgctcgtgctttgcacatgatcacgaacaaagacacgtttcctacgatgtatgatgaacagatccaatctcaaaactaccaatctgatactctcatactcgctgactttgtttaac

SEQ ID NO: 169069 - DNA, 596 bp, Zea mays
  Clone ID: MRT4577_85779C.1
attggtacctcgaggcggcggtaagcatgaccagactggacgaaaagggccttacctactaccggcggatgatccccgtgctgtgcgcgcacgatctgctagcatggtcacctgcggctcctccagaaggataacatactggaaggcacgtgatggcttagcgccggctccggcgagctctgccacgtcgtacattgctgagggctgccgtacccggtcatgatgggaaaaaaaggctggccattcaacaacaccatctcctactgctacaaccaagccgcgttgtccgcgaacgatgatggagacacaactgcaaggacaccagagaccagcttctccacactagcctaacacgacgagctcggcttcatcaggcttgaggccccaacgctctcatgctctgctagcacatgtagacttgataaactcagttgcggtccatacgctttccttcatcgccaacccattactggagaacgccaagcctgacatcatgcttaacactagctgactttggtggatgataccctatgggatgagctcagatagcatcactcgggcgtataatgacctgcctatcgtgcgctcaacatccg

SEQ ID NO: 169070 - DNA, 329 bp, Zea mays
  Clone ID: MRT4577_8577C.1
aaaacccaagctttttaaatgttttttttttttttccaacaaatttaagggtttccatttgggcctgtttagcttttacaggaaaacaatgggggagactttggactttctgccctaaattaagctttgcgcctggaaaataaaaattaaacccagttttttctttgagggggtttttttttttttttctctccccgggggtttttttgttttttcaaacccggggcctttttcaaattttggggttgcgcccaatttttaaccacttggtgtggaaagaaccacggttgttaacctttttttacttttgagccccaaaattttttttt

SEQ ID NO: 169071 - DNA, 409 bp, Zea mays
  Clone ID: MRT4577_85780C.1
gcgtttttacgtccccacagaccaacattgttgcttgctcggcccagatctccaatggccgccgcacccgtagttacgccgctagcctacacggacgacgagatcgtatacgagtccatgccctgcatttgcgtatacattaaacgctcggagcgctactttggtaccgagttcgtattcgcctccacggacgccggcaccgttgttgcctccagggacctagtcatataccccaacgtatgctcgcgcctttaccttccaggcctagacgacgagagcgcacaagctacacatcttcgtctactagcacgggagcgggttctgactcgggtccgctagtaaccgcaccttgcattcctacttgaacagtttagtgggccttgccaacggtctcgtcaggctccgttga

SEQ ID NO: 169072 - DNA, 461 bp, Zea mays
  Clone ID: MRT4577_85781C.1
tttgggctgatttagtgcttgactacagccaataagctcaatgaggatccgaagtattcgaaaggaacaatagtgatacacaggacgatgagcaaatccttagctaggtatctcatacacgcactagggaccccatacttgccgaaggcgccctccgaaggggattgcacatgtcactcactagaagacgactaaatcaagccgcgctgcgggctcatagacaagaccatcgtaacccatcacgatccggctctcgaagccgctatcgcggtaaggaaaattgagctcctgacgtaaagatcgtgttaaggcctataaaggtgagccggagtcagcatagacgttctatacaatactacactcgacatagataagactcgtacgtagtcactctccgacacctaagagcatgtatgaaattcctgcgtgacaggaacagatgtgagagagaccgaccttca

SEQ ID NO: 169073 - DNA, 295 bp, Zea mays
  Clone ID: MRT4577_85782C.1
ggcgaccccggtctgcagccccttgggtcccaccgccctacgctcccctctacggcaccgcgccctgctgctgctgctgccgttccctccccgtgcggactgctccggcgaggacgccgccgcagcagccgaccaggagccggccccggcggacaccaagacggccaccgcagacgacgacttcgaggagcgcgtgctacggatcaagacccgggtggggcccaagaagcgcggcgcgcgcaagaagaaggccgcggcgtccgcgtcagccagcgccgagacgctcccgcccgtg

SEQ ID NO: 169074 - DNA, 436 bp, Zea mays
  Clone ID: MRT4577_85783C.1
tattttggttcttattgtatttttacttttttgaagaaagggtctgcttgctacttaagatattttttattcatacatgtttgtgcccaagaaaacaggtatgcgagttgtttggttgagaaaaggaatggatgcaggcaaataaaatggtaacccaaatatttctggcttctgcttttggagtatagggatagggtgtgttctgtgaacctggtgttactaaaatcatgtcaaacgggccggctatctaactggttaggtggactcaagtagcatcccgggtcctgggttcaactctccgcgggagcaaatttaaactggtctaagtcagaagacaacctcgtcactgatttgagtcatgcgctcatgcgtgtaatcacctgagtcgctttcaacatgatgcacatggtcgtaactcgcaagcatgtgtcctggg

SEQ ID NO: 169075 - DNA, 409 bp, Zea mays
  Clone ID: MRT4577_85784C.1
gcgactccatttcggcctctgtccgttgcacggtcaatatcacctccaaccatgggtaaagagaaccaccacatcaacattgtggctatagaccatgtccactctggcaagtggaccaccacaggacaccttatatacaagcttggaggccttgacaagcgtgtgatcgaaaggcctgagaaggaggctgctgaaatgaataagcggtccttcaagaacgcgagggtgctcgacaagctcaaggctgagcgagagagacgtatcaccattgatattgctgtgaggaagcatgagaccaccaagtactactgcacggtcgttgatgcccctggacaccgggacttcatcaagaacatgaacactgaaacctcccaggctgactgcgctggcgctatcattgactccacca

SEQ ID NO: 169076 - DNA, 260 bp, Zea mays
  Clone ID: MRT4577_85785C.1
acgcatacaaagacattattagactggttatggaatatattatactctactcattgccacttacccgggttggggggaatgccctctgatcaaatccttctttgccctgtacatgttttacgaccagattcgttaattggaggtgcttattatcctgtgacaagccttctcctttattatccttacctacttcgtcagtttatctttattggttctgtactgtacgtggccttagttagaggcgtttcccactcaccttt

SEQ ID NO: 169077 - DNA, 811 bp, Zea mays
  Clone ID: MRT4577_85786C.1
cgacccacgcgtccgcccacgcgtccgcccacgcgtccgcggacgcgtgggtgagcctcccggtggagcgtgggtggtgctgggtgccggggatgagctgcaacgggtgccgcgtgcttcgcaaggggtgcagcgacgcgtgcgtgctgcggccgtgcctgcagtggatcgacggcgccgaggcgcagggccacgccaccgtcttcgtcgccaagttcttcggccgcgccggcctcatgtccttcctcaccgccgtccccgagccgcagcgcccagcggtgttccagtcgttgatgtacgaggcggccgggcggacgatcaaccctgtgagcggcgccgtggggctgctcggcgcgggcagctggcagctgtgccaggcggcggtggagacggtgcttcggggcggcgccatcggcccgctgcccgagttcgacgggggccgcgacaacacgtttgctctggcggcgacggcgaggcgggccgtggggtgctcgacgtcctcctcccgtcccgccggagccgtcgtgcgacctcgggctgtggctcagccccgggtcgtgcccggcgccgggcgagcggcggcggcggcggcccggcacgccgtccatgacctccgaggagtccgtgacgacgacgagcggcggcggcggcggtggagggagggagcccgagctgctgaacctttttgtctgagactttagctacaccgacggcctggctaaaaggccagcggccgatcatgtttcatgtggcgcccctcggcgcgcggtgtgctgtatgcttgatctgatcccggcgaaaacgtctgtct

SEQ ID NO: 169078 - DNA, 313 bp, Zea mays
  Clone ID: MRT4577_85787C.1
gtaaaaatgtttctctcgaaattgaagtattctgtccaaccttagtgaatcttgatgcatgtatagaatataaaaccataatgtatagcctaggtgatactttccctggttcaaacttcaagatatatgccgtttaaattcctacagatcaaacatttttttgactttgaccatggatatgtaaaggattgcgtagattgactatgtaagatgttgctagatttatcatgaaaattactttcacaatatttaattatgtttattggagatcatatttttcgtagaaattgctagtcaaagtgtcaccttgtag

SEQ ID NO: 169079 - DNA, 1499 bp, Zea mays
  Clone ID: MRT4577_85788C.1
cgaagctcggaattcggctcgtggggcgtcgcatgagtggcttgcctcccggcggagcgtgggtggtgccggggatgagctgcaacgggtgccgcgtgcttcgcaaggggtgcagcgacgcgtgcgtgctgcggccgtgcctgcagtggatcgacggcgccgaggcgcatggccacgccaccgtcttcgtcgccaagttcttcggccgcgccggcctcatgttctttctcaccgccgttcccgagccgcagtgcccaggtacatacctcaacccaccggcggaggtgctcgctggttacttaagcacgcggcgcggttatccgtacgatccagtgtgcttgctacctcgcgcacgcacgtgtggttcctgacttgatggctgatgtgctcactcgttcgcgtgatgcagcggtgttccagtcgttgatgtacgaggcggccgggcggacgatcaaccctgtgagcggcgccgtggggctgctgggcgcgggcagctggcagctgtgccagtcggcggtggagacggtgcttcgtggcggcgccatcgggccgctgcccgagttcgacgggggccgcgacaacacgtttgctctggcggcgacggcgaggcgggccgtggggtgctcgacgttctccacggcgaagcgtggggcgccgacgaggacgaacctgggggcggcgcctcccgtcccgccggagccgtcgtgcgacctcgggctatggctcagccccgggtcgtgcccggcgccgggggagcggcggcggcggcggcccggcacgccgtccatgacctccgaggagtccgtgacgacgacgagcggcggcggcggcggtggagggagggagcccgagctgctgaacctttttgtctgagactttagctacaccgacggcctggctaaaaggccagcggccgatcatgtttcatgtggcgcccctcggcgcgcggtgtgctgtatgcttgatctgatcccggcgaaaacgtctgtctagctagcggcgtctcgccggcgaggtacctgtagtcttcttcttccttttttgggcgcgtagaaaccatgggccaccaccgcccaccggtgccggcacctgcctgcctgactccgtccgtcaactgtttattttgtttcttcccaactttgttggcaagcacaaagcagcgttaccgctccgtcgctgaataatacaattgtaaaccaagggtaaagcgaagcgtcgatcttatcctcaacgtagcagctcgatcaggaactctatcagcttatccgaagccagattagtgctttatcgcaatggtctacgactgctatggcgtgttactcattagtaaaaaaaaaaccccagtgggtgctctgctagaaaaaaaaaactccagacgtcacccgcggaaagccacgaaaaaaaattgcaggtgggctggtggagtggggacgatcattggcggtgaggtacaccatgcgcgcgcctatggaagggtgggcttggaaccatacggcggg

SEQ ID NO: 169080 - DNA, 232 bp, Zea mays
  Clone ID: MRT4577_85789C.1
atgaaccagcaagccaaacatagatgagttaactgccattattattgtcaagagcgagaaatcacgatgagtaaaaggtattcaaattcattgcctggttcacttttgtagtcatgcacaatatggaatgaaataggcatcaatacttgatggtttccaaatttgttggtccatatgaattcatgaactgtatgctgagcaaaaaggaaaataaagcttgctttgttgaaaa

SEQ ID NO: 169081 - DNA, 209 bp, Zea mays
  Clone ID: MRT4577_8578C.1
acagaaaaaattttcagggttgttggggggttccaatccaacccaaggtctattttttttttaaacaaaaagtttttgcccaacaatttgtttttccaattttaaaaaaccttttcaatttttctaagatcaaggggggctgccttaggtagcccaaggcggggggatttgaaatttaccgggggtccctaaaaaatttctttgttttt

SEQ ID NO: 169082 - DNA, 683 bp, Zea mays
  Clone ID: MRT4577_85790C.1
ccggccgggacggcgcgcccattcgaccacgcccgacggcgcactatcccctctattatcgcgcacgtctcgaaaatacccagaaacgaattttcgaagctgccgacagcatctgaagagcttcgagtccatccttgactcggtcgcgcatcttggagcgcattgcttgcacaactaaccacgcgacaaagaaatccattgcaaaccagccgacacgtccacgcactttgtaatcctgcgcctgccattcctcagcgaccacttctaacagccttgcacagctcgcatcctgccatgtcgatggcggacgaggccgagctcgccttcctagaggcgcaaaaggacgaagagtacgacccttcagccggctacaacatgcccgacgcgcctacgggccaggaagaatacgacccaaccgcgaccttttccgcacactcagaacagtctggctccgcgccaccagaatcgggcgccaattctccaccgccaactaccgagagcgagcatgggtcgcagtcccagcctccccaggctcctgcagaggcgtccgcagcgccgcagtctaagcgaccgcgcactgtgggtgggttcgtcgacgagagcgaggacgaggaagaggagtccgctgcgcagccgcaagaggcgaatgctacactgctgagagctacgggagacgctgagtc

SEQ ID NO: 169083 - DNA, 156 bp, Zea mays
  Clone ID: MRT4577_85791C.1
agctcaatcactctgcatatacggcgcatggcctcgacaacggcggtgccggaggtggcgctgcggtccggcgacgcgaggcccatgccggccatcggcatgggcaccgccaagttaccggtggtgccggagaccacggtgaaggccgtgctggag

SEQ ID NO: 169084 - DNA, 213 bp, Zea mays
  Clone ID: MRT4577_85792C.1
gcacagaattgaacatattcaaaccttgcagttatgttaaggctggttataccacaagataaaatggaccattcatggcacaaagtcagcacaggggactctgtgttagatcacacaggttagcactcattattgggacaagttcaagaaaactcgataatattattatattggtgtgacactacttgtgcatactcactcctcatactcata

SEQ ID NO: 169085 - DNA, 379 bp, Zea mays
  Clone ID: MRT4577_85793C.1
tggagctcacctacacacgacgagcattgggcgtgcctgttcctggctcgggagggattgtccatcatcaacaactgaaggagcactgcctgtccaatcgagcgggcgaagaggaccacatggagcacacctaggcattaacccagatactgaagaggctgacacatgcgatgacacagctggacatgaggctggctctgatcacattagatccggaccagcatgtggagacccacccatataagcagctaaagagttacggggtacgtatcaaccaaaggccacatatgacagagaggcgggccatacgtggcacgtgagaggctcacaccagactaacgctagtatcgggtatgacgcatgagacgctgcttgcacc

SEQ ID NO: 169086 - DNA, 358 bp, Zea mays
  Clone ID: MRT4577_85794C.1
taaatgcgattgtacactcactcggatcctaatcgatggttcgcaattaacgttacatgtatgcacatgtgcgttgtctgaagacattgtgctatcgcagtcgatggagagagcactgactgtgacatgtgactctgtctgctcatctgcttgcacgataccactcaatagggggatcatcaaattcaggcagcaacagttatcgcgggttgagacaactacaggatgttgggtgcaacacatccggaaggtatcaaagggtcagtcatcattagaactcaatgttgaaaaacacgatgctgtaatcaatggtcatgcttggagaccaggaattggtgcctgcctacatgtagctaaa

SEQ ID NO: 169087 - DNA, 428 bp, Zea mays
  unsure (1)..(428): unsure at all n locations
  Clone ID: MRT4577_85795C.1
ggcgcgctgnccaccttcgccgcggggggggggggggnagnagcgancgccgccaccgccgcggngccggngccgctggcgcccgcgcccgcgtcgtccgagaaggcgctgctgcagttcgaggacacggggcggctgttcgcgggggagccgacncccgcnctnctncncacgggggggggggcgggancnctntccctgggccccctggtggacgcggccactgcggcgctgcggtcgccggcggtggccggcagcgcgctgggccgggccgcccccagggccaccgcgtacccgcacttcttcgcgggcgagacccccggcgaagccctcgcggcccngcgcccgctgtggcgcggcggcatgggcggggtcctcccctaccggatcccagacccccnngaccgnggcgcgtgcgaccgtaaccc

SEQ ID NO: 169088 - DNA, 231 bp, Zea mays
  Clone ID: MRT4577_85796C.1
aaaaggcaatatgggttaaatttttttaattagattggctaattggcaatttcttcactaacctaccccagatttccccggggccggggggtagccagccccttttatcctgccccaaaacgttgaacctttctcccaaaaaagggggggtccgggcccccaaatgggtctggggcccgggagaagccccccccgccgaaaagggggccaaaagagaagggccccgccccc

SEQ ID NO: 169089 - DNA, 805 bp, Zea mays
  Clone ID: MRT4577_85797C.1
ggggggggtgtgttttttttttttttttttatacttgaaaacctaaggtaataccatactttttatttaacttgttgattaatatgaatattttttagctacacctagagtgtttgtattagtaacatttacatattaaaaataactaaaaaactgggggggggaatcttgtcctgggtccctaaaatctcaacggccgctgcctgcttctctacactcaagaacatagcattggcaaaaaatggcgatcttcataatactttcacatctccacacccgtgaataaacatcatcctctatgtagtgtcaaagcaagggattaatccaacgtcatgttataagaccatcaaaattgcacagggcattcttcactgatccatgtaaggcccagccaacatatataggctaacagctaaaaaaggaacgagctaaatattgatgctcgctgcttaactggacaaaccattcagaaatctgtttcatttccacatcgaaggaacctgataattgtctacttccagtggcaacaattttatcaaatggcagtggaaggacgctgaccaatgcaccaatggcagtaaactgaacacttaaactccatgattttgtaaaatgtgcccctgttaacaataacgataatttgttccttagcttactaacacttctctcctcgtaaccaacatcatcaacaaatgaccttccaagttggctcacaagtactaacagagcagctgaatagtcacggcacatgcacaattccagaatctccagaagacggataacgacattgttgcccacgcgaccg

SEQ ID NO: 169090 - DNA, 465 bp, Zea mays
  Clone ID: MRT4577_85798C.1
gtggcactgcgatggcaatccaccggggataggtgacttaagcagagatctggattgttagcgtccgggtataaagtaatcatgcacagcccgtcccgtcgtatatcaagccggtgtatcgccactacactacagagctgcgacacgaaggcaaggacggcgcctcacgctgggtcgcgcgccctagagtagcggaaagatacatgttgcggaccagaaccgccggccccaacctcagggtgatgcttgaccagaggaggaggcaacatcaggagcacgctgacggattgcgtcattgccaacagggaggggatcctatgggccaccaaagacaaggtgcagcaagccaactactacacgatgcctcacccaggctctccaccatgagagtgaataggtttaacggatgaggagatctatgctgccgttcaagagcactcctgcccatggagaacccaaacgaca

SEQ ID NO: 169091 - DNA, 277 bp, Zea mays
  Clone ID: MRT4577_85799C.1
cgccctttaccacggccggccgggcagggacaagcttttttttttttttttttttttttttcttttttttttttttttttttttttttttttcttttttttttcccaaacacccttcttccccatatattattcctttccatttcaatggtcaaatcaccacatttttgggtcgtcgggccgtgcttattgctaaccctccattactcatccccgctaaacgagtaaactccctataggcagctagtcagcccctccattccattattactacaacc

SEQ ID NO: 169092 - DNA, 925 bp, Zea mays
  unsure (1)..(925): unsure at all n locations
  Clone ID: MRT4577_8579C.1
atcctggatcctaacccgatcacgcgcgtagatgtggatgggataagggcacacgattggttcaagcaaggctacgctccttctgcgccgtttaatgatgacgaagaagatatcaacgtggatgaagaagacagcctaaatatgactgagcagaatggcattcaatacaagatagcaatcaaccaaatcaatgctttccagctcattgggatgtcctcctgccttgatctatccggannnnnngagaaagaggatgcttctgaaaggaaaatcagattcgcatcaaattattccccagcttacttgtttgagaagatcgagagcattgtcagnnnnntgggtttccaggtacacaagagcaacggcaaggtgtttgagattaatgaatccctttacgttgtcgagctnnnnnngtcatctggagactgctccctgtacagaaagttgtgtgagacgctctcggaggacttgggcacatgcaaaagccagcaatttttaaagcaggattctatcagacaagagataggtagacataacagtagcttttaactaagagaacacttgttaaataggctatagacacaaactaacacaaccaatatactgaatttaaaacagtatattgggcatgcacctattacagatgtgctctctcatgccttttgtcatgaaaccttaagagacttagactatgacaaattggcaactgacaatgtatcgaactccaaagggataatatgatgtaaacaagtaaaatacacatataagagattcagagttacctggtctctatgtttctctagcctaccccaacttgcttgggataaaaggctttgttgttgttgttggaatgtaagattgtttgtttttgaagcccctggttgacttccatgactcaagaaaaattgtgatatgttgttcgttg

SEQ ID NO: 169093 - DNA, 710 bp, Zea mays
  unsure (1)..(710): unsure at all n locations
  Clone ID: MRT4577_857C.1
ggtacgcctgcaggtatcggtccggaattcccgggtcgaccacgcgtccgccgcgctcgctgcagccaccttcgccgcccaccgcctcctccagcgcggactccggcagctctctcgccagagtcctcgaactcgacttttaattccctcactcgcggcatcggaccaccggcgtgccccaccatgtcagacgcggcagtggataccagctccgagatcaccaccaaggacttgaaggagaagaaggaagttgtggaggaggcagagaatggaagagatgcacctgccaatgggaacgctcaaaatgaggaaaatggggagcaggaggctgacaatgaggtagatgaagaagaggagnaaggtggggaggaagaggaggaggaggaagaaggtgacggtgaggaggaggatgnngagatgaagnnatgaggaagctgagggctccnntacgggcaagcgggtagcttgaggatgantgaggatgancgatgtggacanccaagaagcnagaagaccccgaggaggatganctagacagccaaaaggaaaaataacccttacnngcaccgtgaccctaattcaccctccacttccccgtctcaagaatttaanacggtggtcancctttcgagtagaagaagcaggcccccggcccgcccacagcgggccaatgccacccacagatatgacatgcgcctctcaccacccct

SEQ ID NO: 169094 - DNA, 392 bp, Zea mays
  Clone ID: MRT4577_85800C.1
gcacggagaggtaagttcatgagacatcttgcagaagctgaaacggcttctaaagctgctactgccaacaagggtgatgcctagacccacgccttgaaggttgccaaggctgtgtagtctggggcagcctagtagaagaccaacaatatccgctcgtctgtgacatttcaccgccccacagaccctagaagaaggctagtgaccccaagtacccacgattcatcactaccgtgaggaacaagcttgatcagtaccaaattctcaagtacccccttaccacagattcagcgatgaagacgattgacgataacaacactctgatcttcattgttgacctcaaggcatacaagatgaagatcaaggctgacgtcaataagatgtatgacatccat

SEQ ID NO: 169095 - DNA, 1338 bp, Zea mays
  Clone ID: MRT4577_85801C.1
ctgtgcggcgctcgagccggccggcttgcgaccactgccgccgctctcctttcccccatttcgtctggccgtctaatccgttggccggcccgttctgttcgtggaagcgcttggatctgctctgtatgtgcttgttctcgttcggttttgccggccggagttgtctcgcgaggcgtagcttgtgtgtcaggctctcttttgccttgtagatttcctgcatctgctcttactgatagcttttgctgttaatcttgagaaagttttgccacgagtctctttgatattctattggggtaatgatatgtggggatactgtaatgtttctgatattcttgctatggttggtttgggcatgaagtagaatttgtaatggtgcttttaggatcctgtttttggtactaactctgtcaacactagactgagaattattgttaacaagtagctttcatgttgcacgacaagatccttctgtgtttcattccagttctcatgattttatttcttctttgcatcttcatccgcctgacataatggtctttatctacttgcaattcaggagggagttttgagaagcataaatggctcctaaagccgctcctgtcaagaagggtgatgccaaggcccaggccttgaaggtggccaaggctgtgaagtctggggcaggcaagaagaagaccaagaagattcgcacatctgtaacatttcaccagcccaagaccctgaagaaggccagggacccgaagtacccaagaatcagcactactggaagaaacaagcttgatcagtaccaaatcctcaagtaccccctcaccacagaatctgcaatgaagaagattgaagataacaacactctggtctttattgttgacctcaaggcagacaagaaaaagatcaaggctgcagtcaagaagatgtatgacattcaagcaaagaaggtcaacaccctgatcaggcctgatgggaagaagaaggcttatgtgaaactgacacccgactacgatgcccttgatgtggccaacaaaattggcatcatctaagttaataggcaactggattcgacatctatgtcctactagttctgagcataccaacagatttttctatgttactagtaattttgtttgtcatattgggttgtttttttgcaactaagtcttgttcgcagtcgcagactacatatgcctgtattgagttcctggttgccaaattaaccatcttgaactggcattattccactttacgtataatggctgaatctgttgtggcgttgtgcgaacatgactgatcacactgcatggtttagtggactattgctaaatataacatctctgtttattt

SEQ ID NO: 169096 - DNA, 1238 bp, Zea mays
  Clone ID: MRT4577_85802C.1
ccggccgggcaccgactctcggcaacggatatctcggctctcgcatcgatgaagaacgtagcaaaatgcgatacctggtgtgaattgcagaatcccgcgaaccatcgagtttttgaacgcaagttgcgcccgaagccttctggcggagggcacgtctgcctgggcgtcacgcagccgtcatcgcttcacgtccgctacagaccggcgaggagacgaaaggagggagttttgagaagctcaaatggctcctaaagccgctcctgccaagaagggtgatgccaaggcccaggccttgaaggtggccaaggctgtgaagtctggggcaggcaagaagaagaccaagaagattcgcacatctgtaacatttcaccagcccaagaccctgaagaaggccagggacccgaagtacccaagaatcagcactactggaagaaacaagcttgatcagtaccaaattctcaagtaccccctcaccacagaatctgcaatgaagaagattgaagataacaaaaacactctggtctttattgttgacctcaaggcagacaagaaaaagatcaaggctgcggtcaagaagatgtagacgaaagcccatttcagccagtaagaagggcttcccgccgcacccgctccaggtcccctcccccaaactgaaacgaagttgcggcggtcgcgactgagtgcagagatgctgcagttcccggcgctgatgcggcagtggccatcgccgccgctgatcccggcgtccacgctgctccccgtgccggccacctcccaggaggacgagcttctcctctccatggccgagtccgacctcgaggataagctgaacgagatccggaagaccaacagccacctggttatcatcgggaagcccacgggcgacaccaaggaggagtacgacgctgaggtggaggacgacgatgcagacaacgtcgaggagtctgacggcgacgacttcgaccaggagaccggttgacccaggtggctcccccgtgcttcgtcggcgtccttgagcgtcgtcatccccgctgtccagtctgtatttcgcaatccctgagttgctccttctatctagatacgctgttaccctattttgctgctgtctgttctcaggatctgagcatgtccttgtcgtgtggaccttgtgtatgaaacaagtacatgattaatcggtccaatttaaatgctatattagtttcctctaaatacaaaaaaaaaaaaaaaaaagcccccta

SEQ ID NO: 169097 - DNA, 1716 bp, Zea mays
  Clone ID: MRT4577_85803C.1
gttagccgtcatcgtttcgcgtccgcctcagcccgccgcaaggagaggtaaggtaagccggtctcctctcgccccatctctccactgtccggccgttgtggtctcagcattccgaattgtatggacttctttgttgggtagccggctcggtcggatcgtggaagagccggatctgctctataagcgcttgatctggagaggtctttcggcgggagtgagagtcaaggtctcttatatttcttgtatctgttcgtatcggtggcttttgctgttaatcgtgagaaggttttgtggggggagtctctttgaccttagtacgcccatgtcatcgtggtaaggatgctgtctatgatttcaaatattattgccatggttgaattggaaatggcgctggtttactattggtcttgctatgattctgattttagctgggttcacgcctaaacttggctttcggttaactctagaccgagtactgttatttgttaaccggtagcattcatgtggaggactaaaccattctatggttcactacacaatttgcatgattttgtcctttctcctttgctttttcacctatctgacattatttcctttctttctttgtttccagttcaggagacatcttcgagaagctgaaatggctcctaaaggtacacgcctaacatatttctataggtgccatatacttgatcaagaaatgccctgtgtcaaccttgaaactgctatacgctgatcgtgcatttcctgttcctttgtttgtctcaccacgacaccatgtattaggaactagtaactagtgggtatttgtacatttaggtcttcgatctaacaaccccctctttgttgtactcatgccatgacaagaacatgtgagtcctctcaaagggtgagtatagaattagcaaactgtatttgctgcattatctcttgaatacagatatgatctctaatgcattggcatcaatacatattgtaatcctgtttattttagcgcacaatcaccatgctgaaattcattacctgtctttttttatctaactgtggtttcattagctgctcctgattaccttcttttttatctaactgtggtttcattagctgctcctgccaagaagggtgatgccaagacccaggccttgaaggttgccaaggctgtgaagtctggggcagccaagaagaagaccaagaagatccgcacgtctgtgacatttcaccgccccacgaccctgaagaaggctagggaccccaagtacccacgaatcagcactaccggaaggaacaagcttgatcagtaccaaattctcaagtacccccttaccacagaatcagcgatgaagaagattgaagataacaacactctggtcttcattgttgacctcaaggcagacaagaagaagatcaaggctgccgtcaagaagatgtatgacatccaggcaaagaaggtcaacaccttgatcaggcctgatgggaagaagaaggcttacgtgaagctgactcccgactatgatgctcttgatgttgccaacaaaatcggcatcatctaagtgctgcattaggcatcctaattcatctgttgtgtcctagttctatgtgaaaccagagttttctagctatggctctcaatcgctccattaccatgtgttatgcacacttctgaatttgatatcatccaagtgaccttttgaacgaaaaaaaaaaaaaaaaaaagcggcc

SEQ ID NO: 169098 - DNA, 817 bp, Zea mays
  Clone ID: MRT4577_85804C.1
ccggccgggcccagccgtcatcgtttcgcgtccgcctcagcccgccgcaaggagagttcaggagacatcttcgagaagctgaaatggctcctaaagctgcccctgccaagaagggtgatgccaagacccaggccttgaaggttgccaaggctgtgaagtctggggcagccaagaagaagaccaagaagatccgcacgtctgtgacatttcaccgccccacaaccctgaagaaggctagggaccccaagtacccacgaatcagcactaccggaaggaacaagcttgatcagtatcaaattctcaagtacccccttaccacagaatcagcgatgaagaagattgaagataacaacactctggtcttcattgttgacctcaaggcagacaagaagaagatcaaggctgccgtcaagaagatgtatgacatccaggcaaagaaggtcaacaccttgatcaggcctgatgggaagaagaaggcttacgtgaagctgactcccgactatgatgctcttgatgtggccaacaaaatcggcatcatctaagtgctgcattaggcatcctagttcatctgttgtgtcctagttctatgtgaaaccagagttttgtagctatggctctcaatcgttccattaccatgtgttatgcacacttctgaatttgatatcatccaagtgaccttttgaactagtttgcgttctgcacttcattacacttggacaccgtcagtctttgtgaccagtaattttgtttgtcgtaatgggttggttttgcaactcgcccaaaaaaaaaaaaaaaaaaaaaaaaaaaaaagcttgtc

SEQ ID NO: 169099 - DNA, 544 bp, Zea mays
  Clone ID: MRT4577_85805C.1
tacaaacttttttttttttttttttttttttttttttttttttttttttttttttttttttttttttttttttttttttttttttttttttttatttttttatttatttttttttttaaaatttcccttccacccaaggagaaacggggcacatttttaccaaaaaaacgccccaaaaggactaaaaaaaaaaacaacccaaccccaaaacaaaaggaaaaaaattattaaccaacccgggcggccaaaaggaaaggccaatcccggccccccgggggaaggaaacaaaaggaaccttcttggccccccgggggggggaaaaaaggggaaaaatgccccccgggggaagggggtattcggggacaaccccacaaaaaaaaaaaggcggaaaaaaaaaaaaaaaaaccgggggggccaaaaaagggaactaacccaaaataccccccaagggccccccggcccaataaaaggggaaaaaccgggggccccatgtgggtaaaaaaaaccgccaaaccgcggggaaaaggggcccgcctattggggg

SEQ ID NO: 169100 - DNA, 246 bp, Zea mays
  Clone ID: MRT4577_85806C.1
cggacgcgtgggctctgattctgttgattttggatcctatatttattcctgagttattgatattcctgatatgaagcctgtccaggatgtttattaagatttgaccattgttggttgatccagaattccagatattgtatttcacctttgaactgttgatttttttggggatggggctacattgggcatcgaacaagacacaagtcttttttttgttctggatggtttctagctggagctatggtt

SEQ ID NO: 169101 - DNA, 363 bp, Zea mays
  Clone ID: MRT4577_85807C.1
cttatttttttttttttttttttggtttttttttgttttttttttttggtttttttgtttttttgggggggcacaaaggccccactgatacttggatttcatatggaaaaaaaaatcccgcccaaaaaaaatttggcataaagggtattctccaaggggtggatcgggggtgcctattaaaaaagggatcaaaaatggacagttcgggcgcaatttttttgacattttggtaacaaaaggggggcgccttacaatttggttgatgccacaagaaacttggggtgacgggcccgccccaaaaaatttcctggcttttttttcccgaaaacgacagaaaccacccccactggtttggcgggaccc

SEQ ID NO: 169102 - DNA, 112 bp, Zea mays
  Clone ID: MRT4577_85808C.1
gagtcgtattagtctgggtgtcatgtgggtcggctttgttctcgggtttcatgaccaactcactttatgctggaccttctatctatgctttcattcagttcctcgtgggtta

SEQ ID NO: 169103 - DNA, 1005 bp, Zea mays
  Clone ID: MRT4577_85809C.1
gagagaaagaaagaaagaaagggaaggcggggggaggccggccaaggcaccaccacaccaccacccgacgaattcaagcatgaggccgcagagcgcagagcagggctgccgccgctgccgctgaggagcggctacagagtgctatacctattacacagcggcaacaggcacgcacgccaccgctcccgatgttgcttcagttggtgaaacagcttgctcctaagattgttgtggctattgaccacggcagtgaccggggtgacctcccgttttcgcagcacttcatgaattgcttccagtcctgtatgttccttctcgactcactcgatgctgctggcaccaatgcggatgctgccagtaagatcgagaggtttctgatccaaccgagagtagaggatgcagtgcttggccgtcggaaggctgaaaaggcaatggcttggcgggcagtttttacatcggctgggtttgctccagtgccactcagcaaccttgcagaggcacaagctgactgcctcttgaagcgggtgcaggtccgaggattccatgtggagaagtgtggaatgggtctagcactctactggcagcggggcgagctcgtgtctgtctcggcgtggcggtgctgatcatagcaacctcatccgtcaaccatcgtcgtcgtcgcgcctacactattcgcaggcatgtttaactccggtaatatgcgttttatcttgcaaacattgcaaagaaactattgtcatggttgttccacgcctctgattgctttactgctgtttttggagtattagctaggcctaatgaatgttgcaatcttggtgtgggtgtccccctacaatgtaacatgttggtactagggtctcaacgctgttcgtgctctcttcttggttagccggaggctactttggcatatttgtggcaatggtgttcgttattttactaggtaaatcagatgaagactgacatatgaactgaaatggttgggcattttttttctttcttggcttc

SEQ ID NO: 169104 - DNA, 625 bp, Zea mays
  Clone ID: MRT4577_8580C.1
cctcgagccggccgggagacagaagactagacgtctatcctgtgcggttgcgcccaccatgtacgaggatgagtttcggagcatgctcgacctcttcccggtcgtccgctcccgagactactgctgctccgatcctgccaacatccatcagacgaatcagactgcgatcacgagttcaggaggcaactacgcgagataataaggactcgttctgtgcaccagatcatgtttatgcacaaattgaaaatggctcgcggacaataatattggagagacaaaggcagagttcttctgcaagacattccaacaagttcatgataaacttgttcacagagagctgaatttggatgctgctaatatgttcctgagcgcatatgacagctgatgatgaacaatacgtagatgctgctaaagggtacatgctgttgagcgcatactgataccgcctgattggttcaccctcgcctgtagccagctcgtatgcagccaggctgtccggttatttgggccgtacaagtggatgcacccaaataacttatgttacgtttactcgtgcagccccacgtctttcacgtgcatgcaattaaacatatgctcaataaagtcaacagatgtgatggttcag

SEQ ID NO: 169105 - DNA, 939 bp, Zea mays
  Clone ID: MRT4577_85810C.1
ggccggccgggccagccgtcatcgtttcgcgtctgcctcagcccgccgcaaggagaggtaagttcaggagacatcttcgagaagctgaaatggctcctaaagctgctcctgccaagaagggtgatgccaagacccaggccttgaaggttgccaaggctgtgaagtctggggcagccaagaagaagaccaagaagatccgcacgtctgtgacatttcaccgccccacgaccctgaagaaggctagggaccccaagtacccacgaatcagcactaccggaaggaacaagcttgatcagtaccaaattctcaagtacccccttaccacagaatcagcgatgaagaagattgaagataacaacactctggtcttcattgttgacctcaaggcagacaagaagaagatcaaggctgccgtcaagaagatgtatgacatccaggcaaagaaggtcaacaccttgatcaggcctgatgggaagaagaaggcttacgtgaagctgactcccgactatgatgctcttgatgttgccaacaaaatcggcatcatctaagtgctgcattaggcatcctaattcatctgttgtgtcctagttctatgtgaaaccagagttttctagctatggctctcaatcgctccattaccatgtgttatgcacacttctgaatttgatatcatccaagtgaccttttgaactagtttgcgttctgcacttcattacacttggacaccgtcagtctttgtgaccagtaattttgtttgtcgtaatgggttggttttgcaactcgaccaaatagctgttttgagtataaccgtgtatgtgtgtgtatccgttgttggagaggctgaggctctctaaaaatttctctgattttcccgcgccacccgcgtaaagtataaatcacaactttgatgcctaaaaaaaaaaaaaaaaaaggccccta

SEQ ID NO: 169106 - DNA, 250 bp, Zea mays
  Clone ID: MRT4577_85811C.1
catcccccgcaggccaaacacgaagccaccttttacattttgctcgatacaaaatcacaaccgtagggactaaactacgggcagctttacccatctcaaacatctttactctcccacacaatctatctaattactctggttactacaagaatactaccaccgccaatcctcccatcgcatcacttctctctaataaataatccatagaacatactcagacttatctactcaagaacaatatactcactcc

SEQ ID NO: 169107 - DNA, 954 bp, Zea mays
  unsure (1)..(954): unsure at all n locations
  Clone ID: MRT4577_85812C.1
actcctatgggcgattgggtccctcgaggccggccgggctcccagccgtcatcgtttcgcgtccgcctcagcccgccgcaaggagaggtaagttcaggagacatcttcgagaagctgaaatggctcctaaagtggtttcattagctgctcctgccaagaagggtgatgccaagacccaggccttgaaggttgccaaggctgtgaagtctggggcagccaagaagaagaccaagaagatccgcacgtctgtgacatttcaccgccccacgaccctgaagaaggctagggaccccaagtacccacgaatcagcactaccggaaggaacaagcttgatcagtaccaaattctcaagtacccccttaccacagaatcagcgatgaagaagattgaagataacaacactctggtcttcattgttgacctcaaggcagacaagaagaagatcaaggctgccgtcaagaagatgtatgacatccaggcaaagaaggtcaacaccttgatcaggttagcacttgctccagtgtagttttttcctgcacgatttattatgttgtgcaactaaagagctattcttatcgtgtctgtgcaggcctgatgggaagaagaaggcttacgtgaagctgactcccgactatgatgctcttgatgtggccaacaaaatcggcatcatctaagtgctgcattaggcatcctagttcatctgttgtgtcctagttctatgtgaaaccagagttttgtagctatggctctcaatcgttccattaccatgtgttatgcacacttctgaatttgatatcatccaagtgaccttttgaactagtttgcgttctgcacttcattacacttggacaccgtcagtctttgtgaccagtaattttgtttgtcgtaaatgggttggttttgcaactcgacccaatagctngtttgagaaaaaaaaaaaaaaaaggccccta

SEQ ID NO: 169108 - DNA, 584 bp, Zea mays
  unsure (1)..(584): unsure at all n locations
  Clone ID: MRT4577_85813C.1
gtctgggggtcatacctcccattcaatgtagatcggcgcaatggaccattacaatgatatatattcagtggaggaatgcatagatgcggtggatttggtggcaacaggtcgctgaggttaaacgcccttggcaagcacatgccaggcctaatgaacacgcttacttaccacatgattgtggagttcaactctttatgagaccacatgcaagcaggataaaccaagagctccagatagctctgcttggtcaaaaggcatcagaacaccacccttctaccacagcatctactagactggatgcacagcaaaaaaagctaaaatatctccaactaagcaacatcaacaatagattcattctctctaaatgtgcaactgaaaacgttcctgcggcaatacaagggaaagaaatacaccaatgcacgacatcaatgacgcccatcaatgaataaacaacttaggacagccaagatgcaacacgagattgcctatgatcagnctcgtcttatggcatagcgcggagacaaatgacatgcttaactactccgtgtgagcaattacatgagtctgtgttcactctcaagcta

SEQ ID NO: 169109 - DNA, 505 bp, Zea mays
  Clone ID: MRT4577_85814C.1
cccagcgtgcgatctttctggtcttttattgccccattgaccacagaagctcttgagctgtgctggacttgtgggggacaaatgcggagatacatgctgtgctgatagagattctgctgttggatccacaatagaatcgcgaacaaaagcttcggttatagatgcaccagctgaagggcatgactacatgtgctgggtcatgtgccttgagatgaagattctgcgttaatgatctgattgatgagctgcgtgaggcgttgcatgaactgattggtgagctggctgttatgcaatctcttaacctaactctgagtatcaacagaatgcgaactgaacattgctctgcaagagcttcgcaatggagctgcttgatgttctgcttgatctttcacgtgtgcaaacacatataataatcaagatagtgctaaagccttatctaaaagcattcccaaaggcatgcacaaaggatcctacagaactgctgactttactggtgcctttcttt

SEQ ID NO: 169110 - DNA, 309 bp, Zea mays
  Clone ID: MRT4577_85815C.1
ttcatagcgagggcggcttgcagagacggggggggagaggacgggaagcagaagtcgctcctggttctggtgcacaagctgttcctcctgccgcactccgtcgtggacgacctgcgcaaggtcgacctacgctctgtcgtgtgcggggccgccaaatcctctgacattgcgacttctgtacgagtcgttgccggtggacggcgcactgttagacggacgcgacgctgctggccgttatgcgcgcctggatcgacgaggagatcctgtagcttgtctatactattgttgttgtctatgaaaacttggttg

SEQ ID NO: 169111 - DNA, 238 bp, Zea mays
  Clone ID: MRT4577_85816C.1
aaaaaaatgtttattgggggtttccctggaattggaattcttacccttggacatccccatttttaaaagaaaaattttgggggaactccatacaggatttggtttaaaaaaaagggggggggggggtttttttttagggcaaggggggcccaaatccattggcttgttacaggggggagttctttcaagaatttttgttttcacaacccccccttgggaaaaaattggagaaattatt

SEQ ID NO: 169112 - DNA, 389 bp, Zea mays
  Clone ID: MRT4577_85817C.1
ccggcacttaacccgactcaacctctaactcatgtatacagcctctcgagcccatcaaggaggagtatcataccctattctatgcccacttcaaccagctagaccaagttgtggccgtcgaagctaccgacagacctgtgatcccattccacccacacagggagcacaagcctcactcgacacctgaggaccgtcttccttatgccaccaaggcttctgaccacctcatgcaagtgtttggcaaacatatcaccttgagtcatcacgacatccttaccctctttgccgaccacaccttgataatgagcctcatagagcacactgtttttgacggtgcctagactactaacccttagctctttgacaactcttacttcaacgaacttctg

SEQ ID NO: 169113 - DNA, 391 bp, Zea mays
  Clone ID: MRT4577_85818C.1
caacatgcacgagtaaccccccatgtgtacggcatatcgcttcatttatagctgatttgatgacccaagatctcggaagaattggaggggattaaaaggaaaactattacatttgcccctaaatccctcgaatgattacgcgaaccctgtatcaccaaaggcacccttatggtgaaatgaggaggcattttaaagcacggtgagaggcatctatcgtatatgtaatcacatccttagatgagtactggagagaacggggcggggtcctaaaggaccaccttcaccccgtgaagaatcttcgcacagactgccatggcaaaaaaccatcagctgacgatacatgagaagcaaaccatcgacacattaggttctaaaaggtaagccttatggg

SEQ ID NO: 169114 - DNA, 1249 bp, Zea mays
  Clone ID: MRT4577_85819C.1
gcgcctcatcgaccacgcccccttccaggctcccgtctccatgggtctcctctcaaacaggattgggagggagagcctcaaggcgggggatcatatctactcctggagggcggcgtgggtctacgcgcatcacggaatatatgtgggcgatgataaggtgatccatttcacaagaggaagaggacaggaggtcggaacaggaactgtcgtcgatattattcttgtgagttccaccccaaaacgaagcaacacgccttgcccggtgtgcaccgacgaaaccagcgacagcagcacagagacgaacggcgtggtatcctcctgcctcagctgcttcctagctgggggtgctctctaccgtttcgagtacgcagtcaacccggcgctcttcctcgccaaagcgcgaggagggacgtgcacgctcgctccctctgaccctgacgacacggtggctcgccgcgccagggcgttgtcgggcagagcgggcaggctatctccatcatcggtggacctctcgccgcggtggtctcgacccctggccgcctcgagaccggccgggtctatgggatggcggtgatggccgtcggggtgtactgcgcgagcaggtatgcagctgatattggcaaccgccgtgatgtggtgaaaatggaagtcgaggacctgacggccggactggccagcggcaggatatgtgctgtggagaacatcgcccagctggtggctccggaggcagaaggcccggccgatgccacggccacggccacgctggctgcttaacggaccattgtgccattgttgctgtgagagagatgtgcgtcagccaacatgtgtgctattgctttggcttatttgtgttcagaatccacttaaactcggtcgaagtgagctttccgttcggcaacgtctgtactcttacgaatctcgatcgtgtatgtctttaagtattgtgttgtgtttcaaagataaaaaaaggtgacctttgtgaaaaaaaaaaaaaaaaaagcggccaacctaaaaactaaaaataaagatccttaaccgcgcaggccccccctttttggttccggtccttgccctttctttggccctttaagggggtttttgctccccgcccaaaattcgcttattgacccacccccctttcaaggttccggtttcatgggttctcttttaaaccgggttgggggggaaaaccctaaggggggggaatcttttttcctctgggggggggggggggttttccccccttaag

SEQ ID NO: 169115 - DNA, 1890 bp, Zea mays
  Clone ID: MRT4577_8581C.1
aaagactttaaatctaaactaagtcctatcctagactcaacacacaaagcaagtcctaagttgggggtggaagggtccaatgagatggtaaaaattgttaaaaagtgtacgtatagaatagcagccaggaatcagagattgacaaagcctgccttggttagttctcttgtctctgtctgtctgtatggggcattgacattgttaatagtgctctaaaagagatatagatgtttttcgtagtcatcataaccttcaactaaagtcagacatgtgtcttgagtttgtcttcggcgccagatcctcgaccgccagcgcatcctcgccatgaagatccacgagcggatcaagagggagatcgcgacgcaggggctgggccagtatttgaccttgctcttctcgtgcaggtttccgcaagcaagaccaaaatatacatggtgcttgagtacgtcaatggaggagagctgtttgacaagatcgcgttgaagggtaagctgacggagaaggaagggaggaaactgttccagcagctcatagatgccgtgggatactgccacgagaagggggtttatcacagggacctcaagccagagaatgtccttgttgatgcaaaaggaaacataaaagtttctgatttcggattaagtgcccttccacagaaccaacaaaaagatggtttgttgcataccacatgtggcagccctaactacatagcccctgaggtccttctgaacaaaggttatgacggctcgatatctgacgtatggtcctgtggtgttattctatatgtaatgcttacagggaatcttccattcgacgaccaaaatgtggttgtcctttaccagaagattctcaaggggaatgctcacattccaaagtggctctcccaaggtgcccaagatatactgagaaaaatcctggatcctaacccggttacacgcatagatgtggatggaataagggcacatgattggttcaagcaaggctatgctccagctatgccatttagcgatgatgaagaagatatcagcatggatgaagacagcctaaacatcaccgagcataatgacatccaagacaagatagcaatcaaccaaatcaatgctttccagctcattggaatgtcctcctgccttgatctatccggattttttgagaaagaggatgtttctgaaaggaaaatcagatttgcatcaaattattccccagcttatttatttgagaagattgagagcattgtcagaaaaatggggttccaggtacataagagcaacggcaagctaaaagtgatccaagactgcaagggactagcaaattcaagagggcaagagtcattattaatttctgctgaggtgtttgagatcaatgaatctctttatgttgtcgaactaaagaagtcatctggagactgctccctgtacagaaagttgtgtgagacgctctcagaggacttgggcacatgcaaaagccagcaatttttaaagcaggactctatcagacaagatataggtagatataatagtagcttttaacaaagagacacttactaaatagcctatagacacaaactaacacaaacaatatactgaatttaaaacagtatattgtccatgcacctattttaaatgtgctctcttatgccttttgtcatgaaacctcaagaatcttagtttatgacaaattggcatctgacgatgtattgagctcctaagggataatatgatgtaaacaagtaaactacacatataagagattcagagttaccagaaaaaaaaaacccacgagcctaccccaacttgcttgggataaaaggctttgttgttgttgttggaatgtaagattgtttgttttaaaaaaaaaaaaaaaaaaaaaaaaaaaaaaaaacacacacac

SEQ ID NO: 169116 - DNA, 943 bp, Zea mays
  unsure (1)..(943): unsure at all n locations
  Clone ID: MRT4577_85820C.1
ggccgcaaattttttttttttttttttgggaatgggtatggatgcttctaatctacatccttgctttgccgatctacgcacaggattttaccatagctctctgttccacaccgttggcgaccaatccaacagccaatggccagcggcacatattctccacccagcgagaccaggcggcggtgcgcgcacacctcacggcggcgccataccggagcacccggttccgcgcacccgcccccaagcttctaatcctaccggacctatgcgaagcaaagactaacgcgagttggcagaggaggttctcaccgtggttgctggcacagaagtccccggccacggtgtagcgcgcttccgtggtgcttcttgaagttcggtgagcaactccccgcgatccactacttttcctcgcaaaacgatgccacgggcgcacacgatgcaccggtgtgaatccccgaagtcatacgacgggacccaggcggcggtgtacgcgtagatcatcgacggcgatccccggtggcgctctctgccttcctcgactctcgggatctcgccatggctattggtcaagctgatgagatgagcgaggcgcaccagagtttgccatatatacacagggggaataacagtttatggagcaagaatccagggcagccactggtggcgcgagatacccggacgaagcgctcgcagcagacttggggaggagacgaacctaatagcggtggctccattcatcggcggctcagaataatagaaaggaacaattggatctataccattaaaagatccacatgtaagttcacatgtcattgactcatgtggacccacatgtaagtgagatagtaatggtatggatccaaagtggtgatcttttaatggtatggatccaaattttcctaatagaanagttaaggaaagatgagacgacgcgatagggagttgg

SEQ ID NO: 169117 - DNA, 1654 bp, Zea mays
  Clone ID: MRT4577_85821C.1
accctcgggcctgccggagtacggtcgtgacgcccgcgtgaaaccagcgtctcgtgcatcctacggccaccggctttccccattttgtccttaactcaaacgcgcaagccaccccctcttcgcttccgttcctgtcctctcctctgtccctctacggtgcttctgctcgccggcccaaaatcgcctcatcgaccacgcccccttccaggctcccgtctccatgggtctcctctcaaacaggattgggagggagagcctcaaggcgggggatcatatctactcctggagggcggcgtgggtctacgcgcatcacggaatatatgtgggcgatgataaggtgatccatttcacaagaggaagaggacaggaggtcggaacaggaactgtcgtcgatattattcttgtgagttccaccccaaaacgaagcaacacgccttgcccggtgtgcaccgacgaaaccagcgacagcagcacagagacgaacggcgtggtatcctcctgcctcagctgcttcctagctgggggtgctctctaccgtttcgagtacgcagtcaacccggcgctcttcctcgccaaagcgcgaggagggacgtgcacgctcgctccctctgaccctgacgacacggtggctcgccgcgccagatacctggctgagcaacggtttcaggtgctacaacctgttcaagagcaactgcgaggacttcgcgatatactgcaagactggccttcttgtcgctgagcagggcgttgtcgggcagagcgggcaggctatctccatcatcggtggacctctcgccgcggtggtctcgaccccattccgcttggttaccacgaacatctatgggatggcggtgatggccgtcggggtgtactgcgcgagcaggtatgcagctgatattggcaaccgccgtgatgtggtgaaaatggaagtcgaggacctgacggccggactggccagcggcaggatatgtgctgtggagaacatcgcccagctggtggctccggaggcagaaggcccggccgatgccacggccacggccacgctggctgcttaacggaccattgtgccattgttgctgtgagagagatgtgcgtcagccaacatgtgtgctattgctttggcttatttgtgttcagaatccacttaaactcggtcgaagtgagctttccgttcggcaacgtctgtactcttacgaatctcgatcgtgtatgtctttaagtattgtgttgtgtttcaaagataaaaaaaggtgacctttgtgtatgattttttaaaaaaaaaaaaaaaaaaaaaaaaaaaaaaaaaaaaaaaaaaaaaaaaaaaaaaaattcccccccttttttttgccaagggggttttggctccccggccaaaaatcccctattgaaccacccccctttcagggttcccgtccccaggggccccctcccaaacgggttgggggggaaaacccccaggggggggaatcttttctcccccggggggggggggggggcctccccccttcccgaaatatttgggggggaggataaggggtccctttccccaaaagaaaaaggccggggggccgaaacagaaatggccgccaaaatatttctggggagtccccccccaaaagaaagaaacccgctttggcccggggggccccgacaa

SEQ ID NO: 169118 - DNA, 403 bp, Zea mays
  Clone ID: MRT4577_85822C.1
ggtgggttggtttgttctccctctacgactgcgggtgcgggctccatgaggctctactgcggttgggcattcatggactgagacggatacgagacggcgaggagctatgttagcgtctcattgcttttattgctgccttgcctggggcgctgaccacacagttcatgaacagcgacgctactcctacagtgaggtgcctatgttgtgaacatatctaccgccttatacacttatgcacaggggcttcagactgagcgccttatgaaactgagagactattcgtatctgcctcggaggattgaacatggacgatcttgagcggcgtaaccgaccctcgagatggcctttccacactgcggctaattggccttattctgggacacatctggcgctgtcggaattg

SEQ ID NO: 169119 - DNA, 257 bp, Zea mays
  Clone ID: MRT4577_85823C.1
accgaagggatcacatctttggacccagggatccattttttgcatctaaggtagggcccctcatgacctcgagacgtgatatccttaaaccaagggcatccattcaacgattcctggttcacccatccccgagggcgtcgaactatacttgcccatgccatgcatgtaccatacgcctctgggtcccaagggcaagccttctggggtcctgaagaacaagggctttatcgagctcgctgccaccgagggtaacaact

SEQ ID NO: 169120 - DNA, 269 bp, Zea mays
  Clone ID: MRT4577_85824C.1
gggggaaaaactgtttttattctttaataaaaggcgaacaaaccaacaaaggcctgaaaattgaaaagtttctccccccacgaagacacgacttttggataaaacttgggttatctaaattattgggacccccacagaaactaaacccaagccctctaaataataaaacttggcggacaccccctgatagtatgtaaaagtacctctgggctcccggatgaatttttaaaagagatgggggagaccttgactttccccccccccccttt

SEQ ID NO: 169121 - DNA, 791 bp, Zea mays
  unsure (1)..(791): unsure at all n locations
  Clone ID: MRT4577_85825C.1
cgcctccctccttggttttgctgctcgatctcctctctctccttttctctctctctttccccctcctccatcgctcgccgtaaagaagccatagcagaggagcgagtagcgtagcgtagctcggtgtgggggagatcgagcggagggggggagaaaagaaaggagcaatcgagtgcttctgctccccggctggaaagtcgcccgtcttttcttttcccctggggaagctgaattggtggattgattcgcgtgcgtgcgcggtcatggcgacgtggcggagctagccagtggaggagtcgcgcttcttctcgatttcttcggctcggcgccgaggggagaattattggtgtttgggaggagggagaggaggagggagctagctgatgtacggctcgccggcgtccaaggatctgaaccagccgccgccgccgacgatgaactcctccggcctcctcaggtacagatcggcgcccagcacgctgctcggcgaggtctgcgaggagttcctccagcccggcccgcgcgccgccagccccgacgccgccgccgccgcccacaacgtcttctcccgcttcctggccgaccaccagatccgagacaccaagccgccgccgccgccgcccgtcgcgcccggngcccacttcccggatgactccgccgccatggcgtcccagcagcaccagcagcagatgatgttccactcccagcaccagcaacagcagcagcagatgcccccccgtcggcgtcgaggggctctaccgcaccgtcagctccgcccgggatggacgccg

SEQ ID NO: 169122 - DNA, 376 bp, Zea mays
  Clone ID: MRT4577_85826C.1
agctggcacgcctgcaggagccgggccggaagttatactgtgccgggccgacccgctcatctagtcgggggccggcctggatcttgatgcagtccttaaaggcacaccaatccttccttaaggagtggcaggaatcacaattgcagagatattcaacgggctgaatgatctaagcatgaggtgccaggggagcattcactgcgacataagcctggcagtgagatctctgatgaggtcgcgggctcgctggtcacggactttggcctcagcatgatagcgctgactggcacggtggtacgtgatggaactcccttataggaggctggaacctctgggtgtctccctccacagtgccatggcctaccagaccaccacc

SEQ ID NO: 169123 - DNA, 270 bp, Zea mays
  Clone ID: MRT4577_85827C.1
tgccccccccgggccgagcaccgggtggagcggaatctttaccaggcgggcgcgctctacgaggcgtcactagcaaagatgatcggtcaggtggggcgacgcgggcggtctactgaccagagcatggcgcaaccaaaccggatacggcaccggtcccaactccaggagccgacccacttacggcattcgctgatcaaagagaccgcgggcatatgcctgctcacgggtcgggtggagacccaccccgccatccttggcggcccggaacac

SEQ ID NO: 169124 - DNA, 370 bp, Zea mays
  Clone ID: MRT4577_85828C.1
aacaccccattagctaattgttagtgtggtcccaacagagcctaagactagctaaccatgtgcatggaaacgagcttgtgaaatgcccggaaacagagtttacttgcataataaacatagagctgacaatgcaacaccgtctcgtcgcgcccgatgcaatgcacctcggcggtcatcacgtggacatggctcctgtcctgcccccggccggcagatcgaccgcaggcgtacgtgtcagctcgtcctgctgcctccatggtcatcccctgcctttgcttagtcactgttcttatccaagttttatgatacggaatacaaatttatggcacggaatagatataatgtgaaaatatatttaatggagaattta

SEQ ID NO: 169125 - DNA, 434 bp, Zea mays
  Clone ID: MRT4577_85829C.1
cggccgcgtgggcaacaatctgacccgggccacactccgctgctccgacatggagatccgctacaaggcctgcatctacctgatgctcgcgctggcgcgaagagctctccggccgggcgcaggaggagcccgccaacgacgaagagggcgaggacgtgctcaaactctacgctcacagtttccacgaggccgatcgcaagctcctttaaaaagggccggtactctacgcccgctggtgccggcactgcaagaaacctgctccatgatctgaaatagctggcaagggacttactaaacatgacccaccaagcggtctgggtcaagatgaagattacgatgataacaacacgcctgttgctaccaagcacgaaatacaaggagttccaaccatcaagatattcacggaccaatggaagaacattgaggactacaaa

SEQ ID NO: 169126 - DNA, 579 bp, Zea mays
  Clone ID: MRT4577_8582C.1
agccggccggggacgaaattcgatcatagtggcgtatttttccgcctatgcctttctccgtagatcagagagtggtgaggaagaaaaatcgatcgatggagtccaactacctggacacgacgggtgacgagggaaggttccacgggcctcacagtgacagtaccggcacggactgcaccagcagcgctatgaccgttttgtcatctccggacggcattcggactaacaactcgttgcaggtctgcacggtacaagacgcagatattccccgatctcttactaccaaagagactaccactacgctagtgccagccgtgagttccgtcgaggtagggtactataacgacgccagctgagcacggataaaacgaccgatgtaaaatctgtcaagaggatcaggtccaagctctatcacgaccttgacggtgctctctctgctgaatggacgaggatattgtatctagccgatactactcctactaccggatctctatatgtggatgctctaactgtgatactcatatgacatgatatttgtacgcgcagggtattcacgtgcccacggtgaatagctgctgc

SEQ ID NO: 169127 - DNA, 722 bp, Zea mays
  Clone ID: MRT4577_85830C.1
cgttgctgtcggcgggaggggggttgcggctcggggttttcctctgctctgcgccgcctcgatcgatgggaggccggcgcagcgaggcagaaggtgtacgatgcctcctcctcggcttttctgggggctcccgcgcggcgccgcgacggcgactgaacattccagaagcgggcacgtgggaaagcgacgggccgccggaccgaggctaggtgggccgcggtatcggcgtggcaagctgggccggtttcttgctaggctgcgcgcgtcaaccgccctgtgatgcatgcttgtggcccactgtgccgggcgattttttttggggtcggggattaggtcaccaggaggctcgcccacggcgcacggcggaagtctgcgggtcaacgacggtggtgagcaattcgggccgctttcccgaccgactccacttggctcaccagcggaaagctccaccgcgaacacgcgacgatcaccgacccaaacttcagctcacacgcggcccggacgccaagatggtcgtgcggccgcctctctcctcccttttctctctgctcacagcaatggtggcactagatcgttctggtggacgcgcaaggggaaagtggaggtagggaaagagcagaggggagtgctcctacatatccaccatggactcggcacgggctgagcggaggtcgtgcaacagcccgagatccccagcgcgatttcgccgcgcgctcgttgcg

SEQ ID NO: 169128 - DNA, 214 bp, Zea mays
  Clone ID: MRT4577_85831C.1
ggaatgttggcatgctagactttcctccaaagaagatcacttcttgcaggtccaccctagactcaggcttagacacttattagctctaggctctaggtaagccgggccactccttcgagtagccattattcttttcatcggcaccaatggccactgtcgaggtccagaccccgaccgtcgtggcggtcgaggaagcgcccgtggtggagacccc

SEQ ID NO: 169129 - DNA, 481 bp, Zea mays
  unsure (1)..(481): unsure at all n locations
  Clone ID: MRT4577_85832C.1
gcgggggctcccttcctcctcccacacgacgcactttccctgtgccgacgccgaagctggggggggggggggggttcctaataccctccacgcgcaaattgcccggctccatccaccacgagggatccccgacgaggggaggcctactacccaactcttgtctggcacgaataccctctctcccccctcctcatgccatggactcctatgcgggggggggggggggccccccctctgacgcgcgggagccgagagccgcgctacataatgcggaccagcgcgggggcgcgcttncgacggagtgttcactgctgcgggatccgcttctagcgttgttccgtgtccgtgtccagcgtatcggggcgtaggggggggttaccatttacgcgcctccatctgtgctgtgatccggggatcctgaccggggaagagattggttccctgagtttatggggatttgctccaatcgggcagggggaac

SEQ ID NO: 169130 - DNA, 2542 bp, Zea mays
  Clone ID: MRT4577_85833C.1
tgaatcgcgtgccttccaggcttccagccctctgcccgctgtgccccacgcccggccccccgatccgacccacccagccagcgccatgtcccccgcggcgtgcgccacgccggcggcggcgcgcccgctcaacacggttccgacacgccgctcgccgccctctgccgcgcgcccgccatcggccatccccgcccgccgctccgccggctgctgcttctgcgcctcctcatcctcggcatcgtcgccctccacctgggactggacccgatggagccgccacttcgacgaggtcgaccaggccgagagctacgcatccctcctccagttccagctggaggaggcggtggagaacgaggatttcgcggaggccgccaagctcaagagggatatcatagaggccacaggaaacgacgccgtagcccacgtcatggccgaactcaagagtgctatagaggagcagcggtaccaggacgcgtcaaggttgacaaggcttgctgggaccagcttggtaggttggtgggtgggatatgctaaggacactgatgattccatcgggagaattgtacgaataagccctggtgtcgggagatatgtggcgaaaagctacaacccaaggcaattggtcactgcatcttcaggaactccattatttgaaattttccttgtcaaagaagatgatgagacatatacaatgaaggtggtacacatgcgaccaacaaaaggaacttcaggtgcaccatccatatcatcaacaataacagaaagcccagcaaaggtagagaatgaaaattcatcagaaagtagtgctatatctgacagtgttacagaggaggcaaatacagatactacggtaagaggaaatgaggatgctgaagagaaagcacaagatgttggtagcagcaaggatagtagtgtcgaaggattaaaaagtgttttgaatttttttaagtctcggattcctgaattcaaagttcaggtgataaatgttgatgtggctgaggaaactgaattagctgcaaattcgtctgaagaattagtgcaagatgatgtgaaaagtactccagaaagctcattggaagagccagccactgaggaactcgagcaggaggaagatgttccggaagaaaatacggatgaagaaagtaaaagcacggaagtgaagctttttattagtggagtggttcacaataaagaagatgctggagcaaaatcatatgttcgagttccagctgaaataaataacatggaaaaggactcctttgaactgtacattcctggagaaggttctgatcgtgatttggctgaaacaaaggctgcaaaacagaaagttgcagatatggctgctaaattagcctcagagcttatgccgtctgatgttgccaaggcattatggggtacagccaagagttcttcaaagataaataaagaagttcaggagcttttaaggcttacgttaagcaaggcccgagtcaagctgaccgaaaataccatttttaaacgaatcattatggacactaacagcacagatccatttaatggtctctatgtgggagcatttagtccatatggaccagaaattgtgcagcttcgtcggaagttcggccactggaacagtactgatgacgttgagtttttcgagtatgtcgaagcagtaaagttgactggtgatctgagtgttcctgctggccagataacgttccgtgctaagattgggaagggcaagcgacttgagaatcgaggagcatatccagaggaatttggtgtgattgccagttacaaaggtcagggtagaatagctcagcctggattcaaaaatcctcgatgggtggatggtgagctgttggtactcaatggcaagagtacaattccacaccttggaggcgcagagctcggtttcctgtatagtgtacctgagcagagttttctggttctcttcgatcggcttaatcttcccgagtgatgagactcctaaagggagcagactcctcacatgtagattgcatgaacgcgcagaggccggccacagctccaagtgaccgaaacaggtctggggggccgtttccccatcgtcttctgccctctgggcttcctgccaatcctttctccgcacctactttttaggagctcatgtgcttaactcgtttcagagtgtgagggaaagtcgacaccattgctggtctaaactaacggaggagtcttaatactaataatatatatgttatagcatggtagtttgctctccaatgccacagttgtagctgtattgggtatgggcatgacagttttgcgagttttacccgtcatcgttgatttcagtaattaccgaattgaataaaaatcgttctggtgtatcgtgatgttacaattataataatataaaacaaggcaaataaagtctcatgatttatgatcaaaaaaaaaaaaaaaaaaaaaaaaaaaaaaaaaaaaaaaaaaaaaaaaaaaagagggcgcaaaaatttacaggatacccctttttcctctccatgggattacatcccgagttgttgtgaaaaaaataaat

SEQ ID NO: 169131 - DNA, 1531 bp, Zea mays
  Clone ID: MRT4577_85834C.1
aggaagagaaagagcaagatgttggtagcagcaaggatactagtgttgatggatttaaaagtcttttgaatttttttaagtctcgaattcctgaattcaaagttcaggtgataaatgttgatgtgtctgaggaaactgaattggctgcaaattcgtccgaagaatcagtgcaagacgatgtgaagagtactccagaaggctcattggaagagccaaccactgaggaacttgagcaggaggaggatgttccagaagaagatatggatgaagaaagtaaaagtacgaaagtgaagctttttatcagtggtgtggttcacaataaagaagatgctggaacaaaatcatacgttcgtgttccagctgaaataaataacatggaaaaagactcctttgacctgtacattcctggaaatggttctggtcatgatctgcctgaaacgaaggctgcaaaacagaaagttgcagatatggctgctaaattagcctcagagcttatgccgtctgatgttgccaaggcattatggggtacaaccaagagttcttcaaagataaataaagaagttcaggagcttttaaggcttaccttaagcaaggcccgagtcaagctgaccgatgataccttttttaaccggatcattatggacactaacagcatggatccatttaatggtaaagtttccccagttaagttgatgagcatttcttgtatgatctaacagttggaatgctgggctaacataggtctctatgtgggagcatttagtccatatggaccagaaattgtgcagctccgtcggaagttcggccactggaatagttccgatgacgttgagtttttcgagtatgtcgaagcagtaaagttgactggtgatctgagtgtccctgctggccagataacattccgtgcgaagattgggaagggcaagcgacttgagaatcggggcgcgtatccagaggaattcggtgtgattgccagttataaaggtcagggtagaatagctcagcctggattcaaaaatcctcgatgggtggatggtgagctgttggtgctcaatggcaagagtacaatcccacaccttggaggcgcagagctcggtttcctgtacagtgtacctgagcagagttttctggttctcttcgatcggcttaaccttcccgagtgttgagactcctaaaaggagcagatttctcacatgtagattgcatgaacgcacagaggctggccccagttccaagtgttcgaacaagtctgtggcctgcgggcccttttttccgtcgtcctctgggctattttgctacctgagatgcctgccaatcttttctccgctcctactcggcaggagctgaactgcttttgtgagggaaggctgaccagttttgtgggttttcccccttcactgttggtttcagtaaggtaggatggaaaacaaattaaacaaaatcgttctgttgtatcaggatgttacatatataataataaaaaggcaaataaagtcccatgatttgtgatgacgcatcaaagaaattaatt

SEQ ID NO: 169132 - DNA, 332 bp, Zea mays
  Clone ID: MRT4577_85835C.1
gggtaccctcggagccggccgggctgttattaatatttgtatactactaatgcaagtaagattggagcctcaaaaaaaaaaaatcaaactgaccgtagccatcaaaatgctccccgtaaggtatgctgactaacgatgagctgtgaaaccaatagttccatttgagatcacttgcactctttaaacgacaacgactaatctggctttcgtgcactatcgatgaacgtcgatcacagcgctcctggtctgtgtatgtttcggcaagttctgcgtatgtcgtagattcattggttatttagattgcagagtaccacccgagtggaagggaatga

SEQ ID NO: 169133 - DNA, 287 bp, Zea mays
  unsure (1)..(287): unsure at all n locations
  Clone ID: MRT4577_85836C.1
tgcggcgctcgagncngncngtgaactggatttctgtttccctgaaataatcgtgcccctcacgccgcctcgtgccactgccgtcactgctcgctgcaccggcgctggcactcagcgcactgctgccgatgcgatgatctcgtgagagacatgagtctgcaggactaggtctcatacgattaatagagccctctgtgtcatgacttgacatggtatgcgactcttgaataagaatttagcctctgcattaataacagagggatggcacccgggccctacttgctatc

SEQ ID NO: 169134 - DNA, 422 bp, Zea mays
  Clone ID: MRT4577_85837C.1
gtgaagtgctccgggaacacgcatctttgctgacctgatcgatacggcaagcatcgggatggggagcacctgatgattaccaagcggccacgtgtgagacccgtactagcactatctacacatcgacttcatcacctaccgccaggtcctacagttcataatcatactgaatcgcctaaccctgaggaaccgtggcttctacttgcaaaagttgttgatggcataagagatacttaatgtcatcaacgtcattaacgaccaggcactgcaacagctgcacatgaccgtgcaagaggtcaagtacctaggcatggcgaacacgtggcggctacctacaactacagcagctgccgtcatcgaggccgctacctcggtccaatgcacctacatagctgcagcaactactgctgcagcagattgta

SEQ ID NO: 169135 - DNA, 227 bp, Zea mays
  Clone ID: MRT4577_85838C.1
atcaataagaaagctcaattctttctatttgaggctaaatgcaaaatatgctaaccactgtttacaagaaactcaataattaataaattagctaacaaatcaaatgatgttcaactgttttcaacaacctatcaatctgacgaagggagctgccaatgatttacaccgatggaaggttcgactccttgtattatcttattataagacgcgccggttttcatagattt

SEQ ID NO: 169136 - DNA, 393 bp, Zea mays
  Clone ID: MRT4577_85839C.1
tgtaaaattggttagcttgtgaaaaaaaaaaaaaaaaaaaaaaaaaaaaaaaaagaaagaagaaaataaaaaaaccaaaaaaagacgaacgcaatgcaaaaaacaaaaaaaactataactgtagggtcaccagtaaataaaatttactgtggcgggtgttttccagcgtggtgccctgggtaaagccctggggggggggcggctctaatcgccttgctgtggctccccctttcaccgggtggtggcttgctggcccggcccgaaccgggtggcattccctccagtttcccaccctttgtgccgtgtggaacgcgccctgtacgggcgctttagccgcgcgttatggggcggttacgcgctgggtgcccgctttgtttccgctcctcttggcgc

SEQ ID NO: 169137 - DNA, 377 bp, Zea mays
  Clone ID: MRT4577_8583C.1
cccactcgtcacgatccgcctattcacaaactatccttacactttcatgcttaaactccataatctacttcactcgcatcatcgcactacataaatatggcctgaaaactattcttcacaatgtctatcctaaattcattgttcaccgtcctcttatactctacattacaactaccattttctaacacttctttttttaaactgatcaacactaattaatccttaatctatctaaaaacttacgatcatacactaatcattttaactttcttttctaacaagaacacactctctctctttgaacagatcttataccatgacataaaccattctctcatcataaacactatcatcattttatctactgtctaacacat

SEQ ID NO: 169138 - DNA, 483 bp, Zea mays
  Clone ID: MRT4577_85840C.1
ggtttttttttttttttttttttttttttttttttttttttttttttttttttttttttttttttttttttttttttttttaaaccccagacaaaaaactttttttttgaactttaacccataaaaaatttaaaagggggccccccccagggggggggggggggaaaaccctggggggtttgtcaaagcaaggtggttgaatggccccaattgttgcagttgtaagagggggcccgcgttaggccccaccggctggtaaaacgggaacaactggggttgtgtcaaaaagggagcagggctcaccccacctaactggctgaatgggagtagttgttgctgctgtaaataaaccggagagttcaatgctgctagttggttgaatggaaaaaattgctggggggaggcaacagggagctggctaaaagggagttgttgttgttgcaaataaaaagcagagttcaatgaaccctattgggtgaatgg

SEQ ID NO: 169139 - DNA, 297 bp, Zea mays
  Clone ID: MRT4577_85841C.1
atgtatcgagagtcgttatggcagaagagaggtcgtcctcgggagttatatccggatgtatctagtaaggatgctcatgttcctcctgatttcctgtgcctaattgtgactgtggcagaccagcttaggtaccattggcctgagccagaggcaaatgaaaaaaatgagttggcagaagagttgaagtctgatcttgtactctgcaaatgtggtattgaagctaagtacggattagttacttccaagcttggtgagacgaagaaatgcaattgggagagatacaccgacaaagaatag

SEQ ID NO: 169140 - DNA, 785 bp, Zea mays
  Clone ID: MRT4577_85842C.1
cctcgaggccggccgcgcatacatctcctcccgccgctcgacgatgagcatttctcccgtcgccggcgacgtttcacctttgacgcctactgctgccgccgacgaagccgtgcgagggacagagacggtggtggcccatgagaaggtcgcctcacactgggacccgctcctcgcagaagcgctcgcacaaccctcgacaccggctcatggattctgatgctgcaaggatcatgggaactctttctacgtgaacaagattgaaccaggaaatggagaccctactagtcgcatgaaatcaaagtcaggacaatgaacagcccgtccagaggagctgtttttaaggatactgaaaaggatcgaagagacccacactacaaaccatcactactaaacgcatgcaaggacctcatcgcgtgcgttcaacttgacgccaggtgcttgtagctccggtgggacgccgcctatgcagaatgccattgggtatgtggaatctgctgctgtgtgcagaaaccaccatactatgtactgctggccagactgagctatctataaggacatgtacagctgctgttcatcgacattgggcaagcccacactgagatgtgtccccaatgctgtgattatgttagtgcaataaaaaacaaaagatactctgcaccaagctctcaaccatgattacgagattctgcttgctgtgaaggcgtgaacaaatctcggtcagacttgctatgtgggggagaccgatgtcaagtggagattctttagattcgagccgcggttattac

SEQ ID NO: 169141 - DNA, 300 bp, Zea mays
  Clone ID: MRT4577_85843C.1
ttcggcttgttgagccaaccggatttactttaattactagactcatagacattagcacgggaacctcacatatcgatgcctcacgttccattatcaattccaatgaggggacaaccactcactgcgctgtctgctacaagactaactaccttgtgcactacctcacacgcacgacatgcgcatgtgctacaggcggttcttccgcttcctccacttcaaggggtacgttcagctcgtgaactacaacttcttcgactgagtgctctacttgattcattacttctaccccatggtcctgaa

SEQ ID NO: 169142 - DNA, 478 bp, Zea mays
  Clone ID: MRT4577_85844C.1
ggccggccgggccgggaaaaagaagacgtctccgaatccgtgtccgcctttcctgtctcctctcgctcgctctccccgtctcccgcacgcccacccgccgccgccgttcgccatgggcctcctcgactcgctctaccgcgtggtgatgcgccgcaacgctgtctatgttaccttcgtcgtcgccggtgcttttgcgggcgagcgggctgtagactacggagttcacaagatctgggagatgaacaacctcgggaaaaggtacgaagacataccagttttggggcagaggccagccgaagaatgatatactttggtcgccatttagctccggtttaaccgtttcattttcgcacaataataagctgtgtaaacttcttactctgctgctgagagctgcttcccattcattttactctgaacatgctgtgagggaatttcgtggtgcatggcacaaaaaaaaaaaaaaaaaaggccccta

SEQ ID NO: 169143 - DNA, 374 bp, Zea mays
  unsure (1)..(374): unsure at all n locations
  Clone ID: MRT4577_85845C.1
caatgaaacacagcatttttaatttctacctatacaagggcccctatcccaaggccatgggggcatattaaaaagctctcagtggataccaagccggctaatggcataatcatgcaactatgccttctgctgatgtcagcataacngactctagccatacgacagggaacctcacggagccaaaatcttactgtgaaaactatctaacacactaccaaaaacctattccaacaacttctttagaagaaatctccactggttgaacngacctggcatccctctatgagactatgaatgagcaagatacatcactcacgataatagaaaaacccttacaaatgtacaacattactggttgccaacagatcacaact

SEQ ID NO: 169144 - DNA, 247 bp, Zea mays
  unsure (1)..(247): unsure at all n locations
  Clone ID: MRT4577_85846C.1
cgcgcggggtacccgtacactacgcggtgcccatggagcgggtgcgccaggcccggtcgcgcgttaaagctggggcgacgacaccctctggcgcgtgcaccttcacgagctctccgtctacgcgtacgcctccccgncgccagaccctgtcgccgaatcggacttcccctcgcacctcgggcccttgtgggagggggggaccaccgacgcgcccgccccggtcgcggagctcctcggagggatcttc

SEQ ID NO: 169145 - DNA, 2171 bp, Zea mays
  Clone ID: MRT4577_85847C.1
aaaggtttggcttcctgccttcctggcctggcctagctcctctcctctcctccggcttgattgatcgatcgatcgatcgatccagccagccatccacccatcccttccaagtttccaactgacattgccgcgccgcgcaggcgcagcgcacgacttccgccctccccaccctccgcctcacgcatataaacgcgcgcgcctgcctcccctacccccgcctgcctgcccacgcgctccgctcctcgccccctcctcttcccacgccgccgccgtacccacgggcagggggcacggctggtggctcatcgctcggcccgctccccctccgtcgcaaccggaacataccagcaccggcgctgcggtattattcagctccgtccgccggccggcgcggacggacgccaggcttccttcctgtctgcataacaaagccgccgccattatgatctccacatatgatgcttagcatttgtcgctcgcagctgtattgctcctctagctgcatccttgtactagagcatggcgaagctcgcatctattgctcgcagtatgcttagattcccaaacggaagcatgaggcttgttatggtaacggttattggagcagtccttggctttttcattgggatttcattcccttcggtcagcataacaaagcttcactttccagatagctttatttcgtacattgaagacaaagacgctggactcacgacccaagctatactcaatcatgcttggacttctgccagaaacgcaaggggaaatggtaccgaaccgacttcaaacagtaccttaaagatttatgtcccaacgaaccccaagggtgcagaggggctagcaccaggtatcgttgtatcagagtctgacttccatttgcgcaggttatggggagacccaagtgaggacctgcctttcaaaccaaagtaccttgttacctttactgttggagttgagcagaaagcaaatataaacagagctgtgaagaagttttctgacaattttgctattctgttattccactatgatggccgggtgagtgagtgggatgaatttgagtggtcccagcgagctatccatattagtgtcaggaaacaaactaaatggtggtatgccaagagattcctgcatcctgatattgtggcagcttatgagtacatattcatttgggatgaggaccttggggttgaacattttaatgcagaggagtacatcaaacttgttaagaagcataacttggacatctctcaacctggattagagcctgatcgggggttaacatggcagatgaccaaaagaagaggtgacagtgaggttcacaaggacacagaggagaggcctggctggtgctctgaccctcatcttccaccgtgtgctgcttttgttgaaataatggctccagtcttctcaagagatgcatggagatgtgtgtggcatatgattcagaacgacttggttcatggttggggcttggattttgcgctcaggaaatgtgtggagcctgctcatgaaaagattggagttgtcgattcgcagtggatcgttcaccaagtggttccttctctggggaaccaggggcagtcagaaaacggaagggcgccatgggaaggggtgagggcgcggtgcaggaaggaatggggcatgttccagaccaggatggcggaggcggagaaggcgtattacaagatgatgggcatcacccctccaaactccacgcgtgtctagccgcgcctctcttcttggttttccatccccgccaccctgacctttgtggtggcgggtgagctgatgatactatactatagcactacttgattatagggagttagagatggtgggtgtagctgcttttgatggagaggtccttctgtaagtaaatgcgaggcgaaactgtgatgagaaaacatgtacacgaggatgattacctgatgatgatgatgatctatctattataaaaacatatataccgttaccgagcattgcgattgttctgcagcgcttttgtagcttgatccgaaacccactttgtttgctaatgctgggcgatccatgttgcctcgtgatgttcagaccaggtcggtgctgtaaccttgactgctgcgctggaatgaattttgctgccattaaatttgcagcggacagcatattactaaaaaaaaagtcgacgcggc

SEQ ID NO: 169146 - DNA, 804 bp, Zea mays
  unsure (1)..(804): unsure at all n locations
  Clone ID: MRT4577_85848C.1
ccacgcgtccggtacatcaaacttgttaagaagcataacttggacatctctcaacctggattagagcctgatcgggggttaacatggcagatgaccaaaagaagaggtgacagtgaggttcacaaggacacagaggagaggcctggctggtgctctgaccctcatcttccaccgtgtgctgcttttgttgaaataatggctccagtcttctcaagagatgcatggagatgtgtgtggcatatgattcagaacgacttggttcatggttggggcttggattttgcgctcaggaaatgtgtggagcctgctcatgaaaagattggagttgtcgattcgcagtggatcgttcaccaagtggttccttctctggggaaccagganaaggagaaacattatgttttcttccttgctttctttaatttgactatgtgaactatgattttntctaccattttcctaccatcacaattcgaataccaaaaccttgcaggggcagtcagaaaacggaagggcgccatgggaaggggtgagggcgcggtgcaggaaggaatggggcatgttccagaccaggatggcggaggcggagaaggcgtattacaagatgatgggnatcaaccctccaaactccacgcgtgtctanccgcgcctctcttcttggttttccatccccgccaacctgacctttgttgttgccggtgaactgatgatactataccnggagcannacttgaatataaggaagttaganaatggtgggntgtaactgccttttgaatgggaaaaaggtccttctgtnaanaaaat

SEQ ID NO: 169147 - DNA, 455 bp, Zea mays
  unsure (1)..(455): unsure at all n locations
  Clone ID: MRT4577_85849C.1
gggtacccngtgtccggccggggtcgtctccaactttcccttggtttggcttcctgccttcctggcctggcctagctcctctcctctcctccggcttgattgatcgatcgatcgatccagccagccatccacccatcccttccaagtttccaactgacattgccgcgccgcgcaggcgcagcgcacgacttccgccctccccaccctccgcctcacgcatataaacgcgcgcgcctgcctcccctgcccccgcctgcctgcccacgcgctccgctcctcgccccctcctcttcccacgccgccgccgtccccacgggcngggggcccggctggtggctcatcgctcggcccgctccccctccgtcgcnnccgggtcctcccngcnccggcgctggggncttgttcagctccgtccgccggccggcgcggncgggcgcccggcttccttgctgtct

SEQ ID NO: 169148 - DNA, 353 bp, Zea mays
  Clone ID: MRT4577_8584C.1
agctatagctgcagcacacagattcacatatacctacgtactccagctcgaagtcagacatgagcatctagcgtagctagtctagctacgaggtgacaagctggtctcgagctgactgctgcacctgtccgggacagctctagtgaacgctgctgcgtgtcgttcctcttgctcgcgccgtagctcgtgggcaccggcgtggccgagagcttcggccatcccttcctcgtgccctgctaccggggctcctccttcctccagcccgaggggcgcggcgggtccgccgtctactacaacggcgttgcgctccccgccgacggctgaggggacaagtaggcgctcccgaaggagaa

SEQ ID NO: 169149 - DNA, 292 bp, Zea mays
  Clone ID: MRT4577_85850C.1
ggaagctgagcgctgagaccaagggctaaagctgggagactgaaaaaatgcagaccgccggggcattattcatttctccagatctgatccgctgttgtaccaggggtctaatcaggcctgtgtctgcctccttcttgaatagcccagtgaattcatctaaacagccttcctacagcaacttcccactccaggtggccagacgggagttccagaccagtgttgtctcccgggacattgacacagcagccaagtttattggtgctggggcagccacagttggtgtggctggttc

SEQ ID NO: 169150 - DNA, 497 bp, Zea mays
  Clone ID: MRT4577_85851C.1
acaaggatagggataaagatgggttttttggggaaggggtacaattacaacaccaacacgggggaggcattaaaaatatgggggtatatattaaaaaaaggggggggcttatttattcatcaaagaagagggggccaaatatatataaaagggggggggggaaaaaaaaggggggggccggacacatggggagcatgggggtcaggggaaaagggcaaactacaccagctggggggatgggagggggcccccaattaaaaaacgggtgggacaaaaaaaggaaatgcaaactacacctggcactcccttaaccgaaaacggggccattgagggggggcttggggggccccgagacgggaacaatagcagcataggcccggtataaaaaaaaaataccttttggggtatctaaaacccaaggaaggggggaaaaccgggggggcagggattttgggagggggcaggcccaggggttggaaccagtattgcctgagccc

SEQ ID NO: 169151 - DNA, 276 bp, Zea mays
  Clone ID: MRT4577_85852C.1
gcgcacaaaatcaaccaaaattataaaaaacaggtcatacacctaacaaacaaaggcaacctctggtaatttgtgacactaccacgtcatactataacacgaaaaactacaaccactactcaacaactctaacaacaaactctcattaccctacttccctcataaaacataccagaaaaagtgtttgaatgtattaacccaccatttgaaccttatcacattcaacacacaacttgcttctcacattttttaatcataacatctattaataataac

SEQ ID NO: 169152 - DNA, 367 bp, Zea mays
  Clone ID: MRT4577_85853C.1
tctgtcacccgcaggctgcccaccagggcttgggttatcttggactgggaacggggaacccccatgctaccttctacaagacgctaaccggattcattggcgtcgcctaccgactccattggctcctctgtggggctctcatgtggtccccctgtaaggggtttgttggtgatctacctctatagcgaactacactttcactaagacctgctaggccgctcacttgccaaatcattcgctgcctccaacatgatcctatactaggtcacaggcatttctatacttgtgctaaccgtgactgactatcacatgaaaaccttttatggctatagagttcatcaagtaacgagcttctcgacatataaag

SEQ ID NO: 169153 - DNA, 2063 bp, Zea mays
  Clone ID: MRT4577_85854C.1
gggctctaaagcaggaggacttttgaggtattttgatgccggaatttttagacataccatcattgaagttgctctgatctgtacaacatttacaagatttacagagcttcaactaagtcaacttgttgagtcgcttgttacatatcttttgcatatgggaaaaaataatagataaggtacttggagttggcaaacaattgtttgatatacccttttcatatgcacttgttttttggttaccaacctgctagctaataacaagttttcactcatctctaccatttttcggaatggcgacgtctcttcgctatatgtcaatcatagaggtagtgtgagacacatattggcaactgaccaaatgacttcagatatttggggtctcatcgatgttcaaacagagaatgcacaaagtagtcagaaatggtaattatattgtcattgttgttgctggtagtgatgttactgttctactatcacgaaggagaaatttgatccaattggtgggcctttgcctaaactttcacaagctgattccaagcaatgtgtctaaaatctttttcttgtgttggtaaccaccagatgcttgtcaattgtcaaacttattttggttggcttattttcaagattaaatgatctctggtaactgaggagaatgttgtagatgttgattttccttttaggaaggtgaagctctccgatgtggtagggggaatggaaaatgtgcatatatgcttctgattgcagtgagattagcctcgtccaagttatgggatctgccatgaactagacaagattataagtttacagaggccttacatcaagagagtacaagattgccataaggaagtaaagtctttgaggaaagtgaccttatgagaagcttgagaaaatcaacttgtgtgtgagaagttttgtctacttgtgctaattagtcatatgatatttttagtcatgaactagacaagatcagaagtttaaagaggttttaaatcgagtacaagatcgccataaggaagtacaagtctttgaggaaagtgaccttatgaaaagtttgagcaaatcaacttgtgtgcgagaagttttgtctacttgtgctgatcagtcataccttggaatattgctgaactgttgcctttgttgctcattggcttcaatacttcatacaccatcaaatgagtcatgtgcaaaattcttcgaagcatcagttcttgctctagaagaacttcatcaggaggcggggtcgaatcagcaacgacggctgacatgacgctacccatccagttgctcactgctcaggttatagcgaagaacattgtcttagctggatacaaggagatgcagaagctctgagttttgaggatggatctatggatggttacactatcgcatttgggatcagaaatgtgacacacattgagaaagctctatcagaagcttacagttgatggttctaaagcaagggtggaggttcctatgcttggagttgagtcatgtggatgtccctatttttaaatagatttatgatgcttactcgttttctatgattccggctattggagagctggttgatggtgatcggcagatagaagacaggcaacatgctaaccaggcctgtgaaccttaaaccttggcaggaaaagtttgctcagatgattcaggaagccggattccagagggtggaatatgaaaacctcctgagcggtgtagttgccattcattctggactgaaactgtagagctgaatacagatggttgttttttcatgggtgcaccgattctacaattagtagtatttgttgttttttaatgaattctataataggttcggtggcttgtaaaagcagctggtgctggctgtcagcatcatcacaatatgtagaataagtagtatttgctagaagtatgtgctggagcagtagcgtcagtggctattttggcttttaagccagctgacctcttccatttgtaaagcttttttcttggaaacgtgaaaccatccagaacatcaaattagtcttatcacatacctcctgcaatacatttttttgttctaaaactcgtgc

SEQ ID NO: 169154 - DNA, 553 bp, Zea mays
  Clone ID: MRT4577_85855C.1
agcttctgagaacgcgattgactatcaccgcacggaaatgactacccaacaatcctggcatagcctgcctgtacgcagtctcattctcctagcacatgcaacatgacatgcgaaaagcggctgactccggtctttggaaacctgctgtggctgggaccgatgcgtcatgtattgttacagggacagctgggtacttgcccccctagtactacatgtcgccttacatggccgggaacagcgccttctactgcatcccgcttgagtacgctggaactgatgtatgtgcatgaacccatatgacagacaactcttgcctcaactgctgaaacattggtgcgtgggcccgcacgtacattgcgagcggaaacatgcaccccatcattgatgagtctttggacagaggctgctctcacctgccttctttgtggaaaaccgcctgggtcgccataatgtgcttgaatgctaatggcgcacagaggcctatcctgtcagcggtgctccgggcgatccactacaccattgccatggtagcggatgctcgtttccaatcgca

SEQ ID NO: 169155 - DNA, 525 bp, Zea mays
  Clone ID: MRT4577_85856C.1
cgcatttgggatcagaaatgtgacacacattgagaaagctctatcagaagcttacagttgatggttctaaagcaagggtggaggttcctatgcttggagttgagtcatgtggatgtccctatttttaaatagatgaaaagtttgctcagatgattcaggaagccggattccagagggtggaatatgaaaacctcctgagcggtgtagttgccattcattctggactgaaactgtagagctgaatacagatggttgttttttcatgggtgcaccgattctacaattagtagtatttgttgttttttaatgaattctataataggttcggtggcttgtaaaagcagctggtgctggctgtcagcatcatcacaatatgtagaataagtagtatttgctagaagtatgtgctggagcagtagcgtcagtggctattttggcttttaagccagctgacctcttccatttgtaaagctttttcttggaaacgtgaaaccatccagaacatcaaattagtcttatcacata

SEQ ID NO: 169156 - DNA, 525 bp, Zea mays
  Clone ID: MRT4577_85857C.1
cataacccttcccatcaagcacagattacataagcggtcttttgcataaaacggggggacttagttattacaacgcaaatcaacagggggttttccaggggggtttcaattatcaaaccataacgggaatacaaaggggggggctaaggggcctactttaagtattcagggccataaaacaaaccccccagccaaggggaaccacccccaggtcctttttttggggaatttttttttaaaaccatactttttgggctaaaaaaaaaaacccggttgggggcttccaaaattaacaattttggggaaaccggcccggcccttttccgggggggggcactccttggagaagaaagcggttgaaaggcccactcctccaaaaataacacaccttccctggaacaaaccataatggccctcggggaaaacccggacaagcgtacatgggcgcacgtacaaatcgaaaaaaacacacttgccatcaaatttttggaaaagggggccaatcgggatgccagggtgtttccg

SEQ ID NO: 169157 - DNA, 2066 bp, Zea mays
  Clone ID: MRT4577_85858C.1
gaagcttgagaaaatcaacttacaccatcaaatgagtcatgtgcaaaattcttcgaagcatcagttcttgctctagaagaacttcatcagttgctcactgctcaggttatagcgaagaacattgttttagctggatacaaggagatgcagaagctctgagttttgaggatggatctatggatgggtacactatcacatttgggatcagaaatgtgacgcacattgagaaagctctatcagaagcttacaggaaaagtttgctcagatgattcaggaagccggattccagagggtggaatatgaaaacctcctgagcggtgtagttgccattcattctggactgaaactgtagagctgaatacggatggatgttttttcatgggtgcaccgcttctaccgttagggctcccatgccaccagcttcggtacacattgctcgtatccattttttcctgcttatatagatcctaaaatctcgtagttcactagggtacaagcaggttcgcgaagaggataagagcaaattggttggcaacgtgttcagcagcgtggcttctagctacgacctcatgaacgatctcatgagtgtcggcctgcataggctgtggaaggacaggcttatttccaagctgaacccctttccggggatgaagcatctcgatgtggctggtggaacaggtgatgttgcttttcgtgtactggaaagagttaagagtgtgtgtcacagagctatgcagggtactcttactgaaacccacgcgtccgcccacgcgtccgcggacgcgtgggtgtgatttttctgatcatgaaatggaccagagttccaatctctgttggtttagatgaagtggcaagtttttgttgtgtgtgtgtctctgataaaaggcacccatatttatgtctgtgacattaatccaaatatgctaaatgttgggaaaaagtgtgttgcagaaagaggtcccgagcatgaacttttctaatagattttgttgcctctgtctcaagtgtgggttatgttgttcaacagttggtttttatttccaggttatagcgaagaacattgtcttagctggatacaaggagatgcagaagctctgagttttgaggatggatctatggatggttacactatcgcatttgggatcagaaatgtgacacacattgagaaagctctatcagaagcttacaggtcggctaatttagaaccctaacaattattattgctcatgtttaaattattactgtttgaacttcagtatatgtgtatattcttcgtgattaagttttttttgtcttcgtgtgcagtatcatggattaagcttttttatattttaccatgtttgtttagttgatggttctgaaatgtcattactgtcatatcaattggcatatttcaaaatcttttttgcttagttgatggttctaaagcaagggtggaggttcctatgcttggagttgagtcatgtggatgtccctatttttaaatagatgtaagtttcgtcaatcatgtttactcgtcaatctttaactgctctttcagattttctgcccttcttttttcagttatgatgcttactcgttttctatgattccggctattggagagctggttgatggtgatcggcagatagaagacaggcaacatgctaaccaggcctgtgaaccttaaaccttggcaggaaaagtttgctcagatgattcaggaagccggattccagagggtggaatatgaaaacctcctgagcggtgtagttgccattcattctggactgaaactgtagagctgaatacagatggttgttttttcatgggtgcaccgattctacaattagtagtatttgttgttttttaatgaattctataataggttcggtggcttgtaaaagcagctggtgctggctgtcagcatcatcacaatatgtagaataagtagtatttgctagaagtatgtgctggagcagtagcgtcagtggctattttggcttttaagccagctgacctcttccatttgtaaagctttttcttggaaacgtgaaaccatccagaacatcaaattagtcttatct

SEQ ID NO: 169158 - DNA, 253 bp, Zea mays
  Clone ID: MRT4577_85859C.1
tcgaaaaaaaaaataaaaacatgaaaaaaaaaaaaaaaaaaagaaaaaaaattaggggggcgaaacacattcgggcgggagtggtcaaaatctgaaaacttttcttaacatggatgctatcaatgacttggtagtgtcaggaaaaaccaaccatagtggacagactgatgtaataatattctgaagtggcacgaatctagaagttaggcaccacagaatctgaaggagagctgctttcttagcttgttgactt

SEQ ID NO: 169159 - DNA, 395 bp, Zea mays
  Clone ID: MRT4577_8585C.1
tttatttgtaactatttagttaggtaaattttattatttctatatggggccaccaaattatcgattcggcatacccagagataaattcctagatccgccactgtttccaagtcatgtcctggttcatcaccttggatgcattactgttgttttttgttttagtgatgcaaaaattgtagcttaaagtccttcgcggcgtggttgtggtggattgcttttccgtttcatagtattgggaacatcttttggtgccgataaaggagcatctacacatccatgctgcactttctgttgttccaaggcatgctgcaaatctagtataggatcatcttgcttctggacacgattttgaagtttttccaattcaagtcttaaagctactacatcttcacttg

SEQ ID NO: 169160 - DNA, 770 bp, Zea mays
  Clone ID: MRT4577_85860C.1
aaaaaaaaaacaaaaaaaaatctctacatgcaatttctaagactcgtgagagtaattatctatgaaggttatgaatgaaccaaaactgtccactatccttattgaaaaaggaccacagatgtatgcataatttctaagactctcatactatgcttagaagttttctttgttctgcttcataaatatatccttaatgcatttcctacaatgttctaaatttgtaaactctaaaggatggagaattttttttctgacgatatgttctattatcctccttgaaatatggcctaaacgatagtaccgcaattttgatgaggtttctcaatcatgtttttttactttttcaacatgttctgattggcatcgtttatgatgtttctatcacatttaaaatatcatagtgagaaagcaaataaagcatgtcttgttagatggcgagacctacattattatgattgacttgtattatacattttctaacacttaagtgacaatgtacattctcatcatccaatctagatatagaaaatcaaattcttcccaaagaatgcacataaagaaagttgcttaacaaaaatatgaaacaatcatcaagactaagatgcagatctcaaatggctttaactactgcttcaacttttttgccactctaattgttctttgtccctttggaagcatgtggtttgtatgaaagcccttgtagggagtttgcaacatgaacagttgcccctgattcatccaccaatattacatggatatcactactatac

SEQ ID NO: 169161 - DNA, 1287 bp, Zea mays
  unsure (1)..(1287): unsure at all n locations
  Clone ID: MRT4577_85861C.1
gtcttgccatttcaaaactgaagtatttcaaaactatagctttcaatactttgtttccaaataggacctaattgtaaattagtccggtcgattggagtcttcaactatccaccagttgcaaattcaatctataagttaattgtaattttcctttccaatgtattatcaattggaatacccgaatgcttttgaactgccactgtgatttggcggcagctctctcaatatcaccacaggaacaaaggatcagaaatggctatgcaggccgcaaggaggctagcatctttgaaactccaacgacgcctactccttccctctcaggccgagtccccaagcataagcatcccaaccgcagcggcggcggcagccttcctccactcccatgccaccagcttcgggtacaagcaggttcgcgaagaggataagagcaaattggttggcaacgtgttcagcagcgtggcttctagctacgacctcatgaacgatctcatgagtgtcggcctgcataggctgtggaaggacaggcttatttccaagctgaaccccttttcggcgatgaagcatctcgatgtggctggtggaacaggtgatgttgcttttcgtgtactggaaagaattaagagtgtgagtcacagagctatgcagggtacacttactgaaaccgaagaagacacccacantttatgtatgtgacattaatccaaatatgctaaatgttgggaaaaagcgtgctgcagaaagaggttatggcgaagagcattgtcttagctggatacaaggagatgcagaagctctgagttttgaggatggatctatggatggttacactattgcatttgggatcagaaatgtgacgcacattgagaaagctctatcagaagcttacagggttctaaagcgaggggggaggttcctatgcttggagttgagtcatgtggatgtccctgtttttaaagagatttatgatgtttactcgttttctgtgattccgactattggagagctggttgctggtgatcggcagtcgtaccaatacttggttgagagcatccgtcggtttccaaatcaggaaaagtttgctcagatgattcaggaagccggattccagagggtggaatatgagaacctcgtcggtggtgtagttgccattcattctggactgaaactgtagagctgaatacggatggatgtttttttatcattcatgcgtgcactgcaccttctaaaaacaataaattctacaataagcagtactcctgcaataaaaaaaaaaaaaaaaaagcggcc

SEQ ID NO: 169162 - DNA, 316 bp, Zea mays
  Clone ID: MRT4577_85862C.1
gcaacacacaactccttaccgtccgagaccccaagcaccagcacgggcgtggccgcggaggccaccatgggtgaggggaagaacaagaggatctccaagggaaagaatggtggcaagaaaaagacacgttgccctatctataagaatgatggctatgacatcaacgcaccggccgtgttcattgtgcgcaacatcgggaagactctcggatccaggacacaagttactatgattgcttctgatggtctgaagcacagagtctatgaggtttgcatagctgatcttcaaggtgacaaggatcaagcttacacgaaaa

SEQ ID NO: 169163 - DNA, 215 bp, Zea mays
  Clone ID: MRT4577_85863C.1
aagggaaaatttaaaaaacgggcccatgctttaagccggtactacctttttgggacaaaaataaaaacaaaaaagggctggagttttgatgctgcaaagcaaaattatttgggggccttagcaaatttacatgacgaaatttgtaaaaactttttgaaccaaatgctccccgaaaaaaaactttttgtacttaaaaaaaccgccggtttttttcc

SEQ ID NO: 169164 - DNA, 715 bp, Zea mays
  unsure (1)..(715): unsure at all n locations
  Clone ID: MRT4577_85864C.1
tccgcggncgcgtgggtttgatcacaacaccaccctggcgcgctagaggcggggtcgaatcagcaacgacggctgacatgacgctacccatccagttgctcactgctgcttcaggttatagcgagggacattgtcttagctggatacaaggagatgcagaagctctgagttttgaggatggatctatggatggttacactatcgcatttgggatcagaaatgtgacgcacattgagaaagctctatcagaagcttacagggttctaaagcaaggggggaggttcctatgcttggagttgagtcatgtggatgtccctgtttttaaagagatttatgatgtttactcgttttctgtgattccgactattggagagctggttgctggtgatcggcagtcgtaccaatacttggttgagagcatccgtcggtttccaaatcaggaaaagtttgctcagatgattcaggaagccggattccagagggtggaatatgagaacctcgtgggtggtgtagttgccattcattctggactgaaactgtagagctgaatacggatggatgttttttatcattcatgcgtgcaccgcaccttctaaaaacaataaattctacaataagcagtactcctgcaatatattttgttaatgttgtttttgaaatgaattctataacatcaaactgattttattacatatctcctgcaatatattttgat

SEQ ID NO: 169165 - DNA, 577 bp, Zea mays
  unsure (1)..(577): unsure at all n locations
  Clone ID: MRT4577_85865C.1
gttctagnacgcgagcggccccctttttttttttttttatgtgataaaactaatttgatgttctggatggtttcacgtntttcaagaaaaaaactttacaaatggaagaggtcagctggcttaaaagccaaaatagccactgacgctactgctccagcacatacttctcgcaaatactacttattgtgctgatgctgacagccagcaccagctgcttttacaagccaccgaacttattatagaattaattttaaaaaaaacaaataatactaattgtagaagcggtgcacgcatgaaaaaacattcatccatattcagctctacagtttcagtccagaatgaatggcaactacaccacccacgaggttctcatattccaccctctggaatccggcttcctgaatcatctgagcaaacttttcctgattcggaaaccgacggatgctctcaaccaagtattggtacgactgccgatcaccagcaaccagctctccaatagccggaaccatagaaaacgagtaaacatcataaatctctttaaaaatagggacatccacatgactcaactccaagcata

SEQ ID NO: 169166 - DNA, 585 bp, Zea mays
  Clone ID: MRT4577_85866C.1
ccggaccggcttcccgggtcgcccagcgtccgcggccgcgtgggtttgatcacaacaccaccctggcgcgctagaggcggggtcgaatcagcaacgacggctgacatgacgctacccatccagttgctcactgctcaggttatagcgaagaacattgtcttagctggatacaaggagatgcagaagctctgagttttgaggatggatctatggatggttacactatcgcatttgggatcagaaatgtgacacacattgagaaagctctatcagaagcttacagttgatggttctaaagcaagggtggaggttcctatgcttggagttgagtcatgtggatgtccctatttttaaatagatttatgatgcttactcgttttctatgattccggctattggagagctggttgatggtgatcggcagatagaagacaggcaacatgctaaccaggcctgtgaaccttaaaccttggcaggaaaagtttgctcagatgattcaggaagccggattccagagggtggaatatgaaaacctcctgagcggtgtagttgccattcattctggactgaaactgtagagctgaa

SEQ ID NO: 169167 - DNA, 323 bp, Zea mays
  Clone ID: MRT4577_85867C.1
tttgatttcagacacaccaggcacaaagagagggagggtttaatttacatcccggtccgcaaaagcaaccgctgtgctacaccaaaccacacacaccactctaggtctatagcctatgcgactgatggggatccactagccgaccaccggaggaagaacaaggacggactggtgttcgagctggaccgccactacgacgacctgcaacggtagataatgctagatggccaccgatcggccgcacaagcacctgcgccagaatccacggtgcggggaccgcccccagctgctccagaactgcgaactgcccccaccggacaagc

SEQ ID NO: 169168 - DNA, 1360 bp, Zea mays
  Clone ID: MRT4577_85868C.1
atgggcgtccacaatcgcgtggtgcacgttctgccgctctgctcacgcccgcggccgaacctcccccgcatcccgcagccgccgacgctcaccttccatcctccgcgcagccactcatcccgcagccgcgatccccgcggcgctcaccttccatcccgcagcgcgcaccttcatcctccgccttccatcctccgcacagccactcatcccgcagccgcgatccccgcggcgctcaccttccatcccgcggcgcgcaccttcatcctccgcgaccgctcgcggatctctcatcgacgtcgatgctccgcgattaaggggatccgaggccaacaaacagcatggcgctccccgcggcgggcgggcgaggaggcatgcgcggatactcggcaggatgctccggcggaagcggagccacctccccgtcggccgcccgtgttctacagctccgtgttcgcgcagatcgaagagatcgggtggaagcaactggtgagcgccacaggagagggagtgtcctgtactcctgtctcaccttccgtgtcgtgtcatgacagctgtatcgacttctctaggttgggttgcaccaaatctgttagctttgtgaaggctgagcatctaaatggaggtaaaattcggcagacacgcattgaggattactcctatgacaaggatgttgtagagatcaaactgccagacacagatctttcttctgattacggtgtccattttgtcaaggatgtctgcattgatgaaggagttcttcctgatcaaaagatttcatcagaaaagcaagtagaccaaaaagtgtctataaactttgattccagggaagagataagtgctgactctacaaaaactgcacatgagttgaaatcggaaatagttgtcctacctgtcaagtgtgatactcatgacaatattgtggaacagaactcctcatgcaaaaagcgtgatcttgaagataacaatactacagatgtatctaccgagtctaatgatgagggattaaatcccaaacaattaccatttcatgaagttgcacaagattaccagaaggttgatagtgtcatttcggagagcaatgaaaatcaggactggcttttcactggagatgcaacccatcagggacttgagaaatatgttatgacaaagttgtttaatcgagtattcgcatcagtcctagaagatgtgaagagtgatgaagaacttttttagaattaacttgtacgagaatgaaacatcctgtctggtatgaagattaacttcccttgtttttggcattttttgcttgatgtattgcatctctggccacctggacacatgaataaggtttttggcgaaatgtgacccagattggaattgt

SEQ ID NO: 169169 - DNA, 981 bp, Zea mays
  Clone ID: MRT4577_85869C.1
cccactcgtccgcttcaatacttcatacaccatcaaatgagtcatgtgcaaaattcttcggagcatcagttcttgctctagaagaacttcatcaggtgattactcttttgctttcctttattgaataattagcacatgtgcgttcaaaaaaattgccacatgaatgaaatgatatattctcgaattattctattgagttttttgtttttatcacaacaccaccctggcgcgctagaggcggggtcgaatcagcaactactgctgacatgacgctacccatccagttgctcactgctcaggttatagcgaagaacattgttttagctggatacaaggagatgcagaagctctgagttttgaggatggatctatggatggttacactatcacatttgggatcagaaatgtgacgcacattgagaaagctctatcagaagcttacagttgatggttctaaagcaagggtggaggttcctatgcttggagttgagtcatgtggatgtccctatttttaaatagatagctggttgatggtgatcggcagatagaagacgggcaacatgctaaccaggcatgtgaaccttgaaccttggcaggaaaagtttgctcagatgattcaggaagccggattccagagggtggaatatgaaaacctcctgagcggtgtagttgtcattcattctggactgaaactgtagagctgaatacggatggatgttttttcatgggtgcaccgcttctacaattagtagtatttgttgtttttttaatgaattctataataggttcggtggcttgtaaaagcagctggtgctggctgtcagcattagcacaatatgtagaataagtagtatttgcgagaagtatgtgctggagcagtagcgtcagtggctattttggcttttaagccagctgacctcttccatttgtaaagcttttttcttggaaacgtgaaaccatccagaacatcaaattagtctt

SEQ ID NO: 169170 - DNA, 360 bp, Zea mays
  Clone ID: MRT4577_8586C.1
gaaacgaacgtaatccattcactttttggttgggtgcggtatacaatacaacaggtctgtacagattactcatcgccgtcgccttttcacttggagaccgcacccccaaaataaaaaaaaaggacaggaacgaatccaagaggaggcccctcgaagttcaggccgagacgatggactcgaagcagtggagcccgtcgaactcgggcgcgaaccgcggccgcgcctcccgccggcgctcggccgccggggcccgctggtcggccgccttctcctgcctcggcgttggcgccgtgtccgccgccgccgcctggggccgaggccgcccggcggccgaggcccgccacgagagccgggcggagg

SEQ ID NO: 169171 - DNA, 865 bp, Zea mays
  Clone ID: MRT4577_85870C.1
atttgccaggcaggagtgttcgttggtatcgctttagcacttcttctgtttgtctcttttggtagacttgcagaaatattctccaaagaccccatggttatacaaattgtgaggagtggtgttttgttcgttagtgctagtcagcctatcaatgccctcgcttttatctttgacggactccattttggtgtctcagacttctcgtactcagcttcctccatgatggtagttggagcaatatcctctttgtttttgctgtgtgctccaccatttttcgggcttcttggtgtttgggctggcctggctcttttcatgagtttgcgcatgactgctggatttatgagattgggatggagagcagggccttggtggtttttgcacagaaaagaacccaaatacaggctgcaatgaacaaaatgtggatctatggagccgaataaccaaatggcgagattaggatggaggatacaagttatgaaggcacactacaatggagaaacatactttcatgtcgactcccgtgtatgttttaaccagttcggttattctaattccgtgtgtggtttagaatgtattttgacttgttatggatttcaaccgactcaatatcagccaatccacatgggattaacggtgaaacaaacaagcccttagatggttttagaacttggaatttgagagtaaagctacattggacaaattttcacttgtaggtgtcacataggcgatgattgttcagtatctctatcctctccgtcaaactgtaaattgaatattgcagatttatttagacatatctgatgggttcaaaaaaaaaaaaaaaaaaaaaaaaaaaaaaaaaaaaaaaaaaacccccccccccccc

SEQ ID NO: 169172 - DNA, 294 bp, Zea mays
  Clone ID: MRT4577_85871C.1
gggcccaacccccacggacttgtaatttgttttggacacaaaaattattgttttgagaccaacccggttttaacagcaaacaggggtttcactaaaaggggcccccccatcacttttttatggggggtaacaaaagacaggacccattactgacgggaagataacccggaatgaaccccctcaacacaaggaaccccccctggcccgatcggagtgaccaaaccagggttggttggtaaaataaggcctttcactttttaaaaggggggaaacaccgggccccccctgtcttgg

SEQ ID NO: 169173 - DNA, 265 bp, Zea mays
  Clone ID: MRT4577_85872C.1
gttgggcgcttggcttattgcacaggtcgagttcgtaggtagtacgactgtcagggaggaagaggcagggaagacaatttggagaccctacggagcatacctggggggagcacgcccgtcacacgtcaggcaaacaggacaggaggttcccagataaccgctgtttgctgcagcctgggatggacccctgctgctcaacacaaagggtactttattggtcctagctagggggccaatcaagcaactctacggaaggacggatcga

SEQ ID NO: 169174 - DNA, 131 bp, Zea mays
  Clone ID: MRT4577_85873C.1
gttcaatgatggctctaagagaaatggcgcgtggattcccaattttttctctcgaacatcaactcccccagctcgctcctgcaccacccactgcttcaaaccataacagaaacatcgtggtacctaacctg

SEQ ID NO: 169175 - DNA, 549 bp, Zea mays
  unsure (1)..(549): unsure at all n locations
  Clone ID: MRT4577_85874C.1
gcaggnagctcgtcggccgtaacatcaccgttaaccaggcgcgagtcccgtggcggtggcggtggcggcggtggctacggcggcggtcgcggcggcggcggcggttatggtggcggctacggcggtcggcgcgagggtggcggtggcggctacggcggcggtggcggcggcggctggagggactgatgtgtgttccggtctgggttcnccnanttatcttatctatctatantatcntgttaccgttcacttctntcaccntnttantntccnttctacctttnnattanntnnttctaccctttttttcnctttcnttnctccctctttttccttttccttttatttccttctggggggtgtctcttcttcttttttttttttttgtctgtccttttttgctttttttctttcttttcttgttttgttttttctttccnncctttttttttttttttttccttctcttttcgttttttttctttttcttttttttttttttttttttttttttttttctttttttttcttttttnttttttttttttt

SEQ ID NO: 169176 - DNA, 190 bp, Zea mays
  Clone ID: MRT4577_85875C.1
gtcatgatggacttgtgaatgattttcacatctactccaacaacttccaagaaagcgcacgtttattttaaccttcgccagtacgacccccacttctactcaaactagcgccactacaactaccacttgctctcctacttcctcgccttcaacaacatcttactcaacatacctctctacaacttcattt

SEQ ID NO: 169177 - DNA, 656 bp, Zea mays
  Clone ID: MRT4577_85876C.1
ctcgaggccggccgggacgaacgccgcagcagtgcgccgcgttctacgcccgtccacctgtcaactgcgccgcgttccactgcaagccgttcgtcccgcccatgccgccgccgcgactcccatcaccgcccccgccgatgctcccatcaccgcccccgccgcggctcccatcaccgcccccgccgatgcttccatcaccgccgccgccttcgccacctccaccatcaccaccgccgccgtctccacctcccccacttatgtctcctccgccgccatcaccgccaccgccgtcaccaccgccacctccactgctgccgccaccaccacaaccacattccccacctccaccgttgtcgtcaccaccgccaccaccaccactgccacaaccacattccccgcctccaccgttgtcgtcaccaccgccaccaccaccactgccacaaccacattccccgcctccaccgttgtcgtcaccaccgccaccaccaccactgccgcattccccacctccaccatccccagcccccgcgccagtctaccacccgccaccacccaccaccgtgcccaccatgccctgtgctgccgccaccgctaccctgtacagcaacgcatcaatggccacctcccccaccaatattaccccggtctcattccca

SEQ ID NO: 169178 - DNA, 505 bp, Zea mays
  Clone ID: MRT4577_85877C.1
tcgtctcggtcgcatcgacaccgatcgtcgagcgtcaagcacgtcacgttgtcgtgaagcctcaagttgagaaggaagcacacagtgctctgactcgatggtcgtgcccatgcctctcctcgtccggcctgtgcagctgcgtgtggccgtccccgctgcagtacggctcgtctcgtagcgtcggtcggccgagggaagggcgccacttgcgtacgtcagtggcacatgctccagctccttccagcacaatgcaagggtgcccgacatggcacgctgtcggttctgcgtgccatagcagtcgccttcacctacactcgatgtgcacgctgcctcggacgactcatggcattcgacccgtctgggctctctcggactccggagggcatccgggggccttgatcgagtcccaagtgcgctggtctatggcgaggtgatcaacggccgctacgccatgctgggcgcggtgggcgccatcgccccggagatcttcggcaagatgggcatc

SEQ ID NO: 169179 - DNA, 746 bp, Zea mays
  Clone ID: MRT4577_85878C.1
ccctccgaggttggccggggatatgcgacctgccgcgcctaacaacttacattcgcctacaacttcttccgggcgagccgccggcgtgcgcgcgcgtcgtgccgcgggacagcgaccgcagcaactgcctgcccaaccgccccgcccagcggacgccgcagcagtgcgccgcgttctacgcccgtccacctgtcaactgcgctgcattccactgcaagccgttcgtcccgcccatgccgccgccgcgactcccatcaccgcccccgccgatgctcccatcaccgcccccgccgatgctcccatcaccgcccacgccgatgctcccgtcaccgcccccgccgtctccacctcccccacttacgtctcctccgccgccatcaccgccaccgccgtcaccaccgccacctccactgctgccgtcaccgccaccaccacaaccacattccccgcctccaccgttgtcgtcaccaccgccaccaccaccactgccgcactccccacctccaccatccccagcccccgcgccagtctaccatccgccaccaccaccacagtgcccaccatgccccgtcctgccgtcaccgctaccctgcacaccaacgcatccatggccaccgccgccaccatattaccccggcccattcccacccacagaccctgtccgatacgcatcaccttctcccccacagcagcaccatccatggccatcagtatacccagttcaatatggatcggcgccgccccct

SEQ ID NO: 169180 - DNA, 1149 bp, Zea mays
  Clone ID: MRT4577_85879C.1
ggggcggatgggcaggcagttgatgcggtcgctgtcacgcggcacgacgcgcgcgcacgccggcggacgccgcagcagtgcgccgcgttctacgcccgtccacctgtcaactgcgctgcattccactgcaagccgttcgtcacctcgaggccgccgccgcgactccatctccgcccccgccgatgctcccatcaccgcccccgccgatgctcccatcaccgcccccgccgcggctcccatcaccgcccccgccgatgcttccatcaccgccgccgccttcgccacctccaccatcaccaccgccgccgtctccacctcccccacttatgtctcctccgccgccatcaccgccaccgccgtcaccaccgccacctccactgctgccgccaccaccacaaccacattccccgcctccaccgttgtcgtcaccaccgccaccaccaccactgccacattccccacctccaccatccccagcccccgcgccagtctaccacccgccaccaccaccacagtgcccaccatgccccgtcctgccgccaccgctaccctgcacaccaacgcatccatggccaccgccgccaccatattaccccggcccattcccacccacagaccctgtccgatacgcatcacctcctcccccacagcagcaccatccatggccatcagtatacccagttcaatatggatcgccgccgccccctccgctgcattgatagaaaggatctcagacgcacggaacggaaggatagttggttctgctcttgcccctccggccatggctaccacttgccagattcaccagtgtacgtggtcattgtcatgcttagcaaatactgttggttgatggctgcatgcctcgagagcgcgtggtaatctccacagaattttgtgaaatcatggtctgtcggtgtcggtcgttggtgctgaaagggattgaattgaatgtgacggggtggtctgctgggtctcttcggagcgttttaggcttgggattggtggttaaaattggctgtgaataaagaagagtttgagagggacagcagaggaggggattgtattgtaggcccccggatatatcatatatctgggtgtatagagaagtttcagctcagttaagtacagtcagacatcaaagtttagacc

SEQ ID NO: 169181 - DNA, 1860 bp, Zea mays
  Clone ID: MRT4577_8587C.1
aattcggcacgaggaaaaaatggttaattagaatcttagtcagagacctcgccccgcaccgccggagccatactccctcctccgtaagggtgatgggccaacgggaagcttgtgtatgcgcggtgagccatgtcccgggcctcctaaaaagcgggcgcgaacatcgctccgaccttggaggcaggccgtcccatctgctccggacagagccctcgctccacaccgccggcgacctttttcctcctccgctcgaggagtgggccaacggagggagaccatatgggcgcggaggcagcgcatgggcatccgcagcagcagcctccctcgtccctccgacccggcagggaggccgcggcgccgcccgcggtggtggggctgcagctctcggcgctgatcgaccacgtcgcgcgcgtcgactggtccctcctcgaccgcgtccctggcgaccgcggcggctcgcagcaggtatccattgatgagctgaatcatattcttgatgaagtgaatgcccacatccttccttcccgcaatgatctcactccggtaactacaatagccggtggaagtgttgccaacacaatccgtgggctctcagctggttttgggatatcaactggaataattggagcttgtggagatgacaaccagggacttctgtttgtcaacaatatgagctttagtggtgtagatctcacaagattaagggcgaaaaaagggcacaccgctcagtgtgtgtgcttggtcgatgcaagcggcaatcgcaccatgcggccatgcctatctagtgcagtcaagatacaggccaatgaatttagaaaggaggatttcaaaggctccaagtggctcattgtgagatatgcacaacagaacatggaacagattgtcgaagctattaggattgcgaaacaggaaggcctttcagtatcattagatttggccagtttcgagatggttcgtgactctaggtctaaacttgttaaccttttggagactggtaacattgacctttgcttcgccaacgaagatgaagctagggaggttatagggggaagcctggaatcagatccagaggaggcgcttgcattcttgggcaagtactgcaaatgggccgtggtgacacttgcttcaaagggatgcatggcaaagcatggcaaacaggtcgttcgagtcccggccatcggggagagcaacgcggtggacacaactggagcgggcgacctgttcgcgagcgggttcctgtacgggctggtgaaggggctgccgctggaggagtgctgcaaggtcggggcgtgcagcggcgggtcggtgacgcgggcgctcggcggggaggtgcggccggagaactggcagtggatgtacaagcagatgcacgccaggggcctgctgctcccggagctcaagaactgaatgaaactattgctgctgtagctttagctagctaaatgcctgcatgctgcaccagctgttgtatctcccagctctcgaagactcgtagcatcacccagggccggtcgagtggccattatccagccttccgttgttaattgctgccgttacctttcccctgctagtctgttaatgttactagaatattggtgtccatgaccatgcttgattgctggcatggcgaaggacgggcagatacattagttgatttgtagagccactcctaagactgaatcaatcagatggagtatattgattactgcaaaaaaaaaaaaaaaaaagcacttcgtatgaccttcatgtgtgcgctagctgcctagctcgagttctattttttacgcccaaaatttgtatgctgttttgtctttgtaagtacatactcattccgtccaaaaataaaatttgttttagcct

SEQ ID NO: 169182 - DNA, 253 bp, Zea mays
  Clone ID: MRT4577_85880C.1
caagggacatggtgaagggtagagatctgcgtaaagtggcaggttacagttcagttgaggtcactaactaagtgcacactttcattgctggggagaggactcaccaagattgggataatatatgtacattgctctgtgatgtgtcacgaaggtcaagaagcggggacagctcctttcatgtagacactggcttagcattctaggatttagctgactgctcttctttgaattgaaattgatacttgatgtacct

SEQ ID NO: 169183 - DNA, 2289 bp, Zea mays
  unsure (1)..(2289): unsure at all n locations
  Clone ID: MRT4577_85881C.1
ggnaaaccaatgcaattgcccacccagccccggnaccgggggccaagcacagtacagggggttggtttctgcgacggcgaggacgcgaagcggattcggatcgcgccgccatgccgctcgacgagctcgccgacaaagggccgtcgtcctccgaggaagttcagctcgcgccgtcggattccaagttccggagcctcagtcctgcgccgattccgctcccaactcttccgagcatcagatctatctctactgttagttcactagaatcagagagggcagcatatgaatttcttgctcaaactcctgtcaggtcaactgatgcacatcttgttgagttttcggaggctatgagaactgttgcaaaagccttacgacgagtggctgaagggaaggctgctgctcaagcagaggcagcggagtggaaacgtaagtatgaattagagacagcgcacaagcatcggagtaaaatcaaaggctacagcagttgtatcaataatgacttagacaaactggtcagccaactaaccctggagacacctacatctgatcaattaggatgttgcggaaagcatggtatatgtgcacatgagattctccaggacgaagttcctgggcctatcccaagatctaatcacaaggtggtggggagaaaggcatcatttaaactttcatggggatgtaacggggataaaaatggacaacataagcatgattttgtgtcctttgaaaaaggtgatataacaaccgcagaacgaagcaataagcagatcttactgaaatgggaatcgccaccacaaacagtgcttttcataaccaaaccgaattccaactctgtgcgtgttctttgtgctgaaatgatcagatggcttagggagtataaaaatgtaaacagctttgttgagccacgtgttagcaaggaacttctaacagaggattcttactacaacttcgtccaaacatgggataatgatgaggagataaagatgctgcgcacaaaggttgatttaattataactcttggtggtgatggaactgttctgtgggctgcatcattgttcaaaggacctgttcctccggttgttgcatttgccctgggatcactgggcttcatgacgcctttcccaagcgagcaataccgtgagttgttggacaatgtgctgaatgggccatttagcatcacgctgagaaaccgcatacagtgtcatgtaatacgtgacgaggcaaaggatgaaatcgtgtctgaggagccattcttagtgttgaacgaagttacaatcgaccgaggaatatcgtcctaccttaccaacctggaagtctactgtgacagctcttttgttacttgcgtacaaggggatggactaatcatatcaactacatctggaagtacagcatattcattagcagctggagggtccatggttcatcctcaggtcccagggatccttttcaccccaatctgcccgcactctctgtcattcagacctttgattctgcctgaatacgtgaccctccgcgttcaagtgccgttcaacagcaggggcaatgcctgggcatccttcgacggcaaagaccgacagcagctgtcgcccggtgacgccctgatctgcagcatttctccctggcccgtgcccacagcctgcctggtggactcgacgaccgatttcctccgcagcatccatgagggtctccactggaacttgaggaaatcccagtcatttgacggcccgcgtgattgatgcaacagctgttcagttatatttcagcccggtgccagaattcaagctgggaattctcaacaggaataactgtagctactccagggtgctctcacctttaccgttccatacttgcctatatacaaaggttgcgtgcgttagatgtgaggtatagatagatgtatagaatatggatggatgataacgactggacatgttgaataatacaacgccaacgtatgcacgtaaaagaaaaaaaaaaccaaataatccggcagcatccatgagggtctccactggaacttgaggaaatcccagtcgtttgacggcccgcgtgattgattcaacagtttctttaccgttccatacttatatacaaaggttgcgtgcgtttagatgtgaggtagtatagacgtatagttgagaatccaaatatatagccatgaccatgcgtgtgtgtacatgtttctgtgcttcagtgctccccagatctgaatggaataattggcgagccatacacgtatgacgagatggcagcttgcagtcaaaaaaaaaaaaaaaaaaactcgagagt

SEQ ID NO: 169184 - DNA, 2521 bp, Zea mays
  Clone ID: MRT4577_85882C.1
gccgggtcggctctgtacgcgttcgtctctctctctctctctgcgcgcaacaagtgacgcgtcactgcgccgcacaccaccgagggggatcgccgccgcgcgggatatgagatgagaggagacgtctttccggcggcttccgaggggctgccaacggcggcggtggaggtggacccgtcgtggcggttcccgagccggcgcctgcgggacgcgtacgtcgcgctgcagacgtggaagcggcaggccatcttctccgacccgagcaacctcaccgccgactgggtcggcccgggggtctgcaactacacgggcgtgtactgcgcgccgctcccctcgggccccgaccgcggcgcgctcgccgtcgccggggtcgacctcaaccacggcgacatcgcgggcttcctcccgcccgagctcggcctcctcgccgacctcgccctgctccacctcaactccaaccgcttctgcggcgtcctcccgcgcgcgctccgccgcctccgcctcctccacgagctcgacctcagcaacaaccgcttcgtcggcccgttcccggacgtcgtgctcgacctccccgcgctccgcttcctcgacctccgcttcaacgacttcgagggcaccgtcccgccccgcctcttcgaccgcccgctcgacgccatcttcctcaaccacaaccgcctccgcttccagctcccggacaacctcggcaactcgccggcctcagtcctcgtcctcgcgcacaacgccttcggcggctgcctccccgcgagcgtcgccaacatgtccggcacgctcaacgagatcctgctcatcaacaacggcctctcatcctgcttcccgccggagatcggcctgctgcgggagctcaccgtgctcgacgtcagcttcaacgagctcgccggcccgctgccaccggagctcgccctcatgaggaagctggagcagctggacgtcgcccacaacctgctcaccggcgcgataccgccggggatatgcgacctgccgcgcctcaacaacttcacattcgcctacaacttcttcacgggcgagccgccggcgtgcgcgcgcgtcgtgccgcgggacagcgaccgcagcaactgcctgcccaaccgccccgcccagcggacgccgcagcagtgcgccgcgttctacgcccgtccacctgtcaactgcgctgcattccactgcaagccgttcgtcccgcccatgccgccgccgcgactcccatcaccgcccccgccgatgctcccatcaccgcccccgccgatgctcccatcaccgcccacgccgatgctcccgtcaccgcccccgccgcggctcccatcaccgccgccgccttcgccacctccaccatcaccaccgccgccgtctccacctcccccacttacgtctcctccgccgccatcaccgccaccgccgtcaccaccgccacctccactgctgccgtcaccgccaccaccacaaccacattccccgcctccaccgttgtcgtcaccaccgccaccaccaccactgccgcattccccacctccaccatccccagcccccgcgccagtctaccatccgccaccaccaccacagtgcccaccatgccccgtcctgccgccaccgctaccctgcacaccaacgcatccatggccaccgccgccaccatattaccccggcccattcccacccacagaccctgtccgatacgcatcacctcctcccccacagcagcaccatccatggccatcagtatacccagttcaatatggatcgccgccgccccctccgctgcattgatagaaagaatctcagaagcacggaacggaaggatagttggttctgctctcgcccctccggccatggctaccacttgccagattcaccagtgtacgtggtcattgtcatgcttagcaaatactgttggttgatggctgcatgcctcaagagcacggaacggaaggatagttggttctgcatgtctccacagaattttgtgaaatcatggtctgtcggtgtcggtcgttggtgctgaaagggattggattgaaggtgacgggtggtctgctgggtctattcggagcgttttaggcttgggattggtggttaaaattggctgtgaataaagaagagtttgagagggacagcagaggaggattgtattgtaggtgcagggatatatcatatatctgggtgtatagagaagtttcagctcagttgagttcagtcagacatcaaagtttagaccaataaatttccagtgcccgtttgttccttttgtaccacagttatcatcggttattcatccttgtattgtattgttcagcccccttttttcagcgttaacatttttatttatcctttcctggatcctgcttattatctgccgcttgctagtcttgttattgtttttaaatgatctttgttttccccctttccttttctgtgttctgttctcttcaaaaaaaaaaaaaaaaaaaaaaaaaaaaaaaaaaaaaaaaaaaaaaaaaaagaagggcggccgccgaataatgagctc

SEQ ID NO: 169185 - DNA, 842 bp, Zea mays
  Clone ID: MRT4577_85883C.1
cattgggtacctcgaggccggccgggtccacaccggcctcggcgcctcgcaccacaaccacctcctaccccttctcttcttcttctccccccttgcgaatcggagaccaagtgcaattgcccacccaagccccggaaccgggggccaagagcagtacagggggttggtttctgcgacggcgaggacgcgaagcggattcggatcgcgccgccatgccgctcgacgagctcgccgacaaagggccgtcgtcctccgaggaagttcagctcgcgccgtcggattccaagttccggagcctcagtcctgcgccgattccgctcccaactcttccgagcatcagatcattggtccactcggtttctgatgagagtgtaaatgtagatgtcgcggcctcacatcaaagtgaaaatggatctatctctactgttagttcactagaatcagagagggcagcatatgaatttcttgctcaaactcctgtcaggtcaactgatgcacatcttgttgagttttcggaggctatgagaactgttgcaaaagccttacgacgagtggctgaagggaaggctgctgctcaagcagaggcagcggagtggaaacgtaagtatgaattagagacagcgcacaagcatcggagtaaaatcaaaggctacagcagttgtatcaataatgacttagacaaactggtcagccaactaaccctggagacacctacatctgatcaattaggatgttgcggaaagcatggtatatgtgcacatgagattctccaggacgaagttcctgggcctatcccaagatctaatcacaaggtgggtggggagaaaggcatcatttaactt

SEQ ID NO: 169186 - DNA, 323 bp, Zea mays
  Clone ID: MRT4577_85884C.1
gagctcttattcggcggccgccctgaaggctggggcggggctttctttgacactccagcgcggacgcaagacaaggcaaaaaatgctcagagggagtaacgtacgctagatcgcacaccttgtacagacgggagactagaaggaccacccatagaagggcatacgctaaacaaaagggccaaaatttcactgccaaataccaaaacaaagggttaagatgtctacaagttgatctaccaggacaacctaattcagtaaactgaccatatggaacttaatcggatcatgtacatgccgaagaccacgcgagcacacatttaaaa

SEQ ID NO: 169187 - DNA, 2072 bp, Zea mays
  unsure (1)..(2072): unsure at all n locations
  Clone ID: MRT4577_85885C.1
aagaacacacacacgctctctcccccaacccaacccaatccccgtcccccctcactcccccacgcgcgacgcgaccgcttcaatcctctcccaagggaggcgaagatgagggagatcctgcacatccagggcgggcagtgcgggaaccagatcgggtccaagttctgggaggtggtgtgcgacgagcacggcatcgaccccacggggaggtacgtcggcacctccgacctgcagctggagcgcgtcaacgtctactacaacgaggcctcgtgcggccgcttcgtgccgcgcgccgtgctcatggatctcgagcccggcaccatggactccgtgcgcacggggccatacggccagatcttccgccccgacaacttcgtcttcggccagtccggcgccggcaacaactgggccaagggccactacaccgagggcgcggagctcatcgactccgtcctcgacgtcgtccgcaaggaggccgagaactgcgactgcctgcaaggcttccaggtgtgccactccctcggcgggggcaccggttccggcatgggcacgctgctgatttccaagatcagggaggagtacccggaccggatgatgctcaccttctccgtgttcccatcccccaaggtgtctgacaccgtggtcgagccctacaacgccaccctctcggttcaccagctggtggagaacgccgacgagtgcatggtgctggacaacgaggcgctctacgacatctgcttccgcaccctcaagctgaccacacctagctttggtgacctgaaccacttgatcagtgccaccatgagcggtgtcacctgctgcctccgcttcccgggacagctgaactcagacctccgcaagctcgccgtcaacctgatccccttcccgcgcctccacttcttcatggtgggctttgcgccgctcacatctcgtgggtcgcagatgtaccgctccctcactgtccctgagctcacacagcagatgtgggactccaagaacatgatgtgtgctgctgaccctcgccacggtcgctacctcacggcatctgctatgttccgtgggaagatgagcaccaaggaagtggatgagcaaatgctgaacgtgcagaacaagaactcttcctactttgtggagtggatccctaacaatgtgaagtcgagtgtgtgcgacatcccacccatcggcctgaagatgtcctccacattcatcggcaactcgacctccatccaggagatgttccgccgcgtcagcgagcagttcactgccatgttcaggaggaaggccttcttgcattggtacacgggtgagggcatggatgagatggagttcactgaggcagagagtaacatgaatgacctggtggccgagtaccagcagtaccaagacgccacagctgaggatgaggaggagtacgaggaggaagaagaggaagatcctgctgcctaagccatcatcccaagtgcttggtaaagatatgatgtcccttgtatcgctgctagtcagcactgagtcgtttgaggtgctcgtggtgatgttaggtactagatgggtgtcattacttatgaatgcgatgttgctgtgacagaactgcatttcctattgtactatggttgtccaagttgtcattaccatgatgtgaggtagcttaactggttgttgctataccttatgcagcattttgctgaagttatcaccatgaggtgaggtagtttgagtgatttatgtggtattagagaattcaactgtgtcaagttcgtgcccaaaaaaaaaaaaaaaaaaaaaaaaaaaaaaaaaaaaaaaaaaaaaaaaaaaaaaaaaaaggtttccgtttttgttacttcccgatctggcaagaaaagatctagagaatcagctgatgatgataatactgaagaagaaccaacctcagacagtgaacctgacgttgaagacactgaacagaaaacaacggcgactgaatcacctgtcaatattagaagtgaacctctcacgacacgtngccgcgcccttcatcatggatggatggcagcagcatcagtactgtcgagttccctgatgggctacctccagct

SEQ ID NO: 169188 - DNA, 2075 bp, Zea mays
  Clone ID: MRT4577_85886C.1
ctctctctctctctctcccacttcaccccagttcgccgtctacgcgctccgtctcccccaaaccccacctcctcgccggaaccctagcccccgccgacgcggcgccatgagggagatcctccacattcagggcggacagtgcggtaaccagatcggtgcgaagttctgggaggtgatctgcgacgagcacggcatcgaccacaccggcaagtatgccggcgactccgacctccagctcgagcgcatcaacgtctactacaacgaggccagcggcggccgcttcgtcccgcgcgccgtcctcatggaccttgagcccggcaccatggactccgtgcgctcggggcccttcggccagatcttccgccccgacaacttcgtcttcggccagtccggcgccggcaacaactgggccaagggccactacaccgagggcgccgagctcatcgactccgtgctggacgtcgtgcgcaaggaggccgagaattgcgactgcctccaaggtatgtcttgtctgtctatctatcccaccggatctgatgttttcccacaattttccctccggggttatggcgacacccgcccttttggatctagggattatgcgccactgccattgttctgagcttgtagatctgaacagtctcgcctagatctaagttgttcatcattttgccgtatgattcctgtacctctcagtgattgtcgagttagacgcctgaccgtcatagcgatggattactatgcatctcctctcttaccgcagggttccaggtctgccactcgctgggaggaggtactggttcaggaatgggcaccctgctcatctctaagatcagggaggagtacccggatcggatgatgttaacattctctgttttcccgtcgcccaaggtgtctgatactgtagtggagccctacaacgcaacgctctctgttcaccagctcgttgagaacgcagacgagtgcatggtgctcgacaacgaggctctctatgacatctgcttccgcacgctcaagctttccacaccaacctttggtgatctcaaccacctcatctctgcaacaatgagtggtgttacatgctgccttcgtttccctggtcagctgaattctgaccttcggaaacttgcagtgaacctgatccccttcccgcgcctgcacttttttatggttggattcgctccactgacctcacggggctcccagcagtaccgtgccctcactgtgccagagctgacccagcagatgtgggactccaagaacatgatgtgtgctgctgaccctcgccacggtcgctacctcacggcatctgctatgttccgtgggaagatgagcaccaaggaagtggatgagcaaatgctgaacgtgcagaacaagaactcttcctactttgtggagtggatccctaacaatgtgaagtcgagtgtgtgcgacatcccacccatcggcctgaagatgtcctccacattcatcggcaactcgacctccatccaggagatgttccgccgcgtcagcgagcagttcactgccatgttcaggaggaaggccttcttgcattggtacacgggtgagggcatggatgagatggagttcactgaggcagagagtaacatgaatgacctggtggccgagtaccagcagtaccaagacgccacagctgaggatgaggagtacgaggaggaagaagaggaagatcctgctgcctaagccatcatcccaagtgcttggtaaagatatgatgtcccttgtatcgctgctagtcagcactgagtcgtttgaggtgctcgtggtgatgttaggtactagatgggtgtcattacttatgaatgcgatgttgctgtgacagaactgcatttccttttgtactatggttgtccaagttgtcattaccatgatgtgaggtagcttaactggttgttgctataccttatgcagcattttgctgaagttatcaccatgaggtgaggtagtttgagtgatttatgtggtattagagaattcaactgtgtcaagttcgtgcaacgtcagtttgttcagagttttatttttttaaaaaaaaaaaaacggacgcgtgg

SEQ ID NO: 169189 - DNA, 858 bp, Zea mays
  Clone ID: MRT4577_85887C.1
cggccgctcgaggcggcaggccggggaagaacacacacgctctctcccccacaacccaatccccatcccctcccgctcctccacgcgcgacgcgaactcttcaatcctctcccaagggagcgtagggaggcgaagatgagggagatcctgcacatccagggcgggcagtgcgggaaccagatcgggtccaagttctgggaggtggtgtgcgacgagcacggcatcgaccccacggggaggtacgtcggcacctccgacctgcagctggagcgcgtcaacgtctactacaacgaggcctcatgcggccgcttcgtgccgcgcgccgtgctcatggatctcgagcccggcaccatggactccgtccgcacggggccatacggccagatcttccgccccgacaacttcgtcttcggccagtccggcgccggcaacaactgggccaagggccactacaccgagggcgcggagctcatcgactccgtcctcgacgtcgtccgcaaggaggccgagaactgcgactgcctccaaggcttccaggtgtgccactccctcggcgggggcaccggttccggcatgggcacgctgctgatttccaagatcagggaggagtacccggaccggatgatgctcaccttctccgtgttcccatcccccaaggtgtctgacaccgtggtcgagccctacaacgccaccctctcggttcaccagctggtggagaacgccgacgagtgcatggtgctggacaacgaggcgctctacgacatctgcttccgcaccctcaagctgaccacacctagctttggtgacctgaaccacttgatcagtgccaccatgagcggtgtcacctgctgccttcgc

SEQ ID NO: 169190 - DNA, 1845 bp, Zea mays
  Clone ID: MRT4577_85888C.1
gctctctctctctctctctccacacttcaccccagttcgccgtctacgcgctccgtctcccccaaaccccacctcctcgccggaaccctagcccccgccgacgcggcgccatgagggagatcctccacattcagggcggacagtgcgggaaccagatcggtgcgaagttctgggaggtgatctgcgacgagcacggcatcgaccacaccggcaagtatgccggcgactccgacctccagctcgagcgcatcaacgtctactacaacgaggccagcggcggccgcttcgtcccgcgcgccgtcctcatggaccttgagcccggcaccatggactccgtgcgctcggggcccttcggccagatcttccgccccgacaacttcgtcttcggccagtccggcgccggcaacaactgggccaagggccactacaccgagggcgccgagctcatcgactccgtgctggacgtcgtgcgcaaggaggccgagaattgcgactgcctccaagggttccaggtctgccactcgctgggaggaggtactggttcaggaatgggcaccctgctcatctctaagatcagggaggagtacccggatcggatgatgttaacattctctgttttcccgtcgcccaaggtgtctgatactgtagtggagccctacaacgcaacgctctctgttcaccagctcgttgagaacgcagacgagtgcatggtgctcgacaacgaggctctctatgacatctgcttccgcacgctcaagctttccacaccaacctttggtgatctcaaccacctcatctctgcaacaatgagtggtgttacatgctgccttcgtttccctggtcagctgaattctgaccttcggaaacttgcagtgaacctgatccccttcccgcgcctgcacttttttatggttggattcgctccattgacctcacggggctcccagcagtaccgcgccctcactgtgccagagctgacccagcagatgtgggactccaagaacatgatgtgtgctgctgaccctcgccacggtcgctacctcacggcatctgctatgttccgtgggaagatgagcaccaaggaagtggatgagcaaatgctgaacgtgcagaacaagaactcttcctactttgtggagtggatccctaacaatgtgaagtcgagtgtgtgtgacatcccacccatcggcctgaagatgtcctccacattcatcggcaactcgacctccatccaggagatgttccgccgcgtcagcgagcagttcactgccatgttcaggaggaaggccttcttgcattggtacacgggtgagggcatggatgagatggagttcactgaggcagagagtaacatgaatgacctggtggccgagtaccagcagtaccaagacgccacagctgaggatgaggaggagtacgaggaggaagaagaggaagatcctgctgcctaagccatcatcccaagtgcttggtaaagatatgatgtcccttgtatcgctgctagtcagcactgagtcgattgaggtgctcgtggtgatgttaggtactagatgggtggtattacttatgaatgcgatgttgctgtgacagaactgcttttcctttggtactatggttgtccaagttgtcattaccatgatgtgaggtagcttaactggttgttgctataccttatgcagcattttgctgaagttgttattaccatgaggtggggtagtttgagtgatttatgtggtattagagaattcaactgtgtcaagtcatcaagtgatggtgcaacgtcagtttgttcagggttttatttttttattggcgtgttatgttggtatgtttttgattttcggg

SEQ ID NO: 169191 - DNA, 355 bp, Zea mays
  unsure (1)..(355): unsure at all n locations
  Clone ID: MRT4577_85889C.1
cctgagccctgcagnnggatgcggaccgcacanngcgcgaagnngcattannacgcctctnngcccgttacnnccgaaaatactgttggtgtaccactncggcgatccccggcgccgtgagtgtcnnaccatgattnnncagtcagcgaccgcgttgatgcttngctggctgnnaccctgatgaagtnntcgtgtccgtaccaactnnggcgtaatcaatggggcccttcggggcccccattgtttctcttttgtggaggnnagtccattgnnacgaaagggatganancctgattnnggcccgccttttccgcttcgcttggnnngtgaacaannnctgaaccnnngtgatgtc

SEQ ID NO: 169192 - DNA, 1563 bp, Zea mays
  Clone ID: MRT4577_8588C.1
cattgggtacctcgaggccggccggggggagcgaagacggccctccccgcaatcccatcccatctgctccaccaccggcacatcgccgccgaccttattcctccgccgctcgaggagtcagccgagccaacggagggagaccatatgggcgcggaggcagcgcatccgcagcaacagcctccctcctccgtccgaccctgcagggaggcggcggcgcccgcggtgctggggctgcagctctcggcgctgatcgaccacgtcgcgcgcgtcgactggtccctcctcgaccgcgtcgctggcgaccgcggcggctcgcagcaggtgtccattgtggagttgaatcatattcttaatgaagtgaatacccacatccttccttcccacaatgatctcaccccaataactacaatagccggtggaagtgttgccaacacaatccgtgggctctcagctggttttggaatatcaactggaataattggagcttgtggggatgacaaccagggacttttgtttgtcaacaatatgagctttagtggtgtagatctcacaaggttaagggccaaaaaagggcacaccgctcagtgtgtgtgcttggttgatgcaagcggcaaccgcaccatgcgtccgtgcctatctagcgcagtcaagatacaggccaatgaatttagaaaggaggatttcaaaggctccaagtggcttattgtgagatatgcacaacagaacatggaacagattattgaagctattaggattgctaaacaggaaggcctttcagtatcattagatttggccagttttgagatggtccgtgactctaggtctaagcttattaaccttttggagaccggtaacattgacctttgcttcgccaatgaggatgaagctagagaggttatagggggaggtctggaatcagatccagaggaggcgcttgcgttcttgggcaagtattgcaaatgggctgtggtcacacttgcttcaaagggatgcatggcaaagcatggcaaacaggtcgttcaagtgccggccatcggggagagcaacgcggtggacacaactggagcgggcgacctgttcgcgagcgggttcctgtacgggctggtgaaggggttgccgctggaggagtgctgcatggttggggcgtgcagcggcgggtcggtgacgcgggcgctcggcggggaggtgcggccggagaactggcagtggatgtacaagcagatgcacgccaggggcatgctgctccctgagctcaagaactgaactaatcatgctgcagctggtgttagctgcatgctgcaccagctgttgtatctctcagcactcctacctttcccctgctagaatattgaaccactcctgagattgaaccaatcagatggagtgtattgataattgcacttcatatgtgtgctagtgtactattcccttggtctaaaatatcatgtcattttatcttttcaagactagactagacacacaattattattattattatgtaaattgatacaaaccatatgtagatatatagacgaatttgtttttggaaaaaaaaaaaaaaa

SEQ ID NO: 169193 - DNA, 596 bp, Zea mays
  Clone ID: MRT4577_85890C.1
caatgtgcaaccccttccatgcgtggggttccaagtaagtaactagtcgttgtggccgaaaactatagctttccttgagagtaggaggagaagaaatcatcaagagaaacagcagagttgggagcatgtatgcttctccagttccactgacactccggtgatgagcggggggggcagctcgcgaacaaactggacaaatccaaataccatagatgtgtcaaagattaactgatttcaaccattccaaacaaacaccacatgaaagttaaaatcttgcacaggcaggcaaaccaccatcgtacagaaaccacaaaagtctgcgttttttcattatgtctattgcccctaaaagtactgtgatgacccatctagtaagaccaaaacaacatgggtgaaagtagattacatgtaataccatagatctgaacaacgacggcggataaaaaaaagaccagacaccagatctagaatctttcagctgctagaaacaaacaattgtcaccaaagttctttcggctacacgaaaaccagagtgaacattgaagaccgtttaagcattttaacgtgtcacagaccaaagtccggagttttgatga

SEQ ID NO: 169194 - DNA, 103 bp, Zea mays
  Clone ID: MRT4577_85891C.1
gggctattgtgcgtacaacgaccagcagcagtttgtactgatctaacctggctgaacgaaggtgtactagtttgattttctatgcgcagctctgttgaccagc

SEQ ID NO: 169195 - DNA, 360 bp, Zea mays
  Clone ID: MRT4577_85892C.1
ccaaaaaaaaaaaagttcctttagggggggaatcccaatccccaaaaaaggagggggcccaacccccccgttcaaaaaaaggagggaaaggggcgtcccctgaaaaaaaaccgactgggaaaatggtttcaaaacccggtttttttgggaaaaaaggggataaaaaaaaacccctaaacaagcccaccccgtcccccaaaaaaatttgcccagggataaaaaaaccacctccggggagaaaatttgggcccaccctagggcactcccccacaccaggagaaaaaattccttttaaccgggggcggagaaaggccccccatcgctaaccggggggttaaaaaaggggaattaacccggggg

SEQ ID NO: 169196 - DNA, 592 bp, Zea mays
  Clone ID: MRT4577_85893C.1
ccggccgggcccacccggccatgcttcgcagcagccattaccgtgtagagagcgcggagggccgtcacctggtccgcgcaccgttgtgtccgttcggggcaaacaccgagacctcgggagcctggcgcacctccatcgagcggaacggaagaatggagggagaacggagaaactccgccgccatggcccggcgccgcgcctcctatggtgcaccgctacaggattccgccgacatctccagtgcaaatcatgtggtcgttccgggtggattgatgccgggggaccctgggattgtttgccgggaaatctacatagtggcagagcgactctgagcggtgaccggagtgattacgccatcccatttggagaagaacatgtggttcaagtggagccacatatcaaggagttcgatttgatctaggtggcgtctcccagttgactttctgacgccaaggatggattttagatcctgttatatttatcttttatttttgtaagacttccgctatgtaatatgtactctgattatattgtgacatttatctctatacactctgttattataaaaaaaaaaaaaaaaaaatttgcggcc

SEQ ID NO: 169197 - DNA, 311 bp, Zea mays
  Clone ID: MRT4577_85894C.1
atcttatgcacaaatccaagcctaaagctatacattctcacaacacgtctggagataactgtattgctatagaaccgaacgctacatcacacttacccaaactctgtcttgccaacacggaccatatcccaaacctactgtcgcccaatgaacatcaaagcaccgtgatcgctatctatactctctcacaatacattactacatctactgtggatgggcactttagtctcgcgctgtaaagtacaagcttctatgctgaacaagacagccatatatttcacacttagagcatctatgaatcatgtagagct

SEQ ID NO: 169198 - DNA, 1654 bp, Zea mays
  Clone ID: MRT4577_85895C.1
agcagtggtaacaacgcagagtacgcgggtaagagtttgatccaatcttattttaccagtattatctaacatgtttgtccattaggttagatctaatcagattagatgggatcagaattaaattggtgtaatcagattagactagataagatctacttaatttattttggaataaatcatgtttgttacactattatgagataagcaaagtggtggggataagatgcttgttaggacaagatgagtctctaagaataagatagaatcttttgagatcagttagatctattggggtaagatagaatcttttcgggataagatggatctattaagataagagagaatcttgtaagataagatggatctatataaaatagatacactttaatggaaggtaatctaatcgtttagttatctcatgaattttatttatttatatttacacctatacgtatatgtagatgtaattttggacattactccacaactcatcacactcaatcaaagatccaaatcaaacaaatatcacaagaacaaacactcaagcgtatagatacctataaaaatagttttttcccctaagagtaggtcccctattcatgaaggtcactttaggcacatgatttcaaagtgtgaaatccacatttgtctttagaaggaaaaggtaagaataatcagaggaaagcagaattagatgagaaaagattaagataagtttagaaaaaaaatcagagtagtaaaggtaaggttaatcagagtagaacagtagaaggtgaaacaggatcaagacaagtatagaaagaattagagtaaggtaagtaggtaaggatttgtccatttctatctaggtttcgtcctatagtcaacattcctctgataccacttctgtcacacccggttttaaggaacaaagccaggtgcatctcatacatgcgccaaagaagacaacacatataatacagagtgtatagagataaatgtcacaatataatcagagtacatattacatagcggaagtcttacaaaaaaaaaagataaatataacaggatctaaaatccatccttggcgtcagaaagtcaactgggagacgccacctagatcaaatcgaactccttgatatgtggctccacttgaaccacatgttcttctccaaatgggatggcgtaatcactccggtcaccgctcagagtcgctctgccactatgtagatttcccggcaaacaatcccagggtcccccggcatcaatccacccggaacgaccacatgatttgcactggagatgtcggcggaatcctgtagctggtcaccgaggccaaacgcgggcgcacacccgaattacctagggccgctggattcccaccacgacgacgggctcccaccaacgcactgcacgaaacatggcggcggtaccggtgcaccataggaggcgcggcgccgggccatggcggcggagtttctccgttctccctccattcttccgttccgctcgatggaggtgcgccaggctcccgaggtctcggtgtttgccccgaacggacacaacggtgcgcggaccaggtgacggccctctgcgctctctacacggtaatggctgctgcgaagcatggccgggtcccggccggcctcgaggaacccaatcgcccttaggagtg

SEQ ID NO: 169199 - DNA, 720 bp, Zea mays
  Clone ID: MRT4577_85896C.1
ggccgcaaattttttttttttttttttggttaaaatttagtatctattttatccactgatattatgcgcttaaatccatactcgttgtcgagcagaatataaacacatgggtgttacagcgccatgccacacaccacctcctgcctagattccgagcctaaaacccccacaccgagacgatctatgcgttgcggaggaaaaatagaattgacaggtaagcttcttaccaaatgggatggcgtaatcactccggtcaccgctcagagtcgctttgccgctgtgtagattttccggtgaacaatcccagggtcccccggcatcaatccacccggaatgaccacatgatttgcactggagatgtcggcggaatcctgtagctggtcaccgaggccaaatgtgggcgcacacccgaattacccagggccgctggattcccaccacgacgacaggatcccaccaacgcactgcacggcacatggcagcggtaccagtgcaccagaggaggcgcggcgccgggccatggcggtggagtttctctgttctcccaccattcttccgttccgctcgatggaggtgcggcaggctcccgaggtctctgtgtttgccccgaatggacacaacggcgagcggaccaggtgacggccctctgcgctctctacatagtaatggctgctgcaaagtatggcccggtgggcccggccggcctcgagggtcccaatc

SEQ ID NO: 169200 - DNA, 355 bp, Zea mays
  unsure (1)..(355): unsure at all n locations
  Clone ID: MRT4577_85897C.1
ngatgtttttttttttttttatggtcttttttttggggtgtgtttttgtttgtttgtgatcattccttttatattcaaggccgaactgtacatggccggcgaacctttcggtttgcccaatactgtactcacgaggacgagcctctcccaccaccgccaccatggaacaaatgaaatagaggtactttgtgtccccctactcccgtggtatttatctaccgagggaccgaattggggtaaaaaatgtgggggcaaaacattggaaaaaatacgttttcgaccacacacgggcggggaagttcacgtgctgacctcttagttgcaattcaagacacactcctttgagaggggacca

SEQ ID NO: 169201 - DNA, 355 bp, Zea mays
  Clone ID: MRT4577_85898C.1
ggggggaaaaaaaaccagggttccttttcaaaggccccacctgaatgaattcttgcccccctggataaaaattggctgggttttttgcccttgaacaaaaaaaccccctgccatctttttttggggggttacccactggcccagtcccatggggaattcatttccccgtttttttctttgggggccccatcatccttttttatgccttcacaagaacgggggcgggggtttccccgggggtagggaggcgaccgtggccccccaaaaaaaacacaaaaagctcgcatcttgggtggcccccattagcaagccccgttcaaatgttcccccttggttattatgtttgccctggggg

SEQ ID NO: 169202 - DNA, 283 bp, Zea mays
  Clone ID: MRT4577_85899C.1
atacctcaaactcatatatctacatcttcaaccaccttctctaacactatttccctttccaaaatttcccatccatctattacatccatatcaatctcaccaaccttcactacaacttgtaatacattcttattcaatcacaacaactattaccctttcatttacattaacttctactccaactatccattatttcaatacttcaataaacactacttctcttcctactatattcacttcatcaattacccataatactcctatcttacttacacaattaaca

SEQ ID NO: 169203 - DNA, 565 bp, Zea mays
  Clone ID: MRT4577_8589C.1
gtgggttggaggggaaaacaatctttttcttttttattgggacttaaagttatgcccgtcttatttccacccccgccgttgcaaccccagagaccggaacggggggctcctcgtgggtcccttcgcagaactttaaaaacggcacgccatcccgcattcggggggggcggcccataggacgtgacgaaggccctgaccaggagccggctcagggaaggcactttccttggcgaccacacaaggaggctattgaggggccccgggagcgccacaaaggtccgcccggaaagggcgcccacaacaaactcggagagagagcacccaaagaccccggggcccgcattggacaccgcctttgggccacccccgccgaggaaggcctcgaagggaaagccccctaaccccgccaggaggttgagggtctcccccaggaaagcctacacctagttttgcgtggtgaacacggcccccgccaggttgaccgccggccagaagaaaaccctcaccgcctccggccacgggcgggccgaaaactgatgtccaccgccaaacggcgccgacaaaa

SEQ ID NO: 169204 - DNA, 507 bp, Zea mays
  unsure (1)..(507): unsure at all n locations
  Clone ID: MRT4577_858C.1
ggggggggggggggggtttttaatttttttgtttgtttttttttttttttttttttttttttttttttttttttttttttttttttttaatacaagaaaaaggccccgaccaaaaaaaaccacccaaaacattccaagccctttaggggggacccgccaggggtttttttttttttaacaaaagaggccccaaaccggaaggggccgccgggggcccgccaacaggggccccccccaccccggggccccgaacgaccggaccgggaaaacccgggcgaagcccccaaaaaacgggagggcggggggcaacccccccaggcggggggggggggcccggagcgcgaacaccaccccccaaaacaaaacccgggncccccgcgggggaaggggaaaccccccccccaggaacgaccccccccagccggggaaccccggcaacccgggaccacaaggggaaggcccngagcccgaaagggcgggccacccacacgcacgcccgggggaacc

SEQ ID NO: 169205 - DNA, 432 bp, Zea mays
  Clone ID: MRT4577_85900C.1
ctctccatcttcctttccataattagcgaggggagccacgcatccattcactatttttcatcttagcccttccataatacaccagatgcatcacccttggggtgggtgcaatgggactggagagagcatcatttataatgacctctgcccatggtgcaagggtgagaaagtctttcaagacaacaatgttcttgaagttcatgttgataaggggatgcaacacaaccagaagatcaccttccctggtgaatctaataaaacgcctgatactgtcacttgatacattgtattcttccttcatcataaggatcactccaaattcaaaataaagggtgaaaatctcttctattagcacaccttttttctgacccaatcactattttgtttccaatttctttttacacatttgtgacatcatgcatctttctatta

SEQ ID NO: 169206 - DNA, 2306 bp, Zea mays
  Clone ID: MRT4577_85901C.1
cccacgcgtccgcggacgcgtgggctcgggctagattagcaaatggagttgcagggggcagtcaaaatggtttccatgatgcagatcgaattgcccgtaaaggtgaagaaccatcaagcgctatactaaatggaagagtgcatggtgctgtctctgcagatgaaacactttccctgatcacacaaaacattgcttctaccgagcgaccagcagaaaatgctgctgctgttaggactgagcaacataaggcgaacttggtacttacgccaggcatgaatgcttctagaagttctcatgatgcagttgaggtggctggtgaaggcaagactggcaatgaaacattgctttctgccgagggaggggagaggttgggaccatctttaaatggcaccagcgagggaattaaagggcgcctaaataatgatggttctgtgccccacacttcaaaagttgaaagagaagagggtgaattgtcgcctaacggagattttgaagaggaccattttgttcctttcgaagatggaacatctaaaggaaaggaagattctacaagcagaccattccatggtaggcctggggaagtggtaccctcttctgccgaggcagctggtgagaatgatgctgatgctgatgacgagggtgaggaaagtgctcagaggtctactgaggacagtgaaaatgcttcagaggcgggtgaagatgcatcgggtagtgaatctggtgatggtgaggaatgctctcgtgaagatcatgatgaggaagaagaggatatggatcacgatgatcaggatgcaaaagctgaaagtgagggtgaggcagaaggaacaactgaaacacatgatgtggaagggggaatatcactaccactttcagaacgctttctgtactcagttaaaccacttgccaagcatgtacctacagctttacatgatcgagagttctcacgtgtattttatggaaacgattcattttatgtgttgttcagactacatcagattttatatgagagactactttcagcaaaaactaattctttcactgctgaaaagaaatggaggaattctaaggatacaaaccctcctgatttatatgcaaagtttatgagcgcgctgtacaacttgcttgatggttcctctgacaacaccaaatttgaggatgactgccgagctattattgggactcaatcatatgtcctctttactttagataaactgatttataaagttgtgaagcagcttcaagctatagcaacagatgaaatggacaataagcttctgcaactatatttatatgaaaaatcaagatctcctgggaggttctttgacctagtttatcatgaaaatgcccgtgttctactccatgatgagagcatataccgatttgaatgttgctcgagtccgacaaggttgtctattcagctgatggaatatggtcacgaaaagccagaagtgactgcagtatcaattgaaccaaatttttcttcgtatctttttagcgagtacttgtgtagtacgccagacaagaaattatctgaaggcgtctaccttggaaggaataagcggaaatattcaaataatgatgaaccttcagattctttgaaggcaatggatggtatcaatgttgtgaatggtcttgaatgcaagatatcctgcaagacctcgaaagtttcatatgtccttgatactgaagatttcttgttccggcttcggaagagaaggaaaattttgcggggcgggaatgtgcccgaccgtttgcagatttcatcaatatctgctgcaaaagtgcagcgcttcaataggttcctatccaaaccataggatcatttggcatacaaatgtatcgaaacctgttgctggggtcccagctgcttggcttgaacaatgattccatcgacgtcgcggagtcccctttcggaataacagatgggaagacatagggtaaatacagcaaagcgaagcgagcatgtaggccacagtagtcagtctgttgttccgaaagatgtgtatatatgtattagcagcatgattgttctgattatctttttactgattttcgatggtaggtctattccatcaagtatttaactaatcatttgttgctgttggtataggtcttttgttcttttagccgtcgttttgcattgaagatatgtagccaaaattaaaaacctgtgtcgaacagttatgtagtcttggctccattaatcaaacggacaccgtaatttcttggagccttttggtgaggttgccagcaccctcttcttgtgtatccaattcaatatgaagtataggatgtgtgttacttct

SEQ ID NO: 169207 - DNA, 731 bp, Zea mays
  Clone ID: MRT4577_85902C.1
acataaaactgcagttgcactggttagatggatgcgcttaagcctcttatgtactaggttgcgagttcgagcccttagaactacacattttaaaaaaaaaaaaaaaaaaaaaaaaaaaaaaaaaaaaaaaaaaaaaaaaaaaaaaaaaaaaaaaaaaaaaaaaaaaaaaaaaaaaaaaaaaaaaaaaacctttttccttcggacgtcccccccgaggggggaaccgccgccgccgccgccgccccacgcaaggggaaaaaatctccgccggcccctgggccggggacaaacgcccagaaaataaccgggaaaacaggggcacaaccaggcccttaacggggccccccccggccaaggaccccggcccccccaaaacccggcccaagaagggggacaacaaagtccccttgggggacagggaataaaggtccccccaaccgggaaagaggaaaagacccacccaagggaccccagacttggcccaaaacctgggggcccccggggccaacatatggaaaagggggaaacccctggcagcgggggaaaagcaaggcataaccacccccggggaaaactccttggcaaccatggggccaacggagaacaatggttaaagggccaccccaaaaaaaaaggaaatgggggaggccatggtaaaggcaaccaaaagcccaccggagaaggaaccggagggggctccgccaaacgggttggagaaccaggcagcggcg

SEQ ID NO: 169208 - DNA, 5882 bp, Zea mays
  Clone ID: MRT4577_85903C.1
gaatcccggtcgcccacctccggagttttgaaatgtctacacatctacagccaagagattatcacgagaagtgaactgaagaacttggtgaatgatatactccagcattatccagatcttatggaagggtttaatgaattcttggaacattgtgaaaatatagatggatttcttgctggtgtcttcaacaaacgcccaacaacaaggattgttaaaactgaggataaagaaaaggatagatcgggacagggaggacagggatagagatcgggaaaaggaaagagagaaggaacgagaaagactcgataaagggtcaacattcaattcggcacgagtcacaaaccttctatgttttctggcaaagagaagtacaacctatccaaaccaatatcagagcttgatctctcaaactgtcaacgctgcactccgagttaccggcttctacctaaaaattatcccatgcccccagccagcaacaggactgatcttggagcttctgttctgaatgatcactgggtatcagtgacatcaggaagtgaagattattcatttaaacacatgcggaagaatcagtacgaggaaagcttatttagatgcgaggatgacaggtttgagttggatatgctgttggaatcagttaatgcagcgactaagcgtgttgaagagctgatagagaagatgcaggacaactcagtcaaacctgagagcccaatacgcatcgatgaacatttgactccgttgaacctgaggtgcattgagcgactgtacggtgatcatgcggacgcgtgggtggatgttctacgcaaaaatgctagtgttgcattgccagttattctaactaggctcaaacagaagcaggaggagtggtcaaggtgtcgatcagatttcaacaaagtttgggccgaaatatatgccaaaaattatcacaagtcacttgaccatcgtagtttctatttcaagcagcaagatacgaagaacctgagcacaaagtctctcctgacagagataaaagaaattaatgagaagaaaaggaaggaagatgatgtgctccttgccattgctgctggaaataggcggcctatagttcccaatatgtcattcgagtatatagactcggaaatccatgaagatctacataaaatcattaagtactcctgtgctgaagtctgcaactcttcagatcaattagataaagtgatgagaatatggacaacttttctggagccaattttgggtgttcagcgaaaacatggctccgaggatcctgacctagttaagtcaaagagccgaacaacaaaatcgggtattgcaaatgttggggaaagcaccgctgaaccagatcaggccacagcgcatagctagaaggtggccgagagagtatggacgccggcaaggtggccgagctgcgcagggtcgacctccgcggcctccgacccggcgggcctggctgggtgcaagcctgcgcggcggtggctgcgtcgatggaggagctcggctgcgtcgtggtcgcccacggcgcgctggacggcgagctccggcgggacctgttcggccgcgcgatgccggagctcttcgcgctccctctgccggcgaagcaggggacgctgtctggccatatcggcggccacatcgggcccgacccggagagagatcctgacgtcaagagcctgcgcatcaacggagccacaaacgccggcaaagtacacgccttcgctgatctcatgtggctcgacgttgggaaagcctctttctgttagtcaattggaacgtttgtcaagggcatgctggagctggaccacgcggcacaaaagatggtgctgcattgcctgtgattcctgctaggctccagataatcgcaccacgccgcccacgtcttcgacgtccggctgtccgctacggggccctggcgcctgtgaccgccggcgacgacgacggaacagcgtagtagaaagtcgctcacagggactatagagatggtggtcactgctgagacagcccaaggaggtccgagtgcggataagtggctgcgacgggtgattgcttgatcaggcttcgatagagaagcaaagttgagggtgtcgacaaagaggttgtccgtctgcagaatcaagaaagaaaagctgcaagagtgcgccgcgcaagaaggtttaaattcaacacatagctttaggtgggatacaagtctaccaagagcagtggcgccgttgctggctgcttgacttcaaccttggccccatcgcccccgcggtttcgcctctggccttgagacttgggaaaatatggcaagtttccatccaagcaaagcgggcacggagtcaacagtaggcactgtgagatttgaggagatgggaaaggatataaatgaagaaagatcggtcagatgaacatttggaggacaaacaagcctaaatgtgttggatccattcgttaacggatcatgtacttcatgcagggtagattttcctagtcatgcaccccggatttctagcgaggataggtaggctcgattctaattgtgatccgtgcatgtgtgaagctactctattggtttgaacacgagtttccagctttagcaaaagattaattccatgcccactttcagcaactagatgttcatgaaaattcaagatatcctgggagggtctttgtcacatccggaagtgaagattattcatttaagcacatgcggaagaatcatatgaggaaagcttatttagatgcgaggatgacaggtttgagttggatatgcttcagctgatggaatatggtcacgaagagccagaagtgactgcagtatcaattgaaccaaatttttcttcgtatctttttagcgagtacttgtgtagtacgccagacaagaaattatctgaaggcgtctaccttggaaggaataagcggaaatattcaaataatgatgaaccttcagattctttgaaggcaatggatggtatcaatgttgtgaatggtcttgaatgcaagatatcctgcaagacctcgaaagtttcatatgtccttgatactgaagatttcttgttccggcttcggaagagaaggaaaattttgcggggcgggaatgtgcccgaccgtttgcagatttcatcaatatctgctgcaaaagtgcagcgcttcaataggttcctatccaaaccataggatcatttggcatacaaatgtatcgaaacctgttgctggggtcccagctgcttggcttgaacaatgattccatcgacgtcgcggagtcccctttcggaataacagatgggaagacatagggtaaatacagcaaagcgaagaggatcatgtaggcctttgtagtcagtctgttgttccgaaagcatagtgtatatatgtatttccagcatgattgttgcgaaagtctttttcaacaaaatcgatggtaggtctatttggggaaggatatactggagctgggattgtctccaagcataacaacgatgatgaaagtgaacaagggctgccgtctcgggctagaatagcaaatggagttgcagccaacactcaaaatggtttccatgatgcagatcgaattgcccgtagaggtgaagaatcattaaatgttacacttaatggaagagtgcatggtgctgcctctgcagacgaaacaccttcactaagcacacaaaatattgcttctactgagcgatcagcagagaatgcagctgttgttaggactgaacaacataaggcaaatttggaacttacgccaggcgtgaatgcttctagaagttctcatgatgcagttgaggtggctggtgaaggcaaggctatcaatgaaacattgccttctgctgtgggaggggaaacaggtaggttgggaccatcttttaatggcatcagtgagggaattaaagggcgcctaaataatgatggttctgcaccccatatttcaaaagttgaaagagaagagggtgaattatcgccaaacggagattttgaagaggaccattttgttcctttcgaagatggaacatctaaaggaaaggaagattctacaagcagaccattccatggtaggcctggggaagtggtaccctcttctgccgaggcagctggtgagaatgatgctgatgctgatgacgagggtgaggaaagtgctcagaggtctactgaggacagtgaaaatgcttcagaggcgggtgaagatgcatcgggtagtgaatctggtgatggtgaggaatgctctcgtgaagatcatgatgaggaagaagaggatatggatcacgatgatcaggatgcaaaagctgaaagtgagggtgaggcagaaggaacaactgagacacatgatgtggaagggggaatatcactaccactttcagaacgctttctgtactcagtaaaaccacttgccaagcatgtacctacagctttacatgatcgagagaagttctcacgtatattttatggaaacgattcattttatgtcttgttcaggctacatcagatcttatatgagagactactttcagcaaaaactaattctttcactgctgaaaagaaatggaggaattccaaggatacaaaccctcctgatctatatgcaaagtttatgagtgcgctgtacaacttgcttgatggttcttctgacaacaccaaatttgaggatgactgccgagctattattgggactcaatcatatgttctctttactttagataaactgatttataaagttgtgaagcagcttcaagctatagcaacagatgaaatggacaataagcttctgcaactatatttatatgaaaaatcaagatctcccgggaggttttttgacctagtttatcatgaaaatgcccgtgttctactccatgatgagagcatataccgatttgaatgttgctcaagtccgacaaggttgtctattcagctgatggaatatggtcacgaaaagccagaagttactgcagtatcaattgatccaaatttttcttcgtatctttttggcgagtatttatgtagtacgtcagacaagaaattatctgaaggcgtctaccttgcaaggaataagcggaaatattcagataatgatgaaccttcagattttttgaaggcaatggatggtatcaaagttgtgaatggtctcgaatgcaagatatcctgcaagacctctaaggtctcgtatgtccttgacactgaagatttcttgtcccggcttcggaagagaaggaaaattttgcggggtgggagtgtgtctgacagttcgcagttttcaaaaatatatgctgcaaaagtgcagcgcttcaataggttcctatccaaagcataggatcatttggcatacaaaatgtctcatcattgtatctaaacctggagatattgctgggaccccagttgctttgcttcttcagtgataatatgcaggagttggaagatggtgacgtcatcgacaattcgtcgcagaatgccctttttgaataacagatggggagatctatagggtaaatacagcaaaacgaagcgagcatgtaggccacagcagtcagctctgttgtgcggaaagatgtgtatatatgtattagcaacatgtttgttctgatgacctttttaatgcttttcgatggtaggtctgttccatcaagtatttaactaatcatcatttgttgcagttggtataggtcttctgttctttttttttttgccgtcgtttttcattgaggatgttgccaaaattaaaacctgtgtcaaacagttatgtagtcttgtcttggttaatcttacagacgccgtaatttctcagcctcttgagtgaggtgcttgtacaccctttcattaagcttttgaggcgtggttgacagcaataaaaaaaaaaaaaaagcggcctctcaaaaaaaaaaaaaaaagggcggcaaaagaaaagtgagctc

SEQ ID NO: 169209 - DNA, 418 bp, Zea mays
  Clone ID: MRT4577_85904C.1
atagggtgggttttttaaagttaaactgggtacacgttccttaccaaggtttggcggcttatatatagcacatgaaacaagagcccgtaagtttcgctaagtcatagctaatacggggccccggaagcaccaaaaaccttcggtggcgcggatgcatagctcacgctgctatccctcatgatattgcactggctggactgctccgagcggacaaagcctaatttaattattgtcgagcaatgtttaaacatccgaagcaaacaaaaaaaatgcaggggctgaagaaaaacggaaggcgcattcatcgagagtaggcccttgacaagaaagccatttactaacgtgaaggaagacgctgatggggtggcgcccgcatatggaggactcgaactcttgcaggtattcattgaacgctacg

SEQ ID NO: 169210 - DNA, 181 bp, Zea mays
  unsure (1)..(181): unsure at all n locations
  Clone ID: MRT4577_85905C.1
tctagatttacttctcctccccctccaacacnatgtcgatttcntaagagtcttcttgtgatcaannccanaaanagccacgatccatatctccacttctcatcctaaacacccatgcttcttcaagatacccacctattatcaagtctaccactgcctccacaacaccatcatcacctac

SEQ ID NO: 169211 - DNA, 496 bp, Zea mays
  Clone ID: MRT4577_85906C.1
aaaccgcaatggaccctccaacccaaaatgtttattgacaatgggaagcttcttttgaacaacagtggaaagaccattcttgttgtttttggaagggggaaggaaaaaatgccaaaaaaaaaaaaacccaaaaaaaaagggggggggggaaaccaaagggattttttttaccccttttttacttcccgcttcattggagaagtaaccccagcgggggacaaaaaaaaaaataaaaagagtttttcccaccccaggcaacggcggggggaggagcagcaaacccttggaccttggtttttttgtttttttcccctccctcctcctcctttgggtcctaatttataaaacttcaacggggcaataggggggggtctgaaacctaaacccgaaagccccgggggcccctttccccccgggggtaacaagaaacccggggcaggtaacaaaaagggggtaggggccggaaatccatttggcgaccttccaccggacgggg

SEQ ID NO: 169212 - DNA, 553 bp, Zea mays
  Clone ID: MRT4577_85907C.1
gagtaccagggcagcagctcgcctctcgtcccaccaaaatcaatccatccatccacccgagcgcgcatcgccaccaccgccgggcgcgggcgagcgcaaaccgatggcgggatcctccgccgtctacacctcctgcaggccgcacgcgcgcgccttcctcctgcccgccgaccagcggggcggcctgctcccggccgcggcgtggaggcggggcggcgcggcgccgagggcgagcctggtggcggcgcggacggcgacggaggaggcggtgtacgaggtggtgctgcggcaggccgcgctggtggaggacctgcaggggcgccgggcggcgcgggaggcggaggccggcaggcgccggtggcgggacgagcaggtggagcaggagggcgacgccgagctcggctggggcctcctcggcgacgcctacgaccgctgcggcgaggtctgcgccgagtacgccaagaccttctacctcggcacacagcttatgactcctgaaaggcgcaaagctgtttgggcaatttatgtatggtgcaggagaactgatgagcta

SEQ ID NO: 169213 - DNA, 2274 bp, Zea mays
  Clone ID: MRT4577_85908C.1
attgggtcactcgaggcctgaccgggtgtaccgtggtagttgtgttactggggaattccccgagttattatacaatgtgttaagacaaaaaaaaaaaaaaaaaaaaaaaaaaaaaaaaaaaaaaaaaaaaaaaaaaaaaaaaaaaaaaaaaaaaaaaaaaaaaaaaaagaccctttatccgcacctccgtatccacgcctcgcacttcataagattccgtgctggtctccctatttgtagcacgctccccctctagtcatctcctcaaacaaaaaccctagccgccgcgccgccccgctccctagtggtcctccctcccccaccactgcagctccgtcccggcggccccaagagttgcggcgaggatgaacgtgaagggcggcagccggattccggtaccccctccgggggccagcgcgctggtcaaggtggccgtgttcggcggcgccgccgtgtacgctgccatgaacagcctctacaacgtcgagggtgggcaccgcgccatcgtcttcaaccgcatccaggggatcaaggacaaggtataccccgaagggactcactttatgattccatggtttgaacgaccaatcatttatgatgtccgtgctcgaccgaatcttgttgagagtacttctgggagtcgggatcttcagatggtgaaaattggtctccgtgtccttacaaggcctatgccagagaggctaccacatatctacagaactctgggagagaacttcaatgagagagttttgccttcaatcatccatgaaacactgaaagctgttgttgctcaatataatgctagtcagctgatcacacagagagagactgtgagtagggagattaggaagatactgactgagagggctagattcttcaacattgctcttgatgacgtctccatcacaagcctgagctttgggaaggagtttactcatgccattgaagcgaagcaggttgctgcacaggaagctgagcgtgctaagttcattgtcgagaaagctgaacaagataagagaagtgcaattatcagggctcagggagaggctaagagtgcggagctgattggtcaagccatagcgaacaaccctgccttccttgccctgaggcagattgaagctgcaagggagatctcccacaccatttcggcctcagccaacaaggtgttcctggactccaacgacctgctgctcaacctccagcagctgaatgtatcgagcaagcagaagaaatgatgtcacaacgttatcccctttcttctgagtttgcagtcagtagtggatgcctttgtaccagacattgtgaggaacgctcggttttggatgtagtttcgccaatcttcctgttatgtggaacttgcgagtatttgctcaaaggcaagcaagctgacaggttttgtttaaacgtaactacaggatgagaaagttttcaataaggaacaaattctgttatgccaccaggaattacccctattgagatcaccgcgctgcagtatggccgagctggtggcctccgagggcaacgtgcggcgacgaccaagcggcgagacacgcacactcgtgctcgagactgcgccggcacccccctgcgcacttcgtgctgtcgcacaaggcggcggaggacacggaggtgggcgggtacctgatccccaagggcgcgacggtgaacttcacggtggcggagatgggctgggacgagcgggagtgggacaggcccatggagttcgtgccggagcgattcctgtcaggcggcgacggcgagggcgtccgtgactggcagcagggagatcaagatgatgcccttcggcgccgggcggcggatttgcgccgggctcggcatcgccatgcttcacttggagtacttcgtcgccaacttggtcagggaattcgatggaaagggtgcccggcgacgaggtgatgtctgagccgcgtcatgagaaaattcttaatatgccactaaaaaaaaaccatttgtcatctatcaaaaaaaaaacctcgagtttggcccattttgccattcagccaacctgctttgccaaacccacgttctaccaacaacccatcattggcggtgccctcttttttgcttatgagttatagttcaataatgaagttttttggatgatgtttgtggcttcccagaaataagcccgttctagattctattaaataaaaaaaaaaaaaaataaataaaataaaaaaaaaaaataataaaaaaaattaaataaaaaaaaaaaaaaaaaaataaaataaaaaaaaaaataaagggggggcc

SEQ ID NO: 169214 - DNA, 362 bp, Zea mays
  Clone ID: MRT4577_85909C.1
tgaaacgaacgattttcgtgtcgagaatcaattcgattcaaaactgaaatttaaattccgaaatttgcaagttgggaaacaagtcgcaactgcaagcgaaacattaaattagttaaacgagattaattggtgattgaaaagcgattgagtaattcaacagagattgaattgatttgattaacaaataattgaattaatcaaaatggaaaacatttgttttaattacaaaaacaatgaaatttaagctggatgacggaagttcttgccagcgtagatcgctttgtcgcccaactcttcttcgatgcgcaagatttggttatatttagccaaacgttcagatcggcatggagcttcggttttga

SEQ ID NO: 169215 - DNA, 496 bp, Zea mays
  Clone ID: MRT4577_8590C.1
ctccggcagcagaagccgccggagcaggccccgcagcggctcgcgagaacgaccctgagggccacgcgtagcagatcttgccgaaagacgcagaccggcatgaccatcaccctggcagtattgtagacgactcaccgtccgacattggcactgtacagaaatccaccacaagcaatgcttccagagggaacagcgacggataacctttcccagggaaggacctagagataagacagcatgctagaggtctatacacctacaaaaggagtcaacgactccacagtatcatcttaggatccggagcggaattattgatccatagctatccgcgctatttcgcaagtactatccgtacatgattacctacctataatgctatgcccgactgcaccctagggctatgcactgctcactcataaatgagtaaacagccaccagttgtagaccaagaggatgatcatgaaccgatgcacaactcgtagacagtttcatggac

SEQ ID NO: 169216 - DNA, 249 bp, Zea mays
  Clone ID: MRT4577_85910C.1
acccattggcaatatactttggggggtttatacctaatgctgttaggagtacaacctctcatagacagtatactgtcctacggattttcaaggtccgaccatggcacaccggacacctcgcaatctacgtcgctcttccggccgctggaccctacctccagctgaaccgattccatggacgactgtccgttaagcataaaagataactcttcccgaggccccctccagcagtctacatactttctaaca

SEQ ID NO: 169217 - DNA, 423 bp, Zea mays
  Clone ID: MRT4577_85911C.1
ccgcgtgcctagcgccggctaccgcgactgtggcgtcggcggctgggaccagcggccgtgagtcccctctctgaaagctccgtctgtcttcaccatctgtgtcttcaccatctgtgcaggttcggcgaaaacatcataaccttttcttccccaacaacgcatactcttagctagggtttcaacgcatctgtcgacgggagctagggcgtcgccgccgtcaatgtcgcggcactcccactctttttcgtcaaccgcatcgagcggagggccacctgtgtcgccgctttcttgcatttgttttgcttcgcatttcgaacaggtaacggtccatcatctccatatgacctccttgtatcctccttcgttccgtgatgacggcatacaaactgaataagattctgtatttcgaatacgattctggag

SEQ ID NO: 169218 - DNA, 407 bp, Zea mays
  Clone ID: MRT4577_85912C.1
aaataaaaaataaaaaaaaaaaaaaaaaataaaaaaaaaaaaaaaataaaataagggactggtgaaaaataataaaggagaatataataaataccacaattcatttaacttaaaagtatatccacatcatctttactatgtacacattttttttatcaacttttaattggcgggctgccttttcatgttttcctcttttctcacgattttttccctttacatctccttttttttttttccaacattatttccttcctttgtggcgtttttttacactcctgtgtaggggaaaatttcttcgcttcccctttttttgtttttcgcaacatcaccccttttttcgggtgtgtctttattaggtagggttcctccttttttcctttttatattatttcttccttcttttt

SEQ ID NO: 169219 - DNA, 224 bp, Zea mays
  Clone ID: MRT4577_85913C.1
cttctcgccactgagtcctcccgagtcccgagaaaccgtccacagcaggtgggaggcgagcacccatcgtcctaaccgccggcggaggcccgtggcgcagcgcaaaaccatctgcaaaaccctagcgcttccctagcgccgccggagcccggagcttgcacccacgtcatcgcgcctactctctttctctctctacgcagactatctggggtgcgccgcacccg

SEQ ID NO: 169220 - DNA, 1789 bp, Zea mays
  Clone ID: MRT4577_85914C.1
gtcggttgcgtctcttagcgaggatagtggcttaaatcgcagcaccactgcgaaacccgatggcgagtcgtctcgtcactgccgtttgatccctccacccgtttccagaagcttcgcggctccgtcatgcgtcccgccgtcgtcacggtgctcctcctagtagcagcggccgcctcgccggccgccgcactctactccgccggttcccccgtcctccagctcaatcccaacaacttcaaatcgaaggtgctgaactcgaacggcgtggtgctggttgaattcttcgcgccgtggtgtgggcactgcaagcagctggcgccggcttgggagaaggctgccggcgtgctcaagggcgttgccacggtcgcagcgcttgatgccgatgcgcaccaggcgctcgcgcaggaatatggaatcaagggatttcccactattaaggtgttttcccctggtaaacctccagttgattatcaaggagcaagagatgtaaagccgattgtagagtttgctctgtcacaggtcaagtcccttcttagagataggttgagtggtaaggcatcagcagggtcaaatggcaagacatctggaggctcaagtgagaaaagtgaaccaagtgcatcagtagaattaaattcacgcaactttgacgagcttgttgtcaaaagcaaggacctttggattgtggaattctttgcgccatggtgtgggcactgcaagaaattggcacctgaatggaaaaaggctgcaaagaacttgaagggccaagtgaagctagggcatgttgattgcgatgctgaaaagtccttgatgagcaagtacaaggtggaaggttttccaactattttggtatttggtgctgataaggagagcccattcccctaccagggggctagagttgcatctgccattgaatcctttgcattggagcagttggaagccaattctggcccggctgaagtttctgagttgactggcccggatgtcatggaagagaagtgcgcttctgctgccatttgttttgtatcattccttccagacatccttgattcaaaggcagaaggaagaaacaagtaccttgagctcctgctctctgtagctgagaagtttaaaaagagtccatacagttttgtctggacagctgctggcaagcaagctaatctcgagaaccaggttggtgtgggcggctacggctatcccgccatggtagctctcaacgtgaagaaaggtgcatacgctccactccgtagtgccttccagcgcgacgaaatcatcgagttcgtgaaggaggcagggcgtggtggaaagggaaaccttcctctgaacgatgcacctacagtagtcgcgtccgagccgtgggacggcaaagatggagaggtcattgaggaggatgaattctccctcgacgagctcatgggcgacagctcctcagcaaacgatgagttgtgattctgatgattcttggactgatctgcgtgtcgattagccagactgtaaatctgaggaactctgttttgaaaaatcattccttgagtggcataattttccaggctatggatgctagaatggattaaggagaactgatgtgatagaccttttctttaacgtttttttttatccctgaagtaaagtcagtttggacgtatatgttgaacaagtggtctacgctttagaacatgctcttctgcccacactggaatattggatagacagacccaaacttccagtcctactcccagaggacagaagacgaaacatactggagtagtggagcactgcaggcttttggatg

SEQ ID NO: 169221 - DNA, 702 bp, Zea mays
  Clone ID: MRT4577_85915C.1
atgcagggtaaccttgcgtgaacaaaatatttaggttgatatttaaaaccataaactttacaagcatactgcaacgactagtgttctattctatgtcaacaaaagcatgccgtgcaatcgtttttcttgaaattccctcttctttggtactacacaccctgtgccggatgctttttgccatgcagttttgtctggacagctgctggcaagcaagctaatctcgagaaccaggttggagtgggcggctacggctatcccgccatggttgctctcaacgtgaagaaaggtgcatacgctccactccgtaatgccttccagcgcgacgaaatcatgtaagctccctggtcttgttaattattataccttcgcttgtttcatgctctgattagaaacattattaacggaaagttatctcgtgcagcgagtttgtgaaggaagcagggcgcggtggaaagggaaatcttcctctgaacgttgcgccgacagtagtcacttccgagccgtgggacggcaaagacggagaggtcatcgaagaggatgaattctcccttgacgagctcatgggcgacagctcctcagtaaacgatgagttgtagttctggacgattactgtaacgtgatctagcgtcccgattagcctgactgtaaatctgaggaactttgatgttttaaaaactcgttaaatttcagatttcggatgct

SEQ ID NO: 169222 - DNA, 563 bp, Zea mays
  Clone ID: MRT4577_85916C.1
taagctcggaattcggctcggggagcaactgctctgtctagtttggcgctctgggttccaggtgaataactaacaaggtggtgggtctttacccacagcgcaaacacaatgcccaccttggggctctgttgtttgagttgcccacatactgcagttattctgttaggaatgattccctgggtgcctgaaagtgctctgacacgacacttgttactttgcaggccatctgtgatggcaaggaaaaagcaactatgttcacagtgaaatattcgtggaataggttaggccatttcagtagacattgcagttagttagcaagaaccacattgtctctttatttgttagcattaaacaaatttttttttgcaaattggttttatttttttgatgaagccgagcaactctgtccaaaaaggtttagtttgtactcggaaaccacaaagtagtctcaaagtattttagagggaatcgatattgatggcaaaagaaaatttgcagctatgcatttgcttctaacggttccctctttgtgaaacattatttttggtgatctaaagaaagca

SEQ ID NO: 169223 - DNA, 204 bp, Zea mays
  Clone ID: MRT4577_85917C.1
ttttgggggggtttttttatttttatctttttttataccgctcatgtcacaatatatcttgttattagcttttatcacaaaaccccacttcaaaaccaaggaacaacagcaccgcacataactgggttaaaaagagcccgagaaaggcgtataaaaagacaccgctaacaaaataaccctggggaaccttcacactatgccgct

SEQ ID NO: 169224 - DNA, 637 bp, Zea mays
  Clone ID: MRT4577_85918C.1
gatcgcagacggaaagccaccgataccccgacgtggtccatctcgcgagccaactccctctcggcttctatcgctgcctctctctcgccatcgctcgccgccctcatttatcatcgcatatcctccctcagttgttgcttcgctgcaccatgtccgttcccatggggctgaacaatctgacgtatgctgcacatctcatagaagccggaaagtgggtctcgctcatcatagcacggggattactgactatgcccagcataaatcgactaagcttgcacgcttgccggacatcagcataagtggcgatcacggcaacacagagaaagacccttgcgtctgcagagacggggaacgcatacagcaacatctattcaccatggtatatataggtgggagaagcgaaggacaaactaagggaattgactggagggacgaataccagtccatatgacaacggaagtgtcatgaaggacacgatcagcaacatgcgtgaggtcaagactgatcatggaagatgacaagtacatcgaaagactgcatgagaatgcatgcatagaagagatctaatcgtgtatcggaggaccacagaaagagctatcgagcgtgatcagttaacactggccatgatgtggagaac

SEQ ID NO: 169225 - DNA, 221 bp, Zea mays
  Clone ID: MRT4577_85919C.1
gctttgttccttcaacactctgctgaaattttttttgaactcaagacgtggagaattgttcagatccttagctgttcgcctgttcttgcgtgtaattcgttccttcagggagtggcgtctctatgtaaccgaagatgcttgaatcatttgttcgttcctagatgcgtcaaggtgtaaataagaggcatcgcaatcgcatttcgcagtagtttgtgtgaaaa

SEQ ID NO: 169226 - DNA, 459 bp, Zea mays
  Clone ID: MRT4577_8591C.1
ggaccaattaaacacctttattggaacaattcaattaatcagctacaaattgaaaaaaaaccttaggcgcccctttcgactttatatagcattcagctaattgggggggcaaacacaggaaaagttcgggaaaaacatttttataaaccccatgctagatagcctataggaacaatcccaacacaaaaaaggaacaatttgttcactccttaaccccaaccttggtaaaaaaatgggcatgcataaatcacccctaaattggtatttgggaaggctggggaaaagacatccccataattttgggttgggccggaaccaggcgtaggtccggcctcaacaccaggagtaggcccaaaaacactggcaccaggctggttatacattggctggccaaattgaataacctcctggttaaaagaaaccatgggatttttaatactctggggtgaaccaccaaaa

SEQ ID NO: 169227 - DNA, 575 bp, Zea mays
  Clone ID: MRT4577_85920C.1
attattttcattttcattttcggaagccgtttttacctttcctccgagtagccgctgccgccgccgctgacagggtagaaccaccgcatccgcgatgttctcgtggatcctccgtggctgccgcgacgagtgctcagccactgaccagctcaagcaggctcgtgatgtctttgtggcaaaagaggcagtcttgcaaaagaagatatcacaagagatggaacgtgccaaggagttcacaaaatcaggaaacaagcaagcagcaatgcagtgtttgaagaggaaaaggtactacgagagccaaatgaaccaggttggaagtgtccggttacgcattgataccaaggaaaagatgatcgctgataacatggtgaacaaataagacaaagtggaagacaagctattttcaatctgagcagccaccttaacatctgtaacagcaaggaaggaatggtggcgactttttaagatatctgtcatttgtatatatagtgatagccttgtttgttttcttttgtcatcgttggtgaacactctgcagtgatcatagtaacttcccagtctctttttgcgtagtg

SEQ ID NO: 169228 - DNA, 544 bp, Zea mays
  Clone ID: MRT4577_85921C.1
gttgttattttagttttctttgttgttaatccaagcatgctgttgcaatcattgcttagtgatggaaacacctaatagctatctaattcattaaccttgtacggttgtgctcagggttccaccacatggctaacttgtagctaaggggtaccattaaaagttagccatattgcattccattagtggcgatgaaattctccaggctggcatgcagcacaaagccgaccgtggcagatgttatcggtatcgatgtaggcacaccgaattcatgcatctctgtactggaatgaaaggtgtgtttttaactcgttcatcctaaaatctgtcatattttgttgtttgtaaatgggttgttgtatccatctgtagtagatttcatgcttcaatcgctgaaattagtttgggccagctgctgtatcaatatgtacttaatgtcatggtttgaaatagctacgatttgagtaaattctgtattcttttttttaaatgggttgttgtatgttatgcttgaatgctgaaatggtttgggttagatgttgtctcc

SEQ ID NO: 169229 - DNA, 261 bp, Zea mays
  Clone ID: MRT4577_85922C.1
tttattcttttacactccccccacccaaagcccgccattttataaaaggcgggggggacaacacacttcaataataaccttattaagcgcggccacgtgtccgccggtcactgccgtatcttcttgcacaggaagcaccctgtaggtctcggtaacacctgtggcattcaccaccaccgtattctcttttacaagtaccatccattctacttcatcaaggttggtatgcgttacttccataagctccgcaacaagtactac

SEQ ID NO: 169230 - DNA, 400 bp, Zea mays
  Clone ID: MRT4577_85923C.1
ccgactcgtgcgctcactcttgctattttctacaaaccacaatagtcgaggatcaatggcaccaacgatatgctgcttactgatgctgatacctctctatcgaagtgctgcttatgcacacactctggaacggtgcttactaattcgcactgccttacaacatgactcatcactattacctcaagacagttaccaccgagaaggacgagatgattaccattgctggaaacaacggccagacgccgtcgtaaattgatgttcaactcccttaccagtacaacatccagcttgccaagaacatgacttgtatcaagatccttcggaatctcaaagcacattggttgacccacggacatccactaggacctctactacctcattaataatgtcattacgatta

SEQ ID NO: 169231 - DNA, 237 bp, Zea mays
  Clone ID: MRT4577_85924C.1
atgcggaggaggaggatgaggactgatccgacttcggagaggatgacaggaaaaaggggtagtgatcaacgttcttgggcaagaaggtggcaatgtcgtgaagcgaacttgaactggaaacggatggacaagtatatttagagttcgatgtggtgttaacggatcgggtgtctgtcttagatgatataaaatacattatttttagtccaatttaatcattgtccaatttgcctaaaa

SEQ ID NO: 169232 - DNA, 414 bp, Zea mays
  unsure (1)..(414): unsure at all n locations
  Clone ID: MRT4577_85925C.1
tcccgtcctctgccgntactggctctctacatgggctccaccgacgagcggttcggctccccgtttccggatgcggacgtccccgcgcttcccggcctcgctatcagccaggacggccgccactgggcgcgtatcgagggggaccaccacaccggcgcgctgttcagcgtcgcggaggaaggggagaaatcccgagggtgggaagcgcgctgcattgtcgcacccaaggtggtcatgcacgcagacggggacctgcggatgtactaccactcgttcgacgaaatgtcgcagaggcatgcaatcggtttggctaggtccagggatggtatccgatggaagaagacggggaaggtgcttgagggggggcgtgctggttgctttgacgaatgtggggtgcaacatggacatgttgtg

SEQ ID NO: 169233 - DNA, 558 bp, Zea mays
  unsure (1)..(558): unsure at all n locations
  Clone ID: MRT4577_85926C.1
taacagaaatacatttgtttgccaatttttccacacaacaggtgagaagagagggaggggaggatagtttctatggcagaagcctagttcaggactaccacaaggaaaacatgcgtgagaacataacaagttcatgcacatcctaccaaaataggagacacaactcactaacgatatcagcacccacacaaacaagaattgtaaagaactccatgacatcatatcattagtcttcttaaggtggagcataatctttatcacccgcaatagagtttatgagctgattggccatcccagcattagcagctcgaaatagcaatctcgcaccctcccgcagcaagtcttgcggctcttttttgctcaacctgagcttgcctcgtgcggctgggctcatgccaaagctagctgcgccggcggcttcacaggtcacacactccgtgtagcacgccgaccgcaaggtactggggcatctgaccaacgcttcgcaccggacccttacctcgtcggccggcctgccctnttcgggcgaatcaatcgaaaatcaaaccctgcaacccg

SEQ ID NO: 169234 - DNA, 974 bp, Zea mays
  Clone ID: MRT4577_85927C.1
ccttgtcccacccaccacacccaacactacgtgtctgcgctctccccctttacgccggcgagagatcgtcgctggctcgctgcagcggggagaatagaggcagagagcatgatgagcgacgagcgggtgaaggcggaggacgctgcagatgctgggcctattccaggtgttcccgcgactcgccgccttcgacctcaactataccctctgcgccttctactggtgcgtatccttgactccgtcccactctctcttctcccagcgcagtttcgctgatgcgaggtctcccattgatgaccgccgctgggacctcgagccggccatagaggcagagagcagggatgagcgacgagcgggtgaaggcggaggcgctgcagatcctgggcctattccaggtgctcccccgcctcgtcgtcttcgacctcgactataccctctggcccttctactgcgagtgccggtccaagagggattcgccgagccttttcaggcacgccaggggcatcatgtacgccctcaaggagaaggggatcgacatggcgattgcttctcgctcccccaccccggacatagccaaggtgttcctcgacaagttggagttccagtccatgttcgtcgcccaagtatcaaaaatgggagtgacgagtgttttagtagagaacggggtgaaccttgacatgtttaagctgggtctcagtaactttgcaactaactgtgctgcctccagcagaaaggatgatgaataacctcgaggagaagtgatacatagaagaaaataccttcaaaacactgtactcgaattcattgtaatcaatttgcccccattcatgaacaatttattggtgaaagatgacctcacagactagcttttgaactgatgcaacgcctgtctaatatatttatttgaaggcaaatcactccatgtcattatttcacgtgcaaagcaatatattggtgcatatctgttttgtttt

SEQ ID NO: 169235 - DNA, 1228 bp, Zea mays
  Clone ID: MRT4577_85928C.1
taggggcctttttttttttttttgcaccaatatattgttttgcacgtgaaataatgacatggtaggggccttttttttttttttttttagtgatttgccttcaaataaatatattagacaggcgttgcatcagttcaaaagctagtctgtgaggtcatctttcaccaataaattgttcatgaatcgggcaaattgattacaatgaattcgagtacagtgttttgaaggtattttcttctatgtatcacttctcgaggttattcgtcatcctttctgctggaggcagcacagttagttgcaaagttactgagacccagcttaaacatgtcaaggttcaccccgttctctactaaaacactcgtcactcccatttttgatactgcttcaatattcctgttctcgtcatcaaagaacagcatggatttgtagggaatcccagttttcctctggatcttttggaaatgctcagtcttgtgagtccagctggagaatatttcttgggcgacgaacatggactggaactccaacttgtcgaggaacaccttggctatgtccggggtgggggagcgagaagcaatcgccatgtcgatccccttctccttgagggcgtacatgatgcccctggcgtgcctgaaaaggctcggcgaatccctcttggaccggcactcgcagtagaagggccagagggtatagtcgaggtcgaagacgacgaggcgggggagcacctggaataggcccaggatctgcagcgcctccgccttcacccgctcgtcgctcatccctgctctctgcctctattctccccgctgcagcgagccagcgacgaacactcgccggcgtaaagggggagaacgcagacacgatgtgttgggtttggtgggtgggacttgggccctcccggccaggagataccatgtcgatccccttctccttgagggcgtacatgatgcccctggcgtgcctgaaaaggctcggcgaatccctcttggaccggcactcgcagtagaagggccagagggtatagtcgaggtcgaagacgacgaggcgggggagcacctggaataggcccaggatctgcagcgcctccgccttcacccgctcgtcgctcatccctgctctctgcctctattctccccgctgcagcgagccagcgacgaacactcgccggcgtaaagggggagaacgcagacacgatgtgttgggttggcaggtgggagccaactcaacc

SEQ ID NO: 169236 - DNA, 438 bp, Zea mays
  unsure (1)..(438): unsure at all n locations
  Clone ID: MRT4577_85929C.1
agaaggngattggtgaggtgaagnagggagagtttggaggttttatttggaaaagggtgntggttttaagggagaaaaggttatgttgttaagaaggaggttggggggggggggggtatttttttgtgtttgaggnannagnagaagaggaagtatgaaagngaaagnnaaagaatagttttgatttggtgntatnaagnaagatggtggttgatgattggaagagggtatatttaaaganaaagagtaatttnngggaggttgnnattaaaggtttttggganatgtangaaagagagggttantgtttgtggttgtgtgattaanagtanaatgatgagaaganngtgtngtttgtgannnttgaaaaggttggtggattnttgnagnggatggatntgtgnngnaagtangnttttgggaagatgtttgtgatag

SEQ ID NO: 169237 - DNA, 511 bp, Zea mays
  Clone ID: MRT4577_8592C.1
cggggcaacccccgtgaggcctggaaccggtatggtacgtacagataggcggacaacacggcacaaccatgaaactaaaactaaaatcaaacctacccccagtgtacgcccgcctacgaccaataccaaacaaaaaacaacatcactttcccctccgttacacatttgcccctgacgaaaggttagcacactaagggaggtggggagatcagaccactcctcgttccccagctcactacgcccctgcctaagagaccctctgaccctgtagaactaggaggtaagacgttcgcgctccacgtcaaactagcatcaacttaccagtgattattacattgtggtcacgagtcccatgtaagagccgagtatatttcagttaattacatctcatctcttcgccgtaatcatcgtctcaacgctctttacctataggactacccccgccttcgtcttcgacgtaaccacccaccaggattagtagtccatggataaagtcacaactacgacaacc

SEQ ID NO: 169238 - DNA, 367 bp, Zea mays
  Clone ID: MRT4577_85930C.1
ccggggcggcccacgcctacgcattggtgtagaattgctgagttgatttaatccttgaaaggtggtggaacatgcagagccgggttaaaatgggggggaaaacatgtacacacatttttgcgatgcttctataaacttgggatacttggattagacaaaggggacttgtgggttttcacttggttttagggccggccctgtgggcgtgcgaactgtgcgctccccccccccccaaaaaaaaattatagggccccaatatctatgataatccataccgatattatagataaaaatattattttgcataaaatatttgttaaaatataccctagaattgcaaaaaccttgaaatagatatgttcttatt

SEQ ID NO: 169239 - DNA, 1841 bp, Zea mays
  Clone ID: MRT4577_85931C.1
ggcgtggtgagtgaggcagcggcgagcgagcgctttcaggcggtccgccacccccacataccttctctctcatttcgtggcaaaacagatttcttttccccaaaccttggatggcctgaagatgtcgcttggcatccagctggtgagacaatttttgctgtatacactgctgataatggcgattctcaggtttcaatgacaaaccttatatctggacaactggattgttactttcctgccagagaagcctcacacgaacggaatcataaataacataagtttcatgccttggtctgatgcatgctttgtaactggaggaagtgaccattgctgttatactttggtaataccaagattattcatggataccttagagagtgcataaggattgccgttcagaggctgttatgggtgttccttgccatatctgacctccatatcatcggacctcaacattgggatccacaaatattcatgaaacgttttgggctgattttggcgcttggcaaattttttgttgtggattaggaaccatgaagacctgtgaaattttcaggactttgcatcaatcgaagatacagcaaattcagcatgctttcgctggacctgcttcaccattgactttctctgtgggagaaccatgcagctcagcagctgaagagccccacggttggatgtttgcgcgagctgacccaaacttttccaccttttgagctgctgctggagtggtatggtaggccattcatccgaacactgtttggctcgatgtgttgccctggttatttctgggaaggaaacagtcaactatacacattatatccaacatattcagcaatgtattccccctgtctttttgcagtgaatatgccattgtaagatggttggttgacagggcatacggaagcgatattcagcttttggttagcagcaatcccatgaaaacctgtggacatttgtttgctcaaagcggaacttggcatcaattgaagaaaacagcaaaatcggtgtgctttgagcttgtttcactggccctgcttcgacattgaccttcggtgcagaagaaccatgctgcgagagagctccacagttggatgtcttgctccagttgatggaaacattcccacctgcttttttgagctgctgctgcagttctttcaccagaacactctttggctcaatgagctgcttcggttacttttgggaagagaagagtcagctatacacattatgtccaatattttcggcaacgtattccctcgtctgttactgctttttttttttttgcccttgttgggtggtttacagggcatttatctaaggccaaaatgtatgtgcgccctgcgtagttttatttttctcacacatgtctcgccaacaataatatatgtattgcttgtttttatgtaatgataatattttatcaagtattacgtgaaaaatgtaaagttgagtcactgaagcctttatttaagacaaatgatgacagttcatgccggagtcactcaaacgctttgatgcgccctgcgctatgttagccaaatctctcatctccacagcagcagccagccagccagagccgcccaccttatctatgtctatccttcgtctccatgccataatcagtgtaattggtgagggactagtgcatctataccatgccatgagctctcgcaatgtaaatctgtaaagccaatttacatttggtaaaatgcagaaaaaatcaacacaagatgaactttgcattcattctctgaatatcggcaattccaagatacagcataacatgaaccaggagccaacactctggctttttttttgcattcattctctgattagggcga

SEQ ID NO: 169240 - DNA, 432 bp, Zea mays
  Clone ID: MRT4577_85932C.1
ttcccggatcgacggatggatgcaagcaaactcatatccctaagaccattatatcattaagccagtccattctcttaccacaggtttcgggggaacccaaatgcgggtcacaacacttaagactacaatacctgcccggcaagtactctccgggcacgttcagcacactcaagctgaatatcccacccagcctaatggatgccaaccgcaatatcaatctacactccatgcgctacatatctcgatcgctactaccctgatggctagcagtaaccaggtgcaaaagctctgagaatatcagctgaggatacttcacctttacaagcctcttgatctagaatcatacaatatgcattcttcattggtcttcttaccaacatttcttgaatcatttatgagcaatacacaagaatgctttagaagtattattac

SEQ ID NO: 169241 - DNA, 836 bp, Zea mays
  Clone ID: MRT4577_85933C.1
cttctctctcatttcgtggcaaaacggatttcttttccccaaagcatagatggcctgaagatatagcttggcatccagatggtgagacaatttttgctgtatacactgctgataatggtgattctcaggtttcaatgacaaaccttatatcaggacaaggctccaggtagacagctgcgcttgtttgatgtcaggcttaggcaatctgaggttcatgcatttggttggaaacaagagagcagtgagtctcagtcggctctaattaaccagtcatggtctccagatggatggtacatgtcgtctggttcagcagatcctgtgatccacatcttcgacatcaggcatcatggccagaatccttgccagtctgttcaggcacaccagaagcgggtgttcaaagctgtttggcaccgaacgttgccatatctgacctccatatcatcggacctcaacattgggatccacaaatattcatgaaacgttttgggctgattttggcgcttggcaaattttttgttgtggattaggaaccatgaagacctgtgaaattttcaggactttgcatcaatcgaagatacagcaaattcagcatgctttcgctggacctgcttcaccattgactttctctgtgggagaaccatgcagctcagcagctgaagagccccacggttggatgtttgcgcgagctgacccaaacttttccaccttttgagctgctgctggagtggtatggtaggccattcatccgaacactgtttggctcgatgtgttgccctggttatttctgggaaggaaacagtcaactatacacattatatccaacatattcagcaatg

SEQ ID NO: 169242 - DNA, 712 bp, Zea mays
  Clone ID: MRT4577_85934C.1
gggtacctcgaggccggccgggatcttcgatatcaggcaccatggccagaatccttgccagtctgttgaggcacaccagaagcgagtgttcaaagctgtctggcaccgaacgctgccatatctgacctccatatcatcggacctcaacattgggatccacaaatattcatgaaagcgacatcacgtttttggtgctcagcaatcccatgaaaacctgtggacatttgtttgctcaaagcagaacttggcatcaattgaagaaaacagcaaaatcggtgtgctttgagcttgtttcactggccctgcttcgacattgaccttcggtgcagaagaaccatgctgcgagagagctccacagttggatgtcttgctccagttgatggaaacattcccacctgcttttttgagctgctgctgcagttcattcaccagaacactctttggctcaatgagctgcttcggttacttttgggaaaaaaagagtcagctatacacattatgtccaatattttcggcaacgtattccctcgtctgttactgctttttttttttttttttttgcccttgttgggtggtttacagggcatttatctaaggccaaaatctatgtgcgccatgcgtagttttatttttctcacacatgtctcgccaacaataatatatgtattgcttgtttttatgtaatgataatattttatcaagtattacgtga

SEQ ID NO: 169243 - DNA, 291 bp, Zea mays
  Clone ID: MRT4577_85935C.1
acggcatagcacaggtgaacgcgacgatagcatccctggctaataacatcattgtcgggggcgccgtccttacgagactggacgtcctcctgacgtgcgggcccccgaaggtgccactcggcccaaacatcaccaccaactacaacggcaagtggctcaccgctagtgccacctgctacggttagatcaacggagcactgcgctcctgacatcggctgtgcatgctggatcaacaacctgaacctgccacactacagcggactgacgttatgcgccaacgatgctatcttc

SEQ ID NO: 169244 - DNA, 1254 bp, Zea mays
  Clone ID: MRT4577_85936C.1
cggattggttactttatggcaagtggagactagaggaccttctctctcatttcgtggcaaaacggatttcttttccccaaagcatagatggcctgaagatatagcttggcatccagatagtgagacaatttttgctgtatacactgctgataatggtgattctcaggtttcaatgacaaaccttatatcaggacaaaggaaagttactttcctacccgagaagcctcacacaaaaggcatcataaacgacataagtttcatgccctggtctgatgtatgctttgtaactggaggaagcgaccatggcgttatactttgggaagacaaagatgatttatggaaacccaagagagtgcataaggatttccattcatccgctgtcatgggtgttgctggaatgcaacagaaaaaaacaatattatccgtaggctgtgacaagaggataataggatttgatctctctgctggaaggacagagttcaagaacctaattgatagcaaatgcatgagtgtgttagcaaacccatgcgattgcaacttatacatggtgcagacaggggctccaggtagacagctgcgcttgtttgatgtcaggcttaggcaatctgaggttcatgcatttggttggaaacaagagagcagtgagtctcagtcggctctaattaaccagtcatggtctccagatggatggtacatgtcgtctggttcagcagatcctgtgatccacatcttcgacatcaggcatcatggccagaatccttgccagtctgttcaggcacaccagaagcgggtgttcaaagctgtttggcaccgaacgttgccatatctgacctccatatcatcggacctcaacattgggatccacaaatattcatgaaacgttttgggctgattttggcgcttggcaattttttttgttgtggattaggaaccatgaagacctgtgaaattttcaggactttgcatcaatcaaagatacagcaaattcagcatgctttcgctggacctgcttcaccattgactttctctgtgggagaaccatgcagctcagcagctgaagagccccacggttggatgtttgcgcgagctgacccaaacttttccaccttttgagctgctgctggacagctggagtggtatggtaggtcattcatccgaacactgtttggctcgatgtgttgccctggttatttctgggaaggaaacagtcaactatacacattatatccaacatattcagcaatgtattccccc

SEQ ID NO: 169245 - DNA, 501 bp, Zea mays
  Clone ID: MRT4577_85937C.1
ggtgtatccttagtctgtgtcggttgcgaagatggctgacgaagaattcgagtaccaggagaacacggagggtggtctgattaccccctccaccgccggtgacatcaagaagaaccagttcatgttgatcaagggcgcgccttgcaaggtgatggacaagtccacctccaagaccggcaagcacggtcacgctaagtgcaacattgtcggcatctgccagttgaccggcaagaagtatcaggatgtgctgcctgctcacgccgctgtcatggtgcccaagattactcgtactgagtatcagttgctggacctgactaagagtgatgatggaggaggcttctgctcgctgcttgacgagaagaacaacaccatcgagttgccccttgaaggtgaagaggccgagaagctgattgccgactacgaccccaacaacaccgatgaggatattctggtcgctgttctcgccgttgccgtccttgatggcggtgagactgggtgagc

SEQ ID NO: 169246 - DNA, 265 bp, Zea mays
  Clone ID: MRT4577_85938C.1
ccggaagcccggctcatgaggtcttgtctgggacccaccggactgtcaagtggaacttacattcgaagacacaactcatagacattttaattataaaatttagtggaaattgaatagtgcactggccggtgcaccagacatcaacttcagcgggtctctctacgggcgagcgtcgggcaccaacggctagctgacgtagccactgtcaggtgctacataggaaaaggaaaccgacccattagattgtcgagcgaacgttgcttga

SEQ ID NO: 169247 - DNA, 182 bp, Zea mays
  unsure (1)..(182): unsure at all n locations
  Clone ID: MRT4577_85939C.1
gtaagcaccaccgaaaaccacagcaaaccctaagcgccaacccacccacgccacccaaactcgcttcaagccgcnnctccgccgcgcgtaccaagcannggtggagaacagganntgccggctggccncggcccctgcgctcnngcggacgcgcgaaacctcttcgcgtcgccccctttccg

SEQ ID NO: 169248 - DNA, 375 bp, Zea mays
  Clone ID: MRT4577_8593C.1
agtgagtcgtattaaaaagtgcggcagcctggaggtccttccctctcgcgcgatgggccaggctgttgttgctcaaggttggcatgtcctgttagggctgtgttggacgctgtcaaacgggtcctgtgcaagatggaacgcgtccagtcctaggacgtagacatcatgggacagaaggtcaccgtgaaaggcaatgtgacacctgacgccgtcctgcaaactgtttccaagactggcacgaaaacttcggtctgggaggctgaggccgtgacaaatgaatcccgccacacctgccggcgccatcgcctgacacgttctaatatctggaagtgcccagcaaaaaaatgttaatgtggttagcctgggatctgttaa

SEQ ID NO: 169249 - DNA, 209 bp, Zea mays
  Clone ID: MRT4577_85940C.1
gttattatatcgaacgatttccatccctgcgttttcttttttttctcggaccccggtaaaaaaaagattcctctttgggtcgctcacaaggggccccaacccagttggggggggggccaaatttttttaccccccggtggaccatcaccattttctttgcggtcagcgcggtttggtttttggaattacccgcctgaaaaggttgcacc

SEQ ID NO: 169250 - DNA, 370 bp, Zea mays
  Clone ID: MRT4577_85941C.1
gcaaagccaaaaagattcccttgcaagagaaaccggtttcaggacagggttcacgaatacctttttactgaaacaaacccatatcacgggccacagtttttttccgcaacatacgaggaaaaaccaccaacaaaattggtgcctttggtcaccctaaactcattagcttttgcctgacatttcaggcttcagcaatttgggaactttaaacccagtcaggttttccttaccagccaggtccgcgagctcaacaatggactgtttttgtttgccggcatttttgacgaacggggcgctagtattactattttaaacaaaaagtttgccggctgggctaccaaaaacgggtttgggagggttttggtttttg

SEQ ID NO: 169251 - DNA, 256 bp, Zea mays
  Clone ID: MRT4577_85942C.1
actgcgaaaaaaagctggggcctgtaacttctttaattggttcaaagcattgcaacctaagcggcaaaacccgaaaccggccttataagccccacttattaggggggtccaacacaaacgataagcgcgggggcgatcaagaaagaaccaccgcatgtcgaagccctttaaaagcaagtgtaagcacaccgggcctcccaaaggtttttacccaaaaaaaggcccccttaggcagaaggttttttcgacttgaggg

SEQ ID NO: 169252 - DNA, 134 bp, Zea mays
  Clone ID: MRT4577_85943C.1
ttttgcttaagcttttagtaaaagttggccatgttctttggttaaaaaaataactttggtacattcagatggactctatgtcctagctgttttatatcatttattgatcaagctccagccacaacaatatccaa

SEQ ID NO: 169253 - DNA, 138 bp, Zea mays
  Clone ID: MRT4577_85944C.1
gctatggtcaagtgcgccctggttgaagcaaggggcgtatccgtctccttgttataaagcgcggccatctcccgtgtctggcttgattgggttctggcccacttaatgaaagcccacgtgtggtctcctgtgtgaaca

SEQ ID NO: 169254 - DNA, 649 bp, Zea mays
  Clone ID: MRT4577_85945C.1
ccctggtcgcccacttccctggtgctcgcccttgcacttccctggccggtgccctctatggtcgagctcacccctgcagggagcccctcccatggcgcctagtcctcttcccatgtcgagctcgcccaaccaatcgtctccatcgcagcacgcacgtcattgcccctacccccatggtcggccaacctcgtcagtgagcccctggcgctaccctgcagctcgccctcaagcctagggtctcgctgttttcctttgccccacgcggatgctgtagccgggctatgtctctccctgtcatagcaccccgcaaatgttttgttcatcaccgattggataggagctccgaacgcgagccatagacgggagttgatgccaccgggcgatgaatggtcgcatcctcaggacctcggcgtgcaacagcagcggtaagaactcgcccccttcctcttcggtggtagtctcacgatcttcctccgcagccattgaactttaaaatgagaaccaaaagcacaagagaaccaaaagcacaagagaatcaaaagcacaaggtttctggcctccctattatgggattccacggagggactcctctcagggataaaccaattggctgtcatttttcatatcgcctacttcaatagcctacaca

SEQ ID NO: 169255 - DNA, 867 bp, Zea mays
  Clone ID: MRT4577_85946C.1
aataataatataataaaaaataatataaatgagtaccaatcaatatttcatacataagtgtactcttaaatccaaaccaaaacactgagataatcttgtaattagccaaacaatatgtgcaagtgtggaatacagtgtacactagattgatttgcatcttgtcaaaaccagattgttcaagggatacatcggttgccgctgctgcactcctcctaccgccgatgttccatgactccattcttgctggcctctttctcccaagcatttcaccaaacagttcaagtgcaaatgttagatgtgtgatgactccaactatagaaatcaagcagcgttactactaagaacgccattgtatcttctcagaaggtcattgatatgccacagtagttgcatacacaattcgattaatgccttttatcactctatatctgtttttccggcaagaagagggtttggtaatatgaagatgcatggaaaaagaaaacatcattaaggaagcatatgctagctattaattctccaacttacagaacaagatataaaattacctcacagtatttccagattggttctagtggcatctatatgctaagtgccaagctctcatttgagttacaatgatctcagtttccacaacctgtagatattaaaagaccataaacctgtcagtaaaaaattctatgttgagattaaattttcttccaaaacaaattacgacatcaaatgttatacactatgttaacaacaaaacaattgttctacactaatgaaactcttgataggctgccaattatcaaagcattatttcttacacatatcgtaaggccaaatgattcatctcattatatatagtattgtatatgaaat

SEQ ID NO: 169256 - DNA, 473 bp, Zea mays
  unsure (1)..(473): unsure at all n locations
  Clone ID: MRT4577_85947C.1
gcgcgggctncacgcatacaagcggcggntgcggntgccagccaccggcgacggttcatctaccggcggcggtgcatctgccacctacggttcacctgccacctccgtttcttntgcggccatgtttgcacctnccnccgccgggggagagaaaaaaaaaacnnnccatgtaccaccgacggntcatntgccgncgccaccatgccactaccctactnaaccggccggggctnagcctcatgggnaggcacacccatgcccgtgccaacagccgnatccaagcccgggccggcggnagggaacctgnggggttggcagcaccccgatcctgggccagtgcggcgagtttttggggcattagtgcaggccgacggggacgccctattgcttgggtaagtgccagtcggtgcgggaggggggttggcagcagtttagggtggtgggggnggaggagcggttccaggcgatcttgg

SEQ ID NO: 169257 - DNA, 1663 bp, Zea mays
  Clone ID: MRT4577_85948C.1
aataataatataattaatataatatagatgagtactagtcaatatttcatacataagtgtactcttaaatccaaaccaaaacactgagataatcttgtaattagccaaacaatatgtgcaagtgtggaatacagtgtacactagattgatttgcatcttgtcaaaaccagattgttcaagggatacatcggttgccgctgctgcacccctcctgccgatgttccatgactccattcttggtgacctctttctcccaagcatttcaccaaacaattcaagtgcaaatgttagctgtttgatgactccaactgtagaaatcaagcagcgtttctactaagaacgccattgtatcttctcggaaggtcactgatatgccacagtagttgcgtacacaattcgctgtaagtcaaaaccagcaaacaaaagtaataaacacgcaaagaaaaggtgaagttgtgtgagggaaagcacttgcttgtaacaaacttacaataatgggaaaaccctgacaccagtcagcatctatatagacttttgaagcattgattattaaaaaaatactagtacatttatgtagtacttacattaatgccttttatcactctatatccgtttttcctcacagtaattccagattggttctagtggcgtctatatggttaagtgccaagctctcatttgagttacaatgatctcagtttccacaaccctgtgtgtgttgcaatcgttgcagtataaatccttgcgctagaggagggacctcggccaacatttcttgtgaagtaaaaagcaaggtactgctaatgttgtaggctattgaagtaggcgatatgaaaaatgacagccaattggtttatccctgagaggagtccctccgtggaatcccctaatagggaggccagaaaccttgtgcttttgattctcttgtgcttttggttctcttgtgcttttggttctcattttaaagttcaatggctgcggaggaagatcgtgagactaccaccgaagaggaagggggcgagttcttaccgctgctgttgcacgccgaggtcctgaggatgcgaccattcatcgcccggtggcatcaactcccgtctatggctcgcgttcggagctcctatccaatcatgtcataaaccaaatcgatatgtgtaagggcgatgacgatttctggtttaagctttttgccaaacacctagagcgcgccaaatggactttcctcttccacgacaaaccggtgatgaacaaaacatttgcggggtgctatgacagggagagacatagcccggctacagcatccgcgtggggcaaaggaaaacagcgagaccctaggcttgagggcgagctgcagggtagcgccaggggctcactgacgaggtcggccgaccatgggggtaggggcaacgtcgtgcgtgctgtagggacatagaagcttgggcgccgaggaccaaacttgaggaaagggaaggggaacacagcacctgcgatggagacgattggttgggcgagctcgacatgggaagaggactaggcgccatgggaggggcaccctgcaggggtgagctcgaccatggaggggcgtcggccagggaagtgcaagggcgagcaccagggaagtgggcgaccagggaaaaaatggcccacgcgtccgcccacgcgtccg

SEQ ID NO: 169258 - DNA, 781 bp, Zea mays
  Clone ID: MRT4577_85949C.1
ccgctcaggcggcgggcggggaccccgcatacggccaacgcacaacacagcgttgaggcttgtagccttgtgggtgagagagctagctagctgaagcaacagcaaggcgaagcaagctcgctagcaaggatggggtccttgccggcggcgggcgagaggccgcacgccgtgatgatgccgtacccggcgcagggccatgtgacgccgatgctgaagctggccaagctgctccacaccaggggcttccacatcaccttcgtcaacaacgagttcaaccacctccgcctgctgggcgcgcagcagtcgcaggccgccgtggacaggctctgcagcctgccggggttccggttcgccaccatcgccgacggccttcctccgtccgacctcgaggcctcgcgggacacccccgccctgatctactccaccatgaccacctgccgtcccaggttcaaggagctcgtcgtcaagctcaacgaggaggctgaggcctccggtggcgccgtgccgcctgttacctgcgtggtggccgatagcatcacgagcttcgccattagcgtggcgcgtgagctcggcctccgctgcgccgtgctctggaccgccagcgcctgtggtttcatgggctactaccactacaaggacctactcgatcgtggaatcgtccctctcaaagaagaggctcagttgagcaatggatacttggacacgatcatcgactggatcccggcgatgcccaaggacctgcgggtgcgtgaactcccgagctatttgcgcacccggaccc

SEQ ID NO: 169259 - DNA, 265 bp, Zea mays
  Clone ID: MRT4577_8594C.1
tccgaaaaaaaaaaaaaaaaaaaacgatccataataatttttccaacaaacaatatcaataaaaggggggaaaataaaaaggggggcggggaaatcgggcttccattttaaaggatccaaatttacatactcgtggctgcgaagaccttggttttttattaatttcaccctaaatttaatcaacatttcccctttttttttaaaaacgtcttcatacttgaaaaaaacccctgggccctttccccaacattaaattatctttttt

SEQ ID NO: 169260 - DNA, 1133 bp, Zea mays
  Clone ID: MRT4577_85950C.1
gatcctcatatgcactggtgctctcgaggccggccgggccttcttctttccctaatccccatctccccttctctcgctgctggtggcctgcgaatggcgggcggaagcggcgaggcggctatgtctccgccgtcctctagtgccagcgggaagcgcgggcgggacccggaggaggacgtgtacgtggacaatctccattcccacaaacggtatctcagcgagataatggcatccagtctgaatggactgtctgttggggattcactgcctgacaacatcatggagtcccctgcaaggtcagagactgcttcctgctacagggatgagatattatcccaatactcaccgatgtcagaagactcggatgattaccggtgctatgacactcaattaaaccccagtgggaatcatcctgatgcgatgatcagcccttcaactagcccaatgtcatctcctcatcgacaccagagaccacaatcttctttgttaccttcaaacccataccctctcccaagctgctccctttcgtcagtagtctgctctcatgctcggcgtggctccgataatgaaggccggttcccgtcctcgccaaatgacatgtgccatgtagcagatttgaggcgaacagcactactgaggtcagtgcaaatgagggtgcagggaccccattcgtatgacctatcattcggcatcagacaaggacaagatcatgcacatgagcatgaaggggaacatgaccatgagcatgaacatctagaggacttggaagggacagaaggatcatcttgcaataagtcaatcgttaacgaagtcacgtacaaccagagacgtgaccatgattttggtcggtcagagcacgagatagattacatcaacaacagcacatcagatgattgtgtaagtgatctaaaatttaagcaagaagataagagccatagtaaatttgatatccctatgcacaaaaattcatagcacatggaacatatgtgttagttttttggattataactctacttaacttcattgtattcttgacggatgccttatctattgtccgtggttttagcatcagcgttctgaatagcgacattgtaatatttgagtgaaattaacctttggattgttgcgatgcc

SEQ ID NO: 169261 - DNA, 318 bp, Zea mays
  Clone ID: MRT4577_85951C.1
acattcactcgaatgagtgcagctgggatgacggtatggacactggtcatgcactgagatctgtgttgattgcaagcagaaattggactggcgtagctatctactgcgtcgcaccggacgctctccaccgtgtgccagatcgtcacatgggtccactgccacagtgtcgatgatcagttccgctcaatcatcacgtagtctgcataccgtatcgctgatactggtgtctacactagccgtggcaccaagctgattcgttgaactctacggatgcgtctgcagcgtgcacttcaccgacgtgatgacggaggacgtcga

SEQ ID NO: 169262 - DNA, 537 bp, Zea mays
  Clone ID: MRT4577_85952C.1
gggagtcgtgatctgcacagtttccaactgatctctactctacgcgatggggagcctgtcctattgtggcacttgtggtatctgccatcgtaggaccatgttgccatatactttacatactcgggcaggccataccctcgtggagcgctgatccaaagcactcagcttacacgagtgttctgttgtgtgatgcatgaacttgtctgatccatagctcttgcaatgtggctgtgggcaagtggcaccggaggtcttcaccgaagcaagaacattcaccacgcatggactacactggccctactgtgcaaaaccgactgttcgaaggctccgttttcctagcacttgacgctgctgtctactggctcgattgccaaatgctggccctaaatgcaagggctgactaccatgactagtatgaccgcagcgaagaatatggccagatgtatgctgctcaagtcgaagaactatcgaaagtaagatcctatgctgacatgctcggaagagttctatgattacagtatatacactacattatgc

SEQ ID NO: 169263 - DNA, 394 bp, Zea mays
  Clone ID: MRT4577_85953C.1
cggaccgtgggcgggacgcgtgggtagaaaatgatgatacatcaaatcgacaggctcataacctctctgcaagggaaaattggaaatttaccactgatgaagatagcacaggaggggcattttcaatgtccaatttatcaacgaagcttcagaaccttgttcaaatcctcactaattctgtagaggtttcagcttcagagctctgtgcaaagtcagctcttgatgttcagtcaagtgaagcattgctatcagcccttcagtgtctggatctaatctgtaggatatttgttcatgaggtgaagaaacctcagttgaaattctccataccaaaaaatcagcatgggccggactggttgagaagttctttactggtacatctaaataatttatgggg

SEQ ID NO: 169264 - DNA, 297 bp, Zea mays
  Clone ID: MRT4577_85954C.1
actgaaaaaagcctgcagatgaacaaagactgagtgaaacgagtgaatggatttaacaaaccaaatctaaggagaaactggcaaggacacatggagcagactaaaatgttacacaaaaacaacttataaaggctcgtgtcaccaaaaaaacacacagtaaagggcgagtaaaaagaagcatataacagtcacaaaaacgaacaggatcttaaagggtaagcgatacatgttaccaaccaacgggaggatgctaaccaaatagtatgcgcaggtcaaaccgtatattggattgcaaat

SEQ ID NO: 169265 - DNA, 180 bp, Zea mays
  Clone ID: MRT4577_85955C.1
cttaggggtaatatctgctgcaccggtctcctcctgtggctcctccttcaacttatgcctccttttcctcctcctcctcctcagttcaaggttaagttcttccacaagcaaggttgaagggttaatccaggtcctttgaatcaccataagccttggttttggcctccttttcctggcttt

SEQ ID NO: 169266 - DNA, 313 bp, Zea mays
  Clone ID: MRT4577_85956C.1
actttctctggccctttcctctcatgcttttcccatgtttcttggctcgaagcagtccccactagctagaggtctgaccatggaatgatggaattgggttgataaggacgaggaaagagtgtcacagaatatgattgcttgtgtcgtggacgacgatgatcaccgctagtaaagctagatgcatggtcgactgttgcactgtaatctataaaaataaaatactgtacaactagtagaagttgatattgcttatatctaggacactgctaacgcactctcccaccatgaaactaacttgttaacaaccattaat

SEQ ID NO: 169267 - DNA, 243 bp, Zea mays
  Clone ID: MRT4577_85957C.1
ccacgcgttcgtcacatctagcgttggttttggagctcgtgcaaaatacctggggattaggtcagttataaaaatagccaaggtgactgctgtgcacacttaaatcgtggcgcatcttccgagtcatggcgttcacgcatctacaaccgcgacacttcagactaacgtggacagccttggccgaactaaccatcgataccgcaattttaccgacagtctaatcctaaacgagtgccgttaccc

SEQ ID NO: 169268 - DNA, 313 bp, Zea mays
  unsure (1)..(313): unsure at all n locations
  Clone ID: MRT4577_85958C.1
caactagcaacatagaaagcacaatagtgtaccaacaatggcagccaaaatatttggcctccttatgctccttggtctttctgcaagtgctgctacggcgaccattttcccacaatgctcacaagctcctatagcttcccttcttccccgacctctaccacgggtctcggatggaaaccattttaactatagaccacagcaccagtggtctacttatacctgtctcacatataccatacagagtacttggcattatgccaaacataggcacactcacactgtctncaacctgtgctcttagacacagtctcat

SEQ ID NO: 169269 - DNA, 465 bp, Zea mays
  Clone ID: MRT4577_85959C.1
gccggccgggctggagatctcccgtgcttccctttccctcccccattccccccctccctccgggctctgcctccgctcaccgctcaccgctcatgggcgagtaccaccgtccctaccggggcgacctccgctcgccgccgtcctccgtgccggacccggccttcacgcacgccaacggctacttctcctcctccggtggttcaagggcaagtgctccgagatcttccaccatggatgttgcttgatggctcattcttgttgaatgatgagtgaacagcagctttcctatggcagatgagaaaaacagttctatgaccggtcttggaggaaataaattggtgtagtagctgggatactgtggttccgtgggtaccagcagcggtgttaaatgcttctgtgtgcaaggcaggcacataataatgtccagcagaggcacctcaaaaaaaaaaaaaaaaaaggccccta

SEQ ID NO: 169270 - DNA, 722 bp, Zea mays
  Clone ID: MRT4577_8595C.1
actgcactaactatagatggagaggtgatgcttgggggagaggagagcacgggaggcttccacgcgtccgtgataagagtagtcacatggtgcccctaaaggttgagcttctagctggagaggatattgttcaggtatcatgtggaggaacacattcagttgcgctagctcgagatggccgaatgttttcttacgggaggggcgaccatggccgtctaggctacggcaggaaggtgacgacgggccaccccatggaattgcccatcaacctgccgccgctcagcagcagccgcgacggtcggtggcaggcgaaatacgtggcttgtggcgggcggcacaccctcgctattgcggagtggacagaggccactgattgatcaccgtttgtggaataagcacaaggccggtgccaacgggcgtaggtggggctgcagtcgatggcgctgccggccgccgcggtcggtacttaccagaagtagttcagtaccgactgccattgccatgtgtcgtcttttaattagttgatgtccaataaattcataagtttttttttaaaaaagtctaagtaatctgaaaaggtatttatgaattatgtaacttttttactttttggtattatgtattttttatgttttatgagttatgtaaattttatttatgatttataaattacatactgtgtatttatattcatgaactatatacttttttatttgtttact

SEQ ID NO: 169271 - DNA, 102 bp, Zea mays
  Clone ID: MRT4577_85960C.1
gactactataggcgattggcatctcgagccggcgggaaccctagtgccagtgcttgactcctccgcatttatgatctcctggttgcggtccccgtgaacatg

SEQ ID NO: 169272 - DNA, 438 bp, Zea mays
  Clone ID: MRT4577_85961C.1
ggaaagccctcaaacccctggaaaaattttaaattacccctttccttagttaaccaccaaaaagggttttttttaaatggggggttggggggggtacccccaagaaggggggggcaccaccccggaaaaaccacttcaatggggtttttttggaaaaaaaacctaattttccggcaaaaattttggaaaaaggggtttaactttaccccaggaaaaaatttttttcccccggttgtttgccccgggttccccaaaaggcccccccaaggggaaccggggaaaagtttcaacaagggggggctgaaaatgggggcccccccccccccaaaggcgttctttgtttgggagaaacccttctggcggggaaaaatggggcccagccggggggccaccccccatttaaaaaaggaggaaaaggccttgtttatcttgggaaaa

SEQ ID NO: 169273 - DNA, 513 bp, Zea mays
  Clone ID: MRT4577_85962C.1
gggcgattgggaccctcgaggccggccggggaaatacccggccgggaaaccagcgcccgtcaagttactcgtttaaccatcccaccttgaactaccgccaagatgcctcaagaggtcgctgatatcaagaagttcatcgagatctgccgtcggagtgacgcctcctccgcccggatcaagaagaacaagaagaccaacaacatcaagttcaaggtccgatgccaaaagaacctctacaccctggttcttaaggacaccgacaaggccgagaagctcaagcagagcctcccccccaccctgcagcttacagacgtctccagcaagaagaagtctgcttaaatgaaggtggtttgaaaacgggtaactctggtagcgggaggattcacatggaatgggcgtcttgggaccttgcatttcatcatgtgctctgaaaggaggatactcggatgagtccaaaaaataaaaagaaccgattcgagccaaaaaaaaaaaaaaaaacccgcggccgcggcc

SEQ ID NO: 169274 - DNA, 352 bp, Zea mays
  Clone ID: MRT4577_85963C.1
gggcgacacacgcgtccggcaggacacaactaccattaaggtccatagtatcctgctatgagcccaagacctaaacgggggtacgggggcagtgtatgaggagtctagcatccactgaaatgacataaccgtttgtgctggcttaagcacctcctggcggccccgtcgaagaatagggcaccatcgtacctacccataagatcaggatgtcatctattgtcaacggacgttgcttgccctcttccgaacctccatgcatacaggtgctggaacacggtacctccagcagaacttgcctgtataataagcaattctacaagcctattatcggagatcatctgtcaccaccgta

SEQ ID NO: 169275 - DNA, 1498 bp, Zea mays
  Clone ID: MRT4577_85965C.1
cctccggccggggaggggtggcgaattgcaattgcagaacggaattccattccagaaccatccttcgctcgcccccgccgccgcgctgccgcggccatatacggcgaaagccctattcgtgcccgcggccgtggatagataggtcagtgacgattgagaaacccgtagtcggagcagaggaggggtagaggatggtgttcggtcaggtggtgatcggcccgccgggctccggcaagaccacctactgcaacggcatgtcgcagttcctctccctcctcggcaggaaagttgcggttgtcaatttggaccctgcaaatgacgcattgccatatgagtgtgccataaacatcgaggacctcataaaactcagtgatgtcatgtctgagcattcgcttggccctaatggagggcttgtgtattgcatggattacttggagaagaatattgattggcttgaagaaaaactgaagccttttattgaagatcactatctgttatttgattttcctggtcaagtggaattgttcttccttcactcaaatgccagaagtgttattaataaactcatcaaaaagatggacttgaggcttactgctgttcaccttattgatgcccatttatgctgtgatcctggaaagtatgtcagtgctttgcttctttcactatcaacgatgctacacttggaattgccacatatcaatgtcttgtcaaagattgacctcattgagaactatggaaatttagcattcaaccttgacttctacactgatgtccaagatctttcttatttgcaatatcatcttgagcaggatccccgctcagccaagtacaggaaactgactaaggagctctgtgatgtgattgatgattttggtttagtcaatttttcaactttggacatccaggacaaggaaagtgttggcaatcttgtgaagctgattgacaagagcaacggatatatattttcttctattgacagtagtgctgttgagttcagcaaaattgcagcggcgcctcttgattgggactactacagaacagcggaagtgcaggagaagtacatgaaagatgatgagtttgcgcaactgacaagcaggatgcaatgaggctggcggtgccgtcccgcacccccactttggtagcactacgggtgaaccacgacagtgtggcacgttgaacttcggttgccagaacgatgtgaaacctgtctaaattcatgtagctcagttgtaggtgtttactgaagctgattgctgtagttgcctgatcttctgggagtaccctttgggcagtaaaaaaatgcacttgtcaccggtgaccaaccggtcatgtcctgttttgtttgttcgcttcaacttcgaactgcatcagctacaatctttagagacaaaatattgtagtgtttggactactgcagttgtaatctttaaagacaacattgtagaagcagtagaaatcagtatggattaaagctaaaaaaaaaaaaaaaaaagcggcc

SEQ ID NO: 169276 - DNA, 568 bp, Zea mays
  unsure (1)..(568): unsure at all n locations
  Clone ID: MRT4577_85966C.1
nnnnnnnncctaaacaatggaccatcgattaagcatgaaactgacatggaaattcagtccctgtgcaaggaaagtgacacagatactaggaatctcattgacctgaatgaaaccttgccaataatcgacgatccagaaatagagtctcatgaatcaggtgaaattgttcctcatgaacccaatggcccttcacaggattctatcgctatagcagcagcagcagagacgttggtagaaatgtggaataatagtgatcggcctgcatatcaaccggacattttgcattggtttgctgacctagctatatccaaagataacacattgttggacaaggacagcgatgacgactttgaggctgcaacactgaagctgcgagaaacaaagagcaacgagtaccattcaacaccaagaaccacccaggaggataacactaactttggtcattgctctgcagcttcacttgtctcaaaacctcanagaggtagagggcgaggacgccgacagaggaaacactttcagagggacatcttgccaggccttgcgtcattgccaaagcacgaggtatcag

SEQ ID NO: 169277 - DNA, 843 bp, Zea mays
  Clone ID: MRT4577_85967C.1
gggcgattgggatcctcgaggccggccgggaaattgcagaacggaattccattccagaaccatccttcgctcgcccccgccgccgcgctgccgcggccatatacggcgaaagccctattcgtgcccgcggccgtggatagataggtcagtgacgattgagaaacccgtagtcggagcagaggaggggtagaggatggtgttcggtcaggtggtgatcggcccgccgggctccggcaagaccacctactgcaacggcatgtcgcagttcctctccctcctcggcaggtaagtacgccgtttagttcctcaccgttgctttggctgcccctcaagctgctctagttaagtcgaacacgcttgaccttgatttgacccgctgcgtgatgccgtgattcgattagtagttgcttcggttgcccctcacaagctgatctaggactctaggtaagtggaatacgcttgaccttgacttgacccgctgcgtgattcgattagggtaagtggaataccttcctctgctaaggttgatcgagaatgttagctgataccatattgcttgtagcagaagttgtgccgagagtttaaacttcacccttggctttgttttggttggactaaagctgaagttgataatttgctcacacggatggcttctttatgtgttttccttgtggcaggaaagttgcggttgtcaatttggaccctgcaaatgacgcattgccgtatccttgactctttgagcaccacattttttcctctgtactcactctctccctatcaaaaaaaaaaaacgtactctctccttgatgttctcttgccacattgaactttttcctttgatgt

SEQ ID NO: 169278 - DNA, 853 bp, Zea mays
  Clone ID: MRT4577_85968C.1
tttgggaacaagaaatgcagcagcagcagcagcaagcgcagcaatatcagcagcagatggccgggtacacgcagagccaaatgccgggcaccgtgtggatggtgccgagcagcaacaacacgcagggtggtggtgcaccttccagcggcggcagtggcggaggcaccggcgagtctatctggacgttcccgcagatgggcagcgccaccgccgcggctgccgtgtaccgggggagcgtgccgagcgggctacatttcatgaacttcccggcaccggtggcgctgcttccagggcagcagcttgggctcggcggcggcggcggcgggggcagcggaggcgaggggcacatggggatcctcgccgccctcaatgcgtaccggacacaggtggtaacggatcccgcggccagtcatggcgggggaggcggaggcggcgggtctggccagcagcagcagcacggtggcgggcgcggcgaccggcacgagagcatgagcaccagcgactcgtagccgccgaccggggagtcgtcaccgaagataccatgcatcgctctggtgtggcttttgatctgttctttgtcttggtttcatttttttttcttgctttcctttttgtggtttccttcctctctcatccaagctagacgagacgatacacccctgcgaggattacacttagctgcactactccatggtatgcggtaggatcggaatccttacgtgagctgtacgattgttcatgggaagaagagaggagggaaacacagcagcagcagcagagagattgttcattttgttctttagttttagggtttgcattgatcaagtgcgagcagaagagatttttatcaagc

SEQ ID NO: 169279 - DNA, 478 bp, Zea mays
  Clone ID: MRT4577_85969C.1
agcagtggtaacaacgcagagtacttttttttttttttttttttttttttgtgtgcgtgcgtttgggggcaggcatataaatattcattgataatccttcaatcaataaggggatgtaagtaagcaaacaattccgtacagagacatacatactttcttttttcatatactttctttttagaaaatcagaaaaaaaagagaatacatccaggaacaaggatggctaccatcacaaacttattcatcaaatacacatacagctcgacttatttgctggcggtggctcgctctatatttatccatgaaataggcccgcaacaccacacacatttcttttatatgcctggaccaaccagggcgtctaaatcattgcaggccgggaaattattagatcaggccaaacgcccccccgtactctgcgtgggtaccactcgctgagggcgggttcttgctatatccatgccactgcctgccggtc

SEQ ID NO: 169280 - DNA, 385 bp, Zea mays
  Clone ID: MRT4577_8596C.1
ctcgtaaactaacacacggggggatcctatagttcctgactgtaaccttatggtattccacttgagtctatattgcgatgctttacaaatagccttctccaagtatataccaaatctcagagggaaccagttagctcctttcatttgcactcaccatagaaatcaaccatataaccagcaccttacttgcggggatactagagaactttactataagaacttgtgaggcgtttactgatctgatttgaggctaacaaccaggaaccccacgtgacataattaattaagcaagacttgcaccgaggtgtcttatggaggatactgcatcttaaaggatcatatcacaattgagagggacaatactttataactctaaagggactga

SEQ ID NO: 169281 - DNA, 252 bp, Zea mays
  Clone ID: MRT4577_85970C.1
ttgaactctgactgatagaaagtctagaggaggccacctctcaatgaggggctcgtcgggaagacacgctgatgggctagtcaaaggaagatggctgaatgagaggcgatgggcgcagttggaagagaggggccagcgagtaggcgcagagtactggtaggacggcaagagcatgaggatggatcaggaaggtagcagggctcacaccaggctagctggctgaatgggaggacgtgatgctggtgaaaataa

SEQ ID NO: 169282 - DNA, 495 bp, Zea mays
  Clone ID: MRT4577_85971C.1
gagttgaataaaaaagattaattaatagggaaaaaaaaaaattaaacaaaaacctaagaaaaaaagtaaaaaagagggaggaaaaaaaaacaaaaaaagtacaaaaaaaaaaagaaacggctgaaaaaaaaaaaaaaattaaaaagaaaaaagatccatcggccaagctaaaacaagaataaagggaagggaaaaacacccgggatgaaacccaactgcggggaaaagcaatggctgtaggaatgaaaggaagaaacacgcccatgtcgggtggggcattgggggggaggaaacaacaaggaccggcctaggatgggtgtaccatgaacaaccaaaaaggaagcattaaactgggccacaaaaagaaaggtaaggggaaaaaatggatcttggttaaaaaaaaaacctggatgggaaccaacaacagaagtggggggaaaaagcccggaaacctgaaagggatataaggggaagccagcataagcaccacaaggg

SEQ ID NO: 169283 - DNA, 180 bp, Zea mays
  unsure (1)..(180): unsure at all n locations
  Clone ID: MRT4577_85972C.1
gtgcacacccaacctggacgntacccggattctcacggtccggcattccggcgcgagcaatcgattgtccacgcgtccggcgagatcgagttttctgcaggtgttttggaggctcatcagctgtgatcagttacaggtgagcatgtctcaccaagtaccagtgtacagtttgtatgtgtg

SEQ ID NO: 169284 - DNA, 126 bp, Zea mays
  unsure (1)..(126): unsure at all n locations
  Clone ID: MRT4577_85973C.1
tcgagcgccgggccggattcctacgcagccactccaaacttgctccgcactgcctcacaggaagccgccatggtctccggttcgggcgtgtgctttaagcgcatcgaggnggacgcgcgccaccac

SEQ ID NO: 169285 - DNA, 323 bp, Zea mays
  Clone ID: MRT4577_85974C.1
gttctctcattttccacttttaaagatggctgcagatgtgtttaacaaaccatggggcggcaactcaggcacgaaacaaattccctactggaatatgaggcgggcactaccttatgccaagcattggcaccggctgggctatgtgctggcgacataaccacaaccatccctgtcgaatctagggaacagcttagccgaatggggcaaggtagcgcgttctcggccccttaaacggtgctgacacccaaaaactggttaatccattcactttccatataaatacggcaccccgagcgccttaacggtcgaactcaaaatttcct

SEQ ID NO: 169286 - DNA, 361 bp, Zea mays
  Clone ID: MRT4577_85975C.1
aattgccgggacgacgagctctctcgtcggcggccgccctacatggtttatgatggttttgacactacatgggttcatatgacctccactgatagcgggtgtcttaagggataagaggcagagcctggacaaacagaagtgcaacacaccggcacactgatatgtctgtagcatcagtctcgaccgcattaggctctcactgacaacaactcatagtgctcacctgcattagcgactggacaataaacactgcaccacgtgcgctaaaccatgcataagatgaccagaccgcatttgagtgattggtagcacgatggacccacacatacgctggatgcatgcctccaatgcatgaaccatt

SEQ ID NO: 169287 - DNA, 484 bp, Zea mays
  unsure (1)..(484): unsure at all n locations
  Clone ID: MRT4577_85976C.1
gnaagcacgccttctgaggacgacgtgcgttatgctgtgtttgcgacagcccgtgcgcgactcctgaagtccgttctcgtacgtagtggcggcatccgtgcgtgatgcatgttgtggtgcagcccctaatccgcgcacacatgtgcactgctgatccgggtaatgacaggacctacaggcgaccaccgtggatgtgcgacctggttccaaccacaaaatgcatcaggtggaccatctgaatgatcgagaacaaaaccagggtatgctcaaaaaacgagtacctaactcaacaaacactatctaagtgttaaactaaaaggactgcttacgttcattggttgatcatataactgggatcacatccatgccaactgtatagtatagctagtgatcaattgctgtccggagagatgaccatgaagagtatatatggacaggcataaccatgagactaaattattctgcagtagttatttccaataca

SEQ ID NO: 169288 - DNA, 199 bp, Zea mays
  Clone ID: MRT4577_85977C.1
ggaaaaaaatccttttgctatttaaattgaattgaaatgggaatcctccccatggatccctgggatccctagtcaccaaattagccctcaacggatttcagcttttccaccatccattccaatggaaaagccaattcaccaaaaggaatgcaacaaaatcgtggtgatttggatctctgagaatacaaagataaattcc

SEQ ID NO: 169289 - DNA, 611 bp, Zea mays
  Clone ID: MRT4577_85978C.1
ccgggacacgcctcgactactctctctagctctcttcccttccctttaatactgccgcccaactagtaagaacctgcctaatcctagcggcagagccgcccgaccaagcctcccgtatagggagagatagagagacagaggatggaggccttcgcctccgccgtgcctttgctgctggtgcgcactatgcgcgctgaccacctggtccttcacggcgaggagggggcacccggagccgcccacactggggggccagcgccagctgtaccggcctatacaacagacccctgatctcccttgcgctctaacccacaagatcttcctgattccatccctccaactagtacctaccgccgaagatcgacaagcagctgcgaatggccccgcccaactccacttgttcacgaccaccactactacctctcggtctatacatggttcctaccactagatccattatcaggctctgcgcaactgtgctcgtacagccctacacgctgcacaccaactggtccacgccgggctatggaccgctggcacagctttgctgctgtcatgacatgcgacctcaccattgcacacgtacttcatggctctggaaccccaagaca

SEQ ID NO: 169290 - DNA, 608 bp, Zea mays
  Clone ID: MRT4577_85979C.1
catactccttcggttctcctccagatctctaataccaggagcccggtgaatccaccgcgcccgcagcgatgtcggcgagcagcacccccgtagacgcctcgggggagccgatcccgacttcgtcggtgctgatggcggcgtcgaagcacatcgcggtccggtgccgcccggagaacgttgccttcctcaactgcaagaagaaggaccctaaccccgagaagtgcctcgagaagggccgccaggtcacacgctgcgtcctcagcctgttgaaagaacttcaccaaaagtgtcccaaggaaatggatgaatatgctggttgcatgtattactacaccaacgaattcgacttctgccgtaaggagcagcaagcttttgaggaagcctgccccatttctgagtagatcttgagagttttacttgcagtggtcttcgcaaataagggaaaaaaaggcagaaaaacagcgttcatgatctcccatgtttgttgtcctcatggaatttgtactggtgatgatggcgttttctctttatggttcacaaattacatttggcggactcactgttatttctgtctgtcccgagtgtgttaacccgctaatctgatcttg

SEQ ID NO: 169291 - DNA, 1794 bp, Zea mays
  Clone ID: MRT4577_8597C.1
caaatcatagattgatacccacgagtccggcggggacggagccacgcacgcggcgcttgtcctgcgcggcgcacggaacccacctccaccgcggcaccgcgtgcgtcggctgcttgctgccccagtgccccccgcgttcccttcgctcccgccgacaccgacgccgccactgccaccgccggcatggcgaccccgctccgcgccaccgcggtcctcgcgtggggttccggggaggacgggcagctgggcatgggcgggaacgaggagaaggactggccccacttcgttgaggcgctggggccctacgccgtcaccgccgtcgtagccggcagccgcaactccctcgccatctgcgacgacggccgcctcttcacatggggatggaaccagcgcggcacgctcgggcacccaccggagaccaagacggagagctcccctggccccgtcgacgctctcgcgggtttcaagatcgtccaggcggcgattggcgggtggcattgcctcgcagttgacgacaaggggcgcgcctacgcctggggtggaaacgagtacgggcagtgtggtgaggagcctgagaggaaggaggacgggacgagggcgctcaggagggacatcccgatcccgcagcggtgcgcgctcaagctcaaagtccggcaagtagccgctggagggacacattcagtagttttgactcaagaaggtcacgtctggacatggggacagccatggcctccgggtgatatcaagcaaatatctacacctgtacgtgtgcaaggccttgagaaagtgagggtcattgctgtaggtgcattccataatttggcactaacggaggatgtaattttgtgggcatggggtaataatgagtatggtcagctggggactggagatacccaaccaagatcacaaccgatacgcgttgaaggactatctgatctctcactggttgacattgctgctggaggctggcattcaactgcactaactatacaaggagaggtgtatgcttgggggagaggagagcacgggaggcttggatttggagatgataagagtagtcacatggtgcccctaaaggttgagcttctagctggagaggatattgttcaggtatcatgtggaggaacacattcagttgcgctagctcgagatggccgaatgttttcttacgggaggggcgaccatggccgtctaggctacggcaggaaggtgacgacgggccaccccatggaattgcccatcaacctgccgccgctcagcagcagccgcgacggtcggtggcaggcgaaatacgtggcttgtggcgggcggcacaccctcgctattgcggagtggacagaggccactgattgatcacgtaggtagtgctcgacttcctgagtcctgatctgcatgcaaatctgaggctgacaagcctgctataaaattgtagcgtttgtggaataagcacaaggccggtgccaacgggcgtaggtggggctgcagtcgatggcgctgccggccgccgcggtcggtacttaccagaagtagttcagtaccgactgccattgccatgtgtcgtcttttaattagttgatgtccaataaattcataagttttttttaaaaaagtctaagtaatctgaaaaggtatttatgaattatgtaacttttttactttttggtattatgtattttttatgttttatgagttatgtaaattttatttatgatttataaattacatactgtgtatttatattcatgaactatatacttttttatttgtttaaaaaaaaaaaaaaaaggcggccgc

SEQ ID NO: 169292 - DNA, 710 bp, Zea mays
  unsure (1)..(710): unsure at all n locations
  Clone ID: MRT4577_85980C.1
gccggccgggcctggatgtcccttcgtctccttcctcgtctgggtgtggccgtctcgcttcgccccttcctctctccttcggttctcctccagatctctaagaccaggagcccggtgaatccacctcgcccgcagcgatgtcggcgagcagcacccccgtagacgcctcgggggagccgatcccgacttcgtcggtgctgatggcggcgtcgaagcacatcgcggtccggtgccgcccggagaacgttgccttcctcaactgcaggaagaaggaccctaaacccgagaagtgcctcgagaagggccgccaggttgaaagaacttcaccaaaagtgtcccaaggaaatggatgaatatgctggttgcatgtactactacaccaacgaattcgacttctgccgtaaggagcagcaagcttttgaggaagcctgccccatttccgagtagatcttgagagttttacttgcagtggtcttcgcaaataagggaaaaaaggcagaaaaacagcgttcatgatatcccatgtttgttgtcctcatggaatttgtactggtgaatgaatagcacagcctggagctattcaccccatttgccgcccctcaggattttagagcaggcgaatgctctaaaatggtgatgatggtgttnntctcttatggttcacaaatacatttggcggactcgctgaaaaaaaaaaaaaaaaagcccct

SEQ ID NO: 169293 - DNA, 331 bp, Zea mays
  Clone ID: MRT4577_85981C.1
tctgtttttccttctcttaaaaccacacttaggggaggggttgacatgacttgaggtacgcaaagacacaactcccataatgaacaagttcttcaacaggacgaactccacatgtttgatgttcgtgagtaatatactgtgaatccttacataccggttctcactgtgatgatcgatcctgcaccagactgttttaataacccatggaatgaggattcctgatgttatattattgcatattcttttgtgcataatcgagatgcttttatgccttacatcgggaatggcccacagaccaatatgaaaaatcaggcgtctatgtgatctcccc

SEQ ID NO: 169294 - DNA, 480 bp, Zea mays
  Clone ID: MRT4577_85982C.1
ggggcccaaaaattttggggttttaaaaattgcccttgggggtttagcccccccccctccccaattttcctttaaaatgggggggggggaaactttttttcgggtaggaaaaaaaaaaagggggggggggggttaaactaggaacaaaattggggggggtaaactggggcccaaatttaaaattccctaaaattttctcgggcccaaaggggggaaaggaagttaattgcacctttcacccctccaaacttttaggggttccccaaaaaaaaggccaagggccggggacggccctaactaatctccccttttaacccaaatggttggtgggccctaaatccatgccggtttaccctaataagggggagccccctcccgggggttttacccccccaccctccccgggtttttttttcaaaacctttttataaattttccacgttaacaataggatggaaaaacggggtttttttttttttt

SEQ ID NO: 169295 - DNA, 915 bp, Zea mays
  Clone ID: MRT4577_85983C.1
acgaaggcaggaaccacctgtccccaccttcatccctgccgtcagtggtcagtccgtctcgtcctcccttcccgtctaggtgtggccgtctcgcttcggcttctcccacttccttccccagatctccaagaccaggagccccggcgaagccaccacgcacgcagcgatgtcggcgagcagcacgcccgtagacgctttgggggagccgatcccgacgtcgtcggtgctgatggcagcgtcgaagcacatcgcagtccggtgccgcccggagaacgtcgccttcctcaactgcaagaagaaggaccctaatcctgagaagtgcctcgagaagggccgccaggtcacaagctgcgtccttagcctgttgaaagaacttcatcaaaagtgtcccaaggaaatggatgaatatgctggttgcatgtattactacaccaacgaattcgacttctgccgtaaggagcagcaagcttttgaggaatcctgccccatttccgagtagatcttgagagctttacttccagggatctttgcaaataaggaaagaaaggctgaaaaaccgagttcatgatctcccatgtttgttgtcctcatggaatttttaatggtggatgaatagcacaccaaggagctattcaccacaattgtccccctcaatatttttttttcaaacttgaagtgacttagccgtatgctctaagatggtgaatggtgatgatgatgatgttttcacctagtggttcacagaatacatttggcagacttgccgttatttctgtcctgggtgtgctaagatattaatctgatatccttttctagaccttgtttctgtcacaaggctataccactacaatgtgctttctccgtcccaaaaaaaatgcataggttttcaacaattgagcttttctaagtttgatt

SEQ ID NO: 169296 - DNA, 785 bp, Zea mays
  unsure (1)..(785): unsure at all n locations
  Clone ID: MRT4577_85984C.1
cctcgaggccggccgggaaaattgctctacccattcaaccctnctgtcttatcaccttcgatctctcttactacattttaacccatctgcatattcatctaatcactcgcaacgatgcactccttccgcgccctcgcccgcgctgcgcctagagcgactgcccgcctcacagcttcctctacccgcgcctcaatccgcccggccttcaccagctccatcaggacccaaactcctcgcgctctcaccgccgccttcagcacatcccgtcctgtcttcgatgcctccgcccaagagctcgcagccaagctcacctctgagctccagcttgagagcgagaacgccgattcatcccagaccgcatccgacagcaacgtccagaacttcctctccaggaccgactggcaactgcacgatgtcgatggcgagcagattgtcaagcttagccgcaagttcgaggacgagctgatcgaggtccgcttcaccattgccgacttcaacaacccttaccccgagcacgaggatgccgatgacgctcttctggacgatgagatggactaccccgagggtcagagcggtggtgcccacaccaagggcgccatcaaccagggcaacagccgtgatggcaacttcaaggtcgcacccgaggacaacattgcgcctgccgaccgtgagggtcttagagaccacgaggacgactccgagcccgcattccccgccaacgtcaacgtcctgatttctcngcccagcaagaagacgccgggcgcctccgcatcacctcgtctctg

SEQ ID NO: 169297 - DNA, 920 bp, Zea mays
  Clone ID: MRT4577_85985C.1
ccacgagtccgcacagaataccccggccagttgctaaaccataatcataacactggagcacagcagcagcagcctgcagcagtccagcagccgcctgatgagaagcagggagtcgatgacgaggtgaaaagggacttgaggagccgggggctgtgcggcgtcccggtgtcctcgcacgtcgcacttcggaggggacaacgccgctgactactgggccccggcgccgctcggcgggatgttccgctagatagagcatacagcgccgccgtgccattgaagcatgcatggtggtcgagacgtacgtacgtacgggctgggcgagcagctgtttggtgcgagtatatgtgttcatgacgcttgctgcaggtagagagatcatcgagctgtctaagaatcatcgcgagctagctagctagggtggtgcagctgggaaacatagcatcatgagcagtcattctggtaagggagaagcgagaacctgtaaggctgattgctcttgatgctatgcgagtagtatatgacctttcggggccgtaaagcttcgtcgtctgtatcttcagttggagggcttagcttctgcaggaagatctagctagatcttctctggtccttcgcgcagatttgttttgttgatcgtgtatatgtaattaaaatctagcaagttgtcagtgaacatctttactcatatatatagatcctgccatgctcgtacaagttggcgggatcggacagggagatcgagctagtcccggcgcgccgtcttcttcatttatgcgccgccgctccggatgtacttatctgagttacatatattcaaataaagtatcctttttagctaaaaaaaaaaaaaaaaaaaaaaaaaaaaaaaaaaaaaaaaaaaaaaaaaaaaaaaaatattttaaaaaacacaaaacaaggta

SEQ ID NO: 169298 - DNA, 971 bp, Zea mays
  Clone ID: MRT4577_85986C.1
cgctccgcgagcaaggagcgccgcgaggagagcgagagaacgaagtgggctttggtgatccattggggacctcgaggccggccgggaccatcgtcccttcgtctccttcctcgtctgggtgtggccgtctcgcttcgccccttcctctctccttcggttctcctccagatctctaagaccaggagcccggtgaatccacctcgcccgcagcgatgtcggcgagcagcacccccgtagacgcctcgggggagccgatcccgacttcgtcggtgctgatggcggcgtcgaagcacatcgcggtccggtgccgcccggagaacgttgccttcctcaactgcaagaagaaggaccctaaacccgagaagtgcctcgagaagggccgccaggtcacacgctgcgtcctcagcctgttgaaagaacttcaccaaaagtgtcccaaggaaatggatgaatatgctggttgcatgtattactacaccaacgaattcgacttctgccgtaaggagcagcaagcttttgaggaagcctgccccatttccgagtagatcttgagagttttacttgcagtggtcttcgcaaataagggaaaaaaggcagaaaaacagcgttcatgatatcccatgtttgttgtcctcatggaatttgtactggtgaatgaatagcacagcctggagctattcaccccatttgccgcccctcaggattttagagcaggcgaatgctctaaaatggtgatgatggtgctttctctttatggttcacaaattacatttggcggactcgctgttatttctgtctgtcccgagtgtgttaacccgctaatctgatcttctgctctggacttccacaaggcaatggcacaactacaatgtactcctacatcatatcgtctcaaatctgaatagtctgtactctgtacagactacagaaaaaaaaacattcattgccgttaaaaaaaaaaaaaaaaaaaa

SEQ ID NO: 169299 - DNA, 790 bp, Zea mays
  Clone ID: MRT4577_85987C.1
ctcggaaccggccgggccgggatcagagataggagagacgaacaagaaaagacgagatcatatataccgtacgttatagagtaggaaaatagaaatacgaatgatgatcacgggagggcagcgaaaccctgcaaggctgcaggtgtcgtcgtccttcctgcttgcccttgttttcgcatcatcggtgctcgtcggcatcgtggccggcggcagcttctacgaggagtgcgacgcgacttgggagccccagaactgctgggcctacgacgatggcaacaggctctccctcgcgctcgtcagcagttcctcaggttccatgatccggtcgaagcggcagttcgtgtacgggaccgtgtccaccatgatccagcttgtccccggcgactccgccggcaccgtcaccacctactatacgtcgtcgctgggcgacaaccacgacgagatcgacttcgagttcctgggcaacgtgagcgggcagccctacaccatccacaccaacgtgtacgctgccggcgtgggcaacaaggagatgcagttcaagccatggttcgaccccaccgccgactaccacaactacaccatctcctggactccctgcatgatcgcgtggtacgtcgacggcgtccccatccgcgtgttccgcaactacgcggcgagccacggcgtggcgttcccgacgagccagcccatgtacgcctactctagcatctgggcggcggaggactgggccacgcagggcggccgcgtcaagggcgactggtccaggcgcccttcgtcggcagctacacgg

SEQ ID NO: 169300 - DNA, 834 bp, Zea mays
  unsure (1)..(834): unsure at all n locations
  Clone ID: MRT4577_85989C.1
cattgcttctctcgaggccggccgggctgtcacttgccttcttccgtcgtgccctcattatcccataactacttgccacaggccttgatctccctcgcgtactggagcagaaggggtgtctctgccggatcaggctgcgctgtcgagctcttctcggcgatggagggggacctggacacggacgacgagggctcgtgggaccttgttgggagggacatccggctaaaggccgccttcctgtgcattgacctcggccgtgtgatcgccttgtgcgggggcgaagagcgcagtaaggcgctcattgctcttggcgaagagcgcaagaaggcgctcaatgctcttggcgacgcactcttcgagcccatggatgagctgggcgacgcagtggagagcaggagcctccctctgacgcaggcgcgctacagcgacaccgctgacgcgctccgcgaggtcgtcgccgtcctcgcgctgtccctggatctggagttcggcccggatgatcctgatgaatagagagatcagatgcgcgcccaatcgagacgcgggcgagagctagatctgataggataggatgtatatcgctcgaaacctctccaggacaggcggtgagacggatgatgagccagcgcgcccagaaaggccgtgtgccgtgtgcgagatcaccttcactgtcacacccgtgtttcggggcacaagacccggacgcgaactaatcaccagatgtgctgngaccaagtctcacacatatgatgaatcatgacacaagatcgaatgtcacatttttactatatnacaggaattctatacnaaataaataaataattacattataag

SEQ ID NO: 169301 - DNA, 348 bp, Zea mays
  Clone ID: MRT4577_8598C.1
gccactcttccggtcaccttttcgctgggggcctcgctcctggcgcaccccttctcgctcctcatgctccggggcctactcggcgggtggtgcgttcctctacctcttccggccctccgaccagcctgtgggtctctttggccgaaccttttccgacctggagacgctggtggggctcggcggcgcgtccttcattctggttttcttcacctcctgtggggggctcatcatctacgggctggtcggatggggggccctcgttgcggggcacggggcggtccaggggctcgtggacctattcctttacgaggccaaacgcgcccctctggtaccaacgcgggccaaggg

SEQ ID NO: 169302 - DNA, 363 bp, Zea mays
  Clone ID: MRT4577_85990C.1
aacaaaaaccattgggtggctgataatacactcaaattgcaaaaagttcatgacatttgacccataatgggcttctaatttaacattaaggcccggaaacacaaatggcaaaactttggaaatgccacaagggacaacccctcttgttgtcttgcttgggactgggcggccattgattgttttcaagcccccaacgaggtgttaaacggttctggcggtacatggggggggagagggtctagttgggtttccaggggggtcttctcgagggcctgtacttggggggggggggggccttggggggccggccccaaaattttttttttgccgagggggagccctggggctcacaaggtttgggca

SEQ ID NO: 169303 - DNA, 340 bp, Zea mays
  Clone ID: MRT4577_85991C.1
ggggagcaagccggggccacacccgggaaaagaaagggggggcccgaccccgataatgggcaacccccgggggggggccggggttaacaccgccggccgggccctttcgggattcagagggacagccgccgaaaaaaaaacaaacgcgagcccccggggaaaaaacaacggccagagaacgaccaggagtaggaggagtctacggagggcggctacacagggcgggcgggacctaaataaacacaaggcttcgcatggaccaaaactgattgggcccggttccgggtttcaacggccgggggacgaccccgacgcgccccgcgggggcgcgcataaaacc

SEQ ID NO: 169304 - DNA, 1066 bp, Zea mays
  unsure (1)..(1066): unsure at all n locations
  Clone ID: MRT4577_85992C.1
aattcacgggcttctactttttgtacagtatattgttgcaactgcagcagtacacacaggttaaatcggtaccatactccctagagttttttacttacaaattgccaccatcacacgcccgaaaaaaattaaaaaccaaatatttggcaatgtcaaagcatgaccactaggctgcgtacctacctgcacgaagagttcgtcatccacaagcaagagattccgcactctcctgttccgtctgacgagcgatgaaagaaaaaggtacagagcggactttttcatcatcatgacaggctaaaggaccacagtacactgtgaacgagatgccaactttgcggcaacgccgtattgctgatgtgggatggatcagactgtcttgcagtccacacctatccagttactaccctcttgtgcattgagatgtacttagttttatatgtaggtgcacagccacagcgcgaaatcgacgcaaccgtggccatgtcagcttgtgattttacagggttaacacacgccgcgcgcggctcctgtttatacctgtgcctctctgctaattaacctgcccacaacttgcagcaccagtccacgtcaggtcttctgctattgatcctctgtgttgaagatctcctcggactccatgggcgacgaccagtagtgcacaagggattccacggtgagacgtcgtgtggcgctcaacattgagatgaagaagcggcagccatcgatcttgtactcttccagaggatttctgtgtccaaaactccgaacgttcacagcagaactaagcttgttcatgtttaccaaatggtctttccataatgtatcaagagtcttcaatagtacttccctctcaattccacctatatatgcatcgtcataacaggactcttgcacggcattcaagtaggtagctattagaaaatccccaaaatatttccggagcagattcacagtgtttgtatatctccctttctttgacgtatcatcaacacaaatggaaaaccaccgcgttattgaagatgtttttcttcgaattccccnccggacggcgtgggcggacgctggg

SEQ ID NO: 169305 - DNA, 311 bp, Zea mays
  Clone ID: MRT4577_85993C.1
taaaataaaacccacttttgattgaatatggatggatccgagcacagtacagagaaactacactgcgtttattaaaagggtcctcatgacacctacagagaaaatcgaacagcgagggggggttcttactcaaacttaactgactggctcaaagactaatggacctcaccaccccctcacaaatcgggacactcatcacctctgatcgatagagggccacgacctttgttttatctacacggagggagggggtgaccacctttggatctgccttcaccgctccctatgatgttgatgaccaaagcaaacac

SEQ ID NO: 169306 - DNA, 185 bp, Zea mays
  Clone ID: MRT4577_85994C.1
ggccgcttttttttttttttttttagaggtaagctaatgggctttaagcacggaccgtctaggacggagcaaggagaggctaaccaaaattgaactaagagaaacaaagaggcgacgcaaaagcaagaacacacagcaggcacgaaggccacaaggaacggcaaacacagaagagaaattttttc

SEQ ID NO: 169307 - DNA, 271 bp, Zea mays
  Clone ID: MRT4577_85995C.1
gccgtatgttatcaaccgcaccatcacctgctgggggagggggtcactgacagcaaggggcaccgacagctctgctttgacctcggaaggcgggaacacggggcaccccctcaagcatgtgcgaccaggtgtctgacgccgagcttgacgcatgcctcccgcaggacccccacggaaatgtggcctgcgagacctgcaccaagaccaacattgtgatggggtccggcgagatcactaccaaagcgaccgtggactactagaagatcgtgcg

SEQ ID NO: 169308 - DNA, 407 bp, Zea mays
  Clone ID: MRT4577_85996C.1
tgcttggaacctttgggctgatttatgtgcttgtcaactaaacctccgccgggacacaccttcttaaccttttcttcatctttaataaggtaataataactcgccttggttgttaaataaaattaaaaaaaaaatatatcgaatttaacaacttgactttatagaaatcccctctctggcttgcctgactgactgtcgttgcgctgcccgttacatattactagtatttaaaattacggttcgtaattcggtctagcgtgttattgctgctgtggtgattgctgtgttttgtattttctgtttcgtcgtgcttgtgcttgctcttcctcatgtgaggaagttggtgggtggtagttcgtggtcgtagtggtaggtgcgtcgtcagttgctggcggtgttgctgtggg

SEQ ID NO: 169309 - DNA, 748 bp, Zea mays
  Clone ID: MRT4577_85997C.1
gaggaagcgggccagctctttgtcccctgctgttcctgctcttgctctgaaaagaaagaacccacgctcaagcgtctgctggacacgtcaaaaaaagaaaagaaaaaagaatcatctgccggaggagcgagcggggatcggagggggccgggagcagctgggatcgggatcctctctcttccttgcattgatggcttccctgggcttgcccggaccctcctcctaccacgacctctgctgctacggggcaggaatcgcagggaacatctttgcctttgtgctcttcatctccccgctgccgacattcaggaggatcgtccggaatgggtcgacggagcagttctcggccacgccctacatctactcgctcctcaactgcctcgtctgcatgtggtacgccctccccttcgtctcctacggcgtcgtcctggtcgccaccgtcaacaccatcggcgccgccttccagcttgcatacaccgccgtcttcatcgcctacgccgacgccaagaaaagactcaaggtgtccgtgctgctggcaggggtgttctgtgtgttcgggctgattgtgtatgtcagtatggcgctgtttgatcccaagcctcggcgaacattcgtcggctatctcagcgtggcgtccctcatattcatgttcgcatcccctctgtccatcattaatttggtgatcaggaccaagagcgtggagtacatgccattttatttgtcgctatcgatgtccctgatgagcatg

SEQ ID NO: 169310 - DNA, 310 bp, Zea mays
  unsure (1)..(310): unsure at all n locations
  Clone ID: MRT4577_85998C.1
acctatccaactttttttttttacaaccccaagactctnattagcggggtctaccccacgaggggggggctcttttccctttttctcctgggggaacaaacccctcttccttcactcaaaaaagggcctccaggggatgtgaccacctgccccctccccccatggggaggcgggccccatttttcctcaatccacccccctaaaaaaccccacttgccagcttccgcccgcctttcccccacaacaaatttttttccagggggcccccccccccccccacccattgggccctggatccctttctccaacc

SEQ ID NO: 169311 - DNA, 589 bp, Zea mays
  unsure (1)..(589): unsure at all n locations
  Clone ID: MRT4577_85999C.1
caccaactcgccgttagctgtcatgcgtgacgatattccttacgatccatgatgccgcgacctgacgctcaccatcttcgaatctctatcggcaactcgctgatctgatgacacaatacacacacttgttcgagccgatcctgtacataaataaggacctcaaactgtctagaccagcctatgatctaggtgctcatcgtctgcacactggccgctcatgtgtttgcatatcagtcatctagagctatctctgtcgcaacgctctaatgcgtccgtacgaagcccatgctaatcgactctgctggcctatacttcctcaatgggctggagatgctctctgcgccgatagtgatcgtcttgctccccacaatgatcatagctgagatatgcatcgacttgaagagcacacttgatccgtctctatcgtctccgagacgtgcatgctactagaattctttgccatgttgaacaccgctccactgttcagtcacgcaagtagaataaacctctcctactgcatngtgttgtgagatcgcactcatgaccgaacctgattgcccgctcatgtcctccctcctgtcgatcccgt

SEQ ID NO: 169312 - DNA, 308 bp, Zea mays
  Clone ID: MRT4577_8599C.1
cgtgcgcgagacgacgacactcgatcgttgtccctgtatttccaccaccaccgtttccgacatcgctagggtggattgtcaacagtgctgcctccctccatatccgcatcgccatccttgccttcgtctagagactctatccttcacgccacgcctactacagcccccaccgacttctactatgcctccatgcagtacaccaagtaccctgagcttttcgtcaagtactcatcctcctcggcgccgaaagcaaatgcgaatgctgatcggagaaaacaaactgcactggtcggactagcactatccca

SEQ ID NO: 169313 - DNA, 378 bp, Zea mays
  unsure (1)..(378): unsure at all n locations
  Clone ID: MRT4577_859C.1
atacaacgtccgggcgggggggttcatgttttaataatccaatggagccgagggctagctacctatagctagttaactcgtttatcggtgaagagtaaacgagtgtgacccttaaccctgggtggatagtgccagacctgatctcaccaatgattatacctgggggggggggggggtnatnataaccnatcattgtgtcaccaatgatgatgccaaacatgatgacagtgccacaatgttactctggttctatctcacacattatacaacaacaacaattaccattcatgtccagccccacagccatggcgatcccacccatgttcttacagcagccctttgttggtgctgtattctagatataagcatttgtgttgc

SEQ ID NO: 169314 - DNA, 255 bp, Zea mays
  Clone ID: MRT4577_85C.1
acaaaatatgccctgtcaaacattactttttaaatagaaccaattactaaaaaaaacaataataacaataattaaaaaaaaacacttttcggtttcttacccctccaaccaaactactaaatcaaaaacctaatttgcccaactcctttcccttttttacacccatccatatcccttcaaccatatatacacagatacctccaaaaattctccacttaaaacaacaacttaggcttacaacccaaccataatatt

SEQ ID NO: 169315 - DNA, 302 bp, Zea mays
  Clone ID: MRT4577_86000C.1
ggggaaccaaaaccgggctgggccctagataaaaaaaggaacccggcccaaaagggggggacccagggggttagaaaaaaaaaagccacgaaaccgtggggggccttgggtttttttttggctgaggccctaaacaaacgccctggggaaaaaaaaaaacccccttaaaaaaccccggggggaaacaccttaacttttagggggggcaaaacaggaggctaaggggggccccaaccctggatttggtccctggggaccgggggaacgggttactaagggcaatggttttcctgggaacgggg

SEQ ID NO: 169316 - DNA, 412 bp, Zea mays
  Clone ID: MRT4577_86001C.1
aaaaaaaaaaaacccattgggttaaaaaaaacccaacccaaacaagctaaaagtccaaaaaaacccaaggggggggggggggcaccctcaatacaacccgcgaaaacccttaactaagggattcaaaaaccttaacggggggccccaaaccaaaatttgaacccccaaacgggaaattgacacccgacccagtccctgggccgaaaccacccaaaggggaaattccaacccccggggggccgtaacaaggggacccaagcccggacccaagctgggcaaaaaaagggacaaaactgttcccggggaaaaaaggtaacccgccaaaaatcccaaaaaaaaaacaaaccgaaaacaaaaagggaaaacccggggggcccaaaagagggaccaaccccacattaattggggggcc

SEQ ID NO: 169317 - DNA, 1469 bp, Zea mays
  Clone ID: MRT4577_86002C.1
ctcgaggccggccgggccggattcccagagctggaaggagagagaaggaaccaaaaaaaaagctcggaatttgtagtctccaagccgtgcgacgacccgacgggaaggggaagagagggagggccgccgctgaagtcgccgtcggtgaggagatcggttcctgcgtgcagaggcggcaacaagcgctgcagagggaggagggatttgggatggctggtgacgaccatgtggtggttgacgtgaacggcttagcaaaatccaaggatgacgggggttccaagaagctgtctgaggatgcaaatggttcggctccggctgctgcatctttgtcagcagctgttgacttggtccaggaggaggaggaggaggagggtgatggggaggaggagccgctaatccaggccgcggagtgccgcatatgccaggaggaagatagcgtgaagaacctcgagaaaccgtgtgcttgcagcggcagtctcaagtatgctcacagagcttgcgtgcaacgctggtgcaacgagaaaggagacactacttgtgaaatttgtcatgaggaatacaagccaggttacactgcgccacctcgtgttcagccagatgagacaaccatagacattgatggtgatttggttatggatttgcgagacccaaggattcttgctgtagcagctgcccaacatcgtcttcttgaggcagagtatgatggttacgctagtacagatgctagtggtgctgcattctgccgttcagctgcgcttattttaatggcactgttgcttctaaggcatgcattgtctatgtcagacaacgaaggaaacgatgatgacgcttctaccatattctcgctttttctgcttcgagctgctgggtttctgctgccgtgctacatcatggcatggatattcagtattttgcatcgccgtcgacaaagacaggaagaggctgcactggcggctgcagaggtggccttcatcctacagtcggccaggggccgcgccctccagtttgccatcgctccagactcccccgccaccccgcagcatgagccagtgtcgcagcaacagcaatagtggctgacaaccacatccccagtagttgctcacgactactgaccatacgtatctgtttcgttttcttgggcatcatactgagtcacaaaggttaagcctgggcttctgcctcccgtggccagtttgggtgtcagtgtcacccaaagttcgttacacccgaaaccttgtgctttgtattaaaccgagtgtgatccgagaatataccaatttaatgtaaattcattcttgttcttactgcggcatcattattaaccgttgtatgcactgtaatgtacagtctttcataatactatttatttttctatatggcatatttgatagatgtgaacgatgtggtgtatggaaattgaaacctctattgtttattgtgggaactaatagtgtgtttggattgagaac

SEQ ID NO: 169318 - DNA, 785 bp, Zea mays
  unsure (1)..(785): unsure at all n locations
  Clone ID: MRT4577_86003C.1
agaaacaaaacnaacaaaacnnncactaagagctgaaagcattagtctcgactaacataacgataattcatatgtactacgcctaacagacaaccttgacggaaacaaaaaaaatctcttccctcctggattacagagagctcgcagagaaagacccacacaggacaccagttcttattactgctgaagcttgcggtaatatgacacgcagacatccaagaacaccaaaattgcaagccgggaaattcaatcttgttatcttaccttcccgctttgctcagtgctcacacagtagaacccactacacatacctaatgtaacgcatcttcgactctgactgagcacacggttgctgaacaaaaggcaagaaccacgtcaccttgccggattcaatcgaggaatccggtttgcctgagcacagcgtcgcgcacacgccgcaggtctcggcctttgagcgtgcgcccggcgccctcgagcatcgagaacggagcggcgggcccagccccaccagcggatgcgcgggcgaccatctcatgcgggggcagcatggcggcgtcgccgcgcccgaagtccgcgtcgtcatcgaattcgtcccaccggcccgtagctggctttcggagtggacgcacgggcaccttcacgggcgccgactggtggtacggccgggcgggcccggcgttctggggcttcgcggtcgccgggatggcccgcgcggaggaggtcggggactgggtgggcgacaacgcgcccccgttccccgacgccaccgtggccgaggcagatgc

SEQ ID NO: 169319 - DNA, 313 bp, Zea mays
  Clone ID: MRT4577_86004C.1
ttccgagatactcggacagtcaggctcgggttcgcttcagtcttccagatatcaatcgcacctcctatcaaaaaataaaaaaaatcgttcgcaccttctttgtgccgccgtggccccggcgccggaccgccgccgaagagtgagggccccgccgactttgcgctgtgcaccacggggcgccgggagcatgcttcactacacggtaggtgggtagcaataaaactgtatactggatggagacagaatcttaccagggagagtgggctctcgtgagaagcctcgaatggtccatcactaggacttaatataaact

SEQ ID NO: 169320 - DNA, 2560 bp, Zea mays
  Clone ID: MRT4577_86005C.1
ccccaattgccaatttcaggggccaaattttgggaaaggccaacggggcgggccccttcgcaaataacccaagttgggaaaaggggattttcctcaaagcgaataaaatggggaaccccaggggtttcccaattaccaccgtggaaaacccccgcccgggaaatgaaattagggggccccttaggagaggcatggcggcccaagcccccgtacctaaacttgggacccccaaagcggcccccccttttttttttttttttttttttttttttttttttttttttttttttttttttttttttttttttttttttttttttttttttttttttaacaaacattggtacccaagattgtttgctttcacaacgttacaacatatatatatcatatatgcatggacaggtacaatgcctctccagcagcaccagcaacaagggtggttagcagcagggactataaacaacagagtaccatccgcgttgatagtagattttttattactgcaaaattgatccccgcagcactaccggtagttgcggtagacgggagtgtacatgcagttctctgcatatttcaccaggtcgctggggggaggcagacgggtcgccagaccgagctcgtaggcttttgcagccacggctgcagcgatgtgcgcagagatctttctgatgctggtgaagggtgggaagatggagcccttctcgaagttgtcctgtgtggcctgatcagctagcgctttcgaggcggcgagaagcatgtcctcgtggacacggacggctccagagatcacaagaccgaggccgagtccagggaaaatgtaggcattgttcgactgcccaggcacaaaagtctttccttcgtactccacgggggcaaatggactgccactggcaaagattgaacggccctgactccatgtatatgcttgttcagcagtgcattcagaatgcgaggttgggtttgacagtgaaaagatgataggcctctcgttgaaggaagacatggcctcaatgatttcttttgtgaatgttcttccaactccagatgtcccgatcagaactgtaggtttgatggactgaacagcatcatacaaggttttcaagggctcgtgctcatgcgcccaaggtttcttgaatggctgaagggagcctttacgagagtcaacaatcaaaccctttgagtccaccagccaaaccttcttgcggcactcttcaattggagcattcgtctgtttcgaaatctcaagagcaataagttctgcaataccagttccagcctccccagcaccaaggaacaaataagtctgctctgccagggtcccaccaaccatcttgagtgctgctaacaaacctgcaaggaccactgatgctgtgccctggatatcatcattgaaaacaagatggctcttgctatatttttcaagcaaatcaaaggcattatgattggcaaagtcctcaaactgaatgaggactttctcaccatagaactgcttaacagcagccatgaactcttcaataagctcatcatactcctcgccggtcgcacgtttttggcggagtccaatgtagaactcatcattaagcagtttctcgttatttgtaccaacatcaattgtgataggcaagcaaactgatgggtcaactcctccaagagcagtgtatagagcaagtttgcctacaggaattcccattccctgacaacccaaatctccaagtcccaagattcgctcaccatcagtaacacagataacttgaatgttcctatgtggccagttccttagaacttctaggaccttccccttgtccttcaggctgacatacagaccctgtggtcgtccaaagatggacccatacttctggcaggcctcacctacagttggtgtgtaaacaaaaggaagcagctccaccacattatcaattaaaagcttgtagaaaagcctctcgtccgtttcctgaaggttcatcatagctatataccgctgcaaaggggtctggtactgccgcagggtgttcatgaacttcttaatttggagttcctgagatagtactgccggaggaagcagtccacgcaagtagtgtccatccctttcctcctctgtgaaagcaagacccttgttgtggtgtggatccctcaaaagggtgtaaccgcttgcgacggaggtggcccagggcatgacgggcagctcctcgctggcggccgccgcctcctcctgctccttctccgtctccgtctccgcgttggagaccatcgcgaccgcgtccacccgcctgggcggcaaggcgcgcaccttggcgggcgcggccctcctccgcagggtgttcctgtaggtccggcatccgtcgcagctggcgccgccctcgctccgtcctcccagcttccacggggaggcgggggacgcggaggcggcgacggcggcggtgcgcgtggacagcatggtggcgtcgagttcccgcggagggaggggagacgggagcggcgcggcgcggcagtggcagtggcaaccggcgtcgtcctcctccctcttcggagcgagttggcagtgtggagagggggggga

SEQ ID NO: 169321 - DNA, 367 bp, Zea mays
  Clone ID: MRT4577_86006C.1
tgaagttgctgaatgtttaatctgctgaaaatgttttgctaacaacatacggtagcttacaacctccactcgggaaacatcgcttgaagattgctgagatcatctctgcttttctatcaataggtagtgcaagtgccaaaacacgattgtttgaactaggagcaataaagcatgctatacatctattttgtgagtcccctgttaacaacttcttgcactatcatgtcgagaatatcatctgctcatgtttggagagggagcaggatcgactgattggccctgtgcttagggacttgttacttgttacaaggattctggaagccaagaagaactttgagtatgtgttagatctaactaagcatactat

SEQ ID NO: 169322 - DNA, 423 bp, Zea mays
  Clone ID: MRT4577_86007C.1
aatcggctcgagattggctccagttcctcttcccctcagcaccaccagtccccctctgctcctcctttcagtctcagcccaatgacaaagttctaagcagagtagtgcacgggcagcacggcaacggcatagcacctccctccaccgatcatccagttccgcttgcgtaacgacttcccttcgcaagcaagcttcccgttcagcccagccgcaggccgccgtgctcgcgcgaccatggcgttgctctccgccacttcgcccgccaaggcgcacctctcggcgctcctctcctgccacgacgagccgcagcagcaccaacacgcgctcccggtcccgcacccgcgctgcttccgcggcggcaaggccaggcggcgcgcgcggggcaggtgcgcggcgtcaatgcggccgccgactaataagctc

SEQ ID NO: 169323 - DNA, 2954 bp, Zea mays
  unsure (1)..(2954): unsure at all n locations
  Clone ID: MRT4577_86008C.1
atgttggtaaccttcggttttgttcacaactcaaggactgaacatgttgtgtttgacattgttgacatggaatatccttacaatgcaatcattggtcgtgggacacttaatgctttcgaagcaatacttcatccaacatatctatgcatgaagataccttcggaacaaaggcccattgttgttcatgggagtcaggaagctgccaggaaaaccaaaggaaattggacagactcaaaagcaattcacaatatagatggagccgaagtctgtgaacagtacaaatacaaaagagagaaggctacttcggcggatcagccgaagcctatgcttctatgtgaagacatagtagagcaaaaagtactgctgggatctcagttatctaaagagcaagagaaaactttgataagatttttatttcacaacaaagatgtctttgcttggtcaaccaatgatctctgtggtgtcaaccgagatgtcattgaacattcacccaatgtggacccatccttcaggccaagaaagcaaaggcttcggaaaatgtctgatgataaagccgaaggtgctcggaatgaagtgaaaaggcttctcagtgctggtgtcatcagagaggcaagctggcctgaaattaaatccagaaaaatgtgttttggagtgaagaaaggcaagttccttggctgtctggtatcaacgaaaggaattgaagctaacccaagcaagatcgaagctatccttcggatggagccaccaagcatgaagaaaggggctcaacggctggcaggaagattagcatcattaaacagattcatatccagatcagcagaaagaaatttgccgttttttgaaatactgaagtcagccgaagtctttcaatggggcccggcacaacaaaaagcttttgaagagttgaaaaaatatttgattgatttaacaacattaattccaccctcgccaggggctccattgctcttatatgtggcagcttcgcattctgcagtgttagcagacttcatcgctgattggacgccaggggctcaggaagaagagacaaataaagatgccaaagcttggacaatgttctgcgatggttcttggggaaccttcggcgcaggagcagctgctgttctagtagcaccttcgaaagtcagaacatgttatgcagccaagttagattttagttgtacaaataatattgccgaatacgaagcactcttgttggggcttcggaagttaagggcaatgggaataagaagggctattctgaaaactgattctcaagtcatttctggccatgtagataaaagtagcaaggcaagagattcgaaacttgaaaaatatctggatacagttcaaaggttggaggcttctttcgaaggtttctctgtcaagaatattccaagaggcgaaaatgagcatgcagatctgttagccaaatcagcggctcaggggctccctctaccttcggaagtattttttgaaacaataaaggcaccttcagttgaactcatggagagagcagtgctcgccatttctccagtgcatagtgaagattggaggactgaaatcatatcttttctccagggtaactgcctctcggatgacgaagtttataataaaagaatggaagcaagaacaagaccatatatcataatagaagaggaattgtacaaacatggagtttactccccccttctcaagtgtttatccagaaccgaagaatatttttctaagtggattgaagcaaagcctttggctacaataacttcggttacagtccagaaattcttctggcaaaatatcgtttgtcgcttcggcgtgccgaaggctataactgtggacaatggaacacagtttgatgtcgaaactttcaaagatttctgcgaccagattgacacaaagattcattttgcatcagtcaggcacccagagtcaaacgacctggtcgaaagagcaaatggtattataatgacgggaataatgaagctaatcttcaatcagcctagaggaaagtggccagatgagttgatcaaagtggtgtggagccacaacacaaccatatcaaggtcaacaggctttacgccattcaagttactgtttggtgacgaagctataaccccagaagaagctaaagcggggtcaataagaacagcggcttcggcagaggacgaagctgattgtcccgtggcaaaagatgctatagaagggaccaggcttcaggctgtggagaacatcaacaaatatcaagccgaaacaataaagtggcgtgacagaaaagtccggctgaagaacatcaagccagggcacttggtgcttcggagagtggccaatccagacacagtaggcaagttacagctgaagtgggaaggaccctttctggtggtatcttcgtcaagacccggttcttacagattgaaggatatggacgacaacgacattcctagatcttggaatgcagatgagcttcgatgatattatgtgtaacttgatgtaatcttttttatttttcctatggcacccttttcctttccaaagggggagaaaggtttttgatggggccagagtttctaatttttcctttcttatccagctctacgagagcaaatcccccaaaaaatatgtaaaatgtaaaatctgagcatgcaccatcgagtgcagagaaaaaaatagggagaagctcgaaagtcatccctaaggggatgcagagcacgatgaagctacaaaaagtcgttcctaagggagcgcagcgtaagttttctgctcaaaagtcgttcctaagggaatgcagagccaaataccaccgaaatataaggcaaagaagttcaaaagacgttcctaagggaatgcagaacttacaccgaaaagtcaacggtgataccgccgaaatagaaggcgaagaagttannaagacgttcctaaggggatgcagaacttacaccgaanataagctatgcagccga

SEQ ID NO: 169324 - DNA, 2543 bp, Zea mays
  Clone ID: MRT4577_86009C.1
ttgggacactcgaggccggccgggccggggacccggtccgacctcgcacgcaccaccccggtccgccgcgatgcctcccttcccggcggcgaccaccacctcccacctcgccctcctcgtgctcctctcatcttcctccctcttcttcctctacaaatccctccgcctccgccgcaaaccgtcccccgcccccgcccgcactgccactcctacccttctcttcgcctctgtaaccggcacctccaaaaccctcgctgcgcgtctctccgcccgactgaccgccgatgccggtttccccgtccgcgccaccgacgctgccaccttcgaccccgacgaccttccttcagtccatctcctcctgctcgtaatccccacccacgacggcggtgcgccgcccccttctgcggccttcctttcgcgctggcttgaggagtccgccgctgacttccgcgcgggtgcactcctcctttccggtctccgcttcgccgtcttcggggttggttcccgggcatatggggagaccttcaacgctgccgcgaggagcttctcgcggtggttgcgcgcgctcggcgccgttgaagtggtccctctcggggagggcgacatcgatagcggggatctcgaagcggtgttcgaggagtggaataggagggtgctgagggtggtgaagggcgaggaggttagttatggggctaatgaaaaaaacaatggtcttgacgagttggagttggaaggggaggattgggatgacgacgatgaggagatggtggatgcggaggttgacatggaagatattgctgggaaagcaccggcgaggaggaagaacgggaatttggagggtgttctagctaatggagtgcataacggtgtaaaggacatggtcacaccaatcattaggacgagtttggagaagcaaggttacaaaattattggttctcatagcggagtgaagatttgcagatggactaagtcgcagctgcgaggtcgtggagggtgttataagcactcattttacggcatagaaagtcacagatgcatggaagcaactccaagtttggcttgtgcaaataaatgtgtattttgttggagacatcacacaaatcctgttggaaagagctggaaatggaagatggatgaccctcttgacattgtgaatgctgcaattgaccagcatactaagatggttaagcaaatgaagggcgtaccaggagtaaagccagaaaaacttgacgaaggtctgtcacctagacattgtgcgttatctctggttggtgaaccaattatgtaccctgagataaatgctcttgtggatgagctacaccgaagacacatatctacgtttctggttacaaatgctcaatttcctgaaaagattaaggcattaaaaccaatcactcagctgtatgtcagtgtggatgcagctacaaaggagagcttgaaggctgttgataggccactattttcagacttctgggagcgtttcctggattcactcaagtcactgcatgaaaaagatcaaagaacggtttaccgactaacactggttaaaggctggaatgcagaagagatagatgcatatgcgaaactgctagatcttggccagcccgatttcattgaaatcaagggtgtaacatactgtggctcgtcagcaacttcaaagttgactatggaaaatgtaccttggcactctgatgtaaaggaattctccgaggtgttggcatcgaaaagcggtggtgtatacgaagtagcgtgtgagcatgctcattcatgttgtgtcctacttgcaaaggtagataaattcaagatcaacggcaaatggcatacctggatagattatgaccgtttccatgaactggtgacatctggaaagcctttcaatagccgagattacatggccatgacgccctcatgggctgtctatggtgcagaggaaggtggattcgatccggatcaatctcgtttcaagaaggaaaggcgccatggaactgctgccctcagaagttgaagttgatcttattgagaagacatggacctgctactcccgaacactgacctatgttactgctttttagaggcaaaaactttggaagcaaggatttttgaaatgttagcttccaagccatacattttctgtttgtcgtgtgaatcagtttccgaaagttcattttttgatagtttttattggaacaagttttttgttctcttgagcatttcttacattttattatgcgtagtctggattgcacatttgtgtgaaagttgaaatctccaccatatgttggaagggctactggagttttgtagttggcacaatgtatatagttgtgcctggcatatcccacaaaattttcatttgtgatctatatgcagttatgtccctgtgacggatcacatagaatttagggattgttgcctggagcaattttatttttgcaagtttaaagattgatgaaaattgttaataacaaccatttctgctgaaggtgtttattttatgaggtacatccaactattttactagcacttatggagagaatgttttt

SEQ ID NO: 169325 - DNA, 361 bp, Zea mays
  Clone ID: MRT4577_8600C.1
aaagataggcctatacacaaggggccttatcccaaggggaattattccaaataagaacaagcccaaaacacaccagaaaaatacccgccaccttcagataagagccccacggccaatatccccaagcccttttacccaaatttcttctaccaaaatgccctttttaatgaggaaattgtacacccggagactggtctccctatggctgctctctttacagctacagttacaaaagtgccaggtgccaaattccctgctgacgaactccggccttccacaccctagctttccaatagagacacctaaaataaagtcaccggacgtcaatttacagccccgtgactgacaaaaccctgactgg

SEQ ID NO: 169326 - DNA, 150 bp, Zea mays
  Clone ID: MRT4577_86010C.1
atgacgtcaaccggaactcgtagtcgcgcttgcgactatcgcgtcgaattagtcagggtaagcaaatttgttattcgtattagcggattgatggatggtttgactaggataaaagaggtctcaataggtctcagtattgcggaactgtag

SEQ ID NO: 169327 - DNA, 824 bp, Zea mays
  unsure (1)..(824): unsure at all n locations
  Clone ID: MRT4577_86011C.1
cattgggtacctcgaggccggccgggctagcctctgccagcgctcctcctagcctcggcttgccgcagcctgcatcacggatcccctcccatcacggatcgacgctccccatcacggatcccgctgggcgctgggcgctccccatcacggatcagcctgcatcacggatcccgctgggcgctggcctcggcttcacggatccactgccagcggcctagctccccatcccgtcgtggctggcgagcagaggcgtcgccggctcccctgccagcggcctagctccccatccctccctggctggcgagcagatgcgtcgtcggctcccctgccagctcccccgccatctctacgccagaggcccagagtcgtggcaagcagagcgcgattgaacgcctgtcaccagcacgactgaacgtccgccgccctacaacagcaacagaaagcatcctcctgtaactggattgtggctgctccgttgctgtttgactcagtgaagttcagcttgaaggacagagaactgacaccggtgatattacaaaacacgattgagtggagatggatttaaggatatctgagggttttggtactaataccaccttggatgaccaatcgatacaatcgccgaccagaagggcaaaggtttgggagtattttctacaagagttagttgaggttgatggagtgatgaaggctgtttgcaaatactgtggggcgaagctgacaagtaaaaggattcangaacaaatagccttagaaacatgttgcggaacatgtcctaaaatccagttgaggaccgcagaattcattgctacatgagaaaaaga

SEQ ID NO: 169328 - DNA, 152 bp, Zea mays
  unsure (1)..(152): unsure at all n locations
  Clone ID: MRT4577_86012C.1
ctatcatataatgatttcttttgcaaacaacacccctaattccttgtaccgacaaaaacaaagattgttttccatnnaaacaaatattacatataacattaaaaaaacattcctcattattttctcaaactaacatataccatttaattatt

SEQ ID NO: 169329 - DNA, 335 bp, Zea mays
  unsure (1)..(335): unsure at all n locations
  Clone ID: MRT4577_86013C.1
cgggnaggcataaaccacctaacctggctggtggagcgacggatgacatcctaaaagcgtgcggcgcgaggctcgccgactcgccgaacagacgcacctgaaccggagtcgaagcgccacagatgaactgcgagcctgccgtcgtcgcagatagagaagcacaagtctccaaccacgacgccgcctgcttacttgacgcatggcgccgnncgcggcgccctggtggggtgtctacttgccacgcatgcccacgctgcgcctggctggtagccggtgagtaggcatgcgtcctggcggaaacgctagccgtatacgtgcgccgccggggctgcact

SEQ ID NO: 169330 - DNA, 346 bp, Zea mays
  unsure (1)..(346): unsure at all n locations
  Clone ID: MRT4577_86014C.1
nttataattttttttttaatatttttctaagagggggcaatttgaaatgattattggggacgctccccacttttatttattttttgggacggactacagtctaccaaggggttgagctgcccccctttaatttattaatttattaaagaatcaatttaccaaggagctgagctgagctaattgttttaactgatccatggagcgcacttgggaccaggatagccggggaaaactttaaggcattggtggggaggagggtccgacttcaaaagcttggatggtttgaagattctggggaacaattccaccacggggccgaaccggcagaaggggatgaattccctaa

SEQ ID NO: 169331 - DNA, 232 bp, Zea mays
  Clone ID: MRT4577_86015C.1
atctcaaataaataaataaatagaatgaatttcagctagaagagccttattccattttcctttttattaaacatctggcataagttggtaagtatgtgaagtttatcatatattcttatgcgaattattattttcgccttttttttataattctgtctgggatttgaatagtagagtttgaattcatgaaggacacctgtgataggacaataaaatctagagctggacatgg

SEQ ID NO: 169332 - DNA, 256 bp, Zea mays
  Clone ID: MRT4577_86016C.1
acctggaaaaagtttttttaaagggaaaaaaaatatgggggttttataaaaacttaaccagggcctgggggttgccaaaaaaaaaattggagccgacaggttggcattttacaggaaacaggaacgaacacacaattggaacccacctggcttaaaaaatttgggtatacgggcattatggacaaaaaaaaaaccaggtcagctccggcacattttattgggtaccgggggccgggcctaaattactgaagggcct

SEQ ID NO: 169333 - DNA, 516 bp, Zea mays
  Clone ID: MRT4577_86017C.1
ctaacatcttttaatataccatcacataatttgatgtgtgctagattgctttgagttctatgttcagtatgtattgaactttcattagtaagtttataatctattacaaagtcaagaggtagtaaaataatgattaaatgccatttatagctctagaatcctatttgtaaatacaaactccacgaagagaaataatgaaaacttacccttccacctcccttaggctagtgccagcgctgggcgctatcgcctgcccacttggcacaaccggtcggtcgatattgcctgccacggtgccatcgctggttggctcacgcacgtggtcgtcaaggctatcgaccggccaccagggatggtactgacccatttgttgctttctgtgacctggtaacggttgcctcttgccacttgacgcattctcattggttcgctctattttaaaaaaaaactaaaaaatagaacatggtttataaataaaggagtctgagctcattcacacaacccacacttcaattt

SEQ ID NO: 169334 - DNA, 636 bp, Zea mays
  Clone ID: MRT4577_86018C.1
ggaagaacaactggttcaaggttcaggtgagaggggcaaggtggtgtacaacacgaagggatcctactccgaaacctgcgaagtcgatggcgacgtccgcatcaacagcacagccctgtcggtgaccctggtgccggcgagctcttcggagcgccgcgagtggaggatctggccatactgtcgcaagaacatgcccgacatcaagatggtcaccgtgacgcagctggaggacaagtcctcggccccgccgtgcacggtgacgtacaatataccagcggtcctgttcgcgctcggcgggctgacgggcaacttctggcacgacttcggcgacgtgctggtgcctctgttcatcgcgtcgcggcggtacgacggcgaggtccagttcctgatcagcaacatgaagccgtggtggccggcagcgtacaagaccatcctgcagcggctgtccaagtacgacgccgtggacctggacggcgacggcgacggcgacgcgcacgtcgtgcggtgcttcccgcacgtcaccgtggggatccacatgcacaacggcctgagcatcgtcccggagtgggcgccgggaccgccgggcggccgcggcctcaccatggccgacttcaccaggttcatgcgcgaggtcta

SEQ ID NO: 169335 - DNA, 354 bp, Zea mays
  Clone ID: MRT4577_86019C.1
aaattcgcacgaggagcccactcccgatcagcagctgatcgctcactcttgcagctccatcattctttagctcgctcatagctctagcactctagcacctagcctagtagactagcccacgtccggtcgacgcgaggcatgcagcctctctgcatcgccaacccatgcgccacctgccgaggtccacaccccgaccgtcgtggccaccgaggaagcgccggagggggagaccccggctccggccgacgtcgggcccgacgaggctgcccccgccgccgaggccaaggcggcggagccagctcccccggtggagaccgagccaggctgccgtcgctgagcccgacgcggcccccc

SEQ ID NO: 169336 - DNA, 250 bp, Zea mays
  Clone ID: MRT4577_8601C.1
ggggaaaaaaaaaaaatttatttcctcccccccagtttacgggttaaaaaccatcaaaagtttcagcagttgggacagccaaaaacgcccacgtcgcacgccatggggttcaatttgggggaaccccacaactttcacatgaacttactttagctactaataatacagggggacggtagatttaaagagcattttttggtagtcgggggggaaaaaaacgattttgaaacactgtttttggacccggggg

SEQ ID NO: 169337 - DNA, 675 bp, Zea mays
  Clone ID: MRT4577_86020C.1
atgggcgcgattaaggtcaaggctcagtccactcaagggacacgatctcgcctcgcccgagcccagcctcgggcaaaggcagctgaccccggagaattcacgtcttgcccgagggccccctcaagcaacagacacaccttcggctcacccgaggcccagtcttcgcagagaagcaaccttggccagatcgccacgccaaccgaccgaagctccgcctcgcccgaccccagggctcagaccggcctcggaagacggtctccgcctcgcccgaccctagggctcgggctcaacctcgacgctggacgacggactccgcctcgcctgaccccagggctcggacacggcctcggcctcggaagacggtctccgcctcgcccgacctcagggctcgggctcaacctcgacgttggacgacggactccgcctcacttgaccctagggctcggacacagcctcggcctcggaagacggtctccgcctcgcccgacccagggttcggactcaatctcgacctcgaaagacggactccgcctcgcccgaccccagggctcggactcagcctcgacctcggaagacggactcgacctcgacctcagaggagcctccgcctcgcccgacctagggctcagaccgaccacgtcacaggggggccatcattaccctacccctagctag

SEQ ID NO: 169338 - DNA, 404 bp, Zea mays
  Clone ID: MRT4577_86021C.1
ttttctctttttgtttttctttttttgtcctcatttttttgttttctttttggtatggggccccaagaacaccactggtataaggaagggggtcccagactgtcaggcgggggcccaataaggtccacagtggctgggggtaggattaaccaaaacaacaagagaatgcaaacaaacgccccaaagaggggggacccggcaaatccagaccgccccctgggggctgccgggaatccccgacaggagagaaaatccaagcccggtgctcccaggtgagagccgcagaaaacctgaaaaagcaatgcacggggaacgtcacgtacaaacagggggaaagcaaaaagtgcccacaaacgggggcctgaaaggtctgctggtgaaaactgaggggggtcaaaaaacca

SEQ ID NO: 169339 - DNA, 131 bp, Zea mays
  Clone ID: MRT4577_86022C.1
agcgcccacgcaaacgcaccgggacccggcgacgggggaggacccggaggagatgaggccgaagcgggtccagcggggcaggacacaggggaagcacaagcacgccgcgcgcgatggggaggcgcaggggc

SEQ ID NO: 169340 - DNA, 781 bp, Zea mays
  Clone ID: MRT4577_86023C.1
catatcctatttttaagttatagttttagggtcttagtgaatagtagtcatactcctgaattttttgtttagtccaatctaggatcttttaggatttaaaaaatttgatggtttcaattaattcttcgccctgcaaagactttgaaccatttattccatcttactatcaatgttatcagatcatatgattgaggctagcagtaagatcaccgatcagaagagtaatcatcgaggttagaaaaagcgttaggcagtttctaggcgatgacccactgcctagagcctaagcacgcctaggtgttttgtaggcgtttttgccaaatttgcattcaacatgtatagctgaataaattatatatataaagagagaaggaccaatagacataccttggttgatacaaaagtgatattcctacttagttgatacaaaagtgatgttcctacaagtggacaacagaccatatcaacaatataaatgatacaaaaatagggaaatagggaattgcaagttaggtacttatctgaatgatctcatccttctcccatccatcagatattatcaccagcaaacgatagccatttgaaatcacaatcatgtacggatagcagcaaagaaaattaaatggatagtagactagcagtagacctgatcaacccgatccgacccacccgaaaaaacccgacccgaccaatgcgacgggcgggtacagaccataatttttgacccgcaacaatcaacgcgccgtgttttttgacccaaaacccgacccaaccatacctg

SEQ ID NO: 169341 - DNA, 362 bp, Zea mays
  Clone ID: MRT4577_86024C.1
ccagctcgctcgttccagctgatcaggtcgagcacctagtagcgacctgctcgatcatcagtgtagagtgtcggtaggcgtctgtcttcttggtggctggttgcaacggtcatggcgacgtcctcttgtccggtgcccttgctgctgctgtgcctgagcgtgctgatgttctgctccttcgcggcgggcagcttggaccaggagctggacatgacgtggggcgacggacgcggcaaggttcttgacaaccgacggttgttgacgctgtctgtggaccgcacgttctgctatggggtccagtcccggcacgagtacctgtttcgcaagatcgacatgcagctggggatggtgccgggcaactc

SEQ ID NO: 169342 - DNA, 455 bp, Zea mays
  unsure (1)..(455): unsure at all n locations
  Clone ID: MRT4577_86025C.1
acatgcacgancattacgattggttgaaatgttttatgttttatttttctcttatatatgttaggatgtatgtgtctaatatatataatatatatccctttggcgctaatgatcgaatctatgaccatagtatatcaaatcgagaagatgtacacatcgtgaaattttatatctcataacaacacgaatcatgattatgacttttgtatgggtaaaaattcgatgttttggtatagtttgtgtatttatattataaaatataatatagaaaaataaaagaaaaaataggaaatccacaattttccggtttagtaaagcgcttgcacaaataaaaaccgggattggcatttcagtattcgtccaaaaaagtgtagagagtgtcatctttctcggttttgcgtcgactaagcaaagccttgagcaatcgtttgctcttgatcggatgttgctgctct

SEQ ID NO: 169343 - DNA, 483 bp, Zea mays
  Clone ID: MRT4577_86026C.1
cattgggtacctcgaggccggccgggatcttgttttcgacatctggcacgtggtcatggagtcgtacatgctctccgctacctacgtggcactccaggaagggggcgggctggccgagttcttcgggttcacgagctctctgtcgctgcccatgcgccggaatgccacctctgacgacttcatgttcgtcgtctccttcaggatccacgcagaagaaaagagcagcgagacgcggtgcgcgacgacggaggcgaagatgaaggaggccatacaatgagttcgagacgcatcagacgcaacttcctgcagcgctggcacgggcgcgacgacgcctcgcccctcgaagacatccccatctacgacaccgaaggctgcaagcaggcggcccacctgttcaagtacgactccactgtcggtatcttctatgccgacgtcaagccctgcgatgacaacggcatctcccttgatggcaaagtcatccag

SEQ ID NO: 169344 - DNA, 521 bp, Zea mays
  Clone ID: MRT4577_86027C.1
aacccaaaatgggcaggcagtaaataacccttccaagaaataatatataccgtatcgaaaagcttaaagcgaacatgtttttttttttttcgaaaaaaaatggcagggaacaacaacgggaaaagcccacatcgatcgccaaaaccccaactcatctaattttctggggacaaagggatagctaaaaacttgctgaactatcgatggccctggggataaaagcaaacccgaggggcaaactaacagccttggcaaatcttaccctataaaaacaaaattacaaacgaaaacaactacatgttctgacttccattttattggggggggggaaaagaattgctctgggtatgccgccttcgaatctgatttgcacgtatggttctgccaacctctaaagatttaagggctcatcttccccgaacatttcttgggctttaattgaagattgggggaaaaccgaaacaaccatcaaccgtctttgaaaaaatgctgccatgaagaggaaaaaagaacacatcccg

SEQ ID NO: 169345 - DNA, 242 bp, Zea mays
  Clone ID: MRT4577_86028C.1
ccccacaccacccttaacataacaatttaacaaattttcaactacatttccttccatcacctcattaaatcccccttcatacatattatcaatacaaccactatccaatttaaacttttcaataattacaacacccatcatttccacaacttccatatcaaaatcccactaatctaccataaaatcaatcctccttccttaaaattccataccacctttaacacttacaaacccaacctttt

SEQ ID NO: 169346 - DNA, 759 bp, Zea mays
  Clone ID: MRT4577_86029C.1
gttattatcaagtggaagaaattgttcgcgataaagccattgaaacttatgaggctatctgctaccatactggctttcttgccttcattcgttcagcaagtcaagtctccaagaatcttggcttcctttattctctgatgaacagctctttctctttctacctattctcataccaagttcatgagaaatcaattttgcttcctcttttacctggaagtcttttagcactggaagaacctcggatgtacggatggttcgtgtactttgcccttttctcaatgtacccacttatctgccgtgatcagcttcttctacaatacatagctgttcttagcctattctttctgatatactactcacctggcggaagctacggaaagagatcaaacatttcatgcaaggcaaagttagttcttagcttgccatttttatgctcacttctacttcacattacctacctgcaaatagagcctcccaagaggtatcccttcctctttgatgcactgataatgttcgtctgtttttcacaatttgtcatcttagctgtgtacaccaactataagcaatggatgttggactcaaattctagatccataggtgtgaagaaggatctgtgattgaaaattttgactgctaattttacagagaaatccactgtccctttgtaaccttgtgtgtattcccttttaacattatttattgaatgaaatgcggtgcaaattcagacatttgtgtaaaaaaaaaaaaaaaaaagcggcc

SEQ ID NO: 169347 - DNA, 418 bp, Zea mays
  Clone ID: MRT4577_8602C.1
gactcttcaccctagatctcgagccgacgccctttatggttaatgatctggatcatttacctggaccattggaactcatccatggggattctgcactttatgccgacgagcatacaaacgcccaactacacaacatgagctcattcatcaaacccactttgaccctgctgtcgaggaccaactaccagacatattatcagtacgaaccaaccgtcgagtccctcactgctctttcccataccttcgatacgaaacggctgcagctcccaacggtcaatattcacatccccgggcctctctacatgacatacgaagaggcacacgacgtcaattcatctgcacattctgtaccgacatcacccagcacaagattctacccatacaacgataacttctacatcgactaatgctgcatcat

SEQ ID NO: 169348 - DNA, 591 bp, Zea mays
  Clone ID: MRT4577_86030C.1
acttctattccatcacccccagcgtgtgtgctgcactccctccctgtccctgttctctctctcgaggcgacggcgacggagacgactgggcggacgttgctgccgccctactcgacaggcgcccaggattcttcgttccctgtcgccgacgacgagtgtcaccaggttcctcgtctccggaacgcagagcaaacagagcgatctcggcccactaggagcctcacgacttgactcccaagactccagggctgaatcgtgtttcttccatgcgtgccagctgggatctcgtatgtgctggtttacgaaaggaccgtgtctctgtgctttgctgccgcaatcatgcaaagaggtcgagacatggggcctgtgcacgacagtgaccatacatgctatggctgcgtgatgttgccatcgacaccgcgaaaagtcacacactagcctcctgctgaacggagaaggaaatgcgctgaccggatgagcgtgtacttctgctttgaatactatagaatgcacggcgcatgcgtgatcgaccatgccgaacttgtaccagaatctggacgtcatgagacagatgcgcgtgctatagagagt

SEQ ID NO: 169349 - DNA, 231 bp, Zea mays
  Clone ID: MRT4577_86031C.1
ggcccccccagcgtttaagcgagaaacctcgtgtgaagagccgccccaaaaagatttttattgtagaaaagggccggccttccattaatgggggggggcaaaaaaaaatccgggggcgccaaaaactctttttttaaaagtaagggcaccataaaaccgcaaaggaaagagatagcgcaacgagccccccccagagctgggcaggggccgcgcccaagcaccctccccgcc

SEQ ID NO: 169350 - DNA, 316 bp, Zea mays
  unsure (1)..(316): unsure at all n locations
  Clone ID: MRT4577_86032C.1
ncggacccntnngaaanttacaagaatctttcaacatttaacctgttcagaantctgtgaancagacttctangggtagggcaaaagtnnttcntaaaacacaaantcttgcacaacttncanctgctanaattnaangtanccaggggacatctaccantcatttctgttaaatcaaaatgagctgtccccaccataaacctaatattgatggttataatgttaaggattttgatcacacgagggtggcaaatcttactgaaatttggaaatcactaaaaagacttagattgctttagaagcgatctttctcttc

SEQ ID NO: 169351 - DNA, 334 bp, Zea mays
  Clone ID: MRT4577_86033C.1
aaaggaaacacctgttaaattaaccactgaaatgtttcgaagccttttgactggggagctagcatttgggtcgaaaagcaccaagtagttgttcaggcagccacagccagatgttttgataagtttgggtttggcactttggctgatatttactgaacaagaggagggtatgtgctggttactgcattttttaacaaaacttttttttttgtagttacagttgcgtcgttttttattagaaacaaaaacacatagtcattacatttcataacctgatgacttctgcacaaatgggacttttgcagtaaggcctgttccctgtgcgtataaacgg

SEQ ID NO: 169352 - DNA, 505 bp, Zea mays
  Clone ID: MRT4577_86034C.1
ttcggccggggacgccctccccctctcccgttctcccacgcccaatgtggacgttcttggtgtcgtcgagatctgtgcgtgtggcggcctccgagtacgccctcgtcgccatctccgacccgaagactaaagccaagccgtgcccccgcctctcccccggagacaccgccccatctcctcaatccctctctccatccaaagcttgtgcgccgtcgccatcgccgaacgtctctccttcctagccttcgcctgtccctcctcccctgcccgctaccccctcatacgggcacggtcgctgcctcctccacacgctaacggagcccgagcccatcccaccttcaacgcccccgcctcccctcctccccctcccccacatgcctccaccgcttctctccagcgccgccaccaccgtcccactcactactgcgagctccacatccggtgaggcggaacggatcaggggggtaacgcgccggaaccgacgttgcgcccacacatgccatat

SEQ ID NO: 169353 - DNA, 206 bp, Zea mays
  Clone ID: MRT4577_86035C.1
aaatccaggaaagagaaacgaaaaaaaacactactcatgataatgtttctgagttttagtttgtcgacatggccagactcaaggtgtcaaaagggagggagatgagctgagcaactgttgtagtgtagtctcaaactcaaagcgtttaggtcttgacatttgacaaactaaaactcagaaacactactcatgatcggacgcgtggg

SEQ ID NO: 169354 - DNA, 1186 bp, Zea mays
  Clone ID: MRT4577_86036C.1
gttcatccaatgtatatttctccactattaaattacattggatgaacagaaagcgtgtgagaagattctaacaggctttctgttcatccaatgtatatttctccactattaaattacaaaattagcttagtgtgatacaattgcttgcttattgcagccggcctgttgcaattttcaataccgaacttagcgtggagaatttcaaggcagctatgtctattcctacaacccttggccttgatccaactgttgcaaactcagtgcatcaagttataaatagaagcctcggatcaatcattccaagaaatgtgcagaaggcagttctagaaggattgttttctcttggtagggcacaagtctcagactatatcctgaatgagaaaaatcccattgggtcgttgagactagcaagattgagaagtattctcgatgaaggcaaaagtcttcagctgcagttccctgcagaggatcttggcttccactatgcagaaggtgctctagttgttgaagctagttgtgagaagactcatgaaggagaaaaactacagcattctaagagggcatcaagagagtacatcccatctgctaaggttggttcgcggcttccccacatgctagtaagagaagtgcctgcttcgagtgagggcgcgttctcaacactggacctagtgagtggggataaactcgagtttgttctcatcattgcaccagtgaaagagtcatatgagattgcccgtgccaccctcaagatagcagatgagcttacgctatcagccagagtatgtgtaatgtggccacgaggttcgactgatgctgaagtggaagagagcagatccgagttgacaccctggacaaactacatcgatgtcgaggaagtgcctagggtgtcgggtggttcatggtgggagatgtgtcgtattagtaggaagagtgtccttttggttaggcctgatgagcacatagcatggctaacagaactggacagggtgagggatgctgagtcagaaattaggagggtcttctctcatgttctgtgcctaaatagccaccgggtgtaagaatttataaatttccttccatttaggctttgtttagatactttggtattcactttaatccacatgtatggaagcggattaggttataaattaaattaatttaaaaaaaaaaaaaaaaaaactcgaga

SEQ ID NO: 169355 - DNA, 690 bp, Zea mays
  Clone ID: MRT4577_86037C.1
gtgcaggcgctcgatgccggccgtatctacctaacttatctcttatcgtgcgcgcctctacgtttctgcactctctgcgcctccgtctccgcctacgtctgatccatccaaaacaggaatcggcatggcaaagtcggaggagcaccacttgcatatcaaaggccgacgctggggcgaccaagacctacccgtaggaggctggcaccgctcgaaataacggattcctcgtcatcaagaaccgcccctgcaaggttgtggaggcctctacctccaagactgggaaccatgaccacgctcaaatgtcacttgtgtcgccataacacatattccatgggaagaagcttgaagatattgtgcctgcatcaacaccagtgtgacacttccgtatgtgaaccggactgactatcacctgactgatattgctgaagatggatataggacccttcttacttcacatggcaacactagcgatgatcttatactcccagctgatgagactcttgaggaccatattaaagaacgcgtcaaaagcgtgaaggatcttgttgtgactgtccagactgcgatggatgaggagcatatctgctcgctgaaagatgtgaccccaagaaacttccttggctttgcagacggaaccctactctatctctacttaaatcggaacacaagcgtatcaccaaaggattgcta

SEQ ID NO: 169356 - DNA, 1120 bp, Zea mays
  unsure (1)..(1120): unsure at all n locations
  Clone ID: MRT4577_86038C.1
gaagattttagtgctaaggtatgcgagcaaattatgttcaaattagtcggatgggagccagcagatgttcatgttttagacataaaaccatgggcaatgcatgctgaagttgcagagaagtacatctgctgcaataatcgagtaatcctctctggtgatgccgcacaccggtttcctcctgctggtggttttggaatgaacaccggtgtccaggatgtacataatttggcttggaaattgggcttactgctgaatggtgtcgcctcaccatcaatattacaaacttatgagtcagagcgccggcctgttgcaattttcaataccgaacttagcgtggagaatttcaaggcagctatgtctattcctacaacccttggccttgatccaactgttgcaaactcagtgcatcaagttataaatagaagcttcggatcaatcattccaagaaatgtgcagaaggcagttctagaaggattgttttctcttggtagggcacaagtctcagactcatatctctgaatgagcaaaaatcccattgggtcgttgagactagcaagattgagaagtattctcgatgaaggcaaaagtcttcagctgcagttccctgcagaggatcttggcttccaaatggtgaaaattatgcaaatttttcttgtctctttcacttcttccttcagctatgcagaaggtgctctagttgttgaagctagttgtgagaagactcatgaaggagaaaaactacagcattctaagagggcatcaagagagtacatcccatctgctaaggttggttcgcggcttccccacatgctagtaagagaagtgcctgcttcgagtgagggcgcgttctcaacactggacctagtgagtggggataaactcgagtttgttctcatcattgcaccagtgaaagagtcatatgagattgcccgtgccaccctcaagatagcagatgagcttacgctatcagccagagtatgtgtaatgtggccacgaggttcgactgatgctgaagtggaagagagcagatccgagttgacaccctggacaaactacatcgatgtcgnagaagtgcctagggtgtcgggtggttcatggtgggagatgtgtcgtattagta

SEQ ID NO: 169357 - DNA, 760 bp, Zea mays
  unsure (1)..(760): unsure at all n locations
  Clone ID: MRT4577_86039C.1
ccgtcctcggcggcgtgaaggagaacccagccgcggccaacagcgccgagtccgacgggctcggccgcttcgccgtcgacgagcacaacaggcgcgagaacgcgctgctggagttcgtgcgcgtggtggaggccaaggagcaggtggtggccggcacgctgcaccacctcacgctcgaggccgtcgaggccgggaggaagaagctctacgaggccaaggtctgggtcaagccatggctcgacttcaaggagctccaggaattcagccacaagggggacgccaccgccttcaccaacgccgacctcggcgccaagcaaggtggacatgagcctggttggcgtgaggttccagtagaggatcctgtggtcaaagatgctgcacaccatgctgtgaaatcgatccaagagaggtccaactccctgtttccctacgaacttctcgagatccttcgtgcccatgcacaggttgtggaagactttgcaaaatttgacattctgatgaaactgaagagcctggaaggggcctttgtgctaaaccagcatcagccggcggagcatgatgagtcgagcagccagngaactgacgtaactgtgtgagctgtagnagnaacgtacttcgtgttacgtagaagaataaggagaaaacgaccaatccggttatatctggatgtcatgtatggtcgacggtcgttgctggcttggcttccgaagacggnacctgctgtcgcacttgccgttataataggcattggaacttgtcg

SEQ ID NO: 169358 - DNA, 404 bp, Zea mays
  Clone ID: MRT4577_8603C.1
ccccaaaatgttggaacaaataatttgaaggaactgttatccaaaactttttaacaaaaaagttgatgggtaaccgccgattttttggttttcccccccccgtttccccaaatttttttttccacaaaattttggccccccttggcttaaaattcaaaaatccccccctttgggcaaaattttccttccttttgaaaatcccccaccttggaaaaacccaactggcgggcccttttcccttgaaactaattttttcaaagaccccactttgaaccccttgttgggttttaaattaaaactgcgggcaaattttatggcttaaataaaccttccttcattttttccccaaaccggggattctggggggccccttccttatttaccctaccctcctaagggccttt

SEQ ID NO: 169359 - DNA, 382 bp, Zea mays
  Clone ID: MRT4577_86040C.1
ttttttttttttttttttttttttttttgttttttttttttttttttttttttttttttttttttttttttttttttttttttttttactttaaaacaccccaaaaactttgggcgggaaccaaaaccggatggggttcaaccgccgattaaccacaaaaaaagggcccaaggttttttttaaaaaaagggcatcaattggcattttaaaaccggtttccccaacgcttttttttttataagcggggtaggaaacatgggtccaatttgaattccaaaactttaaggggaagggggaccctttttttaaagggggggtgaactcccaagcccagggatcattggttgaaaggggggtactggaaaaccaaaccctcccccag

SEQ ID NO: 169360 - DNA, 1176 bp, Zea mays
  Clone ID: MRT4577_86041C.1
agaatgtgtcttttttttaagcaaccgaagggtagtgtgggataccatatatcaacatacgatccatcatattataaataaacaatacggcacaaacagatcagctcccgaaatcgacaagttccaatgcctattataacggcaagtgcgacagcaggtaccgtcttccagcaccagtatgcctgctgcgttcggaagccaagccagcaacgaccgtcgaccatacatgacatccagataaaaccggattggtcgttttctccttattcttctacgtaacacgaagtacgttactactacagctcacacagttacgtcagttcactggctgctcgactcatcatgctccgccggctgatgctggtttagcacaaaggccccttccaggctcttatggacctcggctttgatcttctcctccttgctgcctctcttcagtttcatcagaatgtcaaattttgcaaagtcttccacaacctgtgcatgggcacgaaggatctcgagaagttcgtagggaaacagggagttggacctctcttggatcgatttcacagcatggtgtgcagcatctttgaccacaggatcctctactggaacctcacgccaaccaggctcatgtccaccttgcttggcgccgaggtcggcgttggtgaaggcggtggcgtcccccttgtggctgaattcctggagctccttgaagtcgagccatggcttgacccagaccttggcctcgtagagcttcttcctcccggcctcgacggcctcgagcgtgaggtggtgcagcgtgccggccaccacctgctccttggcctccaccacgcgcacgaactccagcagcgcgttctcgcgcctgttgtgctcgtcgacggcgaagcggccgagcccgtcggactcggcgctgttggccgcggctgggttctccttcacgccgccgaggacgtggccggccatggctgctcctccgatcgcgagggacgcgcaaccgaggagtacgaggaggagcaggaaggcgctcggagggtgagcggcggcggcggcggcggttcgggtcgcggcaacgcgcatgctctggtagtggaggaggactgcgaagtctggcggtttgattcacttgagattgctttggctgccattttcggctgccattttcatccagctgcagctgcaaacaaacac

SEQ ID NO: 169361 - DNA, 307 bp, Zea mays
  Clone ID: MRT4577_86042C.1
acttcacaaacagactccctgagaatgactgccgctacgccatctatgacgggggtgtgataccgagaggatgtccataagagcaggatcttctatatcctatggtccccatcctccgccaaggtgaagagcacgatgctctatgcaagctcatgcgaacacacctgacagtgccctcaatggcattcacgttgaacttccggccacagatgcgagggaaatcagcctagatgccatcaccgatcgggcacgctaagcgcagcgcaatcgggagggccatgggtacgcatcatggactcggctacta

SEQ ID NO: 169362 - DNA, 325 bp, Zea mays
  Clone ID: MRT4577_86043C.1
acctcgctccctcgcgtctcggtaatctccatctccctccacatgccccaaaatgcaacctgcaaacctaagccggagccacatagccagcaacaactaggattgtactatcaaacatctggatctggaagacacacaatctgcccgcgagacttgagagtgaattgctcgggcgtgcggattagacgacgacacgatgatgggatgggtgctgatgatggatcacagagtgttgttccctgccgtccctaactttgtggatctcctgatgatgatctcccaccagaatctgggattcacctcactcatggcgcatacgtcctcc

SEQ ID NO: 169363 - DNA, 299 bp, Zea mays
  Clone ID: MRT4577_86044C.1
ctcgccgttgccgcagttcaggaggcagtctccttctcggaggcagcagaggcagaagagcccgcgcccagccccgtctccgccgcagtcgcaggatcatcacacatcgcagcggaacaagacaactacgacaacgaattaataaacaaagacatccatcactagaaacaaaaaaacataataaaaaacataaagcaccataaaaataaacaaaaaaaaaacaaaaaaaataaaaaaaaaaacaaaaaacaaaaaaataaaaaacaaaaaaaaaacaaaaaaataaaaaacaactatat

SEQ ID NO: 169364 - DNA, 287 bp, Zea mays
  Clone ID: MRT4577_86045C.1
gatttctggacgttgtaaatatcataagtgattgttcatcgcagtgacgactacttcagtttccacgccttgatgaaatggtacatctctcaagaccatatctatatctggtctatagagatgtacaatttataagatggcgtggagtctgaagctataaatactgggctgaaactttagaaaataaaactttattattccttgatactatgctcattgtttttcttaggctttcttaacatcattaaattgggcggcttaacacaactgttttaatgtgaaaaccc

SEQ ID NO: 169365 - DNA, 170 bp, Zea mays
  Clone ID: MRT4577_86046C.1
catcgacccgttttctgcatatggttgtattgcatgtgtgggggtaacagcgacccggtcagtttcagagccggtcgctgagtcccaggttacataagaccgctacgcagattttaggggcttaccaaagcagtggtagcgatggaggacgcatatcaactgtacacatc

SEQ ID NO: 169366 - DNA, 243 bp, Zea mays
  unsure (1)..(243): unsure at all n locations
  Clone ID: MRT4577_86047C.1
aaactnngatcctctaaaaacnacccacncttcncttcttatccacactcctctnctccaccaaagctttcttttaaaagaagaaagatccccctcattcttttacttaccatctttctctcctcccttacaaaaaaaaatccctcctacattacgcatatctattcctttctcaccctcaacatatacatattttactatacctactccaaacacccctttatattcatatatttatacacc

SEQ ID NO: 169367 - DNA, 261 bp, Zea mays
  Clone ID: MRT4577_86048C.1
gttaaaggtctcccacaagactggttatctatttgcctgaagaaacaaggcattgaatctctaaaatgctgttctacaatcattgtcagagatgttttcaagttgaagtcagaagatctttcttaatagaaagtcagatgactatgatgtagaaaatagattccccttaagtataactaatttgaactgtggtaagagatatgctcattattaccacttagaagatgttgttaaaaacatgtgaaagataggtatggaaaa

SEQ ID NO: 169368 - DNA, 297 bp, Zea mays
  Clone ID: MRT4577_8604C.1
accttcacgtaggtagaccctcgtatatatatatcatcctcaagtcagaaaaaatgacctccaaagcaatcgtcctcatcactggcgccaatcgaggcatcggctacggcgtcgctcgcagactaattcgcgagcaccccgattaccacgttatcatcggcagccgtgatgccactcaaggccgcgaggcagcttcaaccctccgcgcggaagaagccgcgtcctcaccatcgatatccagcgtcgaactagacgttacctccgacacatccatcacagctgccaaggagaccatcg

SEQ ID NO: 169369 - DNA, 514 bp, Zea mays
  Clone ID: MRT4577_86050C.1
attgttctgaatagaattattttgcactgcagccttagatatgccattcttgaatacaactggcctgccatgaatctgacttgtagtattacgcaaacgaaactttccctggagtccctatacttaaccccttgaaacatttatcagttttaccagtggccgacatacctttgcattgagtgctctacacggtagaccgttgggcaaacttcaacaacatgcgaacatttatacactgggctcagttataaaccagctggaatcttccaggcttgaatcacttgtgaaacaccaccttgacagatcattgaacctcaaacttgatattgaccattttcttgatgatgggccaacatatggccactgattaaaaggctgcaaagcacatgtttcgatatgaaatatagccagttataatcacgatgtttacatatgaatcacagcgagacttgctaaggcactccctcgaggacttcatgaccaccagctggtatggggcctatgtgaggccagc

SEQ ID NO: 169370 - DNA, 802 bp, Zea mays
  Clone ID: MRT4577_86051C.1
cccctcgagtttttttttttttttttttttttttttttaaactattattatggttaaacaattgtgttgtcgccataatgacaaccacaaagataaaaatcctgaacttcttgcgacagatatgaatgactcttccaatttccaaagccctgtacatgtttatctagacatgctaaatttgccatggcgaatccatttccagatacatacatgtcacaatagcagatataagggtagaccccagacatcttaaaatgaaaaccattaggaatagcactggggggatttttctatcaaaaaaagtgctgtaaacactttgcaacagcccaattcaccagtaatctccacatgaacagctgccactgttaaaatggtgaaatctgtacacatctcgtaatacaatttctcttcttgtgacttcagaggtaaatttcatccaactgtggcagtcatcacatacacgaaggttcttaatcactcgaagaggaatacaaggaggcaaagtcattaacccaaaagcaacagctaacttctcactatggacaaaagcagtagggtctttctgctcttgctctttttcatgaaacaaattagggttctcttgcttgtatcctattttggataacctatcatttagctcagacaaaaacttgtatatctgatcggacaaggggtgcgaccgatcaccaacaaagaatgcatggactgcattctttacttcaatccagcttcgacctggttcttttctaattcctctgtctttcatcatctttctgacctgatccctgttggcccacttccc

SEQ ID NO: 169371 - DNA, 219 bp, Zea mays
  Clone ID: MRT4577_86052C.1
acagatcttaacatgcgtttctacgaatttgttgtcctgcacgaggacgccactgcggtgtgaactctgttatgctttttgacatgcattaattcttctcgcgttcgcggagtacccatctgtctattagaggagccaggactggatgccttactaaacgggatgacttgatctatcttcgccaatgtgcacgcactcacgtatgagactcttgcgccc

SEQ ID NO: 169372 - DNA, 362 bp, Zea mays
  Clone ID: MRT4577_86053C.1
ttgttttttttttttttaatttttttttttttttttttttttttttttttttttttttgttttttttttttttttttttaatagggtttaaaaatttaatcggtagaagtaaaataaaattaaaattggcgttaaaattatacatttgtttgtaagggagcccttttaaaaaacctcgccgtattaatactaacaaaacgatgttcaaaagttagccttgaaattaaatttattcaaagggattggttgaaatttggggcttaattttcactgacaaaatgaaaaagggaggtaattaattaacttaacaggaggttttgttttaaggtctaaaaaaagcctggtggggaaaggcgaaaatt

SEQ ID NO: 169373 - DNA, 387 bp, Zea mays
  Clone ID: MRT4577_86054C.1
cgagttacatgttcggtggaacaattattggcaccgggagtttgccgggcatgtcaaaatggctatgggcagattctgacaggaagttgactttgtgctgttatttttgcaggaagttgactttcctctgttgctgctatgctcagtgtggatgacattgtgctgcctcagatcaacgtccgctggtccgccctcagtacgcacctgccgttcgttgctgctagaagcatcgcgttgcagatcgactttcttcgtgctccacaccttcgcctcgcccgttctcatgccccgcagctaatactttccatccggcttctacaccttacgggtcgaatgggccatccttaccgtccaactcggggacatttttgaccatgggaaacgagc

SEQ ID NO: 169374 - DNA, 649 bp, Zea mays
  Clone ID: MRT4577_86055C.1
gccaaattgttgcacatgctcatgctgcaatacatgggcagaatggtcaggctcatccttgccctacatgtcggcaaccgtctccaaagatcggaaacaacaaccacctcttctgttgggcatgccagaagcatttttgtgccctgtgccataaggctgtccaaaagcccgcacagcattacggccccaaaggatgcaagcaacatacggcagatccctgaatgaggttttcccatatgtgcatcaacaccgtggtgccagggcagtttccatgtgttctgtgcaagtacagataaatacttgtcagataaatacttgtcctgggacgtacttcactcctggattccattattattattatttttgctgcaagcatgttttgaagtttccgtcgtcgttgtacctacagtaacaattgtgcagtttacattcgggaacatgaacaggaactgttcattcattcgttcagtaccagatgaattgttgagaatactcgggtgttgaagttgagaatactcgcgtattaaagatgcgattgaacacaagtcaaaaaccgatagaaccttgtaaaattctaaaagggaagattatttgatgtactgttggattgatcttatgccaatacaaaggaagctgtcattgtttggtt

SEQ ID NO: 169375 - DNA, 309 bp, Zea mays
  Clone ID: MRT4577_86056C.1
caagaaaagggggggctagggttcagttatataggttccttcaaaaaaatcttatgggattgccttatcaactagatctaaaccctggaaggagttgaaacatccttatggcatatgcgtacaatttcaggttggtacatattttaccgatggggccaaaggccttaggctgcccccttgacctggcccaaaaccacagactgtagtgaagaacaagcccgggagggttaataggaacagctagtatcgttagttgaacaaattactgttataatgagcccggcttatgggggtggagggttgaactta

SEQ ID NO: 169376 - DNA, 1170 bp, Zea mays
  Clone ID: MRT4577_86057C.1
gcacctgcttggagaggatgaatatgaacctacaggaactacgcagcctgaaggaacccttgatgcgatgaaagatgttgtcaacaggcaggaatgccatactgcttgcttggaggacgtaggtaaatgaagcagtatgttcaagttgtttgttcagcttttgcactctctgtagaaatcgccgccatattggagagcaatgtatgtctccagaagagagacttatgatcttggagaaacgccaagaatctgggaatgtgcaaggagatcagatgaaagttctacaggaactacgcagcctgaaggaaattatgaaggattcaaaacagtgcccaaaatgcaggatggccatatctaagacagaaggatgcaataagatgcattgtgagaactgtggggagtacttctgctatcaatgcaaccgtgcgatcactggatatgagcatttcaggggttcgtgtgtgcttttccctcaagaggaattggacagatgggaaatgcaaatgaatcaaagggtcggacgccaaattgttgcacatgctcatgctgcaatacatgggcagaatggtcaagctcatccttgccctacatgtcggcaaccgtctccaaagatcggaaacaacaaccacctcttctgttgggcatgccagaagcatttttgtgccctgtgtcataaggctgtccaaaagcccgcacagcattatggccccaaaggatgcaagcaacatacggcagatccctaaatgaggttttcacacatgtgcatcaacaccgtggtgccagtgcagtttccatgtgttctgtgcaagtacagataaatacttgtcctgggacgtacttcactcctggattccattatttttttttgctgcgagcatgttttgaagtttccgtcgtcgttgtacctacagtaacagttctgcagtttacattcgggaacatgaacaggaactgttcattcattcgttgaataccagatgaattgttgagaatactcgcatattgaagacacgattgaacaccaagtccaaaaccgatagaaccttgtaaaattttaaaagggaagattatttgttgtactgttggattgatcttatgccaatacaaagaaagctgtcattgtttggttaaaaaaaaaaaaaaaaaaaaaaaaaaaaaataaatatttat

SEQ ID NO: 169377 - DNA, 783 bp, Zea mays
  unsure (1)..(783): unsure at all n locations
  Clone ID: MRT4577_86058C.1
acttgnnggtggaacgattctacanttcgccaagataacaggagcctgtccgagaactggagcggcatcggtttggaccatgatggcctagaagacgaggtggcgttctcggatttcgacaaccgcaacaccttctcttcgtcgaacagcgagctccgtttctcttcgtcaaatgagcacctgcggaacagaaaggcgtgcagaaaccacccgccgctccttccgcccgccctctctgccgacagtttgcttaggtcagtcagcaggatgacggactcgactgaatttaaggccgttacgacgtgcaatacctgcaagcccgcaacgatcagtagggacgacaccgaagctgctgatgcaaggtccttgaagaacctcaacagcaccgcgccgctgtcaaactcccggacaaggcgcaatgggccacacattctctcctggctcttaccgaagtcaaagaggaagccaaaaccagatgtgtccccaaacaccgtcgaatgcgagaacatgtcgcagcttctgaaggactggggtgtgttctcactggattccctgaggaaagaggtcgttgaggccaatgagcacagggacgccgcgctccaagaggtatcagagatgaaactatcactaggagagctgactgccaagctagtgagcctggaagcatactgttcggaattgaagaaggctctaaagcaagcgacgagcgccgaagacatgcagtctcactcaaagagatcggctaggccagntagcgggagcagagacagcttcttgcccgtc

SEQ ID NO: 169378 - DNA, 598 bp, Zea mays
  unsure (1)..(598): unsure at all n locations
  Clone ID: MRT4577_86059C.1
ccggccgggactccccaccgtgcagtcattaaacatagacacaggcgagccgctacctcggcacccatagttgacatacatgatgtccatgggccccgcccttgcgatgctggctgcccttgggtggtgcggtcctgcaacagcgccactcagctcccaagatgaccacgaaatacaaggctgagcggctgaccgttagggccacctggtcagcatagcccaacgggtgcagcaactactgacaacgggaggacttgctgctatcacacaacgtngaacgctgcccacctgtacacgtggcatgatcgacacgcaaggaacgactcaatctccaaggtctggatacggcttgggtgtcatgcttcgaggtgagacgcatggacaaaactgaatgctccggcaattcaaggctgtgaccatctatgacatcaactacgaacctatagctccctaccatgtatgaactatagcggcaaggacttcacctacctgatgaagtccgagataatcgacttgattcaacggtgtggtatgatgcccgaccagccaagaaagaagctatgctagatccctgtcgtgccgactagctgggttgaca

SEQ ID NO: 169379 - DNA, 249 bp, Zea mays
  Clone ID: MRT4577_8605C.1
cccactcgtccggccgttctagccaatcttctaacctgacaatgtcttccgcccggggcggcttttctaggccggggctgggagccaatacgaggtgctgtgccccgcttccaacacagtcaataagtaaaacaacgtcacaaggagtggtaattcacaagcgcccacaggctcccacatatcctacacctatcaagtcatttcacaaagactgactagagtcaaactcaacaggtactactttaaacg

SEQ ID NO: 169380 - DNA, 303 bp, Zea mays
  Clone ID: MRT4577_86060C.1
gggggcatgttaaagggaaaacaaacattattccggctgaattccttgtatggtaccctgggggaaacatgacgaaggtgaacgctgaactggttaaagaaccctcatcataagggcctttaaacgcctgaaatcattggaggctttatatcctaaaaattatttgttgggggccttgccacctgtggaacgcctatagggatccttgtacacccacggttcgtaggagatggcgtgaaccccacccttttttttagcccacgtatgttgaagtaggctccaaaacatgaacctggcttggtt

SEQ ID NO: 169381 - DNA, 482 bp, Zea mays
  Clone ID: MRT4577_86061C.1
gacgcgtgggtgaggatatgaagaaaacgagaaagaacttcatgcatgctctgaagtgcctcgtagttgagtcagaacaaggcgcggatgggtgcgacagagctgtgggatctcttggcctccgactcagagcaattcgtggagatgtgcagggtgtatcaacacctcaagctgaagaactggtttgtaaggtcgagactacagtacggggcagactttgttgctcactgtcatcgtccgacacttgcgcactcgtagttcgtggaggttgtggctctagaagggaaagcattcgacaccaggtgtgccctcatgaaggtctggtctgaactattatgtgtgctttgggactcttcaagtgtggccaagacgttacttcttcttaccatcagcaccaagagctatgagctaggatacttggattgtttggagcaaatgattgttcatgagaggacgatcacgagatggatatcatagccatg

SEQ ID NO: 169382 - DNA, 327 bp, Zea mays
  Clone ID: MRT4577_86062C.1
cacttcaacatcgagctgactttttggaataaagatgaaatgggacaacgacagcttgcagtattataagttacaagatgacaattggggcaacattttttttgtgttagtccaattcaaaactggggagtagtgtgaaatgggatttttagcagatgggcagatgtaggcaatatcatactttgacatgcatccttctctttctttttcatcaaaagatggagctcgggtttcaacagtcttcttcctccattcaacaatatttgttgacctcttatcagagcctcgtgttacatgtcgcctggaccaccgggtcacagttacttg

SEQ ID NO: 169383 - DNA, 308 bp, Zea mays
  Clone ID: MRT4577_86063C.1
aaaaaaaataaaaaaaaaaaaaaaaataaagcaaaagaaaaaaacaaaagcaaaatggaaaaaccaggacagccggtcttgtggatccagagcttgggacgcgtgtctagagacgcctatctcttctatggcgcatgctagatgactaccactggctgccgtgttccaacttcgggtctgggaaaaccattttcaatgcccagcttattggccttgcagctcatccccatttcgccgagctggtgtaatgcccaagagtccctgaccgttcgtcctttccaacagtttgcgcacctgaatggctaatg

SEQ ID NO: 169384 - DNA, 567 bp, Zea mays
  Clone ID: MRT4577_86064C.1
ccggccggggcgcatagctgcctgcaccttctttctctctcctctattcactctatagggtccgggatagatctagagagaaggttcaagatcctaggtacaaagaggcagaaagagaccggggaggaaggacgagcaagaagaggacgatgaagaagggtgatgcaagagtaccaagaagacgccggccaatatagcccctctcctccctgcttcctccggtcctctctcatccatctcctccagctgaaagcgaaacgtacaggcccggccggggagggagactacctcgcaggccaatctctctagatttttatctagctagctagctataagatttctctctcttactttctatatcatgaagcaaatgcaaaaagcattttaggtgtgcagacccatctgtgcagttttggccttgggtgaccaatttgaacacacaacacaatcacagagggctagtgtgtacaagtaggagtgattgtgccctcaaatatatatcaagtgtgtgctgctcaattgacacctatattgggttattggaaattcataggtctactttttttt

SEQ ID NO: 169385 - DNA, 304 bp, Zea mays
  Clone ID: MRT4577_86065C.1
ggggggaaaaccccccaattaggaattaaaggaactaattttacccatgtttcacactcccctggtgaaccaaggccggaaacacacaccacgcccccggtacaaatgctttttttcaccagggggggcccccattcccaatccataatccacaacccccatggcaataaaaaaaaaaaagcgccaaaaaaaactaacatgggaggtagctagctaatacttgcggggtccaaaaatggggggggccttcccctttttttaggcccctcccccccccagggaaaagattaccagggccaccggg

SEQ ID NO: 169386 - DNA, 270 bp, Zea mays
  Clone ID: MRT4577_86066C.1
gaaaggtattatacgactaaaatacttctgactatttgcctattattatataatgatacatgcgcactgtttacatagactagcggctgaccaactcgcacctagattaaagagctatgccaacgtcgggtgacaatgttagcatgtgcatgcacatatctcataagagatctgacatctaaactcagaccaaactaaaaactgctcgcttgattctctctgactaatctaactatgacccgtaagcatcctaggctgctcctcatcact

SEQ ID NO: 169387 - DNA, 632 bp, Zea mays
  Clone ID: MRT4577_86067C.1
tattcggcacgaggttgccgcgatgctcccgtcgatctgccatcctctgcctgccccgcttgctccgcgcgtctgctctagtgatttgagacggagatccgccagagatcgaggagccggagagcggcgtcgacgagggatggacgtccacggcggcggaacgggagccggcaagctgacgcggacgccgtcctcgctgctgcgctcgccaacggtgcgcaactgctcctcgttccaggccgtggttgtcgaggacccggagcccgacgacaagaaggcacaggcgcaccccaagcctccgccccaccacttccaccccggcggcggctccaaccacccgctgctcgtcctcgtgctcccgctcgccttcctgcccctgctcctcctcctccgcggcggcgacggccgccacctcgccctcctcgcggcgtccgcggccgccgcgctcgccgccgccgccgcggccgcgcgcctgctccggggacgcctgcgccgctcgccgggctccggctccgtccagtggttcatcggggacgacgacgacgagccgcagaagcgggcggacaagaccgccgcggcgccgcacggccgcgtcgtgcgggagggcgtcgagttctacagcaatggggact

SEQ ID NO: 169388 - DNA, 713 bp, Zea mays
  Clone ID: MRT4577_86068C.1
ccggccggggactgccctcatgcacttgactcccaagtccccaaacaccgccaactcgcggctctgcctgtgctgcacgctatcgataaggatccgctcgtctcctccacaacaaaagcaacgttcgaggcactagccgcagggcactctgaagtgctcttacatatgctgttctacaacacatcagtgctcccaaggcagcaatgcttcctgctgccttttctcgtttcatgacaccttcatctgctcacctacaggatcgagaatttaaaactgccactgtactggatgtcttgaagtgctacagggaagatggctgatggatcttggctctggtgcaccacactaggatagcagatatgacactgtcaaatctatgactcatgacaacgggagatgtttggtggttgacaaacctggacagaataaatcaatcgctgggattgtcactgatatagattatctccggaaaatcatagtgcggggaaagtcttcccagtcaactaatgttcggcgacctcatgactgaagagaacgatctgttcacagtgaatcccgacaccaaggtcctgccggccatgcagctcatgacataaaaccccgtcagacacatccctgtgatcgacggcacgaagatgctgaggatggtctccatcggcgacatcgtgcgcgctctgatggcccaccacatggcagagctgaaccggctcatg

SEQ ID NO: 169389 - DNA, 571 bp, Zea mays
  Clone ID: MRT4577_86069C.1
tctctgctcccgtcgatctgccatcctctgcctgccccgcttgcgcggcgcgtctgctctagtgatttgagacggagatccgccagagattgaggagagggagggaggcgccggggccggggagcggcggcggcgagggatggacggccacggcggcggggcgggggccggcaagctgacgcggacgccgtcctcgctgctgcgctcgcccacggtgcgcaactgctcctcgttccaggccgtggttgtcgacgacccggagcccgacgacaagaaggcgcaggcgcaccccaagcccccgccccaccacttgcaccccggtggcggccccgcccacccgcggctcgtcctcgcgctcccgctcgccttcctgctcgtgctgctcctcctccgcggcggcggcgtcggccaccacctcgccctcctttcggcgtccgcggccgtatcgctcgccacagcagctacgattgagcgcgttacatgtagcctaccccgagcaatttcttgcatttaaccaactgggaggattgaactcttctgtttatttacagtagcaatatctacttaccat

SEQ ID NO: 169390 - DNA, 437 bp, Zea mays
  unsure (1)..(437): unsure at all n locations
  Clone ID: MRT4577_8606C.1
tgtagtaaaatgggcggtgggaagagttngcgctgctnacctgcaangnctagatggtgtgccttctatctgnnacagagnntttgaacctnnctcaagagnngaggcgnnaggcagaatccgcatattcgtcgacccgtctgatcccgcatggttgacattacattatcgtgtgtcgagtctgccggataggccggtaagcaccaggtagacggagagccctctccgtggtgcatcactttcatcnnaggatcntnncagggttttnnngtttcgtnnttcgcgggccgtnntgggaatttccagtccatggcngagtgatagatgtctcanntcgacggtggaaggtgtgcggccccgtcgcgtgattggttgggcacctttatgactacganntctcttcgtcactcggggccgggcaagcggcgtgcgttcgc

SEQ ID NO: 169391 - DNA, 244 bp, Zea mays
  unsure (1)..(244): unsure at all n locations
  Clone ID: MRT4577_86070C.1
ctatctgcattcatttgtatttatataacaacttcttctgtgngacgacactcattataggggggggagtgacctttattataagcatcataataaatttttacttttaaccgtagtatccccccattattgattttataagtgtcatctggccatgtagtcaaatccacgggcgtggccacacaaaagacatctctctggcttacccttcaacttgcctgtctatcgccatttttttatatgc

SEQ ID NO: 169392 - DNA, 502 bp, Zea mays
  Clone ID: MRT4577_86071C.1
gataacctattcaccatctaactaccgatacatctaattacattacatatagcgaaggaaaagcctacgccaactctgccactgcaaatatgtaccgcacatacgacacatgctaccaactccacatcgcgcgacaaggcgtcttcgtcacagctgcgccttcatgtttctcgaaactctgtcccggcaatcgcggcatcgtagaatccctttcgtttccgttctgcgactgtcacgatccgctagatgcgcaagagcagaagagcaaggacctgctgatacgcacgctggcgtgcctgatgctggagcgagagatcgacctggactactagaccgagctgcgcttgcagaactcctccgtccgcgagctgtacgagaacaccgacctctacctcgagatcactcttcaaggatagcaatctctgcgccattgacggcgagatcgtgatcatgatgataatcgacatcctgctcgccatccgtatgcgtgtcgatatctcct

SEQ ID NO: 169393 - DNA, 702 bp, Zea mays
  Clone ID: MRT4577_86072C.1
atttctgctacgcaatggcggccgagcaaaaacgccacaacagttcacatgatatcacagtagacggccccgcgccggatgcttgccctcctgccaccaatccaacaaatggaaacagccagccccatgatactcagcctcctgcaaatggaagcagccaacccgaggaggtgatcgagagctacgagctcatgctcgacctgagcaagtacatcctgctgctggcaacgctggtggccacggtgacatatgccgcggggttcaacccaccggggggcgtctggcaggagactgtcgacgccacgggccaattcgcaggcgactccattatccggaccaccagctaccaccggtacctggtgttctactactgcaacgccaccgcatttgcctcgtcactcgtgatcatcctcgccatcctcttcctcaccctcatggaagagaaaaagaagaaccgcgtcaccctcctgccactgcgggcggtcatggttgtggacctgctaagcgtcatgggagcctatgctgccgggacatgccgcgacaagcccacgaccatcttctcctcggtgctggtggttgccgtcgttgcctaccttgctcttcagatggtgctagcctcgttgccagaagacaagcacagctacatcgacgcagtgcatgagaaacggctacgaaaggtcctgatgctgctcgcgacgttcg

SEQ ID NO: 169394 - DNA, 283 bp, Zea mays
  unsure (1)..(283): unsure at all n locations
  Clone ID: MRT4577_86073C.1
tcctactcgtcatccttatcattgttattctgctgagtgcggcacggctttttctaagaatgaggagtagtctatggatgggcattcagatattactgctgatcggactttgggtgtgtttaaggattcgtggtcntaggatccgttgagtcctgcgtgtattatggacttgaatgatgctacgtctaatcctcctacttatgagatggagggtacgctgtaggtgctggtggcggctactaatattcctgatgagtctgatgtgatgtcgtctgtcgttacg

SEQ ID NO: 169395 - DNA, 310 bp, Zea mays
  Clone ID: MRT4577_86074C.1
cccacgcgtccggggaggcgtcagcgtctgcatatgctgatgtttatagcgcatttgcggagatcgatactattcatgttgtggaaaaacgtgacacacatgacaatgtccgggacgttcctaaggttaacccactggcacctttagcaacgattaatccagaagagcttcactccaaaattctccccatcttcgctgggcgacccgcaatcatggcatgtcaacgacatggctcatgtggcgagccagtttccggggacactgagcgccaccagctactcgatcacagagtagaacatacctgccctga

SEQ ID NO: 169396 - DNA, 278 bp, Zea mays
  Clone ID: MRT4577_86075C.1
tgagacgtcgacgggagaataggatcgggggtgggggtaagggggctgtgccgggaatcgcaacatgccacagaatattatagcgtgagaatcggtcgatgacaaggggggaatgtgaaagtctataacggaatacgaccagctgagacatggagtggagaaaaacggatgagttattacaaaagtctatttggagcggcaggagatttgagagaggatggcctaagaagggctggagggacccggaagcttttaagattgttaggattgtgtgcaac

SEQ ID NO: 169397 - DNA, 388 bp, Zea mays
  Clone ID: MRT4577_86076C.1
ccacgcgtccggatgaagatgaaatggcagatttcattgtggaggaagatgaaattgatgggaatggacaagttgtaaggaggaagaaatttaaaaagaaggtaccacgacaagcagcaggtgtatcatcgtctgctctgcaagaggcccaagacatatttggcgatgttgatgagctgttggcactaagaaaacaagagcttgagagggaggcccttaactctggtgagttaaggggggcgaggcttgaagatgagtttgaaccatttattcttgcagagaagtatatgacatcaaaagatgagcaaataaaagaaaatgatgttcctgagaggatgcagttgtctgaagagttgactgggtatcctccaacggataaaacaacgat

SEQ ID NO: 169398 - DNA, 237 bp, Zea mays
  Clone ID: MRT4577_86077C.1
aatccttatattgttcattcaaattatctctgccccctacccaaagtttttttttttacaaatacaaaaacacaggaccaaccacggggaagggcgcacaccacaaaaatccccacaggcggggccggcaactgggtccagccgcccctataaataattactccgatcccaaaggccaacacaaaaggaccgcgggcggggggggcgaccccgaaaaaccccaccggggccgggggg

SEQ ID NO: 169399 - DNA, 296 bp, Zea mays
  Clone ID: MRT4577_86078C.1
gggcaaaaccggaacggcttttcattttcataccttatcttatataaaaacatatgtatcttactgactacacaactttacaggggaaaaaacactatacatacaactacttacataatactaatattataatgttctgctctaatactaatatacattctgaccctcattttttcaaaagaacagtattgaataaactggtccacttaactatcaaaaacaataaaacactttttcatctactaacagtcaagcctcttgttattatctaatcttaacctattctttcctgtcac

SEQ ID NO: 169400 - DNA, 244 bp, Zea mays
  Clone ID: MRT4577_86079C.1
cagctctcatctcgcaaccgcagctagttacaattcagagagaagaaagagaccgatatctcgccgatagctatcatcatggcgtccaatgcgctcctcgtgctaacgctcctgctcgccgccaccttcctcgccgcctccgctaacttccaatccaaggcggacacataggagaataacgtagcggtcctttactggcatcgcggtttcagcctaccggtttaaggaagcttacgaggcggat

SEQ ID NO: 169401 - DNA, 282 bp, Zea mays
  Clone ID: MRT4577_8607C.1
ccggatattgaagggtcgacccagagcgaccggccacgcgaccgggataagtcgggggtacgagtgtgaatatctgtttgtgattgtgcaaacacttgtggttcatccaagataagtaaatccatgcgggacgctggggagcactacttctaaaagatggccgcacgtaggaatccatacatcattgaagaagagggtggatctgaagaaatacaggtggagcgtgcttgacgatccgagaccggtcatgggaggaggcaagctcgtggagatgttggtggg

SEQ ID NO: 169402 - DNA, 287 bp, Zea mays
  Clone ID: MRT4577_86080C.1
cccccggctggatctcctacccacgaggtttctatctttgtgaaacaactgaaggtccgaaactgggttctcccggaaaggccaggtctcaaaactcgattgtgtcatctctctttttgaccgtaatctttacttgggaaactggcttcagggcaatattaggcaggacaccattgaggatcccgaagagcctttcttggctcaacaatcatgtcgtggcggtcttcttaaaagggcagggatgtcgtatatgtgactgttaatgtgcacgaacagcacactgatgg

SEQ ID NO: 169403 - DNA, 293 bp, Zea mays
  Clone ID: MRT4577_86081C.1
tcggccgccctttgatattttttttccacacgatattactgttctcgttgatctcaggttagggcacctgcgttatgtttcaaccgatctgccgacctaaccaaactttccacccggatctgtcttgcgaggccatcccttcgatccaaacggaccttcgatgccaacgtttcgacccaccgaatatttcaaatcacggtataagtagtggtactttactagcgcccggatgctactacttatcctacacctctaaagataactacacatattaagactttttgtcaaactca

SEQ ID NO: 169404 - DNA, 499 bp, Zea mays
  Clone ID: MRT4577_86082C.1
gtcatccacgcgcgggcgggaaggtccccacagactctccccgaccttgccgtccagtcgtccaccccaccgccgcagcctcgccccgaggagacaggagaacagcaggatgccggcgacgccgacgatcatcggcgccctcctgggactgggcactcagatgtactccaacgccctccgcaagcttccctacatgcgccatgatgatgaatagctgttcagatttgtttgtcagtgacctgtatttttttgcaacatgttgtcagtacacatggtcaggactgtggatcccccatgacttagttgttgcctcagcttccacatttcaactgtggccttgtaataaaatgtcgttgcccaatggatctgatggatcacaattgtaagctacaaattatgggctttgaatatgatcgcttactttctctgatgaaaaaaaaaaaaaaaaaaggcccctaggttttgcaatgcgaaaaaaaaaaaaaaaaaaggggcggcc

SEQ ID NO: 169405 - DNA, 293 bp, Zea mays
  Clone ID: MRT4577_86083C.1
attaatttgtctctgaactaatttattaagaggtgctttttataaaaatatgcgggtttcaacctcccaaataagcaccactaacaagaacaatcaactcaccaatggccaccacctgtacataaactggctaccaccactactaaaagagaccccacaaaccgcaccgctagtcaaaactggaagaccgactcccgcaaacatggaccgacgcgtccaccgagcatcttcattgcgactgccactgctacaacttgcctgggtgatccatccccacccagagcagcccgagg

SEQ ID NO: 169406 - DNA, 564 bp, Zea mays
  Clone ID: MRT4577_86084C.1
ccccgcgtccggcactctccccgaccttgccgtccagtcgtccaccccaccgccgcagcctcgccccgaggagacaggagaacagcaggatgccggcgacgccgacgatcatcggcgccctcctgggactgggcactcagatatccttgggagcatgtgttggggatgggtctcggtgcagtatttgtgaaccagctggtaaaatttgacgagaagctcaaggaggacctcgacaagatgcttgagcgcgccaggctagccaacgagcaacgctacattgatgatgatgaatagctgttcagatttgtttgtcagtgacctgtatttttttgcaacatgttgtcagtacacatggtcaggactgtggatcccccatgacttagttgttgcctcagcttccacatttcaactgtggccttgtaataaaatgtcgttgcccaatggatctgatggatcacaattgtaagctacaaattatgggctttgaatatgatcgcttactttctctgatgcaaaattactcagttatagtgactgtgcttttgcaatgccaacttttttctt

SEQ ID NO: 169407 - DNA, 754 bp, Zea mays
  Clone ID: MRT4577_86085C.1
gccggcgggggacctcgaggccggccgggccggcacaagtccccacagcactctccccgaccttgccgtccagtcgtccaccccaccgccgcagcctcgccccgaggagacaggagaacagcaggatgccggcgacgccgacgatcatcggcgccctcctgggactgggcactcagatgtactccaacgccctccgcaagcttccctacatgcgccatccttgggagcatgtgttggggatgggtctcggtgcagtatttgtgaaccagctggtaaaatttgacgagaagctcaaggaggacctcgacaagatgcttgagcgcgccaggctagccaacgagcaacgctacattgatgatgatgaatagctgttcagatttgtttgtcagtgacctgtatttttttgcaacatgttgtcagtatactacactggactaggatgaaaacacatggtcaggactgtggatcccccatgacttagttgttgcctcagcttccacatttcaactgtggccttgtaataaaatgtcgttgcccaatggatctgatggatcacaattgtaagctacaaattatgggctttgaatatgatcgcttactttctctgatgcaaaattactcagttatagtgactgtgcttttgcaatgccaacttttttcttccaaaaaaaaaaaaaaaaaaaggcccctagctacaccaccacacccacaccccatcccagcacacaacaagcagccctggtttacggtagct

SEQ ID NO: 169408 - DNA, 854 bp, Zea mays
  unsure (1)..(854): unsure at all n locations
  Clone ID: MRT4577_86086C.1
tgggtacctcgnnacgccgggagggagcaacgcaaacgcaagcagctgctagcataggttacaacatacaagtgcagcacgcgagtgcagacagctagagaaagtccaagatgcctgctggaagaagcgcgccggcaaggggtgcagcagtggcagcaatgctgctgctgactatgcttgcacggctaccatgcctagaagcccaaagctcgcgccgacctactgtcctcactgtagacatgacaggcaagggagattacagaaccatacaggaggcgatcgacgccattcctgccgccgcaaacaactcgaccagcgcggccatcgtcacgatcaacgtcaaccctgggatatacacggagaaggtcgttgtcaacaaggctggagtctctctagtcgggaggagcgccacctcaaccatagttacctggagtggaccctggaaccagaaccaccagtctgagtttgctctctacgtacaggcaaccgactttgtcgccaagggcttaacatttcagaacacgttagggaggaaggataatggcccggcggtggctgctaaagttgacgccgacaaggcggcgttctatgactgtagattcctatcgtatcaggacaccttgctggatgcaacagggcgccactactatcgtgggtgctacatagaaggcgccactgattttatattcggcacaggaaaagccttttttgagagctgccacttgcactctacctcggacgccaaaggagcattcacagcgcagaggcggtccacggagtcggagaacgcccggtttcagtttttttaagtgcgagtcgaaccggcacaggagtcgccacggctatcctagggc

SEQ ID NO: 169409 - DNA, 575 bp, Zea mays
  unsure (1)..(575): unsure at all n locations
  Clone ID: MRT4577_86087C.1
aaacgatgatcggtgctggctggttttcacccttcaaccggtttgttattataggtctccttttaacaggattctcccttatggtactctcaaaataacctttttcttaatattttttataagnggngntactttgggggggggagtctaacttttttatattncttttttcctttcttttttggctatcttctaaactgctcatattgcacgtgttcccgatttgcatctgttcagcgccgctgcaaatgagcaaatccatctcaagccttcgctacctgattttttctccagcgttgggctcacgtttagtaaggatgcaaagcactatcacaaatcagcactgattctttccatagtaaaatcaaaagaaaatataaacattgcggttagatgataactcatactgtgcaagtcatgctctatcggtatttagaactgatgattgccctctgtatgtttagtttctgaacacatcagttcacacctatttaatccagcaatcatgcctcgaccgaaaaagggggtacagtttctgaacacaacgggccccaaaacggtgtttacagtttctg

SEQ ID NO: 169410 - DNA, 546 bp, Zea mays
  Clone ID: MRT4577_86088C.1
ggtaccctcgtcttcggccgggtgctttcacctcaattgttgctgatagcattatgttattccaccattcaaaccctagcgcaccgccaccatattccgtttgatcatgccacaaaccgagtcaacgccgcttccttatttttctccttcggttacgtaaaaaaaaacagaaaaaaaacaatccgagtcaacgccgcttccttgtttttctccttcggttacgtaaaaaaacagaaacaaaaaaagaaaacgaaggagaaaggatacaaagcgggtgtctcatctcggttgttttaaacataccttaaaccgggcataacttttcgctcgggtggtcaaaaaatctgaaatttttacaggagcttggtgacaccatttgagaacaggcggatctcgtatcaacaagggcgctaaccacaaggaggtggtccagcgattgcattggcgcctcaagcttgcttgtcgtagtcagatcacaagggtcatcttccgccaaatcagaattatcttcactcaccgaaagaacgggcacctcaactatatcaa

SEQ ID NO: 169411 - DNA, 243 bp, Zea mays
  Clone ID: MRT4577_86089C.1
taggcagattaaagctaccgtcatgcaactaatatctgttctagaacacatgcaaagggcgggtggtaggacaatggtgcttcttgatacagggcctggtcacaggctagctgctattgttgttgatagctttgagataggttgagacgaacagctatcgatgctggattcagttcacttgaatgtgatactctaaagggcatctgaacttgtagaccgacgcctgctgacgattcttgtagc

SEQ ID NO: 169412 - DNA, 682 bp, Zea mays
  unsure (1)..(682): unsure at all n locations
  Clone ID: MRT4577_8608C.1
gggtccctcgggcttgccgggtaaaagaaacgaaggaagttattcgatctccataaaagaccttcctgagctcctcctccaccaccgcgagaggctccagagcaacaaaggacggagagcaatttcgtcggctgttttcccttcttcaattcctcctcggccggtgaacggtgatgataataatgagatacccggtcctcacggcggcgttctccgcagcggcaattggattcttgatcggcatctccttccttgtgcaaatcacgcccaaggtatacccgtccagcttcgtcgctgacgacgcggacagcagcaccctgggtgacagcaatgtgctcggaagattctccacggcacgcaatagctgcagccgtgctacttctaccgtgggggcatctcctcctccgccacccatcctccagcagccaaacgccactgccgcagaggttgtcgtcgttggaccgggaaagccaaaaggcgcggccaggctaccgccgggcatcgtagtggaagactcggatcttcatctccgccggctgtggggaaacccacatgaggacacgcctncacgcaagtacctttctggtgctgacagtagggtacagcgagaaagacagtgtcaacgcgattgttcagaagttctcggagaacttcgacatcatgctgttccactacgacgggc

SEQ ID NO: 169413 - DNA, 231 bp, Zea mays
  Clone ID: MRT4577_86090C.1
tctacctcattccaaaaacgggttctgtaaccattgacatttctccttatcaccgactctcgaacaaattcacataatacttcaaatccactctcagaaacttaagacatacaataccaagcaccatacacaaccaaaccatactcccaaagtcaagcctccctactctactatggactcactaaccactgatacccatatacaatgacactacatcccaattactcaaca

SEQ ID NO: 169414 - DNA, 577 bp, Zea mays
  unsure (1)..(577): unsure at all n locations
  Clone ID: MRT4577_86091C.1
gctatctcctacccagccttaccttatgattattaactcatagcagcagcacgcgacgccgagtaacgcctctcctcctcaagattgccatgatgtgtacaggatacgaagaagcatttcaagaacgtcaatgcgcccaagcatggaaggctggacgacctaggcggagatttcgctcccaaggcatcttcgggacctcaccagccatagagatggcctggctgtgatcctcgtcatcaccaacaggctgcgatgatagctcatacataacctgatgtcattgccatcctgaagcttctccatgcacctcttgatgctgaagctcggagacacaacacttatcttgctgngctcatggatgttcttctacatcactcataccgatgataactacagggtggtgtacgataccaagggccgcttacgccttccaccaatacgagatgatgatgatctacctgaactgtgcaagcgtactgctgttcacgacgggcataacgctatccgtacctgaacacgtatgacagccgaaccatccgctaccgtgacaccctcatcanagccaacgacaccatca

SEQ ID NO: 169415 - DNA, 394 bp, Zea mays
  Clone ID: MRT4577_86092C.1
acgctgctctgacggcttgggactgagcggagtgtgtcatacacttatggactgcttgcttagactgccgtgcctctcttattggatcctgtaggcatgacctatatgcctttctacatgaatgcatgctttgatgactatagggcactattctacacaactactgacggcacgtattgtatggaatctgtgctaatcttatgttacatgtactgcatgcaccagatcatactgatcacatttatagacactgcatcactaatattctatacattctatgagaggcgataatcgaacaattagtgtttcatttaataatagcgtttgactgtctctatgttaaatttggactatagactacattctacactcgcaatctttgattaatgcatat

SEQ ID NO: 169416 - DNA, 586 bp, Zea mays
  unsure (1)..(586): unsure at all n locations
  Clone ID: MRT4577_86093C.1
ggtaccccctcgagngtccggcccgggacaggcctggcggcagtataaagtctccccgaccaaaccctactcgtaccccgacgccgtcggaggcgcagccgcggccacaccagcaagcagaactagcagccatgccgtccaaataggacccctgtcaggtaggcggaggtcttcctccgcgtgacgggaggcgaggtcggcgcggagacgatcgctggcccccaagatcgggccgatcggactgtccccgaacaagagcggggaggacatcgccaaggagaccgacaaggactggaagggccttcgagtcactcgtcaagcccaccgggcagaaccgctaggccaagggctgcgtcggcccctccggcggggggctcgtcatcataggtggctcataggaacccgagagggacaggaagaacgtcaagagcatcaagcacagaggtgacatcaacctctgacgacgtgatagagatcgctaagaccatgcagaacaggtccatgtgcaaggcgttggtcatgacacgtaaggagatcctggggacctgagtacagcgtcgtatgcaccgtagatggtgaggacccc

SEQ ID NO: 169417 - DNA, 249 bp, Zea mays
  Clone ID: MRT4577_86094C.1
cgccgccagtgtgctggcatccgcccttaagcagtggtaacaacgcagagtacctatttttcttttctttttttttctttttgttgcaacaatttatgatttatttgtagagaaggtattggtttttgtacttatcaatgtgtacgtaccggtgctcttgacaattgctgctgtaagtttttaaaaacaaactatgtaggaagaataaacaaagtactctgcgttgttaccactgcttaagggcgaatt

SEQ ID NO: 169418 - DNA, 176 bp, Zea mays
  Clone ID: MRT4577_86095C.1
cggaagccaacacaccagccgacaagccgcaaccgccatcgacatgtcagcagcggaggagcaccggtggcgctcgctggtcttcggcgaggccgtggccgcgcagccagcgcgctgagtgctcgcgtcgtacccgctgctgctgctcctcgtcgtcctggccgcgttcgtcaggg

SEQ ID NO: 169419 - DNA, 456 bp, Zea mays
  Clone ID: MRT4577_86096C.1
atggcagggcgaggtctcgccggggaaagaagaacggcgcgacgaggggctgcaaacacagcgaacgcacacggtgggagagagaatggggaaggggagagaggacggggcgagctcacctcggcggacgagcggcggcgctccggcgggacgtggctccggcggcggttcggcgaggtcggagggcgagatcgtggcgagaaagtgggcgacgagcggaataaactgcgcgtcgggcggttgtttttctctgaaaaatcgcacggccggttcgttttggaagaagcacagtgcttcctgcgcgtgggaccggctgggcggcggcggcaggcgctgggcgcgtcggctgggccgcgacgtgcagctgggggcacggcgcttgggctggcgtggtcgctggaccgggtttgcgcggtgggagctggcgcacgcgccctggcgcgggacttgggctga

SEQ ID NO: 169420 - DNA, 268 bp, Zea mays
  Clone ID: MRT4577_86097C.1
gggtaaggggttatttttaaaatttatacgtgaccaattccaaaacaccatttgaacaatcatagcaacaggggtaaaaaaaaagaaacgaacaccaagacacaaccggttatcgggaaaacaaaaaaaaccacggatgatcaaacgaacaaccgagcagatacaacggtaaactttttgttgactatgaataagcgcacccagtgaagacacgcggcccggacgaaacaaactgaggggaaaaacaaaaaaaaaacagaagaactct

SEQ ID NO: 169421 - DNA, 399 bp, Zea mays
  Clone ID: MRT4577_86098C.1
acgggccgatccacgcgtcaacccacgcgtccgtgatacttatattcttgatttgttacaattatatgacatgcttccagattcaggttgcctactttttggaatcattgctgcttaaaggtactctgaataaggcatgctcattttaagttagcctagcgtgtcactatggagtttcttcatgatgtcaccaatgccatgatgttgtcatcagtaacaacatgtgtcaaatgtcttacaaacttgttcagactgaagttcaagttcaccaaccatgagaccattatggtgaaggtgttgccactaacttgcagtaggtactatacgagtttttaaaggtagacctacagatgattgttttcagcattgacacattttgtatagttaaaacatgcattc

SEQ ID NO: 169422 - DNA, 136 bp, Zea mays
  Clone ID: MRT4577_86099C.1
aagagtgccagttctactaccacggtggcgccgtaaccatccgatgaggcacgtgggggtgcaagtacatgctcgggggcatggaccggcaccggcacggcctgttcgacgacgatgggaagtagatgcacggaga

SEQ ID NO: 169423 - DNA, 405 bp, Zea mays
  Clone ID: MRT4577_8609C.1
aacggcgcgcccgcgagctcaataaggggcatatcgacgcgagtctggagcttactgctagtgatgaccagcgccgagactacgattctgtagatggctgataccatcgtgtttacttgcgaccggcagaagccaaaggcgctgaaccgattgcactcgcgcacgcggaggatgaccaacccgtgccacatatgggcgaaacccatgatctggaaatcacccacgacgcccgagaaccctacaggcgtggacccaacgtctaggagcccatactacgcaccgtgtgttgacccactccatacgcgcacgccggtggatgcaccgaatctgacctacccgccgcatgacgcatttctgaagacgcctatggtgatcccacaatagaacacgcgcccgccgtaggga

SEQ ID NO: 169424 - DNA, 474 bp, Zea mays
  unsure (1)..(474): unsure at all n locations
  Clone ID: MRT4577_860C.1
tttttttntttttttttttttttttttttttttttttttttttttttttttaatccactttttttaagttttttttttgaaagacgctctgagggaacataattggggccaatgcacacatacaaacattactcaaaatccaaaggggcagaaggggcaaaatctaataaaagcaaaaacaacccatatctgataaccaccaaggacgacaaacctgacaaaccaaggggaacgccccccggacacaaaccaggggaaccaaccggggccaaaaaagggggccaccctcgaaggacaactctggccacagggggggcaacccaagggccccctttaactcccttcctaaagaaaatagcttaacaacctctcggaaaaaaagaaatggctgccccaggagcttctctggggggataaaccgaacgaatagctccggccgatggcccgggggaatgaaccggatgactggcccac

SEQ ID NO: 169425 - DNA, 204 bp, Zea mays
  Clone ID: MRT4577_86100C.1
ggaaaaaaactgcatactggaggcgtgaaaaacaagacctgaacattctttagtgttggacccttcaaacctgaacattcgggggctaaaaatataggggggggaactaaacctaccggcacaagttcagtctgatgggacaagttattacaaggggggccaaggccattggcccattttatggcccggaaaaccgatcaaaaa

SEQ ID NO: 169426 - DNA, 342 bp, Zea mays
  Clone ID: MRT4577_86101C.1
actcgtatccaattctttagtccaaatagaaatactaataataaagctcacttctacttacgacaactaaaaggttgctccactgatatggacaattttccggagcccaacatctaatctgtctattcgggcaagagggcctccctctttaaaaaatggaagggccgtctcaccttcgatcatatgccccattggtgctggtaaaagcacaggaccacgtttgtaccatctgaaatccaacccataaagacacaaggccaaagttggaccccaagacgagctgccccgaacacctaatttgtcttgaccttggagtacgggcgggggttcgtggaaaggggc

SEQ ID NO: 169427 - DNA, 748 bp, Zea mays
  Clone ID: MRT4577_86102C.1
atcgtcacgcgtcatcaggcgggcatacgggatccagtacaatactgttggtctagccggcggcggccgcgtccctcatccagtcatcccctttccgcgatcaaaaccgagctagggttttaggtgcgggggagagggtgaggagcggacggaggcgcgccatggacaaccccgagatgcagcggttccttcagcaagagcagcaaaaggcgatgatgaacgagatggttggcaagctaacgagcgtgtgctgggacaagtgcatcactagcgctcccgggagcaagttcagttccggggaatcaacctgcctgaccaactgcgcccagaggtttctcgacatgagcgtgatgattgccaaacgcttcgagatgaagtgaggcgtcgacgccgaaagctgttacctagtcaatcaccctgagttttttaaccctttgatttgaggttccattgagcacttcgaacgattcaacagagtttaatgtactttctatattgtatctactgcctcgttgggcaacgtgttgaagtgtgatttgagccggttgaaactggattatgtacactttctgtcctgagtttaactaaagtttagcccgtgtcacgtaaaaaaaaaaaaaaaaaaatagtattaaaaaaaaaaaaaaaaaaggcccctagggccttttcattttctatttaatcattaattctataaaaatttcctttatatttttaatataggggggggccgttttaaggatccaat

SEQ ID NO: 169428 - DNA, 787 bp, Zea mays
  unsure (1)..(787): unsure at all n locations
  Clone ID: MRT4577_86103C.1
ccggccgggtaccttctaataattcaacttcggttccaatgtcctcctctccaatcctcggcccttcgcgcgccgattgccaatcgccctacgatgaagaacacatggattgggcgtcttcagtccctaaaaagtaccaccgagtgccaagactacttcgtcgctccaatgtgatcttggttcttatcgatatctttatcgttactgttcttgtccacatcttttggccgctcatcacattgctccgtcgcaacgaggagcttttcggcgcacggctcacctttacgctcaacgatacctctatctcacctactttgcctgagcagcagacgataccgagaatcttccaccagacgagtgcgaacgagacaatccctgaggcatggacagacttggtccagagctgcaaaactacctactccgactttacgtacatgcactggaccgacgacaaagcccgcgacttcatctccgaagagtacccttggttcatcgacacctgggacaacttcccattcaacatccagcgcgccgatgccatnccgttacttcgttctccccactacgggtggtatgtatctcgacatggacacactctgcaatgcttccattcctttcgagcagatcgaggccatcggcgcaaggcaccacgcccgtctttcagtctacaacccctactggcgtctccaacgatatgatgatcacatcagcccgtcaccccgccttcaccaaggncctctcgcgcatccaactctaccacgacatcaccaagccctggaggccatcg

SEQ ID NO: 169429 - DNA, 413 bp, Zea mays
  Clone ID: MRT4577_86104C.1
attcggctcgagataacttaatgctggttctatgctggagagggcaaaaagccttgttatcactgaaaaggagcgccagcagtactagtggagcgccagaacacaggtgtcgatgtggtatgacaacactgagaccgagaacaggaaactgcatcactacaccaataagttttggagcgggctgttgatgagctactaccgtccaagggacgaaatgtgcttctcactacttaacgaggaggcagcaggagaaccggagcttacaactagaggagtggaggaaggactgcagctattattcaaacgagtggaaattgggaaaggaggtgttctcccataaggacacgggtgatacttcggcgattgtgaggtcactgtacagaaaatacttgaggccatgagctagtgctaga

SEQ ID NO: 169430 - DNA, 208 bp, Zea mays
  Clone ID: MRT4577_86105C.1
aaagattgctggtgatcctgatacactcaaagcgaccctaggcgatcagcaactaagtgaggcatatgacatgacaaggccacttggagatggcagcatcgatgagaggcccacatacaagattagaacccaaagccgcataccagagcagagctccgcacacaggcatgcaggaacggtgagcgagccgatgagacaaatgctacca

SEQ ID NO: 169431 - DNA, 497 bp, Zea mays
  Clone ID: MRT4577_86106C.1
cccccctctcttctctttttttttttttcctcccttcttttttttttttttttttttttttttggaaggggggaacattattcggatcctttttattcaggcaaaacgacgaggcctttttttttactagcattttatgggaacgatggaagcccccccccccttccttttttcggggacggacaggaccccagggaaggcccgagttattcatttggaaaattaaaaccccacccgggggggggggcccccgcgacggggtcaacaaaaatgcggccccggtggggggggaaatccatggtcaccggggggccgacgggaaaaacaaaaatgtcggggtggggcttgtccaaaaggaacccccttttggttttttccagggggggcccgaccacttccggccaaaattttttgggcccatcgtccccccctggggagctaatgctggtcggttgccgagggcaaactgaaagggcaaaaattcctcgggccaaatt

SEQ ID NO: 169432 - DNA, 259 bp, Zea mays
  Clone ID: MRT4577_86107C.1
caccccgcgcgtcctctacctggtgaacacgctcgccccagcccccagcgccaaccgcccctgctccctcctgcagctcgccctcaactccctcacggctgctcccatggccgcctccagccatcttcctcatggcgtccacctcttttccccatggctgccaagccccttccatggcgctcgccaccgtctcctgtctggtcgccccatctccaggccgatctgctctggctgtcagccgtgtcaccatggctgtcct

SEQ ID NO: 169433 - DNA, 474 bp, Zea mays
  Clone ID: MRT4577_86108C.1
tcgagcggcgggattgggcgtagagagcaccagtgtttgcgtggatgaggaagtcattcaacgctcgtcgatgtgcgaagctatgcacacatatctggaatcaccgtgcgttcttgcaaacgccgttctggtgctagttactggaatgcgttatgacgcccgagactatcgatgacttccggcataaagacatgagcttggagattaagaagtggaacgacgactctctcgggacctgcgactcgtgtagatctcctgcaacatctgccggaaccgcatcatggagctttccatccagtgtctttgacagcaatggaccgcgacttgcggctaacgctccgtcacttgttcaatatacacccatgcattaccaattccactggataaggacccgcttagacacccctcacgtgtggcccccttgtctcccgcgacagcaatctcccgaagaacgctgcatagacagaatgcctt

SEQ ID NO: 169434 - DNA, 566 bp, Zea mays
  unsure (1)..(566): unsure at all n locations
  Clone ID: MRT4577_86109C.1
cgtccgcccacgccgtccgcgggagggcagggtgggtggagcctagaaacagcgttggcgtgttgatgnntgaagcgggagaatcttggtggcctctctaagatnngtcgtcatctgaacggcgggtaccttttcgaaggagatnntccgggcagagcttgtattcggtgccgggatncctcctcaaaaagccagggtgtggggagcgccctgttcnnctctcaatcgggcacccctgcgtttgtcatcctcagcgtgcgacctcgagcttaagaagcctacagaagnntctcagcgtgggtgggacccaatgtgtatacgtgggtgcaaaggggacctgattcttgcgctactaaaacctgcggccgggaaactttccacttgtgtgtnagtctgagagctgcnnagcgtttaaagctagtgtnngaagctttattttgagagaagncgttatgactncnnaaaagtgatagtcattatatnntcaatgtgtccagtgtgagtattgtgaaaaagctgcannnattcctgatnntattttgagcattgtnngaagaaacccaatg

SEQ ID NO: 169435 - DNA, 220 bp, Zea mays
  Clone ID: MRT4577_8610C.1
ctcacacgtaggcccacgcgtccgggccaggcgacacggcttacggcaagtttacttgtctacgacgtctcactcgctgttaggggggacatccgcactggtagcactaatccaggcagacccataggctcttgtgagctatcttgtgcgtaccctaccctcatattctgcttatacggtctagttcatgctatcaatgaatatcggctacgagtgaatg

SEQ ID NO: 169436 - DNA, 438 bp, Zea mays
  unsure (1)..(438): unsure at all n locations
  Clone ID: MRT4577_86110C.1
gtgctgcctgtactatactaacttgcaagtgttacgtcggcgacggccaggcgcaccactcggcggcccggccagcccacccagagaccacctagccatggcgtccaggtgcttcttccccagggacgcgtccggcgccgacggccggcaccagcagtcgaagggcgcggcggaggccctcgagcagctgcgccacggcgggcgcctcctgtcccgggaggacgtgggcggcgcggtgcgcgtcaggatcgtcgtcagcaggcgcgagctcaagcagatggtcgcggcgctcggcgacgacgacggcgctggcgcggcggcggcggcggccaccagcgagcgccgtcaccggcagcgtggcgcgggcgcgggcgcgggagcggggccgggcgccgagcagaggctgcagtcgctgcngcggcgcagcgcgcggagggc

SEQ ID NO: 169437 - DNA, 333 bp, Zea mays
  unsure (1)..(333): unsure at all n locations
  Clone ID: MRT4577_86111C.1
cggccgcccttttttttttttttttggtgcattaatatcataataaacaggataacatgggtatgtacatatgtactcctacgcgacaacagttatatagataatcagacaacgattatggtttgcacaagaacatttgatccgacagcacgaaatcccatggaatcatatcgtgctttctttttgtttcacaatataaaaaaaaccccgtgaacacaagtcatagtgccatgcagattgccacgcgtatcacatattcacatgacagaggtaaatgacagaggtaaatcagagaggtcaaccaccgcatccgccgncgcagccaccgtcacc

SEQ ID NO: 169438 - DNA, 310 bp, Zea mays
  Clone ID: MRT4577_86112C.1
gtttgttttccataggatggcaaaactagtccatatgctgcactgggttgaagagcaccccagggggggggatgtggagagccgtgtaccaaatgacagaaaaactctcacgtctttgcttgagtaggaattatgatattacaagaacatcaagcgagagagttctcagtttgtctgccactaaaggtggccagtagatggtattattaagtccaagctgtatgacaacaagctggaagcttgtacttggcattttaggaagcgcctattagctcatttgggttgatcctttaaaggccccctcgtattt

SEQ ID NO: 169439 - DNA, 473 bp, Zea mays
  Clone ID: MRT4577_86113C.1
gttctacatttgctactcaagccttccggtgttttcagaccccatgcaaatatgggcgcaggctgggggggggggggggggcaagtccaagggacccaaacgggcccggggcccaaaaccgccaagagaaggggggaacagagggggggggccggggcaacaaaaggaaaaggggaaagcgcagcgcaagaccccttaaaagcacaggggaaaaaccaaaccggggggggaaaagaacggggcggcggaacaaacaaaacaaaccaaaagccgggccaaaggccaaaaaccccaccccatcaaaccaaatggaggggcgggggagggccccccccaaaggggggaaattcaccggcccccaaaggaaaccgggcgccaacgggaatgggggaaaacttaagctaagaggggggggccggggtctttcgtaaaacccacccaaagggaaacaccccccggtttaatgggaagga

SEQ ID NO: 169440 - DNA, 341 bp, Zea mays
  unsure (1)..(341): unsure at all n locations
  Clone ID: MRT4577_86114C.1
cccacttttccgaacaganncgagacacagcggaggccacaanagccaaggccacgngaaaaggcgnccaaaggggacccnannagaggaaggagagnaggngaaacaaggncnagannaccnaaaccnacgaagncccacaangnnggagcnagcagngnnccnggaaaggaggggggggggangcaaangcangnnccaaangcnggaagaacngaaaggagggcnagnnnngcaggaagggcgacaagcacnggcaacaangagacgcccacnggaggaaangaggaggcggggcggggggggggccggagaacggaagcggngggggggcccggacg

SEQ ID NO: 169441 - DNA, 2326 bp, Zea mays
  Clone ID: MRT4577_86115C.1
ggggggattctcacacccatagaaactgaacctactacactgtcatatcacacaagaagagagcttcagcgtgtgagcaagagcaactctcagaaaagaaacaactagtcaagagtcaagactgcctgcggcctgcctgccctccaaggctccaactctccgaggctccaaagtccaagctacttcggcgtccctgactgggcttgtggtctcagtctcagcccttcgttgccgcagagaaccctcagtagttccgctgcaggttgctaattaattaatcgacgagaagtaggagggagcgctgatcgtgtgtgtgcggcatcgcaggatgggggatactagtagttctagccattcaaggcaggatccttctcttcttggctatggcttccatggcgccatcgccaactccactcctcctgcaaacttctttgaccaaggaggaggaggcacctatttcggagagctggaagaagcgttcatgcatcaggtcgcctcgctcagaagaactcaacaggctgcaaccgtctctgcacctcatcatggagacaccaagccctttcccactgctgctggtgctacagctgcaacggctacggctacggctaggccacctcctacactggacatcttcccagcttggcctatgaggtctcgtcttcacacgcccaaggagtgctcgaatgtgacagcagacagcacagacgactcggagagcagcagcaagaaccacagcaaccactcctcagaccagctcggagcagcagcagcagcaaacatggcgagccagttcgagcaagcttcacagcagcagcttcagcacaaaaatatggctacaagttccactccaagaactggcaaggctcttgatccaaaggtaatcagaaggctggctcagaatcgtgaggctgcacgcaaaagccggctgcggaagaaggcgtacattcagcagcttgagagctgcaagctgaagctttctcagatggaacaggacatgcagcgagcccgtacccagggcctctttcttggaggagatccgggtgcaagcaccagttcaggtgccgccatgtttgacgtggagtacgcccggtggctggacaaccacagccggcgcctggccgagctgaacggagccctgcacgcgcacctggcagacggtgacctcagagccatcgtcgacgacgccctcacccaccacgacgagctgttccagctcaaggccatggcggccaaatccgacgtgttccacctcatcactggggtgtggacgacccccgccgagcgctgcttcctctggatgggtggattcaggccctccgatctgctcaagacactgctgccccagctagatccactgacagagcagcaagtggtcggcatatgcagccttcagcagtcatcacagcaggcagaggaagctctctcgcagggcttggagcagctgcatcagtcgcttgctgacaccatggccggtgggtctctgactgacgacgccaacatgagcttcatgagccaaatggctcttgccctcggcaaactggccaaccttgaaggctttgtgatacaggccgataacttgaggcaacagactcttcatcagatgcaccggattctgacagttcggcaggcagctcgatgtctcttggcaattggcgagtaccacaaccgccttcgtgccttaagttccctctgggcttctagacctcgagagatactggtgaccgatgaaggcaattgtgagataagcatcgcagcacaaccatcccaaaaccaattttcaaccttctgactgacacatgttgtggaactaaccctcagcataggagcaagagaaaaatgactgggaagagaatgactgggaagagagattgtttggatgcacgtagcagatatctgagagctacagaggaaagctgggaaatagaagaagctctaaaacaaggagtgtttctggaaattctttagttttcaaaaaacactttctgaaaatgtgtgtacaaggaaattccaggaaggtgaaattgcttcgttgactgcagtgggaaggggaaagagaaaagctagaatctcatgtcgagtactccagtacaatgtgttcttttgtctggtctaaattcttgtaacagctcttcctatgatggaagaatccattcaacaattccacctatgattactggattgagtatgttgaataggttggttgaggctatctagtaatttttatgactatgtttatccattatctaggactatttggttactatattatataatctttatcatatatacatccatttagttcaccaaaaaaaaaaaaaaaaaaaaa

SEQ ID NO: 169442 - DNA, 372 bp, Zea mays
  Clone ID: MRT4577_86116C.1
gggcaaaatgtttgtatatatataaaaaaatatctttattctcccggcccaacacaacaattttaaaacaaaaagggcccattaaaaccccctatccatcctaatagtacattgacttcacaacagggaggcccttgttattccttgatatctccatcacccggaacaatattattttttctacacaacaccaaggttacctttaacaaggattggtccatcaggcaccattcattttagcccctcccaaaaccaactccttgaacccagctattcattccattgcaccctttaattccccccttttcaaaacaaaacttaacccgcagtaaccatggatccccctccaaaaactgctttttattcacaacc

SEQ ID NO: 169443 - DNA, 732 bp, Zea mays
  Clone ID: MRT4577_86117C.1
cctcgaggccggccgtagcttcatccagtatatcattgctcacatatcgaaacagctctctaactagcgcgatagaccgataaactggcttacatgatgcgtaccaagcagattggactcttgacctgcttaattgacattaccgctatcgacttcgcgcaccctgggtatccgccatgctcatcgccaaccactgtggtagaaaagaagcctcacctgtaacggccccgaaaaggtggctgcatccaaatccgcaagcgatgagaataccactgagccgtctgactcaaccatactgtctcttcaataatctccgccggcaaacaatacatcatttaaaaactgaattgctgctccacatgcatagcaggggaagcgcaccagaaaccagctgagctctaccatgccggtcagagtgaggataaccaacctgggcccatacattataagccagggaccagtcctgccacattcaatctcgagctggaaggaggtatccgccatgagagaagcctaatcagcacctacatgcatccgaaacaacacatgactaccagtgcatacagctaatctggcgcgcaagtgaaaacatatgaacatcgcctgcattgtggatcgcaagtctcacttcaactactggtgctctacatttgctagagtactgctacggtcaactacttaacgtaaatatgcaataacaggctgcactagcagtgttatccatgctactgt

SEQ ID NO: 169444 - DNA, 638 bp, Zea mays
  unsure (1)..(638): unsure at all n locations
  Clone ID: MRT4577_86118C.1
tgcagaagagcgcacctaacgcgctcctgttcanctgccagatgaaaccgatctcgcgctcagatcgcaaggcgatcgtgtccacgcccctcgccccaattttctctcccagaacctccctccactctcccccgcctgcaaagcagccaccggaggtcaccctcggcgtcagcgttttgttcgtccaagcggtgccctcgcgtgcttattgcgtcttgatgactacgacatgcacgctgtcgtttgtcccgcgtcgcaccgcatgccgaagttcgtcgatctcgccgtccgccgtcaagcatcacgagagtgcgatccacctccaagcttcaaggaatcgacgatcaagtttcgacgaccaagtgatcaaactctcagagttctatgaaactgaagatcctgagcatctgtttggtgaaggttgcctttggtgcaatctatgctcaggtaaagaagaaggcgtcgaggcggatctccaggagttccaggacttcaatgagttcgaggattaggctagcgacctcccccagtcagctgcctgtggtgggttaatttacgttggctacgtttctattatgtgcactttgatttatattatgtaaatgactctggtctttaatattattaattactcttta

SEQ ID NO: 169445 - DNA, 220 bp, Zea mays
  unsure (1)..(220): unsure at all n locations
  Clone ID: MRT4577_86119C.1
gattcgcanattttacattctgattttggacgattttggtagaagctattttcacggaatcggactccaaccgaagtgtttgagtggcagaagccgattcccacggtcggaatctggcaangccgaaacaaacaggctgactgggttggcttccggtttcggcgatggagtgcgcggcgaagggactggccgcggagccgngcnccatctgtgggggggg

SEQ ID NO: 169446 - DNA, 201 bp, Zea mays
  Clone ID: MRT4577_8611C.1
cgctgaacagattttcattagataggaatgctaaattctctacccatccaaattataaagtgcctctcagtcttcaccttgggcctgacacttctgaggccagaggtgcagctgacatgcccgcatttccaggagctgtcaaaagccttgggttccgatgttgttccccaaccaagaggtttttggaaccctttttttcca

SEQ ID NO: 169447 - DNA, 557 bp, Zea mays
  unsure (1)..(557): unsure at all n locations
  Clone ID: MRT4577_86120C.1
tcgtgttttgtctgggaaaaccgcgatggcatctctatagaactccactgccgcctttccgtttccagcttaccaccgtcgtctatggaagcttactcgaatcatccataaacagtaaacttgtattagggagcgccttcttcgcctttatgtgtactgcgccagaacaatacactgggggggggggcgagacaaaaacaacaaaggcgatgcaccaccgacgtgggggcgggtaggaggaaccgctctggaaagtagcggatacacagaaagacatggaccngaccgaacttttgcgacatgaggctacttgtatatgcataacagtggccttatgccacgcacacaacggggacgcggagcgcaccnaaactatagtttgttttttgtttatgaggcaacctctgtaaggaaggtaaaaacttataattttgtattatgagaaccccatggagacgcactgacaaattattaaatgttagagatagaacaattacaaacagaggatgcaaagacaaaatgatacaggctatatgtggcatggcaatatgacgaag

SEQ ID NO: 169448 - DNA, 463 bp, Zea mays
  Clone ID: MRT4577_86121C.1
aaaaaaaggccttgggcgggtagtatttcaagcaacaagcatatttgggacatatctaacagggtttatcggttttgacaaaattcccccaatccacaagcaggggggtacaaaatggctaaggattctttgtttattttatagacggggcaaaacaaaaaaagaagctactaaagcactctcgccatgacacaacagcagcaagggcgtcactttgcactggtggccggcgccaggccaccaccactacccactcccattcaaatcatacatttcctcaccttttcctccagctagccacaagctcatccgggcggccgggccacctttttaaaccaccttttttgatcagaaagagggtcaaaggaataacggggacccgggtgtcgctggccctcctactggctgccataggggccgggggggaaagctgcccaccaccaaatctgcataaaaaccattg

SEQ ID NO: 169449 - DNA, 267 bp, Zea mays
  unsure (1)..(267): unsure at all n locations
  Clone ID: MRT4577_86122C.1
tagctagcgttccctcttcttcacctgactaacaccagcagctcgatcgctctgtcctgaaataatggncgntcgntcctnctcccagcagntggtcgaggnggaggaggaggaggtcctggaagaggagctgatgatgatggnggagggggacgggacggngtnggngggggtgagntgnggagaggtgacgtngtnggtggagntgtgccttgggtacgngatgggaagngcggtgtngtcttttgnggngtgctgaagtggggt

SEQ ID NO: 169450 - DNA, 231 bp, Zea mays
  Clone ID: MRT4577_86123C.1
agccctgatcatctggggcctccagcaaaataagctggtcgcccaagggtaaaaaccaaggcttctttcttttcatcctggtccaaacaataattatactagtctaataaccctcatttggtcttgcaaaacttttcagcccaaaactgggtgtgccttgcaactttggcacttgcggtcctttgccatctaagctccggagaacacacggcactgtttttggcaggagac

SEQ ID NO: 169451 - DNA, 689 bp, Zea mays
  Clone ID: MRT4577_86124C.1
tgggtacctcgaggccggccgggagaacactacatttctttgagctattggttaacaaaataattgaactcaaaaaaaaaaaaaaaaaaaaaaaaaagtaaacagaaaatactaatgaaaaaaaaaaaaaaaaaaaaaaaaaaagtaggattccaaagaaaaaaagagagaaataaaaaaaaaataaaatagagagaaaaaaaagcaaacatcatgtaaaaaaaaaaaaaatctccccttcttcttccagggcaacaacgacccggagcagaccgacggggttttctaaaactccggggggcgagaagaaccccgcctccggggggggggagtacgataccttcttgaaggaggaaaaggcccccctttttttgcaccacctcagagagggcggggacatccccgccggagacttcgcactctacaagaagagggggccccccccccccccgggggcgtgcacagggacaaaataaaggaggaggagggtgccgcggcggccgtccccgccggggggtacggattccacgagcagggcgtttttgaattttgaaaaaaggacggcgaaaaagacacccccgagaagaagcaccaccacctcttcgggtgagcgtatttccgggcggagcgcgaccgacctagctatttctttctcccacaaccccacacatgaaaaaatcccccactgc

SEQ ID NO: 169452 - DNA, 293 bp, Zea mays
  unsure (1)..(293): unsure at all n locations
  Clone ID: MRT4577_86125C.1
cggaagcactggatttgtgattcttggtgctcatcctatcatacatagcgacggggtagtttggcctgggatcatcaaatgcaacattggcattggcgacaagaagcgtaagttaatcatgcggcaatttattgaactgattatattttaactgagacaccggacgccgccccatgaattanaccacgcatcttgatctacacacctccaacagttgtaccggcaactaagttgtgcttaactttattanancctgccactgacccccctttaactttggaacgtgctctggg

SEQ ID NO: 169453 - DNA, 251 bp, Zea mays
  Clone ID: MRT4577_86126C.1
aaaaggggaacgaatcttttggaacccaccaaaggaattaaattattctagaggcttctggaaaaccggaccgggacctgggggggaaccaacttttcctattggggggcggattaaagttgggggaaaatatgggaaaaggtgtttcctgggggaaattgttattcgtttaaaattccacacaaaaatcgagccggaaggttaaagggtaaagccgggggggccataggggggagctaactcaaaataat

SEQ ID NO: 169454 - DNA, 1225 bp, Zea mays
  unsure (1)..(1225): unsure at all n locations
  Clone ID: MRT4577_86127C.1
gggacgttatggcccccatccccatggccgtggtggngtctatgttgggggaaacaggaggggtaatggtggaggtggggggcggcgtgggagtgagcaccatgggttttttgatggggggcggcgtggcggtggccgcagagatggtcatggaccagttcatcatcagcgtggccatcagccaacatacattaggactcctactctggctgttgtagcaggagcacctcccccaccgcctccatttgttagccctgctactcctcaggcaccaccttatggcacacctatgggcttccctgacatggcaccacaagtttactattacgccgcacccacctcggagggcattcaaggcctgccttttatgcctcatccagcaagcccccaagctgttttaattgatccttttagaaagggtcttctggaccagatagaatactatttcagtgatgccaatttgtgcaaggacctatacttgcggcaacgcatggatgaccaaggttgggtgccattacccctgattgctgggtttccccaggtccagaagattactaacaatattcagtttatcttggaaacagtcatgctatctaacgttgtggaagtgcagggcgacaagctacgaaggcgtggtgcatgggagaattggctgcttccaaaacaaaattattctgctgggagttcttctggttcgttgccccctgtgacatctaacattgattctctgacgtctcagtttcgatttgttggactcgagggagcaacataccatgctaccatgccagtaatgcatggtgaagctctcttgacaagatcagcaacttcagttagtttaggttatcatgcatcaaccatgggtgggctaccgagcaacgggagtgaaccacttttggggccgaagtctgcaagaaatttactcaggagcgataccttttgaggctatatattcaagatgaagaagtataacggcaggccgagttttcacagtgacggcctgcacactatctcgtgtgaggtgaagatcagttggtcaaaaaaaaaacaaaaaaaaagaggaaaagcataatataccaaaaaaatagagataggtatacacagaactgaaaaaaaaaaaaaaaaagcggcatacaaaaataaaaataaaataaaaaggcaagaggcaacttttgtgctggtactcatgcctttgtgtatgtgtcttagtggttgtttcgatgtacag

SEQ ID NO: 169455 - DNA, 336 bp, Zea mays
  Clone ID: MRT4577_86128C.1
attcggctcgagctgagcttaatttttaatgcgtggaatctagggacactcaaggtgggatgtatgagtttaacggtgtggtgatgcctgatgttaggaaaggggacataagaaactcactcggggcctgttcggcgattatcttagaggccgaacgcacctttggtggggggtataggttgaacgaggctgtacacctatgaatgctgcggcttgcctatatgtcataacagaaagtgcacggtgggcattgcgtacggattaaatcttgcctagctgggggtatggactcgtgagcttctagaaacaatgcgatgagcttgtgttgtagcatat

SEQ ID NO: 169456 - DNA, 305 bp, Zea mays
  Clone ID: MRT4577_86129C.1
accacgcgtacgccttctcatggatttgccttagaactctgacctagacctcgcctgtcacggggcgatctcatcagggatcgctctagtcctgacggcgattgtgctcttcctgtggttgacggctccagtgctgacaaggtacatctgttacgctgctaatcgtaatccgctacctatggcactgtgccatcatgccagccccaggctaagtgctgtgctgagagatcatcttcgtgcagctactcatctcccttacactatctagcgcagcacgctagaatctactacagtacgtcatcgct

SEQ ID NO: 169457 - DNA, 451 bp, Zea mays
  Clone ID: MRT4577_8612C.1
ttctttttttttttgagacaacatttgtattatgagcggtggaaaaataatgttatacaacaaattaaaacataggtttcaaagcaatcctttttacacctatatgtaggaaagttcacgttcaagtatttttggattaattctgaaggcttaggtggcttccagtcatattactcatcagtcaaaactcatcaggatgtttgtcaatacccgttaaaatctttcccaatacgatactactaaacaaattttttaaggcttggcttgggggaatttaaactacatcactgctttacaactcatcatcatggaccatagtaaccaaaaccctatttttctgtcttacaatacaaaaaatgatcaaacttcctacatcaacgttaatatattttttttcttcccggacacttacctattttaaactatataattttgccccatatccatctgg

SEQ ID NO: 169458 - DNA, 403 bp, Zea mays
  Clone ID: MRT4577_86130C.1
tgaacccttggccggacccgtgtttggccttttggccaaaggtttggccatgatcctgtggggcggtaaaaagaaccgtggggcctcgaacaaccccaacggcaagggggacgacacctccaagcccatgacggacccattttgccgtgggaccagaaactcccccagggaattaaccttaattaacgggggcaggaggaactccgttggtttgcacagaaaggggttcagggagttgtactgtttaagcccgggatccaagtaccagtggtccggaaggtttgcttacggggtctaagggccggcattgttgaatctcttaatgtttaatcccgaaaacacttgggggggggtttataccttgtgcaacccaaatctttaggtttgctattatttggaaaat

SEQ ID NO: 169459 - DNA, 477 bp, Zea mays
  Clone ID: MRT4577_86131C.1
ctagccaatgctgctgcctttccgatggttctcaaagccgccctcgagctcggtgtctttgacactctctatgctgaagcctctcgcagcgactcgttcctttcaccatctgaaatagcgagtaagctaccaactacacctcgtaaccctgaggctccggttttgttggaccgtatgcttcgtctactcgctagctattctgtggtcaagtgtggtaaggtctcagaaggaaagggtgagagggtctacagagcagagccaatttgcaggtttttcttgaaggataacattcaagatattggatcccttgcttctcaagtcattgtcaatttcgatagcgtcttcctcaatacttgggcacaattgaaagacgtggttctagaaggaggagatgcatttggccgcgcacatggtggtatgaagctctttgactatatgggtacagatgagagattcagcaaactatttaaccagacc

SEQ ID NO: 169460 - DNA, 3151 bp, Zea mays
  Clone ID: MRT4577_86132C.1
gcgcctgaacaaacccttgtatattagcatatatccttttgaaactgccaccacctccaagcagtcgtcagaattgctcgttccagtgccttacatattacaacaaccaattattctcctgtcttaaaatccattccaggacaaaactacagtccataacacatactctgcttctgattttactgccgaacagatccaccgaatctcgtgtcatttgtgacaaatgtggggcatattacaaaaaaagaaatggccaccgaccacaacctgaactcattatgcgtatttgtacgaactccctcataaaatacatgagagaaaactaatctagcacactatgttcattaggtttgggctaaatctacccactgccaaaccttgagctcaccagttccatccccggtaaaaaataaaccaccaggacccatctgtattgccctaatttcttttttggagaataatctgcctctgtcactgaacgatggcagatcatataagcggacagtgttgtcatttaatgaacacagtagcacaggttttgactgtgcgtcaggcataccactgagggcaagtgcaccctgaaggtggaagagaaccagcatacacgtcaaaacataagaaaagataatgaaggattgcatttgcatgttacagaataaattggcaaagatgatgaaccctgttaggccttttcgttttgtacttaaaccatgtggattgaggtggattttgactagttgtggatttattcccccctcaatccacatggatttggaaaaaacgaaaagaaatgctgacaaaacaaacgattctgatggacagtaataactaacgggtacaggcagaagtcatagttctcaattcaaaaattcagaaaaagaacagtacagatataacaagttgacaactgttcttggttttaaagactaaaagatgttagttggagagttagagggtgttagtgattaagaattcaaaatactattctcaaataccacttaggaagattaagacattttaagggtttagtgcctactgggtatgggaaacgtaacctcaaaaaccttctgttttatggaagatgtagggcatgctataatttgtttgccaggtttgttatggtccgcttgggcacttttagatctcttgcctagtcttacttgaccttgctgggcaaggatacatatttggcaggagtactaagagcttgctttgctaggcaagcttcatggcactaccaagaaaatcctcattgagccggagccgatttggctcccctacttggacaagattagcacgagcagtgaggaaaaacacttggcataaggaaacaggtgtgatcccaagccagccaaccaacatgcctcaccgaccctgggacctgcttcttttctgggtacgaaaggcacaagctcctattatttgcacatgactgcctaccatcaagagatgtactagcacagattatcatctgggttaggattttctgttcaagtctccagttactctgcgacatgtactagcatagatgctagctaaataatagtgcacatacaataggcactaggcagacctggtgacggaggctcccacatgagtggcgtctagagaagaaataaattgaggcaagccttccgccgcagctgcggagaggctgcttcgaacacaggacctagtgactcagtgaaatagctctaatagtgcacatacaatactgacaaaaaaaaactaaaccatatattgcatgatcaaaccactagtctagttcttggattgcttaaatttcaacataacttacataaataaataactatattggaatggttaacactaaaaacaataagaaaattccttatctgacattaaaaaaagattgaaatcctatattcgccatgaaaaaagttgtcatgcctgccatcatttcgatttttcattccctgtctatcactgccatctaattttgctgaaacagtagttaacaggagtctaaaattgttattttgttcttctctacccagctcttatttctccttcacctacatgcctcaaaggtcactggaacacagctgtacaggaaccagggcaaatgggatacacgtttgatggaggcctgtgctcaatcagtcgttacagcctgctatggtgccactggctccacactctgactcaggcttgcattgcacgcaccttgccagcctgccgcgtcccacgcccttcacctcagcaccacacatgttcaattgttcatcaccacggtcataggccactgcacgtcagaggctggcgttccttgctgtgttgctgcgtgtctcgcgttctgccttgtgcttgcattgtgcagccacaggtcagaggtccaacacctaatgcgtgctctccttcccttttccctcttgactatcaaatcaacataggccacgacaaggaagaccccacgtaggctgagcgccgggcgcagttagactcacctttgccatggtgactgagaggcaggtctcactgttgtcatcctttgctgccatgttgtcgctgctagccctgaaccacggcatccccagtggagtcgatgtctgccaccgaggacacccctttcccttcccctagcccgccttcaccatagtgcacctacactggtcttagagatccaccaagatgctgtgttgtgacaccagcacagtataggccgccgtgcgggcatggagccatggcaccagagtagagcacccttctgcactgcatgtcttctgtggtgtgcctccgtgatctctgtgtcgctgatccgcgagtgtgcttcttgtggaagaagcaagtggcaccacccacggcatatccgccagcatcagtgcctcaaaggccactgccgaagccatgtccccatcccctgcaccaccgctcagtgctccatgtgcaagtgcagggccacagctgtgtccaggaagtgggagatcttgggacttaatcggatggagctagtgcctaatgtcctttaggggagaagaaatgaagggagaaaaggaagctttctcttttgcttgtttggtgcagaggaagcaagggtgatctaatcatttcccatagtaattgacacttaaagggaactgcagatttttttagtggcaagaaaggaatttcaatcttttatgctggtcta

SEQ ID NO: 169461 - DNA, 1439 bp, Zea mays
  unsure (1)..(1439): unsure at all n locations
  Clone ID: MRT4577_86133C.1
cattgggtacctcgaggccggccggggtagcggcgagacgagccgtttaaataggtgtcaagtggaagtgcagtgatgtatgcagctgaggcatcctaacgaacgaacgatttgaattgcgtcgtagtcgtagtcaccgcgttcgcatcccgagcacgcaaccatggctcgactgtcagccaccgccgcgctcctcctcgtcgtcctctccctcctcgccgtcgcgcactgcggtgtcctcgcagtcgcagcagagcacgacaccgagcccgaatcaaccgccgccgtggccgtcagcgacgacaacgtgctatccgaccccacagtccacgctgaggcgggcaccgccagcgccactgaagaggaggccatcccggcggagcagcagcagcatgggttcgaactcctccgcctgccgtctcaccggctccaccaccaccaccacctctggttgaaacgccaccacgggatctaccgtgacgcgtcgcgcaagttcccttgttctggccacggcgcgaggcgcgagcaggcagtgagccaccttgccatcttgcccgcatccgcagaggtggccagggaggcggngggaggagatgcccgtggccgagccggacccggatcgctccctccggacagcgacganaaaggggggaggtggctattaacagcgagnaagccgtcgccgttcaccgacgccgacgggcacgacgacgagagctcggcggcagtcagggcgtggaagcacgagttgctgcggaggtggtcgcttccacttccaccacgacatgcgccgccaccgtctccaccacgtccaacacnaggaggaggaggaggaggctaccaccgccccacagacgacagagagcatgggcatgaagcggcaccggttccacttccaccaccaccacgacgaggacgaggagaagaatatggcggcgaggaagcggctccgccacgctgatgagcacgacgaggacagcgacgacgaggaggatgagcaaatggaagagatggtccggcggttcaggaaggcgatcatgaggaggagattcggccacggccacggccatggacgccgttcccgcttcttccaccacatcgtccaccgccacgccgaggaggccaagaagcaggcagatgttgaagaagaggagagcggtgtcctggcctggatcaagggcctcatgaaccggttctagagctgcctcattcgagcgatccgtccactcacagtcacagccatggctgcttgcctttttactatgagaacgtatcttgattttgctcatgggagcagcagagctccttgctcataagatacggtgtcttttactatttgccatcggccatcccgcgtgcatactgcagtgtcttggcacggctgaatttacttggtgttattagtgtgttgcaaaaaaaaaaaaaaaaaacccgcggcc

SEQ ID NO: 169462 - DNA, 1062 bp, Zea mays
  Clone ID: MRT4577_86134C.1
cctcgaggccggccgggacaataaaatacagctgcactggttagatggatgtgtttaagcctcttatgcactaggttgtgggttcgagcccccacaactacatatttttaaaaaaaaaaaaaaaaaaaaaaaaaaaaaaaaaaaaaaaaattagcgtcgtagtcggtactcggtagtcgtagtcaccgcattcgcgtcccgagcacgcaaccatggctcgactgtcagccaccgccgcgctcctcctcctcgtcctctccctcctcgccgtcgcgcactgcggtgccctcgcagtcgcagcagagcacgacaccgagcccgaatcaaccgacgccgacgggcacgacgacgagagcgcggcggcagtcaggccgtggaagcacgagatgctgcggaggtggttccgcttccacttccaccacgacatgcgccgccaccgtctccaccacgtccaacacgaggaggaggaggaggaggctaccaccgccccagagacgacagggagcatgggcatgaagcggcaccggttccacttccaccaccacgacgacgaggacgaggagaagaatatggcggcgaggaagcagctccgccacgctgatgagcacgacgaggacagcgacgacgaggaggatgagcaagtggaagagatggtccggcggttcaggaaggcgatcatgaggaggaggttcggccacggccacggccatggacgccgttcccgcttcttccaccacatcgtccaccgccacgccgaggaggccaagaagcaggcagattttgaagaagaggagagcggtgtcctggcctggattaagggcctcatgaaccggttctagagctgcctcattcgagcgatccgtccactcacagtcacagccatggctgcttgcctttttactatttgccatcggccatcccgcgtgcatactgcagtgtcttggcacggctgaatttacttggtgttattagtgtgtttctatccacggtgtgtcgtcttatatacgcacttgtatcacagattcacagtacgtaccgaaaaaaaaaaaaaaaaaagcggcc

SEQ ID NO: 169463 - DNA, 2244 bp, Zea mays
  unsure (1)..(2244): unsure at all n locations
  Clone ID: MRT4577_86135C.1
cccctcaatcatctccaatcctcccgtgattcccttgtcaccaaatcaaccccgagcgatcacctcggccggcatgggttcgcccagcaggaattgctggaacacgaagagcgcctgctccgggcggtggtgcagcgggacctcgtgcccggcgccgcggacggtgaccaagcaggctcagcccttcgtcgtactccatgctccagccgccaacctcggtcgccacgacgatgtaccaggggtagccccaacgtcgtagtggcgccgcgttcgcttcccgcagctggcctagggcacaccgccgcgctcctcctcctcgtcctctccctcctcgccgttcgccgacgccgacgggcacgacgacgagagcgcggcggcagtcagggcgtggaagcacgagatgctgcggaggtggttccgcttccacttccaccacgacatgcgccgccaccgtctccaccacgtccaacacgaggaggaggaggaggaggctaccaccgccccagagacgacagggagcatgggcatgaagcggcaccggttccacttcaccaccacgacgacgaggacgaggagaagaatatggcggcgaggaagcagctccgccacgctgatgcacgacgaggacagcgacgacgaggaggatgagcaagtgagatggtccgggcggggggcgatcatgatattggctccctcgaggccggccggccattgggtacctcgaggccgggccgggatagcgtcgtagtcgtagtcaccgcgttcgcttcccgagcacgcaaccatggctcgactgtcagccaccgccgcgctcctcctcctcgtcctctccctcctcgccgtcgcgcactgcggtgccctcgcagtcgcagcagagcacgacaccgagcccgaatcaaccgccgccgtggccgtcagcgacgacaacgtgctatccgaccccacggtccacgctgaggcgggcaccgccagcgccactgaagaggaggccatcccggcggagcagcagcagcatgggttcgaactcctccgcctgccttctcaccggctccaccaccaccaccacctctggttgaaacgccaccacgggatctaccgtgacgcgtcgcacaagttcccttgttctggccacggcgcgaggcgcgagcaggcagtgagccaccttgccatcttgcccgcatccgcagaggtggccagggaggcgggggaggagatgcccgtggccgagccggacccggatcgctctctcccggacagcgacggagagggggaggtggctattacaagcgagcagccgtcgccgttcgccgacgccgacgggcacgacgacgagagcgcggcggcagtcagggcgtggaagcacgagatgctgcggaggtggttccacttccaccacgacatgcgccgccaccgtctccaccacgtccaacacgaggaggaggaggaggaggctaccaccgccccagagacgacagggagcatgggcatgaagcggcaccggttccacttccaccaccacgacgacgaggacgaggagaagaatatggcggcgaggaagcggctccgccacgctgatgagcacgacgaggacagcgacgacgaggaggatgagcaagtggaagagatggtccggcgcttcaggaaggcgatcatgaggaggaggttcggccacggccacggccatggacgccgttcccgcttcttccaccacatccaccgccacgccgaggaggccaagaagcaggcagatgttgaagaagaggagagcggtgtcctggcctggatcaagggcctcatgaaccggttctagagctgcctcattcgagcgatccgtccactcagtcactcacagccatggctgcttgcctttttactatttgccatcggccatcccgcgtgcatactgcagtgtcttggcacggctgaatttacttggtgttattagtgtgttttctatccacggtgtgtcgtcttatatacgcacttgtatcacagattcacagtacgtactacctgcttgtgtgtgcttcacattgtgttgtttcatgtaattctgtgcagttatgtgccttttgttcccttttgttcttccagatattcgtgatgcttgttcagtacgtaccaaaaaaaaaaaaaaaaaaaaaaaaaaaaaaaagcggcctgcttgtgtgcttgacattgtgttgtttcatgtaattctgtgcagttaaaaatgtgccttttgttcttccctnnctacttcct

SEQ ID NO: 169464 - DNA, 206 bp, Zea mays
  unsure (1)..(206): unsure at all n locations
  Clone ID: MRT4577_86136C.1
gtnttgggttttctctcgattgcgtacctcgaagccggcccgggaacttctcaagcagctcaaagctctagttctagctagctagcaaagggggggaaaatgcctccgctcctctttgctggcatgaaccactctataggccatcctgacctgaggattcacctagtaggacaaaacaatgaaactttctccacggaagcaactgc

SEQ ID NO: 169465 - DNA, 291 bp, Zea mays
  Clone ID: MRT4577_86137C.1
tgacagccttggtattgatgtaagagccttttctgtcttggaagggaagactgggggatttttattcaatgcacatgcgctctttgaacgtgcatttgaaaagaagatcatgcgaatgctttttcctcgttaccagcgtaaaaacgcgaaagcctttactgaagatgagtcttaacctatcatcttttttttctgtgttagcttgcaaacacctgttttaaagacaaggtttgatagggaatctacactatatgattttatgcgtggttcgctatttatataggtgcacaa

SEQ ID NO: 169466 - DNA, 452 bp, Zea mays
  Clone ID: MRT4577_86138C.1
gccaaaagacaggtactgtgatacctctgaaactcccgacagattgccctctgatgaacatttcgaactatctgcaggtcgattacctgctaggagacaacccgatgaagatgtcgtacatgatcgggtacggcgaccggtacccgcagcggatccaccaccgggcctcgtcgttgccctcgatcagggaccatcctcagccgatggcgtgcaaggaaggcacgccgtacttcaactcatccggtgcgaatcctaacccgctggtcggcgcggtggtcggcgggccgggggaggacgacgcttacgaggatgaccgtgcggatttcagaaaatctgagcccaccacctacatcaacgctcccttggtaggggtccttgcgtacttcgttggcaacccgaatcctggtcataacaccagacattgagcggtgcagcctctggatctttcttgg

SEQ ID NO: 169467 - DNA, 426 bp, Zea mays
  Clone ID: MRT4577_86139C.1
cacaaatgtcactcttgagacgcctggcaagagcaagaagtggcatcccaaattctacagaagagatgaaagtagaaagaacttgcttatgggacaatggctagactttgtccgtgacaatcatgtgcaggagggagatatctgcctctttttaccgacaaaagatgagataagacacacatttatggtctatattcttcatgaaacaacccattctagatgtggggctggctttcaaagggttggcccatgccttggtggtgcatccagtgcaaagatggcttcagaagttcatattgaggatgaaccaaccactggagaacatgtttcgtcggacagtgatatgccagaaaattctcatgaacctctggagagcggagactcggatgatccatttgaacctccatactttgtaccatgcaggag

SEQ ID NO: 169468 - DNA, 458 bp, Zea mays
  Clone ID: MRT4577_8613C.1
aaacccacagccgggaatccaggttcaaaaaaaccacaataaaacagggtggcaaaacttgcttcggtaacaggtaaaatggggcttcaccagctaggatcaggcatagggactaaaggaaacgcttacaggaacttattaacaaacaccagggggggggcttaatcggggacaaaggaatttgcatcggggggaagggtaacggccctccaaagggcccttaaaaaggggaaccagcttcagggagcccgctcccggaaaaccccgagggccacctccgagggggcgggcgcctggatttcgaaggggaacccggaaagctcgtacttgaggggggccttcgacgggggggacagaattttaacacgtatgcgggatgtcgagggggaccaggcaaagaaaaaaaattggttttttggaaattctccccgggaacaaaatcaaaatcatacagggca

SEQ ID NO: 169469 - DNA, 405 bp, Zea mays
  Clone ID: MRT4577_86140C.1
ctctcagcaaagccaacagatctcctcaacggcgcctggctgtctccttcgccgttgcctgcaatcccgatcatggagggcgacaggaccaacctccatgcggctatagaggcgagtcctgcacgtgctgaaactaatgcagagtgctcaccgatgccaaggcgccactactacacacatcctcccacccgttactaggatgatactaggcacacccagctgtgcaagcctataggctacaacatggaggtgcgggaagcgtcatacaacaaccaattgtgacaggcgtaacaacaaggcttggcacatgtagcagtacaaaccatcgtagcgcaccaggaacgacattccctaccaggactgagccacctagccatggtcaaccctgacagctacttggacatg

SEQ ID NO: 169470 - DNA, 227 bp, Zea mays
  Clone ID: MRT4577_86141C.1
atttgttgcgattcagattcagaagagccacgtggaaaggacattcccctaaaaggtatggagcctattactagttgtggaccaccagatatttctcgtccattccaaggaacacccaaactgcaatcttctacaatggtctcgttcaagaaaagttgctgataacatttgttccctgagccattttgctgtggatgttagttgggatcagagttgcaactctctac

SEQ ID NO: 169471 - DNA, 814 bp, Zea mays
  unsure (1)..(814): unsure at all n locations
  Clone ID: MRT4577_86142C.1
tagcattttgcattcccacccctccactttttccagccgccacagccttcttcctcctctccccacacgcacagctctcttcttccctgtgcatggcgcaaaaaaatctcccagccgtgcagtagctctgcgcgctcccctcggccaccatggcgccctcctccctactccctgctggcgagcagcagctccatggcgcccagatttttttccagcagagagcttcttccctgcaggttgccagcagccttctccctggccgccgagctccctgttcccctgctccaagggcgcgcacccacctcccagcgcccttcttccccctagcgctcgctccctgcaggcgagcagctcgaccccttcctccctgcgcagcagctctgcccactccaccttggtcagcgcagggcccctctgatccgagctcgagcagtgagctcaccgtcgctcatggagcccccactccctgctacactttctcccggcctcctctgcccagcgcccctttttccctgttggccgtggatgttggcgccctctctaaaacagcaagttttcagcgccccctacatctcctatggaaaacagcaagcccccacggcgtcctggtgttctcgctactcgacttggcctcgcgagctcgctgtcgggacaccctagccgctgctccaccgcgcgcactacctgctcgacgatatgcgcagccgactgcatgctgtcttgcttggtgtgtgcgcagccctgctcgcctcttttcggtggtgtcaaattgtcggtgtggagcactgtgtcggngnnacacatcgtcactttt

SEQ ID NO: 169472 - DNA, 520 bp, Zea mays
  Clone ID: MRT4577_86143C.1
aaataggccgcgacacatcgctcccggctcccgcctccactcatcggcacttccgtcttcaccggaagtccggaaccctataggcggagcagaagtgagcctccacctccacccgccgccgccatggctctccgtcgtgtcaccccgcggaggagacccgttctccccctcccccgtgccttcttctcctcgtgccccccgttcactccgcccccgtccccgtcgaacgaccccgacgacgaccattccccgtcctcctctccgccccccaaccccggcgcgccgcggaatccgtcatcctcgcttttccaggacatcaaggatcgcctccgcttgtctcccacgtcgtcccctccgcgccggaatccgtcgaacttgctccgtcccaaccccgcgcgtggtcctccttcgaaaccgtcccttgaagaggttcgccggatgctcgatgacttccgcccaaccgtcgtcgcgtcctccccctctggacccgggagccgccccctcctttttgcaccataat

SEQ ID NO: 169473 - DNA, 173 bp, Zea mays
  Clone ID: MRT4577_86144C.1
tgaaaaagcaggacagatttttatatacactaaaatcactctcaatagcctaaagtgattctttttaagtagaagaaaatttaaaacttggaaggggaacatacccgggtatatctccacatagagaggtcatgggtgactttttactttctacattttaaaaattgtctaca

SEQ ID NO: 169474 - DNA, 715 bp, Zea mays
  Clone ID: MRT4577_86145C.1
tcgccaccgtggtctgcaacctcgccatcgtcgtggccgccacggagcccgggtgcgcgggccacgccccggtgctcagggcctgcgtcgcgatccggggccgggtgtccacggcgctggcgctggcgctgcccaccaacctcggcatggcggcggccgaggcgctgttcggactccgcgtcgtcgcgcagcgtcggagggacgggaggctcgcgccgggtgtcgccggcgaggccttctcgatcgcctacatccacgcgatctgcgtcgtgctggagatcatcgtcacctgcatgttctacaggagctgcaagaggagtgaagccgacgagctcagagagctggagccagaggagaagggagacctccaggcttgatgccctctcaccttcagcttcagtctggtgcgtgcacaatacagatagtagcatcatcatagattgtgtttctgatcagaacaacaggatcagatcatagggtacagagctgatacaaagaaacatagtggtaagccgacataaatttctgcaaaatgtttctttttttatgcaaagcaaatggtaaacattgagttcaaataaacggttatttgtacagaaagaaacattctcttgaactgttcttgtgtgacactggtagcttgcaccagcacctcgaagaaggaattgcagttcagagcgtataaactcaacctcctcatcaatctactaggtat

SEQ ID NO: 169475 - DNA, 510 bp, Zea mays
  Clone ID: MRT4577_86146C.1
atagcaagaatactccttgtttaagtatgattacaggtacagcctatgaaatggacgggctatcgaccgggtgatatatatgaccagagagagcatattatacacaacagcggtttgatgaataggcaacgactaacaggttcatacggtgcgttcggcgtaagagtacatatgagcgcagctcagttagatctcctctcaggttgagagctgaggtacagcatctaagcacctgtgttgatgtgtagttcttatcaccatggtgaccatgacgcatagaggaccaataaaatgatgctgagaacggcggcatgcttgccgtggaccctgaggctgacaaaggctacccaacggtgcatgccggccagcttgatgagcaggcccggctagaggagcacgaacagcaccacccccatcaccagggtcgcccaggccagcttcttgtccttgccttaaaactagtctagactaggtagcgctaggcttgacttgtgagagaacactcatctt

SEQ ID NO: 169476 - DNA, 786 bp, Zea mays
  Clone ID: MRT4577_86147C.1
caaggctgccttgtaaaaaccagtacccattctcaagtaccttgtcgtcctcatcaataaaagctcctgtaatcccctcagaagtgttcactaggtccaacctccagcgtctcaaggcaatggaactggtcgggaagcttgaccttcctaaaaatggcatccctgagatggatgtccgcaatcgcctcccaaacctcaagaagctgaggcttatgaagacaatggtgtcacaggaattcattaaccaacttggaggcctacagttcctttccacccttgaactaaccagcaattctttcagggagcttgtcttcacggaaggattttgcagcctcaaagaactgacattgcatgaggagacactcgagaggttggagatacatgagtcggcacttcccgagcttggggatctggatattgtcggccatagggacaagctccatgttgttatccatggtcattccgtgctcgtgcaacacattgaagcagaggatgaagatatttttaaggttacggaagtaataacgacgcaacaagtccaagtggaagacaacaaagtctgattacaaagcctgaagattgaatgtgaactgatgtgcttttatgcacgcttctgattgcagtgtatttttatatatgtgcgcatgtgtattttattctgtgtgtttcgaaacctggtgtgcttctgtgtgatgactgtaatacaatgtacgggtcacccgttttataatcatggtgtgtatttgttaaaaaaaaaaaaaaaaaaccgagggggggcgccggtac

SEQ ID NO: 169477 - DNA, 1312 bp, Zea mays
  Clone ID: MRT4577_86148C.1
cggccgcgtgggcggacgcgtggcggacgcgggggcgcggccacactgccgttcgcgctcaccttcctgctgctggccaaggcctgcgtcgccgccatgctccgcctccgggacgacgacgcgtcggagtcgccgccgcctcggcggcggccggtcgccgtggccgcgctcccgcggggcgcgggcgtggcgcgcgcgtacccggccgtcgtcgccacacacctactcaacgccttcctcatgctctccgccaacgccgcggcgttctcgctgctgctgctggcgttcggcgcggccgacctgctggggctcacgtcccgcgcctggacgctggcgctctcggccgcgggcgccatcgcctactcgctggcggtcggggtcgccgccgtggtctgcaacctcgccgtcgtcgtggccgccacggagcccgggtgcgcgggccacgccgcggtgctcagggcctgcgtcgcgatccggggccgggtgtccacggcgctcgcgctcgcgctgcctaccaacctcggcatggccgccgccgaggcgctcttcggcctccgcgtcgtcgcgcagcgacgcagggacgggaggctcgcgccggccgtcgccgccgaggccttctccatcgcctacatccacgcggtctgcgtcgtgctggagatcatcgtcgcctgcgtgttctacaggagctgcaagaggagcgaagcggacgagctcagagagctcgagccagaggagaagggagacctccaggcttgatcacctattcacctatcaccttcaggcagctccagtctgctgcatgcacattgcacaagggaagaagaaaggaaaaccccacacacaaatagtagcgccatagtttgtctttctggtgaaaaccaacaggatcagatcatagggtacagagctgatccagagaaatatagtggcaagccgacatagatttctgcaaaatgtttcttttttttatgtaaagcaaattgtaaaagttgagttcaaataatatctgtctattcgaaaaaaaaaaaaaaaaaaggcccctagcgtgcacaatacagatagtagcatcatcatagattgtgtttctgatcagaacaacaggatcagatcatagggtacagagctgatacaaagaaacatagtggtaagccgacataaatttctgcaaaatgtttctttttttatgcaaagcaaatggtaaacattgagttcaaataaacggttatttgtacagaaagaaacattctcttgaactgttcttgtgtgacactggtagcttgcaccagcacctcgaagaaggaattgcagttca

SEQ ID NO: 169478 - DNA, 279 bp, Zea mays
  Clone ID: MRT4577_86149C.1
cctgctcgtgtgtttgctctgcctcccaatagctgatacttaatggtccatagcccattggctggagcaaacggtgcactatcgagacgagctctactgaaagaagaaccaaggatcactaccactcttccatgcacaatcatcactgactagatcacgatgagctatgcacaatgaaacatcaccaaagctatccacgagagagccctaaacattgtcacagaatagcagctggatactgacctggcgcttataatgcctgacctgtgctgctacaga

SEQ ID NO: 169479 - DNA, 1576 bp, Zea mays
  Clone ID: MRT4577_8614C.1
gtgaacaacaataatttttaaagcataactgaaagcatattcgaataacattaaaacatcataactagtacaaactacatttcctaagaacttattgcaatcccaataacaataaaacatattataatgcatcactaattgcattgttgataatcaatccacatttgttgtgcaattgtgtctctgagattgttgccttgttcactgccttgatcattgctttgatctccatctggaatatcaacaacattgccttgaacattttctgcctgatcttctaaccattgttcatctcctttgagagaccgaataatgttgtgcaacacggcagctgctaccggtatcttcacttggttttctattttgtgaaacgtggcaaccttaagtatggggaagcgtttctttataactcccaaggccctttcaatatgattcctcaacactgcatggcgatgattaaagatctccttgtagttctgtggtcttcggcgacctgccccatattccttcaaatgatacctaactccgcgatatggggcaaggaaagatggtgtgttggcataaccgccatctactaaataaaatttccccgggggcacttgaaagccattgttcattgcagccctgagaactctagcatccgtcgcggacccctcccacccagtggatatgaaagttacattgagatcaaaatcgcacgctaccattacattttgagtaagggttcccttcctattcctaaatggagcggctttatctggcgatatcgatataggcacatgagtgccatcaattgcgccaatgcaattcttgaagtagggataaaacctaggattcctttcaattttttgatggacatgattaggatttggtggcttcaggaattgcttggagagtgtaggaacaactaggtcaaagaaatgcttgatgtgacgatgatatgtatcaccactgtgcccaaattcttctattagatcttcaaatgaggcattatggctgagcatgtataagaagaatgctagcttttcctcgaccttaatccttgtatcacggaccagcccctcccttctaagataacttgccaacgatttgaaaatttcaggctccatcctgaacgctacccgacagttcttcaaatgaccttgaagcaactcctgaacatgttcttcgccacttaactttgatgtatgccttcgcttcttctcccttactatgtttgaactagaacccaatatatgtagcatagggaaaaaaaacaacatcatatcatcatcctcctcatctctcctccgtctaaggtgatctcttagtgcaacatccattgctaactaaaggagagggtatagggtcccaagacggtggaagttcgtcttctccaactcgaactggtgcagggataatcggcgagaagcggacaccgacggaatggcgccggtcagccagtgtagatgtcgccgccgccttctctgtgccctagccgccgccgcctctgtgctgtagacgcggtttctttccacgccgtggagatgaggtttttttccatgaggtggaaactccggccggccccgagggtacc

SEQ ID NO: 169480 - DNA, 406 bp, Zea mays
  Clone ID: MRT4577_86150C.1
ccggggcgactactccccattgcgaccgaggacgaactgctaccatctcgactagccctcggcgcctgctcctccccagctgtcccccaccaaccgcaaaggcaaaagcgaaagtgataaaggccgaggagccgggcctcctcggggctcccatctcccccgccgcgcccccctccgcagggcggggccgacggcccctccgatggtcccaaggcagcttcacgtcggcttctgcgcgcctgcgagaccaacgattctcatacctgaggtggtctgccttgtccttcagctcaagtacactggaagcgtgccgggaacgaagggatcctctaggaggatggcctctgaacggaatgccgctaccctcgacactgaagggaacagggtgagtgattctacattctac

SEQ ID NO: 169481 - DNA, 166 bp, Zea mays
  Clone ID: MRT4577_86151C.1
aaaggggctaatatggagaggttcacttttgtacgtggccgataatacaataccaattacaaggtaatacatatatcctacacctggatggtgggtacgtattctattaatatatatgtacccaccatccaggtggccgataatacaataccaattacaaggtaat

SEQ ID NO: 169482 - DNA, 283 bp, Zea mays
  Clone ID: MRT4577_86152C.1
cggggctcgacccacgcaagcgacttgctcagatacgatgcggagcgcccacaaaggcctgtcggtcaaaagagcgcccgaagactacacccgttccgtgcgcaaaagggcgaggacccttagttaattgtgcgagagtcctgtttaccccatagatacggttgctctcgctaggaacgcaacctattgaaggatgactgagattggtgcctgatcgaccagatacagggttcttgagtcgagaagcgacagtacaccggctaccaccacaactgtgttttca

SEQ ID NO: 169483 - DNA, 437 bp, Zea mays
  Clone ID: MRT4577_86153C.1
aaaaaaaaaaaaaaaaaaaaaaaaaaaaaattataaaaaaaaaaaaaaaaaaaaaaaaaaaagaaaaaattagggcgggggctgtcgttcttccaagcttacgctcccttacacgcgcctgcatcgttctactttttttatacctaaacttaattcaatttcactggccgtccatctacaacgctgggaaagccaaaaccttgcccatcccaatctaaatccccttcatgcacatttccctttcttccgttgacgtaaaaaggaacagacccgtccccattgccattactaacacatcctcaatcttaatggggaatggcactccccctgtaccttaacatcaacccctgtggttgttacttttcacccccaccgttaccctttcacttgccatagccctacctccctttcctttcttttttttcctttcctttatg

SEQ ID NO: 169484 - DNA, 277 bp, Zea mays
  unsure (1)..(277): unsure at all n locations
  Clone ID: MRT4577_86154C.1
gcctgataacgtagcacaaaatgagaacgcattaactcaaatcaatgtgtcaaaattccacggggcattgtagtctgtgttaagtcacgtatcgtgaccatcaaaggcccgcgtggtgtattgaagcgctacttcaaacacttggnnttggtaattcaaatggtttgaccacgttcactgggggtgggaaaatggtttggttcttaaaaagaattggttgtcgtttgagccgtgtgctttctcttgcgggatatgattaagggtgttgcatgtggat

SEQ ID NO: 169485 - DNA, 274 bp, Zea mays
  Clone ID: MRT4577_86155C.1
cgcaacaccaccccattttcccgcaacgagacaacaaatctcctcctcttcctccccgtatccgcatcagtccatcaccttcgcatggcggcggaggaggctgatgccacctcgttcacaacccaccccgtaaggagcctcactagggcaccggttaccttcttgcctccaaggccgccaccatcaacgctcatctacctccgaggcgcccgcagcccctcaaacgccgcctccttctccggctgccttgcggtgtccacctctcacagccgcg

SEQ ID NO: 169486 - DNA, 258 bp, Zea mays
  Clone ID: MRT4577_86156C.1
aaaaattatctagggcactttagtgacttgagcttagatttcatgctgttccaactgtacattaatacgcaaaggtgaactaccctgagggggccagacaccattaagtttacaatccgacagggggggggcgcccaaatgcgattgcttcgtgaggactaattttccttcccccccccccaagggggataattaaaaaaaaaaacactgcagccaacatacaacatagggatctccactttccgaaggccgaaaata

SEQ ID NO: 169487 - DNA, 501 bp, Zea mays
  Clone ID: MRT4577_86157C.1
ggggcagaaaaattttaaaagttttttacaggtcttacattaacgaattgatacacagcatttttttagcaagcttggagtacctaaaggcaaccccagggcaccattctgaagggtttttcccccgaagtccaaaacaaacaaaaaagcgattcttgctcctgaaagcaccctggccaggttgtttccaaccgggaccctgtccgatacccaccaaaactttgggttttacactacacaacacaccacatgtttacgtgcccccccccgggggggacatgcacagtacaaaaaaaaaggggcgcgcgccccccttttccttaaaaaaaacacccctcgagggagcgggcccccccccggggttggaacttaagcaggcccccctaggggcgggcggggacccttaaaaacagggccttcccgttgggggtgaaagcggggcccgggaccttcccgaacacgttcaacttttgggcggggccggggtacccgggcgcgggg

SEQ ID NO: 169488 - DNA, 1242 bp, Zea mays
  unsure (1)..(1242): unsure at all n locations
  Clone ID: MRT4577_86158C.1
aacaactgtcaccaggaacaatgcttggattaatgaccatagtaagcacacacatgcatgctatatataacgacatgaatatcgaagggtagatttaattgcttgtaatcgatgcaaagatacatttaccaatcaacaaacaggcggcggtgcataagctccagtgaaacacatgcaccctttatttattgatctccaattttctggtaacactaagctcttgattaacatgtgttacagctgatgctgctactgtgacatacaggaacttaacgatggttcttgagagcattttatgtctattgtttaaattcaaaacagcatcaattagcatgactctcatatataagaattatttgagaacatcacaccttataggacaacacacgagcgaggtctggaaggaaggaatactgactacacctagctagatcaggccaaaagatgctacacaagtacacataatttatacaccgacaattagaagtaagtaagtaataataacctgaaactagaaattgtaatgataattaataaaaaaccattttattttaaacagttttatttattgataaactgcataatgaatatcacgaaaggtatacttatgaaataagtatatataaacacatatgataccagcaatagtacaagtagaaccctctgtgaatagacattatatcaagtttattgttctgaaacaattagctacgtcgtcaatcactagcagttaaacacttacagacagaatactcgactggcagctgcgtcagcagctgttcgtactgcaacagctataaccgtagagataaaatactgtagagaagccataataaccgcagctagattaaagctgcagcaagcaaccgtgagacaaaatactgtagtctcgcgggagtattgttcagaaaataccagggatcgttctcttcatgtcttgcattgggacagaaaaaacactgacttgcgtgccaatgaacaagaacggacaccccttttcaaatcacaggaaaaccaagccagcagagtgtgtaaaatagggatgacgtggaactgtagatgacactgtttgatactatttgtatagagaaatttaaaatagaaaatgtgatagaggatctagatagcctggcatatgcaggttcgcatactttcgcagaccgaatgctgtggtgaacatgtggaaaagacatgctgatgtggatcacaaaatcataaacactaacaccatnaaaaatcaca

SEQ ID NO: 169489 - DNA, 1766 bp, Zea mays
  Clone ID: MRT4577_86159C.1
tattggaggcattttaatgatgtggagcctgtttactaaatggagtaatacaaatgtctcacatcaggggaagaacaaacgcagtgggcaaaaacttcgattcaaagaagcaagagacaacaaatatgcacatgacgtcacaggatcagaagaatgcctcggtgagaatttcggaacagcctatacaaagaaaggtaaaggaaaaggaaccaaagttggactcggtgtgaagcagcacaaattccatatgatgtatggttttgatcctcaagagtacaacctaatccgattcgtcgatccactcacgggagcaactcttgatgaacaaattcatgccgatatacgcttaattcaagagcatttcgctgaaattcgtgaggaggcagtgattaatgacacaattgaaaggcagcagatttacggcaatcctggactacaagcatttttcatacaacatgggtcagcatccgctctgcgggttgtgttaactccacactcacctacacgggttgtcacaggtaataacatagcaggattcccagaatatgaaggcacacttcgtcaaactggaacagctataactatacccattggtcaagtcccaatcgcaaatgaagcaggagttgcacacgagtcaaaatccatgatgtttgggttgggtgattacacgccaatatcgcaacaattgtgtttagtacaaaatgactcggatggggtaaagcggaatgtattctcgattggatatggctcatatcttatatcaccagcgcacttattcaaatataacaatggtgaaataacaattagatcatcaagaggtttgtacaaaattcgtaattctgtggatttgaaattacatccgattgcacacagagacatggtcataattcaacttccaaaagatttcccaccgttcccaatgcgcttgaaattcacacaaccatcacgagatatgcgagtctgcttagtaggagtcaacttccaacagaattatagcacttgcatcgtatcagaaagtagtgtgacagcaccaaaaggaaatggagatttttggaaacattggatatcaacagtcgacggtcaatgtggactaccgtcggtggacactaagagtaaacatattgtcggaattcatagtctcgcatcaacaagtggaaacactaatttctttgtcgctgtgcctgagaactttaatgaatacatcaatggacttgtgtaagcaaataaatgggaaaaaggatggcactataatccgaacctcatatcctggtgtggactaaatttagtcgattcagccccaaagggtttgtttaaaacgtcaaaattggtagaagacttggacgcgagcgttgaagagcaatgtaagatcactgaaacatggctcacagagcaattacaagataatttgcaagtggttgcaaaatgtccaggccaacttgttaccaagcatgttgttaagggtcaatgcccacactttcaattgtacttatcaacacatgatgatgccaaagaatacttcacacccatgcttggaaaatacgacaagagtaggctcaacagagcagcttttatcaaagatatatcgaaatatgcgaagccaatttatattggggaaatcaaatacgatatctttgatagagctgtacaacgagttgtcaacatcctcaaaaatgttggaatgcaacaatgcgtttatgtcacagatgaagaagaaattttcagatcgcttaacctgaacgcagctgttggagcattgtacacaggaa

SEQ ID NO: 169490 - DNA, 3001 bp, Zea mays
  Clone ID: MRT4577_8615C.1
ctcgggctggccgggggtcaccccagcctcgggcgccgcgaagctattagccccgtgggcgcggcggcggcggctccggccgactcggcaccagacaggcaagggctaggcaaggcgcaagaagaggaggggaagtcgaaaataatttagcagcggaagcggaagcagcagcacgaggtgggtggggcagcggcagcggggttctggctaaattattttaatgtctttattatcagagattccagtaatgtgccttgcctcttttatgtgattgtacaaatcgatgaacggaactcatccctggacctccatgtccgggggtgcatgttctaaccttggatatgccagggacatgaatggtaatgttccaattagcactacaaattcctctggaccaagcattggagttagctcgttggtgactgacgccaactcgtcactttccggtggtgcccagttacagccaagtactagcatgaatggtgattcattgatgcgtgttcctgcatcaccaatgtcattttcatccaataacatctctggctcttcagtcattgatggttgcatcatgcagcaaagtccaccccaagaacagatgcagaaaaggaggtcttcaagtgtaacatcacaacatgtgatcgatgctggtggtgcattgcatgctcagaagaaatcaaggactgatgttagtcagggtgatatcatgcaacatcagctgattcagcatctgatccatggtcagaattctcttcatttccaggggcaacagaacccacagcttcaagcttttatccagcagcataaactagcacaacttcagcaacggcagcagcagcatttgttgcaaccattttctcagatgcaacaaccccaagttggtattcctcggcagccgcaacttaggccgccattggcacagactggaatgcagttaggtggtcctgttaggactcctatcgagaggggcgtttgttctcgcaggatactgcagtatctatttcacaagcgtcatcgcccagagaataactctataacatactggaggaagattgttgaagagtactttgcacctcgagcaagagaaaggtggtgtgtctcttcttatgaaaacagagggaattcttcagctgctgctccacagaaagctctggatacatggcgatgtggcatttgcaatacacatgctgggaaaggatatgaagctacctatgaaatacttcctaggctctgccaaattagatttgaccatggtgttattgatgaatacttatactttgactcacccaacgaatttgggttgcctaatggacaaatggtgctggagcatgcaaaagttgttcaaaaaagtgtttatgaacatctacatgttatacacgagggacatctgagaatcattttcacaccagaactgaagataatatcgtgggaattttgttcaagacgtcatgaggaatacaccactcgtaagactatagcaccacaggttaataatcttctgcaagttgtccagaaataccaagctgttgtcactgaaagtggatcagccgggatatcaaataatgatgcacaaaccatctgcaacatgtttgtcactgcatcacaacaactggcaaaaaatctagagcatcacaccttaaatgaacatgggctctctaaaagatatgtacgctccctgcagatatcggaggtggtgaatcacatgaaggacttgattgagttcagccacaagagcaagcttggtcctaaagagagcctgaacagctattctaaaaccacggcaaagtttgagaatatgcatgattcgagacaggccatggctgccgctaaccttgccaacaaccagagcaacaccaaattgatgggggtcaaacaagagacaagcacttctgcgaacaaccagactcctggtgccggagccattggcaacaacaatctaccgattgccgcacctctaaacacctaccagaacatgctcagaagctcaggtgccagtacgatttctctgcagcaggaggcgtcgagtgtcttcaaaggtcctacagcaatgcacaacggcatgcagctggaagcggccaggtccttcctgggacctaaccaagttcaattccagcaccacccaccgtcgtcgtcgtttcagcagcagcagcaaaacagtttccatggctttggtgtcaacccgcagtaccagcagcatgtcctcaaccagcttctgcaggaagttaagaacagtaacaaccgctcgaaagcgcagcaaccgcctctggatgcaccaccgccgaatgcgagcggcgggggtctcgcgccaggagttgctacccccaacgtcattgctgctactggggagcaggggcagcatgtcaataacagtagctctaaccataacggcacggtaaagggtgctgctggtactggccctagcaatgtcatcaacaatagcacagccagcatggcttcggccagaaacagcagcttcaagtcggtgagcagcagtccagctgctgctggcaatgccgtgagctcgaaggtcgatgactccttccatcaactggaggacctcgacgacatgatcgctaacgaactggtggagagcgggctgttcggtgcaggacacgggtggtagtacgctactgtggtaaagccaagcaatgagatataagcctaagcctgattggtgctggcaagtgcttttgccgccgccacccttctctttctgtagagctttatgtattgacagttttccgatgatgatcatatcatacactggcgtcgctccagatgtgtgtgagttgagatagtgggttggattggatttggctgatagttagcgtgtgtatggcatgttgctgaatcaaatgatgtgatcatcgcaaggtcacaaacagcctctttgtcatgtacatcgttttccatcatgctatagtgggtgtcagttataatcaacaaataaataaaaaaaaaaaaaaaaaaaaaaaaaaaaaaaaaaaaaaaaaacccccccaac

SEQ ID NO: 169491 - DNA, 2606 bp, Zea mays
  Clone ID: MRT4577_86160C.1
tgcttggcatgtgggtgaatgagtcggcagctaatccgaccctagcaccgcccctgagtggccagtgaaacacacatgcaccctttatttattgatctctaattttctggtaacgccaagctctgcttaatacaggaataacgagggttcttgagagcattttatgtctattgtttaaattcaaaacagcatcaattagcatgcctctcataggaattatttgagaacatcacaccttatgggacaacacacgcgagcgatgtctggaaggaaggaatactgactacacctagctagatcaggccaaaagatgctacacaagtacacataatttatataccaacaattagaagtaagtaataataacccgaatctagaaattgtaatgataattaataaaaaaccattttattttaaacagttttatttattgataaactgcatataatatgaatatcacgaaagatatacttatgaaataagtatataacacatatgataccagcaatagtacaagtagaaccctctttgaatagacattatatcaagtttattgttctgaaacaattagctacgtcgtcaatcactagcagttaaacacttacggacagaatactcagactggcagctgcgtcagcagctgttctactgctacagctgcaacccgtagagataaaatactgtagaatacataactgcagctagattaaagctgcagcaagccagggtgagacaaaatactgtagtctcgcgggagtattgttcagaaaataccagggatcgttctcttcatgtcttgtgggacagaaaaaaacactgacttgcgtgccaatgaacaaggacaccccttttcaaattacaggaaaaccaagccagaagagtgtgtaaaatagggatgatcgtaaaatagggatgacccgaactgtagatgacactgtttgatactatttgtagagagaaatttaaaatagagaatgtgatagaggatatagatagcctggcatatgcaggttcgcatactttcagaccgaatgctgtggtgaacatgtggaaaagacatgctgatgtggatcacaaaatcataaacactaacaccatgataaaatcacaaatttcaagggaaaggacagatgcaagtgcctaaaacagcctcgttcttctcttatcggggacatccatgagggaaaaaaagcatcggaaacctgatgatgattcagtccaagtggtggccatacataatgctccaaataaaagcacagggaggatcggagtgctatgctagcacacatcgaatcactagctcttagttgcatgcaaagttccaaagcaaacagggagttcgaaagacgtttcgctgttgcacgacacgaaccgaacgaaagttgcgtcgttgtgattccacagattcccacacgcaccagaaaagctagcatgcatctcgtttagtccaagtccacaacagtgcacaccatcttcttccacagatcacggaaagacggcagaaacctgcagagacgatgcatggatgtatggatcccatcccatcctgtcctgtaagatctacacacaaaaaaagcaaatagactttgtatctccttgatgtattgcccttggttattaataaaaatgcttcctttataaaaaacaaaaacaagcaaagcaaatgaagttcgatctccttttcttttcttcagaacgaaactatatatgggatctctttttttggaagagaacaatatatatgtagattcaacgagcagatcaaggatttagagctagtttatatatcaaaagcgcaaggaaagtacaaaaaaaagctttggatctccattatatatacacacagaacgtaactgctatataacaattaaccagcagagaagaacagtaagcacgcacatgataagggactaaataaaatatgcccgtcgttttggcagctgctatatatgtatgcatcagatgccaaccaaacatgtaagttaagcagctcaagcaaagacagaccatgaagctagtaaaaccatgagatatgacgaagctgatgcatggatcgataaaggtaaacaaggagggaggagggacagagggagcacccttcagtccaagcaaagacggtgcgagatcgaagcttttacctcccgcttcattcactcatctgcaaagctggtttccatggctgtttgcttggcatgtgggtgaatgagtcggcagctaattcgaccctagcaccgcccctgagtggactgaaggacgctctcttccatcaagccatcgtcgtcgcaactaaccatgacggcggcggcggcgacaaattaaacgaccaacaacaaatcaaaagaaaagaagaacaagcatgcatgcatgatgcacaaccgcgcttgctactgctgcttgatcgatccgtctgagcacctcatggcgtgcagtgttcagtttctccctggatctcgcgaagaagaaggcagatgggttttcgatatatggttgcaaggaaggagcgagcgagaaaggaaagtagacgccggcaacgcacacacaaggccattaaatagggccaagttgtgacatcacagcaggcagcgtattcctagttaaataatgat

SEQ ID NO: 169492 - DNA, 553 bp, Zea mays
  Clone ID: MRT4577_86161C.1
ccctcggtttttttttttttttttttttttttttttttttttttttttttttttttttttttttttttttttttctttttttttttttttttggggaaagaaaattggttctaaaaaactgggtttaggtttaaaacttggccaagaaaaaaaccccttttaaaggggggcggccggggcaaccaattttaaaacaaaggggcaagtggggggggggggatagttttttttttccgggcccccccgggacggaaaaaaagggggtttaacgggtccaaaagggaaacaaatggggccaaaccccaaaaaaaacccgggtttcccgaacccgaaccttaaaaccgacctgggcccccttacctaaaaaagggggaacaaggggtttccaaaacctgagaatattattcccgggggggaaagcggaatctccctaacaaaaaggggctttggttaaaaacgggggggccaggggtgccccagcgttttcgggctttggcgtttcccaaaccggggggggggggggggaaggtgggggggccactccccccccccc

SEQ ID NO: 169493 - DNA, 2798 bp, Zea mays
  Clone ID: MRT4577_86162C.1
aattcggcacgaggagaaggggaagccagcttgtgcttcgacaggcctcagccctagcgcagcttcccggcgacggcgatgagcctgggagccgaggtgatcgagctctccagcgacgaagacgaggagcctgtgcccagcactaccgctctcgtccgccacgccccctcctcccctcccgacgtcaagccgcacctgctcgccgacgtcgatgtgaagccgctgcttcttctcccgccgccgctccaccccccgggctacggcgcgctcgtgcccgtgaagaccgaggagcccgtgcccgtggccaccgtctcgtctccgcccagggcgctcccgccgccgcgcctctgccgccagttctggaagtccggcgactacgtcgtcgcgcgccgcaaccccgatgcggccggccccggtgggcggaaccggttgcggataaaccccaagtttctgcactccaatgcgacttcccacaagtgggcttttggcgccattgccgagctccttgacaatgcaatcgatgaggtgaacaatggggcaacatttgtccgtgttaataaatttaaaaacccacgagatgggaacccttcattgttggttcaagatgatggaggggggatggatcctgaggcactgagacgttgcatgagcttcggattttcagataaacagtctgatgctttcattgggcaatatggcaatggtttcaagactagtacgatgcggcttggagcagatgtgattgtttttacacaaaaccaaaataactgggtgccaactagaagtatcggccttctttcttacacatttttgatggaaacaggttgcgatgatgtgctggtgccaacggtagactatcagtatgatctaacaacaacttcatatgttcagatgttgcgtcatgatcagaagctcttctcttctaatttggcaatccttctcaaatggtcccctttttctactgaagctgagttgcttaaacaatttgatgatatgggagatcatggaacaaagataattgtattcaacctctggttcaatgatgatggggatatggagcttgatttcaactctgacaaaaaggatatcctcattactggggcccacaagaaggtgaaaacaaacagtttggacaaggttgctgcacagaactacatctcaactcggcttcgctattctcttagagcatatgcatctatcttgtatcttcatgtacctgatactttcagaattatcctgcggggatgtgatgtggaaccacataatgtagttaatgatttgatgtatcgggagtgcgtgttgtataaaccacaaattgctggacttacagagtcatcggtaatcacaaccattgggtttgttaaaggtgcaccagatatagatgtacaagggtttaatgtatatcacaaaaaccgtctaatattgcccttctggaaagttgcaaacaactcatacgggaaaggacgaggagttgttggcattctggaggccaactttatcaaacctacccatgacaagcaggattttgagaagtcagtcctttatcaaagacttgagttccgcttgaaagaaatgacttacgaatactgggaccttcattgccatcgtgttggatatgacaacaaaaaattacctaaagcaacccgtgctattaatcgtgccaatcatatgaacggtggcagttccccaacaagtgctccacctcggttgcttgcagttgatattccaacaagcagctctagtatacctagattatcagcctctgcagcaagagaaaagatcagtagtctcgattctcttcccaagagcatgattggattgaagaggaagtttaatcctttcggtgctgtggcggccagtgctgatcaggatggactacatcatatggataaaatagatgtttctcaacgaagacggtttaatgaatacaaaactttgaccctggagaatgacaagttgcgaaatgaatgcttacaatacgagggatcagagaaacaacttgtcctgaaggaacaaaagctccgatctgaaattgctgaggtggaaaagaagtatcaggaattgttgggagagctcagatcattggatgtgaagaaagagaaacaatgaactctccacttcagcgcctgttgtacaattaattgctcttgtttctttcctgacctgtgaagatgatgactggattacttcccgagacgtgcagggaactggtcccttggacaaatgttatctaccgattaccattcgcttggtagtttcgttggatagctgtagaggtgtaatttcgtttcactaatcttcctagggtcctgtgatggtggaagaaagtgagcatgtagtctgttgtaaaattatgcaacttgtatctgaatgtacagcagcggtttcaatgttaatggccctctgtttccagcagcacatctcggtcccgtgtcaaaagaggtggattttgatccggcactctggagtctggactctggagtggatacttagaattagacttcatatgttgtgcagtatgtaaaattacttttcgtactcgtgacagtcttaaactggtggttgtgttgtatttgagacgaggggggttagtcaagcctttgttcactccaacagtacattgtaactgtacatgagtgatggtgggtatcagctgtttggttgctgcaaaaaaaagccaaaacccacaaaaggacggcccgagacaatggaactaattctaggggcccggcggctgccacggagggggccgtgccttgggggccgtttattttttgttctccttggggggggggggg

SEQ ID NO: 169494 - DNA, 455 bp, Zea mays
  Clone ID: MRT4577_86163C.1
tgaattcggcacgagggctaactcctctaacctacacaacacgactcatgcaaaaagggactgctgagtcgcacaagcgctagctacgttggtcagcgagctgaaggggagcactcggcccagacggttgatgagaaaccacaacttgcttctgagaaaggctgaaaaggacaagtattgatctcatcacattgggtccctgctgaacatttggaatctgtggttgatcaacccaaggatctcagacgctggaatgaagcctttgatttctatcacagatcatcagaattactaccgtgaatgtggcaggacacatcctgcatctgatgctctagcacatggtgtcagtccatgggaagataaatctgcactaaaagctatcaaaacgaatgatgaggttcatacaactcttaaatactatacgaaggaacaaatggctgtggacttgtaccata

SEQ ID NO: 169495 - DNA, 214 bp, Zea mays
  Clone ID: MRT4577_86164C.1
cgtgctcctgacatcccactggcccagcacgaagcgacagcccatggtgctaagtgaaccctgcagacggccaaaacgcatccaggcaactcctgacgccctggactggggccctgagtctctatatcgctgacgacctgtgcacgcacctaccgtcaaagaactgatcagatcaactacacctgtctaacgcacgacctcacgcagacctgtg

SEQ ID NO: 169496 - DNA, 1453 bp, Zea mays
  Clone ID: MRT4577_86165C.1
gcacgagcggggccttcctgccagcgtcggtcagagacccgcctccgtctctgaatcggccgctgccgctaccgccgccggcggcgacgaccatgccccgcgccgctacgggtgcgatcactgcggcgttcctgcgcgcgcaggccccgcacatggcgccgctggcatcgcgcatcgcgcgcgcgttccccggcctcgccaccgccgccgcgacgcgcttcgctccctcctcgtccgcgtcctcgccgcggcttggcctcgtcccgcgtttccgatccgcgcgctccttctccggcgcccgtgcgtctcccgttagcggcgcggtttctggctcctcgacgtcggaggagggccagcagctgcagtcggagctcatcttcctgggcacgggcaccagcgagggcatcccgcgcgtcagctgcctcacgcaccccaccaagatttgccccgtttgcaccaaggcggctgagccagggaacccgaacaggaggcgcaacacctctatccttctgcgccacgccaccccgtctggcaccacaaacatcgttgttgatgccggcaagttcttctatcactcggcactccagtggttccccacgtttggtttgaggacaatcgatggtgtcattattacccattctcatgctgatgccattggagggcttgattgtcttcgtgattggacgaacaatgttcagtcatcgatcccaatttatgtggcagaacgtgattatgaggtgatgaagatgacccactattatctcatcgacacaagtgtagttatacctggagccgcagtttcagcattgcaatttaacattataaaagaggaaccatttatggttcacaatcttgaggtgattcctttacctgtttggcacggtcagggttaccgctctcttggttttcgttttggtgatgtatgctatataagtgatgtcagtgatatacccgaagaaacatacaagcttctggaaaactgtgaacttcttataatggatgctctaagacctgatcgttcttcatcaacacacttcggtctaccaagtgctcgtgaacaagttaggaaaatcaaaccaaagaaaacactgtttactggaatgatgcatttgatggaccatgagaaagtaaacagtgatcttgccaggctgattggaacagacggtcttgacatccagcttagctatgacggtctcaggatacctgtaaggctctagaattattattattttttggaaaaaatatttatgtattgggtgctgctaattgatgatttcagagtctctttagttcgaactgagtaaaatgatgaccagatgtaaatgtaatctgatgagctctcgatgcagtgcgattttacttttcattctttccccctcagagaggaaacttatgtagcagagttataccaaatactttctgacgtaataaagtcagattatttgattttgtg

SEQ ID NO: 169497 - DNA, 747 bp, Zea mays
  Clone ID: MRT4577_86166C.1
aaggctggcagcatggaggagacgccgccgcagcctcaggcggcgcacgcatctcctccgttcccggcgatcttcacccctccgagcgctctctcctcgacgtccttgcggggcagccccaccgtccccagccccgcgcacttcagcacgccaccgggcccgcccgtcttctcctcgccgctgcgccccgccgccgtgccattccgcaccaccccgatctcccctcaggcggtacccttggcctcccgcaccgcctcctcatcgtcctccgtctccctccccacatcctccgagccgcacaccatgaacggcgcggccacccctcacagccacgcgccctccgtggcgccgtctctggaggactccagcatcgactccccatacgtcctcttctctgcccgcaaggtcctgaagcagaagaaactgctgaatgcccctagcttggggttcggagctcttgtttcaccagggagggaggtatcgccaggtcccgaagccttggagcgtgatccccgccggtgcctgaactgtggggcttatgtgaatttgtactgtgatgtgttgattggctctgggcaatggcagtgtgtcatttgcaaaaagctgaacagcagtgagggggaatttgtggtctccagcaagcaggacctggttcagtggccagagctcatgtcctcgactgtcgattatgtgcatccaaggaataggcggccaggcttgatcccggtgcctgtcctgagggtctct

SEQ ID NO: 169498 - DNA, 480 bp, Zea mays
  Clone ID: MRT4577_86167C.1
cgttcttccagcgtccgcccagcgtccggggcttgtgacggaacattgaccgatcagcaccagaaccagaggctctgtttgtagatagtcagtacaaggtttatgttggtaatcttgcgaagactgtaacaaccgaagttcttaaaaacttcttctccgaaaggggaatatcctcagtgcaacaggctcccacattccggggacctccaagtcaaaggggtatggctttgtcacattctcttctgaggaagaagttgaagctgctgttgctactttcaataacgcggggcaccggaggagggggaatatcttggcgaatacatgtagtaggagggatgttttgaggctagattttgataacaaagtgatcaagaccttcaatgtgatttcgatatgtcatacaatttttgtaccataacagtatatttttcttaacggcacttctaaatgataacataaaggcagtatggtttcagttaa

SEQ ID NO: 169499 - DNA, 272 bp, Zea mays
  Clone ID: MRT4577_86168C.1
gtggatgtcgtaccggacgttcactacagtgactcctgcacacacacgtccggagattacggcccaagtgcaaaccctatccatgcggtggtagatatggccgccacagagcgcgacgcattctctgacgaggcggcgcccaggttgaccctcgacgagttcatggaggacatcatggccgtgatgctggaagcggactaggcgctaaacgatgaccctggcgatgagaagacctaccccggcaagtcacatatgcgccacagcgatcattg

SEQ ID NO: 169500 - DNA, 1083 bp, Zea mays
  Clone ID: MRT4577_86169C.1
cgcggctacctcgaggccggccgggacggacccactcgcaccggcggataacgctctcttccttcggctcctcccctctcgctcctatcctctcccctccaatggcgaccgccatttcctctctagtaactcctccgaccctccaccgccgctgcctgggccctgcctgcgtctccgtctccgtgtgcacccctatccgcatctccttccggcccgccgccgcgcctcaggtgtcgcgccggggctcggcgctgcgggtgtccgcctcctcggcggtgctcgaggcgccagaggcggtggcggcgcggaagctctacgtggggaatatccccaggaccgttacaaacgacgagctccgcgacatgttcgctgcgcacggcaccgtcgagcgggccgaggttatgtacgacaagtatacgaatcgcagccggcggtttgggtttgtcacgatgagcacagcggaagaggccaatgctgcagttgaggctctcaatgggactgaggttggtgatagaaaaattaaagtgaacgtcacagagagcttcttaccgaacattgaccgatcagcaccagaaccagaggctctgtttgtagatagtcagtacaaggtttatgttggtaatcttgcgaagactgtaacaaccgaagttcttaaaaacttcttctccgaaaaggggaatatcctcagtgcaacagtctcccacattccggggacctccaagtcaaaggggtatggctttgtcacattctcttctgaggaagaagttgaagctgctgttgctactttcaataacgcggaattggaaggacaactcattcgtgtgaatagagcttagattagcagaaatttgcaggggcaccggaggagggggaatatcttggcgaatacatgtagtaggagggatgttttgaggctagattttgataacaaagtgatcaagaccttcaatgtgatttcgatatgtcatacaatttttgtaccataacagtatatttttcttaacggcacttctaaatgataacataaaggcagtatggtttcagttaaaaaaaaaaaagaaaaaaaaaaaaaaaaaagcggcc

SEQ ID NO: 169501 - DNA, 666 bp, Zea mays
  Clone ID: MRT4577_8616C.1
gtaagctcggaattcggctcgagcgacgaccatgtcgttgctggaggcgcacatgcggggcgcgccggacggcgtgtacacgcgcgacttccccgaccggccgccggtgatgttcgacttcacgggcgacgccacggcggccaaccggtcgttcatgctcacgtccaagggcaccaaggtgaagacgctgcggtacaacgagacggtggaggtggtgctgcagaacacagccgtccttggcgccgagaaccacccgctgcacctccacggcttcaacttcttcgtgctggcgcagggcccgggcaacttcaacgcgcacaggcacgtccgcaagtacaatctcgtcaacccgcagcagcgcaacaccgtcgccgtccctggcggtggctgggccgtcatccgcttcacagcggacaacccgggcgtctggatcatgcactgccacctggacgcgcatctgcccttcggcttggccatggccttcgaggttgaagacgggcccacgcccgacgccgtgctcccgccgcccccgccagactacccgcgctgctagtagcgttcagaaaagagaaagaacagactgccggagatgaagggacaaactctgtttcagtgtccatctatggttttaaattatagccccccccccctccccctgatggtatc

SEQ ID NO: 169502 - DNA, 483 bp, Zea mays
  Clone ID: MRT4577_86170C.1
gccggctcgtggcaaattgtgacggaccaacttgctattctttttacctcccatagtaagttgctcctatgttaaattctacctggttgcctatgcagggggtagatagactattgagagaacccttgataccatgcagataattactatgtatattatggaccaatatcattgactaatacatggtgagtgattcatgggacatgcactgatatagcatgtacttaagtgccataaggaaatgctgacctttcaagaacaatataaatggtatgcttcatttaagaaaaggagtactaactggccttatacaggagatattgccaacaagaattgcggtgaaacaagcaatgaaaaaattgagtccatcacagcaaggtcttaacaggctgctggattcagtggtcgaatgccttgtgcagagcttgcagacaacattgaacagtgtggacgtagaacactaccagacaccaatattatttg

SEQ ID NO: 169503 - DNA, 542 bp, Zea mays
  Clone ID: MRT4577_86171C.1
cccggggtcgaagcatagttactggttttcgtaaaactagttaaggaaggccggtcatcccttttgtagctcagtatattattcatgcgcggaggagaagcaccagcaccagccctgtgacaccacaagcaggaccaggagcagcttgtctccggggggtacggtgagtccaccatgtacacggtagagccacagtgaactgaggtggcgttcaccgtcgaaaacaaataccactagttcataaaggacgagatgagcacaaccacaagctatcaccatcaggggaggtcctggcgcgcatcagcatgctcattcgctcttcgtacatctacaagaaagcacgcatgtcgtaataacgaccctttagcacgatcactaatccaagatctacgacgatgtagaaagctgggtggcccataccttctgcagattagcttacataagatccacatgtagaataacgaccctttgaagtcttggagcccatgtccatagtaagcaccacttcttattctgagacatcctaccgtattatcagacct

SEQ ID NO: 169504 - DNA, 235 bp, Zea mays
  unsure (1)..(235): unsure at all n locations
  Clone ID: MRT4577_86172C.1
atcaacaagccttagcacaagtaacagcacaagcagttcattctcagtacaatatgataaatcacacagattacagtattcctttttcgtcgacaacagcaccagctttgatcacagcacagcatgccaattcttctgccaatgtggatcagcacaggagaaaccagctctnngtcacatgcagtatggccagaaggagttaggggggcgagtatccaaggagttactacaatgg

SEQ ID NO: 169505 - DNA, 608 bp, Zea mays
  Clone ID: MRT4577_86173C.1
aattccccaatctctgcgccgccgacggtctgcgcttctcttcacccgccgcgcgcatggtgtccgtcttagcccgacgccgtttgtacatccggctgcatcgtcgcgaaccgatgcccaccggcctcactgccatcataggcgacgacatgtttcatgacaacccctccgcacttctcccctcagagctgatctagctgtgcatcgggctcagatctggaagatcatgaacctccactatcacctcgatggcaccctctgcggctttgatgtgtacccctatcatgttcgcgtgcaccacgccacagactatgaatacacctgctgaaggatgacgcattacaaaacttgaacagatcctcctgaatctgaacaacataaacattttggatcctggccgcgtcaccacctgatgtgtacatagaactctttgcttcccatgaggatccttcgtgtcgaaggcatgccccgagaactttgcacctgacattttttaatcattgtcatgtttcctcatctcggatgagcttctcctgatcatgattataccgaagattagtgataactctgtcagcatggactctgtaaggagaaagcagatgagcgag

SEQ ID NO: 169506 - DNA, 213 bp, Zea mays
  Clone ID: MRT4577_86174C.1
agcccacgcgtccgcttcctcaagggcaacttttatcgattctttgaagggtcatgtatgctcacattgcaggagtagtaaactactgtgttcctgccggcgacgcttatcaaaaggctcttgaacttgcgcgggagataaaccagaaagtaagaaaccgctgaacagcctacatgctttattttgacagaagaatcagcaaagttattcgcc

SEQ ID NO: 169507 - DNA, 717 bp, Zea mays
  Clone ID: MRT4577_86175C.1
gggaatcccattttccgtgcccgcgcccgtgccgtaccgtccctatacaccggatcgccactcgctcccccccaccccactccgccccacctccgcgcctcagatccatccccaaccggcaaccctagcgccgggttcctcctcctcggatccgcccgccgccgcgcggactccattgccagaggtgatcgagggggagagatagagcttgggtgggcggattagggagagagggaggggaggatgtccagacggtcgttgaacccgagccggcgggtggcggacgggggtctgccgacagtcggaggcctgttccaccccaagtcacgctcgcctcccgtgcttactattgccctagtcgtcctgggtgtcattcttctcgtcgcctacttcaacagcggctcaggtgtaactgttacaagcagagagtctgtgaccaggtctgaaggcaacccaggtcagcagaaagctaaggtctcagaactaccaaaatttggaagaccggcaaagttgcggagttcttcatggtggacacggtactttgtccagaccggcttgacagagaacgaagggccgctgaagaaattcgaagaggctacatccaagaacaaatacaaaccaggttgtcagatctttcacctgagttcgccaaggtgaggcgcatccatagcaccttgaattgttgtcacaccccctgacctcctccggatggcttgc

SEQ ID NO: 169508 - DNA, 432 bp, Zea mays
  Clone ID: MRT4577_86176C.1
ctccggatcgatatcatcgtgcactgcgtgtctggctaccacattgaccctttaccagggcgacaaggcatgatccttgctcatgccacttctttctaaagtgccacatgtaccctcatccactgacatcaggtctcacagatctgccattgctcaatcctgaataagtcacctggaacctttactcttagaggcttacaaccctgaacttcataatcggctaatcacactatcacttacatatttgatagatactaaaccttgtgtcacactgatattcttgtccaatattagattggctactagtctgctacgtgttactgttcaagtttatggtaatgatcatatatggcagccggagtgttccacgccgatgctgtggcattctgatgctttcaagtaaaactagtcaatgttatgtaccttcatgtt

SEQ ID NO: 169509 - DNA, 1696 bp, Zea mays
  Clone ID: MRT4577_86177C.1
ttcggccgcgacaagcacgaggctacgacgcgtcaacgaccgacatcccccgaacaaaatctcctctgaattcgggccgcgctccactaatcctcatctctcggtcgctaatggcgtgctgatctttccaccgtcgcatacaggcagcaggatgctctttattcccctgtgtcagcttcagcgaagctaatcccattccagtgcccgtaccgcgccgtccctatcgtgccggatcgccacccgctcgctgcgcccccacctccccccctcgccggttcgccacttcgccccacctccgcgcctcagatccatccccaatccggcaaccctagcgccgggttcctcctcctcgtctccgcccgccgccgcctccattgccagaggtgatcgagggggagagatagagcttgggtggtcggattagggagagagggaggggaggatgtccagacggtcgttgaacccgagccggcgggtggcggacgggggtctgccgacagtcggaggcctgttccaccccaagtcacgctcgcctcccgtgcttactattgccctagtcgtcctgggtgtcattcttctcgtcgcctacttcaacagcggctcaggtgtaactgttacaagcagagagtctgtgaccaggtctgaaggttcttgcacatcagaagttatgcgggtgcttccatatcttaaaaaggcatatggaaatgccatgcaaaaggttctccatgtaggccctgatagttgtacagtagtttctaatttgttgaaagaaggaaaggttgaagcttggggagtggagccttatgatttggaagatactgacagtacttgcaaaagcctcgtgcgcaagggctttgtccgtatgtctgatattaagttcccccttccgtaccgtccagattcttttaatcttgttgtggtgtcagatgctttagattatctgaccccaaggtatctgaacaaaacacttccagatttagcaagggtttccacagatggccttgttatttttgctggcaacccaggtcagcagaaagctaaggtctcagaactaccaaaatttggaagaccggcaaagttgcggagttcttcatggtggacacggtactttgtccagaccggcttgacagagaacgaagggccgctgaagaaattcgaagaggctacatccaagaacaaatacaaaccaggttgtcagatcttccacctaagttcgccaaggtgatgcgcatccatagcaccttgaattgttgtcacaccccctgccctcctccggttggcttgctcattgttcgtgtggaggaaatcgtcgcaaaaaaagccatcaggaataggttagcttatgtagagaggctccgacacttgttgctagaaattcactctggaaattaaattgtgtcccccaatgattgcaaactggagccccgctgggatatatatgtaagaactttcacgctgttgtaccgctgtgctatccatgtattgtcaggtgttcaacgagcagtttgaaatgtaaagctcttgatgatccaagagggaggggctatatttgaccactagctccttgtctgcatctagttgtagacatcgtagcatgtcattttcagcaagttggatgatgcttcaagctgacccgttctttctgagacgcgagaaagatggtctaccaaattctgtatcaaacctcagtttaatt

SEQ ID NO: 169510 - DNA, 1573 bp, Zea mays
  unsure (1)..(1573): unsure at all n locations
  Clone ID: MRT4577_86178C.1
gtcgcatacaggcagcaggatgctctttattcccctgtgtcagcttcagcgaagctaatcccattccagtgcccgtaccgcgccgtccctatcgtgccggatcgccacccgctcgctgcgcccccacctccccccctcgccggttcgccacttcgccccacctccgcgcctcagatccatccccaatccggcaaccctagcgccgggttcctcctcctcgtctccgcccgccgccgcctccattgccagaggtgatcgagggggagagacagagcttgggtggtcggattagggagagagggaggggaggatgtccagaaggtcggtgaacccgagccggcgggtggcggacgggggcttgccgtccttcggcggcccgttccaccctaagtcacgctcgcctcccgtgctcaccattgccctcgtcgtcctgggtgtcatttttctcattgcctacttcaacagcagcccaggtgtaactgttacgagcaaagagaccgtgaccaggtctgaaggttcttgcacatcagaagttatgcgggcgcttccatatcttaagaaggcatatggcaatgccatgcaaaaggttctccatgtaggccctgatagttgtacagtagtttctaacttgttgaaggaaggaaaggttgaagcatggggagtggagccttatgatttggaggatactgacagtacttgcaaaagactcgtgcgcaagggctttgtccgtatgtctgatattaagttcccccttccataccgtccagattcttttaatcttgttattgtgtcagatgctttagattatctgaccccaaggtatctgaacaaaacgcttcccggtttagcaagggtttccacagatggccttgtgatttttgctggcaatcctggtcaacagaaagctaaggtctcagaactaccaaaatttggaagaccggcaaaattgcggagttcatcgtggtggacaagatactttgtccagactggcttaacagagaacgaagggccactgaagaaatttgaagaggctacatcccagaacaaataccaaccagattgtcagatcttccacttaagttcgccaaggtgatgcgcatccagaacaccttgggttgttgtcagttgtcacatcagttctgtaagcagcacctttgcttacccctgttgacttgcgcatctttcgtgcggaggaatggtcacacaaacagagccagccatcagcagtaggttagcttgtgtagagagggagagagagagagagagagaggcctcgacacttgttcctagaaaatcgttctggaaattaaattatgtgtaaccaatgactgaaaactggagcccgctgggatatatatgtaagaacttcacgctgttgtactactcagctatgagctaaaaaaaaaaaaaaaaaaaaataaaaaaaaagtatatagacaaaaaaaaacaaaaataaatagatccaaaaaaaaaaatatataaccagaattatgacgaacttggaaaagattaacaccccctggtgatgacataaaatggcaacatgtnntggggggggcccttttttaagaaa

SEQ ID NO: 169511 - DNA, 334 bp, Zea mays
  Clone ID: MRT4577_86179C.1
cttacctaaaaattatttttatttttgttatttaatacactttttttttatttattgtgttgactttttcaagtagtagtagtgaaaaaaaaatcttagggggcccacaaagggtattacagggttttataaagaactgtgccccacacaggggggcggacgcaccattttgttttcgcttcaaaaacaaaaccctttttttttaaaaagggggggagaccaaaaaatgggggaccaacattgggaacaaaccaaccacatccatgaaaacctttgaggttaaaacaaaggggcttttcttgggcaccgccgaaaaagaagaaaaaaatggcct

SEQ ID NO: 169512 - DNA, 152 bp, Zea mays
  Clone ID: MRT4577_8617C.1
cattgggtacctcgagtcggctgtagtcgctatcaaagaggtgaatacgatctgctcgtctgctcttcgagcctacagtgcccgcgtgaggacgatctcgctatcctctactaatatacagccaagacactgctcgtgatgataacgcggat

SEQ ID NO: 169513 - DNA, 1416 bp, Zea mays
  Clone ID: MRT4577_86180C.1
cactaatcctcgtatcggtcgctaatggcgtgctgatctggcaccgtcgcatacagcagggcgctctttattcgcctgtgtgagctgcagcgccgggaatcccattttccgtgcccgcgcccgtgccgtaccgtccctatcacaccggatcgccactcgctcccccccaccccactccgccccacctccgcgcctcagatccatccccaaccggcaaccctagcgccgggttcctcctcctcggatccgcccgccgccgcgcggactccattgccagaggtgatcgagggggagagatagagcttgggtggtcggattagggagagagggaggggaggatgtccagacggtcgttgaacccgagccggcgggtggcggacgggggtctgccgacagtcggaggcctgttccaccccaagtcacgctcgcctcccgtgcttactattgccctagtcgtcctgggtgtcattcttctcgtcgcctacttcaacagcggctcaggtcggttaaagattctcggtgtaactgttacaagcagagagtctgtgaccaggtctgaaggttcttgcacatcagaagttatgcgggtgcttccatatcttaaaaaggcatatggaaatgccatgcaaaaggttctccatgtaggccctgatagttgtacagtagtttctaatttgttgaaagaaggaaaggttgaagcttggggagtggagccttatgatttggaagatactgacagtacttgcaaaagccttgtgcgcaagggctttgtccgtatgtctgatattaagttcccccttccgtaccgtccagattcttttaatcttgttgtggtgtcagatgctttagattatctgaccccaaggtatctgaacaaaacacttccagatttagcaagggtttccacagatggccttgttatttttgctggcaacccaggtcagcagaaagctaaggtctcagaactaccaaaatttggaagaccggcaaagttgcggagttcttcatggtggacacggtactttgtccagaccggcttgacagagaacgaagggccgctgaagaaattcgaagatgctacatccaagaacaaatacaaaccaggttgtcagatcttccacctaagttcgccaaggtgatgcgcatccatagcaccttgaattgttgtcacaccccctgccctcctccggttggcttgctcattgttcgtgtggaggaaatcgtcgcaaaaaaagccatcaggaataggttagcttatgtagagaggctccgacacttgttgctagaaattcactctggaaattaaattgtgtcccccaatgattgcaaactggagccccgctgggatatatatgtaagaactttcacgctgttgtaccgctgtgctatccatgtattgtcaggtgttccccgagc

SEQ ID NO: 169514 - DNA, 452 bp, Zea mays
  Clone ID: MRT4577_86181C.1
cgggttatatgctgccgtcctgtaacgaattcgcaagttttagttcttttgtgctttgttaagaataaacaatgaggtttcagttttaaaaaaaaaaaaaaaaaaaaaaaaaaaaaaaaaaaaaaaaaaaaaaaaaaaaaaaaaaaaataaccctaagtaagcttgtggcaattggggattggataataccttccgatgtgaaacctgtccctacaaaggttttccaccattcaagcttggaaagaaggttaccttgaatggcaacttccttgcttgtgacatatgatggggatgaaactatgcaagttaacattggtaaaaaaaggagacgggggttaccaactttgttagtcgactaaactgatttcaaaatagattttgttaccaaatgacaatgtgcgcagaagtaacttgtctttaggattataaataaggacctttacaaaaacaa

SEQ ID NO: 169515 - DNA, 303 bp, Zea mays
  Clone ID: MRT4577_86182C.1
atggtcagggcggtgaccgcccatcctactccgcctgagagccccgacgccatctcggtggcccttggtgccctcagactcgccccacgcgggccgcagctctttgcgtcgtatgacgcagaaacgtcatcctaccacggtggccctagcaacagctttggcgctttcccacctcgccacgcccctgtggtaatcgccgccctcgtggcccgtggccacctccctacattagacgacctggagttcgtggggatggccagaggcggtggggatctcatcttcgacgcactctgcacggactag

SEQ ID NO: 169516 - DNA, 366 bp, Zea mays
  unsure (1)..(366): unsure at all n locations
  Clone ID: MRT4577_86183C.1
ctctttccgctgcgtctctcttctctctctcgcnctctttcttctttttggattttaaaccaattcattcctcgtgtgagtgaggtccctccgctcctcctctctctctctctctctccctctccgcggagtggagccggcgtctagaggcaagcatacgagaccaggaatgcttccttcttcccatgccgccgccgtccctgttcttctcctccctccctaattccagcgctctcacgtaccagatcttacgccgcggcggagcgtgacgactacaaagtcggtcatgatgagccgccaggataccctgaaagtgcaggccatgtcttctcctgccacgtaattctgtctgagcgcacagaccct

SEQ ID NO: 169517 - DNA, 174 bp, Zea mays
  Clone ID: MRT4577_86184C.1
attcctcgctactcgctagtagccacttctcccgtagcaccccgcgtatctcttctcgttgcgacgactgggcgatccctgcagcaccccgtatcccgctccccgcagccaagtgcccaggttgtagccgggcccttcgccggcgatgagcacccaacaggaggttactgagaa

SEQ ID NO: 169518 - DNA, 486 bp, Zea mays
  Clone ID: MRT4577_86185C.1
tgccagccgtgttaagcttgcgacactgcttcaagctcttgagggtggatatctcggtaaatccgatgcttccatatttggctagcccaagcaagaatcggatgagctggacccaaagccgggggctgctgcctttacaccttctgcttttacatacatccctgctgttgagctgcatcctgtgcggtcggcacgttcccttggttgagatccacctcactgtcagacgtgactagggcctacttgctatgcaccaactctgtcgtactatgctcttacttgctttctgtagaatctctatatccgataacagctctacccttcattcaatgctagtgcgtgactattaaatcctggagagcctacttgactagctacttgcttcattatctagcgttgcgctgactgaccgcttttcttacagtaggccggtcaagccatacgtcctaatgaggagtactactcgcgaagagagctctattgcag

SEQ ID NO: 169519 - DNA, 377 bp, Zea mays
  Clone ID: MRT4577_86186C.1
gtgaaacagtgtttggagccagccggtcaagctgacagtggatgagggggactcggagctagtcgactttaacgcgcactatgatcgtcgttgtccttcccctgacaacagaatccgacggaaaggtgaagctactgctctttctgtgggaccggtagtatgtctctttgatgtcatggtgacgcgactgacacgtgtgggagcagtggattatacgagactttagtggcacttatcggcatggacccggtgcttcttgtcgcctacgtgggcgacaaggccacttcgcacgaccctgctcacccttggaggatggatcccatgtttgtgctcaagggcgtgtctactcttattctttgggtaggatggggtctcca

SEQ ID NO: 169520 - DNA, 580 bp, Zea mays
  unsure (1)..(580): unsure at all n locations
  Clone ID: MRT4577_86187C.1
tntttttttttttnttttttgggagtctatggaaccttattcttaattagatacatatactggagtgaattatccacgagattgcgatgcatatatataaactgtgtcaaatgacacaactaacatatgcaantttgttantgccatgatgatgaggctttgagaccttcaaactctcccatcctcttccacagtgtgacagattgacagtcctcccaatggatcagatcggagttaatcacagctgcaggccgtggccatggaggccgccgcacgccgccgccgggtcctgcaggttgggctgcgtcggctgtagccggaacccgaggtcggcgtgctgcagctgcggcgccgccgacatcagctgcagtgccgtgccgcccgacgatgactccccgccgtagtaggtggagtgcgtgaacgccgccggcggtggcagcatcgccagcggcgccgtcatctcccccagcttcacctcgccggtcaatgtcgcctgctggttctcgttgatcatgcggtacaggaaggtgttctgatcttccaagatttgttccttgcgacgcaggttgtcaagctgttg

SEQ ID NO: 169521 - DNA, 292 bp, Zea mays
  unsure (1)..(292): unsure at all n locations
  Clone ID: MRT4577_86188C.1
acgnaaagcaaaccaggnnnngggcagcgaccanggccccgggaagaagnagcgagaacgcgaaacncanaagcacanaccanacagggaaaacaaaaancncacaggaacagcacganangccagngnaaanacccancnnggaggngagcaaagcagaagagaagancnggaancncnngggnangngcccaaggaanncnaaagaggaagncnccccnggcaaggcccgaaagcnggcacaaagaagcagaagnanganaggagcagngaaaagaaaangcngacgcca

SEQ ID NO: 169522 - DNA, 751 bp, Zea mays
  Clone ID: MRT4577_86189C.1
ctggtggcaagctcgatcgagctaggagtcagatggaaggcacgatgaagcacagcaacgttgtgacggagaggagctctgtgaccaagccccgtgaacaggaggtgtccgcttggcatgaggaggctggagagcgtctggtttggacgccgggagcagcagttcagctgatgctttgtgcctagcattagcacggcggcgttatcctaattgagcttttgagtcaccatctttatccttcctcatattctccgtatcgtgatgcttgtggtttcgcaagaccaggtcttcttgaccttgcaagaccttttcttgaccttgtaagacccaactctacgatacatcttctctttgacttaatcttctcatctcacacccttctctcttctcacctcacacctttctatctgttcttacttctcttctatgtctatcccttctgagctgtgttgagctactttgataaagctaggtactatagattaagtgttttaggaggtgtttctcacatgtgtaatgttgtgagcttgccgtgtgggaaaaaaaaaatccattttgatggtagctatatagagtgaggcatgagacaaacaaaagtatgttcctgttgcgccatgagcacatgatgctcggccatgtgaagtaggcgcctacatgcaagctaagctagctagctccgtatgtatcgcctcgatggaataagctgctgctcgaaacattttggatcgtccaacatgtgttctttgtagtt

SEQ ID NO: 169523 - DNA, 691 bp, Zea mays
  Clone ID: MRT4577_8618C.1
ccggccgggagcacttgcacatcagcaacctcaaccgcaagggaggtggcgaggctgagcgccagccgccatgtctgtccccggcgtcgcctccccgatcgccgaccgcttctactgccccccaccgcaccgccacctccttgacaagcaacacagacagcatccgccactaactgcctcggcggccgaggagccggcgaagccgacgccggagctcgggcgagacccttccccgtcgccttcgccggctaccaacctcgagagtttcatcgcctccaccgccgtccgcgttcccgcgcggtgctctcctcgaacgccggggtgccgggcaggagcgccgtactacgagctcgcggatctgtgggaggcgttcggggagtggagcgcgtacggcgccggcgtgccgctgctgctcaatggcacggatggcgtcgtgcagtactacgtgccattcctgtccgctatccagctctatgggtcgcggctgccgtcgtcgagcaagaccaagagctgcagataccttaatgaaggcagtgatggtgacaatgctccagaaacaagcagtgatgtaagcaatgagagtgacaatgacaatgacaatgaaaagtctattggaagaacaacccaatgtagtgaaattttatatttgtacccgatcaaggaaagttgatccagtgatgactgtgatttc

SEQ ID NO: 169524 - DNA, 1039 bp, Zea mays
  Clone ID: MRT4577_86190C.1
aattcggcacgaggctccatctgctgcagcttctgcatacacacactgcaagtctccatgtccggcgccacctgagtcctgagcctgctctctccgtctctctctccctactcttcccctcgaccttccgtctccttggcctttttattcaccgcagccgcagcacccgtgcactaccacacaaacagacacagaggtgacctacacttttgggagaagctgagcggtttcgttctccttcctgccgctggccggccggctggtggcaagctcgatcgagctaggagtccgatggaaggcacgatgaagcacagcaacgctgcgacggagaggagctctgtgaccgccaagccccgtgaacaggaggtgtccgcttggcatgaggaggctggagagcgtctggtttggacgccaggagcagcagttcagctgatgctttgtgcctagcactagcacggcgttatcctaattgagcttttcagccaccatctttatccttcctcatattctccgtatcgtgatgcttgtggtttcgcaagaccaggtcttcttgaccttgcaagaccttttcttgaccttgtaagacccaactctacgatacatctcctctttgacctaatcttctctacctcacacctttctctccgttcttacttctcttctatgtctatcccttctgagctgtgttgagctacgctgataaagctaggtactatatataggttaagtgtttttaggaggtgtttctcatatgtgtaatgttgtgagcttgccgtgtgggaaaagaaaatccatatattttgatggtagctatagagtgaggcacgagacaaacaaaagtatgttcctgatgcgccatgagcacatgatgctcggccatgtgaagtaggcgcctacatgcaagctaagctagctagctccgtatgtatcgcctcaatggaataagctggctactgctgctcgaaacattttggatcgtccaaaaaaaaaaaaaaaaaagcggcatgtgttctttgtagttactattgacaactggtcg

SEQ ID NO: 169525 - DNA, 315 bp, Zea mays
  Clone ID: MRT4577_86191C.1
atatttttttttttttgatttcaagtcggggggtatgaataatattatggccccaaactaaaataactaagcaggtgtgttacagtacgatttccacaaatcataaataaaattgcacttatggtgaaagagagccaccacaccattatatgactcttccatagaaattaacatgtagcacacttgtcgatcttagtgatgaacatgcgcttgttcctttataggctatggtgccttgaggatagagagctagatgctcccgaaaacaagaccgtagcctaggaacggtgcccttgttacaagggcgggggtgct

SEQ ID NO: 169526 - DNA, 261 bp, Zea mays
  Clone ID: MRT4577_86192C.1
gttttgtctgatagaaggcttgggagttgatgggcggatgtgttaggtggcatatgcggtttatagcaaaccgaaccgtttggggtaaaggagtgaagataagactggaacatgagcataacctagacaacggtaagtccaagggcctgaatactgcttcagcttaaatgaagtcgctcgttcatcgatgagacaagacatgatttccaagacggcgccatcatcaaaatgaatactgaggggatgcaaatagtcaacagg

SEQ ID NO: 169527 - DNA, 364 bp, Zea mays
  Clone ID: MRT4577_86193C.1
cctctcgctcgccggagaagcagccgccgttgctgctgccgcgtcccagaatggggggttatgtgaagacccacaagagctatgcggattctacacgtctcccagtgaaacccaccagaaggcggcctggcaagacagactacaggaccaggatcaggctgattaaccaattacaaaaacaggtacagcacacccaaatacatattggctgtgcgagtcaccaacaaggccatctctgtacatatcatatctgctagcatagcggttcatatggttcttgcttctgcctagtattatgagatcccacgacatggtcttgccagttggtctgcccaactatgtaaggtgactactggactggact

SEQ ID NO: 169528 - DNA, 612 bp, Zea mays
  Clone ID: MRT4577_86194C.1
ccggccggggactttaccgcgcctacacgactaagattgcgcattgatctctcaactaccttagataggatttgttgtatcaaatacccatctacgaagcaacgatgcctaccacaacggcagaaaccctttccctcgtcacccgaaacgtcaccgttgcgcccctcgtgcttctctccgccgtcgaccactacaatcgaacagtttccacaaagacaaagcgacgagtcgtgggtgttctcctgggacaaaatgatggaaacgatgtgagagtgtcaaacagctttgctgttcctttcgaggaggatgacaaggacccttcggtgtggttccttgaccacaactacgttgaatctatgaacgatatgttcaagaaagtcaacgctcgagagaagcttataggatggtaccacaccggtcccaagctccgcgcatctgatttggagatcaatgaactcttcaagcgctacacacccaaccccctccttgtcattgtcgatgtccagcccaaggagtcaggagtgccaacagatgcttactttgctgttgacgagatcaaggacgacgggacaaccaccgcacgaacatttggccacactccttccgtcatcg

SEQ ID NO: 169529 - DNA, 405 bp, Zea mays
  Clone ID: MRT4577_86195C.1
gggccaaagcaaagatccccccccagccggtggggcggccgggaaaagaagggagcctttttacaaaccggcccccaattctgggttagcccgggaatgccgggccggaaccggggggggccccagctttccccataggggggcgatttaaggctcgggggaagcaggggcaaagctgtttccgggggggaaaggggaaccggtaacaaccccacacaaaaaaaaggcccgaagaaaaaagggaaaagcccggggggcccaaggggggggccaactcacataaaggggggggggccaacggcccggtttccaggcgggaaaccgggcgggcccgggggaataaagaaacggccaacccgcggggggggggggtttgcgcattgggcccccggggggctttttttt

SEQ ID NO: 169530 - DNA, 493 bp, Zea mays
  Clone ID: MRT4577_86196C.1
acaacaaaggaaattccaatcggtttaatggggaaaaaaacctaaacaacacaaacacgggttcattaatggtaaggggggggggggacaaacaacacaccaacccagccccaccaaattttggggggaacagccggggcattttttcagatagaccccactttggggggttaggcgaagcagccccccttccactttttccaggggagggggtaaaagggggtttaggtcaagcttagggtcaggcctccagcaagaaaggggggggttccgatttcgcagcatagctacatttaaaagggggggactttttatggacccctggaaggttcccatgagacggtttttggggcagttcaaccattatcctaaagcaaaccattagatggtcttctgaatatctggggggcaggtcacagcatttgttccaggacttgaacccatttatggggcattgagcggggtaaatgggaacgggtgctaacataaacgg

SEQ ID NO: 169531 - DNA, 221 bp, Zea mays
  Clone ID: MRT4577_86197C.1
caaaaattgtagctaagcaaagtctgtgatgttaatattagtattccgtaggtgacagacacccccatcagaaggtagtttgacttggcgtgtcattttggatgactcagattagactttttcatcagtttacaaattttcggatacttgttcatggattatttctatatttatttatatggttggttcatcgttaaaaaaaaaaaaaaaggggtggcccc

SEQ ID NO: 169532 - DNA, 723 bp, Zea mays
  Clone ID: MRT4577_86198C.1
attgggacctcgaggcggccggacgactagccaaccccgttctccagccagctaggtaccgacactcacttctacctattgattacgctctgcgctcgcctggaacatgcggatctgcgctacgatgggcaggcgcctcctcctcctcgtccagggcatgtcgctcgttgcagagcttctcttcttgtccatgtgctcgccgctcatgcgcgactatcggacgagctttagcgactccgactttaccgccgatcgccatactagggagggtgcccgcgccatctgcaacgtcgagcccgccgagacctggcataatgtgcacgttgcagcctgggttatcgataacatcacaagccgccggactcatcgatgcaatccggccgcccctatgcccatcgtgctgacctcaaggtctgtcagtactgtgacgctcttgccatccctgagaggccacacccgtgccaccttccctaaacagctcccgacctccttctgagatactcccctgctcatccttaccgacccaaggactgaccatcagccaattaaggagtgtgctctgccgaacatccccaccattgccttctgggatactgactctcccatgcggtatgtagatatcgctatcccagcgaacaacaaagggaggaacagcattggatgcctgttctggctttggccacgatgggtctgcaaatgaggggcactatcctccctgggcac

SEQ ID NO: 169533 - DNA, 268 bp, Zea mays
  Clone ID: MRT4577_86199C.1
tttccaccatttcttccccccctccactaaaaatttagcttctacgttgccctcctccgggcgtaggccgctcgggcggagccaatgtcaccgccccttgtggcaccaactccctaacttgcgtctatgctgacagctagcagatactcccattgctagctcctattctgacttaaatgcgtacaatcataaaccggcacaccgcagctttacgccactgtcttttcaaccaatctctatgaccaattgtgtgaatcaacggtttctc

SEQ ID NO: 169534 - DNA, 631 bp, Zea mays
  Clone ID: MRT4577_8619C.1
ccgacatcttcgcaagataccgcaaccgaagcccgcctatctccgccgccgactctgcgatccacgcaatgtctctctcatgcttaccgaggtccaacgcgctacccccgtaagagaccagtgattcggtcgcacgaagaagcttgtgtgcgtcgcctacgacaagcatctcagtgaactaatacatgtgtgcgaagtcccgattgagctcatcgtgcctgacatgctccgcctcaaggtcttccaatacatgctgctggaagggcgatcgatgttaacggacatcgactctgaagatccgtcgtcgagcaggcgggaagacaccgcaaatatacgacgtttgccagaatgacgacaaagagctcgtagactattaccataagcacctctaccaggccgatacaaatgagggctaggacatctttccccagtacgaccgcagccttttgccccccgattgcagtcggctgggagtcgaacaaaatcaggtgttcgcatctcccgcaccagattccagaaaacctagcgatgagcgctctgctgactgcgcttgacagaacgatgcctgtgctgtccaacttgccagctagatgcttgtacacgtggcttaatcttctatcatcgcagctac

SEQ ID NO: 169535 - DNA, 499 bp, Zea mays
  unsure (1)..(499): unsure at all n locations
  Clone ID: MRT4577_861C.1
gcccgccngccccagggggccgcngcgggcnccgcaccacgcgcggcgccggagcngcnacggcggcggccggnggacgccgcgccgcgcgngccggaggcggngacgngagcggcggaacccgcccggccgngccanccnggcgacgangacagcgnaagcggncggcggaggggggggcccccccnnccccaacncccgaggncannggcgngngccccnaggcagaaaanggcganganggnggaaccccccaanggcacggcaagncaaggaaagcanaacnnaacnangnggcagacaccgnnngagaacgacaccaagnacgggccgagcaagcccancggaagaggagccaacggaancgnnngcncaacngnnaaccgcgagaccaacgaaaaagncgcgacaaaaaagaaaaacaacgacnnngacaaccggggggaagcgccaaggacgcgaagagagcngaaacaccnacggcacccgaggcacgaga

SEQ ID NO: 169536 - DNA, 1280 bp, Zea mays
  Clone ID: MRT4577_86200C.1
gtgcggatggtcgagctcggggccggccggggactcccctaaacccattgtgtgcccgccgtcgacgcagcctccgtcctcccccgcatccgaatcacgcacgccacgtcccacccctgtcatggccacctccagcgacggcggcggcgaccagcggcgcctcctctccatccccaaggaaggcgagcgcatcatcgcgcccacgcgccgccccgacggcacgctccgcaaggccatccgcatccgcgccggttacgtgccccaggaggaggtcgccatctaccagtccaagggcgccctaatgaggaagtcagggcccgacgtgccgccggggtacgacccggcgctagtggccgacgccaaacccaagacgaaggcggccaaacggaacgagcgacggaaggagaaacggcagcaggccagtttggcaaatgataaaggaaagagtatgaacatagagggaactgatgctggagaaaccgacaaggtcctttcttccaaaacggataagcagaaggattccgtggaaagtgtaacaaagcagatgagtggcattgctatttctgagtcacatgcaatgccgtccacaaatactataaacaattcgcaaccagaatcatctgctccagacatagacaagaagattcgagcactgaaaaagaagatacgcttagctgaagcacaagtacaaggtgaccctgaaaaattgaaatctgaaacgctggaaaagattaaaaagattgatggatggtgtatggaactgaagcttttggaggacagcagagctcctgcggcctagacaaaatcgacttcggctctgatgtagtagaatagacagtagagccatcgcgaccacaccagggtgctgagctaaattccaaggtgcactgaatcaccctaggcttttccattacctgtgttggttactggaaaaccagtccggtagatgcgggtttgcgcagaacgatggagtgtttttccctgcacatttgatgtctcatgttcgccaccaagtttcaaggtttgtaccacaagatccatttatcagaaagaccacacagtgagataattcaaacgattattgtgacagtgtggttaaactttagtatactatgataattctgggaatctcttaagactgaatcagaatcgtaactctctggcagtgccggaattcttatgtctctggctccctgcctctcttcatcacatgtactacctccgttcttaataatatttatcgctggctagttcatttttagaccaaaaaaaaaaaaaaa

SEQ ID NO: 169537 - DNA, 1236 bp, Zea mays
  Clone ID: MRT4577_86201C.1
gcgtcaactcaagccttcactgttcactctgggatctcgactctaaaccttcgcccgccgtcgccgcagccttcgccctcccctccatccccgcatccgaatcacgcacgcgacccttgacatggccacttacagcgacggcggcggcgaccagcggcgccttctcaccatccccaaggaaggcgagcgcatcatcgcgcccacgcgccgtcccgacggcacgctccgcaaggccatccgcatccgcgccggctatgtgccccaggaggaggtcgccatctaccagtccaagggcgccctaatgaggaagtcaggacccgacgtgccgccggggtacgatccggcgcaagtggccgatgccaaacccaagacgaaggcggccaagaggaacgagcgacggaaagagaaacggcagcaggccagttcgacaaataataaaggaaagagtatggacatagagggaactgatgctggagaaactgacaaggctctttcttccaaaacggttaagcagaaggattcggtggaaagtgtaataaagcagataagtggcattgctatttccgagtcacatgcaacgccgtccacaaatactacaaacaattcacaaccggaatcatctgctccagacatagataagaaaattcgagcattgaaaaagaagatacgcttagctgaagcacaagtacaaggtgaccctgaaaaattgagacttgaggcactggaaaagatgaaaaagattgatggatggcttaaggagctgaagcttttggaggacaagagagcgcctgctgcttagacaaaatcaacttcggttctgatgtagagccaccacgaccacaccatggtgccgatccagattcgaaggtgcaactgaatcaccataggcttctccgtcacccgtggtggttattggaagagcagtccagtagatgtgggtttgcgcagaacgatggaagtttttcaccgcacatttctggcgccaagtttcaagatctgtaccgcaagaaagaccgctgctaattatggggatctctgacactgggtcagaatttacttttgctctcacggcccgaattcatctccggctttaccaccattgttcaattagctgttatatcacggttgaaactgactggaagtgccggaattcttatgtctctggctccctgcctctcttcatcacatgtactacctccgttcttaataatatttatcgctggctagttcattttt

SEQ ID NO: 169538 - DNA, 793 bp, Zea mays
  Clone ID: MRT4577_86202C.1
attttatctcatctcgcccctccgttcaagcagtagcacacaccgccgctcgctccacagcagaggacaggaggaggagcaagcgagcagaggcagcagctgctatggaggcgcggaggacggggagagatctcctcgcgagcttcgtgctcgcggcgttggccgcgcaggcattcgtggccgtggtcgagtccagggccagccccgcggagaaggctagccaaggcgacgacgtgaagaagccggactgcgtgccggggatggacccgcgctcgttcccgggaatcggcagcggcagccacggcggcggcatcacgcccgtgacgccgtcgcacggaggctccaccgggacgccgtcccacggcggcggcggcggcggtggggacttgccgtcgccgtcgcacggagggacaacactgccttccccgtcccacggcggcagcggtggggacttgccatcgccgtctcacggagggacaacgctgccttccccgtcccacggcggctccgggtccacgccgacatcgccctccaccggcggctccccgtctcacggcggctccgggtcctcgccgacagccccgtccaccggtggcggctacggtggctccccgtcccacggcggcggcgcgtacggtgggtctcccgtccactcccggcagcggtggcgcctacggaggcgggtctccctcgccggcccatggtggcggcgcctacaggagctccccgacgccggcgtacggcgacgccccctcgcacggcggcatagggaccttgtcgtcgacgccgttcg

SEQ ID NO: 169539 - DNA, 877 bp, Zea mays
  Clone ID: MRT4577_86203C.1
gccggccgggcctcgatctcgcccctccgttccaagagtagcgcacaccgccgctcgctccacagcagaggacaggaggaggagcaagcgagcagaggcagcagctgctatggaggcgcggaggacgggcagagatctcctcgcgagcttcgtgctcgcggcgttggccgcgcaggcattcgtggccgtggtcgagtccagggccagccccgcggagaaggctagccaaggcgacgacgtgaagaagccggactgcgtgccggggatggacccgcgctcgttcccggggatcggcagcggtcatggaggcggcatcacgcccgtgacgccgtcgcacggaggctccaccgggacgccgtctcacggagggacaacgctgccttccccgtcccacggcggcagcggtggggacttgccgtcgccgtcgcacggagggacaacgctgccttccccgtcccacggcggcagcggtggggacttgccatcgccgtctcacggagggacaacgctgccttccccgtcccacggcggctccgggtccacgccgacgtcgccctccaccggtggctctgttgcataacagcattatgtaatcatgtcaatcctgtatccagcatatagatgcattagacaagttgtacttaagcacgtttagtatccgtacgcgtagaattacaggtggctggcgaatgcacccagctgcgctgtgaccgcgtcaagcgcaattctcgccacgccgttgcatgtcgtgcatgtcgcatggtctgccgaataatcaggcacgccgtgcagctgcgcagtgtggcggggaaagcggatcccagttgattaaacgttgagtaatgcatcagtgtggttgcgcgttgcagccagacag

SEQ ID NO: 169540 - DNA, 311 bp, Zea mays
  Clone ID: MRT4577_86204C.1
aatggattcacatatctcatttgattccagtggtgttgttttaacttacaacactgttgaggcagatagtgtccagaagcttgtgtcagatttacgccgactttcaaatgctcgttcttttgctcttggaatgaggagactgattggtgtgaaatttcaagacaagctagatgacaaccagttaaccatggaggtgacatcacaatctgttaataaaggtaacagtgatgctgctgacaagctatctgagcaaatgagaaagacattcaggattgaagctgtcggtctaatgagcttatggtttagctacg

SEQ ID NO: 169541 - DNA, 634 bp, Zea mays
  Clone ID: MRT4577_86205C.1
aagcacaccaccgctcgctccacagcagaggacaagaggaggagcaagcgagcaccgagcagaggcagcagctgctatggaggcgcggaggacggggagagatctcctcgcgagcttcgtgctcgcggcgttggccgcgcaggcattcgtggccgtggtcgagtccagggccagccccgcggagaaggctagccaaggtatagtacatcttcttgagctctgcccactccagatgaaacaagcaccaatgccgatgtcccatgagggcggcgccgtggcgagcaagcttgcattttttttacctttgagatggcgtcgccgcatgcaggcgacgacgtgaagaagccggactgtgtgctggggatggacccgcgctcgttcccgggaatcggcagcggcagccacggcggcggcatcacgcccgtgacgccgtcgcacggaggctccaccgggacgccgtcccacggcggcggcggcggcgatggggacttgccgtcgccgtcgcacggagggacaacgctgccttccccgtcccacggcggcagcggtggggacttgccatcgccgtctcacggagggacaacgctgccttccccgtcccacggcggctccgggtccacgccgacatcgccct

SEQ ID NO: 169542 - DNA, 269 bp, Zea mays
  Clone ID: MRT4577_86206C.1
tagatgacgtgtactatctgtggtataaagttcatcacagatgacgtcttcttaaatgagccctctgcagattccccagcttctctctaccagacaattggaggaaatattaaaatctttgaagaagaagaagttgaatttatcagtgtgcctgtcccagagtttgcagatagtgatcctgccatcattgttcatgactttaacaagaaacttacagcctatttagatcttaacctggataagtgctatgtgatccctctgacacttca

SEQ ID NO: 169543 - DNA, 210 bp, Zea mays
  Clone ID: MRT4577_86207C.1
cgcgaggtggcagggcaccggtgccggccaagaagaagacggatatagtgacgaaccctctgttcgagagaatgccgagcagttctgcatcggcggcacgtttcctcccaagaaggacctgcaccggttcgtcaaggggcccaaggtcgtacgcatccagcgccaggtgcgcatcctcaaacagcgcctcaaggtgcctccggcgctcaa

SEQ ID NO: 169544 - DNA, 366 bp, Zea mays
  Clone ID: MRT4577_86208C.1
cccagaactcggcgacggcgctcctgatgaaggcggcccagatgggctcgacgacgtcgagcaccacccacaacaaccacaacggccctactacgactagcacgctgctccgtgctacgggcttcagcggcgccaccggcagcgggcagctggggactactggcggcagggccgccgcgggagaagaaggggcggcgtcccacgaggcacacttccatgagctcatcatgaactctctggccggcggcggcttctccggcaccgcagggttcggcggcggcgtggacgacggcaagctgagcaccagagacttcctcggcgtcggcaggggcgccgcgacgatggcgccgcccgggctccacatgg

SEQ ID NO: 169545 - DNA, 515 bp, Zea mays
  unsure (1)..(515): unsure at all n locations
  Clone ID: MRT4577_86209C.1
agnaggagaggaggacggggacggcgacacggtgtccgtcaagagcttcgagacctgctgcgtgatgccggaggaggcgcacgtcgtcgtcccggtgcatcatcgtctgatgagcgccgcacacgatggcaacgaccagagcagggtccctggtggtgccgatgaagagggagcggcgacgctcatccagtccgcgttcagagggttcatgtcgaggaggcagctgcaggaggcgagggcgaggacgaggacgaggacgcgcggccgagagccagaaccggacggcgccaaggaccaagagcccagcagccccacctgggggccgtccgtcgcgacgtcgtgctggtccagtaggcgacgagtcgtctcctgggcaacctcggctccgctaacgaggagagcgcgtcggtgcagcagcagcggtccagcagccagagtcgtcgtcgcgcccgccgncagcgttccgagtcaagnaggagtgggacgacagcacggtgagctccaacgtgtccagg

SEQ ID NO: 169546 - DNA, 926 bp, Zea mays
  Clone ID: MRT4577_8620C.1
gacgcgtgggccagggttgatgcaaatccagcatcatccttcaagatcgccccccactttgtccggtctttagatccgccattgagtcaagctgcggcgatcgcgtgcgagactgggacggagatgctcctctgcatctccacctgccctgtcgaccgctagccgccgcctgtttcctccaattgctaagggcttaaaaagtcgaacacccaattgccaagggcttctgccccccagcggtgaaggggagtgagaagcaccgggaagatgacgagcgtgtacatcccggtgcaggggacagaggaggaggtgcaggtggcgctggaccagcttccgcacgacgcatccgatatcctcgacatcctcaaagccgaacaggcccctcttcacctctggctcatcatcgccagagaatacttcaagcaaggaaagatagagcagttccgtcagattctggaggaaggatctggccctgaaattgacgagtattatgctgatgtgaagtatgaacggatagcaatccttactgctttgggtgctttccatactttcttgggaaaggttgatagagcaccacagaaggaatcacattttaaagatgcaactcaatactataatagggcatcaaggatagatgaaactgaaccttctacatggattggaagaggttccaccgtcttttaacattttatttaaacctcttacatatgtattggtttattatagctttcctgtacacattgtcatgtggttgtaggatgaatgaccattacattggatgcacatgggggaaaataggaaatgtccttttgtagttccattttctcgaaatcgcaggagagtccttttgtagttcaaattcgctgcaacgagtagttgtcacacaacagtgcattcttaatgtgattcaacagctattcttattc

SEQ ID NO: 169547 - DNA, 331 bp, Zea mays
  Clone ID: MRT4577_86210C.1
ggtgttaattagtggtgttttgggggaaaactttgcacattctttattaagattatccagcatactttagtgtgaaggccccttaagcaaaaacaaaacatccaaacaaacaggaagccgtcccgggcttattttccgccaggctccctgatgactaattatttgcggggcttcttttaaaacttgggtggaaaccccattacggggacctcttttggcgcgcctggttgactttcaaaaagcgcgtttccgggttccacataacggcctttaggccatttgagaagtggggggaaaaattggggaaattaaagggggcccccttggactt

SEQ ID NO: 169548 - DNA, 201 bp, Zea mays
  Clone ID: MRT4577_86211C.1
atggccgcaatcttcgtcatcaggggagggggcgcctggtcatcgaacacgacagagagcttgaccctgatgaggaggaagcaggtcgtgattgctattctaggtaaggcttcagaagaagaggaaactccagattaccaggtcacctctcctaggacctttatcaccatgctcgtggttcatgcttgttccattttctga

SEQ ID NO: 169549 - DNA, 1854 bp, Zea mays
  Clone ID: MRT4577_86212C.1
aaaggaaaaaaatcaaacgagaaggaagccaccgctccccaatcgcctgcttgccttcccatcctcctcgtagatctccggcaccgggcaccatgagctcctactccggcgaccgctcctcctcctcctccttgcgccccaccaacacctccttcgactcctacaagttcgacttcggcatcaactcctcccgctcctccggctctcgccccctccgcgaccagcggccgggcgcggctaccaaccctccaacgaggcccgccaccggcgccacgtggatgcaccagcccgccagcgccaagccgtcgtggacccaccagccttcccccgccgcggcgtcggcgcccaccatggcggggcctggatccgggccaacctccatggtcggcgacatctttggccggagctggtcctccgccgcgccctcctctgggttcggcatccctcaggccaacaaccccggcctcttcagcgatctcctcggctccgcgctcggctcctcccgctcccagtccaacgcgccgctcagatccgccgccgcgccacaggcatccaggccagccggtgagaagcccaatgtcaacgctagcagctctcccttctcgatgggcggcatggcgggcgcgctcccgaaaactacgggagcaccgatgggctccggtggatacggcgttggtggccggccgatgaaacccgtgggcatggccgcgacggctgctgcgcagccgatggggcagcagagggatccatttggctcaatagacccctttgccgcaaagcctgggtccatgaacgcggtgaagcaagccaattcggtcaagccggatcagggatttggagctttccagggtgtgaattccagtgtcgctgctggatttgggagcttccagagtactgatgctggatctggtggtttccaaagcgctggcacgaccacaccttctaactttacaccaccgccagcaccagcttcaatgcctactcctgtggctgcagcagttaactcaagcatggatcctctggataatctttttgcttcaaccacaagtgcaccgactgcagctgccgctagtaatggtgacagtggcggtgacatgtttggtgagatggatggttgggtcgatgtggaggcagagtttgctggtggtgatagtggtggcacaaccacagagctggatggcctgccaccgccaccatccggattgacaatatcagctgccaaggccaaagggatggatagctacaagggagggcagtatgctgatgctatcaagtggttgtcatgggctgttgttctaattgagaaatcagggaaagatgctgacattgttgaggtgttgtcttcaagagcttcttcatataaggaggttggtgagtacaagaaggccatcactgactgctcgaaggtgctggatcaagataaggataatgtctcagtgctagtgcagcgtgctctcctttatgaaagcacagagaaatataggcttggtgccgaggacctgcgtttggttctgaagattgatcctacaaataggcttgccaggagtacaattcaccgcctgaacaagttggctgactagggatgtctttctagcgccctgatgtaatattgtactaccactgtactgcatccttctcacatgagatctgtgagttatttgaactctttagtctttattactatacttgtggctttgggggaatagtttgcaattgtgttgttataaagtatgaaatacgaatttacatacaatatattttttatttgtataatctacatcatgtatcaaattatcttgaaagctattactctacaacatgtattctgtaccaaaaaaaaccccccccccccgc

SEQ ID NO: 169550 - DNA, 651 bp, Zea mays
  Clone ID: MRT4577_86213C.1
aatttcttttttttttttttttttttttttttttttttttttttttttttttttttttttttttttttttttttggggaaaaaaaagaacaaaaaacttttttgcccatttttttaacaaaaaaaaaactaaacttgttcaaggggggggcaaaaatttcccccataagggcaacagctgtttcccccccaaaaagttaaacaaaaacttgggaggggggagccctattccaaaaatttaaacccccaacgttgtccgggacaaacaaaaaaccctaaaaccccttttaaaggcccggaaaacccccaaaaagggggcaaaaaaaagcagggttttttaaggcggccaatttttaaggggggtccggaacaaattggtttttattccaatcttgttcccaaaaatcccaaccccggccctgtttataacacggaaaactttcagccccaccatttggtccttaaaagggactggaaccaaacccatgcttttgtaattggaacctaaggaaagggcaaccccccggtctggggcaaaaaaaggccggggtttttggcgaaagtaccccaaaaattccctaaaaccaagggttttaacccgagggcctttctcgcttttggggggtataacaaacccaaaccccccgattcc

SEQ ID NO: 169551 - DNA, 561 bp, Zea mays
  Clone ID: MRT4577_86214C.1
ccgtccgaaaaaaaaaaaaaaaaaaaaaaaaaaaaaaaaaaaaaaaaaaaaaaaaaaaaaaaaaaaaaaaaaaaaaaaaaaaaaaaaaaaaaaaaaaaaaaaaaaaaaaaaaaaaaaaaaaaaaaaaaaaaaaaaaaaaaaaaaaaaagggggggcccgttttttggggtcccaattttcctcccccggcctggcaaaaccttgttttttttttggtgaccccaattttaattcatcggcccttcttttaccaccgtagtactgggaaaacccttgcctttccccatttaaatcgcttggaaaaacttccctttttccccggtgggctttatagaaaaaggccccccccggttcccctttccaaaaatttccacaccttaattggaaatgggaccccccttttttccggtcctttaaccggggggggttggttttttccccccagggacccctttccttttccaggccccttagggcccctccttttagttttttcccttttttttttcccaattttcgccgtttttccccttaagttttaaaatgggggcctccttttgg

SEQ ID NO: 169552 - DNA, 1138 bp, Zea mays
  Clone ID: MRT4577_86215C.1
ctcctacgcgcacgcaccgcagtacagcaccgcgcccggcaggccgcactccgctccacgctctcgccccgcacaatgcgccgcctcagccgcgccgtggcgctcctgctgctgctccttcccctcgccctcgcggccacaaccacgatggctgcggccgtcgtggcgaaagctcccgcggcggcggcggcgcctccgaacgtgacggcggagatggccaagggcgggtgcaaggcgttcgcggacctgctcgcggcgtcccccgacgcgtcgtccacgtaccagtcggccgtggagggcggcatgacggcgttctgcccctccgacgacgccgtgagggccttcctgcccaagtacaggaacctcagcgcggacgggaaggcggagctgctgctgttccacgccgtgccggtgcactactcgctggggagcctcaagtccaacaacgggcccatgaacacgctggccaccgacggcgccgccaggagcttcaacttcacggtgcagagccagggcgacgccgtcacgatcaggacggccgccgccgccgccgcccgcgcgggtcgagtccacggcgctggacaaggaccccctcgccatctacgtcatcgacgccgtggtgcagcccgtggagctcttcaagcccgcgccgtcgccgtcgccgacgcccgcgcccgcgcctgccgcggatgcgcccaaggctggcaacggcaaggccgccgcgcgccagcgccacccggcgcccgccgtggccgacgcgcccggccccgccgcggaagacgacgctgctcctgtggaccagaaggacgtcaagaagagcgcggccgatggcgcgccgtgctcccggtggtggctcgccgccgcgctggccgcggcctcggcattggtttagcgatccatggacggaagtgctttgtttttttttgtctttttttttgtttctcaggtgttgatccattggcgtgtgatcgtggttgtggtggcgtgcttcgaggtttgtgtttttttttctcggtcgaaagaaaatagtgtatgcgtgcttacgtattcgtgagtgagggttaggctcagtgcgagtttatgaggaggtgtttgtatttttggttctgacggacgagtgaaatctgggccctggctg

SEQ ID NO: 169553 - DNA, 387 bp, Zea mays
  Clone ID: MRT4577_86216C.1
acggcacggctgacgggcctttccgttccgccgctcgcattctcccaaccctcaccaacggctaaatgcttggaggtatatcgtcgaacacctgacttgcgttgcgtgacagcgcaccccgagaccccgataagatgtggcggctctctccggccgcggcgctactccgacgctcgctcgccgccaccgcgcgcctctccgttccggtactgcccttctctgctttacccattttttgtgatttcagcaaaagaaattccgccgcggtgcttggttagcgcggacttatcacgacttcgagaatcaagtacatgctcacttgaatccaagcacttgctagattactagaacgtgcgctggacgcctagattactagcgtcgaggagg

SEQ ID NO: 169554 - DNA, 752 bp, Zea mays
  unsure (1)..(752): unsure at all n locations
  Clone ID: MRT4577_86217C.1
ccggccgggaagcacatacctgacctttcaagtctcaaaacgctccttcacaatggcttctccttcagaccgtcgacccatcgttatctcgggacctagcggtgtcggaaagggtacgctgatcaacatgctcttcacccgacaccccgatcagttcactctctccgtgtcgcatactacccgtaaccctcgtgagggcgagagcgacggtgtccactaccacttcgtcaccaaggatgctttccgggacttgatcgccaaggacggcttcgtcgagcacgcccaatttggtagcaacctttacggaacgagtaaggcaaccatcgaggagcaaacagccaagggcaaggtcgtcgtcctcgacatcgaaatggagggcgtcaagcaagtcaaggcctccaccatcgacgcccgctacgtcttcgtctccccccctgacaccgaggagctcgagaagagactccgaggccgtggcaccgagaccgaggagagcatccagcagcgtcttacccgtgcgcaggacgagcttgcctgggcgcgatcagccgagtttgacaagattctcgtcaacgatgatttggagaagacgtaccaggagttggacgcttttgtatacactgagaagagcgattaaagttggagacaactgatgggaggtatcttcattcagaggagtttggcaaaagtaaaattataaacgaagcatgatagacctggcatgatncatgactatatcccctatataatgttcc

SEQ ID NO: 169555 - DNA, 183 bp, Zea mays
  Clone ID: MRT4577_86218C.1
ctcctatggcgttcgaaaagaatcaatccaacccgatgcgggagatcaatgagcagaagctggtccttaacatatccgtaggggagagcggctaccgttttacccgctccgccaaggtgctggaacagctcatcggtcagacccccgtcttttacaaggcgaggaacacggtgcgctctttcg

SEQ ID NO: 169556 - DNA, 374 bp, Zea mays
  Clone ID: MRT4577_86219C.1
ctttgatcaaatacagttcccggtatccaatccatggagttctagtgtacagatttttgttttcataacattaaacccatactttttcatattttcagttagcacatacatttcatttcatccaagacatgctgaaaactgaatgtgactcatacaaccagctacgcatcctgttcaaatctaaaaacttattcagtttggatcacatcatatttccagattttcagcttataagctgaaatttgacgcccagcttccagattctagattttcatttttcaagtttttatttaaacagttttgatcacattcatgtttcaactatcgatttgcatataatatgcacgtagctttcatattgacatatattatat

SEQ ID NO: 169557 - DNA, 343 bp, Zea mays
  Clone ID: MRT4577_8621C.1
agctagcgcaaccttacatgaataattacggggaatcacatcggcgagggggggagagaaagaatagagccatttcgaccacgcctcgcgttcaccatctaccaacctctctatcgctgggggatcgctcaagatcaccaagttctgctaatggtacatgtggtcaacatatccaggaatttggcgggggagacgaattgcttgccagggattggcctaatcctcaccgcgaatcctcgaccggcactacaacgtccaccggtctcatcatcgtcttctcgagtggccagaccctactaaattactcggcgcatcatacgcatagatcgcgcccattcaattc

SEQ ID NO: 169558 - DNA, 474 bp, Zea mays
  unsure (1)..(474): unsure at all n locations
  Clone ID: MRT4577_86220C.1
gncactccaatgnagctaacgtgtctaaggctccttcgtagccggcctaagtggtttggcaaatagacaacatttgatgttgatagcttgcaattgcgttgcagcaacacatgacaagtgtgacattgtccttttcatcttttactttttcatggggccaattacacctgtgtttttttaaaaaaaaaagctcgagcctgcaatcctgaaagtacttatctgttgcagccccatttgtcaagcttaagccgaatgcaattagatatcgcgtagttttgtcactatcaataggaatcgagacggtgacgttttctcacaccgttcaggcacatggtcaaaaatggaactacgaaagaagcatatctcatcatcgcatcgatccacctccgtttggatttttgcgggacgggatcccatccttttttatcatccacttaatctaatggtgataactggttaaatgattaattatgg

SEQ ID NO: 169559 - DNA, 555 bp, Zea mays
  Clone ID: MRT4577_86221C.1
ggccgcttttttttttttttttttattggctttttattttttttttttttttttcttttttttttttttttttttttttttttttttttttttttttttttttttttttttttttttgaaaaagggccttttttttttggggggggccccaaaccttagacaaaaaacttttttttgggcctttaccccataagaaatttaaaggggggccccccccatggggggttgtggggaaaaccctgctgggtttgccaaaacaagggggttgaagggccccaattgttgcagttgtaagggggggcccgcgttaggccccccgggctggtaaaacggcacccccggggggggtttcaagaagggggcggggctcccccccccttgctggctgaaggggaaaagttggtgctgctgtaaaaaagcgggggggttcaatgccccccgttggttgaagggaaaaaattgctggggggaggcaccaggaacctggctgaaggggaattgttgttgttccaaataaaaagccaggttcaatgcccctaggtggttgaatggaaa

SEQ ID NO: 169560 - DNA, 1495 bp, Zea mays
  Clone ID: MRT4577_86222C.1
cgttgctgtcggcaatttctattatatgcagaggaactggtgatgttgaattatttgaagcccttctgcaagattttgttgagtgtgctgggtttcttgactacttcaaagctgtatggcttccaagacttggggcatggataactgtcttaaaggccacggcattggctagtgcacaggtagcttcagcaatagagagttaccatcacctgctaaaacttcggctgctgaatgaggcagatgaaagtgtctactggcgtgctgattggttggtcgataagttgggtacaaaggtccattcttactactggctggatgaattctcaggaaagaacagtttttcgcgttactggaggagtgagtggagtagtggcccaaacccatggtgccagggaatgcagattccagattccgatgtcgtcattgaaggcaattatgccagtgtggtcagccagaagaacaaggagaagtcccatgtcgtactgaatccaggttctgagtttgcgttgtgcgattgtagctggtcaatgaaggggaacctttgcaaacatgtaataaagtcggcaaaggtctgccgtgacaggggattggcactgccatcgttggccatgttccactattaccaggcattggcaaatcttgttcattgtccacccagtgatactttgattagtgaccatgcaatggctctggcagtttctgttaaaacacagctagatgcagtgttgtgcgctgttaatggaagttcttcaattaggccaggtttccaggatccacagtcaacgagtaagacaagagaagctgaaattgaggaagccaactctgagaatggtgtgtgcacaagtcaacctcagcctggtgctggtgatgatgaggatcaggccattcggactggcaagagaagaaagtcagggaacgcttctggtgacactgaagatggttccatatatcaggacagtctggctcgcaagaaatgcaagtcaggggaagcttccggtgacgatgaagaggcctccacagaagagggcagtcgggcttgtgaaagtaggaagccaggagaagcttctactaacaatgaagaggtttccataggccagggcagtagagatcatgagaaaagaaagtcgggagaacctcctggcaatgaaggaacttcagcaacgcaagctacggaaccttctgagactgaaaccagccaagcaaccaatggactggttaggtccctcctcccctcttcggaatgcacctagaacgccttgcgggtcttgtaaattcctagttggattagtcaactgttgaattaaccagcagctgagcttaaaaaaactagtagctgcgtctgttaagtgtggatggaagcataaatcagttcatttatcattatgaattatgaatggggggatcgtgtgcattatgcaggacaacaattgcaagtcccagtttaactgtttggcacgatgttccaaaaaaaaaaaaaaaaaagggccccagggcc

SEQ ID NO: 169561 - DNA, 133 bp, Zea mays
  unsure (1)..(133): unsure at all n locations
  Clone ID: MRT4577_86223C.1
cgggtcgaccctagcgnccggcgcacttttcaaagcgacaaagggcaaaggtgggctnctaaacgcaacnggcnnnacnnngagggccanggccganccggcggaggagaacgnngncncgccgccaccgacc

SEQ ID NO: 169562 - DNA, 474 bp, Zea mays
  Clone ID: MRT4577_86224C.1
tcgacggtatcgataagcttatattttataagtgatttatggatatgtgatttatgttgttggttgttttacagttttgcttaatagtcctaaagtttttgagaaaatatttggggatcaattaatcatggatattatcagttctcttgaatgtaagtcctatactgcttgttcgtggatttattattggtgactattgttgattgaattaaatgtctaatttgaaaatttacttatattattggcacgatacttctttatgcaaataactttgttatattttaggattttctgagagttcttatgtttccagtttgtttgctttctcttttcaagtgcatggttttttgtgttattttttaattcaatttctaaattatgacctactatatctgtaactagagttttttttgaagttaacctccatgtagcagcaaagatggccacgatggtcacatgcagaaaggcagcagc

SEQ ID NO: 169563 - DNA, 404 bp, Zea mays
  Clone ID: MRT4577_86225C.1
gacaatcttggcagaagcacagtgccaaatcatgatccatcacacacgcacgtgtgtccacaaattgcaacgtgtatgatgagaatgaccaataatttgctatggtgggagaagagaagggtgggctagtgaatcaaaagccagaccctggtgtggccccgtgccagaaggcaacagtactgtctgtgccgactccagaggtgaatgtgcgagcgggatcttcgtacgcgtaactatccgaacacgggcacacactcttggacacctggaactcgtcaaccggctaggcccaccaccatgtgcgcaaggatcacgttcctggctgctctcttggcggcgctcgcggcaaccaccgtcggcgtgacggcgcatctgcggcatgactactacccggcggtgtgccc

SEQ ID NO: 169564 - DNA, 520 bp, Zea mays
  unsure (1)..(520): unsure at all n locations
  Clone ID: MRT4577_86226C.1
aattcggcacgaggcggtgccattgcattgccccgaaggccaaggcacccgcgccgcggtcgctactcgctgctcgccatacccggctccgtccgttccaagttctcgtcgctttgatcggctgggtcacccgccggccgccgcctcggcgcctcctcagcctgcgccctgcagccaccgccgccgcgccgcacgcccgcgcctcacaaaacttcccgtgcctccccgccggtgccgcaacccctctcgcggccacgagcacgggcatcatctccgcgccacgatcccatcggaaccagacacgcccggccgcgagccgcaccctgcccaccaaaccccgatggactcggcggcgtcggcggctctgaagccctcggcgctggacctgctagcggcactgctgacggngcgggaccccgaaggcggtgcgcactgggcgtgcgcgctcggcgagaatcgacacctgttcctgctgctgaccacctgcgtcggcgtgctaggcggctgcgggggtgccctg

SEQ ID NO: 169565 - DNA, 252 bp, Zea mays
  Clone ID: MRT4577_86227C.1
atcgagttgcggatgtgaggtagcatggccatggacctgctagcaatgccagtgctcctgtccgccgactcagcagccgccgtcttggtgctcctttccgtggccacagttgttgccctgaagcacttgctctcgtcatggcgacgatctcctcggcggcggcttcccccgagcccgacgcccctcccggtgatcggtcacctccacctgctgcggccaccggtgcaccgcactttccacgagctcgcaaca

SEQ ID NO: 169566 - DNA, 362 bp, Zea mays
  Clone ID: MRT4577_86228C.1
tacggttgcgatgacgactgacgggggcgttttttctggttgataccacgattgatgtgtgcgtgtatgagactaatccgtctgtggcgactgcggctccgtgtccgacggcgagtcagtggtaccagtggatggtagagtctcatgtgtttcatatttaccaactcttcgccaccattgcttgtaacgtgctataatgttatgttgtagcttcaacgcgataattacgtctactaagatctccgacatcttaattccgcattttccggttaggacgctaagcactagtgaattcatttcagctgatcttaaaaataaataactagcataccccaatgccgaaaggcttttttcttttcaaa

SEQ ID NO: 169567 - DNA, 347 bp, Zea mays
  Clone ID: MRT4577_86229C.1
tgtttgaggataagaagataggtgatgagttcttttcctttattgttgactataaagatctgaaggcatgtactattctattgaggggagcaagttgaaaattggtgcccactaatagtctggtgagtgtcttaattatatcaatgtcttctaggtgcccactgatgtatcatgaatgtcattatagcaatcttggctatagttaactttgatctttgcacacatagtatttccatcaacaaactggtaagtgtttgggtgtagtctctatatggtgtgcatatgctttgcacagactctgactgatatttgtctggctgttttttgatcaaatcattagggactat

SEQ ID NO: 169568 - DNA, 413 bp, Zea mays
  Clone ID: MRT4577_8622C.1
gggccaaaaaagttttcatttttttaatttaaaaacccgggcccgattaaaagccccccaagacgaaaaccgggggcccgcaaagcaaacccaagggccttggggggctgctctgctagcgtagtacgggctacagcatgtcccgtccgagggccccgacgaccaccaccacaaacggggggacccttgaccaagggatcccttgggggggcatgaactacttttttattatgggccaccctgatgacccacacgttgcttggacatttttgttacaacaacaactggttgctgtttatggccaccctgccatccaaacgagctacctccactttgggtccatcgatcaattgatcttggggcaatccacgggggggcttatgggcccccccacggaaaccccccacttgccg

SEQ ID NO: 169569 - DNA, 560 bp, Zea mays
  Clone ID: MRT4577_86230C.1
tgccattatactcatctgttcttctcatcaggctttagtgaatgggatggccagccagctgagattgcagggtgcttctgtcccggaagtggctttgtctcttgcgtgctggaatccagtgtcgcttcaacgtcgtgtgtccgagttggaggcaacaaatgctggttggtgctcttttccttcttcttctttgcctctgttcgtggattgttttaccttctgaccttatttcatttgattaccccttgataggaatgactcggcagatcgcagttcttgaagaaaaacattcccaagatcaagctgaaatggctcgacgatgcgctgacttcgaggagaagtattctcaaagtcagatcgagttgagttaggtctctgcggctttggatgatgccaacgctttttcttctcttcatgctcagcttgactctgagaaggtagcttacgaacccgtgcttcgccttatcatgctcttggattctgaatgagttgatttttgcttgtaggaagaaagacgcatccttgctgcttctcgcgacaacttggacagattgtactcg

SEQ ID NO: 169570 - DNA, 144 bp, Zea mays
  Clone ID: MRT4577_86231C.1
ctggaggagcgtccgtgtaactgccgtcgtcgcgacagataccgcacagatcgactacagctcaaacgtctcagagttcccgatggaggcctacgacctgcttagaaacgacacgtacaacgggacccatgttcccggaggcca

SEQ ID NO: 169571 - DNA, 344 bp, Zea mays
  Clone ID: MRT4577_86232C.1
gccggccggttccggcttcttctttttttgttcgtaatacattatcatggctcacgctaacgtttggaactctcaccccaagaccttcggcaagggatctcgtcaatgtcgtgtctgtgcccaccgtgctggtttgattcgcaagtacaacttgaacatctgccgtcaatgtttccgtgaatacgccagcgatattggtttcaacaagtaccgctaaacatttttgtttctgttatttgatgcgcataacatcacttttgtattaaaagacatggggcgtaaacaaaaaaaaaactttaataaagacaaaaatttagcaaaaaaaaaaaaaaaaaaggccccta

SEQ ID NO: 169572 - DNA, 365 bp, Zea mays
  Clone ID: MRT4577_86233C.1
atttttatgctgtctctcgccgatagcagcagcagcggcaatggtcgccctcgccgccgcatccaccgccttcgccgccaagtcgcgcctggcgcgcgcgccgtcgtccccggccgcgcggttctccgtgtcgtgctccgcgtcgggcaacaacggcggcgccggcgagatggcgcagtcgctggcggcgtaggccaagacgttctccgtggcgctggcgctgccctcggtgctgctctcctcggtggtgacgtcgccgtcccccgctgtctgccacattgccgggctgacgccgtgtatggagtccaaggcgttcgcgacagcggagaagcaatccatcacgaagctccacccgtcgctcaaga

SEQ ID NO: 169573 - DNA, 599 bp, Zea mays
  unsure (1)..(599): unsure at all n locations
  Clone ID: MRT4577_86234C.1
actcctctcccgcccgcacgagagcagcagcaggagcggcggcctactcaccggcgcggacgccggacggaaaatcgatcccggcgcggtctgtctggactgatggcagaagagaagaaaccacacccgcagccaccaccgtcatggtcagccctccggctggacctagcaggattggtgctcagcctgctccccgtgtacgccgactgcgcttgctttgccgcggtgtgcccgcagtggcgtgccgccgcgaggcagctccagctgccaccgctgccgctgctggcactccccgacggcaccttctacagcctcatgtacgacaagcccttccacttccctggttgtggcttctcagggtacgagaatgtgtgtggcagctggctcatcttctcacgcgatgacggttgcttcatggtcaaccccttctccagggccaccgtgacgctccctgctctctcaagtgtacgactccggcctccgaatgcgtctgctanatctaaatgggcagagggcggaagcgtagaatctgctaacctctacatcacatggatgcgtatcaatgaagcagacaacctgcgcataagtaagctaatcct

SEQ ID NO: 169574 - DNA, 830 bp, Zea mays
  Clone ID: MRT4577_86235C.1
actcctatgggcgattgggtccctcgaggccggccgggatctgcatccctctgcgacaccggttgccatatggaggaagatgttggccaccggcgatgaaatccaccaaccggcgatggagtagttgtggttggtgacctgggtgcttcacagaaccttggagggtgcttcccaaaaccttggaggtcacaaccgtggtgtcacctaggcagattatgctccaaccgcctagtaattgctcaccggagcaaggaaccgccatctggtcacaagaactcgtgggcagggccactacgaccaccatgtctggtcgggttgccggatcacctaacatcggtgtgcatccaccgtggtagctcggcggcgccacccgggactgtcgtggtagaaggggaagaacgccagttgttgatcccggagggaacggtggagatcgaatcttctgggcacggctccgggaggggcgctgtaccattgatcaaagcgtatggcccagatttgagctagtggatccattcagatcggctgttgtgggctgtccgatctgatcggagggataggattaagtctcggcccatggattctagatccaaggattgcgatcgcgtaccggttcacctaaagagaagatctaatttctgccatcgattttggatccaacgactgatcttcgacgatacccttttcgtcatgtaaaaattgcatagaagaccctagaattctacataatcaagccgacgttcttatacatttacgattatcacaaacggggcctggattttataaacctaccaaaaaaaaaaaaaaaggggcggcctcgagctcagctt

SEQ ID NO: 169575 - DNA, 239 bp, Zea mays
  Clone ID: MRT4577_86236C.1
ctgaagaaatagaaaccctaaatatcgcaatcccaacagccggttgggaaaattttaaattttgggaatcgagggtcgtttcatttatgaagggttcatcaggcccgcaaatgatttgcttaaagattaacaccaaaccccccaagtagaagattttttgcagttttagctaaaagaatgctttaagatgcaacacccttgccctttttcctttggggcttcttaatgtaaaactcgag

SEQ ID NO: 169576 - DNA, 172 bp, Zea mays
  Clone ID: MRT4577_86237C.1
cacggggggcccttataaactaccacgccaaacctacttactaaaccagaaccaaggaacgtaaaggtgaccgcggcagctgaataacggccgcatgaggcgaaccacatctcacagaagatggacaagccgtgctcaaacctcaagcagccagggagttgccccccccacc

SEQ ID NO: 169577 - DNA, 410 bp, Zea mays
  Clone ID: MRT4577_86238C.1
ttcaatgtctaactagtagtaactgcatggggcaacttggcatcgagactgtgagatggttccaggtttcaggaataaatataatagaagttattgtgataaaaccgtgctcttgttttctttgttcttatggctacagatatgcatagatccgagttttagagggtcacgattctctctggtagataggggctttatatatgtgatagctcatatccgcggtggtggtgaaatgggccggaagtggtacgaggatgggaaactgttgaagaagaaaaacactttcactgatttcattgattgcgctgagcacttgataaaaagcaagtactgctctagggaaaagctttgcattaatggcagagcgcaagtggctattgatgagtgctgcctaatataggcctgcttat

SEQ ID NO: 169578 - DNA, 528 bp, Zea mays
  Clone ID: MRT4577_86239C.1
aggcctggtcacgcccgcgccagtgtgagtcgcactcgcagctggctacctgcttgccctgctcccgaattttttgtattttggtccttaaacagaagtaaaatcatgtatagaccttaaaaaataaaaaaaaaaaaaaaaaaaaaaaaaaaaaaaaaaaaaaaaaaaaaaaaaaaaaaaaaaaaaaaaccacataggccatataaattgggtataagaggcaaaaaacgcatcgaccaccatgtccggggtcaacaacaatcctgccattttgaccgattttactggggttgggcgcttcgttaagttaagttaatccgggtttttgtttgcaaggtcaaaaaaaactgaaaaaggatgtcgtgctgcgaaggaaactgcgggtgcggttccggttgaaagggcggaaacggttgcggagggggcagaaagatgaacccggacatggttgagcaggtgaccaccaccacccaggctttaataatgggtgtcgaaccatccaaggggcacgccgagggcgggttcaag

SEQ ID NO: 169579 - DNA, 362 bp, Zea mays
  Clone ID: MRT4577_86240C.1
gaacgggttattttttcactgcaggggaaaaattatttcaaataaatcaacacttttacacacactgccaagaaaaaaatttaacatcattttatcaatcaacaacaccgaacagctacataacaaaacttaatcgaaaagaggggtaaacgaccatactgtaacacaaacaaacattattctacattttgacagacacattcccgtctaggaacatgaccgggcaacataacgacaacccttcggggacttatttttctttctaaacactatagaaagacacacggatcatttacttttaccatcaaatacaacaaccaaaacaaaacaaacccatgatggatccctacatgaaacaataa

SEQ ID NO: 169580 - DNA, 1713 bp, Zea mays
  Clone ID: MRT4577_86241C.1
agcttcgggaccgggaggccgggcgaccacactatcaaaagccctagaccacatcagatcccttctcaccgtgtcgctgtctcaccaatcaccacgcacctcccgtcccacatttcgccaacgacgggagagagtggccatggcgtcatccgccgccgccgcctcctcggcttccgcgctcttccgcctcccggggtcgggccacctgcgtgcaccgccacgaagcgggtggcgagaccacaggcggtcccgtcgcgcgaccgtgcggtgctcgttcgcgccggtggagacggcccggataaaggtggtgggcgttggcggaggcggcaacaacgccgtcaaccgcatgatcggcagcggcctccagggcatcgaattttatgctataaacaccgattcccaagcccttattaattcacaagcgcaatatcctctgcaaattggagagcagttgacccgcggcttaggtaccggtggaaatccgaatttgggagagcaggctgctgaggaatcaagagaaaccatagccactgccctgagggattcagatcttgtcttcataacagctgggatgggagggggtactggatctggtgctgctccagttgttgcccagatatcaaaggaagctggttatcttactgttggtgttgtcacctatccattcagtttcgagggccgtaagcgctctgtacaggcattggaagcactagagaagctggaaaagagtgtagacacacttattgtgattccaaatgataagttattagatgttgcggatgaaaacatgcccttgcaagatgcatttctccttgcagatgatgtccttcgtcagggtgttcaaggaatatcagacatcatcacaataccgggacttgtcaatgttgattttgctgatgtaaaagctgtcatgaaaaactctggaactgccatgctcggtgttggtgtttcttccagcaaaaatcgggcccaagaagctgctgaacaggcaacacttgctcctttgattggatcatccatcgaggcagctactggcgttgtgtataatattactggtgggaaggacatcactttgcaagaagtgaacaaggtgtcccagattgtgacaagcctagctgacccatctgcgaacataattttcggtgctgtcgttgatgaccgttacactggtgagatacatgtgacaatcattgcgacaggatttccacagtccttccagaaatcccttttggcggatccaaagggagcacgtatagtggaatccaaagagaaagcagcaaccctcgcccataaagcagcagctgctgcagttcaaccggtccctgcttctgcttggtctcgaagactcttctcctgagaagctcatttggtgaaccgtgactcgtagtgcattagatttgcatttagcgtgttgagggcagtccctaaggtgatcttcggatatctggagatttatagcttgggctagtgttcggtagtggtagaataagtttcagtgtatgtatcgttgctttgctttatgtttttgaggatcaggcggtgaggctgagagaagtgctcagcaactcaacattgaactgttgtagaagatctttgattgcttttattgctgcaacatgccaacaaccctctgttggattcaacagaatgtgggtgcctatttctccaaaaaaaaaaaaaaaaaaaaagaaaaaaaaaaaaaaaaaagcggcc

SEQ ID NO: 169581 - DNA, 811 bp, Zea mays
  Clone ID: MRT4577_86242C.1
cggtgcgcatcgacgtcccgcccaccagccccggccgtgcggcgctcaaggtgtgggaggagctcgtcaacgtgctccgcaaggacggcgccgaccccgccgccgccttcgtccaccgcaagaaggtccagcacgccgagaagagcatccgcgacgccttcctcgccctctaccgcggcctcgacctcctcaacaagttcagctccctcaatgtgaaggctttcaccaaaatattgaagaaattcgtcaaggtgtcggagcagcagcggaagactgacctgttctcggagaaggtgaagaggtcgccgttcagcagctctgacaaggtgcttcagctggcagacgaggtggagtgcatcttctcgaggcacttcgcgggcaacgacaggaaggtggccatgaagtacctgaagccgcagcagcccaggaacacccacatgatcaccttcctcgtaggcctcttcacaggcacattcgtgtccctgttcatcatatactcggtcctagcccttgtcgccggcatcttctcttcgacaggaaacacagcctacatggagatcgtctaccacgtcttcagcatgtttgcactcatcagcctgcacgtcttcctgtacgggtgcaacctcctggcgtggaagagcagcaggatcagccacaacttcatattcgacttctcccccagcaccgccctgacgcaccgcgacgccttcctcgtgtcggcgtccatcatgtgcaccgtcgtcgcggcgctggtcgtcaacctcttcctcagcacgccggggcgacctacgccaacgcgttgcccggcgca

SEQ ID NO: 169582 - DNA, 304 bp, Zea mays
  Clone ID: MRT4577_86243C.1
tttttcttttttctttttttttttcacacttcatacattaatgtttttgttatttttttttacctttttaacccctaccccactatttaaaaaaaaaaacaacttattctcacactcccacagataaatcacataccatttttcttacatgatttaaaaaaaaaaaatcttctttatttaacacataccccctcctaattttatcatatcccagaaaaaataaacatttcactacttttatcaccagtaataaaaaaaaatgactcattgaaaatggtccccatacatatagaacttaaaaccc

SEQ ID NO: 169583 - DNA, 317 bp, Zea mays
  unsure (1)..(317): unsure at all n locations
  Clone ID: MRT4577_86244C.1
cccccctcaccccttgagattgnnnannnnanttnnnantnnnnnnnnnnggggggngntgattgggggnngnnaaaaaaaattaaaananggaaagattgaatatttgtgaaagaataagggtgttgttgaagggatggtttaattggggaaatgaaagtttaatgaattattagatatatataaagggaggagatataagagattttgtattggtgaaataacatttaaacatgtttgagccgtatctttgttttctttttggcgacaggtgcgtcagttgactcacaacggaggggcgcccgtccactcttggg

SEQ ID NO: 169584 - DNA, 490 bp, Zea mays
  Clone ID: MRT4577_86245C.1
acatccatgatacgacagttgagaactaagcaagcagcactacaaacaaggccaacacagtgatgggtcagactagagacaaaagttaattaagcagataacaacaacaagggcggtgaacgccgccgacatccactacgcctacggtctgaaataggactgccatgacacgctaccttctcatgcctgcgcttgatccaacctgaacaccaccgtggttatgtaccggccgtcgcgggcggacaacttgaactgctgctgctggacaactgataacatccattgggatttatttatccaacgcatccaagtgaatggatgcaaagatcgctccatgcattaacatgaaacatgctttggtctacatggatggtgaaccatgacagcaaggatacgctatcgcctgaaggaagtcatgcgagaggacatgggcaagacctaacatctttagactgttgactctgcaaggaatctacaatgatggctacag

SEQ ID NO: 169585 - DNA, 565 bp, Zea mays
  Clone ID: MRT4577_86246C.1
ccggccgggtctccgacggcttcgacggctcctacgtcgacgccggtgagaatctccgacggcatcgtgagaatctccggtgagactccagcgggtacacgaacaaggtcaccggcatcgtgtacatctccgacggctcctacgtcgacgccggtgagaatcacaggatagcgcccggcaactctccacttcagactgccgtgctgccgtgcccgtgctccactacagagtgcaaactgctgccgtgctacagtgaggtattttgggtgaatgttttgcttgttgcaatcagcggctagctgctttgtttgtgaacaggtgaggtaggtgcatggctagctgctttgcttgttgaaatcagcggctagctgttttgcttgctgaatggctgactgaatgtgcgtgctacagtgaggtaggtggatgttctggacttctggtaggtgcatattattttctggtgaatgttttgctagctgtttacatttgtgaatggtaaatgtattttgggctgctttgcttgttgcaatcagctgccaaaaaaaaaaaaaaaaaaggggcggcc

SEQ ID NO: 169586 - DNA, 321 bp, Zea mays
  Clone ID: MRT4577_86247C.1
aggggacacggtgggtaaaaagaggccctcttcaaacagccgctgaggagggggtcaccaccgggggcgtcggctgctactactcaacgtccctccgccaatagtaatccgaccaattaaaacaccaccgcctggggcgcccccccgggatttgcccggggcatcccggaggcccacctgcccctctaataggtagccttatagggggttggattaaagctggtcatagtctccgccggggaaaagttgtgggccaacaatttctccccacaaactaccagccagcataaaaaccggaaccggggggggcaaaagaggggg

SEQ ID NO: 169587 - DNA, 309 bp, Zea mays
  Clone ID: MRT4577_86248C.1
accacccgtccgccaggccatcgcgccgctttcagaattccctttaactttttgacacgatgcgaacccataagagctaggggactactataacaagctagggccataactctactttcattctctactcatcactggacaactccgcgcaggaactacacctcaccaacccgatactctccacccaggaataacgataacaccgtacactactatcttcccctttcatcgcctcaccgatcactcccacttataccagtacgacatacttacatacaactaccaattaacactctctagctcctgtga

SEQ ID NO: 169588 - DNA, 352 bp, Zea mays
  Clone ID: MRT4577_86249C.1
gagaggacaaccatataaccattagtctacatgctagagctacacccaacttgaaggagccgaaccagcactgaaggataaatggtcgcccgcaacaggtggacgctgaagaacgcatagacaacgggccatgacggcctgctccaggccggcgggaaggactacaagattctgcctcgcaaggaggcctctcacgcggtttgcagcgcacaaccgcataagggctaccgagctattgctaacgataaaaagcgaagcctagcctcagacgagcccggcaacaacatgaatgatcccctgaacttacgccaagcaggcaaaaacgagggcggaaacactctcattgatggag

SEQ ID NO: 169589 - DNA, 1165 bp, Zea mays
  Clone ID: MRT4577_8624C.1
gccggccgtttcgaaatccaaactgtctcttcacgtccttccgggtcctatcgctcctctccgtcgccggtggagctcatggcatcctccatggccgccgccgcctccgcctccgcctccgcctcctcgcctcgggccaccaaggctgtggtggcagcgttggctgatcctctcaaggtcatgatatcaggagctccggcgtccggcaagggcacacagtgcgagctcatcaagaccaaatatcaactggcgcacatctccgccggagatttgttgcgggcggagatcgctgctggctctgagaatgggaagcgggccaaggaattcatggagaagggccagctcgtgcctgatgagattgtcgttaatatggtgaaggaacgccttcggcaaccagacgctcaagaaaatggttggcttttggacgggtacccaagaagctattcacaggccatggccttggaaactcttgaaatccggcctgatactttcattctgttagatgttccagatgaactccttgttgaaagggtggttggaaggcggcttgatcctgtaacagggaaaatatatcatttgaagtattctccgccagagaatgaagaaatcgcttcaaggcttacgcaaagatttgacgatacagaagaaaaggttaagttgaggctggagacttattaccaaaatatcgagtccttgctatcaacatatgagaacattattgtcaaagtgcaaggagatgccacagtcgatgctgtctttgctaagatcgacgagctgctgggttctatcctggagaagaaaaatgaaatggtgtccagcacatgagcaaggtaaaaatgattgggtgcagtgcagatccgacaagttcatgtaatgcaagtcacctctcatgataggaacttctccaggggaatatatctgaaacacaggacgacacgtacaagtaatgtaagccagtctcacatgatggaaacttctccatgtggatgtggtcaaagcataggaatttttttcctccaattgttaactgtacgcgaatggaagcaacagatcattcgtaggttgtgagggcttcagagatcatctgctgctgtacatgttttgttgctgtcttgtgaacatacatgtcttgttgtttcgcaaaaaaaaaaaaaaaaaagcggcc

SEQ ID NO: 169590 - DNA, 343 bp, Zea mays
  Clone ID: MRT4577_86250C.1
gtcagcagcagctatgcgtggaggtggtgcggtctgctgctggtgaccagcagaccagcggcctcccccggcggcgtgtgcagtcgcctgcttcctcggcgacgtcctcgctggcttggccgcacccgccttccgcttcttctccacgaccagctggtgctgctgctccgcggcgatgcggtcgaactcgtcgctgagcttcctcgcgcgcctcttcttggctgatggcagcgaggggctcgtccaccccccatactaggtgatcttatactgtttacaataatgtcctgtccttatgtcacccggttctccgttctttttcattgccttccctacgttaaag

SEQ ID NO: 169591 - DNA, 380 bp, Zea mays
  Clone ID: MRT4577_86251C.1
ctggaagctcactctgatatctatctgacttgatgagcaagatccatacaaatgggctcgaacgataggagctgtatgacatgctcgcctattaagaacgctaggactggacattgtaacttgttcagaccatgatgtgcataatgtcgagcggttctacaaatagatttagactaatgtgggggatatcgaacatttcagacctagtgtagcaattacacgagataaagagattcatgttaccggaagctcgttttaaggatgaaggcatgtttgatgattgaaagaagatgagtctgtgacagctcaatagagaacatgcacttgtactggtatgacagatagctggggacaatactaaacaaagctaacttttttgc

SEQ ID NO: 169592 - DNA, 145 bp, Zea mays
  Clone ID: MRT4577_86252C.1
caggaacaccccagctgcccaggacccagggctctggaagctagcatagttgtcctcctgcccagtgcgtctctgtggaagggagccccaggtcctcaagggctagtggggaccaccaggcaagatgggctcctgggtgagccag

SEQ ID NO: 169593 - DNA, 262 bp, Zea mays
  Clone ID: MRT4577_86253C.1
cccacgcgtccgaaaagttagatctatgttgatccaaacagtccgatgcgttgtcttgtgcagtgcttctaatcaatctctttcaatagcagctcccgaagacccgaactgagttccttcaccgacccataccgtagggcgcacgcacctcactgcccctttagcagcgtacggttcgggatttgagatgctggcgctgctcgcggacggcaggatggcgctgacaatggcgccagaggctatcgtgtcactgggcagtgct

SEQ ID NO: 169594 - DNA, 314 bp, Zea mays
  Clone ID: MRT4577_86254C.1
gcggttaaccaaacaggcattcccaatcatattcgcacgaccttaaatttatataacaccttgatattttatctttacccggggcctatttgaacaccccgacatccacacacacaaaaaaaaaccttgatttatttgcagcttgcaatggtcagtactcatggaagggaaatatggacattattttttttggggggttttcctttggggtaactacggagaaaagggacacccatttcaaaaagaagcagcggctgtacccaaggctggttatgaacattttgcccgggagggtttttgttccaacacttttt

SEQ ID NO: 169595 - DNA, 246 bp, Zea mays
  Clone ID: MRT4577_86255C.1
tcttctatactctacccacacctcacttcttctttttttgatttcgcgccaacattggtgattgtgttcttttcaggtgcgatgtgacctaaaaccatgtctaaaaacaagatccacatcaacattttcgttattatccacattctctctgccaagttgaccatcacaagacaccttatctacaacctcgcaggcattgacacgtttattatcacacactatatgaactacactcttaaaatcaac

SEQ ID NO: 169596 - DNA, 364 bp, Zea mays
  unsure (1)..(364): unsure at all n locations
  Clone ID: MRT4577_86256C.1
tcagttnnngcgagtttagtggggtgggggagtgctgaaatgaaaaaattacacaggtgttaggtcgtggcaacccattgtcatccaatcaggctgtatatgttcgatgcggtatccggttgcagaccgtaagaattatattttctatttgtcttttgatttggttttcctctggggtaagaggggggaaaaaaaaaaaaaaaaaaaaaaaaaaaaaaaaaagaaaaaaaaaaaaaaaaaaaaaaaaaaaaaaaaaaaaaaaaaaaaaaaaaaaaaaaaaaaaaaaaaaaaaaaaaaaaaaaaaaaaaaaactagaaagaaaaaaaaaaaaaaaaaaaaaaaaaaaaaaaaggggggggggnct

SEQ ID NO: 169597 - DNA, 360 bp, Zea mays
  unsure (1)..(360): unsure at all n locations
  Clone ID: MRT4577_86257C.1
gaaaanatggagaggggagaaaananggngtgggttttgggaggggtggtnataagagagaatttgggtttgttnagtttgtggaaagatnaagtgnattgaagggagttaatttttttttataatatgaantngatggggagggagtggaattgtttatggggaagnnattggnagataggaaagttgattattnananaggggtggaggaggnnntaattatngnnttnntgnttatggtggtggtggttgnntgggagatnnatatggtgnttatggtgggggtggtnntgtttaggtnngtnattgttatatggnngagganttgtggggggtggaatgaggatggtgnngatggt

SEQ ID NO: 169598 - DNA, 428 bp, Zea mays
  Clone ID: MRT4577_86258C.1
cccgggcttcaaaccgtagtttcacatcgtcattacacagcttctgacaagagcttgttagtcgagcttaaagaatgctgagtgaaagcctaatctcgacgccaataataaagatgacgaattactgatacccagagaatctgagccgccttcatgcaggccacattcatatagaccacctgttctgatgataccatctgcttggggcgggtgctttattttttactggtaccacattacaaaagcaaatatctcttgtcaacgggaactgcttgatgctattacgcgcaattaggcaaaacacatatgacatatgccccttcgtgagatgctactaacactgctacgggatgtcaaatagaccagaatggagagagctgttttttcgtgttctcaggtttgtcatggaaagtggtcaaggggctcgg

SEQ ID NO: 169599 - DNA, 576 bp, Zea mays
  Clone ID: MRT4577_86259C.1
ggccgcttttttttttttttttttgtttttttttttttttttttaggacagactcttaacacattctcaagcgacaccggagaatgggaagggcacacaaaataattcatatagagattatagctctgctagaagactcaaagtcaggccacaggatacacctcaaacacaaaccttggaaggggggcttgcgctcacatggagatgaaacgagagctgttttgccccacacgtgaggggtaaaacgcgctggcctgagccccgtggaggatgacaccttcatacttgacctgtaaccactttatggagacctccttgggcaccctgtgctgaataccaacacgggacttgtgcctcctgcggcgcgcgacgcgggagccacaacgctctagcacgacgtataaaaccataccatagatgcctgtggatggatcatactcgataccaagggcgatgtgctcctggatgcccaaccccacaaagccgcggtggctgaagagtctcctgagcagatcgtactctttgaccttgaggccgctctcaaacacatgcatgggcccgtgtcccctgtccgtg

SEQ ID NO: 169600 - DNA, 562 bp, Zea mays
  unsure (1)..(562): unsure at all n locations
  Clone ID: MRT4577_8625C.1
gcttaccattttatttcaaacttcattatgtgaatagtgtggatgcgtaagggatgagacagtgcaaaacagcgtttttaagtnaaagaaaaaaaaaaaaaaaaaaaaaaaaaaaaaaaaaaaaaaaaaaaaaaaaaaaaaaaaaaaaaaaaaaaaaaaaaaaaaaaaaaaaatataaaaaaaaaaaaaaaaaaaaaaaaaaggggggggggggggggcccttttaaaaaatcaaattttacttacccttccttccaaattaaaaatttttttttatttccaccaaaataaaataaattgccccccttttaaaaacttctaatttggaaaaaccttgggtttcccaaattaaatccctttgaaaaaaatccctttttccccgggtgggttaataccaaaagggcccccccctttcccctttccaaaaatttgccccccctaattggcaaagggaaccccccttttacgggccttttaacccggggggggggggggtttccccccttgttgccctttaaatttgccagcccctaaacccccgtttttttcctttttttccttt

SEQ ID NO: 169601 - DNA, 531 bp, Zea mays
  Clone ID: MRT4577_86260C.1
ggggtgttttttttttttttttttttttttttttgtttttttttttttttttttttttttttttttttttttttttttttttttttttttttttttttttttttttttttggggggggggaaaaaaggggttaaaaaaaaaatttaggggggggggggggggtttcaaaggggggggggaacaaaaaaaaggaaagggtttaagaaaaaaaaagggaccaatcctttggggggggtaagggaaaaggattggtggaaaaactttttacgcaaacccccttgggggaaacttggataaacagaaacaaaaggaaagggcccaaattttattgggggctacgggggaaatttagcacggaaacaaggttgaaatggtgtagtaagaggcaccacgtggggccccaccaagagggggaaaccaaggggaaacgcgccctaaaaaattaagaaccccggagttttttgggcacggggggaaaaactttggttccgacgtaaaggggggggaatagggaaaaatgggtttttttaa

SEQ ID NO: 169602 - DNA, 658 bp, Zea mays
  Clone ID: MRT4577_86261C.1
tcacagacccgcagtccgctacgcgctactccgcttccgctcgtcgtcactgcctcggcgtccaggtccagcgcggcactgcggcagccggcagcgctcctgcggtcctgccgtctgccgacctgccatcggcgcacagcacaggcatcaggcaattccagccgcacagcgccgcgccgccgcagcgcgctccggcgctccgcgctgcaggcctgcagcagctcggtcctcggtggcttggctcggcgctcgcctgcgggctggccggctgggcgctgctctgcgcctctgcacatctgctgggcgctgctcagcctgctctggcctctgggtgctccactgctccgctgctcgctccacagaatatggcctaaaaaagagaatcgggaggatcagctcctcacgaggatcaggatctgaagctaaagttcctgctgctcccgcgttgccacacgggcccttgtgactcgtatatgcggcaccctatctatggcctgaggtgtcttattagctgagctgcaaagaaagtacaagcgattgattccatctcgtcagagactatgggatagagcaatattaaagcatggccatgcaccatttagaacttatatggatctctgtgagattcctgtgttcaaggatgtaataagatatgctc

SEQ ID NO: 169603 - DNA, 270 bp, Zea mays
  Clone ID: MRT4577_86262C.1
cctgttggccgacgccagccccttccccagccgctcccttctctctccccctcagctcgcctcccctctgctcgctcgcgcatagctcggagcttcctcgatgcgctcctctgtcgcgcccgctgcttgctcctctgctgcgctcccatctcccatggccactgcgccctggctcctgctcggccggagctctctggctcgccgcggtgtccgtctccctacgcgcgcgaccgggttcctgctccctgttcccctcgcgtccccctggtg

SEQ ID NO: 169604 - DNA, 322 bp, Zea mays
  Clone ID: MRT4577_86263C.1
cggcctgttttggaaaagggaagggcttttaacctgtttttgctgttttattttctcctccttggtcggtacatatttaaaatggtaacaatttttggggagggaatggaaaaccattcccatttttttaaacagtattataaaaggccggacctgttttttaattccagcctttatttaaacaatgtttggagtttgttaactttggaggaaattaaaaataggggttgcgatggtatttgtgtgtttgcaatttgaaatggttgttgcctgaaataattatttttggtccactggttctatgatccttaatttgtcctgc

SEQ ID NO: 169605 - DNA, 1421 bp, Zea mays
  unsure (1)..(1421): unsure at all n locations
  Clone ID: MRT4577_86265C.1
cctcgaggccggccgggatcgcgcatcgccctgtcttcctccgtgatcacccgaccattccatccgcccgggcgcccacaccccagtcccaaacccatgcaccgtcgtacactccccacctatcccaccgtcgcgcccgccaccgagagccatcgacgacgaccatcgaggtctgcgtccccatgtttgcgggcaggcagagatctggatctgctctcctctgcttcgccgctcagcggtctcgtcgtggcgaaagaacagcggcgcgcacccagggccgcagcccgtcaccttcctccccccgcacccgccgtgacagccgcctccccacgcccgcttacccgactggccgcacaagatgcccacagtggcccccatcgcgcccacccgctccccccatccaccgcgacctcagccgccacgccgacgccatccccgtcctctagcgcgttgtcgccgtcgtcacaccgccaaaggtgcctgccccctgctaccgaggtcgacgaccagcagcggcaagctgccgagctcgacgacacgcacgccatgcttggccacatggacgagtccatcgcctgctacgagaaggggctccagatccagatgtccgcgctcgatgagcgcaatccctgcctccctgagacctgcaggtaggtgacaatgtcatcaagggcccctccccctttgtcgcttctcgatctagatctcgcctctccctaaagcacgggttgcacctcaccccgtcacccactccttccttggcttctcccgggaaacgaccttcagtctttacaggtatgaggtcttattgtgtgccatcattttcttttgctattcattcccgaatccccactgtgccctccagtgatgatggggtatgagctctgaataacaaacaaggtaaatgtttactcttttgagtagctgaattttgctatgatgtagtaaattatactagtaaattatacttgtactgaatatgaatataagaaaaaaatactgcactaattatttttctacgctctatattgtaaaataataggaatataataaaaagctgacataaaagctaatttacaacatccctttattttactatgttttatgataaataccttgattttccttgtaagttgtatcttttagtgattttcaaagaaactcctatttgcttggtgctttttctgtaagcatatgttgattaaatctttgtgtattctttctgtacactaatttaacttatcattattctgtcatccagtatgttgtcttatttgaatggttcatttncttctttaggtgattgacaaggtttaggaggaaacttccaaaagccgggcaagtatggagggcttaacatcactttggcaacttaaattttttacatgtttgcttggttggtaacaacataattatgggct

SEQ ID NO: 169606 - DNA, 142 bp, Zea mays
  unsure (1)..(142): unsure at all n locations
  Clone ID: MRT4577_86266C.1
gccctctcttcttcccgcggnctgctcgttcgatttgtgcagcagatctgaggtcccgggcgaccgggaagcagcttgaatagggggaagtggagatcgggatgtgnatatgtggaaggatggagaagcatgactggaagtg

SEQ ID NO: 169607 - DNA, 915 bp, Zea mays
  unsure (1)..(915): unsure at all n locations
  Clone ID: MRT4577_86267C.1
gcccacgcgtccgcggacgcgtgggtgaaagcatcaatcttttcagatatttttcaggcgaaggcgtgcaacaagggttgtggggaatgcttgaaggaacggttgttagtgttcctgagaaaggggccagaaggcacccaaggggtgacaatatccagattgataccaaaaacattctcttcatctgcggtggtgcttttgtggacttggagaaaactatttctgaaaggagaccggccgggatgattcttcaattggtttccgagcgcaggttcgttcaaatatgcgatctggtggtgtcataaatgctgagattacatcatcgctactgaaatcagttgaaagtggcgatctcattgcgtatggactaatcccagagtttgttggtagatttccaattcttgttggtctatcctccctcagcgaagatcagcttgttgaggttctcacagagccaaagaatgcccttggcaggcagtataccaagttgttcgaaatgaatgacgtcaaattgcattttacggaggaggctttacggcttattgccaaaagagcaatatcgaagaatactgggggctcgtgggtttaaggtccatattagaaagtatattgacagaagctatgtatgagggccaactccaggagagaccaaacggggaatcagagatcgatacggaagccccctctagagtggccagncatgtagaggttcctggcaacaataattatgtatataaataacttattgtctgccttgtaactgtaaccaattcaaatgtaaagtcgggccatataaattcatcatgtngaccggcgctggngttgtaatttgtcatgttgaatttcgggggactgaagcttgatcttgcagtatttacataaggaaagaaaaaaaaaaaaaaaaaacccgcggcc

SEQ ID NO: 169608 - DNA, 389 bp, Zea mays
  Clone ID: MRT4577_86268C.1
tttttttttttttttttttttttttttttttttttttttttttttttttttttttttttttttttcccaccaaaaacccatggggatgggggggattaaagttgattaaaacccgaaacaagtaaaaatcctttttaatacccttaaacccaaaaaaaatgggaaaacccgaaagggcccttccgggaacaaaaaaaaaaaaaagtttttttttaggttttaaccccttctgtttaaaaaaatcttttatttttttaaaccaaaaaaggtccccacgggtgtcctttttgatcatttacaggggcaaaaaatttggggccctggggaaaatcccccccaaacccaggaccctgggaaattccctttggaggtttttataaagggctttg

SEQ ID NO: 169609 - DNA, 2022 bp, Zea mays
  Clone ID: MRT4577_86269C.1
tcattccagtccaccctcccttccccgcacgaaacccccaccagtactcttccatgtcagccgccgtccgctcccgcgccgcggcggccgccctctcggccgcgcgccgcatccacgctggccacgccgcggggcagaagcagcagggcagcaacagcactggcgcctttcgccgaccttggaccctcttcaggcgccagcagcaggaggagcggagccacgttccccgcgccgccgctcctgtcctggatgctgtcgccgatcacagggccggcggttcggacggtgcggagcccccagagatctggcgacagcccggagaagcccctgtcgctcccgagggtgtgggcgccgtcgggaggatcgacgtggttagggttgcagcccccggtggggaagactttgatggaaaggacgggggcggggaaagcgggggttggggtggcgctcacctgggacgacggtttcccacgcccaaggagatttgccgtgggctggacaagtttgtcatcggccagcagcgagccaagaaggtgttgtcagtagcagtttataatcactataaaaggatctattgtgaatcactcatcaacaggtctgctgcggattgcagtcagagtgattcttgcacgagtgacaccgacatggtagagcttgagaaaagcaatattcttgtcatgggaccaacgggctcggggaaaacattgctggcaaaaacactggcaagatttgtgaacgtgcccttcgttatagctgatgcgacaagcctcactcaggctggatatgttggtgaggatgttgaatctattttgtataagctcctagcggctgctgatttcgacgtagctgctgcccagcagggaatcgtctatattgatgaagttgataaaataacaaagaaggctgaaagcatcaatcttagcagagatgtttcaggtgaaggtgtgcaacaagcattgttgaaaatgcttgaaggaacggttgttagtgttcctgagaaaggggccagaaggcacccaaggggtgacaatatccagattgataccaaaaacattctcttcatctgcggtggtgcttttgtggacttggagaaaactatttctgaaaggagacatgattcttcaattggtttccgagcgcaggttcgttcaaatatgcgatctggtggtgtcataaatgctgagattacatcatcgctactgaaatcagttgaaagtggcgatctcattgcgtatggactaatcccagagtttgttggtagatttccaattcttgttggtctatcctccctcagcgaagatcagcttgttgaggttctcacagagccaaagaatgcccttggcaggcagtataccaagttgttcgaaatgaatgacgtcaaattgcattttacggaggaggctttacggcttattgccaaaagagcaatatcgaagaatactggggctcgtggtttaaggtccatattagaaagtatattgacagaagctatgtatgagattccagagacacgaactggaaaagataaaatagatgctgtggttgttgacgaggagtctgttggatctgtaaatcagcatggaattggagctaagattctttgcggagaaaaagctttggatgtctatctggccaatcacaacaataaagaatcaacgggccaactccaggagagaccaaacggggaatcagagatcgatacggaagccccctctagagtggccagcatgtagaggttcctggcaacaataattatgtatataaataacttattgtctgccttgtaactgtaaccaattcaaatgtaaagtcgggccatataaattcatcatgtgaccggcgctgggttgtaatttgtcatgttgaatttcgggggactgaagcttgatcttgcagtatttacataaggaaagtaaagaggatcgctttgcgtctttgggcaaaaaaaaaaaaaaaaaaaaaaaaaaaaaaaaaaaaaaaaaaaaaaaaaaaaataaagggcggcagctcgcgatctagaac

SEQ ID NO: 169610 - DNA, 760 bp, Zea mays
  Clone ID: MRT4577_8626C.1
tcgaggccggccgggtccgcctgagaatgaagaaatcgcttcaaggcttacgcaaagatttgacgatacagaagaaaaggtaagttgaggctggagacttattaccaaaatatcgagtccttgctatcaacatatgagaacattattgtcaaagtgcaaggagatgccacagtcgatgctgtctttgctaagatcgacgagctgctgggttctatcctggagaagaaaaatgaaatggtgtccagcacatgagcaaggtaaaaatgattgggtgcagtgcagatccgacaagttcatgtaatgcaagtcacctctcatgataggaacttctccaggggaatatatctgaaacacaggacgacacgtacaagtaatgtaagccagtctcacatgatggaaacttctccatgtggatgtggtcaaagcataggaatttttttcctccaattgttaactgtacgcgaatggaagcaacagaatcatccgtaggttgtgagggcttcagagatcatctgctgctgtacatgttttgttgctgtcttgtgacatacattgtcttgttgtttctcaactggaggaatggtgttaacctgctgtatcatttccttaatggggcttatgtgaaaaagggaggaggacctgagcagcagctcttgcaatctttgtctaaatttcttcgggatggtaaaggccatttcgcctgttctcccgaaagtatattggctgcattttccgaagaaaaaaaaaaaaaaaagcggcc

SEQ ID NO: 169611 - DNA, 278 bp, Zea mays
  Clone ID: MRT4577_86270C.1
cgagactccgtctcaaaaaaaaagaaactctaaaagcttgcatgttaaaattggagaacgccaccctatatcttattgtctataattcattcatcaaaaaaatattgagtacttacaaattgatgggcacttgctaggcactgacaataaaacattgcatagggcaccattctagctcccaagaatgcacatttatgtgggcaaataatataatttgtgacaaatgctcaaatagaagtataaacataatatttggaagcacaaataaatagtattct

SEQ ID NO: 169612 - DNA, 333 bp, Zea mays
  Clone ID: MRT4577_86271C.1
agcatcaagcgcgggcacgagcactaggacacgcgcactgcatgcagccgccacacacatgctgacacgagacaagctgctagctggcaataggttcgccctggcgcagctctgacgaagatacgtcgcagcgccgttctcgtcaccgtcgtgctccactcggcctcagcttgggctgtctccgcgtttcacctcggaagggacgaaagcggtctcgtgaagggtgtgcgtccggcgctctgctagcgggccaaagctgtgtatgccgctcgctgcgcagtcacgcactacattcagaaccacggcagccgctttggaatttatcaaggtgct

SEQ ID NO: 169613 - DNA, 1148 bp, Zea mays
  Clone ID: MRT4577_86272C.1
acagtcacaaaccctcgctcttcccaccgcaggaaagagctccctctcccctccccaccccaccgcctccgccgacgaaccgatcgaatccgggaccccgatctcggattcgctcggcagatcagcgcgcaccagcccccaagcccccggatcctccttcgtcctccccaccgcgcgcttcagccatggcaggaatggcaccagagggttcccagtttgatgctaagcagtatgacagcaagatgaccgagttactgtaagttaactctaccaatttattgtctcagcctttggcggccatgtgaagctctcctttttgcacaaccgagtacatgcttatgaatttgcaggaaccaaggtgacactggggagtttttcacctcgtatgatgaggtgcacgaaagttttgatgacatgggcctccaagagaaccttcttagaggcatctacgcttatggttttgagaagccatcagccattcagcaaagaggaattgttcccttctgtaagggtcttgatgtgattcagcaagctcagtctggaacaggaaaaactgccaccttctgttctggaatcttgcagcagcttgactatggattggttgagtgccaggcattggtccttgctccaacccgtgagcttgcacagcagattgagaaggtcatgcgtgctcttggtgactacttaggcgtcaaggtgcatgcatgtgttggtggaacttctgttcgtgaggaccaaaggattcttgccagtggtgtgcatgttgttgtcggcacacctggtcgtgtgtttgatatgttgcgcaggcaatccctccgcccagataacatcaagatgtttgtgttggatgaagctgatgagatgctttctcgtggtttcaaggatcagatctatgatatcttccagcttcttccatcaaagattcaggttggggtgttctctgctaccatgcctcctgaggcccttgagattacccgcaagttcatgaacaagcccgtgaggattctcgtcaagagagatgagcttacccttgagggtatcaagcagttctatgtcaatgtggagaaggaagagtggaagctggatacactctgtgacctgtacgagaccttggcaattacccagagtgtcatctttgtgaacacccg

SEQ ID NO: 169614 - DNA, 408 bp, Zea mays
  Clone ID: MRT4577_86273C.1
cccacgcgtccgcccactcgactatgcaacaccccttgcattcctacgaggaggcctacgcgcaaggctgaccgaggcgctggtacaccccaaggaaccttataaggacgcactctccctctgcactaagcgtggctacaaatgcataaaacatcaaattttctgagacagcacattaccaacttgcacgatcaactgagtacacctccttattacacagacaggtacgcaaatacatggctcgatcgctacaatgagacgatatgggcaatatggagaaatggatagtaactccatgatcgatgcgaggagcatcactaccaggcacaacagagggtacagaaacaccatgagaatagctacgctgtaagagatcctgcacaagcttatgcggagcatcaatacact

SEQ ID NO: 169615 - DNA, 217 bp, Zea mays
  Clone ID: MRT4577_86274C.1
ccctcgagcggcctggccgggataacaagcgcacgcagcgcagcactgaagcatcacttcctgcactcactgtgctagctgctcaaaccgtagtagtaacagtccatcaccaccaatggctcccaaggttgcgctcttccttgtcctgagcctcctgggagctgacgacgcgcatgcctgcgaacccaactgaaagtgaaccagtcgccgcaacgac

SEQ ID NO: 169616 - DNA, 435 bp, Zea mays
  Clone ID: MRT4577_86275C.1
gtatttgcagcagctgcagctgatgttgcagctggtgttgcagctgagggttcttctcctgaagaagcaaaaattcaagcagagaatgctgctcatctctcagtagcactagcagaaaatgcaatagttattctggtgcttgtggaagatcatctgagatcacaagctcaacatttttgcacatcccttacaggtgatagcatcacatcgtccacatcaatgacttcattggctgacagtcagtcaaattctttgagcacagctggtaaagaacccatggctgctggggtctcaagacgggcatctttgtccagtgatgctggtggccttcctctggatgtacgtaacacatggcggctaaatgtcattgcattttatcagttatgaatattaacttcataaaagtaattgcaacttgtgtgggctggctatagc

SEQ ID NO: 169617 - DNA, 188 bp, Zea mays
  Clone ID: MRT4577_86276C.1
gccgcccgcgtgaccggcccggaatgaatagagcggccgacctacgcgtctttttttcaggcgctatctaatcagcttggacggtagagccgtataatgccggcctggggcagcagccacactgtccggagcttgcgacgaatacggttgtgccggatcgatggaccgttgaactgaagcgcgcctgc

SEQ ID NO: 169618 - DNA, 589 bp, Zea mays
  Clone ID: MRT4577_86277C.1
aacaaaacaaaaaagttttttggataattttttggaaatttttgggaaaccgctttaccaaataataaaaccccctgacggccttataaaattgtttgttggggggaaattttttcccccccacaggcgggttgggagaaaaaacggggacttggacattgtttccccccccgtttgtcccaaaaggtccctaaaaacagttggcagccccctaaagggcccccgggggggtataaagttaaacatccttccttcctccaaaacccgggaaaaaaaaaaaaaaaaaatagttccttaagggggggggaaaaaattgtttttaccacctaaagggaaaaatcctcatttttaaggccccccccagggtatgattttgagcaggatttttttcagagggggggggaagcccatagcttccgcatgggggggatgctaaaaacaggggttccctttttgggggcggattgcaaaggcaatccacccgggggggtttttttaaccggagaaagggttgtttttgcaacttcagcgtccgtaaaaagcggttttggccctgttggtgggggctggccttttggaaaaatggtta

SEQ ID NO: 169619 - DNA, 195 bp, Zea mays
  unsure (1)..(195): unsure at all n locations
  Clone ID: MRT4577_86278C.1
ccacggtcgccacggtcgccgcgcgaatcgatggaggcgcagcaaggggaggtacacgcgtttcaactttggggatcgtagcccacgtggaacctcatcagaacggcaccccggagaatcctggcaccgcgcgcctgcctacgcccagactattcgaagccacccgccgtgtcgatgagctntatgacactggca

SEQ ID NO: 169620 - DNA, 551 bp, Zea mays
  Clone ID: MRT4577_86279C.1
agaagaaaaaggaaaggatgcgataaaattcgattcagaagtactagaatcataaatgcatagatccaaaccgagcaccttattcaggtttattgaaacatgggagatagattctgcagtacatctaccaccacctggaacactccgtatcattagtatcagttacacgtagcgtagatgagcgcgatgtgagtctcacagtgttcgacaagcgtgcaagaaacgtggcagaaatcgtctcatggattcatcagatacacagctctgcacctcgtactaggcagccgggacaatggataccaaaaagatggtgaacaaagccagacgatcagaactggttggaccagtcggcggcactgccgacacgggggatgctggcgtcctgcttcttcttgctctcgctgtcgaccttgaaggtggagccgcacatctggccttggctgtccacgcgcggcaccgccttgacctcgtgcagcgggtgctcgaagctctgcagcccaccggaggtggtgtagaagcaacctttgcccacgcgtccgcggacgcgtggg

SEQ ID NO: 169621 - DNA, 827 bp, Zea mays
  unsure (1)..(827): unsure at all n locations
  Clone ID: MRT4577_8627C.1
ccggccgggccggggtccaaactgtctcttcacgtccttccgggtcctatcgctcctctccgtcgccggtggagctcatggcatcctccatggccgccgccgccaccgccaccgccctcccgctgccgtccgggacgacgcagaggccgtctgcccagggccgcctcctcttcaccgccgcgcccgcccgctccctccgcctccgccccgccggccgccggtcggcccgctcctcgcctcgggccaccaaggtagccccccctacccctcacctccgcgtaatccgattcggctggattagcagctggcttagcgtaaggggatgggggtgcgtttatttttgctcccttgctgagcttcgcaggattcttcggacatgtataggggaggctgtggtggcagcgttggctgatcctctcaaggtcatgatatcaggagctccggcgtccggcaagggcacacagtgcgagctcatcaagaccaaatatcaactggcgcacatctccgccggagatttgttgcgggcggagatcgctgctggctctgagaatgggaagcgggccaaggaattcatggagaagggccagctcgtgcctgatgagattgtcgttaatatggtgaaggaacgccttcggcaaccagacgctcaagaaaatggttggcttttggacgggtacccaagaagctattcacaggccatggccttggaaactcttgaaatccggcctgatactttcattctgttagatgttccagatgaactccttgnntgaagggtgggttggaaggcggcttgatccctgtacaggggaaatatatcatttgaa

SEQ ID NO: 169622 - DNA, 1303 bp, Zea mays
  Clone ID: MRT4577_86280C.1
gccagggttttgccagtaataagtgtgtatagggtggggggtattttttttttttttttttttttttttttttttttttttttttttttttttttttttttttttttttttttttttttttttttttttttttttttacttttttttttttttcatagatccaaaccgagcaccttattcaggtttattgaaacatgggagatagattctgcagtacatctaccaccacctggaacactccgtatcattagtatcagttacacgtagcgtagatgagcgcgatgtgagtctcacagtgttcgacaagcgtgcaagaaacgtagcagaaatcgtctcatggattcatcagatacacagctctgcacctcgtatagtagacgggacaatggatagcaagaagatggtcagaactggttggaccagtcggcagcactgccgacgcgggggatgctagcgtcctgcttcttcttgctctcgctgtcgaccttgaagatggagccgcacatctggccttggctgtccacgcgtggcaccgccttgacctcgtgcaacgggtgctcgaagctctgcagcccaccggaggtggtgtagaagcaacctttaggaaatggagcgtacgagttgccgcatcctgtcttgaggatcccaacatcgtcagagaacacaaggtggttttcgtagtcaacgccccaaaagaaagggatgctaccatcagcgtcagcagcaacaaaggtagacttcgacagggtgtcatacaggatgaacgcgaacttcccactaaggtctctcacaacctggctggctgggacagggcccctgtccctcagggtcctgtaggcctctatgaggatagtcacctcatttgcagtcttgctcaggccataatgctgcttcaggttggcaatgttctcaatgtgcccttggaacaagcagaagatgtcattcacagcaccaaacaaccttggcacgagggggctctggttggccgccgagtaggccagcgcgccggaggggcccaggctgacggtgacggcgccgtcgtgcgagtcggagaagcccttcatcagcgcgcccgcgccggccccgcctgctccagcggccgccccggcgaccggggggctgcggagaccctccgggcacttggccaccgtgggatcgaacaccgccagcatctcgccgccgtccgatgcgccctctccgtctcccctcccctcgctttccgtgcgctgtcctgttgcgctagtctcccactctcccttgtctgttgctacggcacggaaactctcctcgtgccgaattaccc

SEQ ID NO: 169623 - DNA, 143 bp, Zea mays
  unsure (1)..(143): unsure at all n locations
  Clone ID: MRT4577_86281C.1
naaagatggaaagaaaggcaaggttcgnatacgcctttccacactcaaaactggtcgtntntacacccactcgtatccnctcctggttctacattcntggggggtcaaaaanatgggcganctgcacctggnaattcaatttt

SEQ ID NO: 169624 - DNA, 762 bp, Zea mays
  Clone ID: MRT4577_86282C.1
atgggtgtcgaggaggagcgcgacggcgaggagcaacgccgccccctcctctcctccaccccgccagccgcggcggacccgcagcagcaacagtaccagttcctgggccggagcacctcttcagtgctgcgcggcggtggcgggggctgggaagggcctgaggtgagcgccgacgagaagggttggcgattgttcctcaagggccatatccgtatggtggcagttaccaaccttctgagagcgtcgggagataaaccggatgtactggatgaggtggagatccgacagctactcattgaccatattggacatcgatgctgttggggaagtcaccctgcccgcacatggaaaattacctccattgaggactgcaatgtctatgttggcaccttggaaaccttcatcgaggaaagatacattattacaaaaaaggagccctttgaaagtgggaatatagatggaagagaaaaaggtcctttgcctggattgtgggaacttgatttgaggtctaagtttcctgtactttttgtaccagagaaagaagtgactgtcaagattccacattcagatattattgaaaagtgctcagattgtgagggtcgtggagagaaaccatgccctacatgcaatgctgggaccatgatcgccaatattcaagggaaggctggtgacctaaggcagatgcagggggcggcggtgatgatgataggagagggtaggcgcaaaggagctagggtggggtgcatagagcttgaggagtaa

SEQ ID NO: 169625 - DNA, 418 bp, Zea mays
  unsure (1)..(418): unsure at all n locations
  Clone ID: MRT4577_86283C.1
ccccccccnatcgggggccgccgcgctgaagcgnatagagcaanaaaaaaaatcggccggctcgagccggccggggcgggggtcatctctccctctcgcctgccaatcccctcatcttctccgctcccacgccgccgaatccgagacctgatctcggattcagcgcgaccagaccctcaggggatccccggcacctcctccccgacgcttcagccatggcaggaatggcaccggaaggttcccagccttgacgctaacaactatgattctaagatgcaagagctgatgaaccaaggtgatactgacgaggtcttcccctcttatgatgaagatcaccacagctttgatgacatggccctccaggagcacctcctgagggaaatttatgattatggcttccacaagcctctctgccctc

SEQ ID NO: 169626 - DNA, 375 bp, Zea mays
  Clone ID: MRT4577_86284C.1
cggggcggaccaacccttccgccaacccttccggtggggtgggtttttccttcccctccggtccgggttcggtttcgggaggttttccggggttcggtttcggggttaaccgaaccaaaatgccggcgccgaatgttgagaaccgttgtttcgtcggcggcctcgcctgggccacggacaacaactccttcaaaaacgccttaagaaccaacggcaaggtcctggagtccaaaacaatcctcaatcggaaaacccaaaggtcccccggtttcggtttcttaaccttttcaacggaggaggcgatccgaaaccccatcaagggcataaaccggaagaagctgaacggcctaaacataaccgtaaacaaggccaata

SEQ ID NO: 169627 - DNA, 458 bp, Zea mays
  Clone ID: MRT4577_86285C.1
gaaccaaagcacaccttgatttgggtctgcaggaaagctgttattcttgcagagagaagcccacccgtctgacaatcttaggtctatgcaagacggaaaatcctcctcgcatggggtgcaaacagcacatgtctctgcggaatgcaaccttgcttgggccagatcctcatgccatcgttccaccctacccccgctctcctgctatgggccaaccacccactgcacgtcgcaaagatagtcatcgcctcttacatgaacatacatggtgctatcatactatgtaatgtacacaccgtacagtttgcacttgtttcaattccgctcaaatcaatgaaactgtttgctgttttagatggctagttgaaaccaccgtcaacttggacttgctacagttgctttcaataatatgctgctttctgcaactctatttccatatattccgtgactgatcacacact

SEQ ID NO: 169628 - DNA, 1790 bp, Zea mays
  Clone ID: MRT4577_86286C.1
gaataaaacgatactgcactgtgcatgtgtaaactgatcaaaagttatttcaaattactatacatcacgtttgaaatggccagacgtcgccattttttattttcactgaacaatatatacagtgatgtacttatacacaggaaatccaaatatgcagaatctaatactgcaatacgcacagatatcttctttaatagaaaatacaagaattcgcaatgcttattttaagctttcacgcagccttctgtacaatgaaacactgcacactgaaagaaggcattcattcgtgcccaggaaataactatttccccagccactcgaagcagcagcagaggccccagcaaaacttcgaaggatagtctcttatgaacacatccctgctgtagccaacgacatagaagctaaatgactgcttgcgacgcgccattgtgacacgggttacaggcacaactgaaatgatgtgtctctcggaaataacccttgcagatggtggaactggcagccggctagcgatgacttctgaggagaactggttgagtgggtatgaatcagcaaaaaatgcaggagtgcactggtatgcctgtatgttgcatagctgcactcctttggctctgtggaaaacttcttcagggaccgaggcagcccctctagctgcactaacttttctagctgacagcgtcttccattgaacatgagccatgctttgagcaaggagggaaccatatccagtacatgtgttgcatgtcactaatccacgtgatccacatgctatacaaggtaacattcctttaccattgcacattccacatactgtatcagatccatcttggtgagcaagtaaacctctgccatgacatgcaccacactgggtcatctgatttgctttataaaacccgtgagcctgaccagcattgcatgtagggcatggtttctctccacgaccctcacaatctgagcacttttcaataatatctgaatgtggaatcttgacggtcacttctttctctggtacaaaaagtacaggaaacttagacctcaaatcaagttcccacaatccaggcaaaggacctttttctcttccatctatattcccactttcaaagggctccttttttgtaataatgtatctttcctcgatgaaggtttccaaggtgccaacatagacattgcagtcctcaatggaggtaattttccatgtgcgggcagggtgacttccccaacagcatcgatgtccaatatggtcaatgagtagctgtcggatctccacctcatccagtacatccctcccgacgctctcagaaggttggtaactgccaccatacggatatggcccttgaggaacaatcgccaacccttcatttggatggggagacggtggggcatgagatggggacggggagagcatggcgctatgaatggacggcgggtaagcataggcgttgtcgccgttgggaggtgggccctggaacgtgtggaagccagcggcggacctgacctcgtcggcgctcacctcaggcccttcccagcccccgccaccgccgcgcagcactgaagaggtgctccggcccaggaactggtactgttgctgctgcgggtccgccgcggctggcggggtggaggagaggagggggcggcgttgctcctcgccgtcgcgctcctcctcgacacccatggatccagggactgtgtttggtcgggggaggacaggaccgggattaccgagtccaaagactccgctgcgcacaaggcagaaggcacaagtgccccggccggcctcgaggtacccaatg

SEQ ID NO: 169629 - DNA, 102 bp, Zea mays
  unsure (1)..(102): unsure at all n locations
  Clone ID: MRT4577_86287C.1
ntcttcgtactcggattcggtcgacctccttcccgatccagtccgcagcaacccgagggacatcgaggagagacagatacagatcgcgcgctcagatgtcgt

SEQ ID NO: 169630 - DNA, 302 bp, Zea mays
  Clone ID: MRT4577_86288C.1
cggaagggccggctcaatccacgcgtaggagcccacctgcacagacctacgatcgaatccgagcacgaccaacacgggagagacgcttccatggatgctagcgaaacatgacggcaagcaaccgatcaagactagtctacccaggccgctagactgctccaaggtcctatacaccgtggatactggacaaattgatccagcctttggtcctcaacacacttcacaggaacacgatctaaagacaacccctgaaatctcaaaccaagcattctcagcaaagcctcaactataccatgaaaggg

SEQ ID NO: 169631 - DNA, 377 bp, Zea mays
  Clone ID: MRT4577_86289C.1
aattaaacgatcaaaccgagtaaacccagtcttctgcttctcctgaatacccttaatcatcagaagagcaggatacataacattacatagcatagacgaaccgaagggaaagggccacggccagtacatttcaccggtaccggttcttcccaaggctgtacagggaagttatttgcccaatgcaacctgtcttccttcagacacacgtgcgatcggccatcagtagctccagagcttgacctcaccgtcgtcgtcatcgtcgtcgccgccgccgccactggtggaggaaccggccatcggtggcggatcaatgagcatcccttgcgccatgtcgaggtacccctgcatcccgaagtcgagcctgcctgcgataatgc

SEQ ID NO: 169632 - DNA, 272 bp, Zea mays
  Clone ID: MRT4577_8628C.1
ggttcatttctacgttctatttcactctctaacgtagcttacaacatcaacaagtgggtgggacattctctttatgcatgtaactataataccccatctccatgtgcatacatacataatgcaaaagaaactaagatctaactccttaccatggcgaatgaaaaagagatatctattacttacactatattggaggcaacaacacgatggaacttatgctattatatacaactctgttatgcatcacaaacgtcgtcccgagaaaggataca

SEQ ID NO: 169633 - DNA, 515 bp, Zea mays
  Clone ID: MRT4577_86290C.1
tgacattactgggaggccgttgtgttggtgtggcgttgtgggttctttccctttgagatctatagatgattgtgatctaaaaaaaaaaaaaaaaaaaaaaaaaaaaaaaaaaaaaaaaaaaaaaaaaaaaaaaaaaaaaaaaaaaaaaaaaaaaaaaaaaaaaaaaaaaaaaaaaaaaaaaaaaaaaaaaaaaataaaaaaaaaaaaaaaaaaaaaaaaaaaaaaaaaaaaaaaaaaaatggacaacgacataaaatggaaaaaaccttggcgtcccccaactaaatcgctttacattacataaacgtttcccaaaaaaaaaaaaatgccgaaaaggcccaaaccgaaaaaccttgaaaaaccctgcgcaaacaaaattgaaaatggtaccccactatccacttttacataaaggggaaaaaacgaaaaggttacccccattgtaacctttacaattgccagcgccctaaagggggaacctttctctctcttaaataactttataaacacggggg

SEQ ID NO: 169634 - DNA, 385 bp, Zea mays
  Clone ID: MRT4577_86291C.1
atgctttcttttattctttcataagatggcatgatcgacttaactcttttttaagtcggttctacaattgtggacgcattcaagccgagcagggcgcacaggcacaggtcagtggcgtttattacggtaaaatggatgagattactgtctggaaggcaggtgaatatatgtgataatctatgcacatcttagtgctatggtgggggtctcattctgattagtattatgttagagaggggtggacttgctgaggccaaccacggtaccagcggtggctgactggatgacgatacgtggggatatggcgttcaggaccccaacgaacctctaggtgaggagcgcgcacacgggcacgcacacgaggacggcgcggatcgctatggcc

SEQ ID NO: 169635 - DNA, 534 bp, Zea mays
  unsure (1)..(534): unsure at all n locations
  Clone ID: MRT4577_86292C.1
agcggcacgccctattttttctttttctttgacagtagcaacagagacctcgtacggaactcgggtgaaataataagaagaccaatagagcagaacgaacgaaaaaaaagaacagtgagaaagcgatcagcgccaatcgaataaacactcatgttacctacacagcacaccactcttgaacatggtcacagatatccatcgagcacagcggtggatcaggatctacgagagaggctgaagcgctgccaagactctgcgatggatcgagctgagatggatgaggtgagcgtgaagcaaaagcacggagcanccgacgtggctgtctagtacgagcgaagctcgaccgtcttagttgaagctcctcagaggcttcttcaatccgcatcactctgcgcttttcgcttcacaagcgtcgattcagcctgttcactaagcagagccttctctttgctctctctcgttgtacgcctcgcaggacctcctatgaactgacttctccttacttgaacgcagctcttggctgagatggcttga

SEQ ID NO: 169636 - DNA, 657 bp, Zea mays
  unsure (1)..(657): unsure at all n locations
  Clone ID: MRT4577_86293C.1
ggccgcaaattttttttttttttttttgtaaacagcttctgagccttctgtagattctcatcaacagcccactcagagatcaggatggtttaggttttcgccgagacatcaaactgaaatggcgactgcctaaagaatgcctcgctctaccaggccattatgcgataacatgaagatcagggaatggagatcagcgaccctcggcaggaaagtaggaaaccgaacatctccaatctccatggcggagaaagctcggatggcatcgtcgcgggatatcggatagcagagagcgcagaagcggaagagccgcgccccgcaagcgaaccggcgagaatgagaagcgagcccagaaggtgtgtgaacggtgaaccccggcagcgcggcggcgaagaggaagaaccggagggagggcacgggaaggttgcggcagccgccgctgcggacgtgaggcgtggcgcggaggtcgtgccccggcccgcgttagttgctgagcacacggcagagcgcgccgacgagccgcggatcggngcccggggccggatcgggccgcggatccagctgtccggcgggcgaggcggagtagaagccgcacaggaggagagaacgcgggcttcgcggcacggccgcagcgcggagcctggcgggagatttcatctc

SEQ ID NO: 169637 - DNA, 656 bp, Zea mays
  Clone ID: MRT4577_86294C.1
gggttgagtagtcaagtttaatttattctgaacccctttaactttgcagttattctctcttcgtctattgattgtatgccctgttcctattggaaattttatgcactttgtgcagctatcgtagcaacagaacttctctctttgatggcattgaggagggtggaatccgagcaacatcctattcttctcatgagatagatgagcaagaaaatgatggagctattgatggactgcaggatcgtgtcagcattctcaagcgggtattgtgcaacttcaacttcttaaaacattctaattctgttgattcttttatgtaaaacaactgtagatattattatatacttaccagctcaagagatgagataataaaataggttcattaaaacaatattgtgttccttaaaaaaatagtctctctgctgcaactttagtgcacagtattagtgtagatacgggattcttgtcagctgcacgctttcctggatcagtttggtttgaaatatttgaaattagttcagcacggttctctagttaaattttaccaaaaaggaatctaagtaatctgatgggccttgcgatgactattggtggctgcattaatgcaatctgaatatttcattggccctttctttgagtgtgggattcatttggtagct

SEQ ID NO: 169638 - DNA, 279 bp, Zea mays
  Clone ID: MRT4577_86295C.1
agtcacggccgtccggcctagaattactgtacacaagggacttcagatatgcgaggtgaggcttgctgccatgtgtaaaccatgatagctcatgatagaagcggtggatcaagtgagtctcttggcattgcactattaaaccataaaaggcgggtgcggcaaagtggtatagatgtttaaaaaaaaaaaaaaaaaaaaaaaaaaaaaaaaaaaaaaaaaaaaaaaaataaatattagggattctttatttgggggcgggcgctttaaaggatcaaactt

SEQ ID NO: 169639 - DNA, 283 bp, Zea mays
  Clone ID: MRT4577_86296C.1
tccatatacagcggccgcccttattttttattttttatttattgtttttatggcaaaacaatatatctctattaaaataactataaatatcttacatattacaacaaactacaaaacaattctttctttattattttaaacatacccaaataaatattatgtgccgattcaaaaatgtctaattacacctggctaacactaacccatcctggtaaaatgaacaaacaagtacccaacctaaaactaatacaatttttttctaatcatttacacgacctttaaa

SEQ ID NO: 169640 - DNA, 156 bp, Zea mays
  Clone ID: MRT4577_86297C.1
ggctgcagctacggcgactccctggtgcaagggagagcaggtcacctcagagaagaaggttcgtgaggctcatgttgagaaggggatgcaacgcaaccagatgatcaccttccctggtgaagctgatgatgcgcctgatactgtcactggagacat

SEQ ID NO: 169641 - DNA, 364 bp, Zea mays
  Clone ID: MRT4577_86298C.1
aagaaaaaaaacaaataacaacataaaaagcacaataatataccaacaatgacaaacaggatcggtcgctttcttagacccaaaaggtctgtatgcaagcattagtaaagctaacatttttatacagtgctcacaatctaatatatcttccgttgtttaaccataactcaaatcagaggactcttcaatgtaccaaattacaattgcttaaccctactcgatccaacatgcaatcgcaacaagcctattaccattatcacgcttgttcctccaaaaaccgtgacccctattacagcaaatacctatggtcccatttatggcacaaaaaatccggccacaacatctacaacaacttgtgctacca

SEQ ID NO: 169642 - DNA, 395 bp, Zea mays
  Clone ID: MRT4577_86299C.1
gtaattggaaatgacatcaaagcctttcttatttttgtttctttttttaaaataaattaatctgcctggagcttgagaaaccatgcacctttccagttagcattgggaagcggatcggatataatgattttaatgttcgcccagtcctcagcctgtaatacaggcagcttgggccttttttctcattaacgtgtctgcgaccggcagcatttctattgcacttttagctgtttcttacctactgatagagtgatttgatactgccggatactattagcttcatatatcctcttcggattcggattgggaacctctattattaacttgtgtctggtaaaaaagttagatttgtatatatattggtctgtaaatatccatctttgagggtacatatt

SEQ ID NO: 169643 - DNA, 1402 bp, Zea mays
  Clone ID: MRT4577_8629C.1
agtagcaacttttctgtccaaaactgtctcttccacgtccttccgggtcctatcgctcctctccgtcgccggtggagctcatggcatcctccatggccgccgccgccaccgccaccgccctcccgctgccgtccgggacgacgcagaggccgtctgcccagggccgcctcctcttcaccgccgcgcccgcccgctccctccgcctccgccccgccggccgccggtcggcccgctcctcgcctcgggccaccaaggctgtggtggcagcgttggctgatcctctcaaggtcatgatatcaggagctccggcgtccggcaagggcacacagtgcgagctcatcaagaccaaatatcaactggcgcacatctccgccggagatttgttgcgggcggagatcgctgctggctctgagaatgggaagcgggccaaggaattcatggagaagggccagctcgtgcctgatgagattgtcgttaatatggtgaaggaacgccttcggcaaccagacgctcaagaaaatggttggcttttggacgggtacccaagaagctattcacaggccatggccttggaaactcttgaaatccggcctgatactttcattctgttagatgttccagatgaactccttgttgaaagggtggttggaaggcggcttgatcctgtaacagggaaaatatatcatttgaagtattctccgccagagaatgaagaaatcgcttcaaggcttacacaaagatttgacgatacagaagaaaaggttaagttgaggctggagacttattaccaaaatatcgagtccttgctatcaacatatgagaacattattgtcaaagtgcaaggagatgccacagtggatgctgtctttgctaagatcgacgagctgctgggttctatcctggagaagaaaaatgaaatggtgtccagcacatgagcaaggggaatatatctgaagcacaggacgacacgtacaagtaatgtaagccagtctcacgtaatggaaatttctccatgtggatgtggtcaaagcataggattttttttctccaattgttaactgtacgcgaatggaagcgacagatcattcgtaggttgtgagggcttcaaagatcatctgctgctgtacatgttttgttgctgtcttgtgaacatacatgtcttgttgtttctcaactggaggaatgctgttaacctgctgtatcatttccttgaatggcttatgtgagagggaggaggacctgagcagcagctcttgcaatctttgtctaaattccttcggatggtgaagcccatttcgcctgttctccgaaaagtatattgactgcattttccgaagaattgatcctctgtactggattgtttttctccttaaacatagctcatcaagagtattagttatgc

SEQ ID NO: 169644 - DNA, 819 bp, Zea mays
  Clone ID: MRT4577_862C.1
ccggacgaacctgaatatataagtatcctttaacttttgatcaagcaatattaggtatagatggtgacccttttatcaactcgttagatcgtaatacagcacctggattccctttctctacaagaagaaatgggaaaaaaggaaaaacgttgtggtttggagacagtatggaatacgaccttactggaccacacgcgatggcattacgacaagaagttgaagatttggaattatctgtacttaatggagttagacctgaagttgtttggactgacactttgaaagaccagaagatacctgtggctaaagcaaacgctggtaaaacacgtttattttcggcagcgcctatgcattatgcaatagctctgcggaaagtatgtgccccttttgttgctcacctatcacgaatgcgtattagaaatacgatttgtgtaggtgtaaatccgttttcatgtgaatggagcgcgatagcacaaaaattgtcatcaaagggacaacatgttatagctggagattattctaattttgacggttcattacctgctcaactagtctatgcggcaactgaaatcatggcagattggtacgatattcattgggaatacgttgaagcacataagcgtaatatcgttggtgataatatattaggaaaatcagaatttcttatgtatcttcgtcgattatattatgaagtgtgtgcaccatttacatattatgaattttgaacgaggttcacttatgtattatgttcgcaacggtataccttctggatgcccggtcactgcaccttttgattcaattgtcaacttaatggcgtta

SEQ ID NO: 169645 - DNA, 804 bp, Zea mays
  Clone ID: MRT4577_86300C.1
gagcgccgtgctggcgctcgccgtcgcgtggcgccccgtgctgtgggtggccgtgctcgccgacgtcggcacgtgcctgctcgtcgtcctccacagcatgctgctgctcagggacggcgccgcccgccgcccgaggtgctgcgctagcgctacggcgtgcaagagcaagcaggcgtccaagccgtgctgcgcgacggtgaagccggtggcgacgacgaggcacaggcacgggcacgggcacgggcacgggcacgcaggcgcggggaagcccgggacgctaggaggcgacaagcagggtaaggactgccatggttgctgccagaaggagagcaagccgcccgaggacgccgtcgtgatcgccattccgggacgggccgtggagcaccggaaggaggccttccctcacgagaacgcgggagccggggggtgctgcgctgcagcgcacggtgccgaagacgaggtatgcattgtcatcagcgccaggtcgccctgctgcagcaccgcgaggagtcggtctggttctcccaaggacgcattgtgctgccacggctccggtggtaaagacggcggcgccatctcagccctcgtgtgctgacctcacctaccagcactaccattcgtggaatacggtcgtcttgtatataaaaaaattactcatatcctatgccgtagacaggaagttgtttctattacgagtactaatattcttgtaatctatgttcccctgagatcattagaaaaaaaattatatataatactctattaaaaaaaaaaaaaaaaaaaaaaaaaaaaaaaaccccgggg

SEQ ID NO: 169646 - DNA, 463 bp, Zea mays
  Clone ID: MRT4577_86301C.1
aatagagtattatatataagttttttttctaatgatctcaggggaacatagattacaagaatattagtactcgtaatagaaacaacttcctgtctatggcataggacatgagtaatttttttatatacaagacgatcgtattccacgaatggtagtgctggtaggtgaggtcagcacacgagggctgagatggcgccgccgtctttaccaccggagccgtggcagcacaatgcatccttgggagaaccagaccgactcctcgcggtgctgcagcagggcgacctggcgctgatgacaatgcacacctcgtcttcggcaccgtgcgctgcagcgcacccgtgggcgccgcggcggaagcgccgccgcaacaccctccggctcccgccttctcgtgaggggaaggcctccttccggtgctccacggcccgtcccgaatgggcgatcacgacggcgttctcgggcg

SEQ ID NO: 169647 - DNA, 973 bp, Zea mays
  Clone ID: MRT4577_86302C.1
cccacgcgcccgctcaaatactcctcaatagccatcgaggagaatggacatggaagcgcaaggcaccgctctcaatcctcccgcctcttcctaatccgcctcctcccgctcagtcgccgccgtggaggaaggagcaactcgatcgccagtcatgacccggggagagaaccaggagtcgcagaccgggaacgtctccgccgcatctgcggctgcgccgggaccgaagccggcatcggcgggggccgggaagggcgcggagggccagtcggtggtgcggcggctgcagtcggagctgatggcgctgatgatgggcggcgacccgggcgtgtcggcgttccccgagggggacaacatgctccactgggtgggcaccatcgcgggatccgccgggacggcctacgagggcacctcctaccgcctcgcgctggccttcaccgccgagtacccgtacaagccgcccaaggtgcggttcgacaccccctgcttccaccccaacgtcgacgtgcacggcaacatctgcctggacatcctccaggacaagtggtcctccgcctacgacgtgcgcaccatcctcctctccatccagagcctgctcggagagccgaacaacgactcgccgctcaacacgcaggcggcggcgctttgggcgaaccaggaagagttcaggaagatggtggagaagctctacaaggccgccgcgtagaggacagcacacggcgcagatgccgactcaggttcttcaagcaccgatctcacttggatcgattgacgtggatggttttgtttggttgggttcccagtctggtgctgtagcggtgtagcaggaacgcgtgggtagccttgagcctggcgattctgtaattgtcctgagttctgaaatgttgagagattcatttttacataaatttttgttatttcatttttacactctggatatggacgggactagttgaatttaaaaaaaaaaaaaaaa

SEQ ID NO: 169648 - DNA, 955 bp, Zea mays
  Clone ID: MRT4577_86303C.1
cccgcgtccgcaccgccgcctcccgggaccgctctctatcctcccactaaatactcctcaatagccatcgaggagaaaggagatagaaacgggagggaacaccccactcgatcgtcagccatgacccggggagagaaccaggagtcgcaaaccggtaacgtccccgccgcatccgcggcggcgccggggccgaagccggcgtcggcggggggcgggaaaggcgcggagggccagtctgtggtgcggcggctgcagtcggagctgatggcgctgatgatgggcggcgacccgggcgtgtcggcgtttcccgagggggacaacatgctccactgggtgggcaccatcgacggctccgccgggacggcctacgagggcacctcctaccgcctcgcgttggccttcaccgccgagtacccgtacaagccgcccaaggtgcggttcgacaccccctgcttccaccccaacgtcgacgtgcacggcaacatctgcctggacatcctccaggacaagtggtcctccgcctacgacgtgcgcaccatcctcctctccatccagagcctgcttggagagccgaacaacgactcgccgctcaacactcaggcggcagcgctctgggcgaaccaggaagagtttaggaagatggtggagaaaatctacaagcccgccgcgtagaggaggatgacagcgcctggtgaagatgtgggttcttcaagcactgatttcgcttggattgatcgacaagagattatatttggatggtttgggttcccagtctggtgctgtagcaggaaggaatatttgggtcgcctagagcctggcgattctgtaattgttctgagttctaaaatgttcagatattcatttttccatgaatcgttttcgtcccttcgcctcttcctaactgcaatattggtatgaaattatgaatatggactggccaagactgattgaattc

SEQ ID NO: 169649 - DNA, 638 bp, Zea mays
  Clone ID: MRT4577_86304C.1
cgcctgcgtgtaccgggctcctattacacggtcgacctagtcgttcgtttcaattaccaggccgtgtgcttcatcacgaactgtgccataagcatcactcatgtactggagccttgatcgacaacctccgcaacaggagcatggccgtgtacggcacacacaacctcaactagcctaacacaatataatgcagggtgcatggcagaatgcacttcttcagcaatgttgttggcagcagccccaacatactacagggggcatgtgtctactactatagatagccctcaaacttaaaaaattgtgatgaattcctaatgcatcacatcggtcctttggtaatgccttctgtacaatcacttgagctacaaccaagtaggtttcaggtattgcttgagcatgatgtgtgtatctataagcacatcgagccacgatacattacaccaagcgaatctacagcatggttcaatccataatgcaagaggggcttcaccaacggctctgctagttatgtgggtctcaacgagcttctcatagagcggaggcactgttgacagcagcacagttcctaccatgaatgtgcggcttgctccactcatactaccaaaataatccatgcagcatcactgacattagtggtg

SEQ ID NO: 169650 - DNA, 426 bp, Zea mays
  Clone ID: MRT4577_86305C.1
ccggggttcttgattgtatatcattgacctttctataatcaatacagaacatccatgttctgtctttcttctgtaccaacaactaccaacaacacaagtgaggcaaaaggactcacacttagacctgccttcaatagttctgccaactgcctctctatctctgttttatgcaagcatgagtacccgtagggtctaacatttactggcgctgatcctggcacaagtgggatgtggtggtgatatggtctgaccggtggcaaagcgttgggtgattcaaagatgtctttgaattcttctaacaattcaaagatgtctttgggtgatatgcctgattcctccgccgaaggtcagattgcagcgggcggggggcaaggggcagggggctgtgcctgcgccttatcccgaggagacgcagcggcggcggcc

SEQ ID NO: 169651 - DNA, 298 bp, Zea mays
  Clone ID: MRT4577_86306C.1
aacgaaacatttcttttattaatgaaacgcgagccttttgaattcgatgtcgtaacaggttgaagaacgcaacatctttattcagtagcaatataatcagaagaagcaaaggcagtacacacacgctttcgatcacaagacaataatacacgcacgctcctccgatccagagagaaattgctaaagcgcaagatcacacgagtatatcagcaatcaggcgacgggaaatttgtgacggggtgctgcgtcatgggtcagcttgaaacacagtggtcgcaatcgccactaggcatcgggc

SEQ ID NO: 169652 - DNA, 589 bp, Zea mays
  Clone ID: MRT4577_86307C.1
aatggcgtaaatctctatcgacgaagcgtgtggaggaaaacgaaagatctccccgtgcttgtgcatgccagatcgcctgctctacgtacgcataccgtccctcgcgaaactcggcactcccagggaaatggtgattgtatcgtactattctggggggaaagcgcaattatttgagggcgagttgattcatcatggagggactgtacgtgtgcaaaattcatggcttcagacaccggcaagaagctcattcagatcgatgtgagctcggatacagagtgcccttggtgcttcgtcagtaaaaagaaccttgagaaagcaatggagcaaagcatgggcaagtctgatttcgaggtccgttggcatccattctttctgaaccccgacgcgcctaacgagggcgtcaagaaatctgacttcttcaagatgaagttcggtactgtccaatatgagggggcgaagtctcgcatgactgagatatttcgaggactccggcttgaatatgacatgtcacgattgacagggaacacgatggatagtcataggctcataacacatgctggaacaccaagctatgacaagcaaaatgctc

SEQ ID NO: 169653 - DNA, 225 bp, Zea mays
  Clone ID: MRT4577_86308C.1
attcggctcgaggggtgagacacccgtttctatgacaacctgtgcatttccaagccacgatgtgaaagtgaaatggggcaggaacgttcacatcggttcaatatgctatgggcgggcagggacatgaggctcgcgtaaggcggatccctagtctggaaaagcgtgcatccgagcagtatatattgggaaaaaagcaagactcttagtagctgatctctatcactc

SEQ ID NO: 169654 - DNA, 1198 bp, Zea mays
  Clone ID: MRT4577_86309C.1
gcgaaaatttatttttatagattttttcttgatgttaatgtccgcaggggtgcttacaataggttttcatgctgaaatctcaggttctgaaaaccacagctttcggttgaaatcaaatcaaatatacagactggcctctatttacaggacataacccatgttccatatccaatcacctagaactctattcaaaagtgaacatccacaccatcttcgtcactaatatcaccacatcaaaactacgaaacacaactggttccacagttttttctcgcaaataagcgccattaagctccatcttttgcagccatctcaaacgccctcatgaattcatttggtggctggcccccactgagttgatatttattattgatcacaaaatgtgggaccccggagatgtccgatgagtacttcttgagctcttcctgaacctcatggactcctttggtaggatcttcaagcagttcctcggccccttctatgcccacctttcttgcagcatccagcaaaacctgcttgtcaccaatgtactttccttggcaatggtaattgaggaacaattcttcaacaagagcattttgcttgtcatagccttggtgtccagcatgtgttatgagcctatgactatccatcgtgttccctgtcaatcctgacatgtcatattcaagcccgagtcctcgaaatatcctcatattggacaggaccgaacttcatcttgaagaagtcagatttcttgacgccctccttaggcgcgtcggggttcagaaagaatggatgccaacggacctcgaaatcaaacttgcccatgctttgctccattgctttctcaaggttctttttaccgacgaagcaccaagggcacactgtatccgagctcacatcgatctgaatgagcttcttgccggtgtctgaagccatgaattttgcacacccctccatgatgaatcaacttgccctcaaataattgcgctttccccccagaatagtacgatacaatcaccatttcctgaagcaaaggcgcctaacaaattagcataaacaacgagagtaggtgaaacaaagaaacgaaccctgggagtgccgagtttcgcgagggacgggatgcggacgtagagcaggcgatctggcatgcacaagcacggggagatccttcgttttcctccacagcttcgtcgatagagattcctcgtgccgaatt

SEQ ID NO: 169655 - DNA, 341 bp, Zea mays
  Clone ID: MRT4577_8630C.1
tggtccctcgagtccggccggggtgcattgcctctgctctcgcagacgtgctcgcacgcggcggcgagcccgatagattgactgattgagccctacgaccctcaatctcccccgcacgcccgcgccgcggtttcatggcctggggcgccctgcgcagccgtgtccttccgctcccggcacccgccgccaccgccgcgccccacggtctcttcctacgcttccttctctccaccgcggtcccgcaccacggcaccaccaccggcgccgccgcctcgcccccacggtttacgccgccgcagggggagctgcggctggggcgccgctccccatgacgccaccct

SEQ ID NO: 169656 - DNA, 186 bp, Zea mays
  Clone ID: MRT4577_86310C.1
ttgtattttttttttttttttttttttttttggttgtttgttttttccagctgtcctctgaatcaactgaaccgggccctggtgaaccgagccgtgcgcagcagacgcaaagaccggaccttgggacacaaaacacaaggatggcgaaaaaacattccccaccgtgtcaagagggagaggccaact

SEQ ID NO: 169657 - DNA, 2098 bp, Zea mays
  Clone ID: MRT4577_86311C.1
tgcttctccatccttccacgaattacacgagggaagaacgctgatgaacaaatggcgtaaatctctatcgacgaagctgtggaggaaaacgaaggatctccccgtgcttgtgcatgccagatcgcctgctctacgtccgcatcccgtccctcgcgaaactcggcactcccagggtgtgcaaaattcatggcttcagacacccgcaagaagctcattcagatcgatgtgagctcggatacagtgtgcccttggtgctttgtcggtaaaaagaaccttgagaaagcaatggagcaaagcaagggcaagtttgatttcgaggtccgttggcatccattctttctgaaccccgacgcgcctaaggagggcgtcaagaaatctgacttcttcaagatgaagttcggtcctgtccaatatgagggtgcgatgtctcgcatgactgaggtttcttcctgtgaacttgccctatgatatttcgaggactcgggcttgaatacgacatgtcaggattgacagggaacacgatggatagtcataggctcataacacttgctggacaccaaggctatgacaagcaaaatgttcttgttgaagaattgttcctcaattaccattgccaaggaaagtacattggtgacaagcaggttttgctggatgctgcaagaaaggtgggcatagaaggggccgaggaactgcttgaagatcctatcaaaggagtcgatgaggttcaggaagagctcaagaagtactcatcggacatctccggggtcccacactttgtgatcaataataaatatcaactcagtgggggccagccaccaaatgaattcacgagggcgtttgagatggctgcaaaagatggaacttaatggcgcttatttgcgagaaaaactgtggaacccgttgtgtttcgtagttttgatgtggtgataattagtggtgaagatggtgtggatgttcactttcgaatagagttctaggtgattggatatggaacatgggttatgtcctgtaaatagaggccagtctgtatatttgatttgatttcaaccgaaagctgtggttttcagaacctgagatttcagcatgaaaacctattgtaagcacccctgcggacattaacatcaagaaaaaatctataaaaataaattttcgcaatgctgtaagtttcagcaaacgatcagcgctatgtacacaacacgcaggatttagcttgggtcttccacttgccgtctgggaagacttccatcggcggggtcattcatcctcattgaacaacatagtctttgcacagaccgggcaagcctggctcctttccatccactcgtaaatgcagctaaggtggaaattatgtttgcattgcagtgcaatcttcggattctcataatcatattcttccaggcatactggacagtcatcctcactgtcagaggaatcacagaattgtactccatcatccattcttgaaccttctgagtgctgttttggtgaggacgcagaaaccttatgagctgtgcaagttgacccagtatgggtattcttagtttctgcaggctgtcctagtttctggacatgcgttggtgctttgtcgtgtcctgatacaagtgggtgttgcaccatgcgagggctggattgaggatcatcgtaaggcaaaggccttggagggagacccaaagtatccaatgaatccacttgatttgcaggaggactccttccaccatcaggtgccacccgtgatatcacatctgtgacaagcagcagagcccgagttcaaattgtggtaataatggaaaggccatagtaggcacaagcagctcacgggcggcgctgccgagacgtcctccgagcaccccatgcagcaaagcagggaccccatccctcgcctccccccttccaagttcgagccgagcagaggattcttctagttctagcacgcaggagcggacccagtgaagaacacccgatcggtactgccgggtgctcgttgcctgagaagtagaaggagccgacgaagacctgcgcatctggcggcggcggtagcctagtcgtatatagggagagagcagagatggaatagcccgaacgagtcggagtcctcccg

SEQ ID NO: 169658 - DNA, 1396 bp, Zea mays
  Clone ID: MRT4577_86312C.1
ggccgcttttttttttttttttttctgtgtaaatggtaacaatcaatctaaatgcagctgtgtatgctagctttttttttattcctttcgaatatcaaatctgaactttgttgttttctgatatcttgcacacatcctatcgaaccaaatgtaaatacagaccgggctctgtttatggggcattctaacccatatgccatatccgatcgcctagaattttattcaaaagtgaacatccacaccatcttcaccactaattatcaccatatcagaactacggaaatacaactgattccacatatttttcgcaaatcagcgatgagctgtgctggaactttattgttaaattcggctcctattcctttttaacatatgcgaagactactggaggagctccttttaaatgccattaagctccatcttttgcagccatctcaaacgccctcatgaatacatttggaggctggccaccactgagttgatatttatcattgatcacaaaatgtggtaccccggagatgccagatgaatacttcttgagttcttcctgaacctcatcgactcctttggtagggtcttgaaacagttcttcggccccttctatgcccacctttcttgcagcgtccagcaaaacctgcttgtcaccaatatactttccttcacaaaagtaattaaggaataattctccaacaagagcattttgcttgtcatagccttggtgtccagcaagtgctatgagcctatgactatccatcgtatcccctgtcagccccgacatgtcatactcaagcccgagtcctcgaaatatctcggccatgcgagaaatgacacgctcatactgaacaggaccaaacttcgccttgtagaagtcagatttcctgacgccctccttaggcgcatcagggtttagaaagaacggatgccagcggacctcgaagtcaaacttgtccctgctttgctccatcgctttctcgaggttctttttgccgacaaagcaccaagggcatactgtgtccgagctcacatcgatctggatgagcttcttgccagtgtctgaagccatggattttgcacacctgggagcgccgagtttcgcgagggacgggatgcggacggagagcaggcgacctggcatacacaagcacggggagatccttcgttttcctccacagcttcaggcttcagcgctcttccctcgtctagttcgtggaaggatggagaagcagtcgcggtctcgcggaatttggtttgtgcgacggctacttgctcccggcgggctcggttcacgccttcacggtcccgtgctctactgctctcagcaacctgccaacccacccctggacctggtccacggtaggcacgtgagggcgtgaggcgctctgtctttcccggccgg

SEQ ID NO: 169659 - DNA, 245 bp, Zea mays
  Clone ID: MRT4577_86313C.1
cccactcgtcccgcagccgctgcagcttacaaccaccaccaccaattcatctaccgagtccgttacatctgacacctacgtttcacctgccacctcccgttcatataccaccccctatccacctttcgccatcagtccacctatcatcatccgttcaagtgccgtccacaattcatctgccaacgtcaccatgccaataccctactcaaccaaccaagtcttaaactcatacccatacacaccca

SEQ ID NO: 169660 - DNA, 407 bp, Zea mays
  Clone ID: MRT4577_86314C.1
attcggctcgagcgcaagcaatggaagaagtactgctggattctccattctaaacttgagggggttttgaacggggggggccggcggataaaggcggcatggactcatcagtagctgtatggtcatgcggcataatctaatttgtcgttattgtcgaattacatacccttttattaccattggatgctagtatgtcaacgaactgcattgaccttccaatctaactacctacaaagaacggaagttcttcaattactacagtcaaactcactatatacatcagatacactgaccacaaggcactataaagaatcactactcgagagaatcatcttagcttgctggaaaagaggatctctaccaaacaaaccaggattttttttaaatcagaaggtaactgactgtct

SEQ ID NO: 169661 - DNA, 251 bp, Zea mays
  Clone ID: MRT4577_86315C.1
attgggtacctcgaggccggccgggagaactcattctcgacgacgttgtcgccatctgccactgctgctgactcactaacttgtgaacgacgtggactaaatgcttggtagatgctgtatacccagcctcaagagcacataccgtagagttcgggaatgccgagaactccacttacccgagcatactacatactaccatgtactggaccatgaggaaggctgccgatgatctcctgctactgacgtgcacc

SEQ ID NO: 169662 - DNA, 236 bp, Zea mays
  Clone ID: MRT4577_86316C.1
gccacttccattattacacactgcatataacgcgttacagatacgggcatttgaacacggatctgtgcaagcatataggctacaacacggacatgttgcgagcgtcgaatatcaaccaagttcctaatttcaacagcgatccttaggacatctaacaatacagaccatggtgacccgcagcgacaacaatttgtaccgcgccgaccacctatatagggtgaactcctgccgtctac

SEQ ID NO: 169663 - DNA, 387 bp, Zea mays
  Clone ID: MRT4577_86317C.1
ggcgccgccgcttcgccgctgcccgtttcttcgaagcactccgaagctgtcctgccatggacagctccgccactgacggcgcgaggctaccgccgccaagggccgggagtcgcctctgcgtcaggtgcggcgagaggaaggccgcgctgaagcggcccaaaaccctagaacagaattctctgtttaaagctggtgagcgtgtggcaatcggagcttctggtggaaaagattcaaccgtgcttgcatatgtgttatcggagttaaaccgtcagcacaactatggtcttgatttgttccttttatctgtcgatgaaggaatcacaggatatagagatgactcactagaaactgttaaaaggaatgaaatacagtacggcctgccactga

SEQ ID NO: 169664 - DNA, 1483 bp, Zea mays
  Clone ID: MRT4577_86318C.1
gaagttcggaattcggctcgtgtagctccgcctcttcgccgctgcccgtttcttcgaaccactccgaagctgccccgccatggacagctccgccactgacggtcgcgatgctatcgccgccaagggccggtgagtcgccgccccttctcactgccggtccaggcgccgccgcttcgccgctgcccgtttcttcgaaccactccgaagctgccccgccatggacagctccgccactgacggcgcgaggctaccgccgccaagggccgggagtcgcctctgcgtcaggtgcggcgagaggaaggccgcgctgaagcggcccaaaaccctagaacagatctgtagggaatgcttctatatcatctttgaggacgaaattcatcaaactattgtccagaattctctgtttaaagctggtgagcgtgtggcaatcggagcttctggtggaaaagattcaaccgtgcttgcatatgtgttatcggagttaaaccgtcagcacaactatggtcttgatttgttccttttatctgtcgatgaaggaatcacaggatatagagatgactcactagaaactgttaaaaggaatgaaatacagtacggcctgccactgaagattgtttcctataaagatttgtatggctggacaatggatgatattgtcaaagcaattggtctaaaaaacaattgtactttctgtggagtttttcgacgtcaggcactagatcgaggtgctgctctcctgaaagctgataagattgtaactgggcataatgcagatgacattgcagaaaccgtcttgctgaacattctgcgtggtgatattgcaaggttaagtagatgtacctttataactactggtgaagatgggccaataccaagatgcaagcccttcaagtatacctatgagaaggagatcgttatgtatgcatacttcaaaaagctggattacttttccacagaatgcatctattcaccaaatgcataccgtggttttgctcgtgaatttattaaagatttagaaagaatgaggcctagagctatactagacatcataaaatccggtgaaaatttcagaatctccacaacaacaaggatgccagagcaaggaacgtgtgaacgatgtggctacatttctagtcagaaattatgcaaagcatgcgtcttgctggatggattgaatcgaggcttgccgaaactaggcattggaagtaccaaagcaggtgctagagctgacagtgatggtaagcaacgcaccaaacgttcagagaggaatacatcgagtctacaagggaaacatgggaacttcgatttctagatctctactgctatttttctccaaaaattgtaataaattttgatagtcattggtcatttagtggattttcttctaagccactgttgtttatctgacttcattctgcagtcgtgaaccaaaagaaattatgtggccacaattttgacgccatctttagtttgcttaaatccc

SEQ ID NO: 169665 - DNA, 203 bp, Zea mays
  Clone ID: MRT4577_86319C.1
gcaaacccaaccatcttcccactgcagaagaggggaagaagcaatcgacagaattcaaattggactgcacagaccgacgtcctgtaccacaccaataccacccatctgctcatctcgtgacagccaccttatagcctatgctcctatagactataatatcatcctatagtactataatatctctatagcgcattattaggtct

SEQ ID NO: 169666 - DNA, 1489 bp, Zea mays
  Clone ID: MRT4577_8631C.1
ggctggttccttcgacagcggggatatttcatccattgggtacctcgaggccggccggggtccaaaactgtctcttccacgtccttccgggtcctatcgctcctctccgtcgccggtggagctcatggcatcctccatggccgccgccgccaccgccctcccgctgccgtccgggacgacgcagaggccgtctgcccagggccgcctcctcttcaccgccgcacccgcccgctcccgctgccgctccctccgcctccgccccgccggccgccggtcggcccgctcctcgcctcgggccaccaaggctgtggtggcagcgttggctgatcctctcaaggtcatgatatcaggagctccggcgtccggcaagggcacacagtgcgagctcatcaagaccaaatatcaactggcgcacatctccgctggagatttgttgcgggcggagatcgctgctggctctgagaatgggaagcgggccaaggaattcatggagaagggccagctcgtgcctgatgagattgtcgttaatatggtgaaggaacgccttcggcaaccagacgctcaagaaaatggttggcttttggacgggtacccaagaagctattcacaggccatggccttggaaactcttgaaatccggcctgatactttcattctgttagatgttccagatgaactccttgttgaaagggtggttggaaggcggcttgatcctgtaacagggaaaatatatcatttgaagtattctccgccagagaatgaagaaatcgcttcaaggcttacacaaagatttgacgatacagaagaaaaggttaagttgaggctggagacttattaccaaaatatcgagtccttgctatcaacatatgagaacattattgtcaaagtgcaaggagatgccacagtggatgctgtctttgctaagatcgacgagctgctgggttctatcctggagaagaaaaatgaaatggtgtccagcacatgagcaaggtaaaaatgattgggtgcagtgcagatccgacaagttcatgtaatgcaagtcacctctcatgataggaacttctccaggggaatatatctgaagcacaggacgacacgtacaagtaatgtaagccagtctcacgtaatggaaatttctccatgtggatgtggtcaaagcataggattttttttcctccaattattaactgtacgcgaatggaagcgacagatcattcgtaggttgtgagggcttcaaagatcatctgctgctgtacatgttttgttgctgtcttgtgaacatacatgtcttgttgtttctcaactggaggaatgctgttaacctgctgtatcatttccttgaatggcttatgtgagagggaggaggacctgagcagcagctcttgcaatctttgtctaaattccttcggatggtgaaggccatttcgcctgttctccgaaaagtatattggctgcattttccgaaaaaaaaaaaaaaaaaaggccccta

SEQ ID NO: 169667 - DNA, 275 bp, Zea mays
  Clone ID: MRT4577_86320C.1
gtgttaatgatcgttatcctctgctcactcatggatacgtttgttcatagtctaatgtcttgggataccctgacgcaggaggccgggttgtctacatttttgatcttgtgcgcgctatggagaacgaaatgctttttaggatcaagaatcgacggcattaaataataacctttatgtttatgttggggggggtgctaatggggcattttttttgtttttgggaggctgccatttatgttgagttagggagggttaacgatctaccagttaatatt

SEQ ID NO: 169668 - DNA, 831 bp, Zea mays
  unsure (1)..(831): unsure at all n locations
  Clone ID: MRT4577_86321C.1
gctctcccatttgcctccctcccccgtgggcgcggggtgaatagtgcaggttatagtttcgtgcgtcacctcgaccgatttgacggatccgctctaccggacggtgctctgctcgtcgtctactgagattcattcgagcgcgcccctaccgtatccacgtatccgttcctatccaacgcgcctcgcgatactccggaccgatctactcgatcgtgttcttcgctgacgtcatcgcatatgaaagatggcttttttgtgacgaagatggtggcgacggacctgccgctctacctctgctggaacctcatcgatgtcaatttcgcgagctggaacgtgaatctcttcatgagctgctgcagcaactacaccggggcggccggcaacggttctgcgttctacttccctcgatggtcgtactactcctgccttgatcggtgggatcgttttctcacctgcctggcgggcaccacgagcacgccgtgtcgccgcgacagcctgggcaccaacgtctcgtcatctctcatcacctggggcatcacggcgctcgccttctggctggactgctaggagatccacatcgtggtgcaccgaccggtgttccctgcgcgtgctgaaggacttcttcatcatcctcgacttcacgcagctcctctacgagctcatgctccacacgggactcttcagcgatagcgctggataccgagaccactactacttcttctgccatgcgctcggagagcccaatggagtcaccacggtctgaagattctgatccatgcagctcgtcatgtgtcatcatatcagacgctgctgnactgtgatgacgtaata

SEQ ID NO: 169669 - DNA, 771 bp, Zea mays
  unsure (1)..(771): unsure at all n locations
  Clone ID: MRT4577_86322C.1
cggacgcgtgggcggacgcgtgggcggacgcgtgggcggacgcgtgggttccattcgcttagtaaagttagacttctgagtagtgtcatatactccaatcctaatccaagaagatgaatgagatttgaagttattgtttctatatttctcagcgtagtagtagaaagtgatgaagatatagtgcaaactttgatatattcttaaacattgtttggcacagctagttcatatttcaccatgctgtattactaaaggtcagatgttcctaagtatattgtattcttatcagcgttctgctctggaagatatccaaaagatgattcgggagctgcagcttgatgagaaccggaaaagggaattggcaactgcccttcacgttcagttcaaggattggttatacgcttcaggcaatatccgccagctctactgtctacagggcgattaacgatgggatttgcaagactgactacccttttgccgactcctactccaaaacattcgacaattgtcgaaagctgaccttccttccctgggagagaggattcccacccgcgcagaaggatgtgaagatgtactgttacctacttttttacagattcatttgggtatacccctctgccccagtggaggtactaattaggatgtaatctccaagcctactcttttttttggcccttgataacgtccacgagtatgtaatagggggactgatggatcatacgttgttgaatacccctctcttcatncccgttttgccccaccccacccccc

SEQ ID NO: 169670 - DNA, 579 bp, Zea mays
  Clone ID: MRT4577_86323C.1
aatggcctctctagatctttcaatctatcattgcttactagctctctttgccgtgtgtaccggacgagaggggaaagtaggcaagcacgtgtaaatacctcctcgagcgaaggagcaatccagctccaacagcacacgagtacatcgccatgccgagaatcggagaagacggcaatggccgagacattactattaacatcagggtgatggccaaactcacggcctgattccgtttgcacacccacggacgaagagctcatggtgcactacctcttgatgaaggccctctccatgccgtgccccgtgcccatcgtccccgaagccaacatctaccggtgcaacccctgagcatctccctgcgcaaggtgttgactacgagaaaagagtgggttatctctcgcccccacggagcgctagtaccccaacatggtccgcctcaaccccaccaccgggagctggtactggaatgtcaccagcacccacaggtcatgctcgacgtgtgcatggccacttaacacagcggcgccaagatattgcgactggtgaacaaggacacttgtcttctatatgggaacgacg

SEQ ID NO: 169671 - DNA, 269 bp, Zea mays
  unsure (1)..(269): unsure at all n locations
  Clone ID: MRT4577_86324C.1
ctcagccacactcatggatctctttctactttatctacgaccgaaactactacgaggcgtgtgccttcacctatcggtctcactacgttcacaagctcctatctatgaacaaaatcccttacctgatgatccccctgaacatatctcattacatcattatcgncaagctcattctgaacctgaatcttctccttaacctgtcctcctttgtcaccactttgatttagccctcaagcaacaaactcattatttactccttcaacactaac

SEQ ID NO: 169672 - DNA, 571 bp, Zea mays
  Clone ID: MRT4577_86325C.1
gcagattctgttgagggtgatggtgatgattcactggtgttgacaatggagacttttgagcaccttggatttctagttcaattctcagaaggaacttctttaagccaggctgctacattgtttgcatgctcagatccagacatgcctgatgtgcctgtccctgctgctcaggttcttgattggatgtcacagaaaatagctttttcactggaatattctgctgagaggtctgcagcaaaggaaagcaaccagcaaaccatgtctgatcttgatgtgaccatggctgaggccaatacaagtcacccacggaacagtacaccaagtgccaatcctgcatactacagaaatgtaacatttgtggagggcttttccaaaacctctgttgtcaagcatgcatctgatgtcaaagggaattctataaaggtacattgatagtttgttgccaatagctaacttctggataatggtcgtagatagattttaatatttctcctttagaaagttttggagtatctctgtcaaatatgcaaagttggatttcaaaatccataaatataaactatggtttcat

SEQ ID NO: 169673 - DNA, 2331 bp, Zea mays
  Clone ID: MRT4577_86326C.1
cgggttatgggacatcccaaagcagaaagctagttcatatttcaccatgctgtattactaaaggtcagatgttcctaagtacattgtattcttatcgccccaacataccccccccccgcagccctcgtggaggccaacacgaccccccgtggtgtcaattcctcctctgctgtcaattccgacgccgcactcgcagatcttcccttcgtcctccacgccccacccctcgcgtcgccgctatggccgacgaggccctggaccagccgccagacgcggccccgtctccgtctctggccccagcgacgccgccggcccccgccacctcgtcccccgcggcgctgctccgcccgcgtcgggaggcgttcgagcatgggctcctgcccatccccaagctcatcttcccggagggcatgctagcgcagaccctcgcccagctcaaggagaagctcgccgcctcagtccccgacgggcgcgtgcgcgctgcggccctggctgaggcgctgcagatcccgcaggagcaggcggcgctcgccctcggcacgctcgcggcggtgctcccggccgaggaccccgtgcttggggacggcgccatggatggtgctgccgccgacatccgcgacatgctgctcttcctctatatccagtcttacaagcgcctcgttccgcggagcgcgcacaaggactcgcccgccgtggcggacgtctggccgtccacctccgcgttcgatgggtacctctccgcgctctccccgatccagcttgttcgcagcaacagccgtcgttttatgccttctcaagctgatgaagaaattcatcagttgtcctatctgcaaaagcatatggcgaatattcttactctcttggcagattctgttgagggtgatggtgatgattcactggtgttgacaatggagacttttgagcaccttggatttctagttcaattctcaaaagctgaacttccttaaccaggctgcgttttttgcatgctcagatccagacatgcctagatgtgcctgtccctgctttcttacagattcacttgggtatattctctttgctgagagttgcagcaactaattaggatgtaagcaccaagcctactcatgttttttggcccttgataacgtccgtgagtatgtaatagggaactggtgaatcatacgttgtaaaacatttcttcatcccgttttgctaaatggctcgtcatgtcaaccctctattggatcaaatgtattgtactcactgatgtcaaagggaattcgataaaggttttgaactgccatgattctgttatctacatattagcaccgctgaagtatgctactgtgtacggttgttctgatgctacggttgttcttggtgctgttggtaaggtagtaaaagtggagcattgtgaaagagtgcatatcattgcagctgcaaaacggatttgtattgccaactgccgggagtgcatcttctacctaggagtaaatcaccaacctcttgtattgggggacaaccataaattacaagttgctccattcaatacatgctacccacaactgcatgaacatatgatgcaagtgggtgttgatcccagtgtcaacaaatgggaccaaccttttgtattgggagttgtggatccacatgattcattatcccatcctgctggggttgcagatgttaaagctgaatcagcaacatgtctggatcctgatctattcaccaattttttgattcctagttggtttggggatgaagggcaagagcctataaactgcaatcctttcccactgcctgaaatttatgggacatcccaaagcaaaaagcgttctgctctggaagatatccaaaagatgattcgggagctgcagcttgatgagaaccggaaaagggaattggcaactgcccttcacgttcagttcaaggattggttatacgcttcaggcaatatccgccagctctactgtctacagggcgattaacgatgggatttgcaagactgactacccttttgccgactcctactccaaaacattcgacaattgtcgaaagctgacctttccttccctgggagagaggattcccacccgcgcagaaggatgtgaagatgtactgttacctacttttttacagattcatttgggtatattccctttgctgcgagttggaggtactaattaggatgtaatctccaagcctactcattttttttggcccttgataacgtccacgagtatgtaatagggggactgatggatcatacgttgttgaataaacatttcttcatcccgttttgctaaaaaaaaaaaaaaaaaaacgaaaaaaaaaaaaaaaaaagcggcc

SEQ ID NO: 169674 - DNA, 117 bp, Zea mays
  Clone ID: MRT4577_86327C.1
ccgacgcgtacggttgttggctactgcataatacgtctcctctaggaggcgcggctgtctttcttggggacgtaaaataatagggtcgccggctcctaataaacatcgaactgattc

SEQ ID NO: 169675 - DNA, 285 bp, Zea mays
  Clone ID: MRT4577_86328C.1
atgaaccttgtgcaccgacacgcatccgaccagggcctctagttcgaccactcgcacaagtccatggccaaaatgggcaacatctcgacgctcaccgagagcgccggcaagatcaggcacaactgccagagggtcaaccacttctacctcacatagagcggcacatccgtgcagtggtcttatcgcttctggtacatttgtggatgcatgcatcatctttcatacttggattgaactgtgcagtattcacaaatgattgtaatgaactgtttagtttggtgccca

SEQ ID NO: 169676 - DNA, 2135 bp, Zea mays
  Clone ID: MRT4577_86329C.1
aacaaatgaagggcaagagcgagtgcatcgcagatctcccccttccctccacgcctctcgcgtcgccgcgatggccgacgaggccctggaccagccgccggacgcgtccccttctccgactccggcgacgccgccggtacccgccaccccgtcccccgcggcgctgctccgcccgcggcgggaggcattcgagcacgggctcttgcccatccccaagctcatcttcccggagggtacgctggcgcagaccctcgcccagctcaaggagaagctcgctgcctcagccccggacggacgcgtgcgcgccgcggccctggcggaggcgttgcagatcccgcaggagcaggcggcgctcgccctcgccacgctcgcggctgtgctcccggcagaggaccccgcgctcggcgacggcgccgtggatggttctgccgcggacatccgcgacatgctgctcttcctctacatccagtcttacaaacgtctcgtcccgcccagcgcgcacaaggactcgcccgccgtggcggacgtctggccgtccacctccgcgttcgatgggtacctctccgcgctctccccgatccagcttgttcgcagcaacagccgccgttttatgccttctcaagctgatgaagaaattcatcagttgtcctttctgcaaaagcatatggcgaatattcttactctcttggcagattctgttgagggtgagggtgacgattcactggtattgacaatggagacttttgagcaccttggatttctagttcagttctcagaaggaacttccttaagccaggctgctacattttttgcaaactcagacccagacatgcctgctgtgcctgtccctgctgctcaggttcttgattggatgtcacagaacatagctttttcgctggaatattcttctgagaggtccgtagctaaggaaagcaaccagcaaaccatgtctgatcttgatgtgaccatggctgaggccaatacaagtcactcacggaacagcacaccaagtgccaatcctgcatactacagaaatgtaacatttgtggagggcttttccaaaacctctgttgtcaagcatgcatctgatgtcaaagggaattctataaaggttttgaactgccatgattctgttatctacatattagcaccgctgaagtatgctactgtgtacggttgttctgatgctacagttgttcttggtgctgttggtaaggtagtaaaagtggagcattgtgaaagagtgcatatcattgcagctgcaaaacggatttgtattgccaactgccgggaatgcatcttctacataggagtaaatcaccaacctcttgtgttgggggacaaccataaattacaagttgctccattcaatacgtgctacccacaactgcatgaacatatgatacaagtggctgtcgatcccagtgtcaacaaatgggaccaaccttttgtgttgggagttgttgatccacatgattcattatcccatcctgctggagtttcagatgttaaagctgaatcagcaacatgtctggatcctgatctattcaccaattttttgattcctagttggtttggggatgaaaatcaagggcctacaaactgcaatcctttcccactgcctgaaatttatgggacatcccaaagcaaaaagatatccaaaagatgattcgggagctgcagcttgatgagaaccggaaaagggaattggcaactgcccttcacgttcagttcaaggattggttatacgcttcaggcaatatccgccagctctactgtctacagggcgattaacgatgggatttgcaagactgactacccttttgccgactcctactccaaaacattcgacaattgtcgaaagctgaccttccttccctgggagagaggattcccacccgcgcagaaggatgtgaagatgtactgttacctacttttttacagattcatttgggtatattccctttgctgcgagttggaggtactaattaggatgtaatctccaagcctactcatttttttttggcccttgataacgtccacgagtatgtaatagggggactgatggatcatacgttgttgaataaacatttcttcatcccgttttgctaaatggctcgccatgtcaaccctct

SEQ ID NO: 169677 - DNA, 662 bp, Zea mays
  unsure (1)..(662): unsure at all n locations
  Clone ID: MRT4577_8632C.1
ggggaaccggncccccccctcgagttttttttttttctttttttttttttttttttttttttttttttttttttttttttttttttttttttggaaaattttggctttttttttccaacaaaaactttcacaaagtaatttgaaaaccttgccctgggggggtgttaaaacccctttaaaacccaaaaaaacaacgggtttttatgaatttacttattacccaggggccgggaattaaaaattttacattaaaaaccctttttttttaaaaaaccccgagggggctttctttggctttttccaaaacaacttctttttttgaaacttaattttgcccttcaggccacaaattgcccagggaaaccaaaaatcctttgggcctaacccccttttaaaaagggttgaattcctggaactggttaaaattttcccatggtttttcccaaaccttaattttataaaacttattgacttccccctcctttcctttaaaagggaaaaaaaaccttgggcccacaaccccttggggtttggccttaaaaagctttttaaaccccaaaaaaacattggcctttgtgggtgggcccattgacgggaaaaccccccaactcctggagctggagggcgttttttgttccccggaacgttttttatgccccctg

SEQ ID NO: 169678 - DNA, 1159 bp, Zea mays
  Clone ID: MRT4577_86330C.1
gatcctggtgatcggtctacatgctatgtacgccggtaacacgagttttttttttttttttttttttttttttttttttagcaaaacggaatgaaatgtttatttaacaacgtttgattcattagtccctattacatactcgtggacattatcaagggccaaaaaatgagtagaaacaggggggaaattaagcaatatcacatcctaattaatacccaactcgcagcaaagagaagacttggagaaatacgcaaatgaatctgtaaaaaataggcaatagtacatcttcattttttacatacttgtgtaaataccgcaggtgagcagggtgggagtcctttccatggaaggaagaggtcagcttcgacaatcgtcgaatgtttttgaggagtcggcagaggataatcagtcttgtaaattgcaccattaatcaccttgtagacagtagagctggcggatattgcccgaagcgtataaccaatccttgaactgagcatgaagggcagctgccaattcccttttccgattctcgtcaagctgtagctcccgaatcatcttttggatatcttccagagcagaacgctttttgctttggaatgcctcataaatttcaggcagtgggaaaggattgcagtttataggctcttgcccttcatccccaaaccaactaggaatcaaaaaactggtgaatagatcaggatccagacatgttgctgattcagctttaacatctgcaaccccagcaggatgggataatgaatcatgtggatcaacaactcccaacacaaaaggttggtcccatttgttgacactgggatcgacagccacttgtatcatatgttcatgcagttgtgggtagcacgtattgaatggagcaacttgtaatttatggttgtcccccaacacaagaggttggtgatttactcctatgtagaagatgcactcccggcagttggcaatacaaatccgttttgcagctgcaatgatatgtactctttcacaatgctccacttttactaccttaccaacagcacccagaacaaccgtagcatcagaacaaccgtacacagtagcatacttcagcggtgctaatatgtagataacagaatcatgacagttcaaaacctttattgaattccctgcctcgaggtacccaatg

SEQ ID NO: 169679 - DNA, 846 bp, Zea mays
  Clone ID: MRT4577_86331C.1
aatacttcttcccgctgtccgcaagggagagataaagggcaggctttcccccgtcccttatattttccggggggatccatctccgttctgcttgggcggcgtcttctgaggcgcaggctttccccccctccgctctcccccggcggccgattcgccccgcctcgctcggccctccaggtcagggaggcttttctcctaggagaggatcaatgtccaattatcacgacgatcacgtcgaagacatggaggatgattatgacatggacgaccccgctgaggacatggttgacgcccaccacgagcgaggtttaagagactccgattcggaggatgacgagtatgcccattcgaatgataagatcccagatacttcggcagcggatgcaagaaaaggggaggacatccaaggaataccctgggagaggctagctatcacaagggaaaactacagacagaccagattagagcagtacaaaaactatgagaacattcctaattctggagaagcagcagccaaggaatgcaaaccgactgtgaaaggtggaatgtattatgaattcagacaaaatactagatcagtaaaatcaaccatcctacattttcagctgagaaatttagtatgggctacatccaagcatgacgtctacctaatgtcacattactcagtgcttcactggtcagcgttgagtggtgtggacactgaacttatgaatgtccaaggtcatgtggcaccaagggagaagcaccctggagtctattagaggggttttctcagactcagttagtaccttggcagtcaaggacaatttgctggtagctggcggatttcaggggagctatctgcag

SEQ ID NO: 169680 - DNA, 172 bp, Zea mays
  unsure (1)..(172): unsure at all n locations
  Clone ID: MRT4577_86332C.1
gccacgacacgagggcgacgaagacgaacgcaggcgcnccggagnggaacgacaacgagngagccgacggcggggccgcgcggacccagcccgcaggaggaccaccaccggagggggagggnggcgcacnncgcgcgcgagcgcagcccggagcgcgaggagagagcgcgcg

SEQ ID NO: 169681 - DNA, 427 bp, Zea mays
  Clone ID: MRT4577_86333C.1
aagttggccttttggtttacaccttaatattaaaactggagtcgtcggcggaaccagggggtccttccttaaaggttgaagagcaggaccaccattttgtgggggatcctagttttcaaggcccttttgttttttggggttggggccaaaggacctgcagggccaaaaaaccattgctgttccggcaagtgcacaacttggtcggccttttggacctgcaacaacctcttaacaaagtgcgccgccacctgaaaaaactggttccccgtgtccacgggcaagggcgccaccaattccaggtgccgggatttcttccccgaaaactggggttgcaggatccactaaactaatccatttccaccatggccacagaagccgatggatcctttttccatatgcagtgtttcctccgtccgtccgcttagtt

SEQ ID NO: 169682 - DNA, 299 bp, Zea mays
  Clone ID: MRT4577_86334C.1
cgaggattcaagcgtggcacactccaccgggactagatctgcgctatagcaggctgcacggtcagactctggtgctcatcaataactttgcttcgttaagatcaagctagtgtgctgcactaaagtcctggtcagagggcccttccaagactagcgatggcgacatactatatatcaagggcgtcacattctggcctttgatagtgacaatacccctcatggccgaagaccctgaagagtgaatgtccttccgggtgacacactggtagctcaacggcctgatggctagcacttgcatg

SEQ ID NO: 169683 - DNA, 1516 bp, Zea mays
  unsure (1)..(1516): unsure at all n locations
  Clone ID: MRT4577_86335C.1
nacgtccacctcgncgcacacgaaccggtggccagctcacagagctggattttttccagcaagcacgagcgcctgaagcacacgtacatcaccgacagacaacatgcatctacccagattgatgctcaagcggtgtttgatgaaatgcagcaaggtgatacttcagttggtgtcgtacgtgatgttttcaacccgtgcctcagcgaatctggtttcgacaagcatctgaccagggccatcttcatcgaccttgactcaactgacgttggcactggcttcgggttgtggtccagcggggctaacaacaagaacacgtccatggttgagcagatgccgaggtacggggtcttcaggtcaaccaaagtcgcgaaggtgatggaggccatcgataggggtttatttgtgccacctgggagctctctataccacgatagccccttgctgcttgggtacaatgccaccttattagcacaacacatgcatgtggcttgcctggagctcctcgagaagaatcttcagcatataatttgcatctgggatgcaggcaaagaagagagtattgaaggtagaactctgcactgggttgttgctcatggccatcttagtgctattgaggctcttgcaaaagaaaatatggaccaggattctatgcacaatgaagggcactcgacactccactatgttgctgtttatgaaagagaagacgttgcagtggcagaagtgctcgtcaagcatcatgtcaaccttcagatcaaggacaaggttctcaacgcattgcccaatatacaaccatggccaccacccatgttgttggtgatacttgctgatggcgttcaagtcagacctctaccatggcccatctttttactgtcatgcaggaggagtctgctacggtgatgtctgcatcattcctgtcttagtacaggacactaatccagctcgtttaaaggcacaaacaattagcgtaccagatggagatgagcttggagactatgcacatgcacgaggatttgagatacttgatacactgtgctcagcgaaaaagagagttcaaatgagtgaggctactctgactgcaaaggcatatatggcattcttgcaagagatggcggaccatgggcatcaactgaatgccgttatgtatttttccatgatatctggattgacaaaagcatacagtgcatggtactcgatggattctatgagccgcagagcaactcgtcgtcatggaattgatcagcagcttgaggacaagctgcatttcaagcggtggggaatgtcagcagactgtcatgtgggaccgagatagatggcaagtgggagcatctctgcctacaaaagaggggaacgtgtaggccaaggggcatcgatgaatcatttgaagaatagaaacatctacttcacttctctgttcatcttcttcctctcatctcctcttatgtacctagctcctctctctagtaccattagctgctactctgatttcgtccagaaacatatacacaatgttcctttc

SEQ ID NO: 169684 - DNA, 210 bp, Zea mays
  Clone ID: MRT4577_86336C.1
caactaatctgtaacagtgaaagggtctctatctgagtgcctgacttggttacgtggtcggaatctctgaatagcactcctgacgtcctgggctcgactccccggagcgaatttctggttaaaaaaaatcccctcgtctgtcccaccccaaaccataggtctaaggaccggtcctggtccccaccctttcttacatgggcttaccgtgcc

SEQ ID NO: 169685 - DNA, 314 bp, Zea mays
  Clone ID: MRT4577_86337C.1
aggggggggatcaatagagaagagagccggaagcacagcacaagcggaacaacagacaggcaagggcaggaacggaagtgagaagggcgacacggcccaagcgaccgacaaaccggcgaaggagcagggaaagaacgaggccacgaagggcgaacaggaggagacgggcgacgagcaaacggcaacagccccaacacgcgcggaccgagagcaacagccagaggggaagaccgaaccaagcccaaacgcgcggagggaaagcagaacatgagcgacgaccacgggcaaagacccaggacgaccgcaaagcaacc

SEQ ID NO: 169686 - DNA, 223 bp, Zea mays
  Clone ID: MRT4577_86338C.1
aataacacatccactattttttcttttgttaagggccacctcccttgtttcgggcatggaaaactgggggggaagtttattccgtaactccaaatacaaaagccacggagtcagacactgtttttgattgcttaaagaatgccaaaaggctgcttatggtgacgcgtagaagaaacaaatcacggctgttttcacactttaagaacaaaacaggcaatcaaga

SEQ ID NO: 169687 - DNA, 298 bp, Zea mays
  Clone ID: MRT4577_86339C.1
cggggcggcccacacccgtccgttaacatttaatggggttggcaaaagcccattttgtttgttgattatcccacctggccattggctgttattaaggccattggatggggctggcccgttttcaaatggctctacataattgccttttacttcctgctgcccataataaatttcctaatcctgctttaccctaagtaggagggcttggaacctcgcccttaggaaaacctagggggtgccccgtccattgcaccggaagaattttcggttttgcctcgccccatatttgaccggatgt

SEQ ID NO: 169688 - DNA, 410 bp, Zea mays
  Clone ID: MRT4577_8633C.1
catcagatgcgttaattataccacaatgctcacttgctcctagcgccgtcattccacagttcctgccaccagatacttcatggggtttctaacacctagctgtgcgagcacaacatgcaacaacaagctctaggggcgagcgtcttacatcatccaattgcccaattgcaacaccaatccttgccacatgtaacaatacaagccatcacaactcagcagcaacaacagttctctaccagtgctgagccacctatacatggtgaaccctgccgcctacttgcaagatctgatgctagcatccaacccacttgctatggcgaacgtagttgcagaccagccacatcaacagctacgacctatcctgcctacgctcagactactagccatggtgaaccctgccgtctacctac

SEQ ID NO: 169689 - DNA, 210 bp, Zea mays
  Clone ID: MRT4577_86340C.1
ccggccgggacatacactcttgccacctcgtggggcaaaaatacatgctatgctatcgacacgcgcattatcaccacacagaagaataataccatggcgcaagcctcacagctcgacctcctcggcgttgtggaggctgatatccggcgacctcctaccggacgcactgggaaagagtacggcaagcaggggagacggtggaccccgtaa

SEQ ID NO: 169690 - DNA, 143 bp, Zea mays
  Clone ID: MRT4577_86341C.1
tgttcaatgcgctcaaacatttgatgctagagaagcttggcagagcattatggtctcaagccctctttaggaactcacaaacctagggagtgcctgccactgaaccacatcatgaggaacaggctcaagtatcctcttacata

SEQ ID NO: 169691 - DNA, 357 bp, Zea mays
  Clone ID: MRT4577_86342C.1
ttttttttttttttttttgagtcagaagaagggtttctcccatttgtttatgcctgctataggctcatagcgaccttacagtctaccgaatacattatacatgatactgtactacgtacggtcattacaaccctccagagccgctcagatatgtacaacaaaactgagacagcaaggttagctactccgacatcacaatcgtcataacagccagccaagctgcacaaaaaaatgggggctgcgaagcttcctcgttcataaagattatcgattgccttccaatgtcatgaactcgtcagcatacatgtaagagactggttttctctcattgtcttgcagagaactcattcttgagtc

SEQ ID NO: 169692 - DNA, 365 bp, Zea mays
  Clone ID: MRT4577_86343C.1
cctatctactggcaagatcacacgaagaaccaggaaggtttgctaagaaatgtgcaacacagcagtcatacggaagtagctgctgaactgaagagcatgaggaaatggtcactgtaccttgagaaacccaggaagtaccagtgagcgctgcgaagttgcccagggacgacaagtctgaagacgccatgatgtcgttcatctgcaaagatatacaagacccagaaccaaatcaaaaactgtaccgatcagaatccaaacatttgaaggaagtcgcagcggcagtgccctgaatttctggtgtccgtttacccagctcggagacgcgcctgccgccccgctgttccatcccatgtgcgcgacgtgct

SEQ ID NO: 169693 - DNA, 140 bp, Zea mays
  unsure (1)..(140): unsure at all n locations
  Clone ID: MRT4577_86344C.1
gcgcgttcgcttctgtgaccgtgtgagggtgcggtctacctttggattangtgttggtaccgggtggtggtgcgcgtttgggtgcgtccccgctatgaaaccagaccagaggagaatgggcaagggttttggtcggaggt

SEQ ID NO: 169694 - DNA, 400 bp, Zea mays
  Clone ID: MRT4577_86345C.1
acctcgagccggccggagtacagcttccacaagtagcgctactatagaccgtcttcatacagattgagtcggagggagcgaaccttcttccaatctggactgccggcgatcaagcaccagatgagtgcgggcacagcacgaggaaagtgtatccctagccgcagcgatcaagctggtagccagggcggaaagacgtgctggtaatacgaccggctacatgatgtttttagggcggccgcacaaatacccagagaccagaccttgggggacggagatgatcgctacaacaccttcttcacggagactggagctgagaacgaagctcatcgcgctgcgtttgcagaacctggaccacctgttagatacgaagcgagagactggaacctaccgacagctcttc

SEQ ID NO: 169695 - DNA, 1861 bp, Zea mays
  Clone ID: MRT4577_86346C.1
cccacgcgtccggacgagttgaaggacattaatgaccaacctcatggaacatgggaggaggtgtacagaaatgtgaaaagggtagataggttaaaaaatgaattgcatgaaagagatgacaaggagcttgagcggacaggtcagccactttgtatatatgagccttttttcggggaggggacctggccatttctgcaccagagctctctttatcgtggagttggcctgtcttcaaaaggtcgaagaccaggagcggacgatattgatgcttcttctcgtcttccacttctcaataatgtttactacagagatattcttggtgaatttggagctttctttgctcttgccaacagaattgacaaaatacataaaaattcttggatagggtttcagtcctggagagctacagcaagaaaggttagctgttctggaggcctttcaaaggatgtatggtgtacatcttgatcgtgacctggattctctgttacatatgcctaatgatggagacacgtggtctgtgatgcaaagttgggttttgcctacacggtcattcctagaatttgttatgttctcaagaatgtttgttgatgcactggatgcacaaatgtatgacaagcaccatcaaactgggcattgcatcttgagtctccacaaggaccagcactgctactctcgtcttctggagttgattgtgaatgtttgggcattccacagtgcacgacggatggtctatgttaatcctgcaactggtgaaatgcaggagcagcaccatctcagtggcaggagaggtcaaatgtctgtgcagtttttctcctacgccactctgaagagcatggacgaggagcttgcagaagagtttgacttggatcacccagacaggaggtggctctggccacaaactggagaggtcttctggcagggtctctatgagagggagcgtagcatgcggcagcatgacaaggagcggcggaagcagcagagcagagagaagatccagagaatcaagagtagagctcggcaaaagacgttggggaagtatataaagccaccacctgatgatacagttgtctcgaacgatacaacgactgtagatttgtagcattttgaccatactttagggtgataattcttaccgtggaaaattttggttcattctttcattgttacggctaatgtcctcggtcctcactgagtacccccggcaggtgtgaatatttttggtcagttttatcgtgccctctggtgttctgggtgctttacaggcgattttgtaacatatctaggccattaagtttaaatttgggttcccgtagcgtagatgcttttgttcttttatcttaggagccggatcatgccacaccaggagaaggagcggcggaagcagcagagcagagagaagatccagagaatcaagaatagagctcggcaaaagacgctgggaaagtatataaagccaccgcctgatgatacaggtggctcgaacgatacaacatcagtagatttgtagcattttgaccatgatgattcttaccgtggggaatttggttcattctttgtaacggctgtccttggtcctcactgagaacccccggacggttgtgaatattttgtcagttttgtcgtgccctctggtgtctgggtgctttacaggcgattttgtaacatatctaggccattgaattgtcaagctgccatcttaggtgtaaatttgggtttccgtagggttgtttttgtccatttcgcttatgagcttctctataacagacagttaacacttaacagctgctccgcatttgcagtctccttggtttcataatgagtcgactgatggtatcaatctgtcaagatatatttgggtgaa

SEQ ID NO: 169696 - DNA, 1261 bp, Zea mays
  Clone ID: MRT4577_86347C.1
ccccgcgtccgcccacgcgtccgcccacgcgtccgccgacccgtccggtgaatttggagctttctttgctcttgccaacagaattgaccgaatacataaaaattcttggatagggtttcagtcctggagaggtacagcaagaaaggcaaacttatcaaacaatgccgaatttgcaatcttagaagctgttcaatctcaaaagcatggagattccttctatttttgggttcggatggatcaagatccaagaaaccacacatataaagatttttggtccttctgtgatgcgatcaatgctgggaactgcaggttagctgttttggaggccttccaaaggatgtatggtgtacaccttgatcatgacctggattctctgttacatatgcctaatgatggagacacatggtctgtgatgcaaagttgggttttgcctacacggtcattcctagaatttgttatgttttcaagaatgtttgttgatgcactggatgcacaaatgtacgacaaacaccatcaaactgggcattgcatcttgagtcttcacaaggaccggcactgctactctcgtgtcctggagttgattgtgaatgtttgggcattccacagtgcacgacggatggtctatgttaatcctcagactggtgcaatgcaggagcagcaccatctcagtggcaggagaggtcaaatgtcagtgcagtttttctcctacaccactctgaagagcatggacgaggagcttgcagaagagtttgacttggatcatccggacaggaggtggctctggccacaaactggagaggtcttctggcagggtctctatgagagggagcggatcatgcggcagcaggagaaggagcggcggaagcagcagagcagagagaagatccagagaatcaagaatagagctcggcaaaagacgctgggaaagtatataaagccaccgcctgatgatacaggtggctcgaacgatacaacatcagtagatttgtagcattttgaccatgatgattcttaccgtggggaatttggttcattatttgtaacggctgtccttggtcctcactgagaacccccggacgggtgtgaatattttgtcagttttgtcgtgccctctggtgtctgggtgctttacaggcgattttgtaacatatctaggccattgaattgtcaagctgccatcttaggtgtaaatttgggtttccgtagggttgtttttgtccatttcgcttatgagcttctctataacagacagttaacactt

SEQ ID NO: 169697 - DNA, 815 bp, Zea mays
  unsure (1)..(815): unsure at all n locations
  Clone ID: MRT4577_86348C.1
cattgggtacctcgaggccggccggcaagtttactgttcttatcttatatatagaggcgtggatgccggccggggagcagcgtcgtggatcatctatcgtctagcgcgctagctatactggccagccggcgacgagaagacgatgaggaagacggcgtgcgtgaccggagggagcgggtatgtcgcctcggcgctcatcaagatgttgctggagaagggctacgccgtgaagacgacggtcaggaaccccgatgacagggagaagaactcccacctcaacgacttgcaggcgctaggccgtccgctggaggtcttccgcgccgacttggacgaagaaggcagattcgacgaggccgtcgcaggctgcgactacgcgttcctcgtcgccgctccggcgattccccgtccagacgacgatcctgacgagaaggaagtggtcgtcgaggccgctgcccgcggcgctgtgaacgtcatgaggtcgtgcgtcaaggccaggacggtgaggcgcgtggtcctgacctcgtcggcgtccgcggtctgctccaggccgctgcagggcgacgggcgccacgtgctgcaggaggactcgtgggccgacgtcgactacctcaccgccaccaagcctccttactgggcgtacgcggtctcgatggtgctgatggagaaggaggcgtgcaggtttgcgcaggagcacagcatcgagctcgtcaccgtgtgccccgtcgccaccgtggngcaaggcgccggcggccagaaagatccccgccagcgtccccgcctgcctctccttgctatccggtgacgttgcagcgttc

SEQ ID NO: 169698 - DNA, 424 bp, Zea mays
  unsure (1)..(424): unsure at all n locations
  Clone ID: MRT4577_86349C.1
tttattcgtccgctgactcgcttgggcgttgctgataggttcttggatagctggatgaatgatactgggcagcagccttagcaatagactattcatattggacgtcgtgatagctgccgatagatcgaggagaggattgaggtgtttatacgcgaggactatcgtaacaaacgcaacgagctgaagaggcagcagagtcaccgggaactgcacaggctgcaagctgagagcaaccctgacacgtgcatggaggcgctggcacaactgtagagcccgatgacaccggcccagagactgactccgacctggacgtatgcgtacagacttagacccccgacttcaaggagcactctacatgcgcatggcctactgcaagctcaggctgtcggatggccaccggaagatcgtncgctataccactgtc

SEQ ID NO: 169699 - DNA, 261 bp, Zea mays
  Clone ID: MRT4577_8634C.1
cgcgtgcgcaacggtactggcctcgttctggttgaattttgccaggggcacaacccacactggaagggtgtgccatggggaacagggagccgtgtgaccagtgccccaccaaagacgagctcctgccgtaataggggggtgagtggtactgaagcttctggaaataacaaggtctgatgagaggcctgcctgcgtgagtattgctgcttgcattcctgattacatgataataaaacgcatcgattagtaatatatgtcatg

SEQ ID NO: 169700 - DNA, 589 bp, Zea mays
  Clone ID: MRT4577_86350C.1
atttccctttccccacggcatcagcttgatcctcacctcgccatgtcgttgttctctctccccatctgctgcagtccacccgcagtaggcaccgcctccgagtcagccgtggacgacgcttccttccttcagcgaacgagctagcgctgcctgtagggggccagatatcagcacccctctccttcttcaacccgacgtctgccttcccagatgcgccctctcaaacaacggtgatgcatgttcgggccgctagacaaagctgctggtcttgagtgttggcaagctatggagcatgatgtgcttggagaacactcctatatgtcgcacatcgattttctgcagacctcattcggcagtacacacgccgctatggccggctctcgtaggatcgactccacgcagctagctaggaattccagctactactgtgagacacctcctgagcatgctgcactagctagatcatggacctctatcggggagtctgcgctgttgcatctgtacatgacacagttacggtacagtctgacaatgaacgagtgtgctctgtatactgtcccacatctttgtcttccgtaatactgactct

SEQ ID NO: 169701 - DNA, 815 bp, Zea mays
  Clone ID: MRT4577_86351C.1
gcgtcgcaatcatcctgcacgcccccactccacgccacgccacaccgtcaccgcaccaacccgagaaagaacaacagtggaggacaccggcagcatcagcaacacgctcgctctccaccccgacaaacccaagcaaagcaaccccaaacccaaagccaagcacaagcgcgagctaatctcgctccaggttccactctccaccacgattcctcgattatctcccttcttctccaagcttctagtcccctcccggtctcgcgccctcgaccccgcaccaaccagcccaagctcgggcccctcggtggtggttactaccactagtgccggtcggtggtgggatgcccgccgctgcgacggtggccgccgcccgcaaccgtttcctcccgccgccgactttcgtctcgccagtcgcaacccggtggtgccgccgctgacatcgtctgcctccacccccgcaccgcgcgatggaccccacctcacgccccgccgtcgtcatcgacaacggcaccggctacaccaagatggggttcgccgggaacgtggagccctgcttcatcacccccaccgccgtcgccgtcaacgagtccttctccgaccagacgagggccaccgccaaggggaactggctggcgcagcacagcgcgggcgtcatggccgatctcgacttcctcataggggaggaggctttagcccggtcccgttccagcagcacatacagcttgagctaccccattcgcaacggccaggttgacaactgggacaccatggagaagttctggcagcaatgcattttcaaattaccctcagtgtgaccc

SEQ ID NO: 169702 - DNA, 459 bp, Zea mays
  Clone ID: MRT4577_86352C.1
atgggcaagagcaagaaaggcggaagttcgtcgcaccactctggcgacaagcggaagcgcgagccgagccctccctcggaggacttcggtgattccgagtactcggaggaggagttttcctccgagtccgaggggtcgccggtctacacctctcccccggtatcgtccgatgactcggacgattcccaggggatcgccgccgaggtgtggacatacatccgggctgtcgagtgctccgggctcgagggctcggatgagtcggaggtctcctcggacgaggagaactcctctgactcgtccgaggaggagagcggcggtgacggcgacgatggaggcgacggtggtggtgacggcgacggcgacggtggcaagggcgacgacaagggcgacgacgatggtggcgacggtaagagcggcagtggaagtagcaaggccagtggcaaagcgccactggcttaa

SEQ ID NO: 169703 - DNA, 357 bp, Zea mays
  unsure (1)..(357): unsure at all n locations
  Clone ID: MRT4577_86353C.1
ccggccggggctgctcacaccgcagataagtccagtcctctccctcccctcacctagcgccgccacccgcgcccaccacgccgtcgcaccgccgctggtgaacggatccgtccatcccgtacaccggccttggcctcctcctccctcccctcaacctagctccaccactcgcgcccaacacgtcgccgcaccgccgctggtgaacggatccgtccatcccgtacaccagccatgtcctgacacactgacacacacctggtgggaggaggaggngncacctccgtccgccggcggcgcaggggaggagncggncntcctcnggggggngctgggntccggnnngctgcgcctcggggg

SEQ ID NO: 169704 - DNA, 672 bp, Zea mays
  Clone ID: MRT4577_86354C.1
aaacggcgggggggggggggggccagaagctctgataccaattgaaagtagcctagaggggggtgaataggctacacctgaaaattttcaataaaaacttcgacataggttaaattaaagttgcactggtgcaaaccggttcagttgatgttgattacaactgaacaagtttgaacctgctcaacttagattagataatctgttaaacaaatacgaagtagtgaagaatttagctaaagacttgccctacacaaaatctactcgaatggataatatgaaccaaccaacgaatttaaagcgcttaacaagaacacgcaatataacccgaggttcggcaaccaccacaaaggtgtcctactcctcgttgaggagcccacaaagggccgggtcttttccaaccctaatcctccacaagccgaccacaaaggtcaaggcaatctcttctcaaataagctcaaagagcgggtgatacaaacttcttggggtcgtccacaaatttggagactcccaagcaacctctaaccgtcaaggaacacgaggttccaagagtaacaaatccgcacaaggttaagtttgcaacgagctcaagaacaaagagaataggagaatcgagatgaaattaacagcgtgttagatcgagttcacctcacaccagagtcctttaaatgattg

SEQ ID NO: 169705 - DNA, 428 bp, Zea mays
  Clone ID: MRT4577_86355C.1
aaaaatgttcccgcccggggggcccctcccaggggggaattcccaaacactgggggccggcccctgggggccccaacttggggccccccttgggggacccaggggggtaggtgtttcccgggggaaattgtcttccggaaacaattcccccccaccaactaccccgaaacataaagggggaagcctggggggccaaaggggggggcccccccacattaattggcttgcccttactggccggtttccaagggggaaacctggggggccaaaccctttaaggaatcggccaaaacgcagggagaggccccctgggaaaagggcccttttccgttggcccccttaccgactccctggacctgggcctttgggtggggggagcgggtttaggccacccaaaggcggtaactccgggggccacaaaacggggg

SEQ ID NO: 169706 - DNA, 382 bp, Zea mays
  Clone ID: MRT4577_86356C.1
tttttttttttttttttttttttggcaaacaaacattctggcaccggtgggaacccatagccaggtattttaaaatcttagcttacatgtcatgctatatcattttttcctaccatttaaactttcacctttactgaatacattactttggggagatgccttaatggaaccaagctgttttaagctgattgcggcaaaacaatgggtgaaacaactcaaaattgggatgcagcaaaccaaacttggatcgactagccagataaaaatcccctgcacttaggaaaacttgctttcctatcagtaaactgaccgggggataaccctttgtgcaatccaattttatttattcccttttcaacttggaactggttctttaatttgg

SEQ ID NO: 169707 - DNA, 375 bp, Zea mays
  Clone ID: MRT4577_86357C.1
ccgccccgcgtccgcggacgcgtgggcggcgcgtgggccatgatgatgggcagaacatgccggccatggctggacttacagtaccagtgccagctgcccactaccgaccaaccagtggtgtatcagtccattccgccctactctgattatgatattagtgaaatctcctgtgtcctccctttttatataatctttcaaccgcctgagaaaactcacggactgagtatatattggaaaaagcaacaattgctttgaagaagcattggatgataagggttgggaatacaaggttgatgaaggtgcgggcgctttttatgggccagggggcggtctccaaattgaggatgctcttggcggggggggccgcggccactg

SEQ ID NO: 169708 - DNA, 256 bp, Zea mays
  Clone ID: MRT4577_86358C.1
gagctatcagtcggcggccgccctttctttttttttgtttgtttttttcaaggtttgtacggctaatccatcaaataaatgaaatggggaattccccccgcatgggactcgaggactaactcgccccaccctaccaatgacaccatataaaaccgtcgcacgagaagcttgaacaaatacattggtgaaccatgggggcttaggctcataaagttacaagggttcaacgggcgaatttgatgctagcctcaaaaag

SEQ ID NO: 169709 - DNA, 287 bp, Zea mays
  Clone ID: MRT4577_86359C.1
tcacgcatccgcatcattgcgatctctcgaatcttggagcttttaacctcagccgtcaaagctatctccggtcatgacgaccagggtcaccgcgtattggtgcactctatcaatctgtctatcataccatcgcagttaaggcggcgctcgctgattttagcgcgacttatgtcttcggcgtcgactgctcaggctcctgagatactttcaatgatatcattgacaaccaggtagccactccttccggcctcgtcgacgacacggtagcacatgttttcggtctcttt

SEQ ID NO: 169710 - DNA, 855 bp, Zea mays
  Clone ID: MRT4577_8635C.1
aattcggcacgagggtcgcacggacccgtccttgctaattgctcactccatcggcgccgggtcatcctcgtggccccgtgccgcaccgcgaaaccaaaatctcgcaatcctaacctaccctagcgacctagcgccgtcgtcgttcgacctcccctcgccgcgccgggcccccaagagggtctcaggccatagcgaggagccggggttccgctccgacccgaatccgagcctcccccaggacgcagcgggtctcgtttccgtactcgtagcaggaagtttcgcgcgagggattgattgtcgagctagagatgtacgggcagggagggagcttcaatccacactatcgccatggcccgcctccgccccagcagcaagctggggtaactgggtccttcccccagcaacctgtgccaccgcctcggccaccttacccacagcaccctggagtgcggcctccggctgggccgtaccagcatggcgtgctgccacatcagaaccagccatacccctttgcgcagcatggtcggatgcaccagatgccaatgcttccgccacagcagagaggttatgggtcgatgccaatgccagggtcgctgcctccgcaacaagctatgcatcaggcccctccacagtatccgcccctccctccacctccacctcggccgcctggctttgttcatgataatgtgctgcctccatctctgcctcctcctcctcctccttctccaccaccaccaccaccaccaccaccaccagaagcagcagcagcagcatcatattctcctcctcacacacttgttgttgcacagtcatgcggcgcagaggcagaagcaaaagaaggtgcatctgaaggtg

SEQ ID NO: 169711 - DNA, 1643 bp, Zea mays
  Clone ID: MRT4577_86360C.1
cttctcttgtggccacgacgagcgacattcgctactcgctaccccgggagaaacaaccccagccgccgccaaccccaaccccgttctccggcccgccgctctctctctcctagtccccttctatcgtggcaacgacgagcgacagtcgctgccgccctacggcaggtgcccaggtcttcttcggtcccttcgccgtcgacgagcactaccaggcaacaattctatggctcttgtagccccacggccagggatggagctggctaatattcaacatcatccaaatcaggctcctgggcctggaggaaaacaacgcacatctagcctggaggcaccaataatgctacttacaggtcaccagagtgctatctactgcatgaaattcaatcctgcgggaactgtgatagcatcaggttcccatgacaaggatatcttcttatggtatgttcatggtgaatgtaagaactttatggtactgagagggcacaagaatgctattcttgaccttcagtggactactgatgggacccagatcatctctgcaagtcctgacaagactgtgagggtctgggacgttgagactggtaaacaagttaagaagatggctgagcactcatcattcgtcaactcatgctgcccagcacggaagtggccacctcttgtggttagcggttcagatgatggtacagcaaagctgtgggacttgcgtcagagaggtgcaatacaaactcttcccgacaaataccagatcacagccgttagcttctcagaggcagcagataaggtattcactggtggcctggacaacgatgtcaagtggtgggatcttcgcaagaatgaaacgacagaatatctcaaaggacatcaggacatgatcactgggatgcagcttagccctgatgggtcttacctcctgaccaatgcaatggacaatgagctcaagatctgggatctgcgcccttacgcaccagagaaccggaacatcaagactcttacaggtcaccagcataactttgagaagaacctactgaagtgtagctggtcgccagataaccgcaaggtcactgctgggagcgcagaccgcatggtctacatctgggacacaacatcaaggcgcatcctgtacaagcttcccgggcacaatggttctgtcaatgagactgctttccatcccacagagccgatcattggatcttgcggcagcgacaagcagatctatcttggggaactttaagtgactatcagttccttttcagctagatgttcttgtgacactttgatgaggagaggaggcactgacaccctgttcctttgcctgagaattggaacactcagtttggctgatctggatttgacatttgttgattgtcttgttaagcccagttggtcttgccgttcacaaactgccccatactttgcaccttgtggctttccgatattaagctagatggcatgcttgaaggtcactggttgcatgtactgtgtctagaaccttactaaaaacttgcatacggtagtactgtatgctatattgttatcttttttaatcgtatgaaactagttggagaagtgataccgccttcttcgcatggttcgaaaaaaaaaaaaaaaaaaaaaaaaaaaaaaagcggcctcggcgtaattta

SEQ ID NO: 169712 - DNA, 1651 bp, Zea mays
  Clone ID: MRT4577_86361C.1
ccggccgggggcgaggctgtttgaggtattgtggatacctggaagagtagaaacaaccccagccgccgccaaccccaaccccgttctccggcccgccgctctctctctcctagtccccttctatcgtggcaacgacgagcgacagtcgctgccgccctacggcaggtgcccaggtcttcttcggtcccttcgccgtcgacgagcactaccaggaacttgatcttataatacaaacttcaatatgttctctgctccaggcaacaattctatggctcttgtagccccacggccagggatggagctggctaatattcaacatcatccaaatcaggctcctgggcctggaggaaaacaacgcacatctagcctggaggcaccaataatgctacttacaggtcaccagagtgctatctactgcatgaaattcaatcctgcgggaactgtgatagcatcaggttcccatgacaaggatatcttcttatggtatgttcatggtgaatgtaagaactttatggtactgagagggcacaagaatgctattcttgaccttcagtggactactgatgggacccagatcatctctgcaagtcctgacaagactgtgagggtctgggacgttgagactggtaaacaagttaagaagatggctgagcactcatcattcgtcaactcatgctgcccagcacggaagtggccacctcttgtggttagcggttcagatgatggtacagcaaagctgtgggacttgcgtcagagaggtgcaatacaaactcttcccgacaaataccagatcacagccgttagcttctcagaggcagcagataaggtattcactggtggcctggacaacgatgtcaagtggtgggatcttcgcaagaatgaaacgacagaatatctcaaaggacatcaggacatgatcactgggatgcagcttagccctgatgggtcttacctcctgaccaatgcgatggataacgagctcaagatctgggatctgcgcccttacgcgccagagaaccggaacatcaagactcttacaggtcaccagcataactttgagaagaacctactgaagtgtagctggtcgccagataaccgcaaggtcactgctgggagcgcagaccgcatggtctacatctgggacacaacatcaaggcgcatcctgtacaagcttcccgggcacaatggttctgtcaatgagactgctttccatcccacagagccgatcattggatcttgcggcagtgacaagcagatctatcttggggaactttaagtgactatcagttccttttcagctagatgttcttgtgacactttgatgaggagaggaggcactgacaccctgttcctttgcctgagaattggaacactcagtttggctgatctggatttgacatttgttgattgtcttgttaagcccagttggtcttgccgttcacaaactgccccatactttgcaccttgtggctttccgatattaagctagatggcatgcttgaaggtcactggttgcatgtactgtgtctagaaccttactaaaaacttgcatacggtagtactgtatgctatattgttatcttttttaatcgtatgaaactagttggagaagtgataccgccttcttcgcaaaaaaaaaaaaaaaaaaaaa

SEQ ID NO: 169713 - DNA, 890 bp, Zea mays
  Clone ID: MRT4577_86362C.1
cattgggtacctcgaggccggccgggcattgccctgccggctggccgccgtcaacccgaccccgttccccagctcaccgcgcgcgctctctccttctcttgtggccacgacgagcgacattcgctactcgctaccgtcctacgccaggtgccccaggtcttcttcggttccttcgccggcgacgaacgctacgaggaacttgatcttatattacaaacttcaagatgttctctgctccaggcaacaattatttggctcttgtagcctcacgaccagggatggagctggctaattttcaacaacaaccaaaccaggctcctggtcctggaggaaaacagcgcacatccagcctggatgcaccaataatgctacttactggtcaccagagtgctacatactgcatgaagttcaatcctgcaggaactgtgatagcatcaggttcccatgacaaggatatcttcttatggcttgcccatggtgaatgtaagaacttcatggtactgagagggcacaagaatgctattcttgatcttcagtggactactgatgggacccagatcatctctgcaagccctgacaagactctgagggtctgggacgttgagactggcaaacaagttaagaagatggctgagcactcatcattcgtcaactcatgctgcccagcgcggaagtggccacctcttgtggttagcggttcagacgatggtacagcaaagctgtgggacttgcgtcagagaggtgcaatacaaactctccccgacaaatatcagatcacagccgttagcttctcagaggcagcagataaggtattcactggtggcctggacacgatgtcaaagtggtgggatcttcgcagaacgaagtgacagaacatctcaaaggcatca

SEQ ID NO: 169714 - DNA, 565 bp, Zea mays
  Clone ID: MRT4577_86363C.1
ctccgcctcggccgccccgccgcgcgctcgcctcgccgctcccgccgcagccgcagggcccccagccgccgccaccatggacgccatcaagaagatagatgcagatgctcaagctcgacaaggagaatgccttggatcgagccgagcaggcggaggccgataagaaggcggcggaggacaggagcaagcagctggaagatgagctggtgtcgctgcaaaagaaactcaagggcaccgaagatgaactggacaaatactccgaggctctcaaagatgcccaggagaagttggagctggcggagaaaaagccactgacgctgaagccgatgtagcttctctgaacagacgcatccagctggttgaggaagagttgggattcgtgcccaggagcgactggcaacagctttgcagaagctggaggaggctgagaaggcagcggacgagagcgagagaggcatgaaagtcattgaaagccgagcccaaaaggatgaggagaaaatggaaattagggaaatccaactgaaagaggccaagcacattgctgaaaatgccgaccgcaagtatg

SEQ ID NO: 169715 - DNA, 389 bp, Zea mays
  unsure (1)..(389): unsure at all n locations
  Clone ID: MRT4577_86364C.1
cggaattcccgggctcgactccacgtcgtctcgtaatgcgcatcgagaaagggccgtcgacaggggggatattaatgggtcgtcgnntcgtctagccagtcagctcacgcgtccgcgctgcaaatcctcgtcagctcgtccgtccctggctcnttccgtgccctcgtcggctggtccatgcgtccatgcgtccgggacccctcctggtcgtgtccggggtggggccccatcccgcatcaactctcgtctcccgagtctgccccgctggtacccgtgactcagccccggaccctgcgntngcatcgggcccgtcgccctttcccgtggccccggagccctgaagaaggagatgcnttngccgggagcctgtngcggacatcnnccggcgt

SEQ ID NO: 169716 - DNA, 394 bp, Zea mays
  Clone ID: MRT4577_86365C.1
gaaacaaacgcaggtgcgtagtttttttccctgaacaaatcatacccacgcacctgccaatacatggtaaaataagcccacctgaccctttcaagactttataggcctggccgatcaggtttaattgatcccgtcttctactgtttctacaacgttaatctgtatggatgataactggaccagtctaaacaaccgactttaatttgacccaaacagcccgtatgaaatgatcacactgaggaaccggtaccttccatgccacatgtttacgcatcggcctgaaacagtttctgccctgtctgaccaagatagggctcactcctaatgctatcaatccatctagcgctgatccataccctctccaggctctgttacaatgctctctagaatgatg

SEQ ID NO: 169717 - DNA, 334 bp, Zea mays
  Clone ID: MRT4577_86366C.1
gatcggagaactcaatcgagctaggatcgcagcagcaccgaagcatttgccgatcatcagttcttccatccaggtacgtacgtgaagttcgttcgactcataattagtttccccttgccaatgtatgtatgtatgtatctagcgaaactccagtgcagaccaaccaaattaaacacagcatgcaaaggatcacgaaggcgctgcggctccacgggaggcagctgaggcacgcggtcctgcagcacatgaacatgaaccaggggatcttcttctgggccaccctgatctcgcgcatacagagcgagtcgccagccgtgatcataccgcacatggg

SEQ ID NO: 169718 - DNA, 386 bp, Zea mays
  Clone ID: MRT4577_86367C.1
cggacgcgtggggctcgtacgaagcagacttcccgcatgtccaccggaggcaaggccacggcgcaagcgagctcgccaccaaagctgcgaggaagtcggcgccgacgaccggcggcgtgaagaagccccacaggtacaggtccggcaccgtggcattgcccgagatccggacgtaccacaagagcaccgagctggtcatccggaagttgaccttgcagcgcctggtccttgagatcgctcaggacttcaagacggatcttcgggtccagagccacgccgctctggccctccaggaagacgccgaggcctacatcgtcggtgtgttctaggacaccaacctctgcaccatccacacctagcgcgtgaccatcatgcccaacgacatt

SEQ ID NO: 169719 - DNA, 485 bp, Zea mays
  Clone ID: MRT4577_86368C.1
ggcttccaagaagagcccgttgttttctcaattcataaaggacttgtcagttccaaaagcgaccagggtgaaggctatagccgaaatatttgctgacgctgggttttcagatgttacaaagaatttcttgggtatgttccctgcctagtcattttttgtgtgcctaattaagttaagatacagtttcgtgtaacaagttaatcgctttgatacattccaggggaaaaaactgataaggtgctcttgtcgtgtacatgccttactgatgaactgtgtagaacgtattcagacatttacttgtgctgttccaaaaacttttccatatcgatacggagcaaatattttttggtagccatgatctgcataataatttaccatgtgcagcagcatatttatattagtgtcatcaagttgtttgattaatcatcctgatcagtcccttggactcgattaggtactccggctcgattaaagcgaccagaaac

SEQ ID NO: 169720 - DNA, 282 bp, Zea mays
  unsure (1)..(282): unsure at all n locations
  Clone ID: MRT4577_86369C.1
caccacctaccacaccaatatcaaaatccacccatacacacagatctaccagccccccaaccacatacattactccagcccagaacacaaccacaacatcaaactaacctacaacacctacaccactaccaacatcctaatgcaccaccaccgaaatcattacaattctaaccttgaaccccaccaacatcactatcgacacatgcctcgaaatcaactccaccaccaacaccaaagtccacaaccaccaccgntacactgcactaaaaaacaaccaacacc

SEQ ID NO: 169721 - DNA, 680 bp, Zea mays
  Clone ID: MRT4577_8636C.1
tgccacatacaatagcaaggtatttccctggcgtgggtggagtgaacgcgcgggagagctatcaggtattgcttcagctcttctgtgacaccccagtgtcacctagggtttctctcaagtgctaacccaagaaccatcatcttatgtgaaccaaaattgaccatgaacatcaaattgacttaagaataaaggatccacttagggtgggggtgaaaagtatcatgttcaaaacaaatgggtgtttcaaaaaggcaaaatgtgcaaccccaataaaaaccctaattgagccctataaacaaaatttaagaaaaaggggaaaagggtaagaaaaatttaaaatcatggcttgggccaattataaacattaaagtatactaaataagcaacaacaaagattaaggaagcttggccaaaacaatttaaataaaactctaaacaagcttctcaagtggaaattcaatagggaattctgaaattcagaattctgaatttcagaccttgagccaaagatcaaacgtgttcaccttgatccctaactcaaatcctaatgggcccattgacaaaacgtgcataactaacctctatgtcttgtgccagaatatgggattgggacgcgtgccttggacacgtacaccagaaaatctttccctgtgtgcggcagggagacaaaccacatttct

SEQ ID NO: 169722 - DNA, 343 bp, Zea mays
  Clone ID: MRT4577_86370C.1
cgacccacgcgtacgcaagggcgaggcaatcaggtttaaaattttgcttttaaaaccctgtaccgagcccagcgggtgggtgacacgtgaacaggactggaccaacaaatctcatacattgcatacaaacccatcctaaccgatctacacgacctgcataacgatccatccacaccttacatcgcacgtactgttgactaatataagctctactaagatgcgacaattatctgtccatcatatagtccatacacttgatgcgtattcttggacactactcactttacaccggactacccattctaaccagctacagacgcattcaaaaccaaggtttaccata

SEQ ID NO: 169723 - DNA, 531 bp, Zea mays
  Clone ID: MRT4577_86371C.1
gggggggggtttttttttttttttttttttttttttttttttttttttttttttttttttttttttttttttacttggcaaggactcaagatagcattggagttaagggcttcctgatacaatatcaacagaaaatggttcattgccttggcgggggcatatgaacaaacacaagtccgaaattacatggccattattagccattgggtctagcctaacttggggagaacatcgccaagagcatttttggttgctgggaagtatttctcggcctcaggggggcttttgatctttgggggatgggcaagctgccaaaacgagacacacacagtttttgtcaaaaaccggaggacaaaaaaaattgcactgttcccaaatctaaatgggggcggttaacgtacatcgtcaatggggctgaaaagcttgccggggagctccttgaggcttttttttttcgggtggcgaatcgacccgccccgatccaaatcaggagctgagggatggaccccaacaggccccaaagtgggatcc

SEQ ID NO: 169724 - DNA, 581 bp, Zea mays
  unsure (1)..(581): unsure at all n locations
  Clone ID: MRT4577_86372C.1
ccgggcgtngnaatacctgtttcgtggagcgccgngtccagcgggggtgggggggagggccggcgcttgctccgtgccctcatcgccgagnagagctgcgccccgctcatgctccgcctcgcgtggctctccgcgggggcgttcggcgtgtcgtcgtgggccggcggtcctttcggcgcggtgaagcttcngtcggttttgggtggcggggctaacgcggggctgggcntcgcggtgcggctgctcgtgcccntctggggggagttcccagtcctctcttgcgccggtttctcccngctcgcgggagttgtggccgtgggggttntcggtgggcctgtgtttcccttcctccccggtggggtgggcttgcctgtggcctttgttggggggcggcttcctggtgcccctgggggttctggccacctggggcgngtttttgggctgccggggggcttgggcggtctgggccttggtggcctctctggtggccccgccttgggggggggcgcctttgggccggtctggttctttggggggctgggctgcccccccttttgggtgttgggcaccttttaactttt

SEQ ID NO: 169725 - DNA, 430 bp, Zea mays
  Clone ID: MRT4577_86373C.1
tgcggtgttcaggtgagggctggcaaagggaaggtgttggtggatccacggatgaagaaggacaagcgggccagtgggactgggaagaagggtggcaaaggcgcaaaggggaagggtggccagaaaggcatgagagggaaagctgggaagaaggcagggaaagccccacggtaaggaagccgaggagctaagcatggctggaatgctggatgcccgcctccctgcggaatttttgcctcaggctacagctactcagtaggcagatgttttgaaatcgtgtgatggtagaagtttgtgttgaaaagttttgtagcgtgagtagtggctataatgtttcaaaactagtggtcacttgagtgtcactaagcataatttacacacttcacaatcaatttatcaaaacttttataccccttggggcctctagagc

SEQ ID NO: 169726 - DNA, 669 bp, Zea mays
  unsure (1)..(669): unsure at all n locations
  Clone ID: MRT4577_86374C.1
aattcggcacgaggctccttttccatcttctatgccgagcagccgtcgacgctgccaccacccaccatgcagtgcagccacgcaggcgagctgccaccggccacgtgggcacatgttcgagcagactccatccttcgcctgcttgcctcggtcacgctcacgcgccaccgccccgtgcaggccgtgctcgtcgactcgcagcccgtcgctctcgctattgcggcagcgcaccgcgcgctcgctactgccgcagctcgcgagagccggcggcctcacgctcggtcgtgccgcaacccgccgtgtgcttgccactgccctagctcacgagcgtcgccggccacgctgcttgccgcgtccctgcaggagtcgccggctgcggttgcttcaagacggggaagaacaagaagggagaagatgacttgtgccctgtggggcccatgcgtcagtgacagaaagagagtggtggacgtaggggcattctgggcaatacgaaaatacaatagttggtccaactgcatctgaaggcatttttcagaagaactataaggctatctccagccgttttaccaatctcacctcttatttcaaactccacttttgacagtgcanaacaatgatttgtatagccatatgcacagtctgctggtcacagcctaatgatttaacttt

SEQ ID NO: 169727 - DNA, 561 bp, Zea mays
  Clone ID: MRT4577_86375C.1
acaagcttttctttttcttcttcttttttcttttttttctctttaattttttttttttttttttttttttttttttttttttttttttttttttttttttttttgaaaggggaaaaagaaggggttttttttttaaaaaaaaagggggccccaatttcaccaaataaggaaaaccggcccggcggtcccaaaaacctcaaaaaaggggaaaaaaaaacggggccccaatttttggaaaaaaaaaacccctggggcgaacccccttagggggaaattcccaacactggggggggcgattataggggccccgatctggacccaaattgggggaaaaaaagggaaaaaggtttccccggggaaaaagtgttacccccacaaaatcccacaaaaaaaaagaccggaaaaaaaaaagggaaaacccgggggccccaaaggggggcccacccccacaatatggggggggcccacaccccccttttcaaaggggaaaaacctggggccccctgtgttaaaaaaaatccccccacccgcggggagaggggtttcgcatatggggctctt

SEQ ID NO: 169728 - DNA, 549 bp, Zea mays
  unsure (1)..(549): unsure at all n locations
  Clone ID: MRT4577_86376C.1
gccatcttctancttcccaatcacgacgatgtgtcggctctaatacagaatccgagcaacaacacaaaaaagaaatctccagctactcgcacatgctcaccgtcgttctcttcttctacgctccccgctccctgttcctgccggccctcaggacattcgacgcacgcccaacccgttcaccgcatggaggtgtgggccttcagcaaccactgataccaagcaaatntacacctgccctatctcacatgcaacgacttatgcaggatattcgactcctgccactaataccactgcccacccatgtacacgtccataactaccttaatcacctcctactacatatccaacatatgcaagacgacacatcacaagatcctcttttctaaatctgaaacttcctatgctaacgatcacgatgcagtgaccagctcaaagaatctgttctaactcagtgaacactagattctagagactggataggaatagcgcaaaatggcagttgacttgcctctattgtactgaagacaagtctatatacatatgacatta

SEQ ID NO: 169729 - DNA, 473 bp, Zea mays
  Clone ID: MRT4577_86378C.1
ctctctttccggtgtggagtctggagacgacgtgcagaaatggcacctcgaaaggggaaggaaaagaaggaagaacaggtcatcagcctcggacctcaggtggctgaaggagagaatgtatttggtgtctgccatatctttgcatccttcaatgacacttttgtccatgtcactgatctttctggcaaggaaaccatctgccgtgtgactggtgggatgaaggtaaaggcagaccgagatgaatcctcaccatatgctgctatgttggctgcccaggatgtggcccagaggtgcaaggagctgggtatcaccgccctacacatcaaactccgggccacaggaggaaataggaccaagacccctggacctggggcccagtcggccctcagagcccttgcccgctcgggtatgaagatcgggcggattgaggatgtcacccccatcgccctctgacagcactcgcatgaacgggg

SEQ ID NO: 169730 - DNA, 262 bp, Zea mays
  Clone ID: MRT4577_86379C.1
atatttttcttttttttttttattttgagcgggggggttttattggcattgggtggttacaacagaccacctcaaccatctttgaaagggacaacaacgcgtgtgaagccgaaggtgattcatcaacctaccaggaccagaggggaggtgtcttgtactccttccaagggttggggaagaaatgggcccgaaccccatggacgcccgccgacacgaaagacttgagcttatccatgtcctgaaggcgcgagcttcaccgaaa

SEQ ID NO: 169731 - DNA, 940 bp, Zea mays
  Clone ID: MRT4577_8637C.1
ccccgcgtccggccccgcccgccgcgcgccccccctgcaccggtgcgcggtgcgccctgctgcccgattcgtcggggggcgcgggaatggagctggagctggaggcggcggcccggcgcttccacctctggttccgcgggctgcgctcgctgcgccgggacctggcgtcggcccggtggtcggacgacccgacggcccagctccccgcgcaggtgggccgcttcgtggcccacctggagtcgtactgcgccgcgcgcgccgggctggacccggtgtggacgctgtcggcgccgtgggccacccccgcggagcgcggcgccgcgtactggctcgccgggtggcgccccaccacgctggtccacctgctgtacaccgagtccgggcgccgcctcgaggcgcagctgccggacctcctcctcggcgtgcggtcggggaaccttggcgacctcacccccgcgcagctggcgcaggtcgacgacctgcagcgccgcacggtggccgaggaggacgcgctggcaagggagatggcgctcgtgcaggagggccacggcgtcgtcgtgctgccggcggcgccggacgggtccggcggactcgacgtggccggcctcgtgcgcagggccagggcggtgctggacagggccgacgcgctgcggctgcgcaccgtgaagcgggcggtggagatactggagccggcacaggcggccgagctgctcgtcgccgccgccgacctggagatcgggttccgggagttcgggctcaagcacgggtcgggacgaatgacatgactgccccagtttttttcgagctcccctgcacttcccgccattttatttttctttctttttttttctcctcacgattttgccgagttgtacccggctgggccgtcgtgacagggcacggaaacacgaataaaaaatgcacgagattgacttatgag

SEQ ID NO: 169732 - DNA, 683 bp, Zea mays
  Clone ID: MRT4577_86380C.1
atcgtcaaggagctggacgtgaccttcctcacctacctgctggtgatcaccctgacgctgtgcatgctggcggtgctggagatcaagtggtcgggcatcaacctggaggagtggtggaggaacgagcagttctggctcatcggcggcaccagcgcccacctcgccgccgtgctgcagggcctcctcaaggtcatcgccggcatcgagatctccttcacgctcacctccaagtcgggcgcggacgacgagaacgacgagtacgccgacctctacatcgtcaagtggacctcgctcatgatcccgcccatcgtcatcatgatggtcaacctcatcgccatcgccgtcggcttcagccgcaccatctacagcgagatcccgcagtggagcaagctcctgggcggcgtcttcttcagcttctgggtgctggctcacctgtacccgttcgccaagggcctcatggggcgccgcggccgcacgccgaccatcgtcttcgtctggtccggcctcctcgccatcaccatctcgctgctgtgggtggccatcaacccgccgccgcagaactcgcagatcggaggctccttccagttcccctgatcgtacccatatatcatatatgagttacataccatttgttccagcagcagcagcggcggctagctggtggggagtaaagtaaattctga

SEQ ID NO: 169733 - DNA, 344 bp, Zea mays
  Clone ID: MRT4577_86381C.1
tgccggtcccgaataaagagcagcagcgcaaggtcagccatcttgcccgcaccctgcttctctctcgttggttcgttcgtccgtgcgtggttttgcgcgtatgcttgtggagatatatgctgcaaacccttgggtcttcttcctccgtggagggggtaactggtgctcatttcttggcgcggttggatctgatggtcgccacgggatggcagatccgggtgtggggtttggcgatttatccttgttgcagtttctgtatggattggatgtcgtttaaatttgagggaaatggttttagatttatcatttctaatacagcagtggagaaaatttggcttttttat

SEQ ID NO: 169734 - DNA, 301 bp, Zea mays
  Clone ID: MRT4577_86382C.1
attcggctcgaggtgagtttgctacatggacgttttataggggtgcgggggactgaatgacacgaacgggtgcaacattgcgtccaggaaatgcataagcctcatagcagacagacgagccaccaatgcaccgatctgcttttatgcaaaattcggaatgactgcctgatgcttctaagtcttcgagcacggtcatccgatttcagtgtctgggatcaggcctaaagcagatcccacagggtgttatgtccgcatagactgatcccagatcctgcccacgtagcataacacataccacgga

SEQ ID NO: 169735 - DNA, 301 bp, Zea mays
  Clone ID: MRT4577_86383C.1
gtcgggccttctgtcacatcaatagaagctcttctctagtcagtccctgaaacgagctacggggcgctgtcatacacgccccggggcgagatctgcttgatgggtcataccatgttctccgagtactacaagcgccctaccctaactgaagaagtgttttgagatatctggcttcatacaggtgatctccgggagtggcaatccaatggcacgatgaagatcatggactgatagactaacatcttcaagctgtcccagggagagtatgtcgcaggtgacgtactggcatgagcataccttc

SEQ ID NO: 169736 - DNA, 768 bp, Zea mays
  unsure (1)..(768): unsure at all n locations
  Clone ID: MRT4577_86384C.1
ggccgcgggttttttttttttttttttgtgcgaaaatcgatttttatttcgttaactccgtgcaagagtccctgatgcaatgcccgaagccgaccgacctaggtccctggcccatctttcccgagcgcaggaagacctcttcttctccagtgcccgcaggctttgttcttcaccggggttggagaggttttgttttccgtttgtagaatttcccatacaagcccaaccgactcctcaagcatttacagaacagttgcgatgcttcgcttaagcgacgagctcaacgacaccaccggcctgcttgatcttctcctcagcaaggcggctgacccagcgggcgcggacgaccagagggatctcagggagacggccctttccgaggaccttggagtaaccgagagggaggaggtcgaggacggggacggtgtccttcttctcacccttgacgtaggcgtcacgggtctcttggggaacgagagaccagagcttgtcgaggttgatgatgggcttccagaagtggttctgctgcttgtggaagtatcgcataccaacctttccgaagtaaccgggatggtacttgtccatgttggtacggtggtggtgctgaccaccagcaagaccacgaccaccgggatgcttgcggtgctttccgacacgtcccttaccggcggaaacgtggccgcggtgcttgcgggtcttcgacaaacgggtaggcatggcgacggctgtgggtgattgtcgacttttccggtcccggcccggccggnn

SEQ ID NO: 169737 - DNA, 174 bp, Zea mays
  Clone ID: MRT4577_86385C.1
cggccgcgcccctgtcgctgacctgcgcccgtcggcgtctctcaagtcgtctgattgaccggaggcgggcttgcttggtcactgtagccggctggggcgcactgttaccgagttgacgacgaggcgcagcctataggctgaggccaaaggcgagtggcttccgggcctttcctt

SEQ ID NO: 169738 - DNA, 359 bp, Zea mays
  Clone ID: MRT4577_86386C.1
gagctcattagtcggcggccgccctttctttttttttttgggtttttttttatattcatccagcagataataatatgacctgaaaccatatctattcaaatcttttaacttaaaatccaaatataccccaactgcttaaactcaaggtgtaaaacaggaagcctattggaacaagatcatattactacaaagccagaaatattggaactagcttctaaagtgctcatatggttgaagatcctaatgtggtcaagcggagctaagatggaaaatcttggcctcaattgaagctaaatacttgttgaaaaatatcgtaattgcctttttttgaccttttcaaactataaatggtgccctga

SEQ ID NO: 169739 - DNA, 2240 bp, Zea mays
  Clone ID: MRT4577_86387C.1
ccgggctcgccgctcgccccaccgaaccgcttccaatcacggctgacggcccagcaaagatggcgagaacagcgcgttcgttttcaaaccctttcaaattcctctcttcgcaagccgcaataataccgttcattcgatagttccatcctcctccctcccccttcgccggcctcgcttcgtccctcccgctctcccccttttaaatcaaaccctctctcggctcctttataaatcctagtcgaagcaagggtgcgcgcacttcactacccaacctgaccccgaagatcgcgtccgcagagacagtagccgcgtcatggcgaccccgccgccgccgctcccgcccatgccgccgaggcacgtctcctgcggctcacttctacaggaactgcaggaactatggggagaaattggtcaggatgaaatgaaaagagataggatgatactgcaactggaggaggattgtctcaatgtttacaagcaaaaagtgaatcagactaggaaacagaaggcagacctgcttcaagagctgtcccttggcgaagctgatatagacaagatcctttctgctcttggagagagagaaacatttcctaggtcagagaagcttgggggcacattaatggaacaactcgctaagatagagccagtgctagaagatttgaggcgtaggagggatgagagagtaaatgagttcaaggctattcagtcaaagattgtatgtctacaagcagaaatttcaggagccattgatcatggggatcctgctgctcctgtggtagatgagaatgatttatccttgaaaagatcaggggaattgaaggagcatcttaatgatcttcagacagaaaagaatggaaggctgcaaaaaattgacatccagactaacagtattcatgaaatgtgcaacataatgtctattgatctcaaaatggcactaaaggatgttcatcccagttacgctgagctggggagaagcaaacccatgagtattagcaacagttcgcttgatagactatctgaaaaagtacatgcgttaaatcatgaaaagaaacaaaggcttcggaagcttcaagatcttggcagcacactcattgagttatggaacctcatggatacaccaactgatgaacagagattttttgaccatgtgacttctcttattaaagtctcaccaactacagcgatgccccaagggtgccttgcacacgaaataattgaaaaggtagagactgaggttaagagactgactaagttgaaagctagcaaaatgaaagagctagtcttcaagaaattgactgatcttgaggaaatctacagaagtgttcacatggatattgatagtgattctgagcggcaaaccctcaatgatctcattgattctggtagagcagatctttcagagttgctggcaagaatggataggcgaattgcggaggcaaaagaacatgcattaagtagaaaggatattttagaaaaggtggagaagtggacattggcatcagaagaggagacttggcttgatgaatacgaaagggatcaaaaccgctataatgctgtccgaggagctcacataaatctcaagcgtgcggagaaagctaggatattggtcagcaaacttccatctcttttggagaacttgactgctaaaattaaagcctgggaaaaggaaatgggtattccatttatatttaacaaggtgaggctgttggactgtttagatgaatacacctgtacaagacagcaaaaagaagaggaaaagcgccgatcaagggaattgaagaaactgcaagaacagtttgctacagagcaaggtgccaagttcggaacgaaaccaagccctatccgtcctctttcttcaaggaagcctcttgggcagagctctaatgccaatattattggtggaactccgaccagccgccgtgtttctacccccatgtcacggaagggtaggccatcttctggaagggtgcaggaagctgtcaagactgctgtggcaccagcaaactatgttgcccttcccaaggactgctcagacatttctaccctttgaagtgtaatcacctactctgaccatcgattgacttctcacttgatcgacctacatactatatagtcttgactccagtgaaaaaaaaaaactttaatacactaaagggaaaccgcccaaaaataatcacccccgccaaacggaaattacttcggggagggaatccggggggacaacatttgggccaaaaggg

SEQ ID NO: 169740 - DNA, 486 bp, Zea mays
  Clone ID: MRT4577_86388C.1
ggaataaaaaagaacatatggttatatatttatatagaaaaacaaattggaatggtacaaggtggcggccccggcatacaaaggggaatggtacagggggcgacccccacctgaggcggggggtccccttaagcagttaattagctaggcctttatgggggcccccgatttgggggcgagggccaccctctgcacaatgggctccttgagcgacccgtgcttgacggggacccggtaccccccggggaaaaactcggcctcgaacacaccattggtggccggcatgggctttttgggcaccttcctccactcgtccaggaacctgtcgacgagggccccctgcggcaggttcttgaaattgttgtcggggaggcacatgacctaacaacccttggggggccaggccccccacatgacgatgcccttgacccccgggggggcgaacccctcccttattacctcctccaggaactccacctggttggg

SEQ ID NO: 169741 - DNA, 730 bp, Zea mays
  Clone ID: MRT4577_86389C.1
tcactcctatgggcgattgggttcctcgaggccggccgggctgggccactaaccgccgccgcatcgggagccttcgtttggccacggttcagctagctatcacgcgcgaaggcccacccagacccagcgcatcagggaggcggcgattcgcggcggtgagggcgtccgcggagacgatggcgacggagaagctgggcatcaaggtggagcgcaacccgcccgagtcccgtctctccgagctcggcgtccgccagtggcccaagtgggggtgcgagaagagcaagttcccgtggacctactccgccaaggagacgtgctacctgctgcaggggaaggtgaaggtgtaccccgaaggccacggggaggagttcgtggagatcggcgcgggagaccttgtcgtcttccccaagggcatgagctgcacctgggacgtcgccgaggccgtcgacaagcactacaacttcgagtagccgccgccgccgactagccctgcggcgctcgatgtagacttgctgtgctcttgtactctgaacctatgatgctccactccagagttaacagaccgtgtaataaagctccggattaggggactacaatgctgtactatctgtttcagatcccgttcggttagctgtgataagacctgaaactattccagctgatcagttttaatacaaataaaactatggaacagttttagaggaaaaaaaaaaaaaaaaaacccgcggcc

SEQ ID NO: 169742 - DNA, 327 bp, Zea mays
  Clone ID: MRT4577_8638C.1
cattgggtacctcgaggccggccgggggaacgcctccgccgcctccaatcagcaaggcagcaaccatgggagatttgttgcttcttgccagacacagccgtgtccccgtgtacctcgtctctcctcccagtctttgggcgtgcctgcttcattcgttcatttccttgtagccccaaatctacgtgtgtgtttttcctgctgccaagtgatgctgggaatattgcgcaagggctttgagcaattcgtggcttgtgtttgccgaatgcgatgagatcacaacatatgtatgtattatcccttcttaaaaaaaaaaaaaaaaaagcggcc

SEQ ID NO: 169743 - DNA, 342 bp, Zea mays
  Clone ID: MRT4577_86390C.1
agaccacagacaccatgttaaacattaacaaaactaatttataaacataacggctattaaaaggactgtttggtgaaacagtttgcctttttaattaaatacagaaaaatgctttcccatttaaaatgggactcaaatggttctgtggagcttgcactccctatttttaattcccatttttttaagggaccttcacggtttccgtaaaaaagatgaacacttgtgctaaatttggaaccatttaaataagccaagtatttggtccccaaacaatgggggagaagacgcaagcccactggcgggggccgctgtgcttgcggcgggagtgttttttgttgcctt

SEQ ID NO: 169744 - DNA, 1498 bp, Zea mays
  Clone ID: MRT4577_86391C.1
gttatcccagagaatactgccctcccatgtgtggtctattgccatggaaataggtctatccggcggggattatgtcagtttgggttggcatgagaaagaagacctcaaatgtgcggtgtcatgtcttcgggacaataaacaagtttccactataggcctttgggggcgatcaatgggtgccgttacatgcctactctatggagcagaggacccttctattggtggcatgatattggatagtgccttcactaacctgtatgacttgatgatggaacttgttgacgtttacaaaattcgagttcctaaattcacggttaagatggctgtacagtacatgcggcgaatcattcagaaaagagctaagtttgacataatggatctaaatgttttaaggttggctcccaagatgtttatccctgtactatttggacatggtctgaatgatatgtttattcagcctcaccattgtgatcgtattcaccaggcatatgggggggataaaaatataattaaatttgatggtgatcataattctccaagacctcaatcatattatgattcagtttctatattcttctacaaatctttgcatcctcctctgctgcctgcagcacgatcaaagcttcatatgggagcatttaaagttggtaacataaccaatgagaatttcttctttgaaatcatcaatggtctacggccagcaaacactgcaggttgcagttcatcaaccgatgcacctaacatcccacatgatggcacatctgtaattgaattgttgtctgatagcatgaaccaactgtccattaagaatgagaatcacttgctgcaggactttcttttagatgaaaaccacagcctgccagagattgatagtgatagtgttggatcacgattgcaggataaaagaagtaggcgcaatgaggagtcattttcattcacaagctctaacagagaaagttggggcagatgttcatctttaggagcagccagtgatgaatcattctcaggcgataataatgataagcagaatttgacagtcaaggctttggctacgcctgtaagacaaaaccagaggcaaagccagaggaaaccgattgagaaagctaagcagaagaagattcaagccctatggaagaagattaagcgcgaaaaggtggagatgggggacagcctatcttcgcgtttgaagatgtgcctagggcaatctccgcagcacaagaggaatagatcgtctggaaccattacaacttcatagctctgacaactctactgaaccactgattgtccaccatagattctcccttattctgacctactcattgccacgttgtaacctatataccctaggtgaatatatgctacatgaccgcattgtagcatgccaggatgttcgaaagctgagaaagcacttgtatcatctcttgtaattgcctgaaacaagtgtaattgccatctctggctcgttgtcgcatgcaatttcctttcccctcttgcatcc

SEQ ID NO: 169745 - DNA, 1014 bp, Zea mays
  Clone ID: MRT4577_86392C.1
gccttcattctctccaccgaatgcagctgctcccagggttctgcctgtgcagctcctgctcccacggcaattggctgcacgccattattgcttggcctctaccagactgctacactacagaaagatatgatggccgggatgcccaaaagttgcaaacacaatgttgatatatgctcttgtgatgagtgattatcaacaagggtaatatcttggatcgagttgtgtgggctaaccggaacatgagtgtgtccatgcaacatgtttcttggcttgtgaagcgcagatgtggagtccggagacgatggttgatggcaaaagtcaagatcatgcgagttcatatcaatagaccaagagcagcgaaagatgaatgttgggtcacaagggactagagaagccgcccatagtggctaatacccggggacactgagaggcgcaaggatacggaggcggatcgcgttgccagtgcagttacagactgacgagatgcgcgtgtcaaggatgtgggggacacgtatggcgtacgctaccgcgaggtgtttcatcggtcgagcttcaaaaccaccctgcgaaaatgtgctggtttcatcgtgtttgcacctcaaaacctgataacatggttctagagggaatcagagaagcaaagtggcgtcaacgcggagggtgcatcaaggcgaaacaattttgtgaaaagtgcatgtaacacccaaaaaccaattttgggaatatagggaaaaagtctccaaaataattaaattaaatcatcttttagtaggagcttcttgcttttgaaatgattctcctagaataattaaatggtaacgttaaaattctgagtacccaagttcagatttgaacttctaaccaataaaaaaactcagaaaagaataactagaagattgcgatttgtttaattcagtaaatcatttctttcgtggattattcattctgaagtgttcatgaataaataattaatattaaaataataaaaaaaaaaaaaaaaaaaaaaaaaaaaaa

SEQ ID NO: 169746 - DNA, 1375 bp, Zea mays
  Clone ID: MRT4577_86393C.1
ggaattcgcggccgcgtcgacctactctatggagccagaggacccttctattggtggcatgatattggatagtgccttcactaacctgtatgacttgatgatggaacttgttgacgtttacaaaattcgagttcctaaattcacgggggataaaaatataattaaatttgatggtgatcataattctccaagacctcaatcatattatgattcagtttctatattcttctacaaatctttgcatcctcctctgctgcctgcagcacgatcaaagcttcatatgggagcatttaaagttggtaacataaccaatgagaatttcttctttgaaatcatcaatggtctacggccagcaaacactgcaggttgcagttcatcaaccgatgcacctaacatcccacatgatggcacatctgtaattgaattgttgtctgatagcatgaaccaactgtccattaagaatgagaatcacttgctgcaggactttcttttagatgaaaaccacagcctgccagagattgatagtgatagtgttggatcacgattgcaggataaaagaagtaggcgcaatgaggagtcattttcattcacaagctctaacagagaaagttggggcagatgttcatctttaggagcagccagtgatgaatcattctcaggcgataataatgataagcagaatttgacagtcaaggctttggctacgcctgtaagacaaaaccagaggcaaagccagaggaaaccgattgagaaagctaagcagaagaagattcaagccctatggaagaagattaagcgcgaaaaggtggagatgggggacagcctatcttcgcgtttgaagatgtgcctagggcaatctccgcagcccaagaggaatagatcgtctggaaccattccaacttcatagctctgacaactctactgaacccctgattgtccaccatagattctcccttattctgacctactcattgccccgttgtaacctatataccctaggtgaatatatgctacatgaccgcattgtagcatgccaggatgttcgaaagctgagaaagcacttgtatcatctcttgtaattgcctgaaacaagtgtaattgccatctctggctcgttgtcgcatgcaatttcctttcccctcttgcatcctgtgggccttggatcatctcctgtaattgcctgaaacaagtgtaagtgccatctttggttcgttgttgaatgtaatttctttttcttgcatcctgtagtttgcggcgctgcaacgcaacaacggcatggtgatgaaatggaatggcccaatgggtttgttgttttcatcttcaccaaaaaaaaaaaaaaaaaaaaaaaaaaaaaaaaaaaaaaactcgagggggg

SEQ ID NO: 169747 - DNA, 2045 bp, Zea mays
  Clone ID: MRT4577_86394C.1
ttcgttcgctcgtccacatccatcgcccccctccctctcgctcctttccccccgccttcccctcccggatccccttgggcagccggatccggcgaggcagaaggcgcggctcccacagatccgaggcgcctccgctggggactcgtccggtttcggtgggctcgaccttacaggcggggggcgtaattctgacaggacgacggagccgggtggtgcatgagcgctgagaggccccgccgccgctctgcgtaggagcacggtgcgccgccgtgaggcgccatgatcgagcagttcgttaatttcgtcatccggccgccccggtcagaatataatccagatcagtatctatgggagaaagagtttatccttgctggacgtaaatacaaacgactagacttggagcttacaaatgcaagaggctatatcttaaaatgcagccactatgttcctgcttttatcccagagaatactgccctcccatgtgtggtctattgccatggaaatagcggatgccgagcagatgcaaatgaagccgctgttatacttcttccttcaaatatcactgttttcacacttgacttttctgggtcaggtctatccggcggggattatgtcagtttgggttggcatgagaaagaagacctcaaatgtgcggtgtcatgtcttcgggacaataaacaagtttccactataggcctttgggggcgatcaatgggtgccgttacatgcctactctatggagcagaggacccttctattggtggcatgatattggatagtgccttcactaacctgtatgacttgatgatggaacttgttgacgtttacaaaattcgagttcctaaattcacggttaagatggctgtacagtacatgcggcgaatcattcagaaaagagctaagtttgacataatggatctaaatgttttaaggttggctcccaagatgtttatccctgtactatttggacatggtctgaatgatatgtttattcagcctcaccattgtgatcgtattcaccaggcatatgggggggataaaaatataattaaatttgatggtgatcataattctccaagacctcaatcatattatgattcagtttctatattcttctacaaatctttgcatcctcctctgctgcctgcagcacgatcaaagcttcatatgggagcatttaaagttggtaacataaccaatgagaatttcttctttgaaatcatcaatggtctacggccagcaaacactgcaggttgcagttcatcaaccgatgcacctaacatcccacatgatggcacatctgtaattgaattgttgtctgatagcatgaaccaactgtccattaagaatgagaatcacttggactttcttttagatgaaaaccacagcctgccagagattgatagtgatagtgttggatcacgattgcaggataaaagaagtaggcgcaatgaggagtcattttcattcacaagctctaacagagaaagttggggcagatgttcatctttaggagcagccagtgatgaatcattctcaggcgataataatgataagcagaatttgacagtcaaggctttggctacgcctgtaagacaaaaccagaggcaaagccagaggaaaccgattgagaaagctaagcagaagaagattcaagccctatggaagatgtgcctagggcaatctccgcagcacaagaggaatagatcgtctggaaccattacaacttcatagctctgacaactctactgaaccactgattgtccaccatagattctcccttattctgacctactcattgccacgttgtaacctatataccctaggtgaatatatgctacatgaccgcattgtagcatgccaggatgttcgaaagctgagaaagcacttgtatcatctcttgtaattgcctgaaacaagtgtaattgccatctctggctcgttgtcgcatgcaatttcctttcccctcttgcatcctgtgggccttgtatcatctcctgtaattgcctgaaacaagtgtaagtgccatctctggttcgttgttg

SEQ ID NO: 169748 - DNA, 510 bp, Zea mays
  Clone ID: MRT4577_86395C.1
tctgatgatatgtttattcagcctcaccattgtgatcgtattcaccaggcatatgggggggataaaaatataattaaatttgatggtgatcataattctccaagacctcaatcatattatgattcagtttctatattcttctacaaatctttgcatcctcctctgctgcctgcagcacgatcaaagcttcatacgggagcatttaaagttggtaacataaccaatgagaatttcttctttgaaatcatcaatggtctacggccagcaaacactgcaggttgcagttcatcaaccgatgcacctaacatcccacatgatggcacatctgtaattgaattgttgtctgatagcatgaaccaactgtccattaagaatgagaatcacttgctgcaggactttcttttagatgaaaaccacagcctgccagagattgatagtgatagtgcctggatcacgattgcaggataattcattttcgctctttgaggagtcattttcattcacaagctc

SEQ ID NO: 169749 - DNA, 1056 bp, Zea mays
  Clone ID: MRT4577_86396C.1
gcacgaggcacgatcaaagcttcatatgggagcatttaaagttggtaacataaccaatgagaatttcttctttgaaatcatcaatggtctacggccagcaaacactgcaggttgcagttcatcaaccgatgcacctaacatcccacatgatggcacatctgtaattgaattgttgtctgatagcatgaaccaactgtccattaagaatgagaatcacttggactttcttttagatgaaaaccacagcctgccagagattgatagtgatagtgttggatcacgattgcaggataaaagaagtaggcgcaatgaggagtcattttcattcacaagctctaacagagaaagttggggcagatgttcatctttaggagcagccagtgatgaatcattctcaggcgataataatgataagcagaatttgacagtcaaggctttggctacgcctgtaagacaaaaccagaggcaaagccagaggaaaccgattgagaaagctaagcagaagaagattcaagccctgtggaaagaagattaagcgcgaaaaggtggagatgggggacagcctatcttcacgtttgaagatgtgcctagggcaatattcgaagcacaagaggaatagatcgtctggaaccattacaacttcatagctctgacaactttactgaaccactggatgtccaccatagattctcccttattctgacctactcattgccacgttgtaacctatataccctaggtgaatatatgctacatgaccgcattgtagcatgccaggatgttcgaaagctgagaaagcacttgtatcatctcttgtaattgcctgaaacaagtgtaattgccatctctggctcgttgtcgcatgcaatttcctttcccctcttgcatcctgtgggccttgtatcatctcctgtaattgcctgaaacaagtgtaagtgccatctctggttcgttgttgaatgtaatttctttctcttgcatcctgtagtttgcggcgctgcaagggaacaacggcatggtgatgaaatgaaatggccccatgcgtttgttgttttt

SEQ ID NO: 169750 - DNA, 514 bp, Zea mays
  unsure (1)..(514): unsure at all n locations
  Clone ID: MRT4577_86397C.1
aacggggccccgccagtgtgcctnnggaattcgccccccttagcgtgccgtcccgggcatggtaactaaaaaaaaaaaaaaaaaaaaaaaacaaaaaaaaaaaaaaaaaaaaaaaaaaaaaaaaaaaaaaaaaaaaaaaaaaaaaaaaaaaaaaatttaaaaaaaaaaaaaaaaaaaaaaaaggggtttttcccttggcgggcccccccttaggggggatttttgcatttttccctcccccggggggcctttggggcttccttttgggggccccatttccccttttggggggtggttttccatttccttggccggcgtttttccaaactttggggttgggaaacccttgggtttccccattttattccctttgcagcccttcccctttttccccgttggggttttaccgaaagggccccccccgttgccctttcccaacatttgcccaccttaattggcaattggcccccccttttaccggccctttaaccccggggggtgggggggttccccc

SEQ ID NO: 169751 - DNA, 292 bp, Zea mays
  Clone ID: MRT4577_86398C.1
gtgcagctgctcgcgcctctgttcctggccatggtggtgttgtggcgtacaatgtcgtgtgtgtcgcggtagcatcctggcccatagcagtccgcgtagtagagttcgcccggccgcgacctcgctttactcctcgcgccgttgctcgtcgagtcctaggcatctgcgcgcacgtcttatttggcgccaaacatcttcgtgccacacatactcatctttgctagctggccgtgcacctcactccgttgttctgagtccgccagttaccattgctcatccgcatcaagacatc

SEQ ID NO: 169752 - DNA, 580 bp, Zea mays
  Clone ID: MRT4577_86399C.1
cccggtctagttctatacgcgaacggcgccctttttttttttttttttttttttttttttttttttttttttttttttttttttttttttttttttttttttttttttttttttcaggacaggggtcgcctttttattaacaaaaacaataggtccccaaacagggtttccattataattagcccttgtggccaacaaaacgtttttttccatgatccaaatccataatttggcggccacaaacaaagtttcccttacccttgcccatttaaaaaaatcgataacccccgctgggcgttttgggtttcccattgccatctcatgaatagagcccagcatgatttttggcccacctagaaaaaaaagtccaaaagtccctttcaactttgggactgggtgttgccactgtttgggatccccccggaaagcccccctctaaggtccttccaaaaaatcttgccgggagggattcttcgggataaaacccggaaaaaaaaccctggggaccctcttgaaaaacacaaccccctttgaaacaaactggttgaacctcgttcccactgatccaaaacccttcact

SEQ ID NO: 169753 - DNA, 418 bp, Zea mays
  Clone ID: MRT4577_8639C.1
ttttggattttaagtaccaaacatacttttttgatggaaggcgggaccagatatatatgtgctcactgtttacggagacaatggtcctcctacaacaagttgactgggtgacaataatcccataccatgataaactcggagcattctcctacaaacgcatcatcctgtgattccataccgagcacccgcgcctcgggatcttaggccccatgctgatactatgaagggtggaaacctagcactgagcctagcaatacatataactagagtctggacaaccgtcccatatctggggacataagaatccatctgcgtcacattaatctgtccgtggctacaagatactgcgttcttgaacgagtcccatgaggggtcctagtcacgggtcgcggtgacctgtgaagatcggtgggtggat

SEQ ID NO: 169754 - DNA, 251 bp, Zea mays
  Clone ID: MRT4577_863C.1
gggggaggaacctgcttgcggcgcggtagcaaaatacgcaaaggggaggagtaaggaaacttgcatcctcccctcccaaaatggtttcaaaatgggcagggcagagtggtacgcccttgttcccccatttatgccggaacacccaaaagggttattaccctgacccgggccctcaacccgggggggagagggggcaaagagtcctaccccaccgaggtccaggcggggagggctttagccccttccggggc

SEQ ID NO: 169755 - DNA, 374 bp, Zea mays
  unsure (1)..(374): unsure at all n locations
  Clone ID: MRT4577_86400C.1
cnnnttngttaattcccctcanacaaccaaaataccgggggggttttttaaaataatgggggttttttttccttaaaatttataccccgacccccaacatgatatttcaaaccctattattttcaaaattcaaaaaaaaacacatggcgctaccttaattggttaaagcccccccttgctaaaatggaaccccaccatcttaaaaggcaccaaataaatccctttttccttaaaccttttcacccccattttcggtctcaaaaatacctggaggggccccttttgccccaaatttttggcccccggttaaaattttaaaaaattgtaaaaaaattaagggctttttttttcaaaaaaaatcccttttggaaaaa

SEQ ID NO: 169756 - DNA, 296 bp, Zea mays
  Clone ID: MRT4577_86401C.1
tctccttgttgcgcctagtggtgccttgagaattgaagacatgtaggtgactctcaaacttcttggaaagagatcctgtgtgaatgtaaatgctgtcagtatgacttttaattgtgatgtgaataatcattgagtcatagtcactgtctttcgggatcctctttggaccacagatatccaagtcagtcattatcatagtattggccagtggactttccttcttcctctccatcacgtcttcccttaagttaaagtgttagagaagaccttcttcccataaaaaggttggtggatcg

SEQ ID NO: 169757 - DNA, 849 bp, Zea mays
  unsure (1)..(849): unsure at all n locations
  Clone ID: MRT4577_86402C.1
agcagtggtaacaacgcagagtacttttttttttttttttttttttttttttttttcttttttttttttttttttttttttttttttttttttttttttttgtttttttttttctttttcggtcttttttaaaacaaccccggggggggaaagggcggggtctaaaaaccggggggggggcgcaccacaacgggcccgtttaaaccaaccaagggggaaaaaaggccgggccccaagttcccaacctctggcgggccccggcacctttaagaaaaaaaaaggggggaaccaaaaccctggtcttttgctccgggcctacgagggagcgcaggccccttttagccggaacaacaaccccccggcgaacagggggaagtcccccccaaaaacggggggagggggacccgaagaaaccccccctagggggccgcgaccggcaccttttttctgggggggtcgcgggggggagcaaaacccggacccaccccccctgtggtggggggggggcccccccctttttcccggggtgggcccagnggggggggccccccccgggccggggggggtttgggggcccctttttgcccccccccggagaaaatttcccccccccccaaagggggccccccccccncctgggggtcccttttttttttggggggggcgcgcccccgggggggtggccccacccccccccaaaacgggagtgtttgtggccgcccctccggggggggggggggaggggggttcccccggggtgaccaacccccagggaggacttggggggggggggcggggggccccccgccctgggacccgcccccccggggggggccccccggggggccc

SEQ ID NO: 169758 - DNA, 650 bp, Zea mays
  unsure (1)..(650): unsure at all n locations
  Clone ID: MRT4577_86403C.1
ggtaccctccgnggtttcggccggnaataaattggagtcagggaattgcatggatttaaaaaaaaaaaaaaaaaaaaaaaaaaaaaaaaaaaaaaaaaaaaaaaaaaaaaaaaaaaaaaaaaaaaaaaaaaaaaaaaaaaaaaaaaaaaaaaaaaaaaaggaaaaaaaaaaaaaaaaaggggggccttggggcccgattttttgtcccttttgggggggtttattggccccttggggtaaaaaaggaaaaaagtggtttcctggggaaaatggttttccgttcaaatttcaaaaaaatttaagaccgggaggcataaagggaaaacctggggggcctaatggggggggttacctaaatttattggggtggggttaattgccggttttcaagggggaaaacttttgggccaagttgttttaaagaatggcccaacccggggggggggggggtttgcttttggggggtttttcggttttttggttaatggattggttgggctgggtcttcgggttggggggggggttttaggttttttaaaggggggtattaggtttttccacaaaactggggtttaaggggggaaaaaactggggggaaaagggcaaaaaaagggccggtacccgtaaaagggccgttttgttgccttttt

SEQ ID NO: 169759 - DNA, 577 bp, Zea mays
  Clone ID: MRT4577_86404C.1
cctcgaggccggccgggattgattctcgccatccaccatgtgtccgtgttcagccgtacctcggttacatgactgcaatcgtcttcaagcttctctgtgtcagcgctcgatatcgttatgccgggtgttcttctccgtgtggatcagaacatgaggatgcaaccactaccgctataatcttggctagacgaccagcctagccttcgttccagcttccaagatgaccatgagaaacctgtgaccgttgatcctcttctctttcctctcagtcaggaactggctcactctcctgctaaagtggacagcatgtttatccacatccggtgaggctctgacgagtcgatggagtatctccacaccacaggagcccattgcgcaccctgaatcgcgagctgaaacatctctcgctgcatcgcctgtatcgcaactaaatccgccgctctgtcgcgcttgtagcactccacctgcagtccaccattgatgctctgcccggatctctaaataatagggctgtccaagagaccgtaccttggccttcccgaatatccgtttcacgagctccacactgtacaagaat

SEQ ID NO: 169760 - DNA, 603 bp, Zea mays
  unsure (1)..(603): unsure at all n locations
  Clone ID: MRT4577_86405C.1
cattgggtacctcgnagccggccgggagcagattccttctttcttcaacgtcgtctcctgctctctgctgccgtcgtctgccgagaacgcctgacagatgctatcgccagatccccaacaacctcttcccctagcccgggtactgccgttatgcccctgacccccctattccgatactacgatgttggattttacaaaaaacccgttgatgagttcccctactgtgtgttccttgtctcttgacatattgagaatgtctccagcgatgatcttgacgctgtccgcattgtctgctgcaagtatcatgaccatgtctgaatgaccttatgccattactcacttccaatccccgttcatccccttccatgaccttctgatacgcgagatgctttcgtgtgttgtgactgataggctccaaactgtattgatcatcgacttgtgtgaagatctcagtgacctgtagctatgctggacattgatgcagcctcctttctgttcgatgcgaagacaactgtgcttcacttgcctgctctcttctgcgtatggccaagctccagttacctgcccagctgaagattattgaaaacagaaagtggatgttct

SEQ ID NO: 169761 - DNA, 663 bp, Zea mays
  Clone ID: MRT4577_86406C.1
gaaaggagttccctaaacgtgatcttgatgaagaggctcatatcttctctggcatgatgattgcattgtctggactcatctcgagctcacatggttacttcaaggagcagatcatgaagcatggagggaaggtcaagaattctgtgcttggtgctacctgtgtcgtggcttctccggctgagagagacaaaggtggctctggaggatttgctgaagcattggagcgtggaactcctgttgttagtgagaattggataatcgatagcattgagaaaaaggaagctcatccttttgctgcctatgatattgttactgatgttgttctggaaggccgaggactcccgctaggccaacttgatccaagtgaggaggccattgagaccttagctgcagaggttaaacttgctggcaagagatctgtccacaaggattccaaactcgataaagacggtggatgtgtctttgagaaggatggcataatctacaactgcgcttttgctgtttgcgatctcggatgccagatgaacgagctatgcatcatgcagctggttatggtccctggaaatcgtttgcacctgttctacaagaaaggcccaattggtcatgaccagatggcggaggaacgggtggaggattttggtagccgtgtcaatgatgctatta

SEQ ID NO: 169762 - DNA, 470 bp, Zea mays
  unsure (1)..(470): unsure at all n locations
  Clone ID: MRT4577_86407C.1
ttttgccgcgactatggtcaggtgctaccaaggccagaccgagccatccgcgcggctaactatggcggctgcggcgctgatactcatcatcctggcggagttcacggacacgacgggccgggccgacaggttggtgaaggcgaccgtgcaggtccagagagacttcctgggttttgggaccctgctggctccgtggagtggggggatggcggtgtccgccgtgcaagagacgaaggacgggaaggccaagaccgacgacgggatgaccgagaagaacgggctggagttcagcatctggaaggggatcaggttcaaggaggaagaggtgggctacgggaacctgttgaggacggacgaggtgatggagctcctggtcaaggaggggggcncgtacatgagcaccttgatgacgttgttcatcgggtccttcactgtatgtgacctactacctagcgtcggagctggcgtgc

SEQ ID NO: 169763 - DNA, 372 bp, Zea mays
  unsure (1)..(372): unsure at all n locations
  Clone ID: MRT4577_86408C.1
atcaccactccgatcccgccgcgcccggggcccggcggaaccccaacattacccagtaaacggacgatccagcgccctgggaggggagtgacgggggcggtacttctagtcttaagtttgtttttacttttacgcattaccattatcattataagctcattagttcaatctctttcttattaggtaaataagctcttggtccacgtcaggggcgttacgattttnatatttatagtaaagatccttaagaagaacatgaaatngtttctcctaatcctattgtttgtcgtctattaggtcatgaacaaggtaatngtatacttccttatcgtacactttttacttgttaaggtgcaattccacataaacaac

SEQ ID NO: 169764 - DNA, 241 bp, Zea mays
  Clone ID: MRT4577_86409C.1
agattaggtcattagaatggaaaattggttctttgcactatgattccatttgtgcctacctaggccccgttctaaacctctaaaactaatagtcagcaactaaaattagcggagaggtttagaatgggtcaggtaatgaaccagctaattgttagctatatactcaaagtagccattagttgttagctacttcaacccagctaaaatcagcgaagaacttattagctaactaacaattagc

SEQ ID NO: 169765 - DNA, 345 bp, Zea mays
  unsure (1)..(345): unsure at all n locations
  Clone ID: MRT4577_8640C.1
cgggncgaccacgcgttcttttaacacaccaagcgaagtgctagatctcaaccnacaacaatggcgggaggatattagtccttcttgcgcttcttgcccatttagtgagcgctacaaatgcgttcattattccacagtgctcacttgctcttagtgccattattccacaatatctcccaccagttacttcaatggtgcttgaacattcattcgtgcaagcctacaggcttcaactagcgcttgatttgagcgttttacaacaaccaattgcccaattgcaacaacaattcctggctcatctaaacctacaaaccatcttatcgcaacagcaacaacagttttctt

SEQ ID NO: 169766 - DNA, 1274 bp, Zea mays
  Clone ID: MRT4577_86410C.1
tcttgctggcggtttcttctcgtccggtcgccatggtgcacgagacgagatcacgggtgcacgcagctgcccaggaagaaggcaagctcgcctcaaaaaagcagaaaccagataatgaaaccaaggaaaggggccagaatgtgccctccaagaacaagaagtctgccgacaacgaagggaaagacggggagccggaggcgccaacaaagagcaagaagctcaaagctgaggaatctgagccaaatgggagggaagctgctgcaagagagtttgcagagttttgcaaggccataggagaacgcctctccctcgaggacatgcgcaagatccttcaagccaatgagcaagatgcttctggatcggaggatgcggtcgttccaagatgtgaggatatgatgttctatgggcctctcgagaagtgcccagtatgtgagggtcagcttgaatttaaggagtggaaatacgagtgcactgggaactacagcgagtgggcacgctgtactttcagtactaacgacccttcaaggagaagcggttctatagaagttcctgatgacataaaagatgattttatccgcaagtggctgaagcaacaagaaggaaaggagttccctaaacgtgatcttgatgaagaggctcatatcttctctggcatgatgattgcattgtctggacggatgtcacgctcacatggttacttcaaggagcagatcatgaagcatggagggaaggtcaagaattctgtgcttggtgctacctgtgtcgtggcttctccggctgagagagacaaaggtggctctggaggatttgctgaagcattgtaatgccttgcctgatatacttctgtttttgacatgttccttgatttgagttgtcataaaaataggtagcatggttgaattaaatttgacaactaatactgcacagggagcgtggaactcctgttgttagtgagaattggataatcgatagcattgagaaaaaggaagctcagccttttgctgcctatgatattgttactgatgttgttctggaaggccgaggactcccgctaggccaacttgatccaagtgaggaggccattgagaccttagctgcagaggtgttttgccttgatctagttcattttgcatgtgccagtcacaaatttatttagttgctcaatagcaatgattggattgagtaggttaaacttgctggcaagagatctgtccacaaggattccaaactcgataaagacggtggatgtgtctttgagaaggatggcataatct

SEQ ID NO: 169767 - DNA, 406 bp, Zea mays
  Clone ID: MRT4577_86411C.1
gtggtctttatgttctaggctgctgttgtggcagttcactgaaatggaggtggcatccatcactttgtaaccatacaacccgatctccttgcatattggacaagccgcggctaggtcagggctgcatttgaccgatagctcgtcaccgcactaccttcacaagcaatactgcgcccttcgtacccgagcttggacaccggactctttaaagccagacgattagctgatcaccaggtgcatttccccaagggtggcctaaagccactgcgccaaatcggcacacggaatcatatccaaagattctgggctgagctggcatatgccaaacctgaatgcccccgtacggccccggggttacccctggcatggattgccagtcctgattgtaaaagataccgttagaacc

SEQ ID NO: 169768 - DNA, 398 bp, Zea mays
  Clone ID: MRT4577_86412C.1
attatctctttacccagcgccgtgcttccggtggagacacccttacctccccacacatgccacctctgacgtctactctggctgcacactacaccgaatatactggccggggctccacatcgtgcccctgtgaaaacacggctcgcacaccatctagggccgcgctgatgatatccctgtttctgcatgcttgcgcctaggcagcaggccaaggcgccaactccacggcaacagtgccgcaggacgacatgcgactggaacgcgcccccaaggcgcacattaaccacactgactgtcgtgtgttacaccgcagacgcaccctacaattacgcaccgccgtacaaccctctccttgtggtctccgcccttcgtcagtatccctttggccggctgtgccc

SEQ ID NO: 169769 - DNA, 261 bp, Zea mays
  Clone ID: MRT4577_86413C.1
gaccacgcagtcaccgatgcgtccgcctaggcgtcggaccaggcttccgattttgaacactcaggttcacatcaggtcaatctccctatgaagagtttatcgatttgggtacctggaaatgaactcttcatgcgcttcatgactctattgtgaagtcacgttatcggtgaactaatttaaaaagtacacgtggattaaggaccatgactggattattcccccgaacatttaattcgttggggcccccgggcataggcgggg

SEQ ID NO: 169770 - DNA, 501 bp, Zea mays
  Clone ID: MRT4577_86414C.1
acccaaactgccatgcgtgagaattgattgacagaaagaacaggaacttaaccaacacaagacagaggagggtgcagccgggggaggcatggggcaccgggcgcactgacaccgggccccaccaccattaccacccgacgcacactttatttagcccacgttatttgcagcccgcaccggacacgttcacgcgaaagtaactgtttgctacgtaccgggtttcgtacgaaacaaacacacacacacacagagagaccccagtaaccgtagcgtactgaacaaaaaaatcccgtgttatactgccatgtacccgcgcgaaaaaataccccgccacgcgcgcaagccgattccctggggcctgggccctggccccccccgtttggtgcgcacgggcttacttggtggcctttttgggctcctaaagagcagaaacctccgccttggggggcggtttctggggaccaacaggagcaggagcaggagccttcggcttgtccgggg

SEQ ID NO: 169771 - DNA, 414 bp, Zea mays
  Clone ID: MRT4577_86415C.1
aatctagttgtttcaccattacattgcaaccatcagtatcatgcagacttcgatatatgccacgatttgtatggtctcatcattggagagcatgttccacacatgccggaaaaaattccctcatacatcgttagtcatcagacacacaccatcatacgctcttgcttaaaaaaggtaagtgtgtgtttgcgaagagaattaaaggcaggccggcataaaagctaccctgacggtggtgaggatgacgaactggtcactgttgtcgatcctcctctgcgtcacctccagcgccaagatgacaccacaatcctcgatatagtagtcgtcgaacgcgcgcgacatgacgagtaccgatgactcttggttggactgccaaacgaagtgcaccacgggctcattaacgaggtagtaccc

SEQ ID NO: 169772 - DNA, 254 bp, Zea mays
  Clone ID: MRT4577_86416C.1
cggcggcgcatcagcggcagcagcatccgaagatggttaaggtccttatgggcggcaaggcccctatccttcttcaaggccgttttcccggcaggaaagcaattatcgtgcgcgttttccaagagggcacccgggaccggccctattggcactttcttttttcaaagctctcccaattccccaaaaaagtgttccccaaaggctccccccaaaaaactgcgaaaaaatcccgcgtcaaatgctttattaaactc

SEQ ID NO: 169773 - DNA, 201 bp, Zea mays
  Clone ID: MRT4577_86417C.1
cacgcgtcgcaatagccaacagttcaatattgccttactctgttttgcagtgctgtcgaccattttcccatgctaagctcctatgcttcttttcccgaccttaccacggcttgttggaaaacccaatttaacctcagaccaacgcaccactggcattacttataccctgtctccatatacctaaccattccttgggcatat

SEQ ID NO: 169774 - DNA, 243 bp, Zea mays
  Clone ID: MRT4577_86418C.1
acaactttgtcacaacagtcaatttctcaacccacaattgctttaatctcttccggcaattcagatttgttgctttgtctcagtaatttctctacggttttccccaataagtgatgtgcgctctctcatcataagagcactggaattctaagcttcataaggtgccatcaagtggcatataggagatatttttattacctatttagagtattaggttattagacattggattaaaatacaaag

SEQ ID NO: 169775 - DNA, 281 bp, Zea mays
  Clone ID: MRT4577_86419C.1
tcccacgcgtccgaaaaaatttaacacctttacaaaaaaaaacaaccaaaaagaaaaaaatgaacactaaccaaccgtactaagcttctacaccatacctaaaattcactcacaaacataacatccctcttattaaaaactaaacccaatctattgaccgtaaactatctaattcttacactacgaaatctcttccatttcccaatttatttcctttatttataccgacacattcactaattttcaaactcttatacaaaccaactcttttttttgaacct

SEQ ID NO: 169776 - DNA, 432 bp, Zea mays
  Clone ID: MRT4577_8641C.1
acgaattgctagcgaccaacgtcaacattattctaacaacaacaacaaaccagaagcggaacaacgcaccaagggaaaagggatggcttcgttaaccatgatggcgtccttggccgccgggggggtggccggcccttcgggccggggaaccttcgccggggtaaggtccgccagggtcgaccgttgccagaagcccgccacgttggcagtaaccgaggccaggcccgccgcctacggacgccgggccgtattgctcgcggttgttgcggcggccttggaagccatggggggtgccggggccgccatggtgggcccaatgaacgggacccccgaggcgaaaaaaaataccgcggccttttggtgaaccttgccaaccgccatggtttgccacatcttgacacgcccgctttgattgcatttgcagggccgggg

SEQ ID NO: 169777 - DNA, 1665 bp, Zea mays
  Clone ID: MRT4577_86420C.1
cattgggtacctcgaggccggccgggatgtcctctactccgtccatcttctcctctgtcttccccttttccttctaacgacaccaggagagaaatttcctcctgtgcgcgtgaaacaattttcctcctcgtgccacgagatcatctccaactcaatggaagacctaaaagttacggcttcatagtcccatcccaccacgaggggcacggtggtcggtgggttgagggttctcagctggctggagactggagcatatgttttctttcaagtccaggcagcagagtcagggtttcatgggggaatcagacgtgaaggaacagcagctgaacaggctgcaggaggagctgaggaaggagaaagagaaggcacgcgccctagacgagatacaagacctgaaaggcgaactggaggcagcaagagattcagagaagaagatgctgctgtcattgcaggctcaaacaaagcagcttgagcagaccaaagtatccctggaagaggccaagattgagatagcttccctacgagacagtaggcagccgttcaagaatttcaggagaaggggtttgatgtcattctcctttgctgaccctggcgaggcggagacatggtcgctacagcgtgagctcaggttagctgtggaatccgaggagaagtgcaacaaggccatggatgacttggccatagccttgaatgaacaaaccacagaggccagagaagcaaatgtgaagctttcattggcgcaagccgagttgaataatgcaaggacccaagtggagaccttgaaggcctcgctagaaagcgcagagggcaagctccagttggcactggaagaggcagaccggctaaaagtcgagtcggatgaattggcagctgcctcaaaagaaaaagagagagggctcgttgattgcatcaagatgtttgaggaggacctaagtaaaggacaggaagagaacgataagctgattgaattacagagggtgaccagagatgagaattctcggctgagagagatgctgaagcatgcggtgggcgaagctaatgtagcaagagaatcgctggagattgccagagtggagaattctcgccttaacgaagagatgtttaagaaagagagtaccttgcagagtatcaaccaagaatatgaatccctcaagatcagcgaggcagccgcacagagtagcattaaagaattgaaggatatgattgatgctatgttcagttctgagtcgaccaaaacgtcagcagaagcatcacctcgtgaggccaagggaagcaagatgaaggaaacttctgtggcagcagattatgtgtattctgatgtcgaaagatctactcgtctggacgacataaaaaaccctggaaagcagaaaaagaagacaattctcagaaaatttggtgaaataatgaagaaaagaaactcttaaattgtaatctagtattacgaaagcagtatatcttccattttgtttgttcagatcccttgagcacacaggacagctggaatgccaagatttacaatgatgaaaagatgtgtggggtaacatttttttccttttttacttcatgccatggatttagactacaaagaatggagcatactgtacatacatgtcaaaatacagagaatgaaataagaaagtgtcatagccttttatggttttataa

SEQ ID NO: 169778 - DNA, 297 bp, Zea mays
  Clone ID: MRT4577_86421C.1
tcgcagtacttctcttcccggtccctggatgccacccacaacgttttgatccggcccgatcggaacttcggaccgggcttctggtcttagatacacactggcaactcaatatcaaaatattcataccattcaaccgcagcatggggatggtagtaaacagcagtgcagtttcggtcttcattgcgctggttggcggcgttattgcgggaggagtaattaccaagggtggactgggacgacgaccaacaggcggaggcaacaacccaggaccaacaacccggaacgacgttgacaccg

SEQ ID NO: 169779 - DNA, 281 bp, Zea mays
  unsure (1)..(281): unsure at all n locations
  Clone ID: MRT4577_86422C.1
tccgntgggccancagctttgaccgccgcctccctnccccnccnnnacngnncctccccaccccactcncccgcaggngnggnggnggcggnggngaggtcgtaccccacatcggngagcggcggcggnacngncggnggnaaaggnaagatgtttgggcgngngccgnagaagngcgacaacaccaagtactacgagatcctcggggtgcccaagtcggcgtcccaggacgatctcaagaaggcctaccgcaaggntgctatcaaganncaccccgacaa

SEQ ID NO: 169780 - DNA, 179 bp, Zea mays
  Clone ID: MRT4577_86423C.1
acaaaaatccattacccacaaaataacaacatttcacacccacacatcctaatagacgaaaagaatcatctcaatctccattcattcctatcacttcatccctccctatctactaactatcccatacattttactaattttactcaaacaaccaatcaattcaacttataaaaattcta

SEQ ID NO: 169781 - DNA, 248 bp, Zea mays
  unsure (1)..(248): unsure at all n locations
  Clone ID: MRT4577_86424C.1
ctacaacagcgacaacagttacttattccactagcggtggctaacccattggtcgctgccttcctacagcagcatcaattgctgccatacaaccagttctctttgatgaaccctgccttgtcgtggcagcaacccatcgttggtggtgccgtggtttagattacatatgatatgtactcgatattggtgccctcctagcggcgtgtgtttcctatntttattcattctcttgcttgagatttatctcg

SEQ ID NO: 169782 - DNA, 318 bp, Zea mays
  Clone ID: MRT4577_86425C.1
ctgccacccatctcgtcacttatggtgcccagccgctcgctgcgcaactactagcgcaccgtcccctcctcacccatggccgcggcgtgcgaacaaccaaccataacagcatcaaatgaccacccgcttgcacgccaatagaaccgccacgagtgccgccatcctaataatgccactcaacccgttacaagtacccctcgacgacacctccgactctgctacaccactcaccgcccgccatctcaccgtccatcgacccgtaccgcaaatctcaactgcccccgaatactccattgcaccagcctcccctctctgcca

SEQ ID NO: 169783 - DNA, 260 bp, Zea mays
  Clone ID: MRT4577_86426C.1
attcgtctcgagcacgcattttgaacctcaggttttttagcctcatgtgcgagctctcatgctggaggggcttttaaaatagcttggggcggctacagcacacgaaagacgagtggttgtgcacttccaacatgaatacatatttcatgtgcgtaatgaacgcataagatgttctcaacttaacactccataatatgtagctgatgcttcagcagttgtttctcctgatgctcgggaacaacagaactctttgcaacgat

SEQ ID NO: 169784 - DNA, 414 bp, Zea mays
  Clone ID: MRT4577_86427C.1
aaaaggggggttcaacacacaaaacaccccccggggggaaggggtataggggaaggaacccccccggggatggaacccccccccttttatttttttttttttgggtgttaatttttttttttttttttttttgttttttttttttttttttttttttttttttttttttttttttttttttttttttttttttttttttttttttttttttttttttttttttttttttttttttttttttttttttgcacaaataacatcaccagcatgccatgcaaatactacggtatgtcagacaagcacgataccagtgcagtgagagcacctgttgcaaccgccaactagtgttgctccaccccgacacagctagtgtttctcccagaatcaaccagccaggggagatcacccctcgcc

SEQ ID NO: 169785 - DNA, 204 bp, Zea mays
  unsure (1)..(204): unsure at all n locations
  Clone ID: MRT4577_86428C.1
gtactgctgcagcggtacggcgaatcctgtcctcttccagtactcgcccttctccacgatgtacgtggcgttgaacggaccccttgcgccaggcatggtcgagttcgctgctgcttcgtcgtggggaacaagcttgatcgcgtagctgttgctgtcttgtgaaacctccgtgtagcagcagcnncagtgccagnaagcatgtgc

SEQ ID NO: 169786 - DNA, 434 bp, Zea mays
  unsure (1)..(434): unsure at all n locations
  Clone ID: MRT4577_86429C.1
gcgtttttccagcgtccgcccagcgtccgcccacgcgtgcgcggacgcgtgggcaacgacctaacaacaatggcttccaagacattatccctccttgcgcttcttgccctttttgtgagtgcaacaaatgcgttcattattccacaatgctcacttgctccgagtgccattattccacagttgctgggtggcggtacttcaatgggcttcgaacacccagctgtgcaagcctattggctccaccaagcgcttgcggcgggcgtcttagaacaaccaattgcccanttccaacaccattccttagcacatttnaccattcantccatcgctacgcatctgctccatgctctgtgcctcctagccgtggctgcccttttcgcctccttgcttccccgctgcttgcctccaacccccttgctttggctttcgttgct

SEQ ID NO: 169787 - DNA, 379 bp, Zea mays
  Clone ID: MRT4577_8642C.1
aagctgggaattcggctcagccgtggccccgcctaataatgaaacgaaccggcaaccaaaatgaggggtttatataagggaagccggggtgacatccctgacaggcattggaagacgtgacagatactttgttgatcccagcgacgggtctgggaccaaagataataagtatactgttgaccaagcagaagcaccagaggtgaatggcctacatgaattgaagaaaactacagataagagtaacatcagacatgaagccatctgggagagtgctacgactctagagcagattccacttggaaatgaaggtgcatctgaaagcggacaatgatgtgtcgacgcactcagaaagggctctgaatatcgcctaacaggcagc

SEQ ID NO: 169788 - DNA, 216 bp, Zea mays
  Clone ID: MRT4577_86430C.1
ccgacgcatgcgcactcacgcacttaacgagcttctcaaagctgaccccaaggatgaggatctttaaacactgtgggcgatcatacgatgcttcacgtgccctgacagatacttacagaaagtcatgcgactggctcttggaggcatggacaccgatcaggatgacctcaccagggtcgtatctactcgcgcctagggaggcctgcagctgttaaa

SEQ ID NO: 169789 - DNA, 587 bp, Zea mays
  unsure (1)..(587): unsure at all n locations
  Clone ID: MRT4577_86431C.1
tgtgctggcaattancgccctttcgnagtcggtccgcccgtgtgcaggcttaaaaaaaaaaaaaaaaaaagaaaaaaaaaaaaaaaaaaaaaaaaaaaaaaaaaaaaaaaaaaaaaaaaaaaaaaaaaaaaataaaaaaaaaaaaaaacctttggccgacccccccttggggcgttttttgggttttccttcccctgggggggggtgggcctttttttttgggggcccatttggcccttttttggggggttttccattggcctggccggggtttttaaacgttttttttggaaaacccttggggtttcccaacttaatcgctttggggaacttcccctttttccccgttggggttttttgaaaggggcccccccctttcccctttccaaaattttgcccagcctccttggcaattggcccccccctttggggggccttttggcgcgccgggtgggggggtttttcccggggtgacccttccatttgccggggttttaccccccgctttttttgtttttttcccttccttttttgccccgttggccggtttttcccgtcgggcttttaagggggggttccttttttgt

SEQ ID NO: 169790 - DNA, 390 bp, Zea mays
  Clone ID: MRT4577_86432C.1
catctaaatctatctatttggtgtcagaagaaaaaatgatggaccactttatttttttgtttcgctagctgcctacgctttaaggagggggggcgtgcccccaccggcatggcacccaaagcctaacgccaactcttccttgagacaaattgcacaccgaagaaatttatttacttatacctgtgcctcaccacacaaactccatatgacgccgactgctgatcgctcccttttttttgtctcaaccaccccagcgcgttttgagcaaaagaatcaattcccttgttggcatctgtggtgcacatggtgaatccaacaatgcactcaaagcttatacccaagccaactgcatcaacaggcatgtcctgactcccaagcctgctgagtgaa

SEQ ID NO: 169791 - DNA, 115 bp, Zea mays
  Clone ID: MRT4577_86433C.1
tttaaacccactttcaaagtgccagagttgcgggtaattgaaggggcggacgaagagaacaaactcacagcccaaggtgacagcaagaatcctcccctcacaggtatatgtggcg

SEQ ID NO: 169792 - DNA, 281 bp, Zea mays
  Clone ID: MRT4577_86434C.1
tcgggataatatttgctccaagtgacaaggatggtcagaccaaagaagcaaataatgaccaacaagaagaaggtagtagcttgatgcgaacattggttgccaaaagggtgaagtcaatcaactgtggtgctagtgcttcacaatcagagtcggagaagtcccttgctgaagagaatgaagagcactctaccaggtttcatattatggagcggtggaaggtgaatcttacaagagttgcaattctagggcgcatggctggtgactgtccagccagccccatg

SEQ ID NO: 169793 - DNA, 419 bp, Zea mays
  Clone ID: MRT4577_86435C.1
gcggacgactggagctgatttttttttcttgaagccgggtatgcctggatcaaaccctgggactgggatggagatgggtattactcccattgggacctctggcatgggaagggaacttgttggcggatcgaatatcattggtgttgacctcagggtgagagaggatctggctgtgctgaatggtgcccaaaaatgtgcttgggatcgtgatccctattggggaagctgaggcatatgttctgtcagcaatgtgtggcatggatcgccagcttggaacagggagggctcttctcattatactacaggtttggtttcgtgcttcattgttgtctgtggggatgaacttctccagaaaagctgtggcttgggatccgacatgcttatgatggttgctaccactgtctgcgagaatatgatct

SEQ ID NO: 169794 - DNA, 248 bp, Zea mays
  Clone ID: MRT4577_86436C.1
cgtgcgcacgctcggaatctcgctatagggctccagttctaatatgaacctggaacttccctggcgatgctggaccaaattttgcgtgctattgatcacttataccctcatgcagatatatcctttattttcctaaaaatagcctgaatctctgctgacaacttagtcttcttcttctcctttgcagatcatggccaaggtagccacattcggatcttgtagggccaactactgctactttatgtttc

SEQ ID NO: 169795 - DNA, 399 bp, Zea mays
  Clone ID: MRT4577_86437C.1
caccgagggggtgggctgggtagaggcggttaggatggagaggtgtgagtgcgtggccaggaggctgttggcccagggtgggggagaagtgaccagcgctctctgggtcttcccagggacagctggagagcagtgaaaccctcccctgcatgtgttcgtggctccgcgcagccaggcctcgccttggctcctctccagatcctacagcagggccaggactagggcctggcgagcagagcctctgggctggctgctggccctggcactcagctcctggcttcagggaagcacacagcagtggacggactgtcccaggagcacaggggtgatgcaacccacagctgagaagtgccttaatgctgggaggctgaaaagtgggggtggctcacagtcctggcc

SEQ ID NO: 169796 - DNA, 1961 bp, Zea mays
  Clone ID: MRT4577_86438C.1
gcctcagcgacattggttttgcggtgggtcgccctcaccctgtataattgcaacactgcagtactgcaaccggccggcactcccaggctccaagacgagcacgcacgactgtctgccgtcttccttagccatggacgcccccggagcctccaccaccacgctcctcctctacggcgcgctcctcctggtgggattcctcttcatcgcggtcgcccgccggagcaacgcaggccttccgccgggtcccacgggcctgccgctcttgggcagcctgccgtctctggacccgcagctgcacgtctacttcgcgcgcctcgcggccaggtacggccccatcttctccatccgcctgggctccaagctgggcgtcgtggtgacctccccggagctggcgcgcgaggtgctgcgggagcaggacctcgtcttctccggccgcgacgtccccgacgcggcccgctccatctcctacggcggcgggcagaacatcgtgtggaaccccgtgggccccacgtggcggctgctgcggcgggtgtgcgtgcgggagatgctcggccccgcggggctggacaacgtgcagggcctccgggcgcgggagttcggggccacgctcgcccacctccacgcccaggcccgcgccgccgcccccgtcgacgtcggcgcgcagatgttcctcaccgtcatgaacgtcatcacggggacgctgtggggcggcaacgtcggcagcgagggcgagcgcgtcgcgctgggcagggagttcaggcacctcgtcgccgagatcactgacatgctcggcgcccccaacgtgtccgacttcttcccggcgctcgcgcgcttcgacctgcagggcatccggaagaagtccgacgcgctcaaggaacggttcaaccagatgttcgccaggatcatagagcagagggtcgacgccgagcgggccggcggcgagcccccggcgcccgacttcttggagtacatgctcaagctcgagaaggaaggcggcgacgggaaggcgtccttcaccatgaccaacgtcaaggcactgctaatggacatggtggtcgggggcacggagacgacgtcgaacaccgtggagtgggcgatggcggagctgatgcagaagccggagctgctggccaaggtgcggcaagagctggacgcggtggtgggcagggacgccgtggtggaggagtcgcacctgccgcagcttccctacctgcacgcggtggtcaaggagacgctgcggctgcacccggcgctgccgctgatggtgccgcactgccccagcgccgacgccacggtgggcggctaccgcgtcccggcggggtgccgcgtgttcgtcaacgtgtgggcgatcatgagggaccccgccgtgtggaaggacccgcgggacttcgtcccggagcggttcctggacggcgccggcgaagggcgcaggtgggacttcacgggcagcgagatggagtacctcccgttcgggtccgggcgcaggatctgcgctggcgtcgccatggcccaacggatgacggcctactcgctggccatgctgctgcaggcgttcgactgggagctgcctgccggcgcgcggctggagctggacgagaagttcgcgatcgtcatgaagaaggccacgccgctggtggccgtgccgacgccgaggctgtccaagcctgagctctactactccgcctagtccaccaccaccaccacatccatccactggactgggccattcggcagaggaggaatgtaacatatttggcccacctgccctccctcgtgaatacgttacatactgaacagtgatgttttaatcgaaagctccatagattgttacctcctacataggacaaatctgccccgcatcaacaaccgttgaattgtggatgtccacgtgcgctagataatctgatcttatctatggttatctcattatctgacaaaaaaaaaaaaaaaaacccgcggcc

SEQ ID NO: 169797 - DNA, 708 bp, Zea mays
  Clone ID: MRT4577_86439C.1
gccggccgtttcgggtcctttctctctgccggtggcggtcggagccatgaacttgttcgcgggggtcggcggcggggcggcggacggtggcggcacaggcacggcgctcctggagctgacgccgcacaagatggcggtgtgccacctcgtgcaggtctttgcgccggcggcgcaggccgggggcgacgtcgtgccgcccttccccttcgagtccctcactcaccacaaccgcctcggactcttcctgtttacgctcacccggtcatgcgatgattttctggagcctccactggaagaatttttgaagcagctgagggcagtggatgatttgactaatggttggttctgcgagcagctgacaagtgccctgtcagcactcaactcacctgatgacttgttcaacttctttgataagctacgaggtgtgttcactgcaccagagggtgcgagtgcagaagatgtattcttggatccaaatagccaacttggagtatttcttcgttgctgcatacttgccttcaactcaatgacctttgagggtgtatgccatctgttggcagatcttgtcatgtactgtaactctgctgatgcttcatatgacctggcagaacatgaggacttcaatagtgaaatgggcaacttgatggatgcagacataggttcgcacgctggtatatttgacaaatttcatcagggttatgcctctga

SEQ ID NO: 169798 - DNA, 124 bp, Zea mays
  Clone ID: MRT4577_8643C.1
ggtattcagtttcagaccatcagaatctccaaccgaggacatggcatttcattatccaccggagcggaaatacctgggcttcctaccggaccatgtggcccacgaaccccaattcgggtctccc

SEQ ID NO: 169799 - DNA, 255 bp, Zea mays
  Clone ID: MRT4577_86440C.1
gaaaaaaaaacccccccccggtccaagggcatcgcccccgggaggaaccccccgaaaacgagcggcccgctccccacggggtcgggggattccatgagctggtggacttcgggcccggtcagctgggggcccctgggggccaccccttttcggaattagaccacggggaaggggccccttttggccgagaccaagcttttgaacatttccttgagcccacgggtcccctcctccgacgggccccccctgaagacc

SEQ ID NO: 169800 - DNA, 409 bp, Zea mays
  Clone ID: MRT4577_86441C.1
actactaccctataattattctacgttaagttactctaatataatgagacctgctgtgctatgcatctgcgcattatctattcaggaattgagatacaagagatcctgtcccacctggatcaacctcaaatcctgacaggacgattaccacggttggctgagccccaatatggcgtatgacttcgaggagaacgccgcacgtgagcttccaagagttccgagttcggatgaggtactggatcaccatggtcgagacgaacgtccactccatcgccgcctacgacaacggcagccttcccctccattcgatggtccccgccgttcgggttcgccactaactgcaccgccgacgtgaacttcagcgtcgaaaactacgtcttggcccacatctgcatactgtagcacgccg

SEQ ID NO: 169801 - DNA, 908 bp, Zea mays
  unsure (1)..(908): unsure at all n locations
  Clone ID: MRT4577_86442C.1
gctgactctttttgtgagcatagttttngatttccccccttaaatattcaggtggtacattatgagaacccaaaacatcggnattatttgttcacagatctgggnaaaactgcacgagcagggaagaaggcagtgcaattctaatatacacgtatgaacagactagagctgtaagggtcatcgagcaagatataggatgcaggttcacagagcttccgaagagccagtttcagacgaggctgcagacatgtttaatgtcatgagagatactcgctctagatcagttggaagcagaagaacaggtggaccttttagccgtgaaggttatggtgactttgaagaccatcgttccagagcttcggtgattttgagagatttggtggttcctctgaccgcggcggtggattccgtgactcaggttcaaggtaccacggtggatctggaggtttcagacgatcttccagtgactttggcaggcctagcttcagtcgttctgatagatttggcgactttggagacagtgatttcagcagacgtggtaacgctgactttgggcgttcccggagctctgatgattcaggctcctcacgttatccaagaggctatggtggttctggcacgtcagattccggcaacttcggtggcttcaagggttccaagtgatgaatcggatagggttttcttgtacagttctgaaccttttctaacacctgttgtatgttccttccctgaccaaaccagtagcacttgattcacccgttgtttcacgagtagtttggtgttgtaggcctgtagggttctttcagaacttctgcacttctgatacaaggttgtttcagaacctcctctttaataatcaaaaaaaaaaaaaaaaaaaaaaaaaaaaaaaaactagttctagatcgcga

SEQ ID NO: 169802 - DNA, 355 bp, Zea mays
  Clone ID: MRT4577_86443C.1
gaatacaacaattggcattggttaatcaaaagaaggtcctctgctaatccagaaagtgccacacatgaggaacacagctgaaaaaacaggactcgaccagccaaccagcgtcaacagcacgcttccagccgaggacatcatgcgactcacaaccagaattacgacagaccgaactacagacagagcaagccacaagaaaaaacaccactggcttgcccacaacctactacccaaagcaatcatcaaaagcagttgggcgacccaaagactagtacacatgtgtgctaacattctgcaccagacctacccacacatttcctaaaaacaactcaggtcctcgtaacagcctctatga

SEQ ID NO: 169803 - DNA, 146 bp, Zea mays
  Clone ID: MRT4577_86444C.1
gaagcacatacttactgacctccgttacttcgttgatggacagtatggagctcatacttagggagaagaataaaagcaaaaggatatcccacgctttccattagccctatttgcataccaagctaacattaagcttctttctaggt

SEQ ID NO: 169804 - DNA, 464 bp, Zea mays
  Clone ID: MRT4577_86445C.1
attcctcatgtttttctatttgttttttatttatttatgtttttacaggctttttttcacattgtctttttttggataccccggcccatggccagcgctgaacagaggctacacagtgactttttggcttgcctgggatccaacagccgttacaaaaaatagagagcataagcacagcgtacaaaccaagaggagagccagcatgcgaacattttattgaatttaaccgtaaaatcccaggtacccactctgcttacctgtccacactcgcaagaaagaggctggggcccttctaccccacgcttgcgagtaggccgaaaaagctcttaatagaaggagtccacgccttacatctcttgctgctttcccacctattggcagggggtgggaagccttcttcaaggcgactgtatacaacgttcgcctgatacacattcccatcacctgtcctagaaacggggccg

SEQ ID NO: 169805 - DNA, 341 bp, Zea mays
  unsure (1)..(341): unsure at all n locations
  Clone ID: MRT4577_86446C.1
gcggccccaactacccncagtctcggaagagaactatccagaagcgcaagactccaaagccgtcgcgttcgtatccattccgttcttggcccggggggtcggctgagatcacatanacaatggtgaaggctgttgctgtgcttggtagcagcgatggtgtcaaggcaccaatctttttcacccaagtggaaaagggccttacaattgcaaccgaaggggcttttgccttaagccttgccttcattggtttcatgggccttcccttggtgaccccacccatggcttcatggtaactggaccacacttccattctgcgaaccagggaccttgagcccccgaag

SEQ ID NO: 169806 - DNA, 563 bp, Zea mays
  Clone ID: MRT4577_86447C.1
ggccgcttttttttttttttttttctttttttttttttttttttttttttttttttttttttttattattttttttgttttttttttaatatcacattcaagccccgaaaagggtatacgggaacgcccacgcaaaccaaaaaaaagaaggggggcaaagaaccatcaaacgggctcaaaaaaaaaaaggaatcgcgctgagcaaaacacaaacagggcggctgaaggaaccagacctaaggccgcgaaggcaacccttgggggggcctcctcctgctagcggggggaaaccccccgttgcaggtgaccataaccgccacagggggggagtccgggagggaaaaggacgaggcggcagttatacggctcttccttcctgccaccaataacgggcggcgtgaacagccacgacctggtgaagagcaaggacgaggccttagggaattccgagcccaggccatggggcatgacgaaagccaggtatttgcttgcgggacccgcatggacaaaggggcgcccgctgccttaaacgaggaggaacccgtactgggccagggaacgga

SEQ ID NO: 169807 - DNA, 431 bp, Zea mays
  unsure (1)..(431): unsure at all n locations
  Clone ID: MRT4577_86448C.1
ngcctgggccggaccgactccacgcgcccgtgcttacagccaccctggcgcgaacacatgggtggggacaccaacaaatgccgccgctggaaatcaagctcccagcagatggccgagtgggcctggccttgaaccgattgtccggatggaggacctccgggcctccactgagataaagaaggtgccaagcaagcccacatcaaagatgcttctggcagctattgatgaaagccaccggggaacttatgattttatctacccgcccattgacctcaagacctttccagggaaaaggggggaggaaatccaccagggggaagggggcctaattggcttatgctggaatccaaggaaaatcagttctagtggctcattgccagaactcaagtttgatgaatgaggataaacgctgtcgacctatactctttcac

SEQ ID NO: 169808 - DNA, 406 bp, Zea mays
  Clone ID: MRT4577_86449C.1
agaggaaccacaaacctggggtcttgttacacaatgggccaatgaagaagacttacgaaaccagagtgggactcccaaaaacccattgggcattggcttataagttgcgccaatacggatgcaacatggtattcaggccagggaccggtttgacaaaaaacgaaccggtccctatttttgaagggtttttcttccaacagggaaaaaaagataattcatttatgctggatagggggcaaaaaccaacttccggcaacaaccgggatttcatggctgatgccctccaccagaggggggggcggggggggccagaggccaaatgatacaaccgggcgtgtctttaaaaatggccaaccaccaagctggaccactgggaatgggagccaagggccgaccctcgttgctg

SEQ ID NO: 169809 - DNA, 160 bp, Zea mays
  Clone ID: MRT4577_8644C.1
tggatagagtagaaatggtagggttcttaggagcatatgctgcatatgataactgttgtttgatgacaagaaatggataagttcaacatgaactgattagaagagaaaatggcagaaaaagaagtgcgataaggtgctgaagcagaaaggcaaggggaag

SEQ ID NO: 169810 - DNA, 366 bp, Zea mays
  Clone ID: MRT4577_86450C.1
attgtgaacaaacattattaacctaaattgccaaagaaaatggacgtgcaacgaaaatatggaatttaccagtatcagtctgtcatttacatttcgtaatggagcattgagcacccattgtattcgcatatctacatgaataaggctctcataacatctcctgacaacaaatattcattacgattgggaacataacctaaatccttactataaacattcctagaccaatttacatatctacatgaataaggctctcacagcctcacattacgtatcgctctaggcatagctccaagacatcactgctcttccaaacacaatataagaggtatacgtgaataaaaaccttgattctaattctataac

SEQ ID NO: 169811 - DNA, 283 bp, Zea mays
  Clone ID: MRT4577_86451C.1
cctttttcatatctaaagggccagggcgacacaaatcagttttggactaatcggccagacgccaattccaactccatcttcagcacagcagagacacacactgaaacacgtgtgcatgtgctcctacgtgcatacctacgactacgactacgactacaaatgattggttgattgctgatacataaaggagctcatacatgtctgcattgatgagccccccgcccgaaaaaacaaaaaacgcttctttcggataggattacaaagcttgataatttttcggaac

SEQ ID NO: 169812 - DNA, 495 bp, Zea mays
  Clone ID: MRT4577_86452C.1
gggggggaaaaaatccaaccttcggattatagcgggcccacccggcccaaaggacccctcaaaactttaacaggggggggggaacccatgagccccaagttctgaacaaaaagctaaagcccaaaaataaggccctcaaaggaaggccccctttctttgagggaggaagttccccacagcagcccaggggccccttcaacgggccttgaaaaaaccaatgcccttggcgttgctgcggaacccctgcctgcaacacatgaccccgtacttcctgatcaaaccgggggggttcccccaaccccggctgaaaaaccacaaacataaagagttcccggggctaatttgttgtattgggaaaaaaaccctttgcccaaaaagggaaaaaacggtctatttccacatctttttaacaaatcgcaacccattaaaaacaaaaccccctggggcggcttaagccccacatttgggcataaatgcccaatacaacagaccaaa

SEQ ID NO: 169813 - DNA, 2500 bp, Zea mays
  Clone ID: MRT4577_86453C.1
ctcgaggccggccggggagcccgtcctactcctcccaaagcgaagtcaaaacggaaccaaatcacaaagcgcaaggggggtggccctgccccggagaaaggaacacccagaacggtcgctctcccccggccccgccgagatggacacgggctgcctccaaccaccctgacttcctcgtcgggaggggtcgggaggcgacgcctccgacgcctgcggctccgcctctgcctcccggtcctcctccgcccgccgcagcaagggggtgcggctccggctccggctgcggcgaaggcggcaggagccgggccccgccgctacgcctgggggtgagggtcagggtggcgccggcgtgcaggtgcaggacgacctcgcgctgcccctcgggatgtcgttcgcggccgtcctcgcgcaggttgtgaatacaaagaatcgttcaggcgaaagattacagcctgcacttctttccaagatctgtacatcggcagtgaaggaatcattgagaaatatatatggtaacaagttagacagttttatgagaaactttgagaaatcattcagcagcacattgacaacgcttcatcttgttaatgagatgcctgtctatggacaaggtccagttcctcaatgttcttctaagcatgaagactctgaagcttcaagcaagttgagcactggtggtacacaaaatctaacgcgtgaaatcaagcaggagcgtttgaattcagtggaaagtcagcttgttctttatgctggcggctatcagcagatgactcgccgcgctcatagcttatcttctcctgaagctgatcagcgcatccttaatgcatttgagagatctttgaaagaacaaactcggtcaaatgagctcaaggaatttgagataagccttagcatgagaaagttgaagctaaaacagtctcaactagaacttaactcctattcacacatgttagacaagattaagttatccttgggatttcagaaagcttccttccaagtggaaaaattcaagactcagatgcaggacacgaggcatgcacaaataatgaggacactcatagattttcttgttagtgcagtgattattatgtcagtatgctttgggtatggaacttatacttattcataccaaaggataactgatattacagcagcatgttcagccacttcaaagggatctaaatcatggtggatgccaaattcagtgtcaaacttcaatactgggttgctcttcataagatgtcatgtaatagctgcaacacggatgttctttggtatagtaatgattttggcagttgtttggttagcgttccagcgctctgcggtgtctgtatcaagtatgccagtaacttttaacatcattctgttgggagttatttgtggctacgctggaaggttctgtaccaacacacttggtggtgatgggaacatgtggcttatatgctgggaggtactttgttccgtccatttgattggaaattgttatccatcggtcttgtaccgtgttctccatggtcctatatctgtatctcatagcaaggagtctgtctggttcccgtattggattcgccgttggatgttttatgctgtgctggggttttttatcccagccttgaatggcttactgccatttgcttctctttctgactggaataaccatttcactaaggagctaaaatccatcttcattgatgagagaatcgaagcctgaatgaatcatggatgcaacaattggtgcagtgttgtcctttttgtgccagcggtgcagccaaaggaaagcgaggactgaatgatctttagctgcaactagtgcacaatgtcaatgatttctgagaaatgaaatggttctgtttgagaagcgattcagaagttcagcttggtgttgtctcaagagaataatatatgggatggaagttataggcaccgttcaaggaataagttgactgtacactactgcaggagacgctagcattttgatccaactcaacgtgctttcatcagtgcctcctaccaccgcagtcaaagcttcagatgatctaggattttgacttttgagatcttcgtgtctcttcgacttcaaatgcctcgatttgccctaggcattttatgatgcaagtttacattacagttcagcgtgtaggcaggttcaccaccagttggaaattctgttgaattcgtttttgttgtctttgttgtagctcgataatttgtttttttcactgtaaatatcaagagccgtttatctggtactggctgcttactctttgtggttagtttatgtgcatgttatctccgggcttgagagaacacagcctgatgttgtacttgttcagtgtgttcatgtattgtaagtgcacttgcatttaagcccaaaaactaatgtaagattttgatgtgtacaatttttttatgggatcatatacccaatcatgtaaaaaaaaaaaaaaaaaaaaaaaaaaaaaaaaaaaaaaaaaaaaaaaaaaaaaaaaaaaaaaaaaaa

SEQ ID NO: 169814 - DNA, 106 bp, Zea mays
  Clone ID: MRT4577_86454C.1
agcgctcacgcgttcggagtggcgtatagcatacagcactatgaaccatatgggctgtccctggcgacaacttcctgccgcacgaatccacacaaggtaaggatgg

SEQ ID NO: 169815 - DNA, 137 bp, Zea mays
  Clone ID: MRT4577_86455C.1
tctgccctttctttattatttccttacaccccactcatcttcttggggaaatttttacaacgtagggttgtaacccacactccgtcagattgataagaaccgtcagaaacattacactattggtgcgtactcgtggt

SEQ ID NO: 169816 - DNA, 231 bp, Zea mays
  unsure (1)..(231): unsure at all n locations
  Clone ID: MRT4577_86456C.1
tagtcattagcgacgtagctcgatcgctcgagcttgaagcgcacagactctgctcgcagtgctgctgtatcatacatctgtatntagtggtggctgacttctatatcagaacacgtacgagagtcttacgtgggtcaagatcgtgtcgctgagtgcanagcgcttgcgcgactactcagtgtggaaggaagtgtgctgaccaatgagtagtgagattcatgcaactccgca

SEQ ID NO: 169817 - DNA, 377 bp, Zea mays
  Clone ID: MRT4577_86457C.1
cccacgcgtacaccgacgcatgcgaagatatttggcattgttgatcactgcaagtgtactgatggccccatttgctgagactcttggcgcgatgtatacgaaaccatggattggactggtacatgcaactttggagcttgcatggcctgcgtttatcacatggagccaatgggctgcagcacgctctgatctgtttccatgtgacctttgtgctgacttggctaagctgtacacagaagcaccagctcacagctttacctatactaagacaactgatgagatagctgttgctcgaaagctatcatacattgttgaaaactttcgatgaggaccctgttgcatcagtaaaagctgctcaagcgcatcgggctgctcta

SEQ ID NO: 169818 - DNA, 239 bp, Zea mays
  Clone ID: MRT4577_86458C.1
ccaaaaccacctatctcacccctcctcctttttttcacgtcccccgcctctatgcgatcgggtgcgggtctatgggcatgggaatgtcctcctccttgcactcatcttcggccacggctcaccaccagcaatattacccgcggcagacaggacggagcagtctcgtgccgctcgccgcgctcatcaaggatgaggcccgcactgagcgccaatccatacactgcggcgaaagcaggatc

SEQ ID NO: 169819 - DNA, 422 bp, Zea mays
  Clone ID: MRT4577_86459C.1
tgtagctcattgcggtgttcatcccactatgcgtcccaggcctgatcgaggccatgatggaagtcgtcaagcggatgctctgccgaaggcgcttcaccatgttcatcaccgagctgatcatgcacatgaccatgttcgccaacctgatgtacgtcatgcacgacaaaatgcggtgggaagtggacttcggcttggacatcctcttcgtccaggtgctcgccacggagctccacagcgtccaggactgcatgaaggacttcatgaagctctacatacagctcgacacggcggacgtcatggaggtcgtgtcccccgtgtccgccccggtcgccgacgtcttggtggactacttttgcaacaccctatgcgaggtcgcactggaggtggaactgtacgtgtacgcctacatgccgatcggcgcg

SEQ ID NO: 169820 - DNA, 688 bp, Zea mays
  Clone ID: MRT4577_8645C.1
ccggccgggccgggcatttcctcatccattataaaattctacccgccgccatcgaatcggcttcccaggtaatgaggagagtgcacgccacacggctatcatgcaaatgcaatacccgcgatacgacatctcgacggacatggccggaaggcgcagttcacgggaccatcatccaccaggcgggttctcatgtacggcgggctgacgacgtacctcagtgagaagaacaaggcgcgctccatcacgatacggaaggacgagaaggtgtaggacgtgcgcggatcctacgaggcccgtgagtgaaaggtgctgcaggagaacatgcctcgctgcttcatccacgtcgagagcacttccctggacaacgtatacgcatcacgcgtgaacgtgctgatcctgacatgctacggaatggacagaggggtgaacttcgacaaggatcgtaaggctcgtcgctcaagcggaaggtcgggcagcgactcgtctatgatgctagcgaggacgatactgctcgacaaggcagtgacgtcgtgcgatgctgcaagctccagctccctgtctgtccaaaaaatattgtaagcacatcgcggggattcgacgagtgcagccgcgccgactacctgaagcacaagagtgatgctacaattgttcctgaagatggcaacgatgagatgctcgaaaagcatgg

SEQ ID NO: 169821 - DNA, 145 bp, Zea mays
  Clone ID: MRT4577_86460C.1
cacgtttatatgcactttcatggagactgcaatacgttgctatgagcactttctttatccttggagtttaatcctttgcttcatctttctacagtatgacataatgatttgctatgttgtaaaatctttgtaaaaaatttctata

SEQ ID NO: 169822 - DNA, 2257 bp, Zea mays
  Clone ID: MRT4577_86461C.1
gctcaggtgcccctcgcttcctttccaaatccgtgcaccctgctcctcttttgtaatgcacctggtcgccgaggagagttcctcgacgacgtgatccgcacacacgactaggagaactgtctccaggtacacgagaggaaaaaggaagcagcgaagaaacctatacaaacaaggttatccaagctgctaaagaaccagggctacgtccttaccataatccatatccgagaggtaaccttctgtgatgttataataaacacctccatattattctacatagcgagccacaacagaattttttttgacaacattttttcacattctattcgatattaaattagtttataaggtaaataattccaaattggtaaaagatgagttcaaccttggcccattcttctcacagctgcaggcattagccaacagacctacatcttgcatatgtatttctcttgcatctacttacctctatggttctagcatatggctgcatatatggctgattatgacactgatatatatgtttcgatttccgatgaaaatacattcatatcaatatatgttaccataacttttttgtcgatcgtattcattgttgctagaattctatcagaacaagcatgacaataagcttcgctgctgactctgcagatatccacctgcaatatagtgataaataatagaacatttgtgagatgtcgtggtgccccatcatgatttctttgcttgccttcaaattcttcctatgatatggctaacaaaatgaaatggtagattcaggtgacttcgcaaccttttgatgtttaggttagaacagtgtgatggtcaagttgtaaaaatggttgcaaaattgctgaatacatgttgaagaaatggttgcacatatgattgattctggaagaaatgaaatcactagagagaagaaaataggcgctgaaatggtaataggaacttgaagtttgtccttttcagacttctacccagaaaatgattttgtttcgttttccttgcttaatattcctaaatttttgactgactaagttagtgctctattgaacactgaatgctgaatgactgacactggattattatttctcgtagcacagactctcgcgaagtgcgaacaatctactcgttcaaataaaaaccaataagatatgtggtaacttcaccttggtttcatacaccttttcagttgaactgatgaacccatgggcatgggctatttttgcacatacctcaatactaatccatgcatagatgttgtttacacttcacagtgggaggcaatgcaactcaacaggtaacattattgcatttaaagttctgttctaccagttctgtgatggaatggatgattctatttaagcctcaatgtcacagcataagggatgttcagtaatcgagctacgatctgggattggtgagaaaattcactgccagactccctgctgcctttggttgtatgaaagctaaatatactatgacctgttgtatgcatttctggcgtattgtgtagccgtttctgcaagggtggtagagcataaatgatgcagttaccttctatacttgcatcattccttattattcagttgaagtgccacacatattgttagataaatgctgcacttcagatatccattgtgtgctgagtatactattacatgttatatccttttcaggcgtatactttagccaatacaacaagggtggtagagcataaatgatgcagttaccttctatacttgcatcattccttattattcagttgaagtgccacacatattgttagataaatgctgcacttcagatatccattgtgttgggggtcttcttctctaccaaaggtcctcaagacaaaaacacattcggcaagataatacaaaggctctccgaaactatcatcaacctcggctttgcatctcaagacaaagactttgtgtataagcaacgctgcagaatgctgaaggctcaataccttcggctcggatcaagcaaagaaataaaagactaaatagaccttattagctttagttgcttgtaaataagcgtttaaggatacggatataattttattcgggctgcgtcccgtgcctataaatagatgaatagtaacctcgtactgttcatactggattgtattcactttctcgcatccacacattcgagcaagctgaatgtatcaatgtaatattaacattgtttatattcatttctattttatggaaaaaaaaaaaaaaaaaaggcccctagggcc

SEQ ID NO: 169823 - DNA, 504 bp, Zea mays
  unsure (1)..(504): unsure at all n locations
  Clone ID: MRT4577_86462C.1
ggaccgccgccgtcgccgccccgccacgtttttacggtgccttctcctccgcagcaccgccggcggccacgcnnnnnnggggggcgcccgggctggcaagactatcaccctataggtggagttgtctgacatcattgacaacgttaaggtcaagatccaggacaaggagggcatacgttctgaccagcagcagctcatctttggtgggagacagcttgaggtctttcttcatgcttgctgactacaacattcagaaagagagcaccctccatcttgtgctccgtctcaggggaggcatgcagatctttgttaaaaccctgacacggaagactatcaccctgtaggtggagtcctctgacaccattgacaacgtnaaggccaagatccatgacaaggagggcatatatacagaccatcagaggtttatctttgctgggaagtagcttgatgacggtcgcacgctttgggtctacaaaatgtagatggagagcaccctacacttgg

SEQ ID NO: 169824 - DNA, 327 bp, Zea mays
  Clone ID: MRT4577_86463C.1
gcgacaagttccttatgcatcactgcacgctgacggacacgccctactgctcgcctgagtggcagtctttcctgtatctacggtgtctgcatctcaggccggtgtagccgcataaccggtgccagtctttgtggcagcctcgttgccagcatctcatgcaggtggagccgcatctccgattccaggctaacttgggctttggtctgcattccataccgcaggaacaaccgcagagcgggcaagtcctgatactgtcggcggatcaaatagcgcaggatcttacggcgatgtgcggactgcattcatccctactcatgccctacctgt

SEQ ID NO: 169825 - DNA, 383 bp, Zea mays
  Clone ID: MRT4577_86464C.1
cacaaaccacgcagcggaggcgacccacaaaaaacacgcgcggcaggaggaaggcgaggaagcatccccttgttcaattgaccccaccaccgcccgctgctgcttcgtttctagctcgagagagtttagtgggttgcttgattccgaagctccgagctcgtgggattgaattgagcccccccaagatcagaattggagcagcgggttttggtttcctgcttggtgccgctgattggagtacgcttcttttgtggtggttgagaggctgctcggcttccgccgaccatgtccgtgccggcgatagccgtgtacaccagcccgcccggcgccgtctacgcgccgccggagctcgagtccagctcgcgcggctcggcgccgtgcgc

SEQ ID NO: 169826 - DNA, 678 bp, Zea mays
  unsure (1)..(678): unsure at all n locations
  Clone ID: MRT4577_86465C.1
gccggccgggttggggtggatacccccaaccccagattcttctggccacgcacccgaaatccacacctcacaaaccacgcagcggaggcgacccacaaaaaacacgcgcggcaggaggaagacgaggaagcatccccttgtgcgccccccctcatcctctcaatcccacggattcgccggggtaatctcgccacggccgtgctttgacgccgaattcatgctctgtaggttcaattgaccccaccaccgcccgctgctgcttcgtttctagctcgagagagtttagtgggttgcttgattccgaagctccgagctcgtgggattgaattgagcccccccaagatcagaattggagcagcgggttttggtttcctgcttggtgccgctgattcgagtacgcttcttttgtggtggttgagaggctgctcggcttccggcgaccatgtccgtgccggcgatagccgtgtacaccagcccgcccggcgccgtctacgcgccgccggagctcgagtccagctcgcgcggctcggcgccgtgcgcggccgcggcgtccccgtcggcgccgagctcccaccgccacgcggncgtcgcgggcggcttgtcctgcctattttcgtccccgtccgcggccccgcgggcaacggcgcacgaggagctcggcgcgctctggcacgacag

SEQ ID NO: 169827 - DNA, 568 bp, Zea mays
  Clone ID: MRT4577_86466C.1
actccactccagcagtgaacacttgcttgcttcagagggtaggtagctagctgaatcacaatgcgatcctaccaagatcgcgggcgtgcaggagccacgacacgacggtgacgactactaacgcatggcgctcctgtggggaacgacaacgaggtgctgacatgtggtagcctcgcgggcccatgctgctggaggactaccacctgagcgagaaggtggcgcacttttctttttagcgcatgctggagcgagtggtgcacgcgcccggagcctccgccaagggcttcctccagtgcacccacagacatgacgtcggtgacatgcgccgacttcctgcgcgcgcccgacgaagacgacgcccgtgatcgtgcgcttcttgtaagcgatcctctagcgaacatcccaggagactatgcgagacccgagagggatggccgcaaagccttacacccgcgatgacaactgggacctggtgggcaccaacttacgagatttgttcatacgttatggcatgaagttccgctgactacgatgcacccgttcaaaaccagcccgcgttctgacacgc

SEQ ID NO: 169828 - DNA, 603 bp, Zea mays
  Clone ID: MRT4577_86467C.1
taaaaaaaataaataaaaaaatataaaaaaaaaaaaattgaaatttaaaaaaaaataaaaaaaaaaaaatagatggggataaaataaatagatcttgttcaatttcattatatttactcctattaaatctaatagaaaatatgggggttctttttttagatattttgggggggggcctctttgaggaccctcttctctgttccccgtttttgcgtcttgcgttttttttttgtttgggccttttaattatttacctgtggggctctttcttttcttttctttttgaaaacccccgggtgaccccccttttattccctgtggttttaacttcctttgtcgccgctgggtgttttttttaaatggcctgcccttcctttttttctaaatgtccgcccttttttggcttttatcccccccttttatgggctttcctccccctggtgttttgtttttcccaaattgggcccctttttcggaggtgttcaagcccctttttttctttttctttttttttctagcacttacagcgggtcccttatgtgtttttagtggggcctttggtgtctccttttgttttttgtcgctaggccccaaatttttttc

SEQ ID NO: 169829 - DNA, 299 bp, Zea mays
  Clone ID: MRT4577_86468C.1
agctcactttgtagagtgtagcggtacggctttctttctcctcttggcaggccgctcacgcttctgctcttctgatgtgagcttcgaatccaaccagcgttgggcgatggctactcttttagcccgaagctcctcgcttcatggcccaggtaccctccacaactgaaggtatgagatcgaaaaacaaattggtgacatgttgatgcaaggtgtcattcagaagagtcatagccccttcgcttccccagttctattggttcggaaaaagacaatacatggcgcttttgcgtggattacag

SEQ ID NO: 169830 - DNA, 364 bp, Zea mays
  Clone ID: MRT4577_86469C.1
taaaaaaaaaaaagaacgaagaaacaaagcaaaaaatttttttatatattagacaatctaaggacgaaaattagcagatattaataaaaaaaggtgttgtcctttagccgggccctcccttggggcaaaatctccaaatttccttcccacggggggcccttctaccgtcctttaagggggcctttttgtccctcctgggagggttgaaagttaggggggctcgaatattatctttttttgtggcgggtaaacctatcgcgttcgcccttaaaatgttgtgtgtaacccactcttgatggtctgaatgtgggtgatttgtgcgcggtcttttgttttgttttttaattcatgtgcaccctgtgtg

SEQ ID NO: 169831 - DNA, 330 bp, Zea mays
  Clone ID: MRT4577_8646C.1
gtggttgtgttttttcttttttgttttttttttttgttgtttttttttttttttttctcaaaacggggggaatcttcaagccccccacgttttggcggcaacacccaaaccccaggggcgggggagcccctcccctgcccccggctaattcccaggaccgggcgggcccccaaacccttgcagcgggggctcaagcttcctgggcgcgggcctccccttgcggaccccgggggggacctggatccctctcgcgcaaaactgattgggggggcccctcttccccccttgacaaagaccgggggggggattgaacatactggctgcaggggg

SEQ ID NO: 169832 - DNA, 363 bp, Zea mays
  Clone ID: MRT4577_86470C.1
ccggaacggcagtttcgactcagaccgacgcgttacgaaccaaccaaacagtgcatacattcatgatcggtcagacttgggaccaaactctggaagacccagctactgtcttgtggtgagagttaccagtacgtgcatacagacctgcatgcattcataattgtgtggtgtacaccactgaactgaagccagcgatgatatgatcattcggctgtaccaaacattttattggtgcaactacacgtgtgactctagcagggtagagctctgtgattggaggtctcaagtatagagcgctcctcttgtactttaaaataaacccgtttacccatgatgatgctatatgtagtagatttctcttct

SEQ ID NO: 169833 - DNA, 663 bp, Zea mays
  Clone ID: MRT4577_86471C.1
gccggccggtccgggctacatcaaccatttcctcccgtggcaagtctctctgaattgggctgcttagctcatgtggcgtctacatgcatccaagatccggtacacgctattcaacatacgacgaatcctcccgatactacaccgaagcgccgaccggggggcctcgaaacaacgactccgacttaagatggaagcctgcacacagaaacgcaagcccatcgtagcgccgcctacgtcttctccatagatcatgacaaaatgcagaaagcgtcacggacctgataggaggatgctacctgtcgcaggaactcttggaggctcggaggaccgaaggacgctcgcacagaccctggagactatgctacgatgcttttggtctgagcaagaagccatagggcgtcgccaagtgacaggcctacgatgtgatcgatgccagatggtgcatgctcggtgccgctggcgctgtcatcgcacaggcgtgcaacaagcccttcgctgactgcggacccgaggacgtttgccatgagaccgaagctctgctcctggataagaacaccctcagtgatcgccgcaacagcatcgccatcaaactgtggggcttcgcgatcgtcagacgtggctgactacctgaagtacaaaagagtagggaaaattgttcctgat

SEQ ID NO: 169834 - DNA, 203 bp, Zea mays
  unsure (1)..(203): unsure at all n locations
  Clone ID: MRT4577_86472C.1
agcccttccgcccgcgccgccgccgcctcctccttccgcaggagctccctcctcgcaggcgcgatggtgtacatcaagaaccagaagacaagggcgtactccaagcgtttccaagtcaagttcaagagaatgcgccaggggaagaccgactacagggccatgctgaggctcacaatccaggacnagaacaaaatacatacccc

SEQ ID NO: 169835 - DNA, 429 bp, Zea mays
  Clone ID: MRT4577_86473C.1
atctataccaactagcaacatacatagcacattattgtaccaacacctaaaaacaacggggacggcgttcttatacctggcgatatcacttaacatgtgcctaccgataccattttcataccttgctcacaagctgctataatgcactgatcgccgaacctctcaccacaatatcttccaatctgaaaacccaattgtcaaccatacgattccaacaacaactcgaacacggctattacaatgttcaccgcagaacgtacagcatccttttaacataaacaggcgctgccatttaaacaactaactgcattgaactctgctgcttatttgcagcaacaacaactactaccattcatgcagctagctgctgcctacccccggcaatttctttcattcaaccaactggcagcattgaactctcatgcttat

SEQ ID NO: 169836 - DNA, 682 bp, Zea mays
  Clone ID: MRT4577_86474C.1
tcagcctttgattcctaatgcaccattcaattatcctcttcagcaagatggaaaccctcagtactcttctgcccctttccagatgcagctaccagatactggatcagaacaaggttccatgtcaaatgtccagcctccagctggtcctatgagtttccctgaggggcctcagcgcccatggggtatgaggctgatgagtaatccatttcaatcgatggcccttggtcagggaatgattgatggtgcgggtgatcctcaaggtggtggtggccttgccttcatgcaagctggttttgggggcatgcctgatggctccatgaatacaggcatgcccgatagaggtgatggaaggggtattctagcacagatgcatatgcaaatgcagatgtcacttcccccacctccgcctacacaacctcctccaggttcacagcaaacgtttaacaggacttgatatttttttttgtacgaattgatggcaactcccagaattgcatgtcaattcattgagcaaattgtaattttgtcgtttttggcatgtaacctgtggactagatggctcagttctgttccctggttggataggagcctgtattatgctataactcctgtttgaatgaaatgttccgaaatttcgaaaaaaaaaaaaaaaaaaaaaaaaaaagtagcttgtggccggtac

SEQ ID NO: 169837 - DNA, 361 bp, Zea mays
  Clone ID: MRT4577_86475C.1
gacaaccaggggtgaattaaagtaaatcccataaaaaaacagataccaaataactattttgtagctaatttggcccacatttaaaaattcaagttgaaatttaattggccacaaaccaaggggctagctaccaacactcctttagattggttatcaccaagcgtaagtccctccttaaatggcggtcacctctttagcctaatgggaggttgacacctgcatgggaacttggacatataattcatctccagaaactgataatgctggcttgggccacaccttaactccgcacaagtgacaccacctgctctgaaatagtgaaacctgcaaacaaaaacttcttgaggtacaaaatttttcc

SEQ ID NO: 169838 - DNA, 1850 bp, Zea mays
  Clone ID: MRT4577_86476C.1
tcgaggccgggcattgggtacctcgaggccggggccgaaacccagcccgagaaaggaggaagaaaaactagaaaccctagcgatgctgcagatccgcctgagcaagattggctcgtcggactccggcggtgccgccgctagcacggcagctggcgccggcgcccccgccgcggttggggcggctgcggcgctcggcggcagcatcctggaatcggtcaccgtggcatgccccgaccacctcgtgatcgcggacctccccgtcgcgaagagcctcggtgccgtcacggcctccgctgccgccgccacgcgcgccatcggccgtcgctcccgtcgcccgctcggggagcgcgtccacatctgctcccgctgcgagttccccatcgccatctacggccgcctcatcccttgtgaacatgccttctgtttatcctgtgcaagaagcgattctagctgctatctttgtgatgagcgcattcagaagatacaaagtgtgaaaatgatggaggggattttcatctgtgctgcaccaatgtgtctcaaatcgttccttaagaaagcagattttgagttccatgtgcctgatgtccatgccaacctcctccaaactaatctagagaaggaagaagaacgcaatgagtcagatgctcctaacatcccctgtgcttctgcaggggatactcaaagacaatctcaaatgcctgaaatgtctactgcacgtgctcctcctccaaggccaggtgtttcacaagatcgtgaagaacgctcccgctaccaccagtccagggagcaaacaccactgaggcctccacccctttcaaaaccaccgttccatggtcgccattcttacccaccaggggatactcaggccgagaacaatccacctcaaggattcgaccggccatacaactgggcttctcaatcacgtcaggagagcccaggtgcggtgactccacttcgccaagaatctgaccacagtactcaggacaggcagcaattgatggctaatgcaccttttatgttcccgccgattcctcctcaccagggaaactttatgatgcctatgaatatgaatcagcctttgatctccaacgcaccattcaattaccctctccagcaagatggaaaccctcagtacttttctgcccctttccagatgccgccgctaccagatactggatcagaccaaggttccatgtcaagtgtccagcctccagttggccctatgagcttccctgaggggcttcagcgcccatgggctatggggatgatgggtaatccatttcacccgatggcccttggtcagggaatggttgatggtgcgggtgatcctcagggtggtggtggccttgccttcatgcaagctggttttgggggcatgcctgatggctccatgaatacaggcatgcccgatagaggtgatggaaggggtgttcgagcacagatgcccacgccaatgcaaatgcagatgtcacttcccccacctccgcctacacaacctccatcaggctcgcagcaaacatttaacaggacttgatatattttgttttgcacgaatcgatggttcctctcaaaattccatgtcaattcattgaggaaactgtaattttatcgtctttggcatgtaacctgtgagaactagatggctcagttctattccctggtttgataggagcctgtgtattatgctgtaactgtcctgtttgaatgaagtgttcccaagttacgaaattttagttcagggtgattggttgtactaccgttcacaaatatttgaacatatgacgtcgttcgtcttattcaaaatatttatttgaaaatataaaatttcaagttaaaaaaaaaaaaaaaaa

SEQ ID NO: 169839 - DNA, 453 bp, Zea mays
  Clone ID: MRT4577_86477C.1
atgacgtatcaacgccatcgtcgtcgcccagcaaactggaccttggttttcacctgggaaatcaaaaagaggtcaagagttccacgacaatgccctcagcagggtttttgctacgcccgtagacgttgccattgccgggccgacacacaagtcgggcaaggctttcgcccgaactctctcgttcctgcgcatgagaggggttgcggacccacaacaatgccctcaagagggtttgtgccgtcaaggggcgtcaccattgtcgacccgacacgcaatcaggcaagcccgggcggcaatcagcacatatcttggtgtggatgccgttgttgccgccactccattcgagtccagcctccacagacagggagaaactggacccgacgccacttggagcttacagagcgtcaggggcgggcacacccggtggacgagcacgccggcggggagggctag

SEQ ID NO: 169840 - DNA, 450 bp, Zea mays
  Clone ID: MRT4577_86478C.1
ggggggccccacgcttccaaaaaaaaaaaaaaaaaaaaaaaaaggggcggccgttttaggggtcccaggtttccttccgggggcttgcaacgtaatagtttggttttagtgcaacctaaattaaattaactggccgtggtttaccaccgtcgggcctggaaaacccttggcgttcccaaacttaatcgcttggcagaacatccccttttggccggttggcgtattaccaaaagggcccgaaccgttcgcctttccaaccagttgcccagcctgattggcaattggacccccccctgtagcggcccttaaagcccggcggttgtgggggttccccccagcttacccgttccattggccagcgccttagcgcccgttcttttggtttttttcctttcttttttggccacgttggccggttttccccgtaaggttttaaatggggggttcctt

SEQ ID NO: 169841 - DNA, 290 bp, Zea mays
  Clone ID: MRT4577_86479C.1
cagacatgccaaatagaaaaacattgaggggcagaaacttctcaaagctcattttgaagctagggacacaaaagtgaaggtagaagaatcttctgactcatctaattctttggataggccacctgatgttccagagagctcgatgcattcttcagaagatacagttgatcttaaagttaatggaacaccaaataaggatgcctctgtggtcaaccctgtcctggaggaatctgtttcaggcataccagtcactgcaaagaatgaatccttgccttctgccagaacaaaag

SEQ ID NO: 169842 - DNA, 305 bp, Zea mays
  Clone ID: MRT4577_8647C.1
cctaattcccggtcgagcactcgtccgctcctcctcaactatcactgctacctcaatgtattccacttcagcctcagctcgctcatgaaggagtttaatcagtagggcggggctgcacactacctgcctcaccctctcatacttatcaccggatatcatcatcaagaaaggctactactgcaccctggcctacatctgattcttcagtctcatcctattcgtactcctcgcctgctacctctcgttccacgactcctacctagtgcatatgtacctcatgatcaccatagcctacctcaagtacc

SEQ ID NO: 169843 - DNA, 243 bp, Zea mays
  Clone ID: MRT4577_86480C.1
gacggacaaggatatactttatgaaaaacaccgacacttcaacagttataaattcatatacacaacaccagtaccagagaatatcctatggcctttgaaattttaatttaagcgcacccatgctgacacatggagcatccagaaggacgcattcactgaagacgaactggaggttctccgtgatacatcttcctcctcgtcgtacttcgcttagattaaaatttcaaaggccataggatattc

SEQ ID NO: 169844 - DNA, 650 bp, Zea mays
  unsure (1)..(650): unsure at all n locations
  Clone ID: MRT4577_86481C.1
cattgggtacctcgnagccggccgaggaacctcattcanaaactctaatatttttctcactgtcttgtctctccagagaactgtatagagagagatggcagctgcaacatctggtgctgtgttaaatgggttgggatcttccttcttgagtggaggaaacaggagccaaacccttctggccactgctattggaggcaaagttggtgctgctgctgttactgttagtcctagaagactcattgtggtagctgctgctgcaccaaagaagtcatggctccctggtgtcagaggtggtggcaacctcgtcgacccagaatggcttgatggatcgctaccaggtgactatggctttgacccactaggccttgggaaggacccagcattcctcaaatggtacagagaagctgagctgattcatgggagatgggcaatggctgcagttctaggaatctttgtgggccaggcatggagtggagttccatggtttgaagctggagctgacccaaatgcaattgctcctttctcctttggtactcttctgggaacccagttgattctcatggggtgggttgaaagcaagagatgggtggacttcttcnacccagactcacagtcagtgggatgggccactccatggtcaagaacatctg

SEQ ID NO: 169845 - DNA, 556 bp, Zea mays
  Clone ID: MRT4577_86482C.1
ggcaagtgaaaggatcgctatatatgcattttgctcatcatataatcaattcaaggttagtatacaggtcatacaaaaattgatatgctctatttcttgagcattttagagagctgcaaccactaatcttacaaactgcctataatttgctgcagagaagtgtaggtaccggtgacggctacgaacacgcccatcatcaggatacctgcgatcgccgcgacctcgatgcgggaaattccctcggccctgtagatcttgaggaagcagaggcaggggaatatgactgtcgccatgacgctgaggaaggacccgatgaaggacatgaggtagccgaagaatggaactgttgaggccaccaccgccgtgctgacaaccaccacggtgctgacggacaccctcgccggcgcgcttccagcaggaagatagaacctctcctcgaccgccgccgttatcggcgcgaccagcagcgcgtacttggccagcgggttgatcagggtcgtcactatggcgaccttggtgtagagctttcccgagggcaggttcagcgtgacctgcg

SEQ ID NO: 169846 - DNA, 450 bp, Zea mays
  Clone ID: MRT4577_86483C.1
cccacgcgtccgcggacgcgtggggcgacacttgcacgggtgtgcgggcgatcaggttgtgggggagcgtactcgtgactgctcgtttcgtccgctcgactaacgctgatccagttcttcgtcgtcggcgccgttcgtgggactgcactgcttacatctgcctgcgtcgactgcgtacgactacatcgaacatatacacgagatgtctcttgtgaatagagccactgatgccttgagcatcggtcactccgcaggttccatctaagagagaaggcaaacaactgtggaaaattgaccgcaaagcacataaggaggatggataggaaggaaatggcatggttcaaagtattctgccaaggaagaggcatacctgtgctgacctccgagctgttcacacggactccaaaagccgatcaatctctgcgatccatggtcaccaatggaatatag

SEQ ID NO: 169847 - DNA, 744 bp, Zea mays
  unsure (1)..(744): unsure at all n locations
  Clone ID: MRT4577_86484C.1
aattcggcacgaggccgaaacccctaattctccattgatcttttcccttcagaaaacagagcgagtccaattcgagacggctctccccacatcaccacagcgcagccgcaaccatggcttccgccgaaaccctagcccgctccccctcacgcgagccctcttccgacctgacccgcgccgactcttccgagccccaccacaacatcgatggctccggcgcgggcgccggagaactcatcccgccgccgccgccgctcccgctgggagcagtctaacgacgactccgccgccaacaactccggcggcgagggcgggaccgggggccggaagcgcaagacgcggtgggccgaggaggagccgcgcccggcgatcgcgctcccggacttcatgaaggacttcgccgccgagatggacccccgaggtgcacgccctaaacgcgcgcctccttcgagatcctcgcgtctgctgcaatcgggcctcccgctccgacgatcgcccgaggggggccgcgctcgccctcccctgagcctgtctacgacaacctcggcatccgcatcaacacccgcgaataccgcgcttagggagcgcctcaaccgcgagagccaaggagatcatctcgcagcttatcgggccgcaaccccgccttcaagccccccttcgactaccgcccacccaagctncagaagaagctctacatccccatgaaaggagtacccaggctacaactttatcggcctcatcatt

SEQ ID NO: 169848 - DNA, 615 bp, Zea mays
  Clone ID: MRT4577_86485C.1
ggccgacacggcgctctcccccgtcgcgtgcgcctgcggcaagaagaagaagaagcacttcatgttcggcccgccgccgccgccgccgaggccgacgccgacgcccacgccagccccgacgccgacgtacgggcccccgacgccgacgcccacacccgtgccggagcccaggcctccggcgcccgaggagcccgagccgttcttcaagaagaagccgaagctcaagttcatgcgcaagaagaaaccgtgcccgccgctcgccgacgacgacacgacccggcggcctgcggcagcaggcgggcaggggcaggagaaggttcccatgaaactgaactaggggatcggagctggctcgtgcggggacagcagcagagctctaagatgttgcagtgtcagtgacgttcgtttcgtttcggttcggtgatgatgttgctgtgttgtcagtgattgtttttgttcggttcgtgtgcccgtatgtgtcgcgcggcggcattggtgtttcagcccgtttgcttgcttgtatgtgatttgagaaataaagatagaagttttcgttcaccctttttaaaaaaaaaaaaataaaaaaaaaaaaaaaaaagcggcccggacgcgtgg

SEQ ID NO: 169849 - DNA, 288 bp, Zea mays
  Clone ID: MRT4577_86486C.1
gcagcttgaggacttcccgatggatgcgcacgcttgccctctgaaatttggcagctatgcgtaccctaattctgaagtcgtttacgtctggaccaacggctccaccaagtcggtggtggtggcggaagatggctccagactgaaccagtaccacctgatggggcagacggtgggcactgagaacatcagcaccagcacaggcgaatacacaatcatgacagctcacttccacctgaaaaggaagattggctactttgtcatccagacctaccttccctgcataatgac

SEQ ID NO: 169850 - DNA, 368 bp, Zea mays
  Clone ID: MRT4577_86487C.1
cccaaaaaacaggggcgtgcgcatatacatacactggagtcgtttgggtacaacgaactagatcacgattatacatgcacggagctaggacatatacacttggtggaacaactggtacggatacatacatacatacatacaaacaagagagaggtttgccgacgcgtcgaatatgtaccagcacgggatcccatcccactccactccaagccaccaacgtatggctcggtctaatcagccttggtctggatcttggtccagcaaggcgtcccaacgggttttcaggatcctgtgtgcctccgagcatgggagaccaatcacgctcgacccaccatcagtgggaaggtcaatcaccagccccaaccgga

SEQ ID NO: 169851 - DNA, 577 bp, Zea mays
  Clone ID: MRT4577_86488C.1
actggcacgactatcggggatggaagagcataaggaagcttgtgcaaactgctctgcacgagcatcactttataactggtacactgggagaggactcccacaggtcgagcatcgactattcagcacaaatgaaactactataagagccttaagaccagcgacagtcgccggttcaccaacagatgagcccggttacctatgatgccagataacattaaaaatcttccgagatccaatggtcacactctatggtgtaacttatgaaagggctgtacttgtagaacatctccacatggatgacgattatccaccacgacgccagaaccatgatgagcatcaagtcgttacgaatctgaacatcaaagtaagcagctgcaagctctacactgaaagaccacagttgcggcccacaagtctgaactaatcggatgccgagagctccgctgactgcacatactgataaatctcagaaggacctgttgttagagttaaactttatgtgcctgtggaaagagatcgattggatagctcgatgcatagaccttagtacagactgcgcaacatgacctgctactgc

SEQ ID NO: 169852 - DNA, 1046 bp, Zea mays
  Clone ID: MRT4577_86489C.1
gggggggcgagttttttttttttaacaaagcataaatacgatcatctgttgcttcatcagtcctagtaaagttacacatgcgtgtaactcctgtacaaaccctcagctacaaggacaaatactcctcaacgatcttacgtacaaatcaaaattcaaaagtgtctgagatttgttcacgaggagcagagaggacaccgcaccagcccgttctcgttgcactcggggcaccgcctgaacgtgcccacctcctcgacgaacaccttgcagctgccggagcagtcctcgcagggcacgaaccgcacgccgccgcagccggagcacgcgtccaggacaacgcccttgccgccggagctcggcgggggcgctactactacgtcgcaggcctcgagcgccctcgccagctcgccggcctcgtgcatccggcggacctcctcggcgccgcccaggtgcctgccgtccgcgaacgcctgcgggagcctgcccgcgttggggctggagcccagcgcggcgtggagctcgtccttgaaccccgagtgcatcgacaggtcgcgctcgtcgacgcgcacgccgtagctccggaggacggacctggtggaccagcagtcctcgtacgtcttgcggacgccacggaggctggtcaggtacagcaccaccttccgggcgctatccgggggcggcggcggtgccagcttggcgagcagcttcgcgtcgatcctctgctggaacgcgctgacccgcgcgcgcacgatgccagggaacctctgtatctcgcgctcccgctgcttgaccttgacgcccacctcgccgcccgggccgtcaggcttcttctcgacacacccctcgttgccggggtcgtccggcggcggcggcggggggtcctcatccagcgccttccggaacgcggcgatgacgtccgggtcgaagtcgaactcggcgggtgaccctgtcgccgacttctcccgccgcccctcggcgtcggcgtcggcgtcgcccccctcctcatcgtccttgccgtcgtcgtcgcccacgcgtccgccctgcgtccg

SEQ ID NO: 169853 - DNA, 277 bp, Zea mays
  Clone ID: MRT4577_8648C.1
gagcaagcagccaacaaccctgataatttgcaaattcaggagcaaattgtgaggttgaaagatgaaatcgcagaaaagaaatcacatatacatatgctagagcagcggatggtacaatcactggaaactacagaaggcccagcaattaagacagagttatcccagaccttttcaaagttgagcacgcagctgagtgagaagacatttgaactggagattatgtctgcggataataggattcttcaagaccagctacaagcaaaggtaacagaaaatg

SEQ ID NO: 169854 - DNA, 374 bp, Zea mays
  Clone ID: MRT4577_86490C.1
agagctgtgacgtcggcgcgcgcgcgcaggctcggaattcggctcgtgggtgacggtagtgccccgttttttatatcccaacacacaggacctgtctgggggggagggtgaggaaaacgctgctgcggccctacacctagtagggctcctctcctgggagcgacctggttgctatccccgactggggcgggatccggggtgtatcttgggcgctttctagcttcggtccgtgatcgctatggccctgcttagctggagtggttttggattagtggcccgagctgctgaccgtgtgatcctgaagctggtgtaccagacccgtgagtgacctggcacacacacaaatgatgcttcaggcgttccccatggattcg

SEQ ID NO: 169855 - DNA, 318 bp, Zea mays
  Clone ID: MRT4577_86491C.1
tcggggcgtcgtatcagggggaaggggatgaggcggtggttctggaagcgtcgcggaggccgcgtccgtccactaacgtggagcttcgagcggagagctttgcgagcgagcatcaactggtgattgacgatcggatggttcaaaattttttttgacgacgtggatggcttcatcgttgccgtttctgttcggctttaatatataggaaatctcacatctcccctcctcttgatctgctagttgcttgatggattgaagcctgccatccccacggtcgcagccgctaatgagggctcgacgacagcaacggaattcgag

SEQ ID NO: 169856 - DNA, 562 bp, Zea mays
  Clone ID: MRT4577_86492C.1
gtttttttttttttttttttttttttttttttttttttttttttttttttttttttttttttttttttttgggttttttttttttttttttttttttaaaaaaaaacaaaaaggttaaaaaaagcagggctgggcggccaaaaaacccaaaaggattttcgaggcaaaaccaaaaggggaactgggggaaaccacaattcgaacaaaatttgaaaaaaaaacaaattggccaaacccccggaaaaataaaattgggaaaaaagttggcgggcaaaaaagctcccacagcacaggaaatgaaaccagttcaaaaaaaaaaaaatttaaagggaaaaaagttaaattttcaaacccgggctgtctttgaaaaaaaaagaaaactgcggggcaaaggaaggtttgcccaacccctaaccaaatcccaaaagagttgaaaaaaaccagggccaaggccaagctagggaaacgggttttggaaaaaaaaaaaaaaaaaaaaaacatggaatacaaaaatttggcaataccccgggggaggcccaataaaaaggagaggtttattggg

SEQ ID NO: 169857 - DNA, 571 bp, Zea mays
  Clone ID: MRT4577_86493C.1
gtggggtcttcttgatgctctctcgggagacttcctagggcgatgggggcgaacggcgccgccgctctccgttcctccgtccccccggccccggggaggggggctctctctcgctcctcgcgacgggttcgcgctccctctcgcggcggtctccggccggcacccagcgcggcggtttcggcgttcgaccaccagcccttccatgctcctctagatccggtatgttcgcggtccaacctccaggcccccccaccacttggcagcgaggatctttgcaagtacgcccaagatctccccctctgcgcccctgctgatccatctcctcaaccggacctgctatggtcggccgcgggaggcggcgcccccgcttcaacagccaggacggtcccattgtcaagattcggtacagaaaagtgttcggcgcaaacgtcactcgaagatcctctctgtccgacttcattgccgcgtatcctggcgtctgacaggctcgatggggatactgtctactccccgggctaaaattactctcaaaagcgaatgggggtttgaagccgggcagacctccttcccc

SEQ ID NO: 169858 - DNA, 387 bp, Zea mays
  Clone ID: MRT4577_86494C.1
cccacgcgtccgctagttctagatccggccgcactttttttttttctttttttttgggagattgcatgcatggtgagctgcaatatatagatcatgaaacccttttcaccacctacctaacaagcatatatatatgccatgtatacacatgacctaatgcatgcattctagcagagaaaccctaatcaacaaagatcatgggggtgatgcatggacatggatggattgatcgatcactgcaccggaggtcgatgtccatctaaatatgtaaagtagagtagctatccggccgacgatgcgcacgcttcgcggtgaaacatcgtttttttttccttctccggtgggcggagggtccaaagattcgccgattcggatggacgagctggt

SEQ ID NO: 169859 - DNA, 816 bp, Zea mays
  unsure (1)..(816): unsure at all n locations
  Clone ID: MRT4577_86495C.1
attgggtacctcgaggccggccgggatcattacatcactctccctctcaaccaccaaatacacatccaagtccatcaaaatgcctaaccccaacgtcttcttcgatgtctccattggcggctcgccagccggccgcatcgtcatggagctcttcgccgaccaggtccccaagaccgcagagaacttccgtgccctctgcaccggtgagaagggtaccggcaaatctggcaagcccctccactaccagggctcttccttccatcgcgtcatcccccagttcatgcttcagggtggtgacttcacccgcggcaacggcactggtggcgagtccatctacggcgagaagttcgaggatgagaacttcaacctaaagcacactggccccggtatcctctccatggccaacgctggtcccggaaccaacggttcgcagttcttcatctgcaccgtcaagacctcttggttggacggcaagcacgtcgtcttcggcaaggtcatcgagggtctcgatgtcgtccaggccgtcgagcgcgtcggatcccagaccggcaagacctccaagaccgtcaccattgagaagtccggccagttgtagacaagattctcgactgttgggtagatagacggtgcgcatagtcaatggagcagctccagcgacactcaaaagtatcacgangaatgacgacgtgacgacaaggagcagtgcggatcggtcatagtactagcattaggaaacggcatcttcgctgtagtactagagtgggaaatggcatgatcagttcgagttccaacaaaaaaaaaaaaaaaaaagcggcc

SEQ ID NO: 169860 - DNA, 258 bp, Zea mays
  Clone ID: MRT4577_86496C.1
gaacaaaaaaaatttttcataaatagattttaatagtttcatgaatcccctcaaaagccttacagggctttcttgggggaaggtccaacgggggggtttttaataactgaaaaaaatttaaggggaaataaaacatggtttgggatgcatgcatgcttcctcccacggttagatatggagagaggggttgctttattttctgcgataatttgacaagaacaatttgaaatccagcatgctttgctttctcaggcccaa

SEQ ID NO: 169861 - DNA, 278 bp, Zea mays
  Clone ID: MRT4577_86497C.1
catctctacctttgagttgatgtgtataactgaataatagtgctgtgttttcaaaaggaaaggcttaaaaaacagtgcttctgtagtacaaggagggatgctctgctgaaaatctggaaattacagctaagcaaaaagatgaaaatacaaagtagctgttattctaccacccagagatcgatttgtttctttactaacagatacggcaagtgcctgttctgtgccaggcactgtctaggcactggagatagtgatgagcaaaaccatctcttctttct

SEQ ID NO: 169862 - DNA, 141 bp, Zea mays
  unsure (1)..(141): unsure at all n locations
  Clone ID: MRT4577_86498C.1
cccntgacgttgtgngggtgtccgngattgcggatgtccttgttgtctgcggtgtgcncgcttatgtggtcgttggtgctggggttgtgttcctgcgtgagcgggcgcggctgggtgcttctggtgtccccgttgtgtggg

SEQ ID NO: 169863 - DNA, 267 bp, Zea mays
  Clone ID: MRT4577_86499C.1
tgtgttgctgggatccgctctactcgatcgctcgaatcattactatactgcaaacagggagattatcatacttttgttgcgtggctccggactcaaatgagttgttccagatcatttaacatggattgaaatgtgaactgaggcgccataactaataggtaaactcaggctgtttgtcacttgcaaatgttatggcttaatatgatactgaatattgagggttccaaatctcttattaacagcagaggcgacgaatgataactcatg

SEQ ID NO: 169864 - DNA, 479 bp, Zea mays
  Clone ID: MRT4577_8649C.1
atcagcaaccacccttctttcttttttttttttttttttttttttttttttttttttttaattcttttttgggactagggttacaataaaatttcttattccccccccccccaaaacccattaaaatttaataaaaaacaaaacttttaccaaacatctataaatctacctcccaacccaatccaaaaacttccctactctcttttcaaaacaccaaaatttcatcccattcaccccaaataacaaaacttttttattttaaaaccccattatatcccaaaatatccccctcttaaaaaacccccccttaatcaccatcaatcttacaaaaaaaccccccggcaataaaaacccccccccttcattcccccttaaataaaaaaaaaacccccccaaaatccccccccaaaacccccaatcatttctaaaatccaccaatttacccccattacctacaaaatacccccctccctttaatt

SEQ ID NO: 169865 - DNA, 260 bp, Zea mays
  Clone ID: MRT4577_864C.1
tctcgatctataactagaatttgcatattccaaaggagaccttagttttgatgttttacatgacgttcttgatctctcctgccgtcatttaattttgtaagtagatatgcatgtgtgatgtgtcttgttatgttttttgctacctaaatggtcgcagtcgagatcttattagcttacggcatgcgtcgggtacgatcccggtgaattctcggacatggtactctgtcaggctgtacgcaagctcttcgcctatcattgac

SEQ ID NO: 169866 - DNA, 1006 bp, Zea mays
  Clone ID: MRT4577_86500C.1
gttctttggcttctccgagtacagcgccggcctcgccttcgctgagaatgacacgtccacggccgacaccgggaagctcgggagcaccgacgtctcgccggcccgccggccgtcgtccgacgtgtcccagcacttctgcgggcaggtgccggagttccagcaggcgtccccggcgctcgtcagttcgccctccacgaagcgggggccccggtggtcgggcggcccggcccaaggcgcggcgaccggcggcgacctggccggggtgttgctgccctggacgtcgtacgagttctttggcttctggtgcgtagagcgccggcctcgccttcgctgagaatgacacgtccaaggccgacagcgggaagctcgggagcaccgacggctcgccggccggccggccgtcgtccgacgcgtcccaggacttcttcgggcaggtgccggagttccaccagtggtccgtgccggagctcccttccccgcccacggcctcggggcttcactggcagggcggcccgcgccaaggcgcggccaccaccaccgacgtggccgccgtgttcgtgccggacatctcgtccccggagaaccccttctggtgctacgccaccgccgctggccaggcgccgacgaagcgccgcaggagatgttgaagtagggaagatcgagattgtcttgttcagtactggagtggcgtaggcttgcaagaaacaaacacagttgctgtactgtgtactcccatggtgacgtactatctatatactccatgtcgcagcagcgtagctcgtagggaagtgcggagctagagtggttaattagggctactctactactaccatagtatttttttgttgttgttgacgatgattaattaggacgcctaatatgtagtacggggtaggttggttgtgtgttagcttggcgcgtgctatcagagaattgatgagaaaaaggtaagatggaaataaagaaaacgattgttgtgcataaaaaaaaaaaaaaaaaagcggcc

SEQ ID NO: 169867 - DNA, 700 bp, Zea mays
  Clone ID: MRT4577_86501C.1
gaccccaacattttttcctttgttctcaccaaattttgggtgttacataataaactaattaagtacgatacttacacattacaatgaatgaacacgctatactgcatattaatttgggggaaaacgacacaaaagcaagtaatagacaagtacacgctatacgtgcatgctcgcttggcttggagatgtgtatctgcttatattataggtcgttgtactcgtcaacgaccacgctgggcttgttcgggattctttctcgtcaacgcctttatttgagacaccttcatcttggcaacctggggtgcgtggctgctgactgtgaggagcacctgccgaaggctcgcaaggttttccaggccgtacacgcccgccatcgtcacgaacgtaagctcaaggctctcaagcttcggcattgctcctcccagaaagctcaaaggtggcagcaccggcgtggcaaagcgcagcagcttgagcttctcgaaccctccagcctgcacaaagatctcccctcccttgtgcagaatctggagcacgttcgtcttcttcatcgtagaatccatggtgaaaacgagagagaagaggtctgggagcttgctaaggaccaccaaagtactcgccgtgagcgaggtcaaggaaagggtcaggctctccaggttgtgcaggtggacgatccagtcaggcaccttggacagcatgccgg

SEQ ID NO: 169868 - DNA, 220 bp, Zea mays
  Clone ID: MRT4577_86502C.1
tcgggactctgggatcgaattcacagcatcaaacagtgtgaatcctggaatttccaaacccaaacccggccggagattccttccggaagccgacagggccccttgaccggcttcgtgccctgcgcgccttcccaactttttcggtcttcggttcccgtgcccgcgaaagcgaattgcttaattgaaggtgggggctcgtgcctgaatttgaattttgggg

SEQ ID NO: 169869 - DNA, 565 bp, Zea mays
  Clone ID: MRT4577_86503C.1
tgtcctagacgtcactagaatcatttggcgactctgttcctctgctgcactatgtgctgttcagtcttcatcctcctagtcgtacttggtcacggccgtggttgctctggaaacgcctcctcctgcctggtgcgcacgcgggcccggacggcatgggagcgggggagctggacgcaggctaccatcgccgagagctacgcgctctcctcttcgctaactgcaggtcggtctatcaatacctcaccttgatgtaggggggagaacatggattaactagcgggacttcgtcagccggtagcaggaatccacacttaaatgatttaagaaaggaaataaccacattcaattcgtgcttgaggatgaatgacgaaatgaaaagcttgtaaagcttaggtatgcaactgaagattctacatgaagaatgaccgattcactagattaggatgacagacaattgctaccacttccctagtcaatggatactatcaatggaagttacacaggcaacttcactgatgataaatatcgaagtggctttataagcaacagcacgacttacacactg

SEQ ID NO: 169870 - DNA, 865 bp, Zea mays
  Clone ID: MRT4577_86504C.1
ccttctccctcttctctctcttctctcctccccttgctcttctctggccgccgccacttgcccggacttcctgcagccgagcgcccctgcagctccctgcaccttcatcctgcgcgctccagtcgaccgcgcactgggaccagcgcagtgcccagccgagcagcgcgacgcccggtggcgttcatgtgcttctcggactttggccgttggatggtgtactctgcgggatccgcaacctcctactgagctcccgcacagaggggcaggcatgtgaggctttcgcaggaagtgcaggcagccggccgtcgacaccaagcaagccttgcgcttatggcagccgtggtgctcggtcttatcaccagtggtgtcgtcagatgccaaatgcagtttgctctgcatggggattttgctttctggtgtctgtcccgttggaaatgggtagttcctgagtgacgaacagacttcccatggcagctattctgttgaggatgtgcgaaaggtgcactgcagagtctgagaagtgagaaaaaaaaatgacaagtgctgtttaccgctcacccatttttaaccaatgccacggtgatacaattatctgtgctaaagggacaattgtttcaactaaaccaagcaccacagttggaggccagatccttggaaggcaatattgtgaaattattgtaacttgtgtgctaaaacgagatacaattttgcctcgccctggagtgatgtcgctggtggtgcttttgtgactgatcatctctggagcttttgtgaatgatctagatctagctatctatctgtaaatgatctagttgtgaatgatattataattgtgatgcttttgtaaaaaaaaaaaaaaaaaaaa

SEQ ID NO: 169871 - DNA, 663 bp, Zea mays
  unsure (1)..(663): unsure at all n locations
  Clone ID: MRT4577_86505C.1
ccccccccctcgagaccctaaacctagcgcgcgccactctccctggcagccgccgccaggaagcctccactccagcgcccgagcgcgacggcacgaggccgtgagcacctgcagcccgcagaggcagtgccgctgcctgccttcgtccgagcgagcgagcccaggcggccaggccctaagggctgaccgagccgccgctggccgctgcgcgcgagcagccgctgagctgcctccgagccagccgccacccgccaggccgccagcacggtcgcgctgcccaccctgccggccgtcgacaccaagcaggccttgagcttgtggcagccgtggtgatcggtcttatcaccagtggtgtcgttagatgccaaatgcagtttgctctgcacgaggattttgctttctggtgtctgtcccgttggaaccggggatttcctgagtgacgaatagacttcccatggcagctattctgttgaggatgtgggaaaggtgcactgcagagtctgagaagtgagagaaataaatgacaagtggtttcaactaaaccaagcaccacagttggaggtcaaatccttggaagacaatattgtgaagttattgtagcttgtgtgctaaaacgagatacagttntgcctcgcccaaaaaaaaaaaaaaaaaaaaaaaaaa

SEQ ID NO: 169872 - DNA, 193 bp, Zea mays
  Clone ID: MRT4577_86506C.1
acgtgtcagttccattttctcaatatcttaaacaaggtttttatgtctcaagcccacccccctcggtggggagcccaatggaaacacgtttaatttcaagataaccaagctaatgccatgaaggaaccaagaaccggtgggtattgctattggaccaaaaatgacaagaattatgatgtggatacaatagcta

SEQ ID NO: 169873 - DNA, 857 bp, Zea mays
  Clone ID: MRT4577_86507C.1
gggaaccggtctccacctaaacctagcgcgcgccactctccctggcagccgccgccaggaagcctccactccagcgcccgagcgcgacggcacgaggccgtgagcacctgcagcccgcagaggcagtgccgctgcctgccttcgtccgagcgagcgagcccaggcggccaggccctaagggctgaccgagccgccgctggccgctgcgcgcgagcagccgctgagctgcctccgagccagccgccacccgccaggccgccagcacggtcgcgctgcccaccctggtacgccaatcctcatctctatgcggcgcccaagaaaactctgcacaaagctcaactgccggccgtcgacaccaagcaggccttgagcttgtggcagccgtggtgatcggtcttatcaccagtggtgtcgttagatgccaaatgcagtttgctctgcacgaggattttgctttctggtgtctgtcccgttggaaccggggatttcctgagtgacgaatagacttcccatggcagctattctgttgaggatgtgggaaaggtgcactgcagagtctgagaagtgagagaaataaatgacaagtggtttcaactaaaccaagcaccacagttggaggtcaaatccttggaagacaatattgtgaagttattgtagcttgtgtgctaaaacgagatacagttttgcctcgccctggagtgatgtcgttgtggtgcttttgtgactgatcatctctggagcttttgtgaatgatctagctagatatctgtaaatgatctagttgtgaatgatattataattgtgatgcttttgtgaatatataattgtggtgcttttgtaaaaaaaaaaaaaaaaaa

SEQ ID NO: 169874 - DNA, 957 bp, Zea mays
  Clone ID: MRT4577_86508C.1
ccctaaccctaaccggccgccacctaaacctagcgcacgccactctccctggcagccgccgccaggaagcctccactccagcgcccgagcgcgacggcacgaggccgtgagcacctgcagcccgcagaggaagtgccgctgcctgccttcgtccgagcgatcgagcccaggcggccagtccctaggggctgaccgagccgccgatggccgctgcgaacttggattgcacctgcgcgcgagcagccgctgagctgcctctgagccagccgccacccgccaggccgccagcacggtcgcgctgcccaccccggtccgccaatcctcatctctatgcggcgcccaagaaaactctgcacaaagctcaactgattttattcacttgtggcagccggccgtcgacaccaagcaggccttgagcttgtggcagccgtgatgatcggtcttatcaccagtggtgtcgttagatgctaaatgcagtttgctctgcacggagattttgctttctggtgtctgtcccgttggaaccggggatttcctgagtgacgaatagacttcccatggtagctattctgttgaggatgtgcgaaagatgcactgcagagtctgagaagtgagagaaataaatgacaagtgctgtttaccgctcacccaattttaaccaatgccacggtgatacgattatctctgctaaagggataattgtttcaactaaaccaaacaccacagttggaggtcaaatccttggaaggcaatattgtgaagttattgtaatttgtgtgctaaaacgagatacagttttgcctcgccctggagtgatgtcgttgtggtgcttttgtgactgatcatctctggagcttttgtgaatgatctagctagctatctgtaaatgatctagtcgtgaatgatattataattgtgatgcttttgtgaatatataattgtggtgcttttgtgttt

SEQ ID NO: 169875 - DNA, 618 bp, Zea mays
  Clone ID: MRT4577_86509C.1
cccctccctcgagttttttttttttttttttttttttttttttttttttttttttttttttttttttttttttttttttttttttttttttttttttttttttttttttttaaaagcaaacgaagggctttgccggggggctttcggggcccagcctattggcccctccccgggggggacaaaaaaaaacaaccgggggggtttaaatccaaaactaaccccccccggcctttaaaaacccccccttttccaaggggaaaagggggggcaaatccccccggcccccccccggggaacaggttcccccccttgttttttttgcccccccaaggcctaaaactaaaaaaaggggggcaataattttttttcctaaaacccggccccaacccaaaaaaagcctggcccaaaaacagttttgatcgatgggcccctttttggagaaaacaaaaaaccccccccccaggggccccccgtttaacaaaacccccggaaaacctcaaagtcccttaaaggggaacatcccctgtcctgttggtggaaataagggaagcccccttaacctttagctcccccccccaaacctttgttgcccctttttttaaaggccttaaggaccct

SEQ ID NO: 169876 - DNA, 377 bp, Zea mays
  Clone ID: MRT4577_8650C.1
attgggacaaaaacccctactttttccccctaaatacgcccgccagggtgtgggaccaacgaccacggcgccctgggggagaggggggcacactacacaccaacccattgccgccgaaagcgcccctcttagaccgcggacgaggggatttccaacaaaaaatatttccttgctgggggggaccccgccgcggaccgggaaggggccccgcgcacctgcccggggggccccccggccaggacccctgccgctggccccgcgatccttttacccctacccccgtccgtacccccttgggccagggtgctttgccggacccaccgtgctcccaccaacaccacgtgtttgggggagccctcgcctagatggcccattac

SEQ ID NO: 169877 - DNA, 955 bp, Zea mays
  Clone ID: MRT4577_86510C.1
cctcgagccggccgggaggaagtctccactccttctccctcttctctctcttctctcctccccttgctcttctctggccgccgccacttgcccggacttcctgcagccgagcgcccctgcagctccctgcaccttcatcctgcgcgctccagtcgaccgcgcactgggaccagcgcagtgcccagccgagcagcgcgacgcccggtggcgttcatgtgcttctcggtacggtgaaacctttattgtcgttcctgccacactttcctcatttcttgagactttggccgttggatggtgtactctgcgggatccgcaacctcctactgagctcccgcacagaggggcaggcatgtgaggctttcgcaggaagtgcaggcagccggccgtcgacaccaagcaggccttgcgcttatggcagccgtggtgctcggtcttatcaccagtggtgtcgttagatgccaaatgcagtttgctctgcatggggattttgctttctggtgtctgtcccgttggaaatgggtagttcctgagtgacgaacagacttcccatggcagctattctgttgaggatgtgcgaaaggtgcactgcagagtctgagaagtgagagaaaaaaatgacaagtgctgtttaccgctcacccatttttaaccaatgccacggtgatacaattatctgtgctaaagggacaattgtttcaactaaaccaagcaccacagttggaggccagatccttggaaggcaatattgtgaaattattgtaacttgtgtgctaaaacgagatacaattttgcctcgccctggagtgatgtcgctggtggtgcttttgtgactgatcatctctggagcttttgtgaatgatctagatctagctatctatctgtaaatgatctagttgtgaatgatattataattgtgatgcttttgtgaatatataattgtggtgcttttgtgttt

SEQ ID NO: 169878 - DNA, 414 bp, Zea mays
  unsure (1)..(414): unsure at all n locations
  Clone ID: MRT4577_86511C.1
cgtaagcnnntcggaannttcggcttcgaggccagattttgatctcgcttttgttcaaaggcataccgaaatgtgcaacgctgttttgctgtcgatcgtttggcnccacgacctgtnncaaatcaacctaaacgtgggaaatccattgcgacgatttggncgttcttaaccgccttaatccttatgctattagacaacgtgttgctgctcgtcgtcaattgcgtttgcgtactttggctcgccttgccgctaaaaaattacaaaacaatgaactcaaattggaagaatcacaggctaagactttgcgtactgctttgtctaaagttttgtctggacgtattccatcaaagactccagccaagcatgtacgtgccgatattcgatcctccgaaaaagttcgtcgtgttcgtgctt

SEQ ID NO: 169879 - DNA, 216 bp, Zea mays
  Clone ID: MRT4577_86512C.1
atccacgcttacgtccacttacatgctatcgtataaggtcacctataatgaatctaatgtccgttgattgacaacgtgctttactgcgaaaacactggcaaaaccctgcttaatcgcattgcaatacatttgcatttcatcagctgttttactagcgaagaagctccggaccaatcgcgcttccgatcgaccttcgcaacctgtatggagaatgga

SEQ ID NO: 169880 - DNA, 377 bp, Zea mays
  Clone ID: MRT4577_86513C.1
atatgcttccaaaagttttatcttggggggaccctggctttgcttaacaatccttgggaggctgtaaaattattttcccaaagccttttttataagccttttttgcaagggaaatgcaagctacacgggcagccttgggctgtttgcttacgggcaaaaacccagacggggacataacgtaccgatccccacttgggttttgggggaggcccaatttacatggcctttttaggggagggggttttatccattcgggtttttttacactacccttttctggcttaaggtggttaaggaactggtggcgatgagcaaaccaatcgccgtgacaatgatgggcgacgggcccccgaatcggggggggctccaaaaggggg

SEQ ID NO: 169881 - DNA, 174 bp, Zea mays
  Clone ID: MRT4577_86514C.1
ttttacccggtggtttaaaccctagttcccattccatcttcgtttccggtccggcgccgacaatggagttctgggggctcgagggcaaacctggatcccactgtaaggtgtgagccctggacattggcttttatccttgcaccgtttccccagggctggcccttggggggaatt

SEQ ID NO: 169882 - DNA, 382 bp, Zea mays
  Clone ID: MRT4577_86515C.1
tccgtatcccggtcgccccgcgtccgccacacctcctgcttgcactccgctcgtctgacattgtcccgcctttcgttcgaagtctgtgagccgaccgcccccacgtggttataccgaaggctttgcctattacgcggcctactcggcgctctagactgttcccgtgcccctcctgccgggggcggggggcctcctccccggctccgtgctctctccggcgtgctcttgccgtgctcccatcgctccagtgaggagctctgggaacaggactcggctggcatacctgccccatagttgatgagagtcggtggagaaccggtataatggaagaaatggtttgttgattacacagcccatcttcttttgtcttgcacgtagttcc

SEQ ID NO: 169883 - DNA, 340 bp, Zea mays
  Clone ID: MRT4577_86516C.1
gggtacttgtggaaaatagctgggaacaaaaacttctttcattgccccaaaccattacaacataagcagcacaaccttaaacagtcctcataagcaccacttattacggcattacaacccaaactataaacgcggcgcaaatcaagaaagaaccacaacatgtagaagccatattaaaacactattaagcacaccagaccaccaaaagcttcttactgaaaaaaaaggccctcttaagcacaaagtttctcccacttgagtggcttcaccacctcccaagtgaaatcaaggtcgtccctttcaaaatggccatagaccctccccttgagagtaactccct

SEQ ID NO: 169884 - DNA, 353 bp, Zea mays
  Clone ID: MRT4577_86517C.1
cacaaaaccaagtttcagcataggcggagaggtaggtacctgaaccaatcggtgtcgcaatcgaatgcaacatgtatcacacagttgggccgaacgggcagaatccgtcgtttggatgctacatttaggggtggttcggttgctattgatcaggactagttgctggattattttatcagggaacagactgatgtgattagcagattggattacatgctgaatctgtcttgcatgatatggacgaactaggtaaaccaccaagtatcgccacgaacgcgaagaaatccggcgtcgactaggaacgggttgacctgaatgggcaccctaggggtaggggtgtgtgtaaaggaatc

SEQ ID NO: 169885 - DNA, 383 bp, Zea mays
  Clone ID: MRT4577_86518C.1
agccgaaatgggtttcacagggccaagccaagttttcattaaaaaggacaccaaaatcgggggttttttcaagccaaatatgcctgcctgccctcaagggccccgggcattttttttccaactggggggcaagccccccctaatggtcaaccccacacacccccctaccaaaccaaggctgcccaagggaccacccaacccgagggaaacctgcttcgggttccaccccgaacaaaacaaggttctcccctttgggttccccttaaacggctcggatgaaccttttgaaccccttgggcccctgcctgtcgaaaaaaccctcaaaagacttgcccccctggagggttattaattgaaaaaccccgcgctacccccccccccaa

SEQ ID NO: 169886 - DNA, 281 bp, Zea mays
  Clone ID: MRT4577_86519C.1
cgctccataaagggcggccagggacatcatcctagagaaagcaagctaccgtcgcgccttttcggagacgcgatgtcactccggcaacaagatcagcgtggccttgcatgaccgcggccctagtgggcctgctcatctgccacatacacaccactacctccgcccaccacaaatacatccacgtcctccgcagcgtctaccgctccagcgacggccgcagaccctattcccaaagacaccctcatctacgcacgacatgaacctccctgataccgcatcca

SEQ ID NO: 169887 - DNA, 292 bp, Zea mays
  Clone ID: MRT4577_8651C.1
aaaaaaaataaaaaaaataaaaaaaaggaatatgattaaaaaaaaaaaaaaaaaaaatgagcgaaagctttagtaagatacaaacatacaaacgcgtgcatgcaaagacatagaaagtatgatagagttacctaaatgtagttttctaaggccagcttaagaacgtcactaactgggagaatcccggcgttgcgcaacgtaatggccttgctggacatcagcctttacacagatggcgtgatatctaagatgcccagtacgatcgctcttgtcaccgatggcgaaacctata

SEQ ID NO: 169888 - DNA, 270 bp, Zea mays
  Clone ID: MRT4577_86520C.1
atggccgtgcccgggcctgctctgcgcccgcgtcccaacgtggcgcatggcctgcgcggcggctggcgcggcatgcccacgacgcgtggccgaatattatccccatgtggagataatgcttcggaagccaagctttctctccctccagagccatacaaccctgaagttgatccatctctgaagggagcgctcgagataattagaatcactaatgaagccattgatgaaggtgtcaacagactgttagacgaagctgccgacaaggtctaa

SEQ ID NO: 169889 - DNA, 366 bp, Zea mays
  Clone ID: MRT4577_86521C.1
cgaaaaaaagcagccgcattggctagcatcactttttttcttttcctccacggccttcgccgggaggggggttaacttgccgtgggggggggcctccggcaaggcccgcgtgacaatgctcaagacggcggcaaaggccaagccagcggcggcttccgggagcccgtggtacggcccctaccgcttgctgtacctgggcccattgtccggtgagccactgagcttacctgactggcgagttcccgggcgacttcggttggtacaccgtttggctgtttgctgacccggagactttcgccaagaaccgggagcttgaggttatccactcccgttgggccatgctgggcgcgcttggctgtttttttc

SEQ ID NO: 169890 - DNA, 318 bp, Zea mays
  Clone ID: MRT4577_86522C.1
ttttcttctgagatacagattgggtacatcatgagaggttcccacgcgtacggccacgcgtacggccaacagaacgaagacacgaggcaagaccccaaagtagaaccgggaaaaacggatcgcaggagggcaagacaccggcaaaaaatgtggaaagagagagcggagcttgggttaacaaaagtccaaaccggagccggggcaaatgcttagaacaaaaacatggaccccaaaacgggagaccgaagcaaaaaccgaaagagtcgtggggaccacaggagcagctgacgcacagtaacagagggcacccgactaaga

SEQ ID NO: 169891 - DNA, 408 bp, Zea mays
  Clone ID: MRT4577_86523C.1
ggttggaacctttgggctgatttatgtgcttgtttatgtgcttggaaataataagatcgatagtgatgacgacgttatagtcgtgcagggcggctctgtcggcttctgcggttatggttacagttgttgtctttggtgccgggcccgctgctattggttgtactcatcgtgataatcgttgtgttgggcctgagataaatgcgctttatgttacttaaggtgtgatggcggagacggagcgttgttatcctgagctgtagtaggcttatgataaggtggacgtgatgatgggttttggtggtcggcataggacggagactagtggtgattattaggatgagactcgtgatgcgtgttcgtctaagagttttgaggtggatcgtgttgagactgattatctttgtgatt

SEQ ID NO: 169892 - DNA, 563 bp, Zea mays
  Clone ID: MRT4577_86524C.1
ttattgacacatttctttctcagaactgtatccatacgcacaagctgcaacttcttgggataactagtatgctgattgcctcgaaatatgaagagtattctgctcctagtgctgaagaattttgaacataacggctggtacatatgcaaaggctgaggttctggaaatggagcaacaagtgcttaatgatctgggctttcatttatctgttccaacaacaaacacatttctcaggagattccttagggcagcacaggcttctcgtacagctcatctgaccactttgaattatctggcgagttatcttgccgagttgactttaatcagttacgatttcatgaaatttcttccctcagaggtggcagcatcttcgattttccttgcaaaatggacacttgaccaatctgaccatccttggaaccctactcttgagcactacacgtcttacaaaagcttcgatattagaacttgcgtgcgggctctacaggaactgcagcacaacaccagtaattgccccctcaacgccatccgtgagaagtatgggcagcagaagttcgagtgcg

SEQ ID NO: 169893 - DNA, 829 bp, Zea mays
  unsure (1)..(829): unsure at all n locations
  Clone ID: MRT4577_86525C.1
tcgagctcgaggggggccgggaagctacacactcgttgctcgtctccctcctcatcctcagatcacattgccagacgccatggaggtcacaggcacgaggagagccttgccgatcaccgcattcgccctcatggcgatggctctggcgtccctggagccggtgctggcaggcagggacggcgacgcgctgacggcgctacgcaagggcctggaggaccccgacggcgcgctcacggactgggacccgaacctggtggacccgtgcacgtggtttcacgtcgtgtgtgacggcgataaccgcgtcatccgcctggatcttgggagactgaacctgtcgggtcctctggcacccgagctgggacaactggatcagctgcaatacatggaaattttcgggaacagcatcagtggatcaatcccatcagagttcggtagcttggtgaacctgatcagcctggacctgtccagcaacagcatctcaggagctatacccgcagcgctcgggaacgccaagtccctgaagttcctgcgtttggatcacaatcgcctgacggggccgatcccaagggagcttgctgggctgcccaatcttggaattgtagatttctccaacaacgacctttgtggcgcgatcccgacagacggagcattccagaacattccccgtagcagcttcgacaacaacccgcggctgcatgagggaggcgagttttgacccaactgctagatggctgtctgtaactctgtatgaaatatgatcgaaacatcacngtagagccggtggtctgatccatccatgcagactttctcagggcaaaaccatgctcct

SEQ ID NO: 169894 - DNA, 491 bp, Zea mays
  unsure (1)..(491): unsure at all n locations
  Clone ID: MRT4577_86527C.1
ccttcatttnttcgacatttattttcagaagacatacttgcaaacacaaatgctgtgtcagatcaaacctactccatagattcacagcggaagtaagagacgataaaaatgtgcatatgtgaatctttactgacatgaacagtaaacagctgttttatgtgcacaaatactaggaacagagggaccgtgcggagggaccgaggctcaaggcaacagtggttccattcacacaaaacatctgatgtgtctgttgaaggacccctatgcaggccatgcagacatatgttcacagagcacttcctcgtatagcgccagggacgaggaacctgatcagtggtggccaaacggacgaagtgagccctcactattacgctccccaaaacctgattgtccacatatccgtgcaagtttatatgtgcggacaacgatttctgaggcctgaatctgaacactctctgtgcttgcaagaatgtgctatgggaatgattgtg

SEQ ID NO: 169895 - DNA, 298 bp, Zea mays
  Clone ID: MRT4577_86528C.1
ggcaaaaaggctacgcttttcctgctaattatccataccaaaggtcaattcatacggtacacttctgttaacctcggtcaccaggacagaacccaaaacgaatcggtctgtgcaaccaaggtgaggaaaactgcagatcccggaaaactctccctaggtcaaatttgacgatcactaatacagagcattctgacatggcaagctatgacagcgtgctttaaggccatgtggggaagtggggggtcatgtcagctcactgtagctctgagaccgttagaaaatccacatcgttgtgttc

SEQ ID NO: 169896 - DNA, 716 bp, Zea mays
  Clone ID: MRT4577_86529C.1
cggccgcgtccgcaacgtgctgctcatcaccgccgccgccgacgacgacgatggggaaggagaaggagacgacgacgacgacgacgtcgaaggcgatggcgggtgcgccggcggcaacgcctcgtccagccggaggcacgagctcgtcgcgtccatccaggaggcgctgcgcggcgtcatggactgcaagacggcgagcagcgacacttcctcctcgtctaacggcggcgggagcatgaagaggcagcgcatgagtggtgcgcatgagcaaggttcgctttagtgtgctaaaactagctagtagctgcctccctcgatgcaagcatgaaatatgcaagcatgcgtgcatggctagctagcttctcaaactcaagttattaattagtagttataaagctatatagccacttcaaacttgggacgagcgagctgaatcttctgtttttgttactatggtatggtgtgtgcatgagggaaagaaaatgggaacacatggacatgcaagttgattagtaggagagtttcattgtatcccttatatatctttgtggtgcattattttttacttagttcgcgtatgtattattgtggggagtgggggaaatttgaggggttcctgataaaccgctcgtaacatggggggtggtaagggtgtacacatgtataatctctgggttattataatggaagatggaattggcggggttgatcctccg

SEQ ID NO: 169897 - DNA, 248 bp, Zea mays
  Clone ID: MRT4577_8652C.1
tttcattggagaagactaacactctctcacccccaacattctccctcactagctagctatgtcctccctacctatcattataaatacccggcttcacctcaccatcaccaccaaccaaccaacccacattcccatataccaatcattggctaacaacctctcctccttaaacacattctttctttaaagagataccactgcttccattacaaccttcttccattggactaccaccaagtgcaccaaac

SEQ ID NO: 169898 - DNA, 561 bp, Zea mays
  unsure (1)..(561): unsure at all n locations
  Clone ID: MRT4577_86530C.1
cagaggacccttttttttttttttttttttttccnnntaattttttttttttttttttttttttttttttttttttttttttttttttttttttttttttttttttaatagtttcacaacacacgctactcttttagaatttaatcttggtccaaaaacaagttagattacatcatagtctgagtagattatacggttttatttcccaaacagacggcccctcaatgagcctagctgtgatgccaaaaaggcgcctaattttgatgcgcgtctttccttcagagatgcctggcgtcgtctcggtgttcccaaacacaaagaggcgactgcgcaccacccattcttgggatttcatgggcttgtccaccagtgcagagggtgaggtccctggactgtgacctgtcccctcgctccgtcgcaatggcgccgtcgtccacctcctcgccagtcgccacactccacccactcgagtgccctttgccgatgtgtgtagacggagcgtctcccctctgtcgccccccgcgtcgcctctcaggagagagagagagagagagggaagtt

SEQ ID NO: 169899 - DNA, 904 bp, Zea mays
  Clone ID: MRT4577_86531C.1
gggaacaggtactggtactggcactgccactggctttgggtcggtgacttcgaaggacctccgcacagagctggacctgtcaaggctccggcgcctccggctcgacgtgtccatgtagtagtctcgcgtctgggccgagcccccagggacgttcgcgtcggggtcgggctccggctgggagtcatcctccacggggatttgaccgtcggagcgctccacgatgccggcgggggagtcctccatagccgagaggatgggaggcaggcgggagagcggcggcggcgcgcggccgagggcaatgccggcgccggcgccggcgccgaacagatagccgtcccacgacgcacggggttggtcccaggcgaagcccatgccgtcgacggacatgcgcccggcgtcgagggagaatcttagatcggtgtcacacgagcgccgcccgccggcgaactcagagccggcttcaccacggcggaagcggctgcgccggaggaacgatggcttggagggcttctccggtgggggcattgccgccgcagcagccttgctgcccgcggcctcctgcttcttgagcttctgcttgcgcctccagttctgccacttcttgctgaacaccgaggcagcaagccagaagctcccggcgatctccatctccttgggcggcggcttcttgggctgctgcgactgcgaagactcgagatctatgtgatccttcatggccctaacatcccgcgccgcattcacccccgtctccatctcctcagaggtgtcggccaccaagacgggctccatcaccggaacaatctcgtcggaatcctcggcgacagcaatctcctcctccaagaacatctcagcgacgcaggccggcggagggggcggcggcgcaaggacccggcggcgagcgcgg

SEQ ID NO: 169900 - DNA, 297 bp, Zea mays
  unsure (1)..(297): unsure at all n locations
  Clone ID: MRT4577_86532C.1
ggccgcccttttttttttttttttttttatatttttttttatattttttttttataaataannaaaaacacaaaacacggggttatacatacacaaggggggcatccaaaataacacnacacaacccctcttccaatttaccccccgtttcacccaaatatttccctaccaacccaacaataattaacaccctcatcaagaataacttttaacttgttaccaccaaaaatttttttctcatgaccatttaacatcacctctaaaaaaccaaaaaaaaaaaaaccccacattttattt

SEQ ID NO: 169901 - DNA, 516 bp, Zea mays
  unsure (1)..(516): unsure at all n locations
  Clone ID: MRT4577_86533C.1
ccggccgggnaaaaaaaataaaaaaaaaaaaaaaaaaaaaaaaaaaaaaaaaaaaaaaaaaaaaaaaaaaaaaaaaaaaaaaccccccccttatttaacgttctcttgaaccaccaaaaagaggccgaggaaaaaaggaaaaggggcaaaggaaggttaggaaggttaaacttggccgccaaagttcacgggttggggttgccaatgccatgccagggccttgtgaccccgttgatgaagttctcccacctcctggccaacaaaggtttcaaggtcaccttcgtaaacaccgacgggaaccgcgcggccggggaacccgcgttgaaggcctccggcggcggcggcggcgtggcgcccttgggcggggaaatccacctggggtccatcccggacgggttggccgacaacaaggaccgcagggacttcagaaggttcgtcaacgcctacacgcgccacatgctgggttacctgaagcgcctcctcgccaacatgaaagttgccggggggcccagggcc

SEQ ID NO: 169902 - DNA, 585 bp, Zea mays
  unsure (1)..(585): unsure at all n locations
  Clone ID: MRT4577_86534C.1
acgagtacaagcttttttttttttttttttttttttttctttttttttttttttttttttttttttttttttttttttttttttttttttggttgggggggggggggggggggggaggttgggggcagggggggggggggcttggggggggggggggggggccaagggggggggggtgagggggttagggggggccggggggaaaggggtttcgggtcacatttccgcgccccgtggggggggggggcgaaaaggggaaagcccggaggggctaaagggggaggtaactcaaaataaaggggggggggtcaatggccggtttgccggcgggaaacctggggggccaggtggattttgggatcggcccaagcgcggggagaggggggttgggttatgggccctcttcccccttgttcgttattgaaccgctgggctcgggcggtcgggtggggggggggggtctctgttcccccntgggggggtttccggtctgccccggnttggggggtaaagggggnggttggacctttggccccaaaaggacgggaaaaggcccggaaaagcaaaaaagggccgggtgcccag

SEQ ID NO: 169903 - DNA, 547 bp, Zea mays
  Clone ID: MRT4577_86535C.1
gggaccctcgggccggccgggaaacgcctagtaccgtgcttattctcgcgcgcgcgacattcctcttcacgatgctgcgctagccgctgagagagaagaatagatgagctcgcgcaagggcgatggcccgtttatcgttcatcgatctcggcacgacgtactcttagtgatagagtgtgtggcattgcgaccgtgtactgattattgccaacgaccagtgtaaccgtaccactaccctcttacgtggccttcaccgactgcgagcgcctaattggagatgcaggcacgaaccaatgaacacatgaaccttataaactccgtgtttgctgccaagggtctaatgccgaggagggacagggatgccactggacatagtgatatgaaggtgcggcccttcaaggtacttctgtgctgctgttgagagcccattgattcgcgtgacttcacaaggattgaggatgacgcggctctgcaccatgatgagatgtgctgtatggatcttatcatgatgcgcgagattgctgaagcttaccttgttcgcacgatc

SEQ ID NO: 169904 - DNA, 330 bp, Zea mays
  Clone ID: MRT4577_86536C.1
cgtcgtaagctcggaattcggctcgagccggcgtgctcgacgccgttaacagggttatgctctacagcctacttgacgcgcaggtggacgccgggttcggcgctgccagggggctctgtgcgggctacagcgatgagcgcgataaggcttgcctaaccgtgtggacaggcaaagtcgactgcaactatgcggccgctgatgctgacaacgctcgagcggacaacggctacctggccctcctgcgtctctcctgcaacgcctgtgcccatcgcggtcccttcgccgacatgagcgagcgcctctactcgctcttcaacgagagccagaagc

SEQ ID NO: 169905 - DNA, 589 bp, Zea mays
  Clone ID: MRT4577_86537C.1
ggcgccgaggctgggcctcggctgtcggtccggggaaggggctcacagaaccaacgccaagatgatgctttcaagggccaaacctgctgtaggcggggacctgcctcacacagacaaaagaaagaagaaggtaggaagattccgaaactggaggagctgctttcgcaaagggatttcactggagcgattaccctgttggagttcaaacgtcatgttggggaacaagaagaggatactaatttgtggattggatactgtgcttttcacctgggtgactacaagagagctttggaggaatatgaaaacgcaacaaaagaggaaaattgcaatcctgaagtctgggtgaacctagcctgtacctacttttttcttggaatgtataaacaagctgaagcagctggatttaaagctccaaaaagccgacttcaaaaccgcctcctcttccacttggctcataagtttaatgatgagaagaagttgatgaactttcatcagaatcttcaagatatcacagaagatcaactcagtttggcctcaatccactatatgcgatctcattaccaagaagctattgatatttataagcgaa

SEQ ID NO: 169906 - DNA, 655 bp, Zea mays
  Clone ID: MRT4577_86538C.1
ccggccggggtccaagcagaccactcatcccgtcatccgtcatggcggcatccttcctcaggcccttcctccctgcccaacccctcctctccgcccgcagaccccacctccccgccgctcccaccacgagcaccaccaccgtgcgctgcaccgccacgcccaaaccggcaacctcgacgccgaaacccatcagccaggaagaggccaatagccgagagcagcaacgcccgcaagaaccgaacgccgcccccgctccggacgaggcgaacggcaaccccaacagcatcccagacgaggagaccccggcctccgcggcggtaaccacgtcgttcgcggtggcccggcggctgccgtccgccatctcgccggaccggcggccgcggacggcgctgacgcaggaggagccgcccaactacgagatcgggtggaagcgcagcaagaagctgccgctggagaagccccggggctgggccatcgccgacttcctggagaagctggagggcctgctggcgcgcgggcggtacgggtccgcgcagctgctgggcaccgtggccggcgtggtgacggagcgcgcccgcgaggaggcggaggtcctgggggccgaggggggcgtggaggatggctgcgggacggtggtcttccgctggctgcgact

SEQ ID NO: 169907 - DNA, 222 bp, Zea mays
  unsure (1)..(222): unsure at all n locations
  Clone ID: MRT4577_86539C.1
gcgctaagccgtccgcaggctggtcatttacccattaagaaccagttctcatttgtctcctggttnnnnaagcagttgttcagatcacctagtttattaggtcaagcgttcntcccccaccctgtcctagnctcaagtagcaccctagagcactggtcaatattcactccatcatagagtgagctagagtccaatgaccatgtatcttgctaccatctagca

SEQ ID NO: 169908 - DNA, 200 bp, Zea mays
  unsure (1)..(200): unsure at all n locations
  Clone ID: MRT4577_8653C.1
ggccgcttttttttttttttttttcgatacaaacagcgtgaaacagaagttgatgtgtgggtggggtgaaactacatatgattttaacgtgcaatcaagacacagcagagagggcaatcattacaagnnttcanncatgaaacaacagttnnctgaaaacacactggnnagggannagaacaaanngcaggaaccttaca

SEQ ID NO: 169909 - DNA, 1452 bp, Zea mays
  Clone ID: MRT4577_86540C.1
gtgcatatgggtactacttccatatggctactgcagacggacttctcaagcgagacaaggggaaacatagaccctttgttttgtcaagggctttctttgctggaagtcaacggtatggtgcagtctggacaggcgacaactctgctgattgggatcacctgaaatcttctatcccaatggtcttaattcttggtcttactggtttgcctttctctggcgcggatgttggtggattttttggaaacccagaaccggacctgttggtgcgttggtatcaagtaggagccttttatcctttctttaggggtcacgctcaccatgacaccaagagacgtgagccatggttatttggggagcgaagaactgccataataagggaggcgattcatatgcggtattcactgttgccctacttctacacgctgtttagagaggctagtgtgaatggcattcctgtcatgcgtcctttatggttagaattccctgaagacaaagaaacatataacaatggtgaggcatttatggtcggaccaagccttttagctcaaggaatatatgaagagggccagaaatcagtgtcggtctaccttcctgggaaggagtcgtggtatgacttgagaaatggatctccatacaagggaagtgtgacacacaagctacaggttttagaagatagtattcccagcttccaaagggctggtacaattgtgccaagaaaggacagattcagacgcagttctactcagatggtgaatgatccatacactctggtgatagccctcaatagctctggtgctgcagaaggcgaactttatatggatgacggcaaaagctatgattaccagcaaggggcattcagccatcgccgatttgtctttgcagacaataagctaacttcattcaatatcgcacctgacaatttgagcaagaaatttacaagtggttgcgtgattgaaagaattatagtcctcggtttacgatccggagtgaagaaggctattattgagcctggaaaccaagaagtagaaattgaatcagggccaattagtttaaggagtggttccagcccagttgtgccaacaatccggaggcccaatgttcgcatcgcagacagttggacaatatggatagcgtaagaggttgtccattcacgtctggagcctgatgtctcttttgtttgctgtcaggttgcgaagttaggccaatctttagaagtttagttgtggcctcgatcattgcgcatatcattatggttttgtggcctcaaaatatttacatgtaactggtacttaagctgttccaactgccaattttgacagaaatactgagagagattgttgatgtatatttgtagctttcatacatgagtatttgagtttattatcttgcaaaaatgataaacagttacaaattccgagaacatggcaaccgagttctatttaacgtttcttt

SEQ ID NO: 169910 - DNA, 480 bp, Zea mays
  Clone ID: MRT4577_86541C.1
gccgcgtgagtctccacggctcgacccacgcgttcgtagaactagggatgaacagcttgcgcacataaccaacatggtaagaacttatcctgttcaaggacacattaggaattttaggatctatatagaatgaatgtgttgcaaagcaacacctttttcgttgtattcaatcatgatatggggatgctattttactaggattatgttaaatactcaaatgcatctgtgacatctaagatatcggaacatgtgtaaatttctaggaccacaggatctgtttgggcaagggttggctgtcaaacattcttcagcacaatattttattgaactatcatgaaacttgttttgctgaaagactggaaagtggaaactatcgcttaatctataagccccttttcataataagaatatatagaattttgtgacactaacggggtgtttggtttaaaaaatgagctagttcatcatcttcttactcct

SEQ ID NO: 169911 - DNA, 3116 bp, Zea mays
  Clone ID: MRT4577_86542C.1
gagtgtcccgcccagccagggaagtctgctactgcctccagtcccagatccacccgtctgttccgccccgccgcgcgcaccatggatcccccgcggcggcggctacccgccgcgctcgtcgtcttcctcctgctcctcgccgcggcctctcccgtcgcgcgcgcgtggaagaaggacgagtttcgcaactgcaaccagacgcccttctgcaagcgcgctcggacccgcgccccgcactcgctcgacgcgccgctctccctcgccgccggctccctggccgtctcccccgacggctctatctccgctgagctctcccacccgtcccgcccgcggcccctcgtgctccgcctctctgcgctgcccccgcacgcgctgcggctccagatcgatgaggactactccaccgccacgccgccgcaccgccggttccacgtccccgatgtcctcctcccggacctcgaggcccgcacgctccacctccccgagcccaagactgccgctggcgtatccaccgttgcgctctcctccgaccttgacgtcgtcgttagacacgatccgttcgagcttaccgtccgccgtgctgggtcgggcgatcccgtgctctccttcaactcccacggcctcttcgacttcgagccgatgcgggagtccaagccggaggacgacacgtgggaggagcacttccggagccacaccgacaagcgcccccgcggtccgcagtccatcaccttcgacctctccttttatggcgcggacttcgtctacggtctcccggagcacgggtccacctcgctcggcctccgccccacccgcggcccgggggtcgaggagtccgaaccctaccgcctcttcaacctagacgtcttcgagtacctccacgaatcgcccttcggtctgtatggctcgatccccttcatgattgggcatggcggccgggcgtcgtctggcttcttctggctcaacgcagcggagatgcagattgacgtgcttgcaccaggttgggatggggtcactgaccatgagaacgggcggatcgacacactgtggatggctgaggctggtgtcatcgatgcattcttctttgttggttctgagcctaaggatgtgatcaagcagtacataagtgtcacaggcacaccttcaatgccacaacagtttgctactgcgtatcaccaatgccggtggaactaccgggatgaggcagatgttgacggtgtagatgctggttttgatgagcatgatattccatatgatgtgctctggctcgacattgagcatacggatggcaagcggtactttacatgggatcattctgctttccccaatccagaggagatgcagcgaaagatagcagataaggggaggaagatggtcaccattgtggatccccacatcaagcgtgacagttcattccacctccacaaggaggcaacagacaaggggtactatgtgaaagatgcgaatgggaatgactttgatgggtggtgctggcctggatcatcttcctatcctgacatgctgaatcctgagatacgtgagtggtgggctgacaagttctcctatgaaaattacaagggatcaactccaacactgtacatttggaatgatatgaatgagccatctgtcttcaatggccctgaggtcaccatgcccagggatgcaatgcattatggagatgttgaacaccgagaattgcacaatgcatatgggtactactttcatatggctaccgcagatggacttctcaagcgaggcgaggggaaagatagaccctttgttttgtcaagggccttctttgctggaagtcaacggtatggtgcagtttggacaggcgacaactccgcagactgggatcacttgaaatcttctatcccaatggtcttaactcttggtcttactggcttgcctttctctggcgcggatattggtggattctttggaaacccagaaccagacctattggtgcgttggtaccaagtaggagcattttatcctttctttaggggtcatgctcatcatgacaccaagagacgtgagccatggttatttggagagcgaagaactgccatcataagggaggcgatacatatgcggtattcattgttgccctacttctacacgctgttcagagaggctagtgtaaatggcattcctgtcatgcgtcctttatggttagaatttcctgacgataaagaaacttataacaatggcgaggcatttatggtggggcccagccttttagctcaaggaatatacgaagagggccagaaatcagtgtcggtctaccttcctgggaaggagtcatggtatgacttgagaaatggatctccatacaagggaagcgcgacacacaagctacaggttttagaagatagcattcccagcttccaaagggctggtacaattgtgccaagaaaggacagattcagacgcagttctactcagatggtgaatgatccatacactctggtgatagcactcaatagctcaggtgctggagaaggcgaactttatgtggatgacgggaaaagttatgagtaccagcaaggggcattcatccatcgccgatttgtctttgcagacaataagctaacttcattcaatattgggcctgacgatttgggcaagaaatttagaagtgattgcgtgattgaaagaattataatcctcggtttacgatccggagtgaagaaggctattattgagcctggaaatcaagaactagaaattgaatcagggccaattagtttaaggagtggttccagcccagtcgcgccaacaatccggaggcccaatgtttgcattgcagacagttggactataaggatagcataaaaggtaggccattcacatctggatcctgatgtctgatgtcttcttttgtctgctgtcaggttgcaaaattaggccagcctttagaagtttagttgtggccttgaaatatttgcatgtaactggtacttaagctgttccaactgccaattttgacataaatacttatatacattgctgatgtatattgtagctttgatacatgagcattttatcttgcaaaaatgatatacagttagtcagttacaaattctctgagaaaaaaaaaaaaaaaaaaaaaaaaa

SEQ ID NO: 169912 - DNA, 1022 bp, Zea mays
  Clone ID: MRT4577_86543C.1
agctcggtaccacgcatgctgcagacgcgttacgtatcggatccagaattcgtgatacttgatgtgcattgtattcgaattgagtttttcggtgatgaaatcgatcgtattcgtgaagtaaatgcgttaacaggtgaagtattagcagaacgtgatcatgtagcaatcttcccagcatctcacttcgttacacgtgaagagaaaatgaaggtcgctattgaaaatatcgaaaaagaattagaagaacgtttaaaggagttaaatgataacggtaagttgttagaagcgcagcgtatagagcaacgtacacgttatgatttagaaatgatgcgcgagatgggcttttgttcaggtattgaaaactactcccgtcatttaacacttcgtccagcgggggcaacgccgtatacgttattagactattttccgaaagatttcttaatcgttatggatgagtcgcacgtatcaaccacaagtgagcgatgtataacggtgaccgcacgtaaactgcttgatcatggattccgtctggcatcagctttagataatagacctcatgtttgatgagtttgaggagaaagcgaatgaacaaggggggattaatcttcttattcctgttacgaaaacgacacaagaatcgtaacatggcgggattacaggtggagtgcgttttggctgtgaaaatgctattgtgcaggatagctttaacaatcttatgatgcagattatggcaacgacaatagtgttactacatggtatatatgcatttatcatttttgagatgaagccgaaaaatgtagagactctatatttgtcacttggtagtatatcggcaggtattatatttataattacggctgaacgtggattgttctctttgtatgaatttgaattttcaacatatatgaaaattatatatacatcgtttgtaggtctgagctttattcattgcactgtatatgaaaaggattttacgagggttatggggacaataaaatgattttatttaccattgtattatg

SEQ ID NO: 169913 - DNA, 251 bp, Zea mays
  Clone ID: MRT4577_86544C.1
atatcaagcactattgttactaaaccatgaatcactagtcggtcacttgagagaaaataacaacccgatacaacacaaccctattagaaattaaaaatcctttgttaaacggatataccccgagcgcaccccactaaaatagcaggtcccaccaattattgagacacaccaatgaaccaccatccttgggccacaaataagggtcatacatttcccataacaagaccggcttgagtattaccacggtttaa

SEQ ID NO: 169914 - DNA, 143 bp, Zea mays
  unsure (1)..(143): unsure at all n locations
  Clone ID: MRT4577_86545C.1
aaccgnccggattcccgccgggcgtcgcgctgttcatcttgtacaacgcgctcaagcgcttccatgggggtggtggtgccatcgtgggtgcgatggctgaccatcctcgtcgcctggggcacatcacctctatttatctccta

SEQ ID NO: 169915 - DNA, 491 bp, Zea mays
  Clone ID: MRT4577_86546C.1
cttgcttctctcctttctccatctctctccagcgcagcgcccagtggcgctggagctccgtgcgcgcgcccctattttctgctcgccggccatgctcctctactcgcccagctcgggcgcgcttctccctgctgcgcgcgtcgagctccctcgctgtggtctgctggtccctcggccatggcatggacacctggggagggggtccctctgcttgtccctgctgcggctcgccggcgtttctcccttgtgtgcgcgcccagccaagggtcctccctgcgcactctgttgtgagcgccgatccgtacccacaaagcctcgccggtgcttggctggctcggcaatggcctgaccggcgcccggctgtgtcacgcttcaggccattaaatcgccgttaatcttggcgtgcacaatgccgtctcgaacctgccatgtccggtgtcggtcggcgatcccggcctgctgcttatcccgtcgccaagctgtgtgccggt

SEQ ID NO: 169916 - DNA, 201 bp, Zea mays
  Clone ID: MRT4577_86547C.1
gtgacagatccgctcgctaatatgggacctgagattagctgttaaaaaatatgtaatattgctaaacatgtctatattcatcatgaacctggcgacccagacgctcgctccatccacatttattctcggcatacacaagcagcaaccatccatgagaagcatgggtgaaaaacccctattgggtcgtgtacatgtggcgga

SEQ ID NO: 169917 - DNA, 128 bp, Zea mays
  Clone ID: MRT4577_86548C.1
cgcagcccgcgcagggggatcactcgaggggatgtgggctggtgctcttgttccagcaaagaacaaggcggaccttccaacaactcctgcgtgaagccaagttatgtgcgatagcaagcaccttttat

SEQ ID NO: 169918 - DNA, 307 bp, Zea mays
  Clone ID: MRT4577_86549C.1
aaaacaaatcctaaagacgccgggtttataaatttttggtccaggagtaaaagaggggggggccccccccctttaggcgtttttcccccgctttttttattggccagcccagccttggttaacccttttttggcccccgggaaaaccccttcggggggtctttttaaacttgaggggcggggggtccccccaaacgcccctttaaaatatgagcgggacgttttcctacgggtccctggaacagctggggggggcgcgcaaacattttttttttgggggaaatttgcccttcccccaaaatgggggg

SEQ ID NO: 169919 - DNA, 1709 bp, Zea mays
  Clone ID: MRT4577_8654C.1
ggccggccgggaagtctctttctgccccacgacacctttttcccgacaccctaccactccaactctccaccccaaccgccgccatggacgtccctaggtctaacaagcagcctaccagcacaccgcagaacacacccgccaatgctgcacccatctcgtcgcgcgcccagcagccgaacgtcggcaccatcaaggaagaggagcttgaccgcgccgccgccggactgttcgctgcaaaccccgctctcgtctcgatgatgcaggccaagctcggctcccttgttggccgctcaagcggctacatcgagtcactccctggctctgtccgccgccgtgttgctggcctgaagggtgtccagaaggagcactctaagctcgaggccgagttccaggaggaggttctccagctcgagaagaagtacttcgccaagttcacaccgctgtacgagcagcgtgccaagatcgtcaacggctctaccgagcccacagaggagcaggtcaaggttggcgagcagcaagatgaggacgatgaggatgacgaggaggctggcgagaaggagctgaacaaggacgagggcaagggcgtcaagggtattccagagttctggctgagcgccatgaagaaccagatctcgctcgccgagatgatcacagaccgcgacgaggccgcactgaagcacctcactgacgtccgcatggagtacctcgaccgccccggtttccgtctcattttcgagtttgaggagaacgagttcttcaccaacaagaccatcaccaagacatacttctaccaggaggagaacggttacggtggcgacttcatctacgaccacgccgagggcgacaagatcgactggaagacgggcaaggacctgactgtccgcgttgagagcaagaagcagaggaacaagaacacaaagcagacccgcgttgtcaagaagaccgttcccacagagtcgttcttcaacttcttcgaccccccaagccctccccaggacgaggatgacgacgcttcatccgatattgaggagcgcctcgagctcgactaccagctcggtgaggacatcaaggagaagctcattccccgcgctatcgactggttcaccggcgaggctcttcagtacgagaacatcgaggacttcgacgagggcgagtttgaagacgaggatgatgaggatgaggacgggctcagtgacgaccgcgatgaggacgaggagtcagatgacgagaacgacggcacaaaacccaagcaggaggctgctgagtgcaagcagagctaaacgtctctttcgaccgatcttcttcgatgatatctccgggcattgggcttgttcaatctagatggcttctccggctgtgacaggctcgcaacctgacctcttcccattatctttgcacagcacttcatgttttcgacacggcgtatcattgcatcaaaagagctggacgccgattgggggtggttgttctagctatacatgaactatactggttctacctccctcgctctactccactcaaccctaatagtccctgcccatggctcgccctcagacacgtcagacccggacatgcggtctaaacacagtattggcccctgcggtggtactcaacgcgtgagggagctacgagcagcggatgaatcacgactacagcgatggatagtaaaagttttggtatatagagcgaaatgaatgagatacgagcac

SEQ ID NO: 169920 - DNA, 601 bp, Zea mays
  Clone ID: MRT4577_86550C.1
ctcgaggccggccttcttcccttcagtcctcttccgtcctcctcctgtccaccgccccgtgcagttcggcggcgacatggcggcggccggcgacctgtccgacgatgagaagcgggcgatgaggggcagcaagttcgcgccgcttcctccgcctcctccctcttcccgcccccagccgaggaaatgacttgtaacttgaaatccgtatcactgggatgctattggttgccaaggatgaatctaggtgtaactgcttttggagtaccaggagttcttccatttgtggttgcttctgtcagtgcaatgcaagcttatacatatacacctaaaggaaaaatcagaagagcaagttgaaacctgagtgggggccacatgaagcataaatatagttgtatcgcagcagaccttagggcctgtttggcaccaaagtatttttgcagttttgatggaatactatagtatttgagaaaaccgaggtattgtaagccgtgaggtgtttggtttgattttgcaaactacagttttcaataatacaatatcctcaaaactgcagtaaaaaaaaaaaaaaacaaaaaagaaaaaaaaaaaaaaaaaagcggcc

SEQ ID NO: 169921 - DNA, 837 bp, Zea mays
  unsure (1)..(837): unsure at all n locations
  Clone ID: MRT4577_86551C.1
ccggnccggccttcccgggtggccggcgcggtgcccagggcgcgcgcccgtcgcacgactgcctgtaccgcgccgtcgacatctacctcaagacgcacccggagctggacgagatccagcgggagaaggtctgcagcgtcatggacccgctcaagctctcgtaccaggcgcgcacgcacgcgtcgcagaacaagcggctgccgctgcaggccgcgctcagcgcgctctactacgacgagctcaagctccgcagcgccgcgacggccgacgtggtattggacacgcagtcgtcggccgccgggagggcttgcgcgcaggccagggcggcggacgcggcgctggcgcgagagaacgaggcgctgcggtcagagctggcacggatgcgggcctacctgtcagggatggagcgcagcaaagggggccggtcaacgccgccgtcctcgccgtctcggagggcaaagaaagcaagcttcctgggctccgtctcccgcactatgagccggctgaacccgtttagaagtggggggtggatggcgaaggttacgaccagtaacgccgccgccggtggacgccagagcaaaacgatgatgcagcatgtggtgacacccaagaggaggagagcatccataagttaataatcatgacactgtcgtgtaattttaggaggatatcgtgtgtgcatggcttgtagtttgattattattgtgtgtttttagtttattattgtgctagtatatatatgaatgcgtgtgtagtaccaagtggtttgctaaatcattcgataattttacatgttcgcatcgtagtgatcaattttatcttttctctttatctgcc

SEQ ID NO: 169922 - DNA, 204 bp, Zea mays
  Clone ID: MRT4577_86552C.1
tcgggcacacgctcgccagactagccgatcttcactcaagcggcgcccaacagaagtaatggccactgggacggccctctccctcagcggtggccggggctgtactaccctgctactggggcacgcggtcttggactcagggcagtgctgcgcgttcccatgctcgcggtggaagccgccgcacctgccagactgccgcgcgga

SEQ ID NO: 169923 - DNA, 441 bp, Zea mays
  Clone ID: MRT4577_86553C.1
gggcataaaaaaaaggaaattctttttttcaccggtgggaattacagtaccccaaaatttgttttttgacccgggacattttttgaatacccccatcaaaatgggggattcccccccccgggttagcacaacccatacgggtgggcccggggggggccaacctacgggtttttgggggggaaccccccgtaaaaaatcccaaaaaacccctttatcagggagcaaagctttgcaatttaaggttttccgggctagggcccggttttgccctaaaaaccattttaaaaggggcccccaaatttatgaaaacccccgggggaaaaacccccctcaaaatcgttgtaaaagtccccgggaaacttgccggggttgcccataacctggagctcattcttggaattttcctgggccttaataaccggctttcgggccggaccaccg

SEQ ID NO: 169924 - DNA, 593 bp, Zea mays
  unsure (1)..(593): unsure at all n locations
  Clone ID: MRT4577_86554C.1
gcagtggtaacaacgcagagtacttttttttttttttttttttttttttttgctgaaacacatagtatgtatatgaatatatagcccgggcacgaggcaggcgaccatgcagcgacaggaaggaacaatggcggtggccgggggagggatcttatttagacgccgttacataggtgatgtacaatgcccgtgtactctgcggtgaaccacggcttaagggctaattccattagactacacagactggactatctgatctctagaaggagcgaaggttcattagctcttatggatgtattagacggtgaactctacttagttgattttttattacgaggaggtcgctctacatgcatgctttgggatnaccgtgtagcacatgtttgggatgaagaaccttcataaacttttaaagggagaacatgtcgtaggactaaccaatgattggttgaagaaagacaatccttgatcagtacgtcacgccgggacacaggtgtgaagcactcatcacagacggaatgtgattgacacccttaaataccactgctgccttcttcacatggcccctattctgggcccatctggctaccctt

SEQ ID NO: 169925 - DNA, 281 bp, Zea mays
  Clone ID: MRT4577_86555C.1
cgaaacccagctcttcaaccatataggcttcaacaagcaatcgcagcaagcaacatacctttatcgcccttgttgtttcaacaatcgccagcctaccttggagaagcattggtcaaccatcgggacacagctgagactcgtgtactctgtaccaagtatctggaacttctcctatctcagacacattctccatcacactgctaatgactgtgtattgagacatatacattagcactagtatgctattagacacattctcattacattgcgatgaccgtgta

SEQ ID NO: 169926 - DNA, 152 bp, Zea mays
  Clone ID: MRT4577_86556C.1
ctgtcttagcgctgaccggcacggtaaaccgaggggggatttttaagcggcagagccgcaactcgccacacagccatttcgccagggggagcccacggtgctgtcgatccgaagactagtgagagaccccaggacgcagatagactgggtga

SEQ ID NO: 169927 - DNA, 317 bp, Zea mays
  Clone ID: MRT4577_86557C.1
gcattatcatggattgatcggtgctttgtacaaccattcccaagctaaaacagggagcacattattgaccgtcggccatgtccaaataatgtgggtcaacaaaaaatgctacattgcgacatggcactcaccataaaatggcgcggataaggggaaatctgaatcattgacaaccgcagagtctagaaccttctcttgactgttttacaggtctggggaaccacaaacacaaagatgtttatccatggttggttattgtgcccttttgggcacaaacagcatcctcccgggctagtcggttagagagctttgttgca

SEQ ID NO: 169928 - DNA, 344 bp, Zea mays
  Clone ID: MRT4577_86558C.1
gcgcccccgccaaactttaagatcccaagggggggccccaaaataaacaacacatttttggccaaaaaaattagcccctgcccccccaacaaaggaaaaaggggttttctccctgccccatggcgccacctcgggcaaaccccttgttccaccccgaaaacccggcccccacccacaaaggagcccagccttacccttaaagaggtgcattaaaaggggggggaacaacagcaacaagcttgtcccgaaaaaaaaaggaatccctttacaattccccaaaaatataaaaagcggaggcaaaaacatgaaccccgggggccccaagagaggccccaaccccccca

SEQ ID NO: 169929 - DNA, 231 bp, Zea mays
  Clone ID: MRT4577_86559C.1
gaaaaccggcccgagcgagcggaagaaaacgcactggctgaagccgctattcgttttagaccctctgctgccacccttatggtgattgtgccgtccaacctccttgcttcccctgtgtgaatctgaacggatttttgtgttctgaaaaaaaaaaaaattcctattataataataaaaaataaaaaaaaaaaaaaaaaaaaaaaaaaattcaaggcacagtgtataaatatg

SEQ ID NO: 169930 - DNA, 304 bp, Zea mays
  Clone ID: MRT4577_8655C.1
aaaaattgagattttttttttttttttttttacacgggggggcaacaaaaccaccctcttccaacagggctcttaccaggggacaactccagaccccccaagattaaaacaccgcaccgccaaaaataacaagggcttttgcccaaacccaagtcaacccaacaaccaaaacccaacaacaaaacgacgaaaccaaccctgtagaaaaacccaataagcccaattcgggttatcaaccccccccctggggccccaaaagccaaaaaaaccaggccgggaaaaaaaaacaccagcttaggccccg

SEQ ID NO: 169931 - DNA, 1165 bp, Zea mays
  Clone ID: MRT4577_86560C.1
tgccccgcgtccgcccagcgtccgggggggggggggcggacacgtaaaacaacgctgagggggtcacagatgaaagctgctggccatggtgttcatgcccactttcaggttcccatacaagttaatgatttcatgcagacagatcgtttttctgatcaactgtttcctaaaactggggggggggggggacagaacaatacgtgacacctcttttatacgagggtcatcgtaacacaaatacacaataatatattaaatgtattaaagtttggcatgaatgagttaaccacatggataggcagcttaattgtgtactaggtaaggttttctttatttgtactcttcactgttaatgatattgtaaaactgaaagtgattgactgtattcatgatttatttaatattaaacttttggccactggccttaccgacatgtattctttttatttttattggaataacatgtattgaatgcttactcagttgtttggtgtagcatcattcaactccgtgatgaataaaaagaagggaaatacaagaacaaagccgctccctccttctaaaagacttcgccaagaagcacagagggtcctgaaggagcgtgttcaggacattgcagataagaaaggcgtcaagctgagattttgcaatctcaaggaatgtgaaagccacatcctgtcattggatagtccatgtgagaacacgagaactgaaattggatggccacaaggggttccgtttgtccatccacatgacctcccaaacaaggcaaagcttgggtttttggaagcttacgaacctggatggacggcctcccaacaagaaatggagagccagcctcagtaaattttgatgtattaccaaccttggatatgttttgaatttcggggctggtcatcaattcattccttcaacatgttgcagaagcagtaatgtatactgacgccaaataatttgtatacatagatgtagtatttgagaacgtgtaaatgcgactacccgctgcttagattgaaagttagattatataatctgggtagattataatcctaaacaaacaggcctttaatccataatgcattatacggaaatgtttgtaaaaaacttcgcaagttcgcatcaacaatgacaatgctgatgtggagatgtttagaaggagatggag

SEQ ID NO: 169932 - DNA, 582 bp, Zea mays
  Clone ID: MRT4577_86561C.1
gggggggggggggttttttttttttttttttttttttttggggcttttcttggtgctcttattgcttgacttttaattgggttttctccatctccttctaaacaactccacatcagcattgtcattgttgatgccaacttgcgaagtatattgcgggcgggtccctataatgcattatggattaaaggcctgtttgtttaggattataatctacccagattatttaatctaactttcaatctaagcagcgggtagtcgcatttacacgttctcaaatactacatctatgtatacaaattatttggcgtcagtatacattactgcttctgcaacatgttgaaggaatgaattgatgaccagcccccaaattcaaaacatatccaagggtggtaatacatcaaaatttactgaggctggctcctttgcccattagaaagataaaatgagaatgcactcatcatgtttcaatagaacttaactccatttcttggtgggaggccgtccatccaggttcgtaagcttccaaaaacccaagctttgccttgtttgggaggtcatgtggatggacaaacggaacccctt

SEQ ID NO: 169933 - DNA, 383 bp, Zea mays
  Clone ID: MRT4577_86562C.1
ggccccggagctggtcccttacctgacgggggatggcacggagaatcgcgacagggtgagtatggcggtggaggccctggccgccgtgctgtccgcggaagggatcgcggaagaggccagggagggcctcgtccttgctcttgtcgccgaggatctgggccgcgtcgtgacgacgctgttctgcgcggacgcgaacggcgccgcggtccttgatgcgatgctgacgtctgcgcgcgtggacgcggactccaagaccgcaatcgccgacaggccggagctgttcccggacctcgtgcggatcctcaaggactcctcatgtcatgcagccatccggtgcatggtcgccgcggtgcaagtccgctgccggccggcgcgcgcgttca

SEQ ID NO: 169934 - DNA, 364 bp, Zea mays
  Clone ID: MRT4577_86563C.1
tttttgtctttttttttttgtttttttttttttttttttttttgtttgggtttttttcaaaaaaatcatcttattgataaccataaaacccatcagggtactacatgatcgccagaacaaacaggggcccgtcaaaacacgtcccaccaccaccacgcccacacttcctccgccgccggggccgactccatacatacacacgcccgccgacaccttacacagggccccacccgacccgagctggatttacccaccccagaccagacgaatcattttttggggcaggaaccacttttccagggcggatttaccaaaaaaggtacccaaaggcggcggcggcaagggaggccctggcaaggggtcc

SEQ ID NO: 169935 - DNA, 156 bp, Zea mays
  Clone ID: MRT4577_86564C.1
tttttctattttacctgagaacatcattatttcactatacggacccctgtaattatattgactacagacacagaggccgcatggaagaaagtttaccaccttcaaaagattggcggagaacgggtaaattaactggttcaatatcaatcccacata

SEQ ID NO: 169936 - DNA, 210 bp, Zea mays
  Clone ID: MRT4577_86565C.1
cggactcgtggagactagttctacatctctttctgtcgttcgtcatctacaacctttcctgggctgattcatctatactacaatcctcttaaaacacgttccgcctatcataagattttgtcaactatctaaacgcccccattggtaggatcatctttaccacatgcgctccagtttgatgaatcttcatcttctctacccagatgcatt

SEQ ID NO: 169937 - DNA, 409 bp, Zea mays
  Clone ID: MRT4577_86566C.1
gatagggagagtttctttattgcagtgtagtgaaatatatatacaagagttcccaaggggtgtgtcccttgggaaataactgtcacatatggattagatcacatgtacaaaatattttgtaacaatatagaccttgctgcgatcgcaagcaggtttttacgtcaccagacctgaacagacccattgccatccctaacgttgcgttcttgcagatgccgacgctagctaataagacagtcgcaagcaacatcggagacgaatctagctggacagggcatgcaggcagacaggccatgccgccccgtcgccatcgctcgccagtcgccagtaacgagaacgtgcgggggcagctagcgcgcgtcgtcgtcggtgccggcgtccggcgacgttgccgcactaccggttccgc

SEQ ID NO: 169938 - DNA, 160 bp, Zea mays
  Clone ID: MRT4577_86567C.1
cccactcgtccgataatacaaagatttctcttctctcgtaaactaagctagctacgggggtccatcataaacgagcaatgtctattgataccgaaatatctcatgttaatcacaattacccatattgtacctcatctagaatactaatatctacactctt

SEQ ID NO: 169939 - DNA, 451 bp, Zea mays
  Clone ID: MRT4577_86568C.1
ctttgggctgatttatgtgcttgtccgagtcaaaggaaatctctcttcgaccccgagccaccgaaacactgaatctacacgcagacgccctgaggtagacaccgacaatagcggccttactgatcacggagagccttcagtcgtaatcgcatactcgaataaagctgagtgagatgataattctcctgtagtacctctacatcccgacaaagatggtagtggacacaccatctacgacgagtcataaaaagtacgtcaagaacctggcacagaagacgtatattcagaagacactacttacgatgccgactaggataacgacggctggactgatcataatgagcccgcaataacgacgtagaagggaaacaatttatcagggaaaaaggggtatcgttagacgagtcccggctccatagaagtaccgaagtccggtcaaacggtacgacta

SEQ ID NO: 169940 - DNA, 390 bp, Zea mays
  Clone ID: MRT4577_86569C.1
attcggctcgaggctcggatgccttcacagttttctgacatggagataatgttgctagcagcggagggtgtgcccggcgccccaagcatgaaagaagactccagggaccatctgatgaaaaataacattagctactcatagacgacgacgcggacgatgatgaagattacgattacaacttgcgattgtacttgtggagaggtatccaatacaagggctgtcaaaagttatatgtgaaacaccaagtcgtgctgttgggctaggataccagtacgaagctactagggcatgttaacatgtgtctgcctgatggtgaagaaacggtagaaaggggcaatttattctgccaaattaagcaaatgaaaaaatgatgtgtgaagtattgttgaa

SEQ ID NO: 169941 - DNA, 672 bp, Zea mays
  Clone ID: MRT4577_8656C.1
gccggccgggcccgggaagaaaaaaaaaacacgcacccgcgtccgcgtgctctctgccccctgcccccctcccatctgcgccgccctcctcatccaccgcccgtcccgccgccgccagcccaaggccaggcatccgccagcctctcgcaccacgcgtatcgcgtgcccgcccgaccggctcgtggcgatggcgtaccgggcggacgacgactacgactacctattcaaggtggtgctcatcggggactccggcgtcggcaagtccaacctgctctcgcgcttcacgcgcaacgagttcagcctcgagtccaagtccaccatcggcgtcgagttcgccacccgcagcatccacgtcgacgacaaggtcgtcaaggcccagatctgggacaccgccggtcaggaaaggtaccgtgctatcacgagcgcgtactaccgcggagcagtaggggcgctcgtcgtctacgacgtcacgcggcacgtcaccttcgagaacgtggagaggtggatgagggagctcagggaccacacggacgccaacatcgtgatcatgctggttgggaacaaggcggacctgcgccacctcagggctgtcccgaccgaggacgccaaggcctttgccgagagggagaacgccttcttcatggagacgggggtcctggaggcgttgaacgg

SEQ ID NO: 169942 - DNA, 194 bp, Zea mays
  Clone ID: MRT4577_86570C.1
tcggggacatgcgcgcgcgcgcgccgttgtacatttgaatggtggcaactcgcaggccatggtccacgaggagaaagtatgcgtgcagaaggaggtgaaggaagacattaattaggtggtggtgattgtacctgtttttttttttgccttcttctttggtgatttgttgatagaaacaagtggtttttcaagta

SEQ ID NO: 169943 - DNA, 237 bp, Zea mays
  Clone ID: MRT4577_86571C.1
caggagcacacggccctgccccatcctgggccttacatcccctgccagggctcgggcgctgtagctcctgcgctgatgaagccgtgtcctgccttgatgaagcctgttgccacctgcaagtgcacgctctgcgcctgcgccaacccccaccgaagagcctgagctcaggctgagcccagctactcgcaaggactttccagtgagatatggaacacgtgacgtgaatcctgtctcagt

SEQ ID NO: 169944 - DNA, 647 bp, Zea mays
  Clone ID: MRT4577_86572C.1
ttgtgcggctgctccctcctccacctccgtttctaatccgagttgctaataccactcctagcccctgttcgtgcgctgagatggacagtagcagcctccttctttcgcagctcctggagttgatgtgacagcacctggcctccgatgccggcaaggatgtcaccaggaaggtcggcctcgtctaccagatgaacatcgccccccacaacatcggcgttgatgaggagatcttcgaggtggagctcaagaacgacgaggtcaacaaagggccgtaccagggtaagtcggatgccactgtctccttcgcggatgactgatttccttggaatcgccgccgtgaagacgaatgcgcagattgcattcatccgaggggcgattatgatcgaggagagcatcagtgcgtcgcaaaagttcacccctgacatcttcaccgagcctgacaaggtgtagaaggttatattgtattacttgggctaggcggataatagatgtttgcaagcttcaattactatgtacgagatacgatgggtgatacatgagaagcaggttctcggagggagtttggatatcatgaaaacaaaactctgtgctgacggtgctcgagctgctgtttttgttgccgttaatgaggcataagtgtgtgcttg

SEQ ID NO: 169945 - DNA, 478 bp, Zea mays
  unsure (1)..(478): unsure at all n locations
  Clone ID: MRT4577_86573C.1
ttcccaagttcccaatcccaaccaacccccctcgaacctccgtcagtctcagtctctccttgctctttcggtcgcaagcaatccacagcgcttccagcgagacgaagagaggagagagaggggaggaagggcccgagagggaggctccaggggccctgcattgcgtagggcgcagccgccgggatggatcacggcggcgagggccgcgttgcggcggctcggcgcacgctgcgtgccggtgtggacaagtcgcgcgcttctgggccactcgctggcccgcgcggggccccgtctagaggagatccaggcggcgctgccggcgctggaggccgcggtgcgcccaatccgcgcgccgcatgccgagctcgccgccgcggggccccacatcgaccgcgccgaaagccccgccggcagcgtgctcaaggtgttcgacgccgtgcacggnctcgagccgccgctcctggcgccaggcgccgcg

SEQ ID NO: 169946 - DNA, 1413 bp, Zea mays
  Clone ID: MRT4577_86574C.1
gctgtgagcaagattgcatcgctgcaggagttcattcctcatgatttcgatgccagtgaccatgggacctcaagcttccctgtatctgcagtgcataggattggcatccttgacattagaatcttcaacactgacaggcatgctggaaatcttctggtcaagaagcttggtcctggcgccgacaattttggagagcagacagaactcattcctattgaccatggtctctgtcttccagaatgcctagaagacccatacttcgagtggatccactggccgcaggcatctgttcctttctccgaggaggaggaggaagtgggttgaggaaagagagtcctttcttcccaacgaagccggagttgaagatgacgatgatgacttcacccagttccttatcgacggcgaggatgattatccggatgccttggaaccatcagctttctgcaagtttggtagcatgaaggcaagttctaggaatccactgtccaagctagatgagcgtgacgaggaagacggagacgggaccgaggaggacgacgacgacgacatcttgaccggtgcattgcctcagaggatctcgtctatctccaagctgtcgtcatccatgaaggggcttggcttcattgggaaacccaagccctaccgcacgtgccttcggaagggtaaagcgacaggcagaactaagtacaccggcaaagccagcgagcatcagtccggcagcaggagcgccaacgagctgctcccgcccagcgccagtttcgtgaagctgtcggacatgagccctaaacagtggagcgcattcctcgacaagttccaggagctgctcccaggtgccctgagcgcccggaagcacgctgccggtgtcgtcggccagcgctcgatgccgaggctgggcacgtcttgccagttttgagagtagcagaagagaagccaccgaacccaaggtataacgaacgcgcttctgttcgagctctggtgtgcagcagccaagcaggtacggagtattatatatgcttgtaggtgtctggagccggtggtggtagagggtccgagaataagatcatccatggcatgtgagatgaggttgcgggagaaggaagggggttgtgtgtgtttgtgcatagtgtttcgcataagagatccgttgttcttttttcttcttctctgtatatagttaagtactcctactgctactgcatcgcagcaccgggcacgggctgggatctcggccgttgttacctgaacgatggtggtgagtgtgctggcgtcgcctgctctctgctctgtctttgccgctgtaccattttggaggcgcttaccatattatgaactttgaactatgatatgatgttcgctaaaaaaaaaaaaaaaaaaaaaaaaaaaaaaaaagaaaaaaaaaaaaaaaaagcggcc

SEQ ID NO: 169947 - DNA, 363 bp, Zea mays
  Clone ID: MRT4577_86575C.1
acttcacttaatttcctccgcagtcttaggcttcggtggcatttatcacgcgcttctgggacccgagactcttgaagaatcttttccattctttggttatgtgtgggcagagaggatgggctggctgctgtgaacatacatggcagtgcggggggtgggagtgcttattctatggcttatgaggggacctttacacttacatttgtgactgggcgggctgtgtggataggagcctatcttgctcgacttggtgtacggtgcataccgcgctgcgaccagcctattattgtaacaggggtttctgccctggacaagctccttggtcggcaagtgcgcctggccggacgggcgctcgcaagggcg

SEQ ID NO: 169948 - DNA, 428 bp, Zea mays
  Clone ID: MRT4577_86576C.1
cccacgcgtccgcaccggcaaagccagcgagcatcagtccgggagcaggagcgccaacgagctgctcccgcccagcgccagtttcgtgaagctgtcggacatgagccctaaacagtggagcgcattcctcgacaagttccaggagctgctcccaggtgccctgagcgcccggaagcacgctgccggtgtcgtcggccagcgctcgatgccgaggctgggcacgtcttgccagttttgagagtagcagaagagaagcgcctgctctctgctctgtctttgccgctgtaccattttggaggcgcttaccatattatgaactttgaactatgatatgatgttcgcataaatatcacatgttctctgtgaaaaaaaaaaaaaaaaaattgggaaaaaaaaaaaaaaagaaaaaaaaaaaaaaaggggcggcc

SEQ ID NO: 169949 - DNA, 252 bp, Zea mays
  Clone ID: MRT4577_86578C.1
gtcctcttacgtccgggccaatcaccctcgctcgggggcgcctatccgctgtttgtttctcctgttccccggcctatactgctacgatgcttgtcgactgggaggacctgcacaaggacgacgaaaggctctctgttaggtgacggttggaacatacacccgcgatggacaggggaacgatggcagacctcacacagctggagctgcacagtaagaagctccaggataggatgatcatggctcaggtgaccg

SEQ ID NO: 169950 - DNA, 281 bp, Zea mays
  Clone ID: MRT4577_86579C.1
cggacccgagggttcagcccggaaagggccggacccggaccatggggggaccccaacttgccctaaagcgaggcgtaaaaaagggggggggaatcaagggtaaagaaaaacccggggaaaaaaggttcccgggaaaaaaggccacccaacaaacaagccaaaagcaaaaagggcaaaggcgggggggccaaaagaggggggggcccaaaaaaaaaggccacccccaaaaaggccgatttccagagggaaaaccttgcaggccagaacccataaggaaccgg

SEQ ID NO: 169951 - DNA, 1398 bp, Zea mays
  Clone ID: MRT4577_8657C.1
ccgggactgcactgcacgacgcccgcacggcaccgaccccgcaccaagccaacggaaaccgagcacccgcacccgcccggggtggaattgggaactgagaaggaaaaaaaacacccacacccacacccgcgtccgcgtgctctctctgccccatccgcgcgcccctcctcctccaccgcccgtcccgccgccgccgccgcccggccgtctggtggcgatggcgtaccgggcggacgacgactacgactacctcttcaaggtggtgctcatcggcgactccggcgtcggcaagtcgaacctgctctcgcgcttcacgcgcaacgagttcagcctcgagtccaagtccaccatcggcgtcgagttcgccacccgcagcatccacgtcgaggacaaggtcgtcaaggcccagatctgggacaccgccggccaggaaagataccgcgctatcacgagcgcgtactaccgcggagcggtaggggcgctggtcgtgtacgacgtcacgcggcacgtcaccttcgagaacgtggagcggtggatgagggagctgagggaccacacggacgccaacatcgtcatgatgctggtagggaacaaggcggacctgcgccacctcagggccgtcccgaccgaggacgccaaggccttcgccgagcgccagaacgccttcttcatggagacgtcggccctggaggcgatgaacgtggaggacgccttcaccgaggtgctcgcgcagatctaccgcgtcgtcagcaagaaggcgctcgacatcggcgacgaccccgccgcgcctcccaggggccataccatcaacgtcggcggcaaggacgacgtgtccgcggtcaagaagtctgcctgctgctcgtcttagcttgggaggacaggatagagcgtgtacttgggtttggttgttgatacttacgcactagagggcacatgacgttattgcagtcatggtcctcgatctgtattcattcgtttccaggtgtctcgttgattttgccatttgatacattgattcattcaggacttgggcctttctggtatagtgtagggataccttgttccttttatttcttgtacctgcatactgtcgcttctcttatcaaactagctgcattacttcaacaggctatttatttgcttttgctagactgctgccatgttgcaaattgcaatccaattggtcactagggtacctcaaaaaaaaaaaaaaaaaaaaaaaaaaaaaaaaaaaaaaaaaaaaaaaaaaaaaaaaaaaaaaaaaaaaaaaaaaaaaaaaaaaaaaaaaaaaaaaaaaaaaaaaaaaaaaaaaaaaaaaaaaaaaaaaaaaaaaaaaaaaaaaaaaaaaaaggggggcccctttttaaaaaaaccaaattttatttcccgggggttggg

SEQ ID NO: 169952 - DNA, 412 bp, Zea mays
  Clone ID: MRT4577_86580C.1
gggacaggtcgaccaagagggggttcgtcgtctgggaccccctcaccggcagccggcagcacgggggcatgcccagcgctagctacccgtcccactcgtgccgctacacctcctacaccggggccgtggtgtgtgccaaggccggctgcgacgacgaccacctcgactgccaggccggtccgttccgcgtggtctgcgtagagaccaacctcctgaagcctgtattcgcgtgcgcgaccagctactcgtcagtgaccggcgcgtggagtgctcccgtgcccaaccatgacagccacgacttcaactactactgcttgagaagctatggcaagcagagccttcttgtcggcgatgccgtctacttcctcttccaggatgaccaaagcatcctcacgtacgacctgggtaggca

SEQ ID NO: 169953 - DNA, 288 bp, Zea mays
  Clone ID: MRT4577_86581C.1
ctgattttactagtactagtatgcgccctgctgtcaaactgtcaatagtgaattccgcctagccgcccacgttattgactgacgctcgagcgctgctgctgctgctgcagctggcctgctgcgcttgccctgcgcctgcacaacccgccctcggttttttttttgataaaggggagtttatttcattaagctaatgaaaaaacagtgctcggtctcaaaaaaaaaaataaaaaaaagaaatcaaaaaaacccacgcgtccgcggacgcgtgggctgatggtagcacga

SEQ ID NO: 169954 - DNA, 266 bp, Zea mays
  Clone ID: MRT4577_86582C.1
cttccgtcaacggcccttgcttttttaaccacttgcaaaggccggccacaaaggatgcttgggtgattggtggccttaatgtgctgggtattattaatgagccaaccggtgctggtattggctatgggcttgacaaggaggcaaccaatgttggtgagaagaatggtcttatttttgaccctggaggggggacctttgatggcttccttcttaccattgggggagggatttttgaagtcaagggcacaacttgcgacacccatttt

SEQ ID NO: 169955 - DNA, 438 bp, Zea mays
  Clone ID: MRT4577_86583C.1
cccccccttttttttttttttttttttttttttttttttttttttttttttttttttttttttttttttttttttttaggggggcaaccttattcccattcctattaactttttttttttatcatggggagcatgaatgacagttaaacaatgacgggggggccggtgcaattacattttggtggggaaaaaaaaatcaatagttgcaaaaacaaacccccattatttacctttaatggtagggggaaactaaaaaggggaaaacagctaaacaaaagcaagttttttggggggcaaaaattttgaaaaaacagctggcacattggaaacttttttattagcgattgggccccttgttgacccggatcccccttaaacttttccctgggggaaaggttggcgccaatcagggggaacttccaacgatctgctttgaaa

SEQ ID NO: 169956 - DNA, 371 bp, Zea mays
  Clone ID: MRT4577_86584C.1
aaaccccccctccatttagatcaacattaagggggccgggttcaaaaaagggggggggggggaaaggggtcaccctgcccgtttaaaaacgggggggattttaaaaccccccaagttttaggggaaaaacttaaaaaaaaggtttttacggtcacataccctggccaaaggttaatcacatgaacggggggggcctcaaagccttgaacgggggtttaaggttcctggggggggggctgaccttgggggacacgggggggaacttgatttcactggggggaaactggttgggggtggcccttttgcccaggttgaaaggtactggggggggttttataatttgggtgcagggggacctcaccgggggggga

SEQ ID NO: 169957 - DNA, 118 bp, Zea mays
  unsure (1)..(118): unsure at all n locations
  Clone ID: MRT4577_86585C.1
gccgatccgtcgccacgcgcgctctggggcgcacggtctgggctacacctttatgctctgtccaagaacccgccgtggtggccgccatgcgcgccgaggccggngacgggcgacggcg

SEQ ID NO: 169958 - DNA, 546 bp, Zea mays
  Clone ID: MRT4577_86586C.1
ggccgctttttttttttttttttttttatgtttttttttttttttttttttttttttttttttttttttttttttttttttttttttttttttgggccccgccacccgacgcaaaagggtcccaaacccccattttttttgacactgaaaatatacagcttccaggggacacaaaacaggggggttttggattgaacaccaaacgcgggactgtactggaaacccaatttggttcatatttatacaggaaggataaaaccaataccggggggcccccccaggccccgggaagaaaaaccccaaaggccaggcaaagaaaacactacctggcatacctctgggaccagggcccggcggggttctccaacttgggccggtccggtttgaaaaggggagctattttggggaccaaagggtcggaggggttgggatcaaccacctgggaacaaggggacacccgccccctgggaattgttagggccggaccccaatggcccttcaagaaggcgaggcaaaagccccccaccctgttgcagtttggaggga

SEQ ID NO: 169959 - DNA, 422 bp, Zea mays
  Clone ID: MRT4577_86587C.1
aggcgctgtgcccagggcctatttattgggtgaatatataaaaaaaacatcatttacaatcatgcttagtgctataactgacccgtgacggacctgaaatcgaacatgctgtgtgctataacacagttaaaatcccatgacttgaagatcttacaaatcaagaacattccaacactgggtttatttttcctgagccatcacagaacaacgatagctcctgtaatcccctgtatcggcaggtgagacacacacacacacacacacaccactggtccaggagagccaaagttcaatccaggcatgtttcgggaccgaaagcacgtggaagccgaaggtgcaaactaaaccgatctctgtgccttcttcagggatagagcttggccagatcaggaataaatttgacctttatttgctacctctta

SEQ ID NO: 169960 - DNA, 442 bp, Zea mays
  Clone ID: MRT4577_86588C.1
actgcggacgcgtgggggggtgggagcgcgaagagggagcggtacacgcacggcttctcggcgtcccagatggccgcgctcaccgccctctgcggcgcgctggtgccgtccctgccgccggcggaccgccggaacggtcaccaccacaacccgcagcctgaggaggacggcggcagcaacaaggtcgtggaggagttcctcctcgcgtcggccgccgacccgcccgtgcccggcgaggtggccgagctgatgtcgcgcaagtgcctccccgaggcgctggcgctggtgcgcgcggtgctgtggctgctgggcacgcggctcggctcgctggcgctgtgcggggcgcggtgcctgtctgggcggttcccgttcgtgcgccggttcgacgagctgcccctggagcaccgggaggccgcgctccggcggtggagccggcagaccc

SEQ ID NO: 169961 - DNA, 251 bp, Zea mays
  Clone ID: MRT4577_86589C.1
actagtgaattcgggggggaaaacaaccattagaggccttacttatttattggtgcaaaaatcatagcctttgcatacatgaacctgtagcggtcacaatagactgtccccattcatagatgctctgtatgttgacttaaacatagtttaaacgatgtacggaatcacatctgataatatttcatggaaaaccataatgttcgcagacttgaaattaatgagttgcagcacatttgattcatttcaaatgg

SEQ ID NO: 169962 - DNA, 645 bp, Zea mays
  Clone ID: MRT4577_8658C.1
aaaatacatgacgctggctcccagccgagacgcacacgccgccgcgcgggacctccacgagggcgtctggcgtcaccccggcgcacccgccgagactgctgcgccgccgcgccgccgcgagaagggcggaggtcgccagggagagagcatcaaaaggaggagagggaggtggaagaggcgccctgccgccaccgcgggcaggccgccggcggcgccggcgacagaggaggacgtggctgagggggctgaaggtgaggcggcgggaaatcgcccggtgagtcgcgagagcaacccacgggacggagggaaaagtggcggtggattccttggttttcactgtttcgttcccaaatcagattcgaccgggcaagcatatccagttctctcccggattggattggggtgggaaggatctacatcagaacgcgaccggagtagccgccggagctgccgcagtcttggtctctttgatttgcggctccggccgcccgtgtggttgtagccgacctgctctaaagctgtggtgtttgtgtctgtccatccacaatggaagctccggctccagattggtccgggctaccagcggacatattggtcagcatattccagttgctccagtgcccggacctcatccgatccgccgcc

SEQ ID NO: 169963 - DNA, 491 bp, Zea mays
  Clone ID: MRT4577_86590C.1
aacctctgtctgcgtgctctcgccttggctgtcgattttactaatttggttgcttggatgtggaccgttggcttagatacccacgcgtccggaattacttcgcgtcctttacccagtttttatccattgcttcatggatctagtggcagagggacatatgcacaatgctcggtcatttttccatacatttcgggaagctcataaggtgatgcattcaagggatcttcagaagctggaaggcatcctctctccttcacacttggaggttatttagctctgcactacattgtgccattatgttgtgaatggacccatgtattggaatgtgaattgtgaacccataaccctaaacagggttgggtgtggtattaatagacttgagtaattgggtctggcccattacaacgagggtgagacggtaattacatggggaaggccccaaaccctagacgggtagtctaccccctcgcagtcacaactctatcctgtac

SEQ ID NO: 169964 - DNA, 689 bp, Zea mays
  Clone ID: MRT4577_86591C.1
ccggccggggatgaatacgagtatacgacgtacctacgaggcactttggtctgacccaacacaccaatttaccagagaagacttcaagagcccttcaacaacttggatcaacaaaccatggatacgtgtgcaacggaccgtcaagcttcaatggctttcttcatattccaatggtcgggatgacgtggcggggtctgatagtgcacggatctggtccgatcacccgttgtgtgagtctgacaaaggtctcgtatacactagatcagcactgttgaaggtccaatgtgatcacagtcagaacaatttttgttactttactccaacggttatatgggatggttgagactataaatactccaaccaacattcaagacatacaagagctacaccaaacatccatatacttattgcaactaatccaaagcattcgaagccttccaagtgccacattcaagagaattgagttggagaaatcttagtgtcttgtggagtgcttgtatttgagttgttgctatgttctttttcccttgagtttctttctcactctcactctcactctcactcttgtaaagctagtgaggactccgttgattgtgtggagatcctcatagagactccggtttcttgatttgagaaggacactcaaacggtctaggtgatagtttaagaagagtaaaaagagtcaagtg

SEQ ID NO: 169965 - DNA, 205 bp, Zea mays
  Clone ID: MRT4577_86592C.1
acacgcatctgagttgtatcatctaagagagttattacagcgagcagaaataattggtactccaaaaaaaaaaaaaaaaaaaaaaaaaaaaaaaaaaaaaaaaaggaagaaaatctagaggaataaaacttaattaaacgtgaatgcaaacatcatatatcttctatactgtaacgtaacattaaattcactggcggtggtgttt

SEQ ID NO: 169966 - DNA, 1441 bp, Zea mays
  Clone ID: MRT4577_86593C.1
ttctaatccggtaatcccccctcccgagtccaaaccctaaacctaaacctctcacccggcgccgccgccgccaccgccgccgccccgaggccccatcccagcgcaaccgacttccgcctcggattgaagcaatgtcgtcggacgacgaggtcagggaggagaaggagctcgacctctcctccaacgatgtcgtcaccaagtacaagactgccgccgaaatcctgaacaacgctctgaagctggttgtgtctgagtgcaagccaaaagcaaagattgttgacctttgtgagaagggtgactctttcataagagagtaatagatctttctgtgtcttagtgctcttggttgcttctttcttgctaatttgcatccttacttgggcttattgtttggaataggcaaactgggaatgtctacaagaatgcaaagaggaagattgaaaggggcattgctttcccaacctgtgtttctgtgaacaacacagtctgccacttctccccgcttaccacagatgatgcagttctggaagaaaatgatatggttaaaattgacatggggtgtcatattgatggctttattgctgtggtggcacatacacatgtaattgcaaatgggcctgtcacaggaagagcagctgatgttcttgctgctgccaacacagcagcagaagttgcaatgaggcttgtcagacctgggaagaagaataaggatgttactgaagcaattcagaaagttgctgctgtttatgattgcaaaattgtggaaggtgttcttagccatcaactgaagcaatttgtgattgatggtaacaaagttgtgctaagtgtctccaatgctgatacaaaggttgatgatgctgaatttgaagaaaatgaagtctatgcaatcgatattgtcaccagcactggggaggggaagcccaagttattggatgagaagcagaccaccatctacaaaagggctgtagacaagaattataacctgaagatgaaagcgtcaagatttattttcagtgaaatcagccagaagttcccaatcatgcccttcactgctaggtgaccttgttgcacacataaagttcactgtgctgctaatgcccaatggatcggataggattacatcatatccgctacaggagttaaagccaacaaaatccattgaagacaatgctgagataaaggcatggcttgctttggggacgaaatcaaagaagaagggtggtggaaagaagaagaaaggcaagaaaggagatgcagcaggagatcccatggaggcgacaaacgatgctacaagccaagaataattctgatttttggaattactgcacccagcattttctctcttgtttcttcgctgcatctgatggtgttatattacattcagttgcgaaaaaatgaatacttttttctagtgtctaagaaacgaagcatcctgttgcac

SEQ ID NO: 169967 - DNA, 180 bp, Zea mays
  Clone ID: MRT4577_86594C.1
ggtttggggttttttttttttttttttttttttttttggttttttttttttttaatcaagcttcagcattaagtgtgcaaacgacatgccatgtttacaattacatgatcaaaacccttgagtaaattcatcacatgcttttgtatcaccgggggtgtttgagttcatcaggcatttcac

SEQ ID NO: 169968 - DNA, 1763 bp, Zea mays
  unsure (1)..(1763): unsure at all n locations
  Clone ID: MRT4577_86595C.1
atttacacggtttaaagagtgtagtttgaatatgaggagggtacctcgaggccggccgggggtgtaactctaattcctagccccgagactgacgccggctgcctcgctccatttctaatccggtaatcccccctcccgagtccaaaccctaaacctaaacctctcacccggcgccgccgccgccaccgccgccgccccgaggccccatcccagcgcaaccgacttccgcctcggattgaagcaatgtcgtcggacgacgaggtcagggaggagaaggagctcgacctctcctccaacgatgtcgtcaccaagtacaagactgccgccgaaatcctgaacaacgctctgaagctggttgtgtctgagtgcaagccaaaagcaaagattgttgacctttgtgagaagggtgactctttcataagagagcaaactgggaatgtctacaagaatgcaaagaggaagattgaaaggggcattgctttcccaacctgtgtttctgtgaacaacacagtctgccacttctccccgcttaccacagatgatgcagttctggaagaaaatgatatggttaaaattgacatggggtgtcatattgatggctttattgctgtggtggcacatacacatgtaattgcaaatgggcctgtcacaggaagagcagctgatgttcttgctgctgccaacacagcagcagaagttgcaatgaggcttgtcagacctgggaagaagaataaggatgttactgaagcaattcagaaagttgctgctgtttatgattgcaaaattgtggaaggtgttcttagccatcaactgaagcaatttgtgattgatggtaacaaagttgtgctaagtgtctccaatgctgatacaaaggttgatgatgctgaatttgaagaaaatgaagtctatgcaatcgatattgtcaccagcactggggaggggaagcccaagttattggatgagaagcagaccaccatctacaaaagggctgtagacaagaattataacctgaagatgaaagcgtcaaggtttattttcagtgaaatcagccagaagttcccaatcatgcccttcactgctagggcattagaagagaagcgtgcacgcttaggcttggtggaatgcatgaaccatgagctattgcagccgtaccctgtacttcatgagaagccaggtgaccttgttgcacacataaagttcactgtgctgctaatgcccaatggatcggataggattacatcatatccgctacaggagttaaagccaacaaaatccattgaagacaatgctgagataaaggcatggcttgctttggggacgaaatcaaagaagaagggtggtggaaagaagaagaaaggcaagaaaggagatgcagcaggagatcccatggaggcgacaaacgatgctacaagccaagaataattctgatttttggaattactgcacccagcattttctctcttgtttcttcgctgcatctgatggtgttatattacattcagttgcgaaaaaatgaatacttttttctagtgtctaagaaacgaagcatcctgttgcattatcgcatccaatggcgcaaagataattatctacaaggcatgcctagtgttggttctccgttctctgttcttcgtgacgacgctcgtcacttggatttttcggagttcctcccagcccggaaatttcttncctggacattgccaactgctgagatgtagcatccggatacaaatgttcgaattacgtatacaatgttactgtgt

SEQ ID NO: 169969 - DNA, 414 bp, Zea mays
  Clone ID: MRT4577_86596C.1
gttgcacaggaaaaagaaaaccgatgcaataacgcaaagggtaaggggagcacgacccccagctcccatggccaaaaccaaagaggaaaaccaaaaccaacaccccaaaacaaaagcaaaaacccaaggctgtttcaaaatcggacccaaaaacaaaaacctaatttgaaccatatggcaaaaaaaaaggccaaaccctcgaccgcccccgggaactaaaccagggcatggacccgccccttctgcgcgtgatcagagaggcaaacataggcccacccccaaacctccttgtcaaagacaaaggcgaggacaatctccccattttaaaaccccatgaagagccacagccccaggaccttgaaggggacctgaaaacctaccaaaaacacatatccaaaggctttttggagggcc

SEQ ID NO: 169970 - DNA, 1568 bp, Zea mays
  Clone ID: MRT4577_86597C.1
cccgacgccggctgcctcgctccatttctgatccggtaatccccactcccgagtccaaaccctaaacctaaacctctcacccggcgccgccgccgccccatcccagcgcaaccgacttccacctcggattgaagcaatgtcgtcggacgacgaggtcagggaggagaaggagctcgacctctcctccaacgatgtcgtcaccaagtacaagactgccgccgaaatcctgaacaacgctctgaagctggttgtgtctgagtgcaagccaaaagcaaagattgttgacctttgtgagaagggtgactctttcataagagagcaaactgggaatgtctacaagaatgcaaagaggaagattgaaaggggcattgctttcccaacctgtgtttctgtgaacaacacagtctgccacttctccccgcttaccacagatgatgcagttctggaagaaaatgatatggttaaaattgacatggggtgtcatattgatggctttattgctgtggtggcacatacacatgtaattgcaaatgggcctgtcacaggaagagcagctgatgttcttgctgctgccaacacagcagcagaagttgcaatgaggcttgtcagacctgggaagaagaataaggatgttactgaagcaattcagaaagttgctgctgtttatgattgcaaaattgtggaaggtgttcttagccatcaactgaagcaatttgtgattgatggtaacaaagttgtgctaagtgtctccaatgctgatacaaaggttgatgatgctgaatttgaagaaaatgaagtctatgcaatcgatattgtcaccagcactggggaggggaagcccaagttattggatgagaagcagaccaccatctacaaaagggctgtagacaagaattataacctgaagatgaaagcgtcaaggtttattttcagtgaaatcagccagaagttcccaatcatgcccttcactgctagggcattagaagagaagcgtgcacgcttaggattggtggaatgcatgaaccatgagctattgcagccgtaccctgtacttcatgagaaaccaggtgaccttgttgcacacataaagttcactgtgctgctaatgcccaatggatcggataggattacatcatatccgctacaggagttaaagccaacaaaatccattgaagacaatgctgagataaaggcatggcttgctttggggacgaaatcaaagaagaagggtggtggaaagaagaagaaaggcaagaaaggagatgcagcaggagatcccatggaggcgacaaacgatgctacaagccaagaataattctgatttttggaattactgcacccagcattttctctcttgtttcttcgctgcatctgatggtgttatattacattcagttgcgaaaaaatgaatacttttttctagtgtctaagaaacgaagcatcctgttgcacattatcgcatccaatggcacaaagataattatctaaaaaaaaaaaaaaaaaaaaaaaaaaaaaaagcggccaaaaaaaaaaaaaaaaaaaaaaagaaaaaaaaaaaaaaataaagg

SEQ ID NO: 169971 - DNA, 1154 bp, Zea mays
  Clone ID: MRT4577_86598C.1
gtcatgagaagacccattccatagatagtgtcgctgagcaaaatgtaatactaaagcctcaaagtgaatgcagcgggaataggtctgccaacaaagatgctaaatatgttgagtgccttcaggaaagtatttatggagggaatcacactggagttgatgtgggtactgtcaattcgaatcatgtccatcaaatggctacaggcgaattggattcgcttcagagagacatcaaagctcctctatacagcagtgttagtgtaaatggtgagtcgattcccttggaaccagatcttgttgctcgacgcaccctttcagaaggtcagtttcctagtgtattggatgtgactaatgcacttgaagcgaaatggaccggtaaagatgatcctgtttctagcaaggtaaccatgccagaatctacagcatcttcagaggactcagaagaacatatgggtgataatacaccttcatacgcctctatattgctgagcaagctaggggacagtgcagcagatcattctaattggatagagatgcctttcttactattttaccgttccctcaataagcaatggaatcgatcaaaccgatttgatgcactcaacgaatatagtcccgaatatgttcctttcttaagggaagtggagcgtcatattggacctaaatttttctttcctataggaatcagtgatactgttgttggagtttatgatgacgaacctactagcattatctcttatgcgctggcctcccatgaatatcatcttcagatgtcagatgaactggaacgagaaatgacagacacttcactcccactatgtgactcaagaagtgtctcgttaactgaactggatgaatgtacttctgaacttctaagaagtgttgtctctacagaggacattatcctctccatgtctggaagaaagaacccacttgcttcagattcacttgtgcctcgaaaagtaagtcacataaaagtgaattttggggatgaaggtcctctaggacaggtgaagtacactgtgatttgttactatgccaaacaatttgatgctctgaggagattatgctgtccatcagagcgtgattttgtcaggtcccttagtcgttgcaagaaatggggtgctcaaggaggcaagagcaatgtattctttgca

SEQ ID NO: 169972 - DNA, 406 bp, Zea mays
  Clone ID: MRT4577_86599C.1
gttggtgagtttttttttttttttttttagtgcttttactctctttgtcaccctgtccatggtagtggaagaagcggcatgaaccgggtcaggaggatttttggggcggcggaagctaaggatgcgggactccatttgggttttccgggggggcgatacccttcccatcctgacccggggagacctttttttattcgccaagggcctacggaggtttctggcctgacaacttttcctaaaattagccacctttggatttggctgactaatccctataaacaacattctgaaaaaaattttttttcgatttttttggaaagaacattttagtccctaggatgggcaaggccttctcagcagcctaattagtaattgaacaaacaccaaccttggggggtttattaaa

SEQ ID NO: 169973 - DNA, 196 bp, Zea mays
  unsure (1)..(196): unsure at all n locations
  Clone ID: MRT4577_8659C.1
aaccgnccacgcgtccggcttcttttacttggttttagcttgctgatatctgggaagaaatcgtgcttccttccaaagtcttaaacattgttacacgattaggtcctgatgctggtgctcctttgtcagcacacccagatgttgacaaagtcgcttttactgggaattttgaaactggtaagaacattatagctgc

SEQ ID NO: 169974 - DNA, 418 bp, Zea mays
  Clone ID: MRT4577_865C.1
cggacgcgtgggcggactcttgggctgactcgtgggctgcaaaggattcagcacgccgcgggttgcgaagggagcttctaggcagccctacaccacacgtcaatcgggctggctgagacaatggcacagactcttggcggcgcgaacgcgactaactgatcctcccgccggcggccagcagatgctctggctgctagcatgcaaccttacttagacgcggcaacacattatacagctcaacatatcctagaccctctagatcaaatacatactccgaaatcacatatgtaaggatgaactactgcctcttatactaggggctatgactatagaatggcgatcattaggccattaaacatgacttgcttgacaacattctaaatgaagatctcgtcatcttaatgcaagagatcgatct

SEQ ID NO: 169975 - DNA, 333 bp, Zea mays
  Clone ID: MRT4577_86600C.1
tcctccttttttggagcagatggggaccttttggtgggttgattggaaccgtcgagtcaggccaccgctcacactgacactgtcacccatggggatgcttggcgcgggcacactcaatcatgggcgataagtgtcacaccgtgctacctggccagcggagcttctacagcgcaaaaaattttcagagggggacaacgccggcagcgtcgcgcgggcagggcgtgcgatactgcaggccacacattggcgtcagtaggtgagctaggtgacacggcaacagcccgctgaacggaccgctttgcggatgctgctgctcgatggcctggaggaccc

SEQ ID NO: 169976 - DNA, 289 bp, Zea mays
  unsure (1)..(289): unsure at all n locations
  Clone ID: MRT4577_86601C.1
tctacttttccgccaccccctacanctaagggagaggatgtcataatatgggggcgggacatcaaccaccccaagcacttctccctcctttttcttcccatgaagcactcctcccttcacctctacaaggtgaactcatttcctatttatgaccccaaaaaaccttgccatttcacttccttccttgctacaatgctgtcatcactcacattgttccttagcttgaaaagccaatatccaaactccataataaggaaacctgttgatgctgttaccatgattgaaaccc

SEQ ID NO: 169977 - DNA, 428 bp, Zea mays
  Clone ID: MRT4577_86602C.1
tcctgtatagtggccgcccttaggatcactttatgctctgagctcacgccttcaataagcttagccttctcagccagtgcgaaagcagcaccgatcctaccaaatgtgagagcagacctaggctcaggcagattaggacatagaacggagctgacatgcctgagactctttttggtggcgagggcatcgacccgttatgcactttcaacaagctcgaaacactaagataagctgactatatcgtggcatccaaagcaacgcttctgacctgaaggcaagaagcatgcgagaggaggccgctgcaccagcgatcgctgcctcttcttccctgagtgcactcttccagactccaattattacttgcatccatgcgtctgacttgatggatctctacctcatgcagcttgtgacactcagtcggatgagac

SEQ ID NO: 169978 - DNA, 1093 bp, Zea mays
  Clone ID: MRT4577_86603C.1
gccgggcgttctgttggggaccctcgaggccggccgggatccacaatcgcaattcgcaagcccttccaacggcagtcatggcttccatcaccctcctctccctcgctcccaccgccatcttcctccacatcccggctttcacctcctcctccgtcgttggtcccggaatcctagccggccgctgggccgcgccccgcgccctcccgctccgcgcgctcccgccccgtcgcgtcaccgtcgtctgcagcagcgccgcggcggcagccgaggcctcggacgccgcagcgccagtggagaagttccggctcgacaatttggggccccagaaggggtcccgccggcggcccaagcgtaagggacgcggtattgctgcaggccagggcgcgagctgcgggttcggtatgcgcgggcagaaatcgcgctcggggcccggcgtccggcgcgggttcgagggagggcagatgccgctctaccgccgtctccccaagctacggggcattgccggcgggatgcacattggcctgccgaagtatgtgccattcaatttaaaagacatagtgcgcggcggattcaaagatggtgacgaaatatcactggaaagcctgaaatcacggggtctgatcaatccatcaggcagggaaaggaagctgccgctgaagatcttaggagatggggatgtatcagttaagttgaatatcaaggctggagcgttttcagcttcagctaaagagaagcttgaggcagctggttgttccctaactctgttacctaaacgaaagaaatggcttccacaaaattatctaaagaaccaagcccgagcagaagagtactttgccaagaaaaaagctggtgctggtgaatctgatagcggctctgcatagaatttctttgcgatgtactcttctcttgcttttagcatatgcttattactgagcaagacacaccggctcaactaaaaatgttcataacttcttcatccaaactctgacttcgatgatattagacatttcggaaattttatttaaagggctacgatagccactttaataaaaaaaaaaaaaaaaaaaaaaaaaaagaaataaaaaaattatgg

SEQ ID NO: 169979 - DNA, 875 bp, Zea mays
  Clone ID: MRT4577_86604C.1
ggccgctttttttttttttttttcaaagataatgatcagatcctcacaatttattcatattcatattcacatgtaagaattgacattaatggtatttaatacaattgtaccttcggttcgctagaagatgagaatgcaaagatggtgcatgagagagattacaatccagcgtgaacagtacgggggtactattcatctatttataagcgcgggacacagcccggacataattacatttatgtccccaacatttacatgcaatcataatgtgagtgatcaaggactaaacagtctttttcccttgagtcggtgacgacctttggcttcgtcatattactaagccgaagctccttcagccatagcttcggcttccatccgtgtcatcatgtcgtgtatgcctttgtattgtcttgtccgaaggtgttttttccttgaggacctttggcagggaagaagacccccaacactcctcatagtagtcctcctcctgggccacctgctcttcaccggtgatttgattgaggtgagcttggtccccgacatagcatggcacaacggtaattcccaagcccggcgagcaatcgcccaagcgccaatggtccagcggcgggatggcagccatggctcctaggcaccgtgccaccacaccagaacaccatgccaagacctgggtaaccgcgatttgcgagctcactagcggcggatctcccctctctaaatctcgatttcgcggtggtgatagcacccgacggtagatgatttgctggtcagggctcgcgagagggtaatagagggggaaaaggtcgctggggctctgattcatctcctaggatctcggttgggggaagagggaggccgataacaaccctgcccgg

SEQ ID NO: 169980 - DNA, 371 bp, Zea mays
  Clone ID: MRT4577_86605C.1
tgtatttttcccagctcctatcttctcttcgtcgtagtgctgcccttcagcgaggtgctggactggagcaccttctcggtggtgctcgccgagagaagggcataccggcggacctcaagaacttcctgtggcacgccgcacgccacgcccatcaagtacgacttcttccacatgatcctgcactccatctggttgagtagagcgaaccaggtcgagctcgacggctgaactgtgcggtcaagtctctggaacagattagtctgtaactgagctcgacagctgatcttacggcagcttgccctactgtgctgtcagttaggctgttcagatgcgcccgcacatgtaaacaattctatatatgcaaccttttt

SEQ ID NO: 169981 - DNA, 298 bp, Zea mays
  Clone ID: MRT4577_86606C.1
ccttcttcgggacggcagctctgggctttccacccgcctggcggacccggcgccgcagaacgggcgcatcgtgtctcggatcaagaaccagccatatgcctcagtgcctttactgtcctggtgggcctgagccaagtagcacgatctactatgctcggacgaagaagaagggtgatgatgaattcccctactgtgtgcacattgtctcttgagagaaggacaatgactccagagaggaacttgaggctgcacgcattgcctgccacaagtacatgacataatctgcaggaaaggatgc

SEQ ID NO: 169982 - DNA, 416 bp, Zea mays
  Clone ID: MRT4577_86607C.1
cgtcctatgcgggtacgacaggatcctgaggtagctagcctggctgagaagcgtgtggcctgcagcggcgaccgaagcgccccccgggaagaatactattgttgtaggggtccaccagagccagcacatgttctaccctctccagtggcactgcatcacttattcccgtcaggccagccgtagcaataccgcctagtcgtcgtaaccgccaagcccaccgccgtcttcgccgtcggcctcaccggcccaagcgcctcggatgtgctgccgtacgtggaagccgatcttaagcgcctccgcctgctcgtttttgaaaaagccaaaggcctttgcacacaggcgaacgacgctttatttgaagcgctggaaggggacgcttggaacgtcctttgctaagctttcaagaggcacggggc

SEQ ID NO: 169983 - DNA, 303 bp, Zea mays
  Clone ID: MRT4577_86608C.1
gaactaactcaatcaaagtgaggtgctgccccaaaagtcaacacttacccagaggccattaagggtccttcctcaaccaaatttagtaagggcaagcgagtttgttactagaattttgcgcttcgtttaagtatattgaagtctacaatatctggacaagtctaagatttgagacaaccgtgagttcttgaaaaataaattcgaaatgatttttattttactactgtatacgatggttagattgatgttggtaactgactaactgttatgaatactgcgatatatatttctatgtgctactga

SEQ ID NO: 169984 - DNA, 1259 bp, Zea mays
  Clone ID: MRT4577_86609C.1
ccgggaggattccagggcatatataaataataaaaccctcgaggaggcgcaggcgcgcagcgcatgcacagtcatcaggtccaaaaggcttccaccacccaccagaccgacgaccactctcacaagcggcagtgcagtgcacccaaataaatcagctgggaggaggagcaccagcaccccaagagcagagctgagcagagcagcgtgcgtccaggatgtacccgtaccgcatgagcaacgtggcgatcggctacctgaacctggcgacgctgctggcctcgatcccggtcatcggcgcgggcctctggctggccaagggctcggcaacgcccacgtgctcctccatccttcaagcaccgctcctcgccgtcggcttcgccgtgctgctcgtgtccctcgcgggcttcgtcggcgcctgcttccacgtggcctgggcgctgtggctgtatctcgccgccgtgatgctcctcatcgccttcctcctcggcctcaccgtgttcgggttcgccgtcaccgcaggcggcggcggcgagcaggtgtacggtcggccgtaccgggagtaccgcgtcgccgactactccccgtggctgcagaggcacgtgcgggacgccaggtactggcgccccgcactcgcctgcgtcgtcgggtccagggcgtgccccaagatccacaactggactcccatggactacctccagcacgacctcacgccgatacagtccggctgctgcaagccgccgacggcgtgccagtacagcgggggcgtggccgtcggggcgcaggacgaggactgctaccgctggaacaacgccccgggcgtcctctgctaccagtgcgactcgtgcaaggccggcgtcatggagcaggtgcgccaggactggcacaagatcgccgtgctcaacgtcgtcgtgctcgtcgccctcgtctgcatctgctcctgcggctgctgcgccttcaggaacgcccgccgctccctctccgagtacccgtacggggtaaaccaaatgtccaagattgacccgcgctgggactactactggtggcgatggtggcgtggtagaagagaacagctctactaggctagctctagcttctcaatgcttgtatgatatcttagctcctgtcttccatcgaaaagatgaaataatacttgagagctgtgttagccccctatggtgctctacttgtttctagttgtacagcttcctccctgtctgcataattaagcttctgtacatatctgagttaagaggagactc

SEQ ID NO: 169985 - DNA, 240 bp, Zea mays
  Clone ID: MRT4577_8660C.1
gaacttaagtatagaagtgagagtgtcaaatcatatgttggagcaccaactaatatatggttacagctgcacgcactctggatcgaccaacatgcatgtaggcacacgtgcatgagctcacagactgacgcctatcatgcaacgagagatcgctaactggagaactacgattttatctctatcacacacacaccagacaatacctaagtatggctgacacgtacggctcagttattattg

SEQ ID NO: 169986 - DNA, 808 bp, Zea mays
  Clone ID: MRT4577_86610C.1
atcgccttattattgataccactagcaaatacaaagcacaatattgtacccataatggtagccaaaatattatgcctcattatgctccttggtctttctacaagtgctgctacagcaagcattttcccgcaatgctcacaagctcctatagcttcccttcttcccccatacctctcaccagcgatgaacttcactatgtgaaaatccaattcttctaccctacaggatccaacacagcaatcgcagcaagaatcttacctttatcacccttgttcctccaacaatcatcatccctatcacagaaattacctttggtgcatttattgctactaaacatccatgtacatcaactactacaactcgtgctaatcacctatgctgtctactctcagcaacagcaggtacctttggtgcatttgatggcacacaacatctcggcacaacaactacaacaactcgtgctagcaaaacttgctgactactctcagcaacaacagtttctgccaatcaaccaacgtagctgcattgaactctgctgattatccgcaccaacaacaactactaccattcagccacctatgtgttgactacccccggcaatttcttccattcaaccgactggcagcatagaactctcttgcttatgtaccacgacaacaactactaccattcagccagctagctgctgtgagacctgctgcctacttgacacaacaacatctgttgccgtactacctgcacaatgcgcctaatgttggcaccctcttacactgacacattgctgacatacgaccaacttgctttgaca

SEQ ID NO: 169987 - DNA, 354 bp, Zea mays
  Clone ID: MRT4577_86611C.1
ggagcaggaacaaaattgcacatacataacatatctcacctattcatcggcactgtactgactacttatgattattactaccgatctgacgagaagtcaggcgggccatgttactcatgggggggtcacaaataaattatttattaggtagaagctgatcgatgctactgtggacgccaaaccgaaagagagttctctcttgcgcatgaatccttcgcagtttcgctgcagcagcccatcactcacacaggtcacagtctcacagaacacatggccacctgcccacccatgctcaccgatgccgcggcaatctgatgttgcctatctcctggaacggcgaccgcttcgggagca

SEQ ID NO: 169988 - DNA, 261 bp, Zea mays
  Clone ID: MRT4577_86612C.1
caaaaaattccttcattattccacagggctcacttgcttctattgccgtgagtacacagggcctcccaccagatactctaatgaccctcaacatccactccccaagcctacaattacatctaaccctagtgcgagcgaccacaacaaccaactgcaaataccacaaaatccttgcacatgcaaatcttacaaaaatagcacacctcacaacaacaactactgcattactgagacagctagccgaaaaaaccttgttaccaa

SEQ ID NO: 169989 - DNA, 385 bp, Zea mays
  Clone ID: MRT4577_86613C.1
acttgaccaatcatcgaaatttatgcgggaggaaacaacgattggtccaaccttcaaattaccaaaccaaggtcacccggaacaattcattggaaatttattccgggaggcggtacccatggaactacattagcattcaggccccccggggaggaacacaggaccaatctattggcggggttgtacgaatctggaaatggtttatgatatttgacaaagggggatgtgcagatacaagcagagcccttgagctttttggggatgcccgcgaagaattttccctggggggaggggtggttcagatctacctctctctggcacctcgacccctcggcggggaacgtgcccgcgccgtagggggtgtcaccctgtacctggtccatgc

SEQ ID NO: 169990 - DNA, 167 bp, Zea mays
  Clone ID: MRT4577_86614C.1
ggctaagacgcgttctgccatggaatcactatactctactgcgggtggcctatacgtgactacgttccagatggtgtggtagcagtcactcggaaactctaaggctgctatgaaccctccatgtcatagagctatcttacggacgaggatgtgtctcttacatgtaa

SEQ ID NO: 169991 - DNA, 233 bp, Zea mays
  Clone ID: MRT4577_86615C.1
gcctgcaggtaccgtttcttttttcctgttttgacccactcgtacacttttacccgaccgtgcctttgttaccatttcatccctgagcctagtcgccgtcccgtgaggaagacccgaccccacgcacgccaagccgtcactcgccgccgagctgcccggttactccgcactcgcccctgcgtgcttactgttttgcactgcttgcggccacctcggtgcctagacccgtgcca

SEQ ID NO: 169992 - DNA, 415 bp, Zea mays
  Clone ID: MRT4577_86616C.1
attcggctcgagttggacacgtgctttttttgctttcggagctccccgccttgacgggtaaaattgagaagcattcaggttatcaatggaggcggaatcaaaccaaacgaccaacacatacatggtgatcaaattgactatacgcggactttatgagtgattgtatcaatatacctgatgaaggagttctaactaatgacatgttaagagcttaagacacatgatgtgaatcatgggataatccaccatattggatctaatggtgtgaataatatccgccttgttgatgatgagcctgccgttcaaaacggatttagtagatagagcagagcataaaacatgtatgaagggagagaaaacatgagctatgaccacaaaatggctcaggaatttagagagaccaacaaatttaaag

SEQ ID NO: 169993 - DNA, 858 bp, Zea mays
  Clone ID: MRT4577_86617C.1
ccggggccggtccctcgcgaaactcagattccctgccgcaaccaactccgcccagatcaatcaacaatccgacaaaatggcgcgccgtcccgctcgttgctaccgatactgcaagaacaagccgtatcctaagtctcggttcaaccgtggtgtccccgaccccaagatccgaatcttcgatcttggccgaaagcgcgccaacgtcgatgacttccctctctgcatccatctcgtttccaacgagtatgagcagctgagctctgaggctcttgaggccgcccgtatttgcgccaacaagtacctcgtcaagaacaccggtaaggagggtttccacctccgagtccgtgctcaccctttccacgtcgtccgtatcaacaagatgttgtcttgtgccggtgccgatagacttcagaccggtatgcgtggtgcctggggtaagcccaacggtactgtcgcccgtgtcaacattggccagattctcatgagcgtccgcactcgtgatgctaaccgtgccattgctctcgaggccctccgccgatcccagtacaagttccctggccgacaaaagatcattgtctccaagaactggggcttcactcctctccgccgtgaggagtacctcgacaagaaggctgccggccgcgtcaaggtcgacggtgcttacgtccagttcctctccaaccacggttctctggagcgcaacatccgtcgcttccccgacgctttcaagtctgaggcttaaaggaatgattgataggatgggatatgggttttctggcgtcaaaatggcttgtcaaataaggacctcttaaaactatctagttaaagggcgtcgattaggcaattgaaatcttacat

SEQ ID NO: 169994 - DNA, 272 bp, Zea mays
  Clone ID: MRT4577_86618C.1
cgatcctggccctatttcttttattttgattttgaataaatttacatagggttccaatcatggttagtccaaatgttcgtccaagaatcatcaaaaagcgcacaaagaagttcacgcgccatcaatctgatcgctatgatcgtgttaagttgaactggcgtaaaccgaaaggtattgataatcgcgttcgtcgtcgctttaagggcgaacgtttcatgccaaacattggttatggatcagctgccagcaccaaatttatgctgccaaatggt

SEQ ID NO: 169995 - DNA, 514 bp, Zea mays
  Clone ID: MRT4577_86619C.1
tctgtcttatcaccgcttggccagtcaccaaagaagcacaataccgcctgacctctgatgagctgaccttgtctaccccgccgtgatccataacccagccataggacgggccgcaggatacagcaacggacgggcacgccaccgggctgcgtgccccaaactgggatatgctaccagcggacacatgctacggtggggaacgccccacaaagcgccagcgcgggcccccgtgccgcaccaggttaacctgatgcttctgctgggcactgctggcggcgatcactactagctttcgtgggccccgattatgggggagtcttttacctgctgtaccgcgccacagggtcggggctaaggggacagtcagatggagtagattctctaattcttgaccacctgggagacggaaggccgagctagatcgactccatcatgctgaccaatacggagggcaacccatacatgaagatacgctacctgtacgaagatcatgaccctgctcgatggccactgt

SEQ ID NO: 169996 - DNA, 885 bp, Zea mays
  Clone ID: MRT4577_8661C.1
attggggccggcagccggcggatttggaaccgatgacacagagaaacggacatcccctctactagttttctctctctgccgccgtccgccggcctcgcgcaccccgtccccgccggcaatcgatcccacttgtcccaggacgcctccgccggccgtcaatcgtgcccctccccagaactcgcactgctctccgtcagttcagttaaaacatgactgctcagacaaagaagagaggcgctacagaaaatggggatggtgttggtttgggtcttgctgccttcattgcaaacaatgaggatgtgggtcccgtagtccggcacgctttcgagtctgggaagcctgaagccctcttgcacagcctccagaacatcgtgaagaataaagaggttgagatcgaagagatttgtagactccactatgaggaattcatccttgctgttgatgagcttcgtggtgtcctggttgatgctgatgagcttaagggcacattatctgatgagaacctgcggttgcaagaggttgctagcgctttgctactgaagcttgatgagctttttgagatttattctgtaaacagtaacgttggggaagccctagctacgttgaagatttgtctgcaagtaaccaacctctgcaaggtatgcaacagggacattaccgaagcaaaattactttctgcattgaaaacattggagttgattgagaaggactacctgcaaaatattccactgaagcttctgaaaaagtcattcataaacaagttcctatggtaagctgtacattgagaagaagtttgtagtggagttaatggagtggcttgtgtatatcagaaggactgctaaggatattgggcaggtcgcaataaacagacatctctgactcatc

SEQ ID NO: 169997 - DNA, 1064 bp, Zea mays
  Clone ID: MRT4577_86620C.1
ttttttttttttttttttttttttttttttttttggaccccggaacaaataacaaaataaatatttggttaaaaaaagaacggaagaattgtgaccctgggtatacctgtactgctgtacaacttatgccccgcttaaaaatactaaactgtacacattttttttctcgacacagaagagctgtgtatctttgtattaaaaaagggtaaactgtacaatttcctacgcttctcatagaagatggactgagctgtagagtcggggcaagtcagttgcacagtcgacatgcttcatgatgtcatgatttcaagttctgcccaccaaagtgcgctgttcctcggaatcgcctgatcttgagtgaccccagggatctcttgcatcctcttggggacctctgccattggcggcctctgccttcggccctcacttaggcacaaccgaatcagctctgaaaatgctctggcatgctcctcggggactgaatttagcgttggatcaatcatacccatcaccgggctagcgcaggtgagatatctgcgtgcccatagaacaaggaggccatcgtcttctagggccagacgccttccggagatggtctcaagcagtagcaaagcaaacttatacgctgtgctatactcatcaggagcatcatactcatcatcttctctcttgtcaacgctgaagctgatgtctgaaacctttgcggcatcgtcctcagtcaagtatatgtatgaactgtttagattctttagggttacaggagtgttctgctggtgcatatactgcaggcagtacagtactcccatagctatccgtaggcgtgactgccaattcagatgctccgcttctttaactgcaacaacaatgttttgatgataattagaatttgtaaacctgcttatatgaattttcctgtcacaactgctaacatcatgagcccttgtgtgaagactgctaataacagataacaaggcttttgcagctttgcagtaccccacaacatacccctgaaaagaaaggcaacccacaattaaaactcaccatgcaagcgctcaaatagtgat

SEQ ID NO: 169998 - DNA, 812 bp, Zea mays
  Clone ID: MRT4577_86621C.1
gggcggggtattttctgtttctatttcttcctgccgctttccagttcacttacagtatttaaccccacacttcctgggctggctcaattacccgcgtacaatacggcccgtcggcccatccgacttacaactccacacaagcaccacacctttttttttcagctactggttcccattcggcaccatcttcaggcttcagacatcgatggcacaacctatcttcaattcagggtcgtgacatctgccccacttgaaagcttgcttgtccccaagcaggggtccaacactgtgtagagtctagaataatgaaagtgacgaaaactttgcttgaggtaactgtaattttgcagtgtcgctgagcgcctgagcccaggataaatgttctttgatcacagaactgtcagcagcccgttgttgtatccaagcagccacctaacgttggaaactgcctttgatcatagaaactgccaacaccaagactgcatacctatacaatgagttaaagaagtaaccacccatggaaactgctgctctccttgtgtttgctggaaaactggacactgcctcaccaactgctcaacaccgattttcagatctgtccacccaaacaggctctagaccgagtaataaagaacagccctcccatagtacccccaaacaacggaatcatgaaaggttgaaaacgatatagtatttactgctaaattatgtccacccaaagctgatgaagccttctaatatcgccctgctcctgtatctcaactggttggacaacaatgtcaccatactaagccataaatcggacgcgtggg

SEQ ID NO: 169999 - DNA, 153 bp, Zea mays
  Clone ID: MRT4577_86622C.1
agcgggtgcgagggcaagttctattacacccggagcgcgtttctgagcgccggggaggcgtacccaggctttgcccatggcgggtcgcaggtgcagggcaagggcgagaacggcgtcttttttgtgcaccccatgcccggaaaccggcaattt

SEQ ID NO: 170000 - DNA, 261 bp, Zea mays
  unsure (1)..(261): unsure at all n locations
  Clone ID: MRT4577_86623C.1
acttttatgaatctcatcatcttcctgtgcctgtgcccctcggttgaaaaacaaatgtactttaaggttcaaatatcagcaaaatatgttgatgcatatggttgcgaaatcatcgatctgtgcataatattatttcataactttagtaactgcatgcatgtagaccttatgcaatcggcaacccttatatttgcatacaaattgcttattgcttatgaccattccctttttcaacagaaacttgtatntgtganttgagat

SEQ ID NO: 170001 - DNA, 287 bp, Zea mays
  Clone ID: MRT4577_86624C.1
gtgttagaatccattaaaattttcttacaagctacacccacaaatgcaggacaccaagggaaaaaagactgaaaaccatgtcccaaaagaaacgtggcgaagctccataacaagagcttaagacaaaaaacacccaaagaccatgcaacacgaggtgcggggggaggacaaaaaaccccccgaaaaaatataccctctccccggggcgacaggagggaaaaaaaaatgctcaacaaaccgggcaaccaaataaagacgcatgcccctcgcaaaacgggcgaggggga

SEQ ID NO: 170002 - DNA, 271 bp, Zea mays
  Clone ID: MRT4577_86625C.1
cagacgcgtgggtccccaagaaccctcgctcgtacgtgtccgtccccccctctgccctctccttcgtacacaccttcctcccgcgttgccatttcagagcaaggtggcgcgcgccgcctcctcatcacacggtctcctcgcccgccacggcgtcacatcacatggatgcctcggcacggccgactccttcaactccgcgtccgtcgtcttgttccatctcgcatgattgattgaatctccacgccccccttgtccaactacccctcccact

SEQ ID NO: 170003 - DNA, 685 bp, Zea mays
  unsure (1)..(685): unsure at all n locations
  Clone ID: MRT4577_86626C.1
accaaaacataacaaacgtacagacgccgagaatgcagtaccacccagagaatgacaggaacaaaaaccgcctaccacggaggatgccgcgcctgaacgtgtcgaccaacaccaacctggagggcgcggacacctccgccatcctcgcccaaatctccgagaacgtcgtcaacattgtcgtgaagcccgaggacaagctgatgctcgatctctacgagtccatgccgatggcatttggaggcacccacgaggccatagattagggtgagctggtttccatcggaggcctgaaccctgatgtgtacaacatccttaatgctggcatcgctgctatcctggactactagctgactgatcccaagtaacgcttctacctcgagatctatgacttcgtaatagctcgtactatcggatgcataccgtctccactcgtatctacacttgtggcatgcagatgaaataaaagaaattcgtggaatcatgcaacctaatgaccatggactattgcctattatggacgatgccataagatgtgtcttaatgcggtgctgaactgataaacagtaactgttgccgtggaactggtaagtcggngtgctaganctgtcagattgcttgcttcctagctaacatagcatggctgagctatcatagctattgtgattggcttgatatcagtctatat

SEQ ID NO: 170004 - DNA, 215 bp, Zea mays
  unsure (1)..(215): unsure at all n locations
  Clone ID: MRT4577_86627C.1
gcgcagtatccaccgtcaccgccggaaacgtataccatcctggccactgtnacgatggacgtgccctagggggtcacggtcacggtcgcctccaatctgcttactgcggatgggccgcgcggtaagctaaccgccaacttttagcccctaaactttatttcaaccttcaggacggtggttcaagctaaaggtgattgcttgttttgttacccgcc

SEQ ID NO: 170005 - DNA, 874 bp, Zea mays
  unsure (1)..(874): unsure at all n locations
  Clone ID: MRT4577_86628C.1
agtcccgccccacttcttctggcacgtccgctccgcgcacgcgtcttcacggcccgccggaaaagcgcaacgcgcagatcccctacgcgataccccaatcgaagaagagaggaaaaagagaaagctctgcggcggagccatgtccggcgcgggggagtaccaggagatggccgcgtcggtgccgccggcgctcaaggccatcacgctcacccacgtccgctaccaccggggcgacagggtcggcctcttcctcgcgtgggtctccctaatccccgtcttcatcagcctcggcggcttcatctcccacttcatgttccgccgcgagctgcagggcatctgcttcgccttggggctcctcgtctcgcaggtcctcaacgagctcatcaagcactccgtcgcgcagtcccgcccggcctcgtgcgagctgctcgagacctgcgactcccacggctggccgtccagccacgcgcagtacaccttcttcttcgccacctacctctcgctcttcgtgctccggcggtcgccggcgagccgcgtcatggcctccttctcatggcctctcgcgttcctcaccatgctctccagggtgtatctcggctaccacaccgtcccgcaggttttcgcgggagcagtagtcggccttgtatttggtgctatctggtactggttcgccaacaccattcttgctcaatacttcccaatgattgaggagagcgcatttggggaggtggttttatatcaaggatacttcacatattcaagatgtgctcaagtttgagtatgataatgcaagggcagccagggaagaaagtgctactggatganggatgtagccacagcatatcttaactttttgatcatctgggacatcttg

SEQ ID NO: 170006 - DNA, 2575 bp, Zea mays
  Clone ID: MRT4577_86629C.1
tccacgcgtccgcccttgcccatgccattgctaatgagactggcgtgccgttctataagatctccgcaccggaagtcgtatctggggtgtctggagcatctgaggaaaacatcaggggcttgtttcagaaggcctatcggactgccccctcgattgtatttattgatgagatagatgcgattgcatccaagagggagaatctacaacgagagatggaacggcggatagttactcaattaatgacatgcatggatcaattccaccagaatattggatcgggaagtagcaatttggaagctgaatcatctgaaaagaaacctggttatgttattgtcattggagccacaaataggcctgatgctgtggaccaagctctgcgaaggccaggcaggtttgaccgagagatatcacttggtgttccagatgagaatgcacggaaacaaatactgaagatgcttactcagcatctccgacttgaaggcgaatttgacttgttcaagatagctagggcaacaccagggtttgttggtgctgacttgaaagcattagtggataaagcaggaaatctagcaatgaagagaataattgatgaaagaagggctcggtgttgcattgagcaggacggtagtagcaagcatgactggtggagacaaccttgggatgaaagtgaggtggacgaactacatattaccatgaatgactttgaggaagcagcaaaaatggttcagccatctttgagaagagaagggttttcttctgtccctggtgtcacatgggatgatgttggaggtcttgattcattaagaaaagagttcgaccgctgcattatccgttgtatcaagcaccccgaagactatgaggtatttggagtgaatatgcaagctggcttcctgctgtttggacctcctggttgcgggaaaacactaatagcaaaagcagtggcacatgaggcaggggctaactttattcacatcaaggggcctgagctattgaacaagtatgttggggagagtgaatcggaagttaggaaaatattcactcgtgcgcggactaactccccatgcatcctgttttttgatgaggttgatgctttgacaacaaaaagagggaaagagggaggatgggttgttgaacgtctcttaaatcagttacttatagaacttgatggtgctgatcaaagacaaggtgtctatgtgataggagctacaaacaggattgatgtgatagatgatgctgttttacgtcccggtagatttggaaagaaacattatgtacctttacctggtgcagacgagagagtttcaatattaaaggcacatgctcgtagcaagcccatctcgactgatgttgatttggatgcacttggtcgtcgtgctgagtgcaacaatctcactggtgccgacctagcatcactggtcaatgaagcagccatggcagcactggaagagagactggaattccgtgacaaggggacatcctcactgagttcgtctagcttgattgagatgccgcacttcgaacgtgctctatcgaagatcaagccatcagtatctgaacagcaaatcaagaattatgaggcgttgtcaatgagatactcgtcaaactgatccatcaccagttgtccacatgttagtgtgtatacgagggcaaccttgtgaaaaaaatgtggtgttctgtaccgtgtttgcaaggagtgtgcaccgtcaccagcttttacccatttctgaagcacattataaatctcatgtgagagcctgtggtagagtagtttagatacaaatagaaatctgcatgttatcgcgatcagttttgtttccattttcatttgtctgtaacagactggcctaccggcaattttgtatgcatctcatcaagatacacgaatgagttgttattggacatcatacatacacgaatgagttgttattgaatcaaaaaaagcaagaaattgtttttggctactagcacttgtgttcctcagctacagttgtgtgagttttccattggtctcagcagcagcagcttgaggcctggtggtgttcagtttgtccaaagccgcccatagcttggggtcttcgtagtccctgatgacgagcgttgcgccgacggcgagaagcttgtcctccctgctttcctcggcgatggcaaccaccggcatccctgccgcaatgccggcctgcacgccagtggtggagtcctcgaacacgagcgcgtggtccggcgaaacgccgagcaggtcgagcgccctgaggtacgggtccgggaacggcttggatcggccgcactcctcggcggtgacgacgaggtcaaagaactccgagaggccgaggatggagatcatgagctcggcgttggccctgggtgcgttggtgacggcggcgcgcctgagcccgcggccggcggcccagtggcagagcggcgtgaggccggcgatctcccggagcccctcggcggcgtacctggcgaagagcgcctccttctcggcgaagaaggcgtcgaggcggcgctggtcccaggccgggaacaggaagcggccgatctgctcgttgctccggccggcctcgagggtcccaat

SEQ ID NO: 170007 - DNA, 218 bp, Zea mays
  Clone ID: MRT4577_8662C.1
aatacaaaaaagacagtctattttttatgcaagttttacccaacatttggtgatttctagctttaaaccgtgttacacatggaataaagacccaaaaatgaatgacagaaatacaacatttgcattttacacttgacctttcatgaacacatgagcctcgatgactcacttttgctattaccaacatttgaaaactattgtagtattatgcaaccact

SEQ ID NO: 170008 - DNA, 439 bp, Zea mays
  Clone ID: MRT4577_86630C.1
attcgcggccgcgtcgacatgagatcagcatagcatctctatgtgggtaatctttaagatgaaggtcctcctgagagaatgttatggggatgtgagatcattttgttttgatataggggccttgaacacccacatgttgtacccttctttgggcttatttcctctgttttttgttgcttggttcgaagctcttcgagtttgatgacgaagcttgaggacttgccatgttcttcctcatggtggtgacttcaccggaggtgggcgccaatgttggtcactccttttcggttcctaatggggatccaaaaacaaggcaacacaagttgttaggtagtatctcttcaattaacccttcttcaaaggttaatccaagagaaatgatgagaaatgtaagataacatgcaacttctgggggggaagatggattactcatctgaat

SEQ ID NO: 170009 - DNA, 237 bp, Zea mays
  Clone ID: MRT4577_86631C.1
tccgtccggattcccggttggttgtttttttttttttttttttaccaagccacgatcggctcactgtttacaaaattctattcaacaacggaaccgtccgtcttagtgatatcaacctgagaatacacctatagtaatacacattaaactacacgctacatattttggttgaaggcacacacgaaagggagggggccggaacaggaacaaacaaccctccggtgactccaattcatt

SEQ ID NO: 170010 - DNA, 463 bp, Zea mays
  Clone ID: MRT4577_86632C.1
cggaccggccgaattccctggtcacccaccgacgtacagcgcacgaccccctcagcgggggggataaagagcacagcgcgagaggcccccgagcgagcgagaagaaggcaacggcggcggaagcacctgaaaccacggagccgagaacgaggggcacccatacaagctggcgaccagggccgacgcggagctggaccctgcctggcgcaggaccccgacagaaggtggcctgcgagacctgcaccaagacaacaaggcgacggcgacggcgagaccaccaccaggcgagcgcggacaacgagaagatcgccgcgacaccagccgcgagatcgggcccacctacgacgaccaggggctcgacgcccaccgctgcaaggggcaggtgaacatcgagcagcagccccccaacaacgcgcagggcgcgcacgggcactacacgaagccggccgaggagatcggcacc

SEQ ID NO: 170011 - DNA, 1817 bp, Zea mays
  Clone ID: MRT4577_86633C.1
cgcctccatgctctctctcccctccctcccctcagctccaccgcttcatccccttcttctccacctcctacgaggcggccgccgaagcctgcgcggccgcgaccgcagggcctcagctctagcagcgttcaatactgtaggctagcggagaggtgggggatggcgaagccgacgccggtggcctcggcagaggaggcggcggcgatgcggcgccggctgaggcgcctggtggccgcggtggcggccgggagcgccgacgccgaggccttcgacgaggctgcagaggcgctcgccaagctcagggacgccgagcttggcccccgcaaggacaggaccagcgacggccgggagaacaagcgcagcacggaggccgccgtgccggagcacttcctttgccccatctcctcagagatcatgagggatcccgtcgtcctcgcctccggccagacgtatgatcgtcgtttcattcaagaatggttaagcgctggaaaccggacatgcccacagactcaacaagtcctttcgaacacaattatcaccccgaaccaccttgtgagaagcatgatctcacagtggtgcacagacaacgggatcactctgccaccggttgagaaccaagatgaagatctggttacaaacaatgagcgggagacatttcgtaaactgtttgagaggatcgtatcgtcgtcgtcagacctgtctgagcagagggaagccattaaagagctcaggctgcggactaagtgcaacagttcactaagagcagcgataggagagagaccggattcaatctcgcagatgatttccgtagcgtccagcccagagctagaaaacagtgcagaagttgtggaggatacggtgacagctatccttaatctctctatccacgagagcaacaagaagatcattggagacgacccactggcagtcccgttcctgatcaaggccttacagtcaggaaccatggaggcccggagcaacgccgccgccgccatcttcagcctatccgcgctggacggcaacaaggcgaggatcggcgagctcggcgcgatgaggccgctggtggagctcctcgagcacggcagcacggcagcgaggaaagacgcggcctcggccatcttcaacctgtgcacgctgcacgagaacaagtcgcgggccacccaagagcggggccgtcgacgtgacgctgagggccgtcgcctgcgccggggacggctctggctccggctcgctggtggacgagtctctggccgtcctcgcgctgctgtcgggcgaccacgaggcggtggaggaggtcggcgagacgggcggcgtggcctccatgctccacgtcgtgaaggacgacccgtgcaagcgcaacaaggagaacgcggcggccgtgctcttcgcggtctgcgtgtacgaccgcaccaggctgcgggaggtcgccgagcacgagaagctgaacgggtccctgggctggctcgcgcggaacggcacgtcgagggcgcggcgcaaggccgccgggatcctcgacaagatgaagaggtccatgcaccacccgcactactcctgctagtgctgccgccgtggctgtgtgtgatcagggggggaataagggtggtgtgtgttgtgttggactgctcgttgctttcgcgctgtatatatatatatatatatatatttcagcctgcgtatatagctctatactcttggtctctgtggtttggtacatatatgagggtacattttttttccgtctcgcggagtaagtggtggtggtttccccctcaaaaaaaaaaaaaaaaaaaaaaaaaaaaaaaaaaacggacgcgtgg

SEQ ID NO: 170012 - DNA, 394 bp, Zea mays
  unsure (1)..(394): unsure at all n locations
  Clone ID: MRT4577_86634C.1
ctctacgaccgtccttgaacaccgtgggggtatgatgctgcaccgtcgtgataacgataggttctggtgttatcgcgtctagcaccgccgccgccgctgtttacccaggcgcggcgctgaagaacgncgggccccattggttctactgaagaataaaacttgtagggctaacggggggggggcgggggggggccccatggttctcccccggtgttgcgtcttcttggtctttgttttgtgggccctgctgtcgctgcctggccggtggttcctgcaactggtgtctgggtaaaccctggggctcccctttttctttgttttgtgggcactccccgtttttcccagcggggtgttggtggggtgggcctgctgggcctgcctttccgtgggtttg

SEQ ID NO: 170013 - DNA, 355 bp, Zea mays
  Clone ID: MRT4577_86635C.1
cccacgcgtccgcccactcgttttatcttttccaacctcggcaagctatactgcttattgatccgttttagcattaccaaaacacttgataggtatgaaaaaaacagatattgacgaccacatactactgcacagatcaaggagaactagttaatccacaccagtcttaatgaatactttaagctgaaatcaaagcttacaaaattacatacgactcatatgaatatgcttgatgaaaatctatattcactttctgtaaaataacttaagcaccttgagaagcagcataattcatccttaatgcacataatatccacatagtcacaacatatccttgatcagctaactgatcttc

SEQ ID NO: 170014 - DNA, 168 bp, Zea mays
  Clone ID: MRT4577_86636C.1
ggattcccgggtcgactcacgcgtccggcatacagttatctgctatactccattgcataaggtcccgttggatcaattagctaggaataatagttagctagctaagggcatgcacagtaagggagtgtttggtacgatgaatcactctatctatgcacagataaagaa

SEQ ID NO: 170015 - DNA, 374 bp, Zea mays
  Clone ID: MRT4577_86637C.1
aaagtgacgtacctactagcacgtgtggtaatgcgttgatacagcatgctaataaccctgagtgcacgtcgtgctcgtctcgatggcgacgacgctcctctcggttccggaataccatatcaggtcgcaatgggcatgtgcacagtcgcctgcacggtcatcacagcagccgccacggccacagtggtcctcgttcgcgaaggcacgtgcgcatagggtgacgagctcctcctcgggtacgtcaacgggcgtcggcacattactgggtacctccgtgctcaccttcttcgcctactacctgcagtaaaattaaaggagggtcagatggagatgctgctggctgccagtgcctgtattcggttggattccgttta

SEQ ID NO: 170016 - DNA, 480 bp, Zea mays
  Clone ID: MRT4577_86638C.1
aaagggaaagagcaagaagttcattgctcaactgaactgaggggagggagcaaaaatatggtacagaggaggaggatggacggacaagtgaggtggaattggattggataatcccaccccggcccctacccttcgatcctcgcacgctcatcatcagactgcaagaagagaggaaaacggctgctactgctaccgacattgacgagaccttcgcctccttgttggctggctgtctctccaccttccttccttccttccttcggtccctccctcctctaacctacaaggaccggcgagctaggaggtgacagcccgatcagttccacgcgccccacaccttctccccgatgaagcgcaccagcctccccaccgtgctcttctcggggccggaaccgagaccggcgccgaagctgcagtcaccctcgctggccaccgacgcgtcgtccccgtcccgacgctgtccatggtggtgcccccaac

SEQ ID NO: 170017 - DNA, 465 bp, Zea mays
  Clone ID: MRT4577_86639C.1
tttttttttttttttttttttttttttttttattttttttttttatattattatttttttttatttttattaattttaatttttttatttttttatttttttttttttttaaaaaaaaaataaaccccaaaatgcactttttgaaagcaaaaaaaaactaaacggggggggttttaaagaaaaaaatggcccattcacgtatttacaacgtttaatcaataattaaaacccctattaaagttttgctggggttaaaaaaaaaaacaactaccccctggaggttatggaaaccgaaacccccttaataaaccttctttctaaaaattgggggaattaaccacgggaaaaccacccccctaaaaggaaggtaaatttcccccggggggacacggaacacactttttgggggtggaaaaaaaaaacggggggatttttttcaaaaaaaggtgttttttttgggggggt

SEQ ID NO: 170018 - DNA, 2170 bp, Zea mays
  Clone ID: MRT4577_8663C.1
gccatggttagcataaatcatgtggacgccatggttagcataaatcatgtggaccaggtacagactatagaagagagcgccattgatcaggcacacaaaaccaaatcgggcgctgttgatgagatacatggtaatctggaaagcactttcagtcagttacagttgagccaagcagacactgctaatggaatgcaggctatgcaggaaaacactaccattcattcacaaccaagccaattggatactctgaatcctacacacagaagccaggagaatagtggcaatcagttacaatcggtgctcacagattcttcgattccaaaacgaaccacacagaaatgcactatagacgagccaagccagccaggcataaatcatatacgcacagatcaggaattcactgggaatcagttcccctcgagcctaccagttgacactgttatttcattaggggatactgaagaatgcacagcgggtcactcacagccaagcaataccgacagtactggacaaattcaggccaatgaggaaaacactgccaatcaagtacagtcgagcctaacagacacagttattccagtaccggctattcaagaatatgctactggttattcacagctgagcaaagctaacacctcagataaaaaacaggccaatcaggaatacattgctgatcaagtacaatcgagcctaacagacactctcattccagtacaagctattaaggaatacacaactggttatccacatattaataaagctgacatttcaaatcaaatgcaggtcaatcaagaaaacactgatgatcacttatatttacgtcaagtaggctgtctcgctcaaatgcagataattgagcaaaatttgcccaagcaacctcagctgagccaaccagacactggggatcaaatacgaattgatctggaaagcactaccaatcacttgcaaccaaactacgatgaaaattctatgctgcaatctggtttctcttgggctcctgaacagaacagaggagcccctactacagatttctggaaaaatgttgaaagtcaggcgtcatcggtttccatgccaataaatggagcgcctctttcaagctttccagcaaatgtcagattccaaaatgcagcagcagcagcagcagcagcagaacctgctttgccaccacaggttgctccaaccgaaacaggttctgatcagtcggggttggcctttcaatctgttttcggaaacatctggtcggatccttgcatcgagtttgcttttaagacccttacaggtgacattcctgttctggacgacacaacggctgtcacagactactttccggagcaacaagacttgaataaaggcccagcaccaaaccgtgcaggttctgttgataattccagaaaccacacacaagtcgatgtcaaccttccaccacctgctctggatgatttctacaatggcaattggttccctccccaatgaattcagtatgggaggaaacaaatgcaataacattttgtacctgtgaaaaacaaatcagagaaggctaatggccagattacaaagcaatggtcgtgcgctaatgatttctacaatgacagttggttccctcccccaatgaattccgtgtagggaggggaaaaatgcaatgacattttttagctgcggaaaggcaaatcagagaaggctagcggccaaatcccaaagcatcaatcgtgcactctgttagcactctgaactgaatgtgtcatcccggaggacacattttgtaaaaaaaacagtagctttatagccttattagactgttaaaacacactcgactgaatgatgtccggttccatcaacaaggcttcacggagactgtcgagtacctgatctgggtcatgttttccatagtttgcttctgtgcagttgcctaataagcccattcgttgtaaactagctagttctaacttaagaaagctccctcagggcctatgcatgggtctctgattattgtgcagatgaactgttctggacattttgaacatgcaaatgtggaagcgtcactgtcagttgaattatgtttcagcggaattgcgaagaggtaaaaaaaaatccgctgtttgtgtagtgtttgctgaatcttgattttgtagttggctacttgaatctgtgtatgttttggctcgcttgtagt

SEQ ID NO: 170019 - DNA, 217 bp, Zea mays
  unsure (1)..(217): unsure at all n locations
  Clone ID: MRT4577_86640C.1
gccacagaggggggagaggaggctagaagttatagcgcatcgacatagcacctccacgagacggagagncaaaccaccagagggagagatggngntgangaagatgtgggagagagtgaagcagtcgatcgttgtatacacggggntgtcgccgggggactttttcacggtcgtggagatggaggaagttctgtaccatgtcgtgacgggggtcttc

SEQ ID NO: 170020 - DNA, 634 bp, Zea mays
  Clone ID: MRT4577_86641C.1
ctagaaagatcgaatcgacccatgtacataataatctcatgcggtcatgccatgttctttctgccactccagggaaatctccatctcggtcgctgctgctgctgaggtcggcggtgcagatcatcgcagtatgagcatggaggggctcatcccgttcgtttgcggcgcgatcagcaagcggagggcggcgaaaagggctgtggactacgagcgcctctcctccgccggcgctccgccaacgcggggatggggacacgagcgcctccccggcggcgcctacgaccatcctcggagccagagctgccggttcgccgcgcgctcgtcgcccgacgagcgcggtttctcccgtgacgagggtgtccaggacgagccgtctccgccgggcggcgacgggtggcgtggtctgtccaagtcccggaggttcagtagcatgcgcttgtttggatgcgtcagtggcgcgtaggaagagaagaatctgtttggatgtctggtatcgtgtgccgcgagcacagctctgtacagaagcaacgatttgacgagtaaatcgagtgaaatgtagcgcttgctgcgagctgcgactgcgaagcacaatcttgctgatggcaaatgaaatacacaacggacgcattttgtt

SEQ ID NO: 170021 - DNA, 310 bp, Zea mays
  Clone ID: MRT4577_86642C.1
gtcgctggtgctcacgtacgccggccagacggcctacctgatcaaccacgtgggcgacttcggcgacgggttctacaagttcgtgccgcgccccgtgtactggccaatgttcgtcatcgcgacgctggcggcgatcgtggcgagccagtcgctcatctccgccaccttctccgtggtcaagcagtcggtggcgctggactacttcccgcgcgtccgggtggtgcacacctccaaggacaaggagggggaggtgtactccccggagaccaactacctgctgatgctgctgtgcgtgggcgccattatcggc

SEQ ID NO: 170022 - DNA, 430 bp, Zea mays
  Clone ID: MRT4577_86643C.1
gccgtacaaggccccggttcccctaaaagcgggaaattccacaagggccattgccgggggaaaggccttttctctagggagcagcatttgagtttggtttccacgcggtgctaggcgttaaccgcaatgacaaatgcgtcccgcaacactggtccccaaaaaataaacccaagctaaattattcactgtatgcagtacggccagatcatggccgagcttcagggtttcagaacccaattgggggccaactttggtgcccagaagaccgaaacggcacctggcgaaatttttaaagccctgctcggtcagggaatagccgggccttttcacccccatggtggattgcccttgaaaaattggcttggcatagaccccaattattaaaggcctgcccgtttttttgatagaaaaagccccacaggcctttttt

SEQ ID NO: 170023 - DNA, 385 bp, Zea mays
  Clone ID: MRT4577_86644C.1
caaaaaaaaacaaaaaaacataagtgttcacaaaaggataaaaagggggaaaaaactgggaaccaggtacaaaaaaagggacaggggtcaaaaaaccccaaggggacgaaagagaaacttttaaagaggaaagggggcaaagtttatttgaaaaaaaaggggtgggaaaaacttttaaaaaacttttaaaaggggggagcctcctcctggagggggtttaccttggggaggaggaaaattatcggccaaaaccttgaattggcttaaaaaagctttcaaggataccaattgggccttttcttttgggaaaataaaccccgacgaacggggtttaaaatttcaaaccggggttgttttgaaaacccccaaaagaaaaaattttttt

SEQ ID NO: 170024 - DNA, 569 bp, Zea mays
  Clone ID: MRT4577_86645C.1
atcgaaagatgaagatcattccggtggcttgcttggaggaaactatgcctacctgatcgttgacgagagcaccaaggcggcggcggccgtcgacccggtggagccggagaaggtgctggcggcggccagcgaggtcggcgcctacatcgactgcgtcctcaccacccaccaccactgggatcatgctggtggcaatgagaagatgaggctgctggtgccagggattaaggtctatgggggatccatggacaatgttaaaggctgcactgatcaggtggaaaacggaactaagttatccattgggaaggaaattgagatactgtgcctacatacgccatgtcatacaaaaggtcatattagctactacgttactagcaaagaggaggaagacccagcagtatttactggagacaccttgttcattgctggttgtgggaggtttttcgagggtacggcagagcaaatgtaccagtccctttgtgttacactgggctcgctgcctaagtcaactcgtgtttactgtggccatgaggcaagtttcttagctctttctggaccttcatttttga

SEQ ID NO: 170025 - DNA, 397 bp, Zea mays
  Clone ID: MRT4577_86646C.1
tctttttcgttcatcacctcctttatctcggggggctttttatataccgggcagggcaaccaatcctcaaattcaaagacctcaatgagattctcaacatggcaaacaccacccagtatagattgaccaccctcgtattcaccaacagcctcaacactgacaacaccctgactctctcgctcaactcctataccatttgtctaaactacttccacctcttctatgcttccattcaccttggtgatgtacaacactcatcctatctactagagagaaggactttgacatcctgaataactacctacacgtaaaggctgtcccaaccccaatcaataacccctcattgttgtaaacacttcaattgttgtcttatgcactataaccacatattattatt

SEQ ID NO: 170026 - DNA, 379 bp, Zea mays
  Clone ID: MRT4577_86647C.1
gaagcagcagaagaaactgggcatgaagcccatcgaacaggggagctggacacaaggggcgccggctgatggtacgtacattgggtaaccaccaccaagcacacatctgaggagaaaatccaggagtgaggaaatcgaagctggatgtaacaatagattttactgtttgcaaatgcaacctttgtttttttttcctgggtgttcttcgtgttggaggttttttagctctgccctagttgtgagttgtgccatctttagttttaggctgaagtctgaacgatatggggtgagagatcatgcgtgcccatggttgtcttgggattggacatgcataagttgagatgttctccttttctgtaggagttttcttttcgatgtg

SEQ ID NO: 170027 - DNA, 546 bp, Zea mays
  Clone ID: MRT4577_86648C.1
gtgcgccgctcgaggcggcgggttcagacttactatcaatagctgcctttctcttgcacctgaatgatgatgcgaaaaaatcaaaggaggctggtgtaactcttgattaccttcgacgatcgcgtgagaaaatgagagctggttacttccatccaagggaggatgtgcttgctcgtcgctgtacatcactgcaacttccacaacatatgatagggctccctgcatgcggatcttcgagataaggtattctacttggaaggacatctaatgccttcaactatccagaacgatcctgctcttatcctggactgcaaacatgacattgattataacaaccacatccaacccaaacgacaatatgctccgcaagttcctaaattctttgactttgcgaacaaaaacaaggacatctcttacaccacgaccagagacggatgatcgctgataataccataaacaaacagattgtgctgcctcacccattgcgcattgtgggtgaccaggaaacagcccgttaccagaatcaccttctaaatcgtttgattt

SEQ ID NO: 170028 - DNA, 383 bp, Zea mays
  unsure (1)..(383): unsure at all n locations
  Clone ID: MRT4577_86649C.1
agagcggccggcacgcacacagaaccagaggaaagagagcaccccaagccgaggaagcaggcggacaagagaaccggccccgggggcgagcgcccccaacacgcagaacgcaagacacacgccaaagcanccgacaacaaaaaacggggggggggggggggaacccaaccaccncaaggggaaacggagagaaccagcagaggaagaagggcccggagaacaagagagagcaacagcaaaaggagacccgggcaaagacaacgagccaacgggaggaggaggcggccaacccaacgggggagccaaccccagcaccgacacaagcgcacggcaccccaggagagcaaagacagagagaacggcacgaggcagcaagacaacag

SEQ ID NO: 170029 - DNA, 218 bp, Zea mays
  unsure (1)..(218): unsure at all n locations
  Clone ID: MRT4577_8664C.1
gccggccggtccggggagctgcttgcttgaattcccggggttatcaaaaggggggcttgcttgaatttaaagccctgccatctgccccggagcgccgccgcgcgagatgccccccaccgccaccgaagccacctcgtcgntcggcgaccaagtgcccaaccctccgtttcccaaacgggggaaattggggccccccgcgggaaaaaacggggcccccc

SEQ ID NO: 170030 - DNA, 413 bp, Zea mays
  Clone ID: MRT4577_86651C.1
ccacccgatacgacaataaatctatggggcatcgcccacccactgcttgtggctactttcttcttttgggctgtaggatgccggcctctgggggcatgcgttttggaacggtaagggccaggtgcatggcggacgtgccgtaaacccactggctgacgagatttgttttctccacccattgcaagaggtttgcactgccactgccgggcgccttgcattcaattaccctgttcatagacaatttggccttgctgaacatgcaagtggtcgctttcgccaagctcacagcgcaggcgctgaagcacgtttcggtgacggcccggactatttcaccgacgcaagctcaggccctcttgagctgcgacacgatgttcttgaacacgcaggtcgccatttatgcggaacatctagcc

SEQ ID NO: 170031 - DNA, 327 bp, Zea mays
  Clone ID: MRT4577_86652C.1
tcacactctttcacacagtagaggagacgacgagcgcactcgccgacggctgaggacctcgcacgagagccttccatgagagaagctcgcaccgtctcgaacgaagagactcccccacccccggaacctcgcctctcacttctcgccgccgccggagagaagacttgtcctgaacgaaaaggctgcaccaggagacggaacttccaacggccgaatgtcctcgaatgcaggatcacaacaaggccacactccgaaaagactcggccgacgtccccttacgcctcggagatgacagaaaacaagaacaccgagggaggatattttttt

SEQ ID NO: 170032 - DNA, 1354 bp, Zea mays
  Clone ID: MRT4577_86653C.1
gcagccggggcatcagagcacaaaaaaaaaaaaaaaaaaaaaaaaaaaaaaaaaaaaaaaaaaaaagacatctttttccacgtcagcgcgagctagctaactcctaagtatccccctgccagctccgcggccgccggaacaacagaaaacctcgcagctagcagcaagatcttagcacaaacaccacagcccacaggctgattaatcactccaagactaatcaaacgaacgcttagctaatagcgcgcgatcttttttccccctccccctcttgagtcttgagcgtgcgagaagagatggcgctgaacggcggcaagacgacgttggtgcaggacgaggagaagcagcagcttctgctggagaagcacaccgagaagcacttcacagcgggcgaggtggtccgggacatcatcatcggcgtctccgacggcctcaccgtgcccttcgcgctcgccgcggggctgtccggcgccaacgcctcctccgcgctcgtgctcaccgcggggctcgccgaggtcgccgccggcgccatctccatggggctcggagggtacctggcggcgaagagcgaggctgaccactacaaccgggagctgcagcgcgagcaggacgagatcgacaccgtccccgacgtcgaggccgccgagatcgccgacatcctgtcgcagtacgggctgggcccggaggagtacggccccgtggtgacctccctccgcaacaaccccaaggcgtggctggagttcatgatgaagttcgagctcgggctggagaggcccgagccccggcgcgcgctggtgagcgccgccaccatcgcgctgtcctacgtcgcgggcgggctggtgccgctgctcccctacatgttcgtgccggaggccgcgcgcgccatggccgtgtccgtcgccgtgacgctcgcggcgctgctcttcttcggcttcgtcaagggccgcttcacgggcgaccgccccttcttcagcgccgtccagaccaccgtcgtcggcgcgctcgcctccgccgccgccttcgccatggccagggccgtgcagtccatatgaagactggtgtgatgcagcaaaaatagtgaagcaggccggtcgccgcatgccccatatcaatcatcaccggccggctaggttggcgagggaaaataagtgcagctctatatgcatacgtggctacggtcactgcttctttgtttgatggctgcgtggtgtactattgtcagatgtggattattatttaggtcaagtcgattccaaactgtgacccgctgggctttggatccatttgtttttatctatctactggtaaattaaatgactgatgttgggctgtgtagaaaaaaaacccccgggcg

SEQ ID NO: 170033 - DNA, 252 bp, Zea mays
  Clone ID: MRT4577_86654C.1
gtactatgatgaattttcaagtaagagccttgtctgcaaaacatgcttgttagttgttacatgtgcaatttctatggacctagcatatgggcatacacacaaacaggacgtggttcaattaaaataactttcctgcaatttttgatgtgttgtgtcctagtgctgtgcaatataaggcgttgcacttatacatgtgtttcaggaaatgctatgtttccactaacctgtcaaggtactagggaagcttcatgt

SEQ ID NO: 170034 - DNA, 506 bp, Zea mays
  Clone ID: MRT4577_86655C.1
ggccgtgtccgtcgccgtgacgctcgcggcgctgctcttcttcggattcgtcaagggccgcttcacgggcgaccgcccttcttcagcgccgtccagaccaccgtcgtcggcgctctcgcctccgccgccgccttcgcgatggccagggccgtgcagtccatatgaagactggtgatgcagctaaaatagtgaaggccggtcgccgcatgccccatatggccatatcaatcatcaccggccggctaggttggcgagggaaaataagtgcagctatatatgcatacgtggctacggtcactggtagctgtacacatggcgacgtgtgggtgtggtgtacttgtaccgcttcttcgtttgatggctgcgtggtgtagtattgccggctcagctgttgattatttaggtgaagtcgatgccaaactgtggcccgctgggctattggatacatttgtttttatctatctactggtaaattaaatggctgatgttgggctgtgcaatttggc

SEQ ID NO: 170035 - DNA, 1441 bp, Zea mays
  Clone ID: MRT4577_86656C.1
ccggccgggaccaacacagaaaacctcgcagcagcagcagcaggatcatagcacaaacacgaaggttaatcaagcgagcgcttagctaataagcgcgcggtcttctttttcctcgagagtgagagagagagagagagtattgaggcgcgagaagagatggctctgaacggcggcaagacgttcgtgcatgacgaggagaagcagcggctgctcctggaggagcacaccgagaagcacttcaccgcaggcgaggtggtccgtgacatcatcatcggcgtctccgacggcctcaccgtacccttcgcgctcgccgccggcctgtccggcgccaacgcctcctccgcgctcgtgctcaccgcggggctcgccgaggtcgccgccggcgccatctccatggggctcggagggtatctggcggcgaagagcgaggctgatcactacaacagggagctgcagcgcgagcaggacgagatcgacacggtccccgacgtcgaggccgccgagatcgccgacatcctgtcggagtacgggctggggccggaggagtacggccccgtggtgacctccctccgcaacaaccccaaggcgtggctggagttcatgatgaagttcgagctggggctggagaagcccgagccccggcgcgcgctggtgagcgccgccaccatcgcgctgtcctacgtcgcgggcgggctggtgccgctgctcccctacatgttcgtgccggaggccgggcgcgccatggccgtgtccgtcgccgtcacgctcgcggcgctgctcttcttcggcttcgtcaagggccgcttcacgggcgaccgccctttcttcagcgccgtccagaccaccgtcgtcggcgcgctcgcctccgccgccgcctacgccatggccagggccgtgcagtccatatgacgatgatgattaatgaggcagctcgtagtgaaaagtccgctcgccggccggtcgccgcaggtcgtatcattcttcaccggccggccggccggctaggatggcgaagaaaaataagggcagctactagcctactacgcatacgtggtagccaaactgtactgtacaacgtgtagtgtgcttgtactatcacagtactagtactagtgtgtgtactttgtttgatggctgcctgcgtgtcgcacatgtcgtgtttggatgatttaggtgaagccaaactgtggcccgctgggcttttcttgtgtaatttggcaagcggaggcccaaattgggtgccctttgggctctgtctctaaaaaaaaaaaaaaaaaaaaaaaaaaaaaaaaaaaaaaaaaaaaaaaaaaataaaaaaaataaaaaaaaaaaaaaaaataaaataaaaatgtagttgggattttcataattcaatattaattataaaaatttgggggggctcccttttaggggtctcttcaccccgtaattaaatttgggc

SEQ ID NO: 170036 - DNA, 247 bp, Zea mays
  Clone ID: MRT4577_86657C.1
actttggagaggtgtatacaattcagcagtactaatattatcacagttatttttcatgccttcaattttttcttgcaacattattttcaaactattaggggcagcttgatagatccacctggaaaaactcatactcaatgtcatgatatttgtctttgtattggttctttgtgaggggttatatataatttgagaaatttcaagatgtgatgattacccggagtcagcaaaaaaggtactgttttca

SEQ ID NO: 170037 - DNA, 3406 bp, Zea mays
  Clone ID: MRT4577_86658C.1
ggtggatcagccttatgtagaaggaaagtgcctaagttgtgcttgcccttctgtgcctagtactatatttcaagaagatccaattgaaccaaaaactggaataaaatttccaacatttctggaagacgactccagtccatctgcagcggtccttgttgggataggtttcaaaggcatgagagtgatgagggtcaaaaatctgaacctctacgcttttggtttatatatgcaaccgacttctatccgtgagaagttgggtcctaagtatgcttcatttccaactgacaagctgatggagaaccctgatttctatagtgatcttctcagagaaaaccttgatataagggtcaggttggtggttaactacaatggccttagcgttggtgcagtgcgagatgtgtttgagaagtcccttggcctgcggctgcagaagatgaatcctaacacagactttcactgcttgaagacctttggttctcacttcacagaagatatcgctataccttcgggtacgaagattgacttctgtcaaacatcagatgggaagcttataacagaaattgatgggaaacaaattggtgctgttcggagcaaagatctttgcaaggctttcttcgacatgtatattggtgattcaccggtttcactggaggccaaaaaagtcgttgcccagaacgtggctgggctcattggaagacgctgaggatagcgagaggatggttatttcattcttctgtacagttagagaggattcatatgagcgggaaaataggccaagtatgtagagtgatctgtcttgtatagaaagcaggcaaaaaggtccaatgtatatgtggaaggtagcatcttcagttgtgctaggcctccattcctctttttttttcttgtttggatgggccttttgcttcttcgtagctgctgtatcatgtatgctcccattgagccaggagttgtaaaatattaaattgaaggtgcttcttccttttttttttttttttcagcaatcagaatacagacgtaaattaacttagcaaaaagagcagatgcaaatgcaccttagcaattgaattcacatacctgcatttttttaacctaccgggtatgagaaaacagtgaattcatgactactgacaggtaacagctagttaacaaattctgagtataataaggttcaatggacttctcgcgacgtcgggggcggcgaaccgcccccgtcgccgcgatccgaacacttcacccgatcgacacacgcagccgcgacccatcgcgacctgacccgaccctcccgaggccgccagccttatcctctccgcctgcgactcccgccgtcccccgcgacccatcacaagcgcgagtagaagacatggcctcgacgttcggtgccacttctacagttggccttatggctgctccaacggggaagaatgtgcgccttcagaggagggctaacttcagagtaaaagcggctaaggagctgtacttcaacaaggatgggtcagctatcaagaagctccagactggagtcaataagcttgcagacctagttggagttacactcggaccaaagggaaggaatgtcgttttggagagcaagtacggctctcccaagattgttaacgatggcgttacagttgcaagagaggttgagctggaggaccctgtggaaaacattggagctaaattggtcaggcaagctgcagctaagaccaacgatcttgctggagatgggacaaccacctctgtggtccttgctcaggggctgattgctgagggtgttaaggttgtggcagctggtgctaatcctgttcagattactcgtggtatcgagaaaacagcgaaagcactagttgaagaactacggaagttgtctaaggaggttgaagatagtgagcttgcagatgttgctgctgttagtgctggcaacaactatgaaattggtaacatgatagcagaggccatgagcaaggtcggtcggaagggtgtggttaccctcgaagaggggaggagttctgagaactttctctatgttgtggagggaatgcaatttgaccgtggttacatctctccgtactttgtaacagacagtgagaaaatgtctgccgagtatgagaactgcaagctgcttttggttgacaaaaagatcaccaacgcaaggggatcttatcaacgttttggaagaagccatcagaggtgcatacccaatcctgataattgctgaggatattgagcaggaggctcttgctacccttgtcgtcaacaagctcagaggatcactgaagatcgctgccatcaaagcccctggttttggagagcgcaagactcagtacttggatgatattgccatccttactggagcaactgtaatcagagatgaagttgggctgtcacttgacaaggctgacaattcagttcttggaacagctgcaaaggttgtccttacgaaagagtcgacaacaattgttggtgatggcagcacccaggaagaagttactaagagggttgcacagattaaaaatctcattgaggcagcagaacaagaatatgaaaaggaaaagctcaatgagaggatagcaaagcttgctggtggtgttgctgtcattcaggtgggagcacaaacagaaactgaactaaaagagaagaagttaagagttgaggatgccctaaatgcaaccaaggctgctgttgaggaaggtattgttgttggtggaggatgcacccttttgcggcttgcagctaaagtcgatgccatcaaggatacactggagaacgatgagcagaaggttggagctgaaatagtaaggagggccctgagctacccacttaaattgattgctaaaaatgccggtgtcaatggcagcgtcgtcactgagaaggtcctttctaacgataacttcaagtatggttacaatgctgctactggacagtacgaggacttgatggctgctggtatcattgatcctactaaggtggtgagatgctgtttggagcatgccgcgtcggtggccaagaccttcctgacatctgatgttgtggtcgtcgatattaaggagccagagtctgcgccccttgctaacccgatggacaactctggctatggatactaatggagatgagatggccaagccgcatgggaagaagggtgatcaccattttttttttggtaggcgagaagagtcgggtcgaggtagtttttcatcatcagataaaaaaagcgagtttgttgtacgaccattaggcgaaaaataagtgggaggggctgtgtagcccaaatttgtgatgtaaactggagacagacagcagctaaaaacaagcagaaattgctgagtgattttgtaactgatttgcagctatgctgaatgcagtttgcacgcgactaaacaggaaaaaaaaaaaaaaaaaaaaaaaa

SEQ ID NO: 170038 - DNA, 605 bp, Zea mays
  Clone ID: MRT4577_86659C.1
gctgctactggacagtacgaggacctgatggctgctggtatcattgaccccaccaaggtggtgagatgctgcttggagcacgccgcgtcggtggccaagaccttcctgacatcagatgttgtggtcgtcgatatcaaggagccggaggctgcacctgtcgcaaacccgatggacaactctggctatggatactgatgagatgctatggccatgccccatgggacgaaggtgatcaccatattaattttttggtaggcgaggagtcgggtcgaggtagctttttagacgaccgaaaggcgaaaataactaatgttgaatgcagtttgcacacgaccgaacgcgaattcaaatggctccggcaacgtcagattgtgctgcgtcgaaaaactgatttgaaactgatacaccggagcggtgtcctctctgggagcgatccacatttttgtgtactttctgatttgatgaacaactttctagaagatgtattagtatttgagggcgtctgtttttaaaagaaaagtttgcatgagtacccagttgctacagttctcggggatgtgggcagaacacgtataattttgaaataattgctagttacccttctg

SEQ ID NO: 170039 - DNA, 1852 bp, Zea mays
  Clone ID: MRT4577_8665C.1
cggacgactgggatcgaacatgaagatgacatggttagcacaaatcatgtggactgggtacagactattgaagagagagccatcgatcaggcacagaaaagccaatcaggctcttttgatcagatacatggtaatctggaaagcactttcagtcagttacagttgagccaagcagaccctgctaatggaatgcaggttatacaggcaaacactaccattcattcacaaccaagccaattggatactctgagtcctacacagaaaaaacaggaaaacagttccaaacagttacaatctgtggtcacagattcttcgattccaaaacgaaccacacagaaatgcactatagatcagccaagccagccagacataaatcatatacgcacagatcaggaattcactgggaatcagttcccctcgagcctaccagttgacactgttatttcattaggggatactgaagaattcacagcgggtcactcacagccaagaaatagtgacactgcaggacaaattcaggccaatgaggaaaatactgccgatcaagtacagttgagcctggcagagacagtcattctggtaccggctattcaagaatatgctgctggttattcactgctgagcaaagctgacactactgatcaaacacaggccaatcaggaatacattgctgatcaagtacaatcgtgcctaacagacgcactcattccagtaaaagctattgaggaatacacaactgattattcacatattagtaaagctgacattacaaatcaaatacaggtcaatcaggaaagcactgatgatcacttatatttacgtcaagtagactgtctcgctgaaatgcagataattgagcaaaatttgtccaagcaacctcagctgagccaaccagacactggggatcaaatacgaattgatctggaaagcactaccaatcacttgcaaccaaactacgatgaaaattctatgctgcaatctggtttctcttgggctcctgaacagaacagaggagcccctacagatttctggaaaaatgttgaaagtcaggcgtcatcggtttccatgccaataaatggagcgcctctttcaagctttccagcaaatgtcagattccaaaatgcagcagcagcagcagcagcagcagaacctgctttgccaccacaggttgctccaaccgaaacaggttccgatcagtctgggttggccttccaatcccttttcggaaacatctggtcagatccttgcatcgagtttgctttcaagacccttacaggcgacattcctgttctcgacgacacaacggctgtcacagactacttcccagagcaacaagacttgaataaagacccagcgccaaactgtgcaggctctgtgtttgacagttcaagaaaccacacacaagtcgacgtcaaccttccaccgcctgctccggatggtttctacgatggcagctggttccctccccaatgaatttgagtgcagggaggggaaaaatgcaataacattttgtacctgtgaaaaggcaaatcagagaaggctagtggccgaaacataaaagcaatagtcgcactcttgttagggctctgatctgaatgtctaatcccacaggacacattttgtaaaaaggcggtagcttctttagccttattagactgttaatacactcaactgaatgatgtccagttccatcaacaaggcttcaccgagactgtcgagtgactgatcaggatcatgttttttttttcacgttttgcttctgtgcagttgcctaataaacccattcgttgtaaacaagccagttctaactttaaaaaaaagggcctgtgcatggcgctctaggttattgtgc

SEQ ID NO: 170040 - DNA, 1502 bp, Zea mays
  unsure (1)..(1502): unsure at all n locations
  Clone ID: MRT4577_86660C.1
ttccctgcctgcctcttcttctcctccgcctgttcttgccgcggtctccccctccggccgatctggactcgacagatcattaattttttgttggcatacattcccaaccttgatgtaaagacctccttcattcagaaccctgtgttttggaagggtatttcacaatgaagcccaatcagttgattacatcccatgttgatatacatagggtatacccatacgagttccaaccagagttttcaatgtctcatgatcttggattgaatttgttttcacaagccggtacagtgctgggtacttctttaagacatcataggaagatctgttcttctggaaatgcaatgatccatggagctttcaatcgcctcaacaagctttcccgagctctctatttctggctctctagaccatctgatcctaagattttgcgttggctggaatctgtagcagcgaccagttctagatcttgtcagttgcgtttcaaccaaatgggctctcacatgcaaaatctgactaaactgcagttcagctttccaatgagggaagagcaagcagtacaactaattttagcgaggcttgcaagtgcaacgattgggcgactgttaaatgagcagcaacgagcatgcaatcttcttactctagctggcgctgttgctattgtaccgccacttgaaaatatatcatcaatgatgcttgccgagtcaatcacatcacgaaatattgacagtgatatcagaagactggtggatcagccttatgtagaaggaaagtgcctaagttgtgcttgcccttctgtgcctagtactatatttcaagaagatccaattgaaccaaaaactggaataaaatttccaacatttctggaagacgactccagtccatctgcagcggtatttccgttttctttaaaaccataacttctcttaatctggaggaattgatttcattttttttttgtgtgtgtgtgttcatttgaaatcattttcaagctagtggtgtattacgatcaatacataaattgtaccagttgggtacatggtttgtggtttactttatggctattcaaacttgcttctttgacaattttgaactaaaagtctacataatcgtatatagtgtattctgatactgatttgttattatgcactccgtatctgcacaatgcatttttaatggttttgaaacattgaaattaaagcgtacaattttggtaatattactttccagattccgtatcattttgtataaattcttcgatttgatccctccatgtgacaatttccattgataattaaaccttcaggtccttgttgngataggtttcaaaggcatgagagtgatgagggtcaaaaatctgaacctctacgcttttggtttatatatgcaaccgacttctatccgtgagaagctgggtcctaagtatgcttcatttcaaactgacagctgatggagaacctgatttctatagtgatcttctcagggaaaacttgatataaggtcag

SEQ ID NO: 170041 - DNA, 2416 bp, Zea mays
  Clone ID: MRT4577_86661C.1
attgggaccctcgaggccggccggcgtccgcaaacccctctcgatcgacacacgcagccgcgacccatcgagacctgacccgatcctcccgaggccgccagccttatcctctccgcctcccgccgtcccccgcgacccatccgcaagcgcgagtagaagacatggcctcgacgttcggtgccacttctacagttggccttatggctgctccaacggggaagaatgtgcgccttcagaggagggctaacttcagagtaaaagcggctaaggagctgtacttcaacaaggatgggtcagctatcaagaagctccagactggagtcaataagcttgcagacctagttggagttacactcggaccgaagggaaggaatgtcgttttggagagcaagtacggctctcccaagattgttaacgatggcgttacagttgcaagagaggttgagctggaggaccctgtggaaaacattggagctaaattggtcaggcaagctgcagctaagaccaacgatcttgctggagatgggacaaccacctctgtggtccttgctcaggggctgattgctgagggtgttaaggtggtagcagctggtgctaatcctgttcagattactcgtggtattgagaaaacagctaaagcactagttgaagaactacggaagttgtctaaggaggttgaagatagtgagcttgcagatgttgctgcagttagtgctggcaacaactatgaaattggtaacatgatagcagaggccatgagcaaggtcggtcggaagggcgttgtcacccttgaagaggggaagagttctgagaactttctctatgttgtggagggaatgcaatttgaccgtggttacatctctccgtactttgtaacagacagtgagaaaatgactgcagagtacgagaactgcaagctgcttttggttgataagaaaatcaccaatgcaagggatcttatcaacgttttggaagaagccatcagaggtgcatacccaatcctgataattgcagaggatattgagcaggaggctcttgctacccttgtcgtcaacaagctcagaggatcactgaagatcgctgccatcaaagcccctggttttggagagcgcaagactcagtacttggatgatattgccatccttactggagcaactgtaatcagagatgaagttgggctatcacttgacaaggccgacaagtcagttcttggaacagccgcaaaggttgtccttacgaaagagtcgacaacaattgttggtgatggcagcacccaggaagaagttactaagagggttgcacagattaaaaatctcattgaggcagcagaacaagaatacgaaaaggaaaagctcaatgagaggatagcgaagcttgctggtggtgttgctgtcattcaggtgggagcacaaacagaaactgaactaaaagagaagaagttgagagttgaggatgccctaaatgcaactaaggctgccgttgaggaaggtattgttgttgggggagggtgcactcttttgcggcttgcagctaaagtcgacgccatcaaggatacactggagaacgacgagcagaaggttggagctgaaatagtgaggagggccctgagctacccacttaatttgattgctaaaaacgccggtgtcaatggcagtgttgtcactgagaaggtcctttctaatgataacttcaagtatggttacaatgctgctactggacagtacgaggacctgatggctgctggtatcattgaccccaccaaggtggtgagatgctgcttggagcacgccgcgtcggtggccaagaccttcctgacatcagatgttgtggtcgtcgatatcaaggagccggaggctacacctgtcgcaaacccgatggacaactctggctatggatactgatgagatgctatggccatgccccatgggacgaaggtgatcaccatattaattttttggtaggcgaggagtcgggtcgaggtagctttttagacgaccgaaaggcgaaaataagttgaggatctgcatcccaaatttgtgatgtaaactgaggcagaacagcagccaaatgaagcagagatttgatgaaagattctgtaactggttgcagctaattttgaatgcagtttgcacacgaccaattcaaatggctccggcaacgtcagattatgctgcgtcgaaactgatttgaaactgatacaccggagcggtctcctctctgggagcgatccatatttttgtgtactttctgatttgatgaacgactccatctgtttgtttctagaagataatgtatttgagggcgtctgtttttaaaagaaaagtttgcatgagtacccagttgctacagttctcggggatgtgggcagaacacgtataattttgaaataaatgctagtcatcctttctgcccttcc

SEQ ID NO: 170042 - DNA, 2409 bp, Zea mays
  Clone ID: MRT4577_86662C.1
ccggccgcggtccgaaacccctctcgatcgacacacgcagccgcgacccatcgcgacctgacccgaccctcccgaggccgccagccttatcctctccgcctccgcctcccgccgtcccccgcgacccatccgcaagcgcgagtagaagacatggcctcgacgttcggtgccacttctacagttggccttatggctgctccaacggggaagaatgtgcgccttcagaggagggctaacttcagagtaaaagcggctaaggagctgtacttcaacaaggatgggtcagctatcaagaagctccagactggagtcaataagcttgcagacctagttggagttacactcggaccgaagggaaggaatgtcgttttggagagcaagtacggctctcccaagattgttaacgatggcgttacagttgcaagagaggttgagctggaggaccctgtggaaaacattggagctaaattggtcaggcaagctgcagctaagaccaacgatcttgctggagatgggacaaccacctctgtggtccttgctcaggggctgattgctgagggtgttaaggtcgtggcagctggtgctaatcctgttcagattactcgtggtattgagaaaacagctaaagcactagttgaagaactaaggaagttgtctaaggaggttgaagatagtgagcttgcagatgttgctgcagttagtgctggcaacaactatgaaattggtaacatgatagcagaggccatgagcaaggtcggtcggaagggcgttgtcacccttgaagaggggaagagttctgagaactttctctatgttgtggagggaatgcaatttgaccgtggttacatctctccgtactttgtaacagacagtgagaaaatgactgcagagtacgagaactgcaagctgcttttggttgataagaaaatcaccaatgcaagggatcttatcaacgttttggaagaatccatcagaggtgcatacccaatcctgataattgcagaggatattgagcaggaggctcttgctacccttgtcgtcaacaagctcagaggatcactgaagatcgctgccatcaaagcccctggttttggagagcgcaagactcagtacttggatgatattgccatccttactggagcaactgtaatcagagatgaagttgggctatcacttgacaaggcagacaaatcagttcttggaacagctgcaaaggttgtccttacgaaagagtcgacaacaattgttggtgatggcagcacccaggaagaagttactaagagggttgcacagattaaaaatctcattgaggcagcagaacaagaatacgaaaaggaaaagctcaatgagaggatagcgaagcttgctggtggtgttgctgtcattcaggtgggagcacaaacagaaactgaactaaaagagaagaagttgagagttgaggatgccctaaatgcaactaaggctgccgttgaggaaggtattgttgttggtggagggtgcactcttttgcggcttgcagctaaagtcgacgccatcaaagatacactggagaacgacgagcagaaggttggagctgaaatagtaaggagggccctgagctacccacttaaattgattgctaaaaacgccggtgtcaatggcagtgttgtcactgagaaggtcctttctaatgataacttcaagtatggttacaatgctgctactggacagtacgaggacctgatggctgctggtatcattgaccccaccaaggtggtgagatgctgcttggagcacgccgcgtcggtggccaagaccttcctgacatcagatgttgtggtcgtcgatatcaaggagccggaggctgcacctgtcgcaaacccgatggacaactctggctatggatactgatgagatgctatggccatgccccatgggacgaaggtgatcaccatattaattttttggtaggcgaggagtcgggtcgaggtagctttttagacgaccgaaaggcgaaaataagttgaggatctgcatcccaaatttgtgatgtaaactgagacaacagcagccaaatgaagcagagatatgctgaaagattctgtaactggttgcagctaatgtcgaatgcagtttgcacacgaccgaacgcgaattcaaatggttccggcaacgtcagattgtgctgcgtcgaaaaactgatttgaaactgatacaccggagcggtgtcctctctgggagcgatccacatttttgtgtactttctgatttgatgaacaactttctagaagatgtattagtatttgagggcgtctgtttttaaaagaaaagtttgcatgagtacccagttgctacagttctcggggatgtgggcggaacacgtataattttgaaataattgctaaaaaaaaaaaaaaaaaaaaaaaaaaa

SEQ ID NO: 170043 - DNA, 537 bp, Zea mays
  Clone ID: MRT4577_86663C.1
ggccgcttttttttttttttttttggcatagaacttatttcctttttactcttatattgtttttacacagctgccaagatggattgagggtttttttccttataaacttctttctcaaggcctatctatggcaaaaagggccggacctttatttagattttattatagaaacagatctcatgcaccgcagaataatctctgaacgaatatgaaaaacaaaacatgcgtccggtgatgggttttcgtccaatgaccaccacacaattccttcccaaaggcaggcgctgtcttgaacccgttgttacccaataaacatagccattggtcggggcccgcctggagatgacagcgcgtgtggaaggcggtagagtaccccgctgagccgccatgcccaaaagggccgacccaagcccgaagccggctatcccgcctcatctgaagaagacgaccgggctaaggtcccaggctagtacagaggctccttgcggtatgtgcagaaacctgtggaggctggccttgcgattgagggacatttcc

SEQ ID NO: 170044 - DNA, 213 bp, Zea mays
  Clone ID: MRT4577_86664C.1
gtcggcgtcggcgtccgcgtctgagcggtgcttttcttcctcgcgtcggtgtggcggctccactgggcgtacgcgtcaccgcaggtaggcgacggcaggcggtggtctcgatggtgtccgccgacgcgcgcttggcggagattggctcttcgatccggcgtcgatcccaggacttccgcaggcccagggatcatgttccaggacagcaggaca

SEQ ID NO: 170045 - DNA, 198 bp, Zea mays
  Clone ID: MRT4577_86665C.1
cgctcagttctcgcgcccacaccaatttttctccctcatcgcggcataagctgcactgcagccatggacgccagcggaccggtagcaggcgaagaaggggcggctgggcgcaaggctggcggccccagaagaagtcgtgtcgcggccgcaaggccggctgcattccccgtcgccggatcagcgctaatcaagaagggc

SEQ ID NO: 170046 - DNA, 392 bp, Zea mays
  Clone ID: MRT4577_86666C.1
tgcatctataaccaggaccctgtcgcagtccatcaccgtaggtattctgtgcgcaatgctgataatggtacaagcgtacgcgaaccgttcgtccgacgtttagcatttcagggtggcataattttttgactcgagatttgggaggaaacaatgattggaaatttctcggtgtggtgaacgagcaatgctgcattcatgctccaaataaaactgcgagccctcaaaatttcgcgaaacgtaattgggtcatgtggaaggccagaggagaagccacgatcggatgaaggagacatcgagatgactaggatagtaagtagttatcgagatgtatttgagcggtttaagctgaaattttaagactgagctgaagacgatgtatgaatctatgtatt

SEQ ID NO: 170047 - DNA, 160 bp, Zea mays
  Clone ID: MRT4577_86667C.1
atttacatcgacattactcgtacttagtagtcgctatagtccgacacgatgatcaagcaagtcgtagtcgtattggtcgtccttttgggaatggcctctgctcgatacgttactttggaacaattccaatgcatgttccctcaagtcagagcctctaaga

SEQ ID NO: 170048 - DNA, 1990 bp, Zea mays
  Clone ID: MRT4577_86668C.1
ccggccgggccgtcgctgtctgtcgcgtgtacgccatcatcgctgccgtctcggtggtgctcgtcgcggctcgctctttcacggtggcgtgggttggcctccagacggcggaccggttcttcaagcagatcctcaacagcatcctgcacgcgcccatgtccttcttcgacaccacgccgtccggcaggatcctcagcagggcgtcgtcagatcagacgaacgtcgatctcttcctgccgttcttcgtctggatgagcgtatccatgtacatcaccgtgatcagtgtgctgatcgtcacgtgtcaggtggcgtggccgtccgtcattgccataatccctctggtgatactgaacatctggtaccggggctattacttgtcgacatcgagggagctgactcgcctcgagtcgattaccaaggctccagtgatccaccacttctccgagacggttcaaggtgtcatgaccatcaggtgcttcaggaaggaggaaagcttcttgcaggagaacctgaaccgggtgaactcaagcctgaggatggacttccacaacaatggtgccaacgagtggctcggtttccggctcgagctgattggaagctttgttctctgcttcacagccgtgctcatggtcacattgccgagcaacttcgtgaagccagagtatgttggtctgtcactatcatatggtctatctctcaaccaggtgttgttctgggccatctggatcagttgcttcattgaaaataaaatggtctcagttgagaggataaaacaattcacaaatattccttcagaggccacatggaggatcaaggactgcctaccagattctaattggccaacaaaaggcgacatcaatgtcattgatcttaagtttaggtataggcacaacactcctctagtgttgaagggcatcacaataagcatacatggaggagagaagattggagttgtcggcagaactggtagtgggaaatcaacactgatccaggcactgttcagaatagtggagccttctgaggggagaataatcatcgacggtgttgacatctgcactttaggactccatgaccttaggtcacggtttggtatcatacctcaggaacctgttctctttgaagggaccattaggagcaacattgatccgcttgagcagtattccgatgatgaaatctggcaggcattgggccgctgtcagttgaaagaagccgtagcttcaaaacccgaaaagcttgatgcttcagtcgtcgacaatggtgagaactggagtgttggacaacgtcaactgctatgcctgggccgggtgatgctaaagcacagcagaatactgttcatggacgaggccactgcttccgttgattcccagaccgatgctgtgattcagaagatcatccgggaagactttgcagcttgtaccattatcagcattgcgcacagaataccgacgtttagcatttcagggtggctacggttgatggactgcgacagggtcctggttatagatgcaggactagcaaaggagtttgaccggcctgcaaatctgatcgagaggccatctctgtttggagcattggttcaagagtacgcgaaccgttcgtccgacgtttagcatttcagggtggcataattttttgactcgagatttgggaggaaacaatgattggaaatttctcggtgtggtgaacgagcaatgctgcattcatgctccaaataaaactgcgagccctcaaaatttcgcgaaacgtaattgggtcatgtggaaggccagaggagaagccacgatcggatgaaggagacatcgagatgactaggatagtaagtagttatcgagatgtatttgagcggtttaagctgaaattttaagactgagctgaagacgatgtatgaatctatgtattgttcaactagaatattactgcgcatgcaaattttctgccgactgtatctgctattctgctgaacaaaaaagaaaaagactcgtgcaggggc

SEQ ID NO: 170049 - DNA, 379 bp, Zea mays
  Clone ID: MRT4577_86669C.1
ggggcccaaacatttttttaacacagtctttttaaagcaaaaaggggtttccaaaaaaccttttttcacccgaaaggggaaaacccccctgaaacctaaaccccggataagttttcggggccccggggccccgggggggggaacttccggaacatgcggccgagcaggtttacttccgggacaggcaaattacagggacatcgggaaatcatttaaaaagcgggccatcagggtccccatggaagggggggtccccccgccctccctatgggtatcccggggggtagctttgggtttcctctcaaccccaaaagggaaatggggggggcgaccattgggggggaaccgctcaaatagggggggcagggccgttggggga

SEQ ID NO: 170050 - DNA, 522 bp, Zea mays
  Clone ID: MRT4577_8666C.1
gtgtttttactaaagcaaatgcacaaatcttacaaaaacaacgggtccggaatatacggttactagcagttaaaactgtccgggacgactgttggaccaaggaagcaaacgatgcaaagcggcgccggcacacaaccggcctgagacggtgcgcgatgcatgcacttgctctacagaaactaagctgctgcaaacgaggagagagcagttggatgcgctatcatgcacttatcacccctaggtacggaaggctaaaaattttacttgactgtggaggggaacttatccagtgtgctgtatatgaacagcagctaactgatgacgccgggaggtctctcctagaggggcccgaccatacactcatggagcacatccaataacagggctggacaaagacacatcggtgtttatggacgcccacgaagccttctcacagaatgtggcctctacatgaagccgatagcaatgggggtgatggtgatcacaatgaccttcttctgatgcaccgatctggcgttacac

SEQ ID NO: 170051 - DNA, 304 bp, Zea mays
  Clone ID: MRT4577_86670C.1
cttgggtgggaattttgttttaccatctttttctaattgccaaaatcccagactgcatttttccgtatttctccatttttttatgcccgccccctccaacaattgtttacaccccccaagttgccccgttaaatgatccacgttgcgcggaactaactccaaaattgctgttggttatatatagagagtcaacaattgtggcacggggccattcgggaccggatacaaaaagcgggatatgcatcaccccaccaaccccgggaggttttactgtaaattcattccatgccaccggggacatcca

SEQ ID NO: 170052 - DNA, 312 bp, Zea mays
  Clone ID: MRT4577_86671C.1
tgctgatcacagtaaagcaaagatttttatttatcatattgcgaagacactgagagcggggtacaaaactgtcccaaactgtgagcattgactgtattactaaaggtcacttatagaaggttgctatatcactggagattacacagagcagaattacctgacttatatggaaggtgcaggcctatctggtaagctctgcgcccagtgcattgggcctgattatcgcaggcttgaactaaggagcctgaatagcctacaatcaggagacggtgcagtaccttcttagtcgcaactggacttagatattggaat

SEQ ID NO: 170053 - DNA, 152 bp, Zea mays
  Clone ID: MRT4577_86672C.1
gccaagccttcggccaagccttcggccaattcttccgttgaccagcggattaccatgggtgggccctatggccttggccaggtccattttcctgaacctaattcctgggaacttgcacccaccttttgaaccataatttggttttccaaagg

SEQ ID NO: 170054 - DNA, 180 bp, Zea mays
  Clone ID: MRT4577_86673C.1
ctatgaaagatggctccaggatggcccagtatcttcgtattgatgaatgtgaagacttcactgctagagactatgtgatcatgcttgacgtctggtagcggtactggagcatgaacactgtctatgatgtacaaccagctgggatgaaccatgtggttcttggactacaaggactagctg

SEQ ID NO: 170055 - DNA, 2477 bp, Zea mays
  Clone ID: MRT4577_86674C.1
ccggccgggtgcatgatgtctttctcgttaaccttgagacatttattgcatgaaagtcacctaatccattcataactcaagactgagaaaaaaaaaaaaacagctctactcctctccccgagtcctctcctctccggggtattgaattcgaaccaaaaaatcaaaacaactcagcgattcgattcgcggcgagtcaagcgggatgccgccgcgcacggctccggcggcgacctcaaccccgccgcggaaggtgcccctccggaagctgctgcgtgcggcgtcggtcgcctgcggggtgcagttcggctgggcgctgcagctgtcgttgctgaccccgtacgtgcaggagctgggcatcccgcacgcctttgccagtctcgtctggctgtgcggtccgctgtccggcctcctcgtccagcccctcgtcggccacctctccgaccgcatcggccccgccgcttcgccgctcgggcgccgcaggcccttcatcgccgccggcgccgcgtgcatcgccgcagccgtgctcaccgtcggcttctccgctgacctcggccgactcttcggcgacgacgtcaccccgggctcaacgcgcctcggcgccatctgcgtctaccttgtaggattctggctgctcgacgtgggcaacaacggcacgcaggggccctgcagggcgttcctcgccgacctcacagatcacatacagtataccatatgcaatggctgctagtcgtgttgaaaatctcggtcttggccaaggcctagcaatgggtattctcaatttagctattgtcataccacaggttattgtgtcacttggcagtggcccatgggatcagctgtttggcggtggaaatgcacccgcttttgcggtggcagccggtgcatctttcatcggtgggctggtggctattctggggcttcctcgggcacgcattgcatcctcgtcctccaggaggagaggcgggacacaccgataagtctgctcatttaccattacaggcatcatcaagtctggaaactctttgtgggttggagaagagcacgctgggagctcttgaatgctgtgtgctctttggtggtttgccccgttgagctattttttgccttgtctccaaatcttttgttgttcaattcaactcgaatgtatgtacgcacgtatgcatgtatgtatttgtatgtatgtggatcatttgtagagagcttaagcaatgaataaaagtttttttttttacgttcaatgagcttaatcactattctgggtgtggcttcttatatatatgtgtgcacttatataaactccgaaaatgctatgattgtggctggggatggatgcccccattgcccagtgcccaccatctatgaatctatgatgtccagtccagctgcagttggagcggcacgccgggcgtggggtggaggacctgcgcctcgggaagcgcctccgatagcagggcctggaaggactgcgtcgtcccctgtttggtgagcacggttgccaggagtccgccggcgtccacgtcgccgttgctcatgggtaccacgtacctggctcgcagcagcctggccaggtccaccgcgtcctcctggccggagacgagggtgaagttggccgggaggagctgcttcaccaccggcgtgatgacgatgtccgcccgcagctgcttctcctccaggaaggacctgtcgtacacgcagtgcggctcgtagtagaggaggccggggccgctctcctcacctgtggccatgaggatgtagccgttctcggggcgctgccacgggggccccaggacggggcctgcggtggccagcacccggacctgctggttgacggcggtggactggccgggctcgatgtaggtgacacggcggaagggcgtgggcagggattcgagcactggctgcgcgttgggggtggtcaccaccggcaggtcaggcgccctggccgacagctgcgtcagcgtccggacgtggcagtgatcgtccaggctctgcgtgatgagcagcacgtccggcctcgcctccggcgccagcagcaggtcgtccaccccgagggccttcaccttgggattcttcttggcgcgtcgaacagccagggcgcgccgaagtcgaggttgccgacaaggactgggtccaccaggatgcgcacgggggcttggccttgctgctgcacctcccacacccagctgttgatctccaggtacgtcagcttcagcgtcacctgctgctgcctgctctcgcggatggcggtgctggaggattgcggttgctggggccgtcgggacgaggatgatcttgggtgatctggacgccgtctcaaaatcagatgatctgatgagggacgacgacggcaaggagaagcagcagcgggtgggcggaagaccagctgcaggcggacggtcgtggccatcggtggtgcggtgccccgggagatgggagctgggggggcaagatccggccccgcccggccccgaggtccc

SEQ ID NO: 170056 - DNA, 176 bp, Zea mays
  Clone ID: MRT4577_86675C.1
ggggtgtgggttttttgaaaaaaatactaggtatttttgggtcaaatatttaaccaaaaaccaaaaaacttattgggggggggtaatttaatccggtcttatgtttgggaaccaacccagggaaaaaccaaattggacctcggggacgaaaaggttgggtgtgtaaatttgagaaa

SEQ ID NO: 170057 - DNA, 2153 bp, Zea mays
  Clone ID: MRT4577_86676C.1
ctcggccgggatgtatccataatcgtactcgcgggcatggactgcggatcgatggatgctgttacccccgtcaggctttattcaccggccgggaaaaaacatatgttccagaatatttttagctcagtccctctgcagtctgcactcggaagggtactagagataatataactccacctccatatctccacccactctaggtctctagctctactcctctccccgagtcctctcctctccggggtattgaattcgaaccaaaaaatcaaaacaactcagcgattcgattcgcggcgagtcaagcgggatgccgccgcgcacggctccggcggcgacctcaaccccgccgcggaaggtgcccctccggaagctgctgcgtgcggcgtcggtcgcctgcggggtgcagttcggctgggcgctgcagctgtcgttgctgaccccgtacgtgcaggagctgggcatcccgcacgcctttgccagtctcgtctggctgtgcggtccgctgtccggcctcctcgtccagcccctcgtcggccacctctccgaccgcatcggccccgccgcttcgccgctcgggcgccgcaggcccttcatcgccgccggcgccgcgtgcatcgccgcagccgtgctcaccgtcggcttctccgctgacctcggccgactcttcggcgacgacgtcaccccgggctcaacgcgcctcggcgccatctgcgtctaccttgtaggattctggctgctcgacgtgggcaacaacggcacgcaggggccctgcagggcgttcctcgccgacctcacagagaatgacccaaggaggactcggatcgctaatgcatacttttcactcttcatggccctgggaaacatacttggatatgccaccggagcatacagtggatggtattcgatatttcctttcactgttacagagtcctgcggcatcagttgtgccaaccttaagtctgcctttcttcttgacattattgttctggtcatcacaacgtacactactgtaacatccgtgcaagaacctcaaacttttggaagtgatgaagcacaaaatccaggtgctgaacaggaagctttcctctgggaactttttgggtcattaagatacttcaccctaccaatttggatggtcttaattgtcactgcccttacttggatggcatggtttccttttaccctctttgatactgattggatgggccgagaaatctatcgaggaagcccagacaacccaggagagacccaaaggtaccatgatggtgtgagaatgggttcttttggtctaatgctcaactctgtcgtccttggattcacctctgttgtgctagaaaagttatgtaggaagtggggagctggacttgtatggggtgtctccaatattctaatgactttgtgcttcttggcaatgcttgtaataacatatgttgcaaagaacatggattatccatccagtggtgcacctccgactggcattgtcgttgcttctttggtggtttttacaattttaggggcacccctggcgatcacatacagtataccatatgcaatggctgctagtcgtgttgaaaatctcggtcttggccaaggcctagcaatgggtattctcaatttagctattgtcataccacaggttattgtgtcacttggcagtggcccatgggatcagctgtttggcggtggaaatgcacccgcttttgcggtggcagccggtgcatctttcatcggtgggctggtggctattctggggcttcctcgggcacgcattgcatcctcgtcctccaggaggagaggcgggacacaccgataagtctgctcatttaccattacaggcatcatcaagtctggaaactctttgtgggttggagaagagcacgctgggagctcttgaatgctgtgtgctctttggtggtttgccccgttgagctattttttgccttgtctccaaatcttttgttgttcaattcaactcgaatgtatgtacgcacgtatgcatgtatgtatttgtatgtatgtggatcatttgtagagagcttaagcaatgaataaaagttacaggagttacgttcaaaaaaaaaaaaaaaaaaaaaaaaaaaaaaaaaaactcgagactagtctctctctctctcctcgtgccgctcgtgcaaaaa

SEQ ID NO: 170058 - DNA, 579 bp, Zea mays
  Clone ID: MRT4577_86677C.1
cctgtcccatcaaaaccagtttaggcaaacgactttacaaagagggcaaaccccccctcgtcaaaatctaaagagatggaaaaaaaggggtttttttttgttttgggggcccccacaacaaatcacctgggtagttttggggcaaacccgaccatactttttttgggaccgtccaaactttgtaacaaagggcagcagggagctaatatagctccacaaaaaaacatcctaatccttttccttttttagaagggctccacgggggccctgaattttgttccggggaaaaccggggaatcaccgagcttttcctcgaccctgaccagctggttgtttttggccaggccctcaaaccggaaaggggctcccgttttgatttggcccgtaacacaggccacctgaaaggccaaaaatgaaggggtcctttgttcccccactccggggggtggccatcactccccatccgggcggcttggacatcctgacagttttaatattttcggccccacacccgttttggttcccctttaagagggaagctttgcgggttttttaattgagggccttggcacccctggg

SEQ ID NO: 170059 - DNA, 348 bp, Zea mays
  Clone ID: MRT4577_86678C.1
gggggaaagaagccttttggcctcatttttggggggctggccccgaatttctgttgttgtaacaaacaggcccaaattataaatgcccatcaatcacaatttggtcacatttcaaattttttggggccccctgccgaacaaaccaaaatccttgattttttggaacggggcaccatgcattttttcgaacatcctggaacacttcttctaaatcctaattcactaaccggtaatatgataaaccgggggcccatgataactcaacctggggggggttttagaggcaacccttgaattagcccccggagcgactttttagcgactcgggggggtccttttccatgagtc

SEQ ID NO: 170060 - DNA, 367 bp, Zea mays
  Clone ID: MRT4577_86679C.1
cacaacggaggagacgacaacgttggtggggctgacaacggtggcgacggggggcagccggcggcgacggtgatcactgtggcgaaggatgggacggggaacttccggaccgtgggggaggcggtggctgcggcgccgaacaacagcgaggcgaggacggtgatccgcgtgaaggccgggacgtacgaggagaacgtggaggttctgccgtacaagaaaaacatcgccctggtcggcgaagggcgcgacacgacggtcatcaccggcagccgcagcgccgccgacggctggaccacctttcgctcggccactttcggcgtctccggcgaggggttcctggcgcgcgacatcacgttccgcaacacgg

SEQ ID NO: 170061 - DNA, 296 bp, Zea mays
  unsure (1)..(296): unsure at all n locations
  Clone ID: MRT4577_8667C.1
ttgctcgagccggataggctaaaagataccaactagccacatcataaagcacaattacagtaccaacaatggcagctaaaatattttgcctacctacgcgccttggcctttctgcaagtgctgctacggagaccatgntcccacagtgctcacgaagctcctatagctaccattcttcccccgtacctatgatcaacagagtcttcggtatgcaaaaaccccaccttccaaccctacaagatccgtcacgcaatcgcaattggcatataacctttatcaccctgggtgctccaaca

SEQ ID NO: 170062 - DNA, 339 bp, Zea mays
  Clone ID: MRT4577_86680C.1
gcgatgctttcagcgcttcgggctcatgagtgagcgcaacaatattgattcttcctatggtagactaccgctaattcgttggcggtgtctcctgggccactgacaatcactacctgcacaacgcctgcggcacatacagcgaggtcctcgagaacaataccattctatatcgggagactcattggtaccggagcttcgggttagtcaccttctcaacagcagagtcgattatgaacgccatagagggcatgaactgcaaggagctggacggccgtaacatgagcgtcaacgaggcccattcccgtcgaggccgtggaggtagctacggacgttacggtg

SEQ ID NO: 170063 - DNA, 1557 bp, Zea mays
  Clone ID: MRT4577_86681C.1
gccggccgggccggaccgccgggattgtttccctttttcttcgttgctaggatcagacacaagagttttagtgatgatctcctcatcaacatctatctccatcacaagaagaaggtgtggacaggaagacgacacaagattcaggcgacactcccaccattgctgctgacggcgtccaaattgtcttctttctcccccctaccttggctggctggctctctagatcgaatcacgggtcaggcgctcccctgaccaaggccatgagccactacaccatgcatgcagccatcaactacgccgcgctgccacccacgtcgccgctgcaactccccctcccgtacctccctccgcctcctcctccgccgttaccgctaccgccgctgttgtcgccgccgccaccggcggcggcgtcctctgacgcgggattccagagcaggatcagccccagcgtccttctcatcatcctgatcttggccgtcatcttcttcgtctccggcctgctgcaccttctcgtccggttcctgctccgcccggcgccgcgggatcccggcgacgcgtacgggggtgacgcgaacgctaccgccttccagggtcagctccagcagctgttccacctccacgacgccggcgtcgaccagtccttcatcgacgcgctgccggtgttcctctacggcgccgtggtcggcgccggcgggaaggatcctttcgactgcgcggtctgcctctgcgagttcgcggacgacgaccgcctccgcctcctccccaagtgcagccacgcgttccacgtcgactgccactccaagcgggaccgcagccagctgtcgaaggcggtggacaagagggagagcttctccgtctccaagatatggatgcgcagcgggccgaggaggaaggacgtgccctccggcgcaacgacctcgcgccgcgcgtcgtcgttccggctctcctcggcgctccagcgcacggcgagcgacgttggggcgacgacggcgaagcgccgggcggacgtggtgagccccgtgacggagtccgagtacaacgtgtcggcttgggacaagagcgcgagcggcagcgtcgtggattgggacgtcgagtccgcgggcggcgggcacggcctcagctccagagccgacgaggcgccgtcgttcgcccggcggacgctgctctggatcagaggccacctgtgaattgaaccgaagcgaagcagagatcttggcttctaccaccttgttcttcccctctgctctcccgtgtaagttgtagtaactgtgtgtgcatggatgcctgcgatcttctcctgcagcaacagatcgcaggaaatttgcattgcttggcgagtggatgaaatggtggatatttgttcggtaaaaaaaggattacggctcgagatttctagattgtttcgcatagcatttcgcagttgtgtgtagtagattagctgtatttgctttgcatcttgctgtacatttgaaattgcttcgtagggttttatccagggtaatctataaaccgaaaaattgaaaaaaaaaaaatgaagcaaagccaaaaatacatgag

SEQ ID NO: 170064 - DNA, 430 bp, Zea mays
  Clone ID: MRT4577_86682C.1
attcggctcgaggatatggccatggagtttttgaaggatacggctctgggtctggcttggggggtggtgctaccccttgacctggtggacatggcggcggcgatggtggtggccaaggacgctatggctatggctatggttcaggatatggatcaggtgaaggattcgcacaaggtggtgctcatgggggatgctatggaaccggtgccagcggcgccggcggcgtgagtaaaggcgatagcggctctggctattgcactggatccggctacagttatggaggccgcaccacaacggacattattacgctctccttaagagctagatacatgctatacacatctgtcaccagacatgagtctgaattggtgcatggcatggtagctgtatgcatcgtgtgtgtaacaccgcaaggattgcgatttgttct

SEQ ID NO: 170065 - DNA, 217 bp, Zea mays
  Clone ID: MRT4577_86683C.1
acatagcatcgcgcatgcacgcgcagaattcggctcactgcgcgggcgtcgacgtcctcgctgtcgtcgtcgccatcttcctccttccatgctgccgccgccatctcgtcggcgttcccaatccatccaaatttcgcggtacatgcatggacacctttcccttagcttggaaagattactagctagtagctctttagcacggacttgaactggtctg

SEQ ID NO: 170066 - DNA, 287 bp, Zea mays
  Clone ID: MRT4577_86684C.1
gggcctgggccgggcacaaacacaagggacaaacctttttttactcgggagaaacccgttacacaacatgaccacaacgggagcccgaaagggacaggcaccccccttcttttttttaatttcaggggaagggccccacaccccttcccatgctgattattttattgcaaccgtgccacacccacacttgggattcccagaagggctctgcaatttgcaactattggatgggtgccccaaagaggggggaaaaaaaacccctgggaggcattttgataccagggggg

SEQ ID NO: 170067 - DNA, 756 bp, Zea mays
  unsure (1)..(756): unsure at all n locations
  Clone ID: MRT4577_86685C.1
cggccgctcagccggcgggccatccatgtccgtgctggtggtccgcacgctggcagtactggaccgggagcacgtctgcatgatagctcggatcttctctctgatgaagttggtgctgagcagcttacaaggaatatacaattttttggagtcgaatctcagaagaaagttactgaatcttttgttgtagtcattggtcttggaggagttggcagtcatgctgcttccatgctcctcagatctggagttggcaggttgctcctagtagattttgatcaggtctcactgtcatcactaaatcggcatgctgtggcaaccagagaggatgtggggaccccaaaagcatattgcctcaagaagcatttctcattgatatatccagagtgccaaatagaagcaagagtgcagttgtatgattcgtcagctgaggacgaaattcttactggacagccagattttgttcttgattgcatagataacattgatactaaggtgtctctccttgcggcttgcgtacgcagagggttaagggtactttctgcaatgggagctggagctcgagcagacccgacccgaatccgtgttgcggatttgagagaatcaagcaatgatcccctttctcgggcggtacggtatcggctgaagaaggatcatggaattgaagggggaataccagtagtntttttcatggaaaagcccaaggcaaagctacttcccctttcagggttcgaaagaaagagaaactccatctgatta

SEQ ID NO: 170068 - DNA, 618 bp, Zea mays
  Clone ID: MRT4577_86686C.1
cctctcctctggaggtggcggcgctcctcccgtcttcttcttcttcttcctgtactatatatatatagcttcccctcgcaaattgtcaccttgacgttcattcggcttgcttgattgttccaggtattcgcagtcgaccgtgtcctcggagcacgtaagttacgaatcttcgcttcttcttgtgatagtgtttcgagttgcctcatgtttaccttgagtcgtctgccggctcgccacatgggcaaggcgcatcgccgtcgatgcccgctcgattccaccgtcagccagatttttctggctcgatgtacctgcgacgtagtgtggagatgagacgcgcaggtgacgccggatgctagggaaccggaactagatccggtccctgctactgtggtggctgcgctggtttctgaattctcatattgggatttgaatgaatccttgaaacatttataacatgccttgaccgcttgtttacttaggtctctagttgaggagggcattgttaagatttgctctggtccatgagcgtgtatgtttacttgttgtggtctgtagtacgtattcaccaagtaatttttggtgttttcaccgtagatactggtctctaattctctatgc

SEQ ID NO: 170069 - DNA, 315 bp, Zea mays
  Clone ID: MRT4577_86687C.1
ggtgttttaaatttctgcaaatgtaacttcttatttctgcttcaccacatacatcatccaaaaaactttattattgaattacaactaataagcaatctaaaagagggcaccaccaatcatctatttttcctaaaacgcccctggggggtgcaaatcaagtttgacaaagggcaacaattgttttatttgtaaaagggttgcaaagttaacctcaaactgcttgtagaaacgcaccaactattgctgtatcaaaaatgaatcactgattcctgcagctagctcactaaatagtcctattatttgctcctgcaaata

SEQ ID NO: 170070 - DNA, 748 bp, Zea mays
  unsure (1)..(748): unsure at all n locations
  Clone ID: MRT4577_86688C.1
cattgggaccctcgaggccggccgggctcgcattcgtcactgacgagtgatgtcattccgcttgcttgattgttccagatattcgcagttgaccgggtcctcggagcacgtaagttccgaatcttcgcttcttcttgtgatagtgtttcgagttgcctcatgtttaccttgagtcgtcttccggctcgccacatggtcaaggcgcgtcgccgtcgatgcccgcttgattccaccgtcagccagatttttctggctcaattgtacctgcgacgtagtgtggggatgagacgcggaggtggcgccggatgctagggaacgggaactagatacggtccctgctactgtggtggatgcgctggtttctcatattgggatttaaatgaatccttgatctatttataacatgccttgaccgcttgttgacttantatctctagttgaggagggccttgttaagatttgctctggtccatgagcgtgcatggtttacttgttgtggtctgtagtacgcattcaccaagtaaaatttggtgttttcaccgtagatactggtctctatgctcttcntgttttggttgtccgttaagcctgtntggtattttttctggtgcttcagtatgtcctgctgtctgacacttcaacataactgttgttatcatacattagtgcttgagcatttctttggattctagcagacaatagattcaaggtactctgggtattttgattttttaggttgatttgcttt

SEQ ID NO: 170071 - DNA, 514 bp, Zea mays
  unsure (1)..(514): unsure at all n locations
  Clone ID: MRT4577_86689C.1
cccgggtctaacttcccatcgctctcccccttcatctccccacacttcctgcacctcacctgctccgnaactggcgagcacctcccctcgccgccactccacacggtgctcgccatgtgccgtccatccgcgnatcatcagtgccggcctctcactccataccggccgcagcgaccatgtgggcgctgccgccccggccgcgtcccgctctcgggggccgttccgctgcgctagtaccgcgcgcgtgcggcgtgcgtgcgcgcggtcgctgtacgcaggtacgtaccatcaagcggcgtggcgggcggtgtcgcgcccgtccgagcaggtgtaagagcggcgatcggtgctcgggcttcgtggacgggtctccacgngtcgcctgtcgccgtctgccgagtatcggctgcgctcctcggccgcggtgcaagcttcgagaaagatcgtcggctgtgcccacatgcaagcgcaccttctagcaagcgcagtcgttcggggtcccgctctccacgct

SEQ ID NO: 170072 - DNA, 272 bp, Zea mays
  Clone ID: MRT4577_86690C.1
ggactgggacttcagtttgtttaacatttttgtgcgtgtttatagacagcggcggaacgagagccaactacagctgccacctgtgcgcatgggtgcactgggacccgactagtacaggcgcacgtaaataccaaccatgaaaacacttcgcgcgaatgcacagaacactgaggactaggaaaataccatttacttgttcgttggatcgccacccgacaaaaggggataagcgatgccactgaaaacgacggatgatgaagggtgatcctacc

SEQ ID NO: 170073 - DNA, 523 bp, Zea mays
  Clone ID: MRT4577_86691C.1
acatttcaccagcagctcaaagctctacatgctattctagctagcactgggggcgaatatgtctacatcttctctgtgctgccatgaacctcactgcagcccatactggacttaggacccacctacgatgacccaacaatgacagcatcacatggaaccaactgacgacatcttctcgacagagcagccagagaacgagaaaacttacctttactacaacatctgcaggagcatgcacacaaaatggatcctctgtggtgactcgcgcggaaatcccaccaagtgtactgcttctcctccgacttctccttctcggccgccacttcaccgaaacaattcgaaggcgctctgcaacgaatatggacagggagaaagtgactgagatcactctccgtcatctcatcatccagaaaggataccgccttccagcgaatcatacattgaagcgaattcgtaacacatgtactgacacgaacgtccgattgctcaaggaaatgggcatggacgcatatacgttcactat

SEQ ID NO: 170074 - DNA, 360 bp, Zea mays
  Clone ID: MRT4577_86692C.1
tcggacgcgtgggaccgtcaggtccacgcgggccgatttaaatccatttggcacccaatgccctagccctggggtccacatctcgggggggctctacactatcctgctgcaggtgccgctaccagtgccacgagggagacagctcctgagcttctcttagtacagagaggcgggggctctgccgatgttgacagccaaggccagtgcagtggacatactccttgcaggagggcgctctgggactaggtgggggtcattgggactgaccgcacccgcgagtatgtgatgcagcggggcgggaactcctccgatgacaggggccggctgtccggagggaagtgaaccagccgacagacatgg

SEQ ID NO: 170075 - DNA, 157 bp, Zea mays
  Clone ID: MRT4577_86693C.1
aagaaaacatccggtggccaaccaagtcagccacgtcagtcgaacctgcctatcattattgacagattttactttggcaaataattttgtggcacgttatatgtaaagatggtacagttttagcttcattgtccacaaatcttgttttgaacgatta

SEQ ID NO: 170076 - DNA, 648 bp, Zea mays
  Clone ID: MRT4577_86694C.1
cggacgcgtgggcggacgcgtgggcggacgcgtgggctcgaaaccttttcttgtgctctgtctgtgtgtttccaaagcaaacgaaagagctcgaggatgtcttgcagctgcggatcaagctgcaactgcggatcaagctgcaagtgcggcaagatgtaccctgacctggaggagaagagcggcgggggcgctcaggccagcgccgccgccgccgtcctcggcgttgcccctgagacgaagaaggcggcgcagttcgaggcggcgggcgagtccggcgaggccgcccacggctgcagctgcggtgacagctgcaagtgcagcccgtgcaactgctgatcctgctgcgttgtttcgtttgcggcatgcatgcctgtcacttttttttacgtactgtctgctttgtgcttgtggcgtgtcaagaataaaggatggagccatcgtctggtctggctctggctctccgccaggcatgcttggtgtcggttctgttgtgcttgtgttggtgcatgtaatcgtatggcatcgttacacaccatgcatctctgatctctgtgcgctagtgtgtgtgactatgtccctgtaacgattggctcaatatatacaatactgttttactaagtaagtatgattacctcttatttttttcct

SEQ ID NO: 170077 - DNA, 1345 bp, Zea mays
  Clone ID: MRT4577_86695C.1
ccggccgggccggtacaaaccccataactcgaaaccttttcttgcgctctgtctgtgtgtttccaaagcaaacgaaagaggtcgaggatgtcttgcagctgcggatcaagctgcaactgcggatcaagctgcaactgcgggtaatgtaattaaggctcttattttcctttctgtaactgtgtgatcttgtccttttatgaattgtacgtggtgtctatttttaattttttttgcttaattctgcgcagcaagatgtaccctgacctggaggagaagagcggcgggggcgctcaggccagcgccgccgccgtcgtcctcggcgttgcccctgagacgaagaaggcggcgcagttcgaggcggcgggcgagtctggcgaggccgcccacggctgcagctgcggtgacagctgcaagtgcagcccctgcaactgctgatcctgctgcgttgtttcgtttgcggcatgcatggatgtcaccttttttttactgtctgctttgtgcttgtggcgtgtcaagaataaaggatggagccatcgtctggtctgactctggctctccgccatgcatgcttggtgtcggttctgttgtgcttgtgttggtgcatgtaatcgtatggcatcgttacacaccatgcatctctgatctctttgcgccagtgtgtgtgactatgtccctgtaacgattggctcagtgattgaatatatatacaatactgttttactaaaaaaaaaaaaaaaaaaaaacccaggggccggcccccaagcacattttttttgtgacaggtcctttttattaattaataaaagggccttattccaacgaacggtggttccagttttggacccggttccccccttggaaacttataaaaattcctccccccgaaaatggatcttttttttcgaccatgtgtttccccccgccccctccctgttcttcgctggtgggcgtataatttctcgttcccgtctcccttatttttttcctgggcaaacacctgaccccctccccgcactaccaataaacaccttctctacaacccccccgttctttttttctttgttgcaattgccacaaggagaaatccctattcccactttttatattccgccaatatctttttcgccctttttatcaaaacataacggagctaaccaccaaaacaacatttctgctggatttacaacaaggagggtttaccccctaccaaaagacaaccacacctctttttttcaaaatttataaacgcgcgttgctcccaaacccccattcttaccgccatacatagaacactttatattccccacccttctctattattacgatgcacatacattaaattatt

SEQ ID NO: 170078 - DNA, 275 bp, Zea mays
  Clone ID: MRT4577_86696C.1
aacacgcgtacgctgatagatcgcgatttgacgccaacgttttctattcgtgaaatggggaattatacattgccgatgatcactagcagatcccagcatgaatgcactatacagtttggatcattactatatcggcgtgtccataaagacagatcctagtaatcactgatactcccaggagctctactcatacataccgcgaaactatccagtgtagtcgcatctctgaagtcgacggccacaatcaaactggtattgaactcagatctatccat

SEQ ID NO: 170079 - DNA, 407 bp, Zea mays
  unsure (1)..(407): unsure at all n locations
  Clone ID: MRT4577_86697C.1
ctatcaccaccctatttcttcaaattcgttggcagatggataacacccgtaccattcccttggaaaaccctatcttcagccaccatgcaagggaaggctggcacctccaaaaacgacgagggcaggatccggcacatggccgatccctcggtaagcgcaagaatgccgccttaaagcggtatgtccaagcccccgccctcctccttanttttattcatggatgaattcaggcgggattatcaggcgcttcaccctgccaacaagagcgaaataactctgaacaatgaaccaggggaaaagcggtttactatttcatatcaagaaaagcaaccatatagtggaccaaactggtcctaaaaagctaggctatgagtaacactaaggactaacttttttaaataacgaga

SEQ ID NO: 170080 - DNA, 533 bp, Zea mays
  Clone ID: MRT4577_86698C.1
ggggggggggggggtttttttttttttttttttttttttttttttttttttttttttttttttattggaacccgggtttctttttttcgttacacagccttttggattctatttgaagccaggtttctttctttcgttataactgaacagggggttgtgggggggatatgggacaacacagttgaaagctgggagcccctacaacagccacaagatagcccagctttccaacaccaactacaagcggatattttccacagagatgcatcagctccctggcacgcaggaggcacattttttgctatatattggttggcagctatatatgacctgcagcaggatgcacattttttgctaccgacctgctagcggggggggatcaattgaacaatcgaatcggggcatatctttggtttacttactttccggcccggtaagataacattccaaggtccacctttgctccctaacctccggaacccagcaactgcgcgcaaccttcttattggggggagacccgcccatatggcccc

SEQ ID NO: 170081 - DNA, 782 bp, Zea mays
  Clone ID: MRT4577_86699C.1
gaccgcgccctgctccgccgcggcgccgccgagcgcgtcgaggacgtcatgctgccgcgctcccccgagcggatgcggcgcctgatgcagctcgcctaccaccgcccgcgccgcttcacgccgggcttcgtgctccgggatctcgcccagtatctgtacagcgacaaagtagaagagaagaaggagctaatcaaggggataacgctgggcaacaaagacaagttccagcttactcctctcccccaggaagtccttgtgttgtggggagagcacgaccagatattccccgtcgagaaggcatttcaagtggcaaggaaacttggagcgaatgctaggctggaggtcctcaaggacaccggccacatgcctcaagaagaggatccaaagcggttcaacgaggcaatcctcaacttcttgcttccagctccaaagtcgtccttgtaacgcgatatatatcccatagttattcacttattattcaggcccaaggatcaccggagagttcacgatttcgatatgcacattctgcccgatcagtgcagtctttgtcgctttggtatcacctcaccttcaagattgatcatggaggaattggaaagtatgttatggaaactattgctatttatctgccaatatatatctgttggatcttttatgggcttgacctatttattgaataaactatagggtgtgtaatggtggagaataccaatagtaccacattggaagtccaagtatcttttgcattgacttatatggtgtgatttattccacttatttcc

SEQ ID NO: 170082 - DNA, 719 bp, Zea mays
  Clone ID: MRT4577_8669C.1
ctccactattatcctgcctgaatttgacattggggttcgtgcatgatcgccctcacccacaccgacaccaccaccccacccctgctggtcttgatctcacccacgtgctcctccccatatctcctctccattactgccgccctgcctagatttgtgcctaacggtggcaataagaatcgcatcgatcttctcgctataaggcaaaagaagctgcagcagttcggaagaagaaggagaggtgggttccgtcaagaagtctgatgccgacgcggaggccgagggggcgcccaaggcggtagagtcttttctcgagctcaaatcgcttcttgggttgaagcagctcgctagggaggatgatagtggtagctgggcttctccttcaaaagggatgcggtgtggactgaaacttttctgctgtggtagcggtgatggggtgcccgtacgcgcagatggaaggggtgtcgaagaaacaacgcggcatcggaggtggtggtggcggcggtggcgctgacgggtcgcagtcgtcgtcctcgtgtagggacatagggctttctgttgatttcaaggagtagcacgtctgaggcacatcgatttttctctattttgtttgtgctttacaggttgcatagtgcatggtagagaatcgagtacatttgtagttccaaattgaacaagggtgccaattagccttttccagataatggagttgaacatatccg

SEQ ID NO: 170083 - DNA, 334 bp, Zea mays
  Clone ID: MRT4577_866C.1
gcaacgaaatcaataattcacagctttgcgagctagtatattttttttcacaggccaacgggtttttatttatggatggggccttgatccagccccaataattttcaggggccatacatacaaagggccaagcagtttctccaaaggggggggggggaagaaaaacacccgtcccccccctttggacaatgaagagcacacctaacatgcaggggatcaattctttggggcaaccccatcgacggagggggggctttgatcaagttccttttaaagctccgggatgaccggctccacagaaacataaatctcataactggcctgggggactttt

SEQ ID NO: 170084 - DNA, 905 bp, Zea mays
  Clone ID: MRT4577_86700C.1
cagctgaaatattatactgggtatgattgtaagccacagggcaaagcatacagtactctataataatatccctttgccgtataattattaggccatttattttgatacactgatgaacagtaattattattcattcaggcgcgcgtccgttcgtttgctgctgttggctttggctccagccctgatcggggtattatatatatgtagaagagcgtatgatcgaagagctagccgacgtagtacatggggtcgggcagcttgaacgtgcgatcgccctccggctcgccgaggaggtcagtccactggtcgccgatgttgccgacgatgacgtacccggcgtccaccagcttcttccgctcgccggacttgaactccaccgcagtcaccctggcgtcctgaggcttgagcagcagcttctcgtagccggtgtaccccacatcggcgaggttcttggccgtggactcccgcttgtcctcgcgtcgccccgtcaggatcaccggcttgatgcccagctcctgcagtctcttgtacagccgctgcgtctccggcaacgccggcgcgtttgccaacttggtgtacgcgccgaaggccgtcgagttgtacggctcagacccgaagccgtgctcagcatagtaggggaggttggagagcgtcgtctcgtcgacgtcgaacacccagacctccttgccatcgccggagagcttcaggccctcggcgtaggcgacggcctcgtcgacgaccgcttgggagtctggaattactgcccgccgagcatgtagttgccgacgacttctcgcagcgggccgggaccgtttcccatcgcgcagggtgtccgtctccacagcgaaccgccagctgtcgcaggcacgccgccgagccggcccaggtggccgtggaatgcagca

SEQ ID NO: 170085 - DNA, 198 bp, Zea mays
  Clone ID: MRT4577_86701C.1
tcgagtttgtgtattgaaatgtattcttatagtacttttacgtatactgaacacggaggtgggggcatttttgatatgaaggattattaataatagttgttgcataataacaaaaacctggagctggaccctaataaacagcacgaagtgggaaaatgaacgcctatttggataatggcaatcttgctaaaggtaaat

SEQ ID NO: 170086 - DNA, 369 bp, Zea mays
  Clone ID: MRT4577_86702C.1
cccaaactcaactcatgtcatgacaatcttccgggcgatagtcaacctggtgggtattctaacaagaaaacttccaacatgtcccacttccacttttgcggatgatcatcactgctcccagccaacaatgatactattgttactaatgtgaacaacatcatattcagctttaatgacaaaaccaactcatcactctgccccatcacaatacacaacacacaatatatctcatccagatcaagcacttatatcttcacacgtacctagattcactaattaacctgatcctcttacctctattcaaacgattagcattcttcaacataagaacacaattctttccactgctactgctcacgctaatcttct

SEQ ID NO: 170087 - DNA, 263 bp, Zea mays
  Clone ID: MRT4577_86703C.1
tttaaggatttttggaaaaaccaaggccctgggttttttaatcgatcacctggccggacgggaaaaccaagctaccgcctcctcttgccccaattacccaaatttgacccccaatacctcattaattgctcgcattggcatgccggcatcattcactttcacgccaaactggttggaggggatcgccacccctcttgatgccttccggaccacccacttatttttcttgtaaaccacccggaaattggaattttattcccctt

SEQ ID NO: 170088 - DNA, 1777 bp, Zea mays
  Clone ID: MRT4577_86704C.1
ggaaaataaaaaactgtgtttggccctctaaagtatgacatatgaactaacatatttcaatagacctatcaaagagcaattgcatcaagtgttatgacagtatggcacagcacgaccagtttcttttttttgacggtatttgtttatatttaggataaatatgtaaacatagtagttgaagtcatgcaactttaaggaacaaaaaatccacatatattgggtaactgaaatataccaaatcggcctctcagatgctatagaaggaaatcttgaatgactggagtttgaggtacgatatcaggctgagcactagacttttctctatgtttattttttccctgacgatgtccacttctaccagagcttctgtgctttcttggttctttgccatcactttcaggacgatctgtgactttctctttgtcatggttttgttgcttacttgttctagaatgtgaagcgggatggcttcctaaattctctatctgctgagagctagattcgttactgtttgctttgtttagcattacttccaggttcatatccgaagccttttgtgaagacaatgccttagcatcactacccaagagcacatcacgtagagcaccagacaaggggtcttcttttgggacaattgcactaggcatcatagaactgaggaaatcctcggtatccaacttaactacttttggtctggtcttcgtggctgtcgactttttcccagcaaatacacgttcagcagtcttgccacttgtcatcattagcagaattattgctagaagatggtagagaatcgttagcttgagggtaatcatttggctcgtcctcagctttccctgtttggagataaaagagcccatgcctcttgcgatgctcagaaagagaagacaaaccaattgacactgcaggctcatctctggtatctacagaatgacgactgcgaggatagaaaaagattgaagttgagggagtagtatcatcttcactcaccatgccagcaagttcaacaagattttcattcaggataaggccatctggaggggacactttcatctgtgcattcacataaacagggcctaattcttgacagaatactgcccgcatagtcttaacaagctcttttaacctgctagacttgtcaccatcagcaaccttccttttgttcaacccttgaatctctcttactaaatggacaaaaccaatcaggttgtgtgctctctcctggacttctacttcattgcagttaatgagtggaccaactgtagtttgaatcaggttaatcatgtaaagtatagattcatgcgaaaaagggtccttttgcactgtgctggccccaatatcttgctcatcaccagacccaagtgcagcattgctttccaaattgacagtttcatcagcagctaacctgtcaaacatgacatccattgccaagtctgaatcacccaatctcccaatatatgcactgaaacaccatgtaatcactttaaatactgcatggatgtagacagctctcactgaaattggcaggagactggtccttggttgcaagagcgcttcaacaagctcaacaggatccttcgttaagtctacatactcaccagaaatccatgcagccgctgaaagaacagggaagaggaagtgatttccaagcaatgcaggatcaatcaggagagttcgagctgaacggacaagctctggccgtgcatcctgcactctgagtcctacatcaacaagctgcgaccaatctcatccccttgggcctcgtggagaattcgtg

SEQ ID NO: 170089 - DNA, 265 bp, Zea mays
  unsure (1)..(265): unsure at all n locations
  Clone ID: MRT4577_86705C.1
caaacaaaaagcaaaaagaaaattagaaacgaaagtaaaaatgaattgggcgagcgggacgcgagcaacgccgggctgtcggatcgctacgcacagacccccggcaactcggccaaggatacgccgcaatttgcggcaagggccaacaggtacgccgggtaaatggccaacagagataaacacagcgcttcaggcagagacagttaccctgcacatgccaggcgctcaagaactaactagggngtccgcagccaccgcagacccc

SEQ ID NO: 170090 - DNA, 241 bp, Zea mays
  Clone ID: MRT4577_86706C.1
aagggggaaatattactccaaggggggaaattaattataaaccaaacattctataatttatccaaaaattgaatatttttgttcccaaccaccccatcataagtatacaaagggctcctataatactttattaacggggcattttttgcaaaacccatttgaaggtcccggttagcaaagaatattccgccctattccatgaaatcttcataaccaccggcaatggcgtcattgcctttct

SEQ ID NO: 170091 - DNA, 381 bp, Zea mays
  Clone ID: MRT4577_86707C.1
agagagcacaatagtgtaccaactttggcaaccaaaatatttcgctcccttatgctccgggatctttctccaagtgctgctaccgtgaccattttaccgctgtgctcacatgctcctatatcttaccagcttctcctatacttctaaccagttgcgtcttcaatctgtgataacccccatcttcaacactacatgctccaacatgcgctcacactcagcatattacccatatcacactctgccgtctaactaccgcaacacctattactgtaatctactccggtgcatgtgttcactccaaatacatacgtgcaacaactattgctgctagagcttgcaccacctgtgactcaactatcatgagcaaaccctgttgcatac

SEQ ID NO: 170092 - DNA, 664 bp, Zea mays
  Clone ID: MRT4577_86708C.1
attgggtacctcgaggccggccgggagcccaacttataaccgtcccatatcatgtagttctcacatttagtcacccggccatcgcagccgcctctagcagaaaaatcccttttgcacggctgccacgacgacgcagtccatacatttccacaaggcactgatccctgacaacgccgtcgtgtccgccgatactgaggttgctctcgaggatgataagaattcatcgatgactcaagtatccggcgcgctgtggtcacaatgaagctactactcaaaaaggaagctcagggaatcgttcgcacccagctgcgacatacaaacgcggtgacaccaaagaacaaattgtagacatatgatctacaattgacaaagctacaatgtagctctgcatcttgtgtccatctgattattctccatgaagaaacactgagattggctgccaatgtgacagaaatcgatgttctactcctatataaagatatatgcgaccatgaggaaaatgagaaccaactctgatgttgataataatgtaatatcagcggctgcatctttatgtctgagatgcttctggctggggacgcacatatcatgcttcaacttaaagatttatctataatttgaagtatgatggtgattgcttcctgatgctcaaggaacttgacta

SEQ ID NO: 170093 - DNA, 1249 bp, Zea mays
  Clone ID: MRT4577_86709C.1
gcgggggctcccggtgactcgctggttccgcgcctgcgtggggtgcggagccccgtgcggtccatccggatgctccgcgtgcacggcacgttcccgtccttctcgcccgacggggcgcacatcgccgtcaacggcgacttcttctcgacgccgggcgtcagcgtgctccgctccgacggttccaggcggtggacggtgagcaaggagcccgacctgttctacaccacctggagccccacggagcggggggtggtgttcacgtccaagggccccatcttcgagaccccgaaggcgacggtccggatcgcgcgcgtggagttcgacccggccgacctcacggacgacggccgcggggagggtgaggtgcgcgccacggtgaggccggtgggccggccggaggccggcaacgacgcgttcccggcggtgtcgccgtgcgggcggtggctggtgttccggtcgggccggacggggcacaagaacctgtacgacgtgtccacggcgcgcggcgaggaaggcggagtccggcggctgacggagggcgagtggatcgacacgatgcccagctggtccccggacgggagtctgatcgcgttctcgtcgaaccgtcacgacccggcgaacccggccgtgttcagcatctacctggtgcggcccgacggctccgggctgcgccgcgtgtacgtggccggggcggagggcagcgcggaggcggacaaggagcggatcaaccacgtgtgcttcagcccggactcgcagtggctgctgttcacggccaacctgggcagcgtcgtggcggagcccatctcggggcccaatcagttccagccgtacggggacctgtacgtgtgccgcctcgacggatcggacctgcgccgcctcacctgcaacgcctacgagaacggcacgccggtgtgggggccagcaagcgccgggctcgggctggagtcgctgtccatgggcccgcccgccggggaggacgccttgggccagttcgacgagccgctgtggcttacctgcgacgtctgatggtccttttgtaattaataatgtaagaataatgacgctgcattgctgttgaggacggccttttgtttgtttcgttgctgaataaaaaaggacgtgctgtacgttcgaaaaaaagagcgaaggaataaagaggtgtttgcttgtgtggactccaaaaaaaaaaaaaacaccaagaaaccaactgatctattaccaaacaaatggggggttgaagccatcttgg

SEQ ID NO: 170094 - DNA, 156 bp, Zea mays
  Clone ID: MRT4577_8670C.1
acacaggtcttattgagagcggcggcgccgccctttccccggacgagactcccaggacagcaacagtctgccgactggcaggttagacgtacgccacgcatcgggcttcttattagcgcgactatgccacgatgcgataacacatttcgatgcccc

SEQ ID NO: 170095 - DNA, 416 bp, Zea mays
  Clone ID: MRT4577_86710C.1
ataataaattgtttttttgtttttatttgttttttttctaaaatgcacaactgcaaagaaaccatcatgaatgcgccggcggtttatagttccccgttactgacccgaaaaaagaggggggcggggggtttgactaccaccccccacaagaccagacctggacaaaaacacccactacgccccccgcggggtgaatgcatccgccctgggcccgaggtttttttgaggggggagggtgttcctcccaacaagcacgagcgcgggcctatctctgggagaccctggcccccttaaacaccgagcctggagaccccccggtggggagggaccttctaaaaaaaaaaggacccgaagaaaaaaaaaaaagcgcgggccaccttggggaaatcccggggggaaaaaaacaaaacctgggg

SEQ ID NO: 170096 - DNA, 268 bp, Zea mays
  unsure (1)..(268): unsure at all n locations
  Clone ID: MRT4577_86711C.1
ctcactcgtccggataaatcctttccccctccatttcatttcatctnctcgaaatatggtagtcgttgatccgatagctgtctcctctgcgcaccagttcaccgtggtcatcgacggcttcgagacgatcgtccacgaggtcgttctccggctctacgtctgctcggtggccgttgtctgctcgggcttcctcgatgttatccgtctccagctcgtgtgtgtgcgcggcttgggctggggctacgtgcgcttctccctgtgcctgtac

SEQ ID NO: 170097 - DNA, 184 bp, Zea mays
  Clone ID: MRT4577_86712C.1
ttgttttttttttttttttataaaataggacttcatctcttgtcacctgttaacccaagctcaccctcaagacagatgttgtgcggcgttgaggctgaggctatcataatcaccgccagtcaggttctaaaaccatagttatgacacatgccgccactcgaaaatgtgcacgacccgcataagc

SEQ ID NO: 170098 - DNA, 125 bp, Zea mays
  Clone ID: MRT4577_86713C.1
ttttgtgtttgttaaggaaagatgacactcgcttttatatgcaagtaaccaaagtctggaagaagctatgatgaaaggtacgaatataggacatgaaaggaaggaatataggagatgatggagag

SEQ ID NO: 170099 - DNA, 864 bp, Zea mays
  Clone ID: MRT4577_86714C.1
ttttttttttttttttcactcattgcatcaaaaaaatgaaatactatttttcaccgctgcgaattacagtacgccaagatctgttctttgacgcggtacaattttcgaataacccaatcaaaataggagattacaacaaccggtttagcacaacacatactgattgatccgttgagttctaacttactgttttttctgtttgaattccccgtaaaaaataccaaaaaacgcaataagcagcgagcagagctctgcagctcagcgtcttccgcgctagggcccggcttcgcgctcagaaccatcatcagagtcgtcctcgaattcatcgagatcctcgtcgtcgaagtcgccgtcgaagtcgtcgtcgaagtcgccgtcgaaatcgtcgtcgaagtcgctgtcgaactcgccgtcgctgcccatagcctcgagctcatcctcgtcatcatcctcgtcctcgatcaccgccttccggcccgcaccaccgcctgccgcgtaaccgcgccggaggcgcaaagcagcagcctcggtcgtaggctgcataacaaacctagcattggtagcggtcgccgccaccaccaccggccggagatgggcaagggagacggggcttggagccactgccgccgctgcggcggagaggcggcgcagtgcgagcgcggcggcgcggtgcatagccatcggctttatgaagtgtgaattgagggggcggcggcgcgggcgcgtaaagggaggcggcgtctagggttttggttttggcggaggatttaatggagcgggatgcgcctgctgcaagttgaaggaagtttccagagacacacacaaagagggttcgcactctcggttccccggccggcctcgagg

SEQ ID NO: 170100 - DNA, 449 bp, Zea mays
  Clone ID: MRT4577_86715C.1
atttttgttttttttctttttcttcgcttcgtcactacgttatttggtgtttttctaacacatgaaattgtacttgggggcacttttaacacatgaatctggcatgcctttgctcctcgggaggcaaaactgtgtttgaggcccgacaccggagaaatacactcaaaagacgcatcatttgcgaactgttcacccgcacaactctccattggggaacggttcggactgtacaaaactgctagtgttaacaggtagggtttatccctattgcgagttgaaaaaatttcgctgtttcctttccgaactttaacgacgctttttttttaccttgaaatctcttaccacccctggagacaccccggatttccctaccgggacttggaggtgaaccagctttacctatagggagtggtgttagatgttggcatatacaaggccttagctgtttc

SEQ ID NO: 170101 - DNA, 252 bp, Zea mays
  Clone ID: MRT4577_86716C.1
tttgctgcactgacctcgtcaagctcaacctctcggacaagaccgagtgagatgagcgtggaatacatatggatcggtggatctggcatggatcccaggagcaaatccaggaccctctcaggaccagtgacctatcccagctcgctgccccactggggctacgagtgctccaacacggattaggcgcccggcgaggacacggaggtcatccctgtaccggatgctatcggtacagacccaatcaagaggggc

SEQ ID NO: 170102 - DNA, 678 bp, Zea mays
  Clone ID: MRT4577_86717C.1
gccggccggtttcgggaccactccactcatcaccagctgccattgccatctactgacctgtgacctccgcattcccaaacagcccgagcgagcgagctagcagagcggcggcaggcacctccctcctcaaggaacatggcccgcacgcagcagttggcagtagtggcgaccgccgccggcgtcagcggcctcaacgccggtaacgccgccagcatcccctccaagtgcggcgtcagcatcccctacaccatcagcacctccaccgactgctccagggtgaactgaaccctaaacgacgacgacggcgccggcggccgcctgaagacgatccatatctatcccgccgtcgtcggcgcccgcggatcggaccgtcatgaccatatctacctacgcatgatcactacttgaatgtctactactgctacgtactactactgaataaaaaaacctctccgcgcacatcgtccttgtgtttgtgtgtgtgagagagagaggagacggagagccggccatgtccttttggctgtttgtttggtttatttttgagttcatgcggtctttatttatttccatgtacgctgcttcctcgtacccactttaaatttgtaccatgcatgcatgttccttatgatacactcacctctttttgtttgcaaaaaaaaaaaaaaaaagggcggc

SEQ ID NO: 170103 - DNA, 513 bp, Zea mays
  Clone ID: MRT4577_86718C.1
agccagccatccgccgttgggacttattttgttgggacaacaaaccaatgcttcaaagtttaaacgtacacccacaacgggggggtgggtgcgtggtgcttaccaaacacaaatacgtcagttgtgaaaacagaaaccgggttacaataacttaaaaaggtacatcacgcccacattaactttgcacctttcagggataataccaggctcgctttggttcggcatcagtcgccgaatagagtaaagagcagcaggttctgcacgaacgtggctttgacccgggcttgctttcgcttaaacttccttttttcacttgggagcgacgaatcgatacttaactttcgggcctgagcgggcgctttttttaccgtcgttgctttatgaggaatggaaacaggccatttggatgcttgctccccgtttgagggggggaagccaaggccgaaccaccacagaagagggtctgcccaaatgttcggggcccttctgctgctgctgttgtccctggatttt

SEQ ID NO: 170104 - DNA, 502 bp, Zea mays
  Clone ID: MRT4577_86719C.1
tggtcgggaccctcatcaccagctagtagctctagcaaagcacttgccatctaccgaccgccgcattccaaacagcccgacgagctagcagagcggcaggcacctcctccaggaacatggcccgcacgcagcagttggcagtagtggcgacagccgtggtggccttggtgctgctggcggcggcgacgtcggaggcggccatcagctgcgggcaggtggcgtcggccatcgcgccctgcatctcctacgcgcgcggccagggctcagggccctccgccggctgctgcagcggcgtcaggagcctcaacaacgccgcccgcaccaccatcagcacctccaccgactgctccagggtgaactgaaccctaaacgacgacgacggcgccggcggccgcctgaagacgatccatatctatcccgccgtcgtcggcgcctgcggctcggaccggcatgaccatatctacctacgcctgatcccgacttgcatgtctactactactac

SEQ ID NO: 170105 - DNA, 365 bp, Zea mays
  Clone ID: MRT4577_8671C.1
ggcccctctggggacccggcccgagatttcccggtccacccacgcgttccgcactatgaaagcctgatgctgtcgttcttcgtgttctgtaagatcactttcctcccttgttcttagaaaatgtgcaagtctttaatgagcgatggcaaccgagagagaaccctcaaaagcagctgaagatggggctaactggcataaacgggacaaacagaggatgctttttgcatgctcaccgggttggggatctggaccgcactaataggtactacacagaatgctgtgggatgatactgctcgggcaaagggatgttcttgatgagaagtgctccaacggcttccttgggtttaggcccacagaacaccaa

SEQ ID NO: 170106 - DNA, 438 bp, Zea mays
  unsure (1)..(438): unsure at all n locations
  Clone ID: MRT4577_86720C.1
cgcggggctagtttaagttttacatgatggattccacgatacactacgcggctcgcgctttcgtccgcgtccctganataacaagttcagcgccaacccggcgcggacgcgtgaaaattccttatagaacagcacgacctgtgccgatagcaacgggggtcaatggtcgccttgtgagggggagcgcccccccctttgctctgcccttccttggaggggagccgtgggatctgtctggctttccccggccggttcctttttcacgtacggataggataggataggagatcgaaacctgggccccgctttcggtagaaacttgagtcgattgttactcagctccatgaaacggcccacgacacgccatgagggttggctgtggtcagttccaaaaacaaaaatcccaaaaaacaaaaaaataaccgctatgggccgagc

SEQ ID NO: 170107 - DNA, 932 bp, Zea mays
  Clone ID: MRT4577_86721C.1
cattgggaccctcgaggccggccgggctcaccactcatcaccagctagtagctctagcaaagcacttgccatctaccgaccgccgcattccaaacagcccgacgagctagcagagcggcaggcacctcctccaggaacatggcccgcacgcagcagttggcagtagtggcgacagccgtggtggccttggtgctgctggcggcggcgacgtcggaggcggccatcagctgcgggcaggtggcgtcggccatcgcgccctgcatctcctacgcgcgcggccagggctcagggccctccgccggctgctgcagcggcgtcaggagcctcaacaacgccgcccgcaccaccgccgaccgccgcgccgcctgtaactgcctcaagaacgccgccgccggcgtcagcggcctcaacgccggcaacgccgccagcatcccctccaagtgcggcgtcagcatcccctacaccatcagcacctccaccgactgctccagggtgaactgaaccctaaacgacgacgacggcgccggcggccgccttaaaacgatccatatttatccccccgttgtcggcgcccccggatcggaccgtcatgaccatatctacctacgcatgatcactacttgaatgtttactactgctacgtactactactgaataaaaaaaacctttccgcgcacatcgtccttgtgtttgtgtgtgtgaaaaaaaaaggaaacggaaaaccggccatgtccttttggctgtttgtttggtttatttttgagttcatgcggtctttatttatttccatgtacgctgcttcctcgtaccccctttaaatttgtaccatgcatgcatgttccttatgaaacactcccctctttttgtttgcaaaaaaaaaaaaaaaaaaaaaaaaaaaaaaaaaaaaaaaaaaaaaaaaaaaaaaaactcga

SEQ ID NO: 170108 - DNA, 330 bp, Zea mays
  Clone ID: MRT4577_86722C.1
cgtgagaccacaagcggaacggggaccaacttcgcccaccccagtaccgaggcgacaacttaggcagcagagacctcactttgacactcctggacccacgctacacccggatcctcacaaccctcaacgcacctctaaacaccctccatagctttaggactatactaagaagttaagaaagagattcagatctactttgtcttcgtgacaaagatatccatttaaaaggtcacggaagacgtcgtctaattggagttgacgaacctccaggacagagtcaagtttgacaagtcaaaagttctaattgaagtaaacgacaaggacaacacc

SEQ ID NO: 170109 - DNA, 731 bp, Zea mays
  Clone ID: MRT4577_86723C.1
gccggccgttttcgggaccactcatcaccagctgccattgccatctactgacctgtgacctccgcatttccaaacagcccgagcgagctagagctagcagagcggcaggcacctccctcctcaaggaacatggcccgcacgcagcagttggcagtagtggcgaccgccgtggtggccttggtgccgccggcgtcagcggcctcaacgccggcaacgccgccagcatcccctccaagtgcggcgtcagcatcccctacaccatcagcacctccaccgactgctccagggtgaactgaaccctaaacgacgacgacgggcgacggcggccacctgaagacgatccatatctatcccgccgtacgtcggcgcccgcggatcggaccgtcatgaccatatctagctacctacgcatgatcgtcacgacttgcatgtctactactgctacgtgtactactactgaataaaaaccctctccgcgcacgtcgtccttgtgtttgtgtgtgtgttgagagagagaggagacggagagccggccatgtccttttggctgtttggtttatttttgagttcatgcggtctttatttatttccatgtacgctgcttcctcgtatacccactttaaatttgtaccatgcatgcatgttccttaaaaaaaaaaaaaaaaaaaaaaaaaaaaaaaaaaaaaaaaaaaaaaaaaaaaaaagaaaaaaaaaaaaaaaaagggccccta

SEQ ID NO: 170110 - DNA, 574 bp, Zea mays
  Clone ID: MRT4577_86724C.1
gaacgagaaaaccagtgggggggggggaggggcagtgggtgctcatggcaacggggcggacgccgaccaacattgcggtgatcaagtactgggggaagcgggacgaggcgctcatcctccccatcaacgacagcatcagcgtaacgctcgaccccgaccatctgttgggcggggccactatcgccgtcagcccctcattcccttccgaccgcatgtggctcaatggcaaggtgtgtcatcgccaggaccccttctctggtcgctaatttgtctctaccgctgcttcgtcacctccgtggtctgttcattagggagggaaaaaacactacagactggtttggtggacaggtaaatggatggtccatgacggaggaatctaatcgctatttaattttgaatagggaggggattcctgccccgccccatgaatcctctccattttcatgcccaccaaatcagcactacatgccttttgttttttacgtgtcactctggaatctggacgttgactaagtggcagataaaaaattctagtatataggactttgatttgacgataaatggtataaattca

SEQ ID NO: 170111 - DNA, 481 bp, Zea mays
  Clone ID: MRT4577_86725C.1
cgcgtacgcggacgcgtgggccaccagctgccattgccatctactgacctgtgacctttgcatttccaaacagcccgagcgagctagaggtagcatagcggcaggcacctccctcctcaaggaacatggcccgcacgcagcagttggcagtagtggcgaccgccgtggtggccttggtgctgctggcggcggcgacctcggaggcggccatcagctgcgggcaggtggcgtcggccatcgcgccctgcatctcctacgcgcgcggccagggctcggggccctccgccggctgctgcagcggcgtcaggagccttaacaacgccgtccgcaccaccgtcgaccgccgcgccgcctgcaactgcctcaagaacgccgtcgccggcgttagcggcctcaacgccgccagcattccctccaagtgcggcgtgagcatcccctacaccatcagcacctccaccgactgcttcagggtgaactgaac

SEQ ID NO: 170112 - DNA, 872 bp, Zea mays
  Clone ID: MRT4577_86726C.1
cactccttagggcaattgggttcctcgaggccggccgggaccactcatcaccagctagtagctctagcaaagcacttgccatctaccgaccgccgcattccaaacagcccgacgagctagcagagcggcaggcacctcctccaggaacatggcccgcacgcagcagttggcagtagtggcgacagccgtggtggccttggtgctgctggcggcggcgacgtcggaggcggccatcagctgcgggcaggtggcgtcggccatcgcgccctgcatctcctacgcgcgcggccagggctcagggccctccgccggctgctgcagcggcgtcaggagcctcaacaacgccgcccgcaccaccgccgaccgccgcgccgcctgcaactgcctcaagaacgccgccgccggcgtcagcggcctcaacgccggcaacgccgccagcatcccctccaagtgcggcgtcagcatcccctacaccatcagcacctccaccgactgctccagggtgaactgaaccctaaacgacgacgacggcgccggcggccgcctgaagacgatccatatctatcccgccgtcgtcggcgcctgcggttcggaccgtcatgaccatatctacctacgcatgatcacgacttgcatgtctactactactactgaataaaaaaacctctccgcgcacgtcgtccttgtgtctgtgtgtgtgtgagagagagaggagagccggccatgtccttttggctgtttggtttatttttgagttcatgcggtctttatttatttccatgtacccagtacccaccttgtaccatgcatgttccttatgatacactcacctctttttgtttgcagaaaaaaaaaaaaaaaaaaggccccta

SEQ ID NO: 170113 - DNA, 860 bp, Zea mays
  Clone ID: MRT4577_86727C.1
ccctcgaggctgccggaccctcatcaccccagctgccttgcctctactgacctgtgacctccgcatttccaacagcccgacgacgagcgagctagcagagcggcaggcacctccctcctcaaggaacatggcccgcatgcagcagttggcagtggcgacggcggccgtggtggccttggtgctgctggcggcggcgacctcggaggcggccatcagctgcgggcaggtggcgtcggccatcgcgccctgcatctcctacgcgcgcggccagggctcggggccctccgccggctgctgcagcggcgtcaggagcctcaacaacgccgcccgcaccaccgccgaccgccgcgccgcctgcaactgcctcaagaacgccgccgccggcgtcagcggcctcaacgccggcaacgccgccagcatcccctccaagtgcggcgtcagcatcccctacaccatcagcacctccaccgactgctccagggtgaactgaaccctaaacgacgacgacgggcgacggcggccacctgaagacgatccatatctatcccgccgtacgtcggcgcccgcggatcggaccgtcatgaccatatctagctacctacgcatgatcgtcacgacttgcatgtctactactgctacgtgtactactactgaataaaaaccctctccgcgcacgtcgtccttgtgtttgtgtgtgtgttgagagagagaggagacggagagccggccatgtccttttggctgtttggtttatttttgagttcatgcggtctttatttatttccatgtacgctgcttcctcgtatacccactttaaatttgtaccaaaaaaaaaaaaaaaaaaaactcgagggggggcc

SEQ ID NO: 170114 - DNA, 980 bp, Zea mays
  Clone ID: MRT4577_86728C.1
aaagggtttggtttgagaaaaaattgtcccaagattggattgcttgttaaagctcaatattgttattgaaaaaaaaaaaaaaaaaaaaaaaaaaaaaaaaccactccactcatcaccagctgccattgccatctactgacctgtgacctccgcattcccaaacagcccgagcgagcgagctagcagagcggcggcaggcacctccctcctcaaggaacatggcccgcacgcagcagttggcagtagtggcgaccgccgtggtggccttggtgctgctggcggcggcgacctcggaggcggccatcagctgcgggcaggtggcgtcggccatcgcgccctgcatctcctacgcgcgcggccagggctcggggccctccgccggctgctgcagcggcgtcaggagcctcaacaacgccgcccgcaccaccgccgaccgccgcgccgcctgcaactgcctcaagaacgccgccgccggcgtcagcggcctcaacgccggtaacgccgccagcatcccctccaagtgcggcgtcagcatcccctacaccatcagcacctccaccgactgctccagggtgaactgaaccctaaacgacgacgacggcgccggcggccgcctgaagacgatccatatctatcccgccgtcgtcggcgcccgcggatcggaccgtcatgaccatatctacctacgcatgatcactacttgaatgtctactactgctacgtactactactgaataaaaaaacctctccgcgcacatcgtccttgtgtttgtgtgtgtgagagagagaggagacggagagccggccatgtccttttggctgtttgtttggtttatttttgagttcatgcggtctttatttatttccatgtacgctgcttcctcgtacccactttaaatttgtaccgatgcatgcatgttccttatgatacactcacctctttttgtttgcaaactgtgttacgcatgcgctgcaggcat

SEQ ID NO: 170115 - DNA, 842 bp, Zea mays
  unsure (1)..(842): unsure at all n locations
  Clone ID: MRT4577_86729C.1
ataggaaaagctgtgccgcctgccggaaccgtgcctcatttacagcgtccacccacgctttctgtgtggcctcttgcagataattgggaaatgccaaaagaaactgttaaagaaactgacgaaggtgggctagtcaggctgaagtatacattcaaatacggagacacattcgttgagccagatgatgattggctaaagagcattgagaatgtaagtgatgaattgcttggggtatattcgaaggccgaagacactgcattgtcagcggccttcggaggccgaaaaaaagaaaagactcaaccgagtgtttgatgctgtcgggtttgtctaccccgactaccgatatctagtgcgggggcaaaaaagaaaaggcacaactgctgcgaaagaaagtgcttcagctgctcctagcgagccagcgccgaagagaaaaagggtaaaagttctcacacaccggccacgctatactgaaccagccacagtgcctgagttcgccggtgagacctcttcggccaccgaagctaaagaaccaaccctgctgccagaaatcaaagagttggccgaagtgccagtaacagaaaagatggaagaaccaaagactgaagaagcaaaaacatcagctgagggagtaaaaatatcagaaattttaagtccttcaggagaaaattgaagtagcaaaaattaaaaaggggccaacagtgaccccaaaaagaaaaagaatggttaatgtgtaagatggttntggagacaattaaatcttcaagcataactccaaagaagactgctgaaacttctgaagcgtctgatgaggcatctgtcgctgaagctttgaaacaacagac

SEQ ID NO: 170116 - DNA, 251 bp, Zea mays
  Clone ID: MRT4577_8672C.1
ccagatctgctccatcctcaccccacataagccagctcaagagcatggttcgtcaagttagcagtgctggtgctcaaagttccttgggttatctcttttgcaatcaataggcccctgccacaaaaccgtcaacaaacaatgccccagcccaacctgaattgcaccctgtaaaacaatacgcccttcttcaaaaaccatttcctactactaaaacaaatagacccctaacaaagccttcccgtaataaaaca

SEQ ID NO: 170117 - DNA, 1188 bp, Zea mays
  Clone ID: MRT4577_86730C.1
aattcggcacgaggcacgatttctctcgggtaaagccaatgcttagatgcctcgggggcgcaacgccctcgacctacgtctcaaactttaataggtaggacggcgcggctgcttcggtgaagccgtgccacggaatcgggagctccaagtgggccactttttggtaagcagaactggcgatgcgggatgaaccggaagccgggttacggtgccaaactgcgcgctaacctagaacccacaaagggtgttggtcgattaagacagcaggacggtggtcatggaagtcgaaatccgctaaggagtgtgtaacaactcacctgccgaatcaactagccccgaaaatggatggcgctgaagcgcgcgacccacacccggccatctgggcgagcgacatgccccgcgagttcagtgacctccgcatttccaaacagcccgagcgagctagagctagcagagcggcaggcacctccctcctcaagggaacatggcccgcacgcagcagttggcagtagtggcgaaccgccgtggtggccttggtgctgctggcggcggcggcgacctcggaggcggccatcagctgcgggcaggtggcgtcggccatcgcgccctgcatctcctacgcgcgcggccagggctcggggccctccgccggctgctgcagcggcgtcaggagcctcaacaacgccgcccgcaccaccgccgaccgccgcgccgcctgcaactgcctcaagaacgccgccgccggcgtcagcggcctcaacgccggcaacgccgccagcatcccctccaagtgcggcgtcagcatcccctacaccatcagcacctccaccgactgctccagggtgaactgaaccctaaacgacgacgacgggcgacggcgggcacctgaagacgatccatatctatcccggccgtacgtcggcgcccgcggatcggaccgtcatgaccatatctagctacctacgcatgatcgtcacgacttgcatgtctactactgctacgtgtactactactggataaaaaccctctccgcgcacgtcgtccttgtgtttgtgtgtgtgttgagagagagaggagacggagagccggccatgtccttttggctgtttggtttatttttgagttcatgcggtctttatttatttccatgtacgctgcttcctcgtatacccactttaaatttgtacc

SEQ ID NO: 170118 - DNA, 173 bp, Zea mays
  Clone ID: MRT4577_86731C.1
tcgatcagatcgtcatgtatacagccgggtgttcactcatgagagacgggtgacgatggtgtacctacgcgtggcaatcatactcatgggactactcctggtaacaggcaccaatgggaggatgccgtcagaaggccagttacagccgtcagctttcgcaatatcatgagatc

SEQ ID NO: 170119 - DNA, 279 bp, Zea mays
  Clone ID: MRT4577_86732C.1
gaattcccggcgctcgccagacggacgattgaggctgttgatttgacgcttttttttactcgcatgccgtagtttcaaaccaggtgagggcattttgccggacgcgcctgactaaatacgaccacgggagccacactccgcgcttgctttgctgccggggcatggacagagcgctagctcgcctacccatcgcgatcacacagccctattccgcagcgagtacaaattccctgctcgtctgcttgcacggtgcaggcggtcagatcttgaccgaattta

SEQ ID NO: 170120 - DNA, 386 bp, Zea mays
  Clone ID: MRT4577_86733C.1
tcatacgctcactcgtggtctgacacatacccgaacttcacattccaaaccctactctggaacatggtgaacttttaacagagcttgatcttatgctaactcctccatcaatatcaccattttccacaccaaacacacattaaaccatgcattcactccactactccagattaatctttcacacatgctctaaaacatacttacttgcactccgcccatcctacattattcttttctcttaatactcctctatccatctattatctacttccttcaacccttttcataacaacctttttacatcacaaaaactcaatcctattaatccaatcattatacacaataccttcactacaactactaatctattattacactaataatat

SEQ ID NO: 170121 - DNA, 307 bp, Zea mays
  Clone ID: MRT4577_86734C.1
ccgtttagccattattcgagttaaacagggcattaaacgggtgaaacagcgaattaaattggataaacgggcaataaaacggaagcggcgtaccaccatgtagtgttcacatggtgtttaaacgccattgaggtgaacagtgcctgtgagctagttattgtggttcagattgcacaatgcatgcccttttgccacagtattggcgtatttgataggatatcagcatatacattattcccttcgttctgtaatctccattggttagtactccagcacagtgtccaaggaacgaggtacttctacccgg

SEQ ID NO: 170122 - DNA, 410 bp, Zea mays
  Clone ID: MRT4577_86735C.1
ggggaaccaaacccacgacaggcccttttaaaagggggtatggaaaacagttcccaaggccaaacaaggggtccccgaacaaagggtttaaaggtccccggggcaaaagggggccctaacccccccgcggaaacaaaaatggttggcccacaaaaccggggcgggggaaattttaaaaaaaaaacaggccccccttaacgttttccttgaaaggggggaggggccccaaaaaaacattcgaaaacccaccccggggggggccccccccgggggggggcccacggttgggcaaaaccccccccccccaaaacccgggggacctggaatggggccccagggaaaaccccccccgggaggcggcccaaggaccttagttgcgagaaggaccaatgggaactgggcggggcccc

SEQ ID NO: 170123 - DNA, 289 bp, Zea mays
  Clone ID: MRT4577_86736C.1
cacatattgaaatagcaaatagaaatgtgcaggagcggagagacagcgacacctggttcttaagcaaattctagattggaacaattagaagatctgactgatgttaagagtggccagaggaaagtgagaggcgtccatttccagcagacacaatggaggctgacagaggcaggagcctacccctggccacaccacctctgggacacggcacccccctgggcctggagggagagggccaatccagacacactcacactctcatctctttccttggctggaaacaagtgca

SEQ ID NO: 170124 - DNA, 176 bp, Zea mays
  Clone ID: MRT4577_86737C.1
tttgaatcttggtctccctccttgcaagaggggtctttttaaatattattggggcaataaattatttgtttacctcatggaagcgcttaggccttatttcattatcacatttgatgactagaccctattctttttccagtaaagacctcaaattttacttacactattattggact

SEQ ID NO: 170125 - DNA, 399 bp, Zea mays
  Clone ID: MRT4577_86738C.1
cggacgcgtgggggtaaaagcgacaccgatggcgggccactcaatcatgacggacctccagtctacccgggccactggtggtggacgcctatcgagacactacacagagccgggagcctaccaccatgatgatacaggcattataaagccatgccagagctcgaagttgaccaccaagacatgacaagaaccctgtacaaataactgttgcaaccactccggccagcacttccggatctgcctactatgatacaacggccactacctcctgagaggagatgttggagccccacaacctccgaactgtagatattcaggggagcatacgccacaaccatagcctgacgagttgcccaccttatctaggggggcctaattacgtgactcctacgatatcaa

SEQ ID NO: 170126 - DNA, 259 bp, Zea mays
  Clone ID: MRT4577_86739C.1
tggggcaaaaactgaaatggctttaattaaacacccaggggtctgaaacctgcatccatcctttacccaaaaaaaagaccccctgggggcccattaaccccacaggggtttacctaggttggagttcaaccaccatgcatggggcttaattaggggccctaggtgggtatttgctaattgactcttttggaggtcttccttatttgtcccttgttggggcccgtcagcggtgggatttcccccattttggacatgcccc

SEQ ID NO: 170127 - DNA, 593 bp, Zea mays
  unsure (1)..(593): unsure at all n locations
  Clone ID: MRT4577_8673C.1
attctcacaacacatgacacgccaccatttgtttcacaaacatcactcgtatttgtacatatcccaatcggactagttgttgataccaaaccataatttgtctgtccagatgaattttatgctctgcgattgctaggtgacggggcaacagagcaaaaaattgtgtctcgcatctaaaattcattaaaaacaacacgaatgctgcggttatatactgtaatggataatgacttgtgtgatacgtattcagatcatctccaggtccaggagcacatcatcaccatcatcaccgaaacaactctgggaaggaccacatgatgaaccttgcatagatgtcgttctccaggaactctatgtgcgcagctctgccgatcatggtgttcaggttccgtccttgggcggactggtcgaatatcacgtcacaacgcatgaatacccgagtttccgacgttggtgcccggatctggtccaagcaattgttcagcatctcagtgaacacctgcccgcgtttcgagttatctgacgacgaggcgtggcagaggtcgattcttgctgaatggtatgnggacgtaaccatcctgcggtgacgatcc

SEQ ID NO: 170128 - DNA, 192 bp, Zea mays
  unsure (1)..(192): unsure at all n locations
  Clone ID: MRT4577_86740C.1
tctctcctggaggaattcaagagcacanatagtaatcatatgagctctccgaatagctgccatgttgtgagttagtgctgtcatatgggagcggtcatacaacagaactagaacagcagactgagaaaggacatggttttcaaaatttgctaagcttacataatgactgtgtttggaatatgtgccaaagtt

SEQ ID NO: 170129 - DNA, 2013 bp, Zea mays
  Clone ID: MRT4577_86741C.1
atctggcagcattgttgctgtccgaggggagccgccctctctctctcctcgtgctccgattcgtgggctcgagctccggtgactaggaacagcggcaaggaaacaatgcttctttctcccttcgcacctttgtgatgcactgaacactagtcaggagctctagtaatcctctaatggccgaatgttcattggcaacgctgagagtgagaggccagtatcaagggagatggacctggtccaacagcaagctgaatatgccaatcatggatccaaagaggaactacgccctcaagattcatcttccatgccaatccaaagcagcaagagaatggacaagtgttgcatttaccccttttggttttcatggaagggatcacagggtggaaacttcagttaaatgttactgtttgcagccactcatggattcggagagcatggtctcaccaaatctaatactgatttcggatgaagctcttctcactatcagcatggtttttgcatatttggctggagttgtaccctctgggcagacatctcctcgtgtcagaaatcagaatgtttctcaacatattccagagccaagctcctctcattctggtagggacctaaagttcttgcctgaaaggaatgctgcatttgaccccaacgatatgtggagtgaagtgagtgctaaactttccaaagccttacaagcacatgttcaagatgcccttttggatagccgagaggatggactcatgagtgataggaaaaactatcctttgagtatgcttgccattcatgctggtcccagattgcggcttcttctgatcacattccagcttctggaaatggaggtaagaaatatctctggaagttctgaacttgatggaatcaggtggttgcaagtatcaactaccttgatagatagtttaattcaaccagtatttatgaaatggattgaagaagaacaggccttggaaaatggacaaatcaacgaaaaacttatgaagacgataagcagcaaactaaaggagggcaataagatcttgaggaggtttaacagatttgggaaatctgaactctatttggatatgctctttttcctaagatttggttctgcaaggtgtgacagttattttaatgtcaaatttcttgctgaacatggagaaagaattttagaggaccttgttatttccttagctgatgtgattgctagtatttatctggagcttatgtcagtggatggtgatatgtctgctgaagttgttggttccagcttggttctatgttctctatcaaccagagaactccaaaagctgcgcaatgaggtggcaattaattggtggttgcaccaatacttcaagtcagttgtttcaatgtatgaggacaggttcgagttatatgttctatgcagcaaaaaatgtgaaaaaacagccgacaatcaagctgagagggcaaattggtggaggattgcatctggcaagcctaatgtgcttactcttgattatgttaacatcagtccattttcccttccagcaagaaggacaaaggaattaagagctttgattggatggaggtattacttcagcttattcttagagttgtcagatattgccatgcccttcataagggttgctatcagcaaagtgagctctgcggtgtcctacttctgggtgtcaatgattggaaggtctcttgggctgattttctcagggattagacaatcactaggctggaaataagcttatacggtcatacctgttgagttttgagtctgacttctgggactgaatgaatgtctgttaggttatgcattgtaaatctttgagatggctgtcatttttctctggtttctttttcatcttagtgtgtaagaaagtccattgatttcgtggacggaatatgttaatctgtggattactgaaatccatgcacatccagtctttctcaaaacagaaatcatgtacagagatatgtctagatgcatttttgtttttttattcaagagggacggaacatcattttttctcg

SEQ ID NO: 170130 - DNA, 396 bp, Zea mays
  Clone ID: MRT4577_86742C.1
acacctaccgggggccgtagccctaactagccggcggaaccctccaaatcccttctgccgaggtgttcttgtacaccccacgccgaatccgctcttcctagaactgcaacacgcccggaccacagtgcatttgatccgtaccagccgtctacacgatgtccaagtctggagcgctgcatcttgctgctgatctcacagggaagaccaacaaggtggataccaaggcggccgtcaattagtatgacaaatatcctggatcctatggcgggaaggaggaagcacggaagtccatctatactgatgtggataataagatctatgataatgccactagctgatattagtatgggtgggggaaatcctttcactttgatcacagatggaatggatactact

SEQ ID NO: 170131 - DNA, 652 bp, Zea mays
  unsure (1)..(652): unsure at all n locations
  Clone ID: MRT4577_86743C.1
cccacgcgtccgcccacgcgtccgccacgcgtgcgatggaatcaggtggttgcaagtatcgactaccttgatagatagtttaattcaaccagtatttatgaaatggattgaagaagaacaggccttggaaaatggacaaatcaacgaaaaacttatgaagacgataagcagcaaactaaaggagggcaataagatcttgaggaggtttaacagatttgggaaatctgaactctatttggatatgctctttttcctaagatttggttctgcaaggtactaaatggccttctcgatccttgtagcaatttttttattcacttttttttgttgtgaaaactgcatcctattcaagagctgtacatattttggttgcatattgtgtagacttattttaaaaatattatactcctgttttttgatagtgacagttgtctagagtcaagactgttttgattctttttttccttttgttaaacaattgccttttctgaggtacataaaggcatccttattcggaatcctgacacttcctgatggcaggtgtgacagttattttaatgtcaaatttcttgctgaacatggagaaagaatnttagaggaccttgttatttccttagctgatgtgattgctagtatntatctggagcttatg

SEQ ID NO: 170132 - DNA, 1076 bp, Zea mays
  Clone ID: MRT4577_86744C.1
gaacgaggggcgctcgtggcacggcatcaaccaccaccacccggccacgttcgatacgctcgccatggacccggtgctcaagcagtccgtcgtcgacgacctcgacaggttcctgaagcgcagggactactaccgccgcatcggcaaggcgtggaagcgcggttacctgctctatggcccgcccggcaccggcaaatccagcctcgtcgccgccatggccaactacctccgcttcaacctctacgacctcgacctctcggaggtgcgcctcaactcggcgctgcagaagctgctcatccacatgcccaacaagtcagtgctcgtcatcgaggacatcgactgctgcttcgacaacgctgccgcgtccaggaacggcctggacatggaccccaactactcatcgggatcgggatcgggatcggattcctcggacgaaaactgggcccagccgcgagtcgctcccccgaaggccaggggcatcaccctgtccggcctgctcaacttcatcgatgggctgtggtccacgtgcggcgaggagcgcattatcgtcttcaccaccaactacaaggaccgcctggactcggcgctgctgcggccgggccgcatggacatgcacgtctacatgggctactgcgggtgggaggccttcaaaactctggccagaaactacttcctcgttgacgaccacaagatgttcccggagatacaagaacttctctcggcggtggaggtgacgccggccgaggtctccgagatgctgctgcggagcgaaaacggtgacgtggccctcgggattcttgcagagttcctccgggagaagagacggagggggagaaaagaaacaaaggaggagaaggacgcaacagaggacaaggatgaggaggaggtagcagagaaagctgcgtagcatagtactgtattctttaggtttcctccatggatcatttttatttctggagaaaggaatcgaaataggtcccgggaataaatagctaggccataggaacaatttattaggccttctcgtcggtactgttatcctatcgctcggttgctgcatgtttttgctgcacgtc

SEQ ID NO: 170133 - DNA, 540 bp, Zea mays
  Clone ID: MRT4577_86745C.1
gagaaaaatggatgtggatggatttcagtaatccacagattaacatattccgtccacgaaatcaatggactttcttacacactaagggctattttgaaaacctcatttttccaagagatttccattttccaatgaaaattagtttattttcacttgggaaaataggaatcacttggagaatcgagctcccaaactagccttaagatgaaaaagaaaacagagaaaaatgaccgccatctcaaagatttacaatgcataacctaacagacattcattcagtcgcagaagtcagactcaaaactcaacaggtatgaccgtataagcttatttccagcctagtgattgtctaatccctgagaaaatcagcccaagagaccttccaatcattgacacccagaagtaggacaccgcagagctcactttgctgatagcaacccttatgaagggcatggcaatatctgacaactctaagaataagctgaagtaatacctccatccaatcaaagctcttaattcctttgtccttcttgctgggaggga

SEQ ID NO: 170134 - DNA, 552 bp, Zea mays
  Clone ID: MRT4577_86746C.1
aagaaaacccctaattggtctatcgtcttcatggggcccccccagcaaattttacgggaggccacaaaaatttactttcgaaaaattttaaacgccatcccgaaaaagaaaggttaaacggaaaattaaaacggggggggccagaaagttgccttttttttcgccccccccaaaaaaggacccggggttaaacaatcttttggaaactgggggacaaccttgttttcccttgggcaaatgccccaattcaaccccggggtcgtcctggcaccccccggaaacgttgggggggcggccgaaccggccaagttgttgaagaacttgtttaatcaacggccggaacgggccgtctcccccggggcacatgaccccgagcttaaacatggccacggggtcgtaaatgaaaacggccctgtcctggatggtctcgcccacaacgtcggggaaagggccccccgctttgtacctccgccacgcccatttcacaaggaaaaaataaggggggtccttgctgctggcgttggctaccctccggggcgccagttccaggag

SEQ ID NO: 170135 - DNA, 597 bp, Zea mays
  Clone ID: MRT4577_86747C.1
tcgaagccggccgggccgggatgcaatgggaacaacgtcgagagattcgcgacttaacaatcataatggacaccggcatagatcccaaggactgccagctgctgatgcgtatgccgatctgcgcttccacacgctctactacctgacatccatggcgttcaagtgagcgttgtcgctccacgtcccgaccgccatccacaacctaggagggtctgccacgctgccggacctcgtgcccgccctggccctgccagcacccgagctactgctactcggacgcctgatgcaactgctcgctacgcttctcgtcttcgcaccatccgaccatgcgcaacaccgcctaaaaccgctgccctggctgcttctggagcctctgctactgggacgaccacacctaacagaaagacttcgtgctgcgacccctgcctccacactattggcaacgcctactaccactggccgactgtcatgagaaggagcaggaagatcaccgccagctgccgtcaccgctcgaggccctgcccggggtgcccctcgtccaccagagccctaagctgctggtccacgagatgtaccggctcctgctatgaggagtga

SEQ ID NO: 170136 - DNA, 613 bp, Zea mays
  Clone ID: MRT4577_86748C.1
gttctagatcgtttgcgatttcgccgacgcaagccgcacgccttgaccctagaaggcgtggtcctcctccttggatcccgacctcccccggggcagacccgttgaccctataggctagaggggacgcgcctctgcagctatggcgatcaacccgaccaaggcggaaaataagatcgcgtccaacacgaatctgtgcaagactgctccatgagaacaccaaagtactcatcttccctctgagacgcgacaagctcccaccatccccaaaacatacgacccggcctcaagcgcgactcgggggcgcccatgagcaagaacacgctcatcaggcgctggatcaaggtctacgcccagaacaccatcaaccacacctttgacccgctcatggacctgctcgacggcaacgttggcctcatgtttaccaagggagacctcaaggaggtgcgcgaggaggtcgccaagtacaaggttggggctcctgctcgcgtgggtctgggagatcctgacgacgttggcgacacccctggccacactgggctggatccctcgcagacctatctgttccaggtgcttaacatccccaccaagattaaacacggtactgtggaaatta

SEQ ID NO: 170137 - DNA, 253 bp, Zea mays
  Clone ID: MRT4577_86749C.1
ctctgcctgcctccgttgcggatcacatgccgaccagacatcgccgtccattcgaccgcgtgggtgtgccgagagccgacgtagcgaggcgtccaagctccaggtctcgtgggtaggatgtctccccaagacgagctaggcgaggagcggacaggagcaactgctgggccacacagagggggaagcgactgctactgacgaaagcaagagcgtatagccgaaagtggcccgacaagcccggcgggccgcctct

SEQ ID NO: 170138 - DNA, 530 bp, Zea mays
  Clone ID: MRT4577_8674C.1
acaagcttttttttttttttttttttttttttttttttcttttttttatttttttttttttttttttttttttttttttttttttttttttttctctctcttgcacttaaccccccccccaagcaaggagggccagcggccaccagggcgggccatgggccccggccgcaaccacccaaagggggacggcccccccccgggggggaattccaagggaatgcgggccgggaccaaggggtgccggcccggggcccaaaggggggtactgggggaaatgggtgtcccctgggaaaaacggacaacacgcgacccggacccaaaaaatgcaaacccgggggggccaaaggaaagcccgggggcccaaaaaggggggggaacccacagaaaacgtgccaggccgaaaacccggtttcccagcgggaaaactgaagggcccaccgcccggagaaagggggcaacccccgggggggggcggccggttaattgggcactgacccgcttcccccggaactgaccccgggggcagggga

SEQ ID NO: 170139 - DNA, 1583 bp, Zea mays
  Clone ID: MRT4577_86750C.1
attggccgggggagctttatttggtcaaaatttcaggctaccaggatcgaaaaaacaaagggccagccagcagtgtacaaaggctgcagaatatacttaggaagacaatcaaaattttactatggaacgaagggtcaacgcacgctgatcctaaaccgaatccctcttcggtttcctactgcggtggaatggcagccaactttttaatccagttcggtatatggcacacatggatataggcgcaaaatcatcagagaataactctaatcatgacgttggagtagctaagtgctcaacgcttggtcgatagtggaagcaggcaacagaaagtgtctaaatgtaattcaaactcacgcaatgatatgtaaagcatcatgagacaactgccaattggtagcaaaatgtgccgaaaggctccaacaaatgaggtaagcagaaaggacatttatttgatatgattgctcttgctgtccaatatcagtagggataatgatctagtagctccatacaataataaagacatatataacagacagggaggataaaagactaatccatcaatgcatcagaacatgcagttagcatctccattacttttcctcgcatacctgaagaaacacttcgagcaccctggtccagcacagcgaaatagaatggcattccttcagcacggagaagacagtccacccgccagtgcccaactgcccacccactgtctccagcgaggatgagaactttgagatggtgctcaccacatcaacattcttgtatttcttcgcacatggcgcctccaccatctcatacatgagaagacagtcatgcagcagccctatccagcgaacccccaataatccaaaacgaggggcagcatcgcgaggagtggagaatcgaaacgagggtggacgggatgaagcagacgcacccaccgtcgctggcaccggatctagcgtgggccttcagcacggtgccgtagtcgccgccaccggatctagcgtgggccttcaacacagtgtcgtagtcgccgccaccgctgtcctcttcctccatggcggcactgtcctgccccaagcgacgcttgtccacccccagcagcatcacgcgaagccgattgggcgagaacccattgcccctgttacaacaaagcaagcgaggcacacgcgggcgtgtcgtccacgaccgtcgctaaatcatgtgcagggccatctcgccccgatctcgcccagatctggccgacacagaacacctctgcctccaagcgccgccggagcaaagaaggaaccgatgccctagaagcggtttgtgagcgcccagatgagctcgccgtcatatcgtcggctttgagggacgtgctgccatagtggaggcgggaagaggggttggcggaggcatatgaactcatcggagtaggagcctgcggcggcgtggaacaccatcgtgcgggcgcagatcgcccagatgcggttgcgcagtgcgagacagacggaggtggatggcgaaaaaacggcgacggtgaatccccatcgtagggtttggttaacgggcttttaaatgggccaccccggccggcctcgaggtacccaatg

SEQ ID NO: 170140 - DNA, 1271 bp, Zea mays
  Clone ID: MRT4577_86751C.1
gccgagcaagcttataatatttatcacgttcattcatgagcaagaaaacagcatgttactggaggcagggctattgtcctctggatctttatttgctccaaatttcaggctaccaggatcgaaaaaacaaaggcccagccagcagtgtacaaaggctgcagaatatacttaggaagacaatcaaaattttactatggagcgaagggtcaacgcacgctgatcctaaactgaatccctcttcggctcttcctactgcggtggaatggctgccaacttcttaggcgggggatttcctcccgcaagtagcacataggcgtagaaacaacccattgcagtgctcagtgaagcgtagaagtcccaaggaaggagtctatttgtcaagaagtaagcatgagagtacttccatgccaggaaagcagaaattgctgcctgagccaagataagcaggaagctggatctgccgctcctccagcacttcgaaataaaagtggcattcgttcagcacggagaagacagtccacccgccagtgcccactcgctgtctccagcgaggatgagaactctgagatggtgctcaccacatcaacattcttgtatttgtttgcacatggcgcctccaccacctcatacatgagaagacagtcatgcagcaccccgtcgctggcaccggatctagcgcgggccttcagcacggcgccgtagtcgccgccaccggatctagcgtgggccttcagcacagtgtcgtagtcgccgccaccgctgtcctcttcctccatggcggcaccgtcctgccccttgcgacgcttgtccacccctagcagcatcacgcgaagccgattgggcgagaacccattgcccctgttacagcaaagcaagcgaggcacacgcgggcgtgtcgtccacgaccgtcgctaaatcatgtgcagggccatctcgccccgatctcgcccagatctggccgacacagaacacctctgcctccaagcgtcgccggagcaaagaaggaaccgatgccctagaagcggttcgcgagcgcccaggtgagctcgccatcatattgtcggctttgagggacgtgctgccatagtggaggcgggaggaggggtcggcggaggcagatgaactcatcgtagtaggagcctgcggcggcgcggaacaccgtcgtgcgggcgcagatcgcctagatgcggttgcgcagtgcgagaaagacgaaggtggatcgcgaaaaaaccggcggcggaattgcccggccggcctcgaggtacccaatg

SEQ ID NO: 170141 - DNA, 1097 bp, Zea mays
  Clone ID: MRT4577_86752C.1
gcccaaaaatgatgaattaaatcaagatacccagggttataaaaaattctactatcatggtgtaccttgtccatcattctgaaaacatagaaaaaatgattcaatggacgatttatttgatatcaatgcaaaaaaaattcaatctcagtagggataatgatttagtagctccatacaataataaaggcatatataacagacagggaggataaaagactaatccatcaatgcatcagaacatgcagttagcatctccattacttttcctcgcatacctaaaaatatgcaggattagttgaacatctaggcacaattgaatactaggaaatatattctaaactctccctagaattcccaaaaattcttttatgcctccacatatatattgtataggtgccaacctgatcgtgtagataaaggtgatataaacattttcatgaccagttgtttcaggcaatttataatcattgtttcatttagtttaatccagttcggtatatggcacacatggataaaaaacaaaatcattagagaataactctaatcatgatgttggaatagctaagtgctcaacgcttggtcgacagtggaagcaggcaacagaaagtgtctaaatgtaattcaaactcacgcaatgatatgtaaagcatcatgagacaactgccaattcgtagcaaaatgtgccgaaaggctccaacaaatgaggtaagcagaaatggcattcctttgaaatgattacgcttgctgcgcaataggataaagtattagataatatagcaatggccaaaaatcgtgccgactacctgaagaaacactttgagcaccctggtccagcacggcgaaataaaatggcattcgttcagcacggagaagacagtccacccgccagtgcccactcgctgtctccagcgaggatgagaactctgagatggtgctcaccacatcaacattcttgtatttgattgcacatggagcctccaccacctcatacatgagaagacagtcatgcagcacccccaccggcgctggcaccggatctagcgcgggcctttagcacggagccatactcgccgccaccggatctagcgtgggccttc

SEQ ID NO: 170142 - DNA, 723 bp, Zea mays
  unsure (1)..(723): unsure at all n locations
  Clone ID: MRT4577_86753C.1
gccacgctgtgctcagtcgcccgcagtccgctgcgtctgccgagtgcgtccggcgggcgggagatctggccgacggcgcggcgctgcagatcccctgcctgcgcgggcacggctcactgctgctgtggaggctgttgcgcgcggtggtgccgatgggctacgggtacgtggatcccttcctgccccctcagcagccacagcaggcggcatacgtcgcgccgcagcagggggactacgggcagccgcagccgcagccggctccgcggccaccggcttgcccgtactcgtcgtccgcctccgctccgccgggctccgcgtcctaccatttttcgcctccggcaacgtcccctccgccggtaagtagcccacctccggcgtcccctttaccggagccatcggcgccacctgcaccattgctgccatcgccgccgccacctgcaccattgccgccgtcgcctccgccgccagcattgtcgcctcctccgccggacgccctccctccgtcgcttccaccgtcaccgctgccatatccaacccgatcaccacctcaagccccgccgcccccgctgacgacggatcagccgcgcgttcagccccgcgtatacccatcaccgccaccgncgtccctccctcctccgccgncttccaccgtntcgccgccagcgcctgctccatccaattcgccgtcgccgtcgcctgctccagctgcacaagctccgggtc

SEQ ID NO: 170143 - DNA, 1309 bp, Zea mays
  Clone ID: MRT4577_86754C.1
gggcataaaacacattaagaaatttcataaattggtgtaagatacaacaagaagtgatctgaggtaattgtaaaatgcaagctaaccatttacatgagaactgtttcagattttacaataagatttaagagataattatttatgtactcaactatgataatggcgggtttacattttagctgttggtacatacacacaaaactttgtttcaccataacaccactggtagcaaaaaactgagttcaaaaggctcttccagcttttttaatgtagagaaaaccaccgaggtccatatttgcaaacgtaacatgaactgctaatatgaactttctttggtaatatgtcttttcaagcttgttatgactaacataacctaaagtctaaattgaatgcaaatttaagttagacgatcatattaccaaaagaaaaatatcttgagttaaaggatcaaatcccatgtgagcccgcataaaaacgataaaaaggttcaagaatatatccggaagacaatcaaaattgactaatggagcgaagggtcaacgcacgctgatcctaaactgaatccctcttcggctcttcctactgcggtggaatggctgccaacttcttaggcgggggatttcctcccgcaagtagcacataggcgtagaaacaacccattgcagtgctcagtgaagcgtagaagccccaaggaaggagtctatttgtcaagaagtaagcatgagagtacttccatgccaggaaagcagaaattgctgcctgagccaagataagcaggaagctggatctgccgctcctccagaacttcagactgagagtgccaagtagcagagtggctagcccgggtgcaatgcccaagacaagacttatggtgcttctggagaagatgtatcctagaagccccatagagaataaaagaccaccaaaagggatcccaaggcaaaagtcatggattttagcactcctcttctggggaatagcatgctcgtccacctgtaattccttcatctgatctgacctcaaatctaactcttcaattcgagcattctcatttgcacattttgttgaaagtttagcagcaaagccaaatggcttcatactgactccacttgtagaaattgaaagcttcggggaaccagactgcggccaccggcatgaggatggaactgagtaggctcgagtcccgcgatatgccaccgtggccgcagccgatccgtgcagctgcgccgccgccgccatggaagtgggacacgaaagacgaaaccgtatacgggcccggccggcctcgaaggcagaggaaggtgaactt

SEQ ID NO: 170144 - DNA, 1627 bp, Zea mays
  Clone ID: MRT4577_86755C.1
attataccaagagtagctcacagaacggtctaattgtttgcaatggcgatctcacaagctcttcatggatatgtgacaatggttcggattacaggtgctcgacctcggggagaacctgctctccggcgtgctccacccgacgctgttcgagaacctcaccagtcttttgaagtgtaagatttgttattctttagctatataatttttatttttgacttcttaagtattacaactatggtcggtgtctcttggtccacaaaatacatatgttactttcagcacatgtgcatatggccgcttaaaagttccattgctccaacactaggagtgcgcacaactggataacgtgatttcgtcatccacctccgtctgtctcgcactgcgcaaccgcatctgggcgatctgcgcccgcacgatggtgttccacgccgccgcaggctcctactccgctgagttcatatgcctccgccaacccctcttcccgcctccactatggcagcacgtccctcaaagccgacgatatgacggcgagctcatctgggcgctcccaaagcgcttcaatggcatcggttccttctttgctccggcggcgcttggtggcggaagcgttccgtgccgggccggtcggtcctcgacgggcccgtatacggtttcgtctttcgtgtcccacttccatggcggcggcggcgcagctgcacggatcggctgcggccacggtggcatatcgcgggactcgagcctactcagttccatcctcatgccggtggccgcagtctggttccccgaagctttcgatttctacaagtggagtcagtatgaagccatttggctttgctgctaaactttcaacaaaatgtgcaaatgagaatgctcgagttgaagaattagatttgaggtcagaccagatgaaggaattacaggtggaggagcaggttattccccagaagaggagtgctaaaatccatgacttctgccttgggatcccttttggtggtcttttattctctatggggcttctaggatacatcttctccagaagcaccataagtcttgtcttgggcattgcaccagggctagccactctgctacttggcactctcagtctgaagttctggaggagcggcagatccagcttcctgcttatcttggctcaggcagcaatttctgctttcctggcatggaaatactctcatgcttacttcttgacaaatagactccttccttggggcttctacgcgtcactgagcactgcaatgggttgtttctacgcctatgtgctacttgcgggaggaaatcccccgcctaagaagttggcagccattccaccgcagtaggaagagccgaaggtagggattcggtttaggatcagcgtgcgttgacccttcgctccatagtaaaattttgattgtcttcctaagtatattctgcagcctttgtacactgctggctgggcctttgttttttcgatcctggtagcctgaaattttgagcaaataaagatccagaggacaatagccctgcctccagtatgaatgtatcaacaaaaaaaaaaaaaaaaaaacataatcatagttgagtatagaaataattatctcttatatcttattgcgaaaaaaaaaaaaaaaaa

SEQ ID NO: 170145 - DNA, 510 bp, Zea mays
  Clone ID: MRT4577_86756C.1
gggccgggtcttcacaacaagcgagaacctaagaacctgtacccctaatcaccaggagcttgcccgaagaataggcggaaaggaggggaaattgtgtggagatacttcgccgtttgcggggcgatcccccgagggctgcggagaaggagagcccagcctgcctgctatcctcgagaccacctgctggccgctagccctcatactggcactcgactactcctgaagacaagccgtcccctggaaaaggagctgctcctggtcgacttccctctcgagaccctccgaaccgatcattgtccggagaacggacgcaccggaatagacgcctcggacatgctgtacactaccgctacccaaaaggatatgagggtggctccacccccggctgtgtgcactgtccgagggaaaggctcaggcatatgatccactgataacgcgatgacgtgcgtgcgcatactgactgagaagacttggactctttacgaggatggtcttggatacggcatgcga

SEQ ID NO: 170146 - DNA, 1121 bp, Zea mays
  Clone ID: MRT4577_86757C.1
ggccgcttttttttttttttttttgctttaagattgatgttatattgctttaaaattgttgggcgtggatacgtgtcacgaacgaagcctgcgtggtgcttgtgtgcagccggctgcagggatttcttttccgattttgctggccaaaatcgactggacactcaagctgggttgctaggtggtgatcagagcagaggcacagctttgataggagggaaggctaaaacactggtggtggtgaacttgtcgctgacgtcgacctggtccgccgacatgccggccggcagctgccactggaacgcgtgcaccagcgacgctagaaccagcggcaccacccgctccgccatgggcacgcctgggcacagcctacggccggagccgaacgggacgaactccagctgcttcccgcggaagtccaggtccctggccaggaaccgctccggcaggaactcgtcgggcctctcccacgccgccgggtcgcgcatgatcgcccacgagttgaagatcacggtgcaacccctgggcaccgcgtagccgcctatctgtaccccgtcctccacggccttgtgcggcagcagcacgggcgccgccgggtgcagccgcatggcctccctcacgacggcctgcaggaacggcaggcccgccgcgtcgggcctcctcgacggcgtccttgccgcccagcgcgtccctgacctccgcgcgcagcctggccatcacgcccgggttgcggagcagctcggccatcgcccacaccacggtcagcgccatggtgtcgctccctgccgcgaagatgtcgaagagcgtcagcgtcacgttgtcgcgcgtgatcttgcccgtggactggaggtctaggaggatgtcgaggaagtcgtcgcgcctgtccccgcccttgctagacgtggaggaggaggaggaggaggccaaacggcggtcagtgatgtcgtccaagacctgtaggacctggcccagttgcacggccacccggcgacgacacccctggaggtcgagcgcgctgaggaacgggaagaggtcggagacgttaggctgggccatgcactgcatgagctcctccaggagctcctgcaacccgtgggccgccgacgacgactcggcccggccgg

SEQ ID NO: 170147 - DNA, 198 bp, Zea mays
  Clone ID: MRT4577_86758C.1
tcgcctgcgctccgcattccccccatctgccgcctagatcttgtcgcgatgggcctcgccgccgccgcccgcggggtcctcttctctcctcgccgtagacgttaccatcttactgacgcggcggcgtgcatagaaggggtggttctacaagaacgagtcccgtgaaacgatgcacttcgagaacccacgaaaccggcc

SEQ ID NO: 170148 - DNA, 767 bp, Zea mays
  Clone ID: MRT4577_86759C.1
ccggccgggaccccaccatccttcccgagtcgtcctcaattcgttcccctcccgattcgccccgtcttcccaagccctacgccagcgacaaaaccctaaccggtgggatggcgacgcagccgccctctaccgccactgccgcggttgacctctatgagacggcctcgcagccggacgcccccgccgccggcgacgcctacacttttctcgagttcaacacgcagggggacgacttcgactaccccgacttcccggagctctctcaaccacctccccgatccacgccgctgacgtcctccatccccggcgccggcacgtcgtcctcgtcgtggcctgccccaccgcctccgccgtccgacgcggcctccccggaacccgatctcacgtctcaagacgtccacaccccgccggcctcctcctcctcgccgtcgccgcgttccgcctccaaggcgcgtccgtcggctgcggcggatgggctcgcctccggggttgtcgcactcaacttcgaggatcctgtaggaaccggcgccgtggaggacgggtacgactacagcaagggagacttcgtggaacacgcatgccggtactgcgggatccacaaccctgcgtgcgtggcgaggtgcaacgtaccctcctgccgcaagtggttctgtaactcgcgggggaacacttcaggctcccacattgtcaaccacctggttagggcaagcataaggaagtatgccttcacaaggatagccctttaggagaaacattctcgatgctac

SEQ ID NO: 170149 - DNA, 459 bp, Zea mays
  Clone ID: MRT4577_8675C.1
tacctcgaggccggccgggacaaattcattagccatcccctgtcgcagctatctttcactgaattgtgcgctctcccggagaaagagaaggcgctcgctgcccaccaagattcctggacatccagttgaagtgcgcagggctcctcccgctacggcaccgcagagcgcacagggagggctcagaagattgctcgcttttcacgaagaagccggtccataagcccatgcccgctgtggaatcatcctcttctccggacatcatcgacgagctctgcacgtgctatggtcctgacaggaggatctacctgccggatgcactgctggaccgatcggaggtgccggagaacctcgccggagatgtttttgaagactatggctaccacccttttgatctgggcaagaagccagatgacttcgccacgcaccacccatacgagctgatccatgccaaatgggaca

SEQ ID NO: 170150 - DNA, 397 bp, Zea mays
  Clone ID: MRT4577_86760C.1
tccttttctgctatccatatgtacacaccttgtatcagaaatgctgttatttttttttctgtggatactccacggagatgtctccgtgttgtatcccacacggcgccacgcctatctgtatctttatcggatatgtatctgacatgggatatgggggtgacatgatgtatccatgcgactcaggcttatctttgtcgctagcactcttgctgcattacttagtcgtattctattagttgaatcgtctgttaccatgtgcctggctaactatgcattcattttgcagtttggcaagacaactgaactctcaaggcgtgaaagagaggagcttgagaaacaaaaagctcatgaacgttatatgaagcttcaggagcaaggaaaaacagaacaagcacga

SEQ ID NO: 170151 - DNA, 411 bp, Zea mays
  Clone ID: MRT4577_86761C.1
atcacgctgcatgcaggatcctaggatggagcagcaggttggtcaagtgaaaactcaaatcacatcgttcacaaaatgattgttagctcctgctgaggtaccttagcagcagactctctcgtagcatgatttcacttccccaaatcattggatagcaacatctgatctgttggtgcaaagtttttcttttatttgaggtagatgggcgggtgtcatttatcaggcaaagtcttttcaagtctggcaccagtcgcaattgatagtacaaagctgagatgcaaagcagaacacatgaagccgtagtcgtcgcaatcaactcctcggcctgaaggcaggtctgcgcctccgcgagaggagcttggctgctcggcgcccgcggcgaggagctcgtccagtcgagctgccgagcgg

SEQ ID NO: 170152 - DNA, 641 bp, Zea mays
  Clone ID: MRT4577_86762C.1
ttcctgttctccgttaggtccttagatccgttggaggcacgcgcggggtgggagcaggcagggtgagctgccgtcgcggcgccgctgttcctctctgattccaggcgccgctcttcctcccagatctgccgtcgcgacgccgctcttcctctctgattcgcgccgccggtcttcctcactgtattcgagacgccgctcttcctctctggacgatcagcccgtctcgctccaccagttcatcgtcgccggcgggcagcgggcgcagtgcatcgagggcagccaaaggaggtgcggtggcgtcctgtgccaccaactcacccaggcgccacgctctgtcgtacgatgaagtggtggcgtcccgtgccaccaattcacccaggcgccttccacttccgccacttcatcgtggagctgcccatttcgattttgcatacgatgaagagtaaaataatataagcggccacgggttggatgacactactgggtggtccctgccgccgcgcgggtccacgtgcagccgctgcagggagaggagcggatgggcacgtagccgtcgtccacacgctgtcattcgtctccatcgttcctatgcgtcagcagttccaggcatggccgaaacagcgccacgctctgtgcggtac

SEQ ID NO: 170153 - DNA, 1467 bp, Zea mays
  Clone ID: MRT4577_86763C.1
aattcggcacgaggcagacgcacgcaaagtcgcaaacacaccacacgccctcacaactcccatccatccgcttcttcgactccacatcgggagccgcaagcagaaccaatgacgacgacgacgaagcagctccggcgcgtgcgcacgctcggccgcggcgcgtcgggcgccgtggtgtggctgggctccgacgaggcctcgggcgagctggtggcggtcaagtcggcgcgcgccgccggggccgcggcgcagctgcagcgcgagggccgcgtcctccggggcctctcgtcgccgcacatcgtgccctgcctcggctcccgcgccgcggcgggcggcgagtaccagctcctgctggagttcgcgccgggcgggtcgctcgccgacgaggccgccaggagcggcgggggccgcctcgcggagcgcgccatcggcgcctacgccggggacgtggcgcgcgggctggcgtacctccacggccggtcgctcgtgcacggggacgtcaaggcccggaacgtggtcatcggcggcgacgggcgcgccaggctgaccgacttcgggtgcgcgaggccggccggcgggtcgacgcgccccgtcgggggcaccccggcgttcatggcgcccgaggtggcgcgcggccaggagcagggccccgccgccgacgtctgggcgctcgggtgcatggtcgtcgagctggccacgggccgcgcgccatggagcgacgtggacgaggacgacctcctcgccgcgctccaccggatcgggtacacggacgacgtgccggaggtgcccgcgtggctgtcggccgaggccaaggacttcctggccggctgcttcgagcgccgcgccgccgcccggcccacggccgcgcagctcgcggcgcacccgttcgtcgtcgcctccgccgccgcctgcgccgccatccgcggcccggcgaagcaggaggtggtcccgtcacccaagagcacgctgcacgacgcgttctgggactcggacgccgaggacgaagcggacgagatgtcgacgggcgcggcggccgagaggatcggggcattggcgtgcgccgcctccgcgctgcctgactgggacaccgaggaaggctggatcgacctccaggacgaccactcggccggaactgccgacgcaccgccggcgcccgtcgcggacgacttcatcagctgggcggagccgtcagacgcagagctggaaccattcgtcgccgtcgccgccgccgcaggtctcccgcacgttgcaggagtggcattagctggcgccaccgccgttaacctgcagggcagttattacccgcctatgcatctaggcgtccgcggaaacgagattccacgcccgttgttggatcatcatggcgacgcgttagaaaaggggcagggatcccaccgcgtttgtaacagagaaacagaaaaagtaacaatgaaacgaatttcgttaaaagaagtccacctttccttg

SEQ ID NO: 170154 - DNA, 393 bp, Zea mays
  Clone ID: MRT4577_86764C.1
caaaaaaaagggcaggggcctttcccctggttaataaaaaaaaaaagtttatgggaaaaagattcaccaccccggggcacccttggcccccggcgggaggctaagggacggccggccccgtccggcaaacagggaaaaaccaaagggggttatgaggggggaaagggatggcaaaagggccccccaaattttggcccggccggcctttcccgttacgggcccggaacggaaccaacaacgggggcccccacaggggttaaaaataaattaaggggggccttttttttttttcccccccaggccaggaggacaggccccttaaaaagcagcccccgccaaacccagggtttttaaacagccccggttttatcgggggggggcggaccattcccc

SEQ ID NO: 170155 - DNA, 474 bp, Zea mays
  Clone ID: MRT4577_86765C.1
taaaaaaaaaaaaaaaaaaaaaaaaaaaaaaaaaaaaaaaaaaaaaaaaaaaaaaaaaaaaaaaaaaggttgtaccttttttcgaaaccacccttaaggggtttttctctccggtttggcatcccccttggagggcggtttttggcctgtttttttgagggccccaagggcgcccttttcttgcttcttattgggccctatactggcccttttttgtgtggttttacaattggtaaacccctgtttttcccccccttaatctggttaaaccccatccccctttttctaaatggggttgtaacaaaaaggcctttaccgaaatggcttttccaacatttgggccccctgaatgcgccttggaccccctttttaaccccccttttaaatcgggcgccccctggtgttcccccttaattaccggtacttttggcagtcccttatagcccgttctttttttttttttccctttttttc

SEQ ID NO: 170156 - DNA, 301 bp, Zea mays
  Clone ID: MRT4577_86766C.1
cggacgcgtgggcgcgcgtgcgcctgaacgaagctacccgcaacctcgccgcgcgcgcccggcggcacaacctcgccggcgccgtgctctcctcttctccactctgtgcggtgcctgtaaatttttagggttcgtatccaaacattcagttcacctgttctttatttttcatacttaattttgtgttttctctctttcttttttttacaactgattaaccttcttttcatctgctttatatcttagttattcatgttttacttttatttttttttgaatagattctaacattttttttttt

SEQ ID NO: 170157 - DNA, 216 bp, Zea mays
  Clone ID: MRT4577_86767C.1
gttcaattttgaacaaatcctctcgtctctcctacgacaaagcacatgtctaaggtcaaccttggttttggtcgggttcaaggttctcatatggcctatggtgccgttgtgtatggtcacatgagctacagggctgatgtgtatgagtggggcagttcgagggttttctcgacctatatttcttaattcaatgttcgggactatcttaccccctag

SEQ ID NO: 170158 - DNA, 361 bp, Zea mays
  Clone ID: MRT4577_86768C.1
agaataaagcatggctggttgcatatctagatttgtcaggcgcataagaaaaaacataatcaaccaaaagtgaaatactaacatccaacatcttcgtcatcctcatcctaccatttgtccagtcaaccttcaagaacacaggtcctttttcaggagccttggccaccaaccgctctcatctttcttgttctggtagcatatggttcttaggacaacaactgctttgctctcctgcaaataggaaggccaatacaatcaaaatctaaaacgctaattcaacatgtattaaatagacaacatcaaacaactcaagatcaaactcgcagggcgagtcatctgagcccttagctgacaagttgaa

SEQ ID NO: 170159 - DNA, 349 bp, Zea mays
  Clone ID: MRT4577_86769C.1
caacacgccatgagagatctgcagaacgcggccaaactttggtttttttctttgtcttttatcactgtcttttcaattttgcaaagattacatgcttgggaaaggctactcatgaccgctatgtcttatgcttacctgtttttcgttatgaccagctcctctttcttgtgtggggggggggcacgtctgctcggtccattctcctccctccgccggtcggggctgcccggtgccttggccgcggttttcctctctggcttctgtgccgtttccgtgctctccccgtcccccatctcccgggggtctcaggcccccggggcttcggccgccggtttggggatcagcccag

SEQ ID NO: 170160 - DNA, 440 bp, Zea mays
  Clone ID: MRT4577_8676C.1
aacctctgacaactataattcttaactgtcctgtcgtctggtacatgcctagatcacattttgcacccaggtacatgcaactcctcagattctgcggtctccgggacatattcgtgagcattagtgatgggggggacggccgcagggaacacactgcgccatgagtataattttccatcttaccaactgccgttggttgttctagggaggcggagttttgccagcacgcggctgattcttatatcagtacatacctcacccttggtccagagagatagaaatgatgaatggaaagtcgcttggctgtccactatcagatgggatgggcgaaataaaccagtgccaaaatgtggtcaattcaaggggctgccacttttgtttctggatcctccttgtttacctcaccgcgcagggaagggaacgaaggtatggactttaaa

SEQ ID NO: 170161 - DNA, 259 bp, Zea mays
  Clone ID: MRT4577_86770C.1
taagagagagatcagcaacttaacaacttttgtggccatcgccatagttcccacggacgccgagctgctgcaggcgcaggccgacctgtggcgccacagcctgtactacctgacatccatggcacgacaacctggccatcgggaccgtgatacgaacgtgcggttccgactacttcaggggactccggtcgctcacatactgatgcggagggcagggaaacgtaagcgccgccgccatcgtcaaggccttcccagacat

SEQ ID NO: 170162 - DNA, 298 bp, Zea mays
  unsure (1)..(298): unsure at all n locations
  Clone ID: MRT4577_86771C.1
cctcgagccggcgggacgccctctcctctggtctattttttcctctccttccgtccgtccccgaacgaaaagctcctcgcgcttataagtacgcgacccacccgtaccgtcgcacccttcgccggtcgaccgatcccccccacccccaccggataccaccgcctccaccaaccgattccgttccatcccccctcccccctcgctcgagcgcgaggcttctctcccctcccctcccttctcctccccccccggggcgggttccttcngccggctccctcgccggtcgcggtcccgtccc

SEQ ID NO: 170163 - DNA, 257 bp, Zea mays
  Clone ID: MRT4577_86772C.1
ccgggctcctctcccctctccctcactttctcgccttatccccttcgtcactcacctcgaccaccgccatggccatggccttggcctccgcgaccgccgccgcactctttcgctccgtcctgtccgcgccacacggcgccggcgcgcgcgtacggccgcatcgccggcagtcgttcttggctccgttacacacggcgaaggggcccggtttgagaccggaggagctggagggcaaggtcaaggaaaagaataagaaa

SEQ ID NO: 170164 - DNA, 409 bp, Zea mays
  Clone ID: MRT4577_86773C.1
gcagtcgcagcccacaggatcaggtgatgagcccaccacctaacgataacggcgaccggaatgattcacaccgcggcgacagcccccaagggaggcaagacagcaccagccgtaccctaaccccattcccaggtaaccgacgccctgcacctaatgggcctcgccctagccccatacgtgaccgtcatcccagccacatcgctgaccacagccccagccctaacgtccatggtctcaacgatcgtcctgatgatgatcctgcccgaggttgctaccgcacaggaaacaagtgaccattaacgctacaccgcctcaactatcaagtgcttaactatgcaaagagcaaacatacccattacttgatagctggatcactgccctatctgatacatgaacttatatagcttgc

SEQ ID NO: 170165 - DNA, 263 bp, Zea mays
  Clone ID: MRT4577_86774C.1
acgggcaccagcattcataggcttccgaccaatactgaactttgacgttagtgaacctgcctagaatgcttcgagatgcttgccttggatcttagcctccttaagtaagctgacactgttatgatctctggatccagatgaaacacttatccttggacttggagacgttctaagcaccattcttaaggatgaagacaaaattacggggtgatttagcaactctaggggtcagcatgacgctttgagctctgagtacctgacgc

SEQ ID NO: 170166 - DNA, 999 bp, Zea mays
  Clone ID: MRT4577_86775C.1
ctgccggcgcgtgcgtctacttactcaggcggcctcgctaggactcgcccacgagacgagctacgccgcctactacccgccgcccgcgcccgcctcctcgtacttcccaccaccacccgacctcgtggcggacctcccgccgcccgccgccgccaccatggccgatgactacttccagttcgggttcaccggccaggagatggtggccgatgactgctcggcgccggtgttcgccaacagttcttcagacgccgtcaccgccgccgtcggcaatggcatgagcctgctgagctacggcgtggacggcgacggcgacgggaggaggccgatgagcggaccaccatatggcaccggtgggaacggcggcggccggccgccgtcgtcgtcacggatcgggttccggacgcggtcggaggtggacgtgctggacgatggcttcaagtggcgcaagtacggcaagaaggcggtcaagagcagccccaacccgaggaactactaccggtgctcggcggagggctgcggcgtgaagaagcgcgtggagcgggacagcgacgacccgcgctacgtcgtcaccacctacgacggcgtccacaaccacgccgcgccgggcccgggcgccgcctcctacctgtgccaaccaccgccgccgcgcggcgcaaccgcgaccgcaacgcccttctcgcctccacgctcggcctcggcgccagcgcctctggctgcagcgcccagctggagcgccgcctgtgacgcgtggtgggaggcgcagctgcacgccgcggcggcggttgctcattcctcggagtcgtcgtactgatccgatccgtcatccatcagttattacacgcacgtacgggtcacgtagctagaatgtgttggaactctaaaacgctcacaagcacaggacacagattggtgagaggaggaagacgaatgaacagtagctaaacacaaagagttcggcgcccaaacacctgcagcgctccgaccctgcctttctct

SEQ ID NO: 170167 - DNA, 198 bp, Zea mays
  Clone ID: MRT4577_86776C.1
acgcggacacgtgggtctatatcgcgagcggcgccctttttgttttttgtctgtgtggtttttgtttgttttggtctccaggggaactcatgctctcgtgccccgagctgagtggatgaattggtctgccgaatggtaaattgtcgaactgtatgtagattagcgtctaaaggcactaagtataagtagacctggggg

SEQ ID NO: 170168 - DNA, 384 bp, Zea mays
  Clone ID: MRT4577_86777C.1
ggaccaagggacaggctactccagccaaacaacatacaggagaccccaaagctgaacccagccaaaacgtagaaggcggcaaatggggcagctaaacagggacccaccccaaagagttggagtattagttccagttccacccaaatccccagtttcaaaacaggcaaatcccctccaaacccaaggcgcttcgagttaccggttttttccagctccaacggaaaccccttttctcgtttcaggaaaaaacttcttgccatcttttcagccacatcactggcaggcgcttcctctttgttgaaaagggaaaggttttttgaggagaaaagttgaaaaaacttggcagcatcaccttccttcaatctctcgaaaatccccgcgaaa

SEQ ID NO: 170169 - DNA, 655 bp, Zea mays
  Clone ID: MRT4577_86778C.1
cgctggtcccccgacggcctacgcatcgtcgtctctggggacggcaagggcaagtccttcgtccgcgcatttgtgtgggactctggcagcactgttggtgaatttgatgggcactcaaagagggttctgagctgtgacttcaaaccaacacgtccatttcgcattgtgacatgtgggatcactcaaattttgttaactgtatccggtatgctcctgatggtagtaagtttatcactgtgagttctgataagaagggtttgatatatgatggcaaaactggagaaaaaataggagaactttccactgaaggcaatcatacagggagcatatatgctgttagctggagtcctgacagtaaacaggttctaacagtttctgctgataaatctgcaaaagtatgggatatcatggaagatgcaagtgggaaattgaatcgaactttgtcttgccctggtataggaggtgtggatgatatgcttgttggttgtctctggcagaatgaccacctcgtgacagtctctcttggtgggacatttaatgtgttctctgcaagcaacccagaccaagaaccagttacattttgcaggacatttgaagactgttagttctttggtcttctttcctcaaggaggcccaaaactatactatctactag

SEQ ID NO: 170170 - DNA, 291 bp, Zea mays
  Clone ID: MRT4577_86779C.1
acagggggatcccccggctgaggaattcggacgaggtccgagtctccccttctgggcaaggggaagcactgtcagtacttacaacaggcggcctcagagctgagtacggggctcgatgtgggctgtaggggaagtattaggaaggcaggagcgggtgctgcgctacactacagctcatggttgcctttgacttgtagggatggagatcagctaaaatgccctgaatgctgtcgctgtgcgccgaggatgagagtccctagagggctctgcaggggggcatgagataggcct

SEQ ID NO: 170171 - DNA, 366 bp, Zea mays
  Clone ID: MRT4577_8677C.1
cccacgcgtccgcccacgcgtccgcggacgcgtgggatcagattgcaatctcggatcgtgtagatgcattctctacgttcctccggacctcagtctggtgataatctcaagatccgagaatttccggcgatttggtagcaaacgtgatgtaaagaaactaagagtgtgtttggtttgaggaatgaagtaatccatcttcttctcaaaaaaaaaaaaaaaaaaaaaaaaaaaaaaaaaaaaaaaaaaaaaaaaaaaaaaaaaaaaaaaaaaaaaaaaaaaaaaaaaaataaaaaaaaaaaaaaatataatataaaaaaataaaataaatttatttaaagaagaattaaaatgaaaagttttgggggg

SEQ ID NO: 170172 - DNA, 2059 bp, Zea mays
  Clone ID: MRT4577_86780C.1
ccttagactttgggtggtgtttttttttaaaaaacgagaacgaaactaattaaaacccactcaatccacatggattgagagcaaaacgaacaatctctagactgatatttgaacatagtatttctacaaacttacattacatagcatagctcgtataacgtgttccctcaacatgaccataactttacatgggtatatatatagcaggtaccaatggaataaatagaatcttcaccgccactcctaagagcttttagatgccgacacactttgcccacctgaaccagcacgaaaccttctccggcaatcggtagggttccaatgtagcaggatccacctcgagggatttgggatctgtccaaatgtacacaccgcgctcttgtttgctgcctggcactgtgttgtcaaggatcaacgcgacaaggagagccaccacaacgttgatggtaggatgcgcgttcactggaaacttaatattacttccaactttaattactaatccaatctccgctactgtattccctttaacatggccgaaacagtatactcggcagatgtacagcaggtaccaatggaataaatataatcttcaccgccactcctaagagctttcagatgccgacacactttgcccacctgaaccagcacgaaaccttctccggcaatcggtagggttcccatgtagcaggacccacctctggggatgtgggacctgttcaaatgtagactcaacgcgacaagagagccaccacaacgttgatggataggagcgccgtcactgcataattcaacccaccgctggctgtgcgaactggtccacttgacgctgtgtcttaactgtgaagatagcgtggatacataagattggccccagactcgtactgctgaaagtatgcagggattaagagggatcggtctgctgacaactccacgtgttggtggagcatagattcaccagcagtgaagcggcatggtacgatgaaagcgaatcaactggagcaaccagcgaaactattatcatgatgatacccgtcttgaaatggaatgttggagggccccattggaacggatagggaaccctcacccaggcagcagttttccacgcagtagaaacatcggtacgtcagcgcctcatggtctctaaatgccttctgcatgaatccaacaatatgtttgaactgggtatgtttgagcggcagcctttgaagttatatgctccatcagcagttagaaagaatgcataagcccatacaagtgcaacactgaggggcaccacttgtcccatgcacagagtgcacagaagaaccaacagaatgaggggcatgctgatttctacacagctgccagcctgagggaaaccataactaaaaaatgccaaacccactgcagcaatagttggtgccaccactactggatttattaacctcagaaacagtgacataagaccagtgtatcctaatattatctggaatactgaaccaacaagtatagccccctgtagttccctcattatgtgcttgaatttctggtagacaaaaagaagagattgtcccaggaatcctccaagtgatttagctccgatggatctccccttttcaaacagaccccaaattggatcctgaatgcaattgtcactaagatttctgaactcctcggagttcgcaattaccaacgctggagccaaatatacaaaggagcttccttgaatcagtggaagccgagaacccaaaaaagtatgtagtattgtagtaagaccagagactaataacatggtggatatgactgttgcggtatcctcatcagaaccacccattgcaggtacgagtatcaaaggaacaaagacaagtgaaccagctattgacaggtaatgttgcatgccataaaatattagtagtgccgcgccacgcgcgacctcgacgccctcgctcgcgtctcttccaacgccacgcgcggccccgcctacgccacgtgcggcctcgttgacctcgccagcgccacgcgcggccccatcgaagagcgcgcccgcttcgtcgaccccgctctcgtctaccaccgccat

SEQ ID NO: 170173 - DNA, 2248 bp, Zea mays
  Clone ID: MRT4577_86781C.1
ggaagaaaaaaaaaataactccaccattcccttccctctcgcgagctcagatcacgcgaagcaaggaaaaaagaaaaatggcgcagctggtggagacgtacgcgtgctcgccggccacggaacgcggccgtggaatcctcctggccggggaccccaagacagacacgatcgcctactgcaccggccgcagcgttatcatccgccgcctcgatgcgcctctcgacacttgggcctaccccgaccacgcctaccccacgaccgtcgcccgcttctcccccaacggcgagtgggtcgcctccgccgacgcctccggctgcgtccgcgtctggggccgctacggtgaccgcgctctcaaggccgagtttcggcccctctcgggacgcgtcgacgacctccgctggtcccccgacggcctacgcatcgtcgtctctggggacggcaagggcaagtccttcgtccgcgcatttgtgtgggactctggcagcactgttggtgaatttgatgggcactcaaagagggttctgagctgtgacttcaaaccaacacgtccatttcgcattgtgacatgtggtgaagattttctggctaacttctatgaaggaccaccattcaaatttaagcattccataagggatcactcaaattttgttaactgtatccggtatgctcctgatggtagtaagtttatcactgtgagttctgataagaagggtttgatatatgatggcaaaactggagaaaaaataggagaactttccactgaaggcaatcatacagggagcatatatgctgttagctggagtcctgacagtaaacaggttctaacagtttctgctgataaatctgcaaaagtatgggatatcatggaagatgcaagtgggaaattgaatcgaactttgtcttgccctggtataggaggtgtggatgatatgcttgttggttgtctctggcagaatgaccacctcgtgacagtctctcttggtgggacatttaatgtgttctctgcaagcaacccagaccaagaaccagttacatttgcaggacatttgaagactgttagttctttggtcttctttcctcaaagtagcccaagaactatactatctactagctatgatggtgtcatcatgaggtggatacagggtgttggatttggtggcagattggtgcgcagaaacaacactcaaataaaatgttttgctgcagtagaagaagagcttgttacctcaggttatgataataaggtcttcagaattcctcttaatggaaaccagtgtggagatgctgagtcagttgatataggcggtcagccaaatgctttgaaccttgcaattcagaaacctgaatttgcactgatcactactgattccgggattgtgttgctgcacaattcaaaagtcatttctacaacaaaagttaactatgccatcacgtcatcttcagtgtctcctgatggcacagaagctgttgtgggtgctcaagatgggaaactgcgaatctattccatcagtggcgatacactcacagaagaagctctgcttgagaagcaccggggtgctatcacttccatacattattcgccagatgtttctatgtttgcttctgctgataccaacagggaagctgttgtgtgggatcgagcaagtagagaggtcaagctgaagaacatgttgtaccacacagccaggataaactccctggcttggtcacctgacagtcgattggttgccactggctcactggacacctgtgcaattgtctacgagatagacaagccggtagccagtcgcgtcaccatcaagggagcccatcttggtggggttcatgggttaaccttcctcgacaatgatattctggtgactgccggtgaagatgcttgcattcgtgtttggaaggtggtgcagcaataggccgctcttcattctggtgtgcaatgagaatgtctgtgctgttgattggaataaacttcttttttttgttggtatggtggctgttactcacggggtcatagcatgggttgttgctttatctgcgatttgtgctctaaatttcctttacaattctttttgagctgtattatttttgcttgtttttttttcaggaagactccttcgtaagtggatccggtatccctgcatctgattttgttaggagttgtgagaatatagggatactgttgttgctttttctaccccaggtccctaaaatagtcgttaataactgacttcgctgtggttaagtttttacg

SEQ ID NO: 170174 - DNA, 287 bp, Zea mays
  unsure (1)..(287): unsure at all n locations
  Clone ID: MRT4577_86782C.1
tcgagcctatgtttttttgtgattttgtggtgtttttggtgtttttttattttttttttttttttttctttctattgggaccccccactgatttattaaaaaaaaacatcctctaaccctctgctaataagtctggaagccgtttttttaacccctnttgccnnnntaaaagggactgatttttttcttatctgcagaaaaatccatgccccaccacttaattgatatcatatttatgtctttgtccaggggttatcctaaaagggtccctttcttcacactacccc

SEQ ID NO: 170175 - DNA, 1772 bp, Zea mays
  Clone ID: MRT4577_86783C.1
ggggaacggttaaactcggggactggtcatttgaacgtagcatttttacaaacttacatagcatagctcatagaacgggtcccctctaacatgaccaaaactttacatgggcttatcctaacctaacagcagcaagagaggcccctaactatggagcatctggatctatatatattatatattctcatataggaaatcctacagtaacaagggaccaatggaataaatagaatattttcatcgccgcccctgactttggaacctttacatgccgacacactttgcccacctgaaccagcacgaaatcttttccggcaatcggtagggttccaatgtagcaggatccacggtcgttctagaagtctctcgagagatttgggatctgtccaaacgtacacaccgcgctcttgtcggctgcctggcacagtgttgtcaaggatcaacgcgacaaggagagccaccacaacgttgatggataggagcgcattcactgcataattcaacccactgctggctgtgcgaactggcccacttgacgctgcagcataagggagaagatagcttggcaagattaggttggagctgggttcatactgctgaaagtatgcagggattgacagggagatgaatagggtaaatccaactattatcaagtttctggagcttgctgcttgggtgtatcgcaacgtagacaaaccaagtgcaacgattagcgcccaggtgaagcacagaacagaggcggccaatgcaagaggtatagaggctaggagagctccgattttaccaaagaaggagcagacgactaaaacggctgccccaagctgcaatgcccttctgctgcccattttggtcgtttcaagggtgtgtatgttctctgttaacgttatcgatcctgtacctgtaccccacactccagcaataaaacttgaaatcccttcaagcccaatcgctctgctgacaactccacgtgttggtgggcttaaatttaccagcagtgacgcggcatggtacgatgaaagcgaatcaactgaagcaaccagagaaactattatcatgatgatacccgtcttgaaatggaatgttggagggccccattggaacggatagggaaccctcacccaggcagcagttttccacgcagtagaaacatcggtacggcagcgcctcatggtctctaaatgccttctgcatgaatccaacaatatgtttgaactgggtatgtttgagctgcagcctttgaagttatatgctccaccagcagttagaaagaatgcataagcccatacaattgcaacactgaggggcaccgcatagacaaggaagatatggttgccaaacaaggatatttttctcatgtacagagtgcacagaagaaccaacagaatgaggggcatgctgatttctacacagctgccagcctgagggaaaccataactaaaaaatgccaaacccactgcagcaatagttggtgccaccactactggatttattaacctcagaaacagtgacataagaccagtgtatcctaatattatctggaacactgaaccaacaagtatagccccctgtagttccctcattatgtgcttgaatttattgtcactaagatttctgaactcctcggagttcgcaattaccaacgctggagccaaatatacaaaggagcttccttgaatcagtggaagccgagaacccaaaaaagtatgtagtattgtagtaagaccaaagactaataacatggtgctcgagccgaattccgagcttacgcacgg

SEQ ID NO: 170176 - DNA, 5269 bp, Zea mays
  Clone ID: MRT4577_86784C.1
ctcgtctcccaccagccgtcacctccggcttgcccggatgtgctttgcggagggggcaacccgcgcgcctcggtgggctccaactccgccgctgtcctcgaagctactccgcggcctctcctgcgctccaccagagggccggtcgcacccaccgctcggagggggtacccgcgccttccgatgcccgcgcgtgccggctcctgccctacttccgccgcggtggaatccgacgcctcctcgtgctgcttttcgtctgatacgtcgtccacgtccactgacttccctgaggccgatggggcgctcgggatggccccagccgcgtcgtgcgagtgcccgacgctgctgggcccagcgtcctgccgcgggggacgcctctcgtcagagctccgctcgttggtgccggagtcgggcgggtcctcgcgggcgtccaacccactatgctaccgctcgctcaactcggcactgtcgatctcgatggcgatggccgggaaaccgactcccgcagggaggccaccacaaccgcaagggccgaagacaactaatctgaagaaggcggcgaccgtagggggcaggaaggccgtggggaagcaagaagacgtgcatcagctgcggctgatgggcaattcgtacctccagtacaggttgctcaacgcccgggctgaggctgcaggcaaggccaaggcagttgctgctgagaaatccctctacgggctagaggagaagattgccagcctcagcgtgtctgttgccgagaagagggtagaggtgcaatggatgcgaagggagaatagattgagttcagtagtaaatgcgcagggatcactcgaattttgttaactgtatccggtatgctcctgatggtagtaagtttatcactgtgagttctgataagaagggtttgatatatgatggtaaaactggagaaaaaataggagagctttccactgaaggcggacacacaaggagcatatatgctgttagctggaatcctgacagtaaacaggttctaacagtttctgctgataaatctgcgaaagtatgggatatctttgaagatgcaagtgggaaattgaatcgaactttggtttgccctggtgtaggaggtgtggatgatatgcttgttggttgtctctggcagaatgatcatctcgtgacagtctctcttggtgggacatttaatgtgttctctgcaagcaacccagaccaagaaccagttacatttgcaggacatttgaagactgttagttctttggtcttctttcgtcaaagtagcccaagaactatactatctactagctatgatggtgtcatcatgaggtggatattgggtgttagatttggtgggagactgatgcgcaaaaacaacactcaaataaaatgctttgctgcagtagaagaagagcttgttacctcaggttatgataataaggtaagaaaaatcaacaggttgcccatacttgttgttgtcttcatatctagggcactggcctcccatgtagactgcagtttttgtcaaaaatgatttttttgaataagtaggcattatatccttcaagattttttatatggaaatcctaaattgtgagcatattgatttttactctatttcttaaatgtaaagttgtaaacttgaatcacctagaaggaaccgtgttaagaagaaataagcaactatgtcttttcttctggaaagataaaaggtgtttatctttgaaagctagaaaggtagctttctattatgtcacatcagtctaaaccagaatttaatcattatttataatgcacgtgcaatgagataataccaaaacaccttataatttggaatagagacttaacattttgttggctgggacattgggctatattttgcagcctcctcacttggcacagataacttcatttgttttccagagactgtattaatactttgcaggaataaacattgtgtcttgttatccattgcaatatacaacacttaagcccttggctgatagagtgattgtaaagattaactcttccgaggagaagacaactggtggaattttgcttccaacgactgctcagtctagacctcagggtggcaaggtagttgctattggaaaaggaatgataattggggacaataaagatgatgtcaacatttaggttcatttgcagaacaagatcatgtgcatgggacaacaacagggtgcactctacatcttggagaaaaatcttatttatacagtggtcaatggtatccatgtcagagtggtgctgggaagtacattagagtcatccgtcgatgtgcttgcatgctccagcaaaagtgttactgacatggtgaggatattccacaagttaataatcccaaccatactatacctgtcttcaagtttgatgttcgaggaaagcattatcaggccagactgtgtaaaatatctcataccgcataggttcctccaaacacagcagctgcctctgaagagaatgaagcaaattcttttgtcattgcctgcagaaagcatgtatggttatgagcatacatggagtgccattgaaagcaataaaaggatcatcttacaatcaggatcagatcatgccagagaattgctatcagatgatgatttccatgaagttcttcaccgtagatactatgatctacagcacctcgcaactgaacttgctgtcaaccctgacaatcagcagcaacatgaaatcatccccgaaacagatgtggttgatccttccatattaggcattgcaaaaggtgttgagatggttctacaaagattgaagagagtggaacaaggaataagggacctcaaggaggaaatcgcaagcttgaggtactatgagtatcaccttttgactgaactccacaggaaaatggactacatgatgaattacaacacccagttggaggagaggaaagtgccacagatgttttatcttgttagcctggacaaccggtccaaacagctggtcacaagaatactgcctgggatgcggtccttacgggtgcacatgctatgtgaattccgtagagagatgcatgtagtggaagatcagcttggctgtgacctgattcaagtggacaaccagacggtgaaatccttgctaccttacatgagtaagttcatgaagctgctaacctttgctctgaagatcggcgcgcatttcattgttgggatgggagagatgatacctgacctgagcagggaggtggtgcgcctgctggactcctcggccttgtacgacacaactgcatctgccatgtccgtgggggctctggtattctcagtacataccaaatagcatgcatacatcaaggaaaaatgtcgaacaacaactcagaagataaattcaagaactggttgcttcaacaagagtctgtccatgagaatggcatgcaacattacttgcccttcgattgagataggtggctacggtgatgctttgttgaacctgatatacgcatctccatcaagccagttcgaagagctcagtttagaatgtgagctagatgctacatgtaatcattctagagtgaatgattctcaagttcacggctcacctatacctgagagtaatggaagattatcgacagctgctcagactaaaacgatgtccacagtctcagaagatgtaattctcattggctcatctttcagataccaaagtagccttggtaacaacaataagagggttgggctttttgatatgggtgatggaagtagtgagcctgctgctgaggacaacaatcaaatgcatcaggttcttctacatgccaccattcaatggcagatgttcaatgtactatccactagagcattggtgagatgaccatcgagggtgacgatgtacatgaattcttcatttttctcttacatattattgaattatatacttgagtcttgacactgagaatgcatcagttacatggtaatttggttttcttcttggtttatgtatccttaacttttcttcttatattgtgtctctaaatctattttagattttagaaatgaatgtacgcatatcttaatgagtgaagtggtactatcatggcttgttgtaattataacgatgattttagttgaacctctacacttttggataaacattagatctttaggctaactgtgattgcagtcagaggtttaaaatggatcaatagtatatttgtgtaaacaaaaaaggatattgttcatggggttatttcatcagacactaaaccaaaaccattttgtcttgtgaattgtacttctgtagggggcacgttcattgacattagagttaactgatgtctggtctggtatcaaggaagagatgtttttaactatgtttacactaatcaagttaatgaatttggtacatgtcataacatctaagcctttgtaagtttgaatattcacttgtgacttaatcaactacttatagcttttattaggctgtatattgctcagtcctgtaagtttggcgttacacattgcacatttgctttaaaccaatggcttttctatcaataagaaaaactaggaaaatgtagttgtgattatgataattttgagcgaccatacttgggataaagtttgaatgttttctcttttcttaccaaagttctaacatagctttttcacatttcttccatggtatacagtttgctgcaggaatccacaaactgagtcttttcttcggcttctggaactcccatatctgtcggactcatctaaatctgaggatatgtctcttgtgattggttaatatcatttctgtttatatttatgaatttcatttcgtatatatgtaaagagaactactaaactagctagcctaagttttgttagtctcattggtttcctctgtagagagtttatactatgacttgtgcttgtagaatttttataatttatggtttctcaacttttgatatatagtgtttggtagaaatgaaatgagtcaagctcttttccaggaaacacacttgatggtgaagatatggagctaccagatgaagatgaggatgctttagaagatgacgagtgaaggacaacactgttgaacaagtaccattgcacctatcatgtttgctgcagggtttgcgatagattacattgtctttgttggttgcagtattccattgtttgttgggactcgtttcacttatgttttataccgtcactgtagtcttatgctgtaagctttgtacttggtgcttaagacttgcaacaatcgatacttcatggttgtggggttcatgatacttaagggctttgcgtcttatctc

SEQ ID NO: 170177 - DNA, 956 bp, Zea mays
  Clone ID: MRT4577_86785C.1
ctgaaacttggcaagaccttgttcagttattcctatccatatggattggatgagattgaaaaaaaattaaaagatttgactttttgattgaaactcacttaatctcacccaatccacatagattgagagcaaaacgaataatctctaactggtatttgaacgtagtatttctacaaacttacattacatagcatagctcgtataacgtgttccctctaacatgaccataactttacatgggtatatatatagcaggtaccaatggaataaatagaatcttcaccgccactcctaagagctttcagatgccgacacactttgcccacctgaaccagcacgaaaccttctccggcaatcggtagggttccaatgtagcaggatccacctcgagggatttgggatctgtccaaatgtacacaccgcgctcttgtctgctgcctggcactgtgttgtcaaggatcaacgcgacaaggagagccaccacaacgttgatggataggagcgcgttcactgcatagttcagcccgctgctggctgtgtgaactggcccacttgacgctgcagcatatggaagaagatagctgggcaagattaggttggagctgggttcatactgctgaaagtatgcgggtatcgacaaggagatgaacagggtaaatccaactattatcatgttcctggagcttgctgcttgggtgtatcgcaatgtggacaaaccaagcgcgacaattagcgcccaggtgaagcacagaacagaggcggccaaggcaagaggtatagaggctaggagagctccgattttaccaaagaaggagaagatgactaacacggctgccccaagctgcaaagccctcctgctgcccattttggttgtttcgagggtggtgtatgttctctgttaacgttgtcgatcctgtacctgtaccccacactccacccggcgagcccgagggtcc

SEQ ID NO: 170178 - DNA, 414 bp, Zea mays
  Clone ID: MRT4577_86786C.1
aaaaagaagggtcaggccccccacttgcccggaaatttaaagaccgcttacaaccccgtgccggacgggaagtttcccccaaaaaaatcaaccctgcccccaaagcattgcccggggtccccccataaaatgaccaccgttgttcacgattcaaacatagccccccccaggcaggggaggataactttggggagccccccaacccgggcattagttgccccccaacaggttgcccagggaaaaaccccccccaggaaccacgtggcccttggttgaaggaccgcccctaaggaaattgccaatgttctaaccatcaaccctggggtagttattggtttggctggtaaccccaacaacaacctgcttggccccattaatttttgcagcagatggtttctcaacagggggagccct

SEQ ID NO: 170179 - DNA, 633 bp, Zea mays
  unsure (1)..(633): unsure at all n locations
  Clone ID: MRT4577_86787C.1
aattcggcacgaggagtggtagcagtagcaccaaggccggagtagtttatatgttgtggacagctagccctcgctgctcgtagtcgtagctccaggcctccggctgctgctgccgccgccgccgccacagggagagctagctaggaggtatataggtatagccgtatagctagctagctgctgctgcgtgaacggggaagaggggagggggggctgctgttgcagtgttgcctgttggcctgttgcaggctcagctcgcaagtcgcgagtcgcgtctgcagcagctgctgcctcagggaggggctcattactccctcgttgcgtgctgcagttattgcttgctaccgctagctactgtgtacgttttggccttgccaataagctctaatggagaggatgcagctgcaactgcaagggtccatcgccttttcgctgtgggcagacaagcagcagcaggcggccagcaccaacgccgcagcggcggcggcgcagatgcccttcctggcgctgctccagggcgncggcgttgtggtggaggcggagcancaggaggagcagcaccacgacgggcgcaagcggcaggccttcgcgcgcgccgtctncgaccttgatctgctcgagagctgcgcccgg

SEQ ID NO: 170180 - DNA, 310 bp, Zea mays
  Clone ID: MRT4577_86788C.1
gaccatacataaacacaccatgttttttacataagcaacatcctaacaacgggggctaccatacatattatcgcctcctcgcgcttactcctcttttctcgacacgcaacaaatgcgttcattattcacacaatgatcacttgctccatatccattattacacagacactctcaccagttacttcaacgcgctccaaacacccacctgcgcaagcctatagtttacatcaagcatttgcgcccagctttttacaacaaccaatttcccaggtgcaacaacaatgcttggcacatctaacaatacaaacca

SEQ ID NO: 170181 - DNA, 1561 bp, Zea mays
  Clone ID: MRT4577_86789C.1
aattcggcacgaggcctatgtcctcctctatcctcctcttcgtctatctcttcctcctctttcctgttccattacgcagtgcagtctatactacactactacagtgctgctgcaactgctactccgactactagtaactagtggtagcagtagcaccaaggccggagtagtttatatgttgtggacagctagccctcgctgctcgtagtcgtagctccaggcctccggctgctgctgccgccgccgccgccacagggagagctagctaggaggtatataggtatagccgtatagctagctagctgctgctgcgtgaacggggaagaggggagggggggctgctgttgcagtgttgcctgttggcctgttgcaggctcagctcgcaagtcgcgagtcgcgtctgcagcagctgctgcctcagggaggggctcattactccctcgttgcgtgctgcagttattgcttgctaccgctagctactgtgtacgttttggccttgccaataagctctaatggagaggatgcagctgcaactgcaagggtccatcgccttttcgctggtaagttcacatacactacacagccaggggagggggcagccgggcaggcaatggagcacgcacgcagcttccatttgtagcggcaggcagcttctttctggaggaagctccgtcgtaaatgcaatggagtattaattctcctgctcctgctgcatgccgctgctgcctcctctagtcttgacgcttcctttcccttccatgccctctctgcattgttcacctttgctagtacttccctctcatgtcgtcgcagtggcagctctgccgccggcacccacgcacgcacgcacgcacaattcaatgcgcaccactgtactcgctctctgtgcttcctgctaggagatcgacatcgactcgactactaggagtatctttaatgtcgttgctgctgctcccctttctcgatcggcttgctgatgatgtgcctttcttgctccccttccggcgatggcgtggtgatgacgacggtggcggtaatggaacagtgggcagacaagcagcagcaggcggccagcaccaacgccgcagcggcggcggcgcagatgcccttcctggcgctgctccagggcgcgggcgttgtggtggaggcggagcagcaggaggagcagcaccacgacgggcgcaagcggcaggccttcgcgcgcgccgtctccgaccttgatctgctcgagagctgcgtcacgcaggcggtagctcccgcagcggcggcgtctgcgcccgtggccggcaggaccgagaggcggaggaagcggcagaggccccgcgcgcgcgccgcgccgccgccggagaagcgcaagaagcccgaggaggccgagagccagcgtatgacgcacattgctgtggagcgcaaccggcggcgcctcatgaacgaccacctcgcctcgctccgctccctcatcccttccagctacaccccgcgcggcgaccaggccacggtggtgggtggcgcgatcgactacgtgaagcagctggagcagcagctggtggcgctgcaggcggcc

SEQ ID NO: 170182 - DNA, 120 bp, Zea mays
  Clone ID: MRT4577_8678C.1
aaagtaacatacattctttattaccaatacatatatgtgaaaaaatagtgtaggacgtagtgctctgcgctttgcacaggggctacaacaatggacctcgtaagtaacattccaccttgc

SEQ ID NO: 170183 - DNA, 548 bp, Zea mays
  Clone ID: MRT4577_86790C.1
aaaaaaaaaaaaaaaaatataaaaaaaaaaaaaaaaaaaaaaaaaaaaaaaaaaaaaaaaaaaaaaaaaaaaataaaaaggatataagaaaaaaaaagacaatggtctgcgcgttttctggggttccaatctttgggtccctcgttttggcgcgctggttccttgtttttacaggtggcgctaaccgttcaaacctcctgaccgtgctttgtccggcgggttttccgggataaaccccttttggacccccttccacatttgcgctggttggcaaccccctttttggccctgttggccttattggcctgcccgctgggccggtgcccctttcccatcatttgcccctcctgctcgcagagtggccggtccctggccggggcccttacgcccgcgctagcggctgtattccctaagtttttcctttcttttgtcggtttttttggcccctctctttttggccggttccctttctttttccgctacattcgtttgactttcccttttaccccttaacggggttatgcttttgggtccccgattggggcatt

SEQ ID NO: 170184 - DNA, 310 bp, Zea mays
  Clone ID: MRT4577_86791C.1
aaaagtcaacagattcagagacctgagatgcgcaaggaagctgacaaagcggggggccgtggcaaaccgaaaccggtggacgaccctgatcttctgagaaaaggttcaagttgaagcacgcactgtgggcacccgtttgatggtgaactatgcttgatcggctcgaagccagacgaaactcttgtggaggctcaaagaaattctgacgtgcagatcgctcgtttaacttgggtatacgggcaaatgactaatcgaaccatgtaatatctggttgcctccgaagattcactcacgatagctggagccttca

SEQ ID NO: 170185 - DNA, 331 bp, Zea mays
  Clone ID: MRT4577_86792C.1
gcccgcagcattcaaaacagggggctgaagctacattcattttcatccctacctacgttctcctctgccactggactcgtcttcgtccagccgcgattctctttctcctcaagggtaatgtatctcctccagtccccacccctgtgattctctcgttttttcttgttcggtatcgctgcagtgccaaatggggggccgcatggttcaaacttcaaagcaaacttcggtttgcatctctccggttgagtttcatatgcgcgttgcctacggctgggtgtgtgaggcccttagaaggtaacctggaactctggaaggatgggccggccaatct

SEQ ID NO: 170186 - DNA, 313 bp, Zea mays
  Clone ID: MRT4577_86793C.1
gggggaaaacaacccttattgatggaatgcttaaacaaaagattaatccatacatgtatgctcatgggggcagacgcagtttaccaccatataagactaggtgtacacaacatgtctgagcaactgataaaggaagatcacatgtttatagacaaaatttttcaaactaatagccgggctgggctgctaaccaaacgacaaccacgagaccgcatcgatataaaaagaaaaaaacttatgaagcaaatggacaaaggtaaccttggttaaagttaaagacttccatcatttacttagaaaggattcaagttgc

SEQ ID NO: 170187 - DNA, 307 bp, Zea mays
  Clone ID: MRT4577_86794C.1
aaacttgtcatataatttaaattttcaaacttttattattgtgtcctaacatttcatgttttattaacatccaaataagcaaacaggattttgaacataaccttcacttgccaaaaaaaacacccgactggaaaaaagtggatgactagacctcctaaatggcacattaaacataaaaggtgccgcaaaccaaattggctacaattttaaattccaaccggaaccagcccctctgtgtgttttacttggaaatacagggaccggggagattttcaaacccccaaagaactttttatgattctgctgg

SEQ ID NO: 170188 - DNA, 417 bp, Zea mays
  Clone ID: MRT4577_86795C.1
caggctcaatcgctctgcagagacgacgcatggcctcgacgacagcggcggtgccggaggtggcgctgcggtccggcggcgcgaggcccatgccggcgatcggcatgggcaccgccacgttcccggtggtgccggagaccaccgtgaaggccgtgctggaggcggtggaggtgggctaccgccacttcgacacggccgccatgtacgcgacggagcggcccctgggcgaggccctcgcggaggcggtgcgccgcgggctcctggcgtcccgggaggaggtgttcgtcacgtccaagctctggtgcacgcagtgccacccgcacctcgtgctcccgtccctccgggagagcctccagaacctgcagatggagtacgtggacctgtacctgatccactggccgatcagcctcaagcccg

SEQ ID NO: 170189 - DNA, 415 bp, Zea mays
  unsure (1)..(415): unsure at all n locations
  Clone ID: MRT4577_86796C.1
gcagaagagggggcggggggggggcgccccaaacatagctggcgccaacagctgggcttcccgggcaacccgccccaacaacctctgccacgtctgcttctggccgcacgatactctttcctcgttgccgcgccgcctctctggtgggggggggcctccattcgacgaccactcacacccgggacgagtgccccccggcgtccacccccacgggaacccccagccgggcccgcttcagcccgcttcgcctggacgacgccgagccaacctgccaagcgggggggctcacgggcttccctgcccctgccgggacctcttctnggagcgcccgctactcgggccgccccactgctgatcttactacaggggcggcggacgagactccatcgccagggacaacccctgggcgcgcgcc

SEQ ID NO: 170190 - DNA, 260 bp, Zea mays
  Clone ID: MRT4577_86797C.1
cccacgcgtccgcgacgacgacacagagaacctcgcccgtgagcaatcatctgtctcgggccatttttcccatgaacaatctgatcgacgtttttttgtgcctaggatcccaatagataaattcgggcacttgtccaccgttgatgtgataaatgatttatatatgttcatgttcacatctctcgctgttgatgatgttttcttttaagatggattctatacctagtgctttaaggctctcactttattagtaacactag

SEQ ID NO: 170191 - DNA, 448 bp, Zea mays
  Clone ID: MRT4577_86798C.1
gcgtccggcagcccaattggcctatcacatttatgctttgaaactaaactagttggaacgtacaaaggccgaaacaactcatttcattccaaattaaagacgtgctagattatcaaaccgcccaattattttggaaccataaaactatgacacacgtcctctgctttgataggctgatgctagagggtactagtgacaaatgacatatgttacaaaaaaaaacttgagtcccgtgcaaaaagcaaacttgagatgaaaatggatatgcatgtacataacacccagccatatatacaatgctagagaatagaactgcagcttcttttttcagctggcttcagctgtccacaaccacaaaggctgaaggagctttcagcagcagtttcctaaactatccgctaaccagaagatctcggccacataacgcttgaccctccagaggaaggaa

SEQ ID NO: 170192 - DNA, 2076 bp, Zea mays
  unsure (1)..(2076): unsure at all n locations
  Clone ID: MRT4577_86799C.1
caaaatgatagtaaccaactgggcacaacaagttcgtctagtgtgcttgtgccaaacagcagaaaacagaatgctacagccaccaaacataaagtgcactcaaacccagcaacccccagtaggcaacggagcaatattcaccaaataaatgcccatccaagaaaagcgagggctgccaacacatttgctggaagcagtagtcaaggtagcagaaaggtggacttgcagccagatgctcgtgcaaatgtaagaaataattctgtatccaaagcaatcccgaagccaagaagattacaagacagaagagtgtactctgatacaagccagtcaagtgatagtattaattctgacaggagccagaggcggattcggcacaatattgtgattgatgagcagtcatctttttcaacaaacaaaaagaaagtcagcactgagattgtttcattcacatttacctcgcccgttcattagttcgaacatgtcaagcaaattttaaggaatcagaacaccttgtcaacactaagcaatacatcaaacactaaacttgatgtcatagatggaaaatttatgggactccttttggagcagaaattgagagagttgacatctggtgtgagatcaccctacactaaaccagccgaaggtgctcaagcgtaccacacttcaacagctttggaagatatggcatcagcatgtgaaacatctagcattgcttctactgattatgatagggagtcattacagtctttcagtgatggaaaagctactctgccctatacagatcttgctactagaagtgtccagtcatctcagcctgtgaagtacgatcatggcgtcacggaccgatcagagctcgagcatcttggccaaagcccccttttcacatgggaggtttctatttcaactgaaacctgcagctcatcagagagctggaggaggcctgcaaatggaggaacaagactgttcagttcgaccgaaggagcgacaacttctgattcgacgcgcttcaacaaactcctagaagcggacgcctcttcagaatactccgacacggcctcatcaatcacagtggccacagcagaaatccctcgatcagaaagtagcagctcgtggcatatggatagcagacaggaggtggagtttataagagagatactgaacgccagctctccctgccgcggcatctccccttatctggagcggttcagcaacggcaactcttcgggtattttggatccacatctactggaggagttaaatggcggcactaggctgctggccggtgaagagggcaaaggtcacagactgaggcggaggctgctcttcgactgcgtcaatgaatcgctgagcgtgaaatgcgcgcactacttcagcgccggctacagcttatggttcacggggatggcggttctgcagagcctgtcggcggcagaaatgcatcgggagatgaccagcctgacggtcgccgaggagtggatggtggacgagctcgtgtacagggagatgagtggtcctatggggagctgggtcgatttcaggactgaagcgtaccaggccggcggagacgtggcggcggagctgctgggttccttggtcgatgaacgcggttgctgaacttctgacttccggcggctcgtcgtcgtctttgtagctgatgttggattggattggattgggtccccgcgctaacgataccagttgacagccgcaaggtttttgctccatgtattgttccttgtttgtatcctgtatatcggtaggtcgctcgagaaattcgtgtagcgtagcattcctaagatgaaatgtcactaacttacaattgttcgatggttgatcggtttcctgtcgagagtggaaagaagaaacattcttgacctgttctatgggcaattcgagataattggannnnnnnnnnnnnnnnnnnnnnnnnnnnnnnnnnnnnnnnnnnngnnnnntttatgggagcaattcaggcgtttcatgaatcagtattttctactaatagccttgccttcagttgtggtcccgtatcaccctttcagccctgcaactacatggggtccacttatcatcatc

SEQ ID NO: 170193 - DNA, 535 bp, Zea mays
  Clone ID: MRT4577_8679C.1
gtgtgttttttttttttttttttttttttttttttttttttttttttttttttttttttttttttttttttttttttttttttttttttttttttttttttttttttttggggccccccaaaaatgaaaccccattgttttttttgggggggaaggccaaaaaaacttgaactttgggaatttgttacagggggggggcggataagttaaacacaaaaaggacaacgggtccaaaaccaagatggatcccaggtccaggggcccccctcaaattttttttcaacaaaaacaaaccccaaaaatgggttggaaccaaaggccattggggaccacccccaatggggggggaaaaaaatttttttttactggggtttaaaaaagggggggaaaaaggtaaaaacccggttgttggaacccccattgttggggaaccaaaaaaacaactttaaaaaaggggttttaaagggaaaccccgccttgggggcaaaaaatactcaacctgttttcaccggggaaatcgggggaaaaccaaaac

SEQ ID NO: 170194 - DNA, 320 bp, Zea mays
  Clone ID: MRT4577_867C.1
tgttttccctcttctattcattcttctttttaccattgcagtctggcaaccagagtatctggttcttgagtcgtttcgatggaaaacaagaacgaggagattaaagatgccatccgaaaggaattagaaggcacagagtatgaagtatcatcgctaacaccgctttctgggggcactgcaaatttcatctacctggctagacttcacaagccgctatcgggtggtgtaagcgaagtggtattgaaacacggagaagcatacgttgctctgcatcctgacttcaagctggaaatggttcgatgtaacattgaagaagaagg

SEQ ID NO: 170195 - DNA, 449 bp, Zea mays
  Clone ID: MRT4577_86800C.1
aataaagggaccacggggagtatgaagcggttttgcttaatatgcaaagtactccaaaagccaccagagcgctcataaataaactatatgcccacgtgcctggggatcatcgggcaactatttcctgtggacaaaatacgggatggtgatctggacgcgatgcgcggacgcaaaggacatgacacgtagtactctcgacgagcgctgccactgacactgttcggctatacagtcaagaacgcgaccgtggagtataccatccaacgattctgtgctgtgaaactctgcgaacaaactatgcgtgccggaccatcttttctcagcatatactagcaagtttgggaactgaccactgtgtccctgaacggacataaatggggttggagtcattggtgcctctaaccataatgcatgaaggggtggaggggccttcactgctgcagatacac

SEQ ID NO: 170196 - DNA, 349 bp, Zea mays
  Clone ID: MRT4577_86801C.1
attctagcactaattcactactgtgatttacgcgcacgtcaccggcccacgttaacaacgcaagtataccaaactgactagaaatattaaaacgaaaagcgagagcgacgacagctcaccaataatttaatctgtcttgaaggccacaagcacaactacgatttccggttctaccattacgtcgagcacgtggtgagcaccacgcaggatttgttgctttatccaaactctcgagatttttttagacgacgcaagggatgttgacgagttggaggcctccgaggtcgagcacgacaagggtcttcagagctcaacgcaagtggcgcgcaactagaagatagactgtcgg

SEQ ID NO: 170197 - DNA, 467 bp, Zea mays
  Clone ID: MRT4577_86802C.1
cctaaaacggggaaagacgaccggcccagttaaaaaggcaggggggccaggaccggggggggggaggatggaaacagaaggggcccaatcccccaggaagattaaattccccggcgggggggacaaatcaaggggcgacaagacaggggaggaccccccccattcccaaaaaacccgggggctagcggcttcaccacttccaaaaaacgggggagccgcactggaacttttccttcccctggcactaaatctcgagggcgccgctgaagaaggggactttcggcaagagcccaaggaagcccggccgacccggcccaggaggagaaaaaaccagttcaaattattgccaacaggccccgcgggggggttgggaaaaaatgggggggaggatgaaaaaataaaccttctgctgggcggggcccgggcccccagtgaagttgaagggaaacgggcagctgccaaacccc

SEQ ID NO: 170198 - DNA, 430 bp, Zea mays
  Clone ID: MRT4577_86804C.1
gatctatatctagagtcaaaatgcgaggcaccatggagctccggacataaccctcctatgagagagagtaggccaaacgtggcggtacagctcccctcgcgccctctattgtccacactctcccagacagtgaaagaagacgtggaggcaagtgaaacacacctgggagccattaccgtaggagctctcaccccgatgatgtcgcccaatgagagcacccgtacaaagggactaaaaacggaagggaatacagggttctgcctgctcaatgcatgtcacaagcaatgtatagcccctaaaatttgcctaagcagcatcagcatcactctttccagcgtccagagccttcgtctctggctctgcaaggtaccgtgtattgtatcacgacacgggctccagacgacagacaagcactgacaaagagtccaca

SEQ ID NO: 170199 - DNA, 566 bp, Zea mays
  Clone ID: MRT4577_86805C.1
gggtaaggaatgtagtatgggtcctttctagcctacaacggacctagtctagagcgcagacgtactggcacagacaggctgtgttgaacgtagtggacgacccgcgtatgaggacaaaacgtgtaggtaggcctactgttatgtggcggcttctggtgctgtgctcggtggctgtcgtgtgctggattcaggcgcctcgccggcaccaaccgctccctgttcctctatctatttatatgctaaaggggtctctgtgcctccttttacccgctcttgtatatctccatatatccctttgcccccaccatatctcttcttcttaactaattccttcgtctatcactttgcgtgcttgggctaaaatgtttacttctataacactcgcgcatgctacatgaccatttaactatgccacacgggcctcaatgcttaaccttcttttgttcctctctttgtacaagtggaataaactgcattgaaagcattgaccgtcaggaaacatgacacaaatggtccgggtactgctaacatgctttatggcaccaatgatgcttgcatgctctctt

SEQ ID NO: 170200 - DNA, 235 bp, Zea mays
  Clone ID: MRT4577_86806C.1
gggggtatatgtagagaacggtccactatatcccaagggtcaaacttaaatgggatgtgtcacatcacagggaaaaacacacactcaaatgaaagactgcatttttaaaccaagaaaagagcccacatcatgacaccaaatgcaaaggcccagacaaccacggtatggataaagggaccaaccagacgcacgagcgcgagtactgaaaacgaccagagaactactgaccagcaaa

SEQ ID NO: 170201 - DNA, 359 bp, Zea mays
  unsure (1)..(359): unsure at all n locations
  Clone ID: MRT4577_86807C.1
ccgggtcgccccgcgtccggagactgttttacaaaaggcactaggcaccacctttcgtggcttcctctgctctcctccacagggcngggttgcagcttctctgttgcagggaggagagggtnggcagtctgtccactgtccacgctgcagaagagagagatgggggtgcgggcggcggcggctgctgtggcgctggtggcggtgttgggcttgctggcgccccgngcggcggcgctgacgccgtactgcgcggcgttgctggtcccgtgctcgtcgtncatgaccacgacggggacgccgtctgtcacctgctgcggccctgctctgggcgccggcnnttgcgncctctngtgcctctg

SEQ ID NO: 170202 - DNA, 340 bp, Zea mays
  unsure (1)..(340): unsure at all n locations
  Clone ID: MRT4577_86808C.1
cccacgcgtccgcccacgcgtccgaagtgtagtgctaggcgatgaagcaacatctctccacatgattcagctcgtggctgaaggttagataattagagatgacattgtgttgacttctccattcaaatcatgactaatgtaccaccctnctctcatcacangatggccaagctcctagctaattgaaatagataacagaaacaagaaaggagctcagttcgttatagaggcactggagatgaggtttgtaactatcattttccaattcaactgtgctgtactaagaaaggtccgtccttgatgtttcaacccactgattttaagacatctttaacctctt

SEQ ID NO: 170203 - DNA, 385 bp, Zea mays
  Clone ID: MRT4577_86809C.1
ttttggggggttttttaaaaattttgtgtgtatttttacttttttttttttcttttttttttttttcttttttttattcttaccccggaaaatgcctttaattaaaaaacggctttaagaataaaatccgttccaaaattgggaaaacaaattaccgtgaaacctaaaaacaccttcttttttaaaccctccctttgttaggtgtaacccctgaaaaaatataatgctggctccaaaggggcccaaatagtaaaatgttctccaaaacattttcctccaaaaagggaaaactttttttttttctttaaatctcaaatttttcccctaaccctaaataaaattatgggggtgggattcttcaaacataacaaaatccaaaactttt

SEQ ID NO: 170204 - DNA, 253 bp, Zea mays
  unsure (1)..(253): unsure at all n locations
  Clone ID: MRT4577_8680C.1
ccaccattctcgcaatttcatcagtctttgttncgcgcctgaggaggacttaaccagacccaaacacganaaatcatagcatactcatcaattgcccacataggatgaataacagcaatccttccatacaaccctaacttaaccctcnnncacttaacaatttacatcctacttactgttccaatattcattacactcataacaaactcagcaacaacaatcaacacactctcactcgcatganataaaactt

SEQ ID NO: 170205 - DNA, 483 bp, Zea mays
  unsure (1)..(483): unsure at all n locations
  Clone ID: MRT4577_86810C.1
ccgcgggttttttttttttttttttcttcaggaaattgtgtctatttgcaaagcccccttttttgtatgagtgcgaggtcccggaactggtaataaaaaggtaggtaggatgaccgttatagaataaacggggggatactgggttaaacggtgtggtaaaaagccagatccaggtcacctagatgcagaatatgtacagaagtcaacgggcgccatgaaaatctatcctcccctccttccgataaaaaagccaatttgaacagttgttgggtattcccctagcgagtgtacaagaaatgttaaaaagaactggtggcatcgccggccgtcaagctttgagaagcttaagcggaggcgtagacgctaccgtagctggacatctcantctcggtggtcatgagcataccagcctcgaccttgaagnacgagtaagcataaagggngccgagagcctcangacgagggatggnctcctcgttccat

SEQ ID NO: 170206 - DNA, 647 bp, Zea mays
  Clone ID: MRT4577_86811C.1
cgctgtattaaaaaaaaaaaaaaaaaaaaaaaaaaaaaaaaaaaaaaaaaaaaaaaaaaaaaaaaaaaaaaaaaaaaaaaaaaaaaaaaaaaaaaaaaaaaaaaaaaaaaaaaaaaaaaaaaaaaaaaaaaaaaaaaaaaaaaaaaaaaaaaaaaaaaggggccgccctttttaaagatccaaattttcctcccccgccctcccaaaacaattttttttttttggggcccccaaatttaattcccgggccccgtttttaccaacggggggtggggaaaacccttgggttccccaaattaatccctttggaaaacaccccctttttcccctttggggaaaaaacaaaaaggcccccccccattccccttcccaaattttgcccccccctaatggcaaatgggcccccccctttattggccctttaaacccggggggggggggggtttcccccaagggaaccctttacttttccaaggccctaaacccccgtttttttggttttttccccttcttttccccccagttgggcggttttccccggaaagttttaaaaggggggccccctttaggggcccatattaagggtttacggcccccttaccccaaaaaatttttttagggggggggttcaccttgggggccccccc

SEQ ID NO: 170207 - DNA, 267 bp, Zea mays
  unsure (1)..(267): unsure at all n locations
  Clone ID: MRT4577_86812C.1
cacgcggccgcccactcgtcctcccactcttccncccacgcttccgcctagatcatcctcnatcnngggacncggaggtcccgcgacttgggctgggtcaccttctccacnnannanncnatncnnaaccccatcnagggcatgaacggcaaggagctggacggccgcaacatcacctttaactaggcccaatcccacaacagccgtngatgctgctgctgtgggtactgtggttgccgttgaggctgcttctacagcggtggcggg

SEQ ID NO: 170208 - DNA, 262 bp, Zea mays
  Clone ID: MRT4577_86813C.1
gggcccaaaagacaagaaactttatgggccaaaaaactcattatccggggggaacaaaatgggaaaactacttggggaaaaactggggggggaattctggaagggtcttggaagagcttcctccttccgggaggggcccctgggcctggggcatccaaagggggggattcctcccggacacagggtttctttccccggccaaaacctcccttagggacctttccacctcctttctaaacaaggaacccttccggaggggcac

SEQ ID NO: 170209 - DNA, 413 bp, Zea mays
  Clone ID: MRT4577_86814C.1
taccggattggatgtcgaggtagacccacgcgtgcgcccaacgaccatgagcttgatgtactcgattacgcagacacttatttgacacgatggggacggtcccgtgcccttcttatcatgatcgtggtacaagcgcggaatcacgcttgagatcgggcgttagcgctgcaaactcatgccaaatcgggtcatatacagccggcgggacatctgaacacatcggttaacctgccagttcgggtgaatctagcaccaccggtcgaccttggacctcgggtcaagcgaccacggggggcccatggcggcggagctggtccgcgtctcggcgtagatcccgagcacagttctcagcaccttcgggctgatcaccatctgcatcgacatccatgtctgcttcgacgtgctcgcgcact

SEQ ID NO: 170210 - DNA, 1459 bp, Zea mays
  Clone ID: MRT4577_86815C.1
gcgttcggtaaaaccgtgacagtatcataatggcataagaggttcttttattttgtttgaacattctagtcagagtaagttatgtatctgttttctacatgctgaaggttatactcaaaccacttgtgaaatggctctcaccctatatctttctttagtgaatcaatgttggtattttagtagtagacttcagtcgtcagccatacttagcttttttctgctagtactgtactaatgttttgttcctccaagagaccgggaagtaaaatttaattggttcatatctttggtttatcattgtgttttttttggctattgcagtacttatgttaccaaagcaaggctagtaaatcataccggaaagaatggtgatggcgtcttggtcttgggtctgctagatgcatgcctactgccttatcgcaaagctagcttacctggtcatacgaatttgtagtcggttctgatctaattgcaagtgcatctagtaacttggattttttcgcaaaaaaatatcgggtgttcacgcctggcccctgcgcttgcagctactgaagagacaggagcaaagagttaacaggagatgaatgcccctgaccgttatgagcgtttcgtcgtgccagagggcaccaagaaagtgtcctatgagagggatacaaagattgtgaatgctgcatcattcactgtcgaacgcgaggatcacactgtaggcaatatcctccgcatgcagttgcacagagacccaaatgttctctttgccgggtataagctccctcacccactccagtacaagatcattgttaggatccacacaacgagccagtcctccccgacgcaggcctacacccaggctatcaatgatctagacaaagagcttgagtaccttaagcaagcttttgaggatgagaagaacaggtacgaggacaggatgaagcaggggttctagatgaatggaatagtgtgggagataaacttcctgtgttagttttatcctaggcgagtcaacaatgaaacgaacgcccaaggattgtgaatgtctgatccctgaactaaggttgcttgctgtcgttttactgtcatgcttgtgtcaatattcgtattattgcaaacacaccaatggagttttacattgacatcctcagattgttcgcaactagataattgaagtccaacacccaggttatcaatgaactagacaaagagcttgagtaccttaagcaagcttttgaggatgagaagaacaggtacgaggacaggatgaagccaggggttctagatgaatggaatggtgtgggagataaacttcccgtgttagttttatcctaggcgagtcagcaatgaaacgaacgcccaaggattgtcaatgtctgatccctgaactaaggttgcttgctgtcgttttactgtcaaaacacaccaatggagttttacattgacatcctcagattgttcgcaactagat

SEQ ID NO: 170211 - DNA, 353 bp, Zea mays
  Clone ID: MRT4577_86816C.1
ccttttaaacttattttttttttttttttttgggggttctttttaaggggttttttgcggatttccccccaacaaaccccagtttatttaaaaccaaactttccatgcccaaaaaacccgggggggtccaagtaaatcctacccaaaaaaaaataacaaagcttccccataaaaaaaaaaaaaatggctcctggtcacacccttaaattttccctaccaatgtttacccaaaaaaaccccattttatcttttttttaaaaccggggcctttttttcccaccccccccctgccaataatatactaaagtggttaccccccccccccggaaatgtggctcccccccccccccccc

SEQ ID NO: 170212 - DNA, 198 bp, Zea mays
  Clone ID: MRT4577_86817C.1
ttttatcacgccgatgcagatgacccctcgagatccacccaacaagttgctgcatgggatgatcattccctggctgggcgctggcgagggctctgagcgagcgcaccaacaagctccaggaggcggcactgctcaccggcgaagaggtcgatcatgatatatctcctgataccagggactaggatggtcttgtggcag

SEQ ID NO: 170213 - DNA, 239 bp, Zea mays
  Clone ID: MRT4577_86818C.1
ccgttccaacggcaccgggccgggttaccgaagggggaggatgttgtcgtcttccttgccggggggcacccgcctggatctggatgggaaccccattgcttccctcaccatctgcattatcggcgccggcgggttcattggctcccacctctgcgagaagcttatgggcgagacacaccacaccgttctctctgttgacgcctactgtgacaaagatacccaccttgtggaacccccgc

SEQ ID NO: 170214 - DNA, 941 bp, Zea mays
  Clone ID: MRT4577_86819C.1
aattcggcacgaggcgagaacagaccagtgtgagagagagagagcggggtcacagcagcgcccagcggccgcagcacaaaagcgttcgtcgggggctttggattcccaggaattccgttccaaagcagccgaatcgcgggaccccgcctgctcgctcctcttcttccctccaaccgcccccccctcccctcctcctcccgccgccgcagcgagagccgagagcggagcgagcaaatcttggcgtttcgcgcccgctctcgcagtctccgggcgggggccgcctggcggagtggttacttccccgctggcttcttgctgcgccccgccattaaagccggcgccatttgggtttctctctccacctctctctatccgccccccaccgcgctctcgccctccctctccctctctagcggtagattggtgctgttcccccctaatcggtcggcggttgggggcccgggttcccgacgtctgcccgggagctcgaccgggcctccgatccgggctcccaagccgccgcctcccggggcgcccctccggaattcttgctttctcgggctccgaatctcgccgcctgtcgtcgccagcggctggcgcgggggcttggttcccggcgtttcattgcgaattcgggggcgatctggggcccctggtctggatggcgaggatttgagtggattcgagacgaacaagtggaggtggagccctgatctgggtggcgcccccgccgtgatatgtgccatgaggaagctcttcttctccgagtcggcctgcaaagagaccaagcttcactccgcgccccactcatggctgcccctcgagagggggaagctctccaagttctccggccatgccgccgccggctcctccatgtaagctccatcctggtcgcttgtttccagtctccaagttcgtttatgcttgaattgtgtggcgcg

SEQ ID NO: 170215 - DNA, 426 bp, Zea mays
  unsure (1)..(426): unsure at all n locations
  Clone ID: MRT4577_8681C.1
ccggccgggattcaacgtcgagcctgtcgaaccgatccgcacacccggaaaccgacttattcacaatggctacgtctcaattgagggcaattggcgtccttgcgcgtagcgcgcgcgtctcccagcgtgctttcaccacctccgctcggcaattcgaggccgctgtctcaaccaagaccaacgaggcatcacccgctgccgccgacgagaacaagcccgctgtgattaaccaagcccccaaccgtgtgggtgtctggtcacgtagccagaagccccgtgctcaggctatgaccggcccccgattcgagcagaccgacttcgaccttcagcctcaacccaaggctgctattgagatgatccacaagcagcccgtcacatggactcatgaccgaattgttgcttgtaacggtggnggcgnncctgaag

SEQ ID NO: 170216 - DNA, 275 bp, Zea mays
  Clone ID: MRT4577_86820C.1
gggattggggccattttttaaaaaaaaaagggcccccgggttcatgctaaatcggttacttacacaagagcttcttttgtggtttcgggtgaaaaccagttaagaagatttagaagggttaaaacgtcccttgattttgtacaaatttgggtggggggctgcatttttacagagtcagttgtttattggacaggaaggggcttggttcacaaaacaaaaaccttggggtgactcgcgaggggcctgtttgcaggcttgcagtgcaattaaacttc

SEQ ID NO: 170217 - DNA, 240 bp, Zea mays
  Clone ID: MRT4577_86821C.1
cctacgcgttcgacctcgcgtttggccatacatacggacgcgcagtcgcacattcggcatctagtcctcccgtcgtgacccgtacgcacgatctgcgattggccgacgcccggctcgccctcgtcaacaaaagcacaccgcaagcgagcgaaaccgagcaatagtgacactagaacgcacgggctagctgagcctggatggacgacctgaataatgaagcaactgcgtgatatgcatgtt

SEQ ID NO: 170218 - DNA, 293 bp, Zea mays
  Clone ID: MRT4577_86822C.1
ctagagcggcgcgtcttttttaacgctagacacacaaagaagagagaaaacccagaaagaacaaaacaaacccgaccaccaaggactctgaagggagcacgcatcaagggccccagaacacggcaggcaccggggcgccaacaatttcaagcccgagggggcaaaagacccaacgacaccaaaggggaagtcatctgggcccacgcatcccgctacaccgaggaaaagcgaaacaaaccatgccgaaagcgaatgcatgccacgcaacggggaaaccgaggaccactagaact

SEQ ID NO: 170219 - DNA, 232 bp, Zea mays
  Clone ID: MRT4577_86823C.1
gtgtgacgttactcatctgtagaccaaaggagataagagttattctgtcccggactataagtagcaaccaacaccattgattgagcccatgtgtagttaactcgttctgtagagcatgcatagatgcttgtctcaactgttgatagggaagtaacgtgctcaacatgattgttaacaaggaccgacttgtggctaactgtacatatgataggaacggaaaaagaataatcct

SEQ ID NO: 170220 - DNA, 396 bp, Zea mays
  Clone ID: MRT4577_86824C.1
gatgactacaggaagaaaccaagcagtggtagctatggtgggggaaggtacgaggatgaagatgattacaagaagaaacccacatgtggtggctatggtggtgggaggtatgaacaagaagataattacaagaagcctacagatggcggctttggtgacgggaggtatgagcaggaagatgaatacaagaggccccatcccatccaccccgtagcgaccacagaaggcggaagatgatgagcgcgtacaggttcataaagtgcgtcactgtcggagacagcgccgattgcaagacctgtatgctcatttactacacatacaacacctttcacaccgactatgttacgactgtgtttgacaacttcagtgctaacgttgaggttgatggtaacactg

SEQ ID NO: 170221 - DNA, 245 bp, Zea mays
  Clone ID: MRT4577_86825C.1
aaaacatgtcgagggtaaaataacatcaaagaattctaatgaaggatctaccggtttttagcggcccacggcacaacagaaactgacttattatacacaccagggcgggaagaattgtgcgtatacgacacttgacaacttaccgaatcccatttccccttgggggatctatcttttaccagactgacgaggattttacgcctgacacaaccctaaacatttagccaaacccgaaaaaacactcc

SEQ ID NO: 170222 - DNA, 508 bp, Zea mays
  Clone ID: MRT4577_86826C.1
ccggccgggacgccgttcgatcgtctggcgcgtctgccaacctgtgttgatccacatgactacctcgaggcgtattgacgataggaagatatactgactgcagaagaatatcacgagcatggcctctgttcctgagacaggcaagaaagcaaatgagtatcctcgttgtacctattcttcttggattctttgtcttcctggctgctgcatcatctctctttcacataatcactacagcatcagacgctggttgattctgatgacaatcggccacttacttgtagtcactctaaagaacaggaacatgtttgacatatgcaagtcgtcccttaaaaactatacaagtgtatggagtatgtgctactctacacatgtactctctgtactgctgcaacatgaagactttgaacccataatgtatatgccatatatatatatatatgcaactggaagtgctacattatacagtcacttagtctgcacaggaaatacgcgtcacatccgtaat

SEQ ID NO: 170223 - DNA, 343 bp, Zea mays
  Clone ID: MRT4577_86827C.1
gggaaaccccaaaaatgccccatgggttggggggggggtttactggcataaaaccatccttggtacaagcacaccattcatgggttagccaaaaaaagagaagggggaattccctcccattttcttttacgaacaaactccagggaacccccccaccacccatattggacttacttacttagcccaaaaaaaaaaccctggatttggaaaatctttcaaccctaaaaacccacgggggaccaaaccaaacgtgaaggggtttttttttttttaccccctttcccccccaaaggatttcccaaaaccaacctttttttttaaaccgggtttacgtccaagccaa

SEQ ID NO: 170224 - DNA, 289 bp, Zea mays
  Clone ID: MRT4577_86828C.1
ggggatttgacaaactcgacttccggatctcgatcaccaaagttcgcccggatcgcaggtgggtcattcaaggccgtaacctgtacttagccggtatgcacatgtcgaagaacctctacgggaggtccacccacaagacagagggcctgatcaaattctaccactaccaccacttcataaacgtcattgaacagccttgccctgagtttgtgccaatgccagtcaacctgaccaagacgatgttccaaggggttccctatctataccacgataacattaaactattggc

SEQ ID NO: 170225 - DNA, 240 bp, Zea mays
  Clone ID: MRT4577_86829C.1
cataacgaggcacaaatgttcatatatgaattggaattatatgatttcttattaggcctatcctgaagccaaaggaaatgcgatcggaattccttggggaattccaattccacattttcaagatataatgaggcgaaaacgttcatatatgaattggaattatttgataacttattaagcctatcctgaatccacaggaaatgagatcggaatacctcgatgaatatcaatatcacattt

SEQ ID NO: 170226 - DNA, 380 bp, Zea mays
  Clone ID: MRT4577_8682C.1
ttcctctccacttttttttgatgtccataacctcatttactctctggggcttccatgcaattgcagagaatgcgttcattgatcttcttcgtcctcaacgaatagtccctcatttgggttgccatgccactcctgctctagttcctggagtatcttgtagccagacaaactcgtattcacacggtgttaatgccccacgcgtccgggaggccctacctggtgaccaatgttggcttcaatgccaagaaacgttttcgtgaaggatttcaaacgtgggtacgtggccttcaacttttaagatgaccctgccaaggatggctgcttgcttctacctccaaggtatcctcacgaaccaccctgggcagatggccaaggctatg

SEQ ID NO: 170227 - DNA, 623 bp, Zea mays
  Clone ID: MRT4577_86830C.1
tcgagtttttttttttttttttttttttttttttttttttttttttttttttttttttttttttttttttttttttaaaaaaaaaaaaggttttgggtatccctacccgggggggaaaccccaaggggatccaaagggcaaatttaaaccccgggggggggttggggttaccttttccccaaaaagcaaaatttgataaaccccaaaggggcccaaaaccaaaaaaaaaaaccttcccagaagtgggggggtaaaaaaaaaaaaaaccccacctttttttgcccccgagggcgggcccacccaaaggggggggcccctgttgcataagggcccccagcaaaaaaaggccggggccccttttaaaccatgaaaaaaccggaaattactttagggggcccactttttcctttttttaaaatcatccaaacagcggcgggaggggtacttttttccttttttaaaacccgttgccccccaggcggggaaaaagaaatcgggggggggtgcccacttccccaccccttttgggcttgggctggccccccattggggaaaaaaaaattggcctaaggttatataaacaggaagttgtctcaaaaaactttgtttaaagaaagctgaaa

SEQ ID NO: 170228 - DNA, 161 bp, Zea mays
  Clone ID: MRT4577_86831C.1
atctaactcccacttgtaccaactctgcaggtcactagccaacatcggcctgaatataaaagccattgacgactctcgcccggacataagagactgcaccaacaaaataatcccgtacacactgcccgaccaagtgaaaaccatgctcaatgccatgttct

SEQ ID NO: 170229 - DNA, 1244 bp, Zea mays
  Clone ID: MRT4577_86832C.1
gtttttttttttttttttagtacaatcttcaagaacttacaaattcacccttaactgtacagggaataatagtacatctagaaacttagtgatctatgttgataaatgcttactgccaaagaacacacagttctattaacaatgttttgtttcaccttgtgttttttccacatgtaacaggggtacagtgatttctacagtggactggtagattccgtgagctctgaactgaagggatccaaggattttacaaagttatgtgcaggtctctcgatccttgggtacatttcttccgagtcagatggaacttgcaccaaggcattttcccaactcctcacattcctaggccgcagataccccaaggtaacatttgtcatttcttgccatactaagcaggagtcggcacagttagagagtatctattgagatgtgatcttcttacaggcctgaaaagctgcagccgaccaggtgtactaattacttgtgctgctgcaaaatgatgggcttttttcggtaaagaatatttcttgaacacgggaaggtacagtgagttctacagtggaagggtatgtgccggaagctctgaactgaagggatccaaggattttactaagttatgtgcaggtctctcgatccttgggtacatttcttcggagtcagatggaacttgcaccaaggcattttcccaactcctcacattcctaggccacagataccccaagatccgaaaagctgcagccgaccaggtgtaccttgtgctgctgcaaaatgatgaccttattgtgtcggagaatatggataaagcccaggaattacttgcggagacgtgctgggaaggggatgtggaggaagcaaggcgtaggaggtcagaaatcaacgagatggctggttttagggtcaccacttcacagaagtctggaaagcaagaaactagaacggtcgccgcttcgacggatgagaacagatcttattcgtcattggtcgatttcagcggatactaaagatcgccttacatcctattttcgacgaaaggtgtcgattgtactagtgcacaatgccgaatatcactaaacgtttgaatgagcggggttgcttgtggattttcttttttttttttttttgtggtgggtgttttctttcttttcttctttttgtgtgtgagtagaagagttaggctgttttcagcaacgtcctctaaatttcatcctctaaagaaatattctttgtcctttacagtacactct

SEQ ID NO: 170230 - DNA, 242 bp, Zea mays
  Clone ID: MRT4577_86833C.1
tccttgctcgcgccagagcggacacacctttgtggtttcagggaacgcacgcggtcttgtgaccatgcccaggctccacagactgtagatcatgcccctcttaatcttggatcccaggcactgatgtcgaaggcgggggtagactgactgcagcagataggacaaccagcatgactgctccaaggttggaataggacgcgttagtgtaccccaaggcaagcttgataaacagctacctactg

SEQ ID NO: 170231 - DNA, 433 bp, Zea mays
  Clone ID: MRT4577_86834C.1
ctctaacacaacatgttttttcgaaagcgcaagagaactgagctaacacaacatgttcagcatgtctaattagtacataacatagaaaagggtatcaacaaggaatacaaataacacaatagttgtatctctgagacagaccccatcgttcatgtagcctgcaatattgccaagaagaattgttgtgtttgtcctgataccaggttcttcgtccacctgtagcttagagagatattttaagagagatcctgagattgtacgctgagataactgcaataacggaccaaacaatcagtcatctgcaagtatagcttttggcaggaaatagaaatcagtgcatgagggattgtaggatctaaaatcccagaaatattccatcaaagcatgccatggcaaatagttgtgccgtatgtgcacgctcctgcatctaaag

SEQ ID NO: 170232 - DNA, 623 bp, Zea mays
  unsure (1)..(623): unsure at all n locations
  Clone ID: MRT4577_86835C.1
atcttctataaccctaatccctcgcacgaatccgccctcttcgcttctgtctaccgtcatcgccgcagctccttccgaccgatcgccgtgtggccgccttctacgataagccctacgccgcggatttcaggtaaacgcttgacaagtatataggcggagcagctccgacgatgacatgaagcttctgcgccgaccactgtcggtcctccctccaggccggcacggagaagccgagcacgccgaccgggacctatgcaaacattacctctgcgccaaactaatgacgggtggcggacctgaagataggttcgatctcgccgatgcttgcgcgagatccagcatcgagcccaacagagcttcgttcgacctcgctgctcaagagaataggtcgaccgatctggatgtgcgacggcgccatgaagatcattgaacggatgctgcacatacgaacagatctcgatgacgaatcctatgattcggctgtaggtctgattattaaacagaaccacgatggctcatgtctgcagtataagaagctgacgctaacgtcttgctacacgccatcactaactgttttcactgcatgtatccgagaatgcgacgnagtctgggaaggtggacac

SEQ ID NO: 170233 - DNA, 1945 bp, Zea mays
  Clone ID: MRT4577_86836C.1
cggggaagcctaaaccccgaaattataaagcggccgggctcggccgcaaggcggggatcttcgtgaggaccttcaaccatctcaggcggaatggcggcttctggtgagggcgcgtcgctgccgtctccggcgggcggggaggatgcgcaccgccgccgcgtcagctatttctacgagccgtcgatcggagactactactacgggcaaggtcacccgatgaagccccaccgcatccgaatggcgcactcgctggtggtccactacggcctccaccgcctcctcgagctctcccgcccctacccggcctctgaggccgacatccgccgcttccactccgacgactacgtcgccttcctcgcgtccgccaccggaaacccgggtgtcctcgacccgcgcgccattaagcgctttaacgtcggtgaggactgccccgtgttcgacggtctcttccccttctgccaggcctccgctgggggaagcatcggcgccgccgtcaagcttaaccgcggggacgccgacatcaccgtcaactgggcgggcggcctccaccacgccaagaagagcgaggcctccgggttctgctacgtcaacgacatcgtcctcgccatcctcgagctcctcaagttccacaggcgtgtgctatatgtagacattgatgtccaccatggagatggcgtggaggaggccttcttcactacaaaccgagtcatgactgtttcctttcacaagtatggggattttttccctggtactggacatatcactgacgttggggcagccgaagggaagcattatgctctgaatgttcccctgagtgatggtatcgatgacaccacctttcgtggtctgtttcaatgcatcattaagaaagttatggaggtttatcagccagacgtggttgtcctccaatgcggagctgactctttggctggagacaggttaggttgcttcaacctgtctgtgaagggtcatgctgactgcctccgtttccttaggtcgtacaatgttcctatgatggttttaggtggtggaggttacaccatcagaaatgttgcacgctgctggtgctacgagaccgcagttgctgttggagttgaacctgataacaagctgccttacaatgattactatgagtactttggccctgattatactcttcatatccaaccaaaaagtgttgaaaacctgaataccacaaaggacttggagaacataaagaacatgatattggagaacctgtcaaagatagaacatgttcccagcactcaattccatgacagaccgtcagaccctgaagctccagaggagaaagaggaggacatggacaagaggccacctcagcgcagcagattatggagcggaggagcttacgactctgatacagaggatcctgacagcctgaaaagcgagggtaaagacgtaactgctaacttccagatgaaggatgaaccaaaagatgatctgtagaagtttcagaagtgcccccaaagttactgagttgtcaatgggatcgtcgacatgcatgttgaagagtggggacgcatctgaacctgtccgtgctgatatctgccgctgtgcatctgtaacagactgaacgttttgctggttccagctttcctgcgtgttggtaactagactagatatatggccctttggtgggtcccaaactgttgagctggagaaatgaagtgattattctcgcatgatttactgtagcatgcatgtaatcattacccattagttcattaggctatcaacagtagtttactcatccccatattcaaacttcactatgcgcgcatacagtgatttgagtgaccatatggataaactttgaagatgaattttgggtagtgtttggtttcgaagtgtaatggaatagagccgccccgctcttaattcagcgccgtgatggcggacggcggctacggcggggggggcggtt

SEQ ID NO: 170234 - DNA, 547 bp, Zea mays
  Clone ID: MRT4577_86837C.1
ttttttttttttttttcccgatcaacctcgtgcgcactagcctcttttgcataccccctatgatttgttgcatttgatctaactgctcatctatatgtaagctctaagagattggatttcgtttgtctcgcttaccttggggtagtcatagcaggtcggacagaaagcgagatcagtcgcccgctaccggacgatcttgtgattccagcccactttgaagatggctaggaatttttcctgtgcttccttgatcagctagtccttgtgctcctcaaactcctgatgatattcaactggtagagtttcccaggtcggctcaatgatgttgctgggagagacgtcagagctatctttgaatgggccattgaggactgatctgatagatctttatgcgagttccccagcggagtcgccaaaaagtgtgttggcactgatctgggcaccaattattgcgatgactaccggcggcggtgctctctattgaagcgcgaacggtccgcagccgagggccggacgatccatgacatggcgcagaggctagggtttc

SEQ ID NO: 170235 - DNA, 313 bp, Zea mays
  Clone ID: MRT4577_86838C.1
ctctactgcacctcgatccacatgttccggttcacggacgacgactggcgcgccgtgcgagccatgctgctcaggcattccgtcagccattaccaacaccacctaaccatggactcccactagctccatgagctcgcggctctcctaatgaacccactggacactgaacacctcacgctgcactaagtcttcaacggatgccgtcaactacttcgcaccgacgatgtacgactcctgcacgaagaccctgagcttctgcacctcattgacgaacccagcgctgactttgattccacataccgtcattgcggct

SEQ ID NO: 170236 - DNA, 367 bp, Zea mays
  unsure (1)..(367): unsure at all n locations
  Clone ID: MRT4577_86839C.1
ggcaattccagacagttttcttcaaaatgcgccctgctattattcttaatggattctcatcacatcaattgaagttaattcaacaggttttgagaaaaaactttagggatcttatttttgtctgtacatttggtgaggatgacacatctgaaaagaaagtagtttattcagacactgatgaggacagaatattattaatgaaagatgtgcaggaagatctactaaaaaacagggaagaaagaatcaaatcagcaataggaatccgccatgtcatcgaccttctttcatcagaaaggaaattgattgttgggccttgttgtttcctagatgttgcacatgngtccagcccgtttgctcgtcctttttc

SEQ ID NO: 170237 - DNA, 232 bp, Zea mays
  Clone ID: MRT4577_8683C.1
gtgagtttctctacttcaaaagaataaccacaccgggggacgtggaggtgcccgggattacgcttaaacacgttctcacacgccaaccaaatggtaaatgctatagggagcatggacggaaggaagctttgcaggacgcatgatgacttgactactacaagatcctgcgcgtcgacaagggcgccaccgacgacgacctcaagaaggcctagtgcttcgggagattcttatg

SEQ ID NO: 170238 - DNA, 386 bp, Zea mays
  unsure (1)..(386): unsure at all n locations
  Clone ID: MRT4577_86840C.1
caaaggcccaaacccagccggtcagtcccccaccccccagcagccatggagttcggcttccgcgcaggaaaccgcacgcagcgccgcccttcccccgatcgacgcgtcacagcacagcaagccggacccttccacggcgaccacccgcagccctcgccgttgcagtgggaggatgcggcccggcgcgagcggatcaaacgcgaggtggagcgccggctcatcgaggaggaggtccgcctggagctcgcccttgagcgcgcccgcctgcacggtggttttggccccgccccgttcctcgggaccgacggattcgtcgagccggtgcagtcaccacctncacctccaggccggttcttcagggccgacggtccatcgatgacgccggc

SEQ ID NO: 170239 - DNA, 327 bp, Zea mays
  Clone ID: MRT4577_86841C.1
tttttcttaacaggagtggaccaacctttaatgtttagacgatcgcgtccaataagctgggcgaagcgcggaggcagttcggatctgaatgcgtgctcgcccagctggcgcaagccctacgtcgcgccgaccaaacaaccaggacctacagcgtcgcggccaaggagagaacggtgcggaaagcattgaataccgcattacataaagaaagcgccgctgaccctggtggtccctcaaagagagaagagggtggcgagtaccaaggtgcatacaagatatccaaaggtgtgcttgacaagtatcggcccaaaagggctctcgaaactc

SEQ ID NO: 170240 - DNA, 997 bp, Zea mays
  Clone ID: MRT4577_86842C.1
cattgggtacctcgaggccggccgggaccccggcagcgaccagccagtgatcgaccgaggcagatactgactaggagcagagagcagcggagatggtgaagattccgagccccaggaggctgttcaggagccggtccaggagcaccaccatcatcggcggcggcggcgcggacatctgcgccatggtcgccgagcacgagaggatcgagtgggaggtgcggcccggcgggatgctggtgcagaagcggcgctcgacggaggacgacgcggcggcggccgtggagtacatcctggtgagagtctccaccaccgggtggcagtggcacgacgtctccatcgacgccaccgcaaccttcggcgacctgaaggtgatgctgtcgctggcgaccgggctgtggcccagggagcagaggctgctgtacaggggcaaggagagggacgactgcgagcacctgcacatggtgggggtccaggacaaggacaaggtgctgctcctggaggacccggccgtcaaggagaggaagctcaggtcaaccaccttggcgcagctcatgggcgtgccctgtcactccttcatccaagtgtagagagaaacccccggggaatatttcttgccatttttctcccgtctcgtcgtcgtcgttctccaatttgcctgcgtgagcgaagggtttcagtccagtctaaccgcgtttgttcagagcctgctgagttccatctcagggcttgaattcggccaatcgaatcaagacagtcgcaaacgataggatataaagatgatggatacatggcgtaaattactgtgaacgggtacgtaatgtcatcccagtgccagtgtgcgtgagccagtagttctttggttccttgctctgtatatattctctctttttttttcttcctgagatcagcaaaacagttcggaattcaatagatgctgctgtaaatcccttgtctttaaaaaaaaaaaaaaaaaactcgagactagttctcctcgtgc

SEQ ID NO: 170241 - DNA, 379 bp, Zea mays
  Clone ID: MRT4577_86843C.1
ccggccggggaattcttcacccctctccgatctctcacgcgcaccgacgcggccgatgtcgtcgccgcttaatggcatgctgcgggcacggctgcgcggggcagcgcgcgttcgcggtggcggcggcgagggagacgcgcggtggaccaccccacgtcacgaggagcgccccaacgggcacctcttccaccgggcgccgccgcctccgggcgaatctcccaagtgtgcggattgggagctgccctgccacgtgacctccttccccaccgacgtgatccacgttgccgacctcaacacgaagcccgaccttactatcaatacccgccgcgcaccagaatgttctcgatctcctcccccacccggagctcgccgttgccca

SEQ ID NO: 170242 - DNA, 910 bp, Zea mays
  unsure (1)..(910): unsure at all n locations
  Clone ID: MRT4577_86844C.1
cattgggaccctcgaggccggccgggaacatccagagaccagagccggtgactggccgagatnatacagacaggagcagagcgcggagcagctgctagcctagtagagagaccgagagcagcggggatggtgaagattccgagccccagcaggctgttcaggagccggtccaggagcagcaccaccatcggcggcgccggagcggacatctgcgccatggtggcggagcacgagaagatcgagtgggaggtgcggcctggcgggatgctggtgcagaggcggcggccgtcgcccgaggacgacgcggcggcggccgtggacgtggagtacatcctggtaaaggtctccaccgggtggcagtggcacgacgtctccatcgacgccatcgcaaccttcggcgacctgaaggtgacgctgtcgctggtgaccgggctgtggcccagggagcagaggctgctgtaccggggcaaggagagggacgaccgcgagcacctgcacatggtgggcgtccaggacagggacaaggtgctgctcctggaggacccggccgtcaaggagaggaagctcaggtcaaccaccttggcgcagctcatgggcgtgccctgccactccttcatccaagtgtagtagagactagggggttgtttggtttcatgggactaaactttagtccctgccttttagtctattttagtccctacattactaaatataggaaataaaagggaataaatcagatttccttccctctctttagtcctatttttagtaatttaagactaaaaaagagggactaaagtttagtctcatagaaccaaacatgccctagagagagaaccccccggaatttcttgccgggttttttcgttttcgntttttttttttcagcttcttgaccgcgtgagcgact

SEQ ID NO: 170243 - DNA, 800 bp, Zea mays
  Clone ID: MRT4577_86845C.1
cctcgaggccggccggggccagtcccggcacaccggcagcgaccagccagtgatcgaccgaggcagatactgactaggagcagagagcagcggagatggtgaagattccgagccccaggaggctgttcaggagccggtccaggagcaccaccatcatcggcggcggcggcgcggacatctgcgccatggtcgccgagcacgagaggatcgagtgggaggtgcggcccggcgggatgctggtgcagaagcggcgctcgacggaggacgacgcggcggcggccgtggagtacatcctggtgagagtctccaccaccgggtggcagtggcacgacgtctccatcgacgccaccgcaaccttcggtacgtccgccgtcgtccttctgtactgtactgcattgcgttgcgttgcgtgctgcctgcaatctgcatgctctccattgtccctgctgctgctccctctgcgaccatatccctctgttcgctaagctgcgtctgatgatgatgatccaacaacccaatgcaggcgacctgaaggtgatgctgtcgctggcgaccgggctgtggcccaaggagcagaggctgctgtacaggggcaaggagagggacgactgcgagcacctgcacatggtgggggtccaggacaaggacaaggtgctgctcctggaggacccggccgtcaaggagaggaagctcaggtcaaccaccttggcgcagctcatgggcgtgccctgccactccttcatccaagtgtagagagaaacccccggggaatttcttgccatttttctcccgtctcgtcg

SEQ ID NO: 170244 - DNA, 507 bp, Zea mays
  Clone ID: MRT4577_86846C.1
ggcgggatgctggtgcagaagcggcgctcgacggaggacgacgcggcggcggccgtggagtacatcctggtgagagtctccaccaccgggtggcagtggcacgacgtctccatcgacgccaccgcaaccttcggtacgtccgccgtcgtcgttctgtaccgcattgcgttgcgttccgtgatgcaatctgcatgctctccattgtccctggcctgctccctctgcgaccatatgaaactagtgaacggggagctgttcgctaagctgcgtctgatgatgatccaacaacccaatgcaggcgacctgaaggtgatgctgtcgctggcgaccgggctgtggcccagggagcagaggctgctgtacaggggcaaggagagggacgactgcgagcacctgcacatggtgggggtccaggacaaggacaaggtgctgctcctggaggacccggccgtcaaggtgaggaagcttaggttatccaccttggcgcagctcatggggctccctgcc

SEQ ID NO: 170245 - DNA, 327 bp, Zea mays
  Clone ID: MRT4577_86847C.1
agcaaaaataatgttgcatacggtaccatagacataccactaaagttatgctgatgcggatgcatccacccaccagtacggatacaagataacggggccctacaaatttgatgtttatagaagcgggtatgttggcaagggcgctaaacagggagggggctaaatttttttttcagaggctcccgcatctatggcggagtgggacgactgttctgtggggcttaaggatcgggagaaggggtgaagttaggtgatgccggcccaaggggtgctcgtgagggccagcttttttgatgggcggtagatgaaggggaagacgcctgggcc

SEQ ID NO: 170246 - DNA, 357 bp, Zea mays
  unsure (1)..(357): unsure at all n locations
  Clone ID: MRT4577_86848C.1
gccgggccgnnggtccagaggtgatggcctgctccttctcttccgccgtgaatcctcccgctgcggggaactccccatccgcggccagccaggcatggagacgcgatgagcccgcgcctgccatgagaggtctagtccaacctgacggaagggacgagcagcgtgcacgagacggtgcgcctggtccaccagctgaccgtcaggggctccgccttcaactctgcctccgaggttcccctcctccgccggctgaacgcgctcgtgggggagctcgacgcgatgcacaaagtagctcgggattttaacatcgggtcgccgatggaggtcgtgaatttgatctactttttttataacccc

SEQ ID NO: 170247 - DNA, 164 bp, Zea mays
  unsure (1)..(164): unsure at all n locations
  Clone ID: MRT4577_86849C.1
cttatcctccctcagagtctggttcatatcctctccgctctcccattataagtgttcgtggtactactngtcatccttatcattattattctcatcagtgctgcacggctttttctaagaatgatgagtagtctatggattggcattcagatattactcctcat

SEQ ID NO: 170248 - DNA, 224 bp, Zea mays
  unsure (1)..(224): unsure at all n locations
  Clone ID: MRT4577_8684C.1
cggttgccggggcacgatgaggaccgcgtggccgctgctcctcgtggcgacggcgctgcattcgacttcggcagcgagggccaggaggacctgcaggttccctgncgtcttcaacttcgtcgantccaantccgacaccngcggcttctgggccgccttcccggtgcacaggnnnggttnggcatgangtattcggganggngggnnaggcaggcctnnaagng

SEQ ID NO: 170249 - DNA, 559 bp, Zea mays
  Clone ID: MRT4577_86850C.1
aataaaaaatattatttagtctttctggatcaaaggttgtatacatgagatgctttacaagagcagcagacaaggtttccgacattgtccctttgtattggactttatatcaacagcatgcatcagtgggtagttacttacattgcagggccaacgttattagtatcagggaggaaataacaagcttcaattcagtgatcgacacactccttggaatgacacctcagactacctagtaatcaagcaattcccttcatgttcatgccaatcacatcgccgccttcaaaaccatcatttcggggagcgactccttcagtttcccttgggtgaatctccttagcatctccagggaagcttttggctggtccatcggaaccatgtgacccgcattgtgaaccttgaggaagctgagtggtccatggctcttcaaaactccagcttctgcaccgtctactacaaacgataagtcagaagaggatacaaagtctttctggccagaccattccatggagtgtacccatctcgagtttccgagccaattgcatataaggtcatactc

SEQ ID NO: 170250 - DNA, 183 bp, Zea mays
  Clone ID: MRT4577_86851C.1
gttgcatcacttgaatatataggctcaggttgccttgcatgtataggatttaaaacgtagaggaggaaaatagagtgcgtcacattctggttgtggtcgatgaggcctgtacttaaaaattcacaattggataaagcatgtctgctatatgcttcttgcagttccaaaaggaactcatgtaat

SEQ ID NO: 170251 - DNA, 559 bp, Zea mays
  Clone ID: MRT4577_86852C.1
gtgcgccgccgcggatggggcagggtgtcgccgcccagctcggtcggaggaagaagcatgtgagagtcctcggatccgaaatggggggctaggatttgatcagggtcagggatgatgcgaaccgttagatcatggttgaacggttgccattaggtagagcgtaccctttcgtgggaattaaatccggacctgagattctggatcgggtggtgatgatcagagcgtgctttaataaaatctgagccgttggatttggatccactggtccagattaaaggataccccttcggctggtggtctttcatatgtgcccctgcctttctgggtaatcaacccgcggtcctaggcatgcgcggtctgagtctgttgaaattttataggtttgcccctgcctttctcgggaattatgcgtgcagtccaaggaaatgggaaatcagggaaagtgatttatgaaacaaatttcttatataaaaacaattccagaatcttgtttaatccataagaaattcatattaagtccaaattaggtcattctaaattcttaaattctataatatta

SEQ ID NO: 170252 - DNA, 279 bp, Zea mays
  Clone ID: MRT4577_86853C.1
attattttttttttttttttttttttttttttggggttttttttatgtgtttggacaggaataaaaaactgtccaattaacgcttaaacccatttgtcttcttatttcaccacaactataaagacgaaaacccacactttttttggttaccacacaccaacaataaaagaaatttttcctaccttattaaaccccaaacaacctgtgtgaaaaagtttggaagctcacaaaaaaagaaaccggggcggataacccagcttggaactgaaaaattaaaac

SEQ ID NO: 170253 - DNA, 820 bp, Zea mays
  unsure (1)..(820): unsure at all n locations
  Clone ID: MRT4577_86854C.1
gccggccgggtcgggaatccttcgactcctcatcccctacccctccaatccttcgccgtcgctcgacgctaccaccaccacgactttcgttcgtgtgccgctgccctagcattatcacgtcctactcccctccctcccccactcgcccctagtagcttcctcatctgggtcggggagacatctccccctctcagatcctccaccagttccccgtcgctaccttcatcgccaccgctctgaggagggcaacaatggccggatcctggtcctgttgggcctcggcaaggcgattctcgttgtcgtgtgcaagggcgaagtgaggtccgcctggcgtcgaagcaggagaagttgtagtctcaccagccttccccctatggcgtacaccccaagggcgaggtgaatccatgggagcatgtgttggggatgggtctcggtgcagtgtttttgaaccagccggtaaagtttgacgagaaggtcaaggaagacctcgacaagatgcttgagtgtgccaggctacccaatgagtagcgctagattggtacagggctaacctgccctatcatgttatgtctgcaaattcattttgctattgttgttgacatttctcacttataatatactatattgtctcagtcatcagccatgataccacaagagctaccagatcctatatcatttntgtttagggtttaggggttttaggttttttggaagaggtggtagtgttcgaatggaatgggctgggttgggtgcgcgttgtattctaaaaccttttatccttaatgcaatattcgaggaaaaaaaaaaaaaaaaaggccct

SEQ ID NO: 170254 - DNA, 465 bp, Zea mays
  Clone ID: MRT4577_86855C.1
ggcgcgtggggacggacggcggcgcggccacaacctccacgaacgccggggagtggatcacgtcctcgagcaggccctgcggcatcatcgggtattcaccgtccccctcgacgccggcgaaagggctgggaacgacgaaagcatccggctttaccggcgccaccaacgcagctgccgccctggcgtcggttccggccgcggacaggccgcgcctgcccccgccggcgcgcggacgcgtgaaagggtagaagtcgtgcagcgcgtcctgcagcagcccggcgtccgcgggctcgctccgcaggacgccgtcccagtcgtccacgtcctcgtccatcgctacggcggggtgtgcggcgacagggaagggcgctgcgatggtcgtggacgtggcgtccgccgccggcgccggagatctgggggctgcggagtggacgtgtccgtggcctgcgtggttgagcaggcggc

SEQ ID NO: 170255 - DNA, 242 bp, Zea mays
  unsure (1)..(242): unsure at all n locations
  Clone ID: MRT4577_86856C.1
gtgtggggttttttttttttaatactaaggaggaggggcgctactgacagagataaaaaaacatcgtccagttggtttccacaaccgacacccaccttattagagaaaaactaggaaacaaaacaaaacacttaagattacagataatattggggaatttgatncgggaaaccaaaattctcaactangctttattcacttcatcatggttcatctcttctntccttcnaccctttcctacc

SEQ ID NO: 170256 - DNA, 255 bp, Zea mays
  Clone ID: MRT4577_86857C.1
gcaaacttactcatgaagagcttgttgaggaagctatggggtatatgtttgctggatcgggtactacatcatcgacattaacatacctgctgtacgagctctcaaaaccagagaacgccgctattcaggagcgtttgcgcacgggggtactggcgatatcagatgatgatatcgtggctatcagaaacaacgcatacatcaacgcagtcatcaaggaaacattacgcgctcacccaacgatcatctcaaccatcc

SEQ ID NO: 170257 - DNA, 687 bp, Zea mays
  Clone ID: MRT4577_86858C.1
acctcgagccggcggaatcttttcaaaaagggctcgcctcaaacgttttcccaaagtgcggctctttgaccaccagagctctagcactgactactcttctgcctgacgtagtctcacgacccggcctcacatttccggcgacgatccctgcaatgggctacgccgccgccattactctccgaggcatgatgatagggtccgctgctgtgagactcgcactagagtggttcctcgaaggagatcattgccaccttgaggagccttatgccggtggcgtataccacggcttctccgaccccgctggctttctggccactcgtgtcttccctctcgcccgagcaacctaccgctactctccaatcctgagcttcctgcttgtcccaaactcactcctccatggtgactgagctgagctccatcttctctgccgctcatttgctcgcatgagagcccataagcaccattctggaatgtaccaggaattcctgacaacatgcgcatgaggactgtggaagattgcctgttccatcccttcacattcaccgttgctaagagaggaaactgtgaacgcaatagtctgggcaggcatactctgtattcacatatgtgtgatgaatgagctagatgtagccagccgattactgttatgctgttattgtgcacttcagagtataaccaatcatatat

SEQ ID NO: 170258 - DNA, 269 bp, Zea mays
  Clone ID: MRT4577_86859C.1
ccgcttcgagccggccgggccgggcattccatccggcgtcttcacaaacgccggctcgctctcgctccgtctccctccctcctcccccgctccgcgtcctccgccgccagatcccgtcgagccccccgcgcccccgcgtccaagatgaaggagcgcatcacgatccaaatcgggcaggcccgcatccacgacgggaacgcgtgctgggaacattactgcctcaagcgcggcatcgagcctgatggaccgacaaatggagacaataccat

SEQ ID NO: 170259 - DNA, 311 bp, Zea mays
  unsure (1)..(311): unsure at all n locations
  Clone ID: MRT4577_8685C.1
gcgctgcgcccgtgtcggatctgagacgagacgagtcccctccccccagctctgctcagcgggggggaacgaacaagttacaatggtgagtgcaaccccgcctcgaccggatctcgtcggactcggatccgnccgaccaccccgcgccgccgcagatcaaagaagatggcagctgtcgacacattcctcttcacctcggagnctgngagcgggggggggccngacaagctctgngaccaggtctcagatgccgttcttgacgcttgccttgctgaggaccctgacagcaaggttgcttgagagacctgttt

SEQ ID NO: 170260 - DNA, 323 bp, Zea mays
  Clone ID: MRT4577_86860C.1
agacaacatgcgacaatccgcgtttccaaacgcttcagttggtacgggctccggccatatacgagcattctaaggctcgaaacggcacctggaggctggcacaatacccgatgctctcatgtcgtgtaccgacaccaccgacggcgacgtcggtggccccacgtggcggcccgttgacccgggcgccggctagatcgccttttacctgagactcagcttcatcttcggcttcgtcaagggtctcatgctgcatgatcatctcacctataagtctactaggatgcgaagcagcgtggtcatggcattctggttcccctcggagt

SEQ ID NO: 170261 - DNA, 294 bp, Zea mays
  Clone ID: MRT4577_86861C.1
atttgtgtttcctcatgatgtttgggaatgggatagggggttggcagctggtgagtttaggctgttttttcccagcctgttttgacactgattactgtatacttgaactgcggtttggaaatgctccagctgttaggttcaaaaaaaaaaaaaaaaaaaaaaaaaaaaaaaaaaaaaaaaaaaaaaaaaaaaaaaaaaaacaaaatataaaaaaaaacaaaataaatttgcaataaaaacaacattataaaaaataaataaaaaaaaaaaaggggcgccctttttaaaggttcc

SEQ ID NO: 170262 - DNA, 409 bp, Zea mays
  Clone ID: MRT4577_86862C.1
acgggcacttagcacgggtgctacagagagatatgggcttatctcccgcaatggaaatccttcttcactgtataggaatacaaatatgaacagatactcttgccgcaagatccttaggatttcttttgtctaagccaaattcctaactaaaaaaacatacatcatattatatgtatatagaatgaaccgaatagacaagattttcctatccctaaaaaagatgaccactcttttctatacattactacatgaataggaccgtttctttgtagagagaaatcagactggattttagttcataccccttccttgattatatgagaccaagaaacaagaaatgacaataaaggtctatttgtgataaagaaatataagaaaactacgacgcgcaaaacacgaaaggaattgt

SEQ ID NO: 170263 - DNA, 169 bp, Zea mays
  Clone ID: MRT4577_86863C.1
caacaagaagcagcagggctccgaggtccctgggtactgacccctcctgtcctcgtcacgtcagtgctgttgcttcttgttgccgccgccgttcttccgctggcacttgtccttgatccactggaacccctgcgacgtgccctctttcaccttcctcatgccggtggcc

SEQ ID NO: 170264 - DNA, 627 bp, Zea mays
  Clone ID: MRT4577_86864C.1
tcgaagccggccgggatcttgtcctgatacactgaaacgagcacatggcgcttgcatgctttccgctaccaacgagtgactctggcaccggccatccctgccataaggctgaaggtgtcaggagctctccgtggctgcccatgacccggaatgccaactcttaccactgcatgtgagctgcctccttcaggacccaatccggagacacgagcggccccccgtgtcgccacccgcaaagacgccaagctcgtagacgagtccatcccagcctgtcggacgcatcccaaggcaactgcttgagccgctgcgacggacgcgacaacacctcctccttcgacgaaggcgccatgcaacgcacaccgccccgcgtcaagcactggacacacctgttcatgtaccagtccacgttcagtatcttagaagacgacgcaaagacctgcaagaatacttccatatcaataaactggaagaggatcaacagcgtgcattatttgaactccagcaaactaacgagatttccaactcgaaatggaccactgtatggatttgcaccgagcgatgttaacaaacgacacaacacgctcaaatacatctcagcgattgaagatacttcgctcatcattcgga

SEQ ID NO: 170265 - DNA, 321 bp, Zea mays
  Clone ID: MRT4577_86865C.1
ggccgcttttttttttttttttttggcggggacaaagaggggaggcccaaaccgggagcaggggggcgaagcaagaagacccaacacatcccaacaacagataaacaggaaccagaggacacacaacacgagaggaggcacctacaccacctcaccggctactgggctccaacaataccccagagggggagccacaagcaccgacgccgaccggacaaacttgaagaccgcgctaaacgcccgaaccctcacgaccgagccacccggaaacccaccggagcgcagccaacccctgaagagcctcatagaacgcgtcccgct

SEQ ID NO: 170266 - DNA, 320 bp, Zea mays
  Clone ID: MRT4577_86866C.1
gggaaaaaactctcttcattctaatttataattcggttaactttttttaccaagtttgaccggggggttctaatatgttacaggtcggtcccggaaattttttacccaaacaaacattggataacctaaccacctaccgcccctttgataacattggcatgctcatgttattcatagagctactaggggtttctcctgtttcctgggcttcagaatacctttgtgaaaaaaataccggctgttttggaactgaaagggttgggtttcattctccaacatgaagaccacgttgacatgagcggcctgctttttggattggc

SEQ ID NO: 170267 - DNA, 530 bp, Zea mays
  Clone ID: MRT4577_86867C.1
ggggggggtttttttttttttttttttttttttttttttttttttttttttttttttttttttttttttttttttttttttttttttttttttttttttttttttttttttttatatttttttttttttagggtttaaatatttaatttggggggggggggcacacaccattgtaaaaaaacaaattttaaatgggcgtgcaaaaaaaaattttttcccctttttaaaaaaaacacttttttttatgtttggttagaagttggccttttttaaaattttggacgcgttctcaaaaaaaagggctttctccagggtggggcccccccttcccgacccctatcttttccccccccccctttccctctttggggtgcgcttggggcttcccgggtttttcgggttggtttcttcttgggtgccatttttttcttttttgggtttttttcaaagtttggggcctggtcgtaatttttaaatcccggggggccttaggttttagtttacaaaccttaaattgttaaaggcgaatg

SEQ ID NO: 170268 - DNA, 320 bp, Zea mays
  unsure (1)..(320): unsure at all n locations
  Clone ID: MRT4577_86868C.1
ggacctgctcgtggcgctcgcctcctcctctggtcccagtcccgccgtctgctcctccagcttcaagttgaagcagagccgccgtcatcttcagctgtctgtcaggacgggcgaacaccactgaacgcagacagagcaggcgaatgcatgtgtgcgactgatttcattttgtgtggaaacttcaaaagagggggagggtggactcgtgggcattcctggcaatgggtggactcactgcctggctggtcggttggccgtccttatcacgggaagaaattcgaagttactaagggccggnnnaaaaaaaagaaggaataaaa

SEQ ID NO: 170269 - DNA, 401 bp, Zea mays
  Clone ID: MRT4577_86869C.1
ctcggaattcggctggtgctgtatacgcacgaacctggggacacccctgcgacccatcaactgggcctggctctttactggagtgtactggtggcaaacaggctccctctgggttgacccagcatgtcgactgacatcttggggcagatggatccatggtccgatcccctgctcatgaacaaagcggaataacagccaccggagaacaaggagtgcagatacgcaaatctgctagcagacctgtataggaatccttaaatggcatgaattcgatgacgggatttcatatcaagaattcgacttggaaacgttcaaccaaaggcagtccatcaccagattgcttgcaagggatgatgaaaaccagcccctacatggatcaaccttaaattaaacagcttcat

SEQ ID NO: 170270 - DNA, 463 bp, Zea mays
  Clone ID: MRT4577_8686C.1
aacccgaaaatatgcccaggaaattaatttttggggggggaaattaagcgggaatgggggcacgggtaaaacaagagcccgggggccaactgggtaattcgcccccccacttaaggggggggggggtctgaacaacccccttttttggccccctttttacgggggggaaccctggcccccttcttatacccagggggaaactaaaagaaagcccccacatatgggccccccccgggggctgcaaaggggccccacctcccccggggggggaggaaccccttttccagggccggaaagggccccccccccaaaaaggacaggggggcccccatgaccatgggatcggaggggaaaaaaatcctgccggggccccccccaaaacccaacccccccctgggcatgggcaggagctcgggaaaaaccgccccccccgggccccccaatgggaccttaaaccgggccc

SEQ ID NO: 170271 - DNA, 150 bp, Zea mays
  Clone ID: MRT4577_86870C.1
cgtcgaccctgcagatgtgattctatggctaatggactgtggcacggggcatgcaagctacctactgcacaccagcgagtgcttgacaagcagatctagcacactagatgctccttacagatggccgtgagatacctggtctgtgtagag

SEQ ID NO: 170272 - DNA, 471 bp, Zea mays
  Clone ID: MRT4577_86871C.1
aaccaaagaaaacccataccaataccatacccaaactgccatggcgtgaaaatagattgacagtaaagaacaggaaccaaccaacacaagacacaacaagctgcagccgaggaaggcatggggcaccgtgccactgacaccggggcccaccatcattaccacccgatgcacactttatttagcccacgtcactctggaagcgtaccggacaagtgcacgcgacagtcactggtgggtacgtgcccggctaacgcctgcacacacacacagtgagagacgccagggaccggatgccactgaacagaaaaatcccgagcgatactgtcatgtacgcgcgcgagcgattaaccctaacagcgggcacgcctatcccctgggtcctggccgaagccgctgtgtgcgcacggtcccactccctgggcttctgagactgctaaggagcaacagcctccgcctcggggggcgggtcct

SEQ ID NO: 170273 - DNA, 255 bp, Zea mays
  Clone ID: MRT4577_86872C.1
cggacgcgtggggcctcggctacggcggcaacaagaagctcgacggacgtcactcccagggccagcttatgcagatgaccatgatggttccaccttcgttaccgtgagaacactctctgaacaaggaggacagactggttcgctattgctggctggttgtgaagcacagagacgcggtgtatggactggagttctgctatgaggatggcggtaggaacgagctgagcggttttagccttgcttgtagaaaggatg

SEQ ID NO: 170274 - DNA, 133 bp, Zea mays
  Clone ID: MRT4577_86873C.1
aagacgcgtagactgtctcgtgcgctagttttcactttaacgcccattaagtctgtagtcggactgggcgagcttgccgatagtctcggcttcctgacctgctcttttcgagcggttggccatccactacatc

SEQ ID NO: 170275 - DNA, 693 bp, Zea mays
  Clone ID: MRT4577_86874C.1
cctggccggacacgatccaactcataattggtgccagtacgattcaatcgaccctttgaatctcttaccagaagacaccgtctttcaacgtcactccctccattactcgtacgacacttccaatctcttccacaaactcaatcatggaataccaagcacctgctcctgctgctggcgccggcggccgtggctgctacaactgcggcgatgcgtctcaccgcgctgccgagtgccctaccaagggcaccccaacctgctacaactgtggcgagaagggtcacgttagccgtgagtgcagctctcctcaggctgagaagacctgctaccgctgtggcggcactggacacatctctcgtgagtgcaccaaggacggcggtgccccaatgggaggccgtggtggcggcagccaggagtgctacaagtgcggccaggtcggtcacattgcccgcaactgctcccagggaggcggctacggcaacggtggctttggaggaggtcgtggtggctactgcggcggtgccggtggctacggtggtgctcgccagaccacctgctactcgtgcggtggtttcggtcacatgagccgtgactgcacccagggccaagagtgctacaactgcggcgaggttggccacttgtctcgtgactgcccccaggagacatcttctgagcgtgggtgctaccgtttcaagc

SEQ ID NO: 170276 - DNA, 835 bp, Zea mays
  unsure (1)..(835): unsure at all n locations
  Clone ID: MRT4577_86875C.1
cctcgaggccggccgggccgggagtatttctcatcaggtcgcccgtcggtgggcgcgggcacgtgacagcgatacgcccggaggccaagataatctttgcatcgttctcggtctcggttctggagagttttatatggccgcgaggtgtcaattattatggagttctctctcccgccccttctctcttcgtgatgctcatgctcctctgcttgccttgccctggtgtggtggtgtctagtcaagtacgcttccgaattaaaagcgctctggcctgcaacctgctgtctgctccgtcctcccacggccggccgcctgcccgcgtcttcttcgccacccctcttctccggtcccgcacctgcatttcttgaccccttcctccaccgcagccagacaatgtctccggcgccgagttcgcatcactcgcagatcaattcgaggaaggagaaacggatgaggaaggtggacaccttcgcgccgcacaacgatggccaccaatggaggaagtacggcgagaaaaagatcaacaacactaacttccccaggtattactacagatgcacgtacaaggacaacatgaactgcccggccacgaagcaggtgcagcagaaggaccacagcgacccgccattgtacgcggtcacgtactacaacgaccactcgtgcaacagcgccttcctcccgctctccccctccgagttccagctgcagacctcgtcctgcagcaccgagtgccacgacgcccttctcggctgncgccgccgccgtgcccggaggaggtggtagatgcaggcagatttggatctatcaggtcttccattttttgtaaatgatcact

SEQ ID NO: 170277 - DNA, 344 bp, Zea mays
  Clone ID: MRT4577_86876C.1
catgaaaaaacatttttgacttccctttgaatttttaccagcacaggaacacagaacagaagttacacggggcacataaaacttaaattttaggcccaaaccgggatttttttctttttcttaaaaaatataaaaaattccctgacccttagtccttaccagtcaaaaatggggggtttgataatgcaacatggggccaaatttttacgacaagatttgtattaaaccccaattaacattggcctggaggggccaccacctttttgtggttgtggcggccaaaaaaaaggataaaccttccgtgtctatgggcgggccttgtgccaccggggatgggcccaaaa

SEQ ID NO: 170278 - DNA, 572 bp, Zea mays
  Clone ID: MRT4577_86877C.1
ccggccgggccccgtctccatcctcccacgtcgccagagccacctccccgcacaatccgggccatgcgtcctacccgatgccacgaacccgatcgcgaaccccgcctgccgctgcaattcgccagtccgccgctatccgcccgccgctgcaaaaaaagtgattctgcgtctgcgcgtgtttctgagaaatctatcttcgccggcaaagaacacgactctattagccaacctccctccacttcgctatgcacgtacaaggacaacatgagctgcccggccacgaagcaggtacagcagaaggaccacaacgacccgccattgtacgcggtcacctactacagcgaccactcgtgcaacagcgccttcctcccgctcttcccctccgagttccagctgcggacaccgtccgggaaggccgtctccatctgcttcgactcctcgtccggggcgccggcgcaagagccggcggccgtggcgtccgtcgccaccaatgccagcggcggctcgccctcttccagcgccgcggaggcgcgccgaggcacaccgccggatatcagttacccgctcgacct

SEQ ID NO: 170279 - DNA, 652 bp, Zea mays
  unsure (1)..(652): unsure at all n locations
  Clone ID: MRT4577_86878C.1
gtgcggcgctcgagccggccgggccggctctctcccgccccttctctcttcgtgatgctcatgctcctctgcttgccttgccctggtgtggtggtgtctagtcaagtacgcttccgaattaaaagcgctctggcctgcaacctgctgtctgctccgtcctcccacggccggccgcctgcccgcgtcttcttcgccacccctcttctccggtcccgcacctgcatttcttgaccccttcctccaccgcagccaaacaatgtctccggcgccgagttcgcatcactcgcagatcaattcgaggaaggagaaacggatgaggaaggtggacaccttcgcgccgcacaacgatggccaccaatggaggaagtacggcgagaaaaagatcaacaacactaacttccccaggtattactacagatgcacgtacaaggacaacatgaactgcccggccacgaagcaggtgcagcagaaggaccacagcgacccgccattgtacgcggtcacgtactacaacgaccactcgtgcaacagcgccttcctcccgctctccccctccgagttccagctgcagacctcgtccgggaaggacgtctccatctgcttcgactcctcgtccgggaccngcggcgccgcgcggccgccaccaccaatg

SEQ ID NO: 170280 - DNA, 679 bp, Zea mays
  unsure (1)..(679): unsure at all n locations
  Clone ID: MRT4577_86879C.1
cgcgaaccccgcctgccgctgcaattcgccagtccgccgctatccgcccgccgctgcaaaaagtgattctgcgtctgcgcgcgtgtttctgagaaatctatcttcgccggcaaagaacacgactctattagccaacctccctccacttcgctgtttgtttcttccaattgtctgcatccaaaccggcggccagcaggtgttcattccactcacacacggctgcttcttgtcccccccgccgcaggtattactacagatgcacgtacaaggacaacatgagctgcccggccacgaagcaggtacagcagaaggaccacaacgacccgccattgtacgcggtcacctactacagcgaccactcgtgcaacagcgccttcctcccgctcttcccctccgagttccagctgcggacaccgtccgggaaggccgtctccatctgcttcgactcctcgtccggggcgccggcgcaagagccggcggccgtggcgtccgtcgccaccaatgccagcggcggctcgccctcttccagcgccgcggcggcgcggcgaggcacaccgccggatatcagttacccgctcgacctgcggtggtctgacacgtacccgtggggcgccggcgccgtggactagaagctggcgtnctgcgccaccgagtgccatgacgccttctcgctggcgcc

SEQ ID NO: 170281 - DNA, 401 bp, Zea mays
  Clone ID: MRT4577_8687C.1
gggggggctggccctaatttttttcccagcatataaagggggagccgggggagccacacaacgaccatttttcaaacggaataccgtataaagccccaagggagggacatgtggaagttgcttcccaacggaaaaaaagggggttaataaaaggggggaaaaacccccgggggccaaagaagttttaaaaaaaaaaaaaaatttggggggggcagggcccaacgggcaaaagtggggggaacccgggtcctccgggggcccgaaaaaaagggcaacccccccacgttaattggtgcccggggagggaggaacaatgcccaaaaaaagggagtcgccggaacccaaacagaaagccgtgttgggtgggccccacaaacccggggggttaatttttcccaacc

SEQ ID NO: 170282 - DNA, 989 bp, Zea mays
  Clone ID: MRT4577_86880C.1
cattgggtacctcgaggccggccgggaatctttgcaccgtaccccgtctcggttccgggccggaggtctcgattattatggacttctctcccgtcccttgtctctcttcgtgatgtgttgttatttagtaagctgttaagctaaaagccagggccgctcctctgctgttaagctaacgcgcgctggcctgctcccaccgccgcccgccccccgtcttcttcctcacccctctccgccagtccccttcctcactgcatttcttggttttctccctccaccggaaccaagcgatgtctccggcgccgagttcgcatcattcgcaaaccaattcgaggaaggagaagcggatgcggaaggtggacaccttcgcgccgcacaacgatggtcaccaatggaggaagtacggcgagaagaagatcaacaacaccaacttccccaggtattactacagatgcacgtacaaggacaacatgagctgcccggccacgaagcaggtgcagcagaaggaccacagcgacccgccattgtacgcggtcacctactacagcgaccactcctgcaacagcgccttcctcccgctctccccctccgagttccagctgcggacaccgtccgggaaggccgtctccatctgcttcgactcctcgtccgggccggcggcgcaagagccggcggccgtggcgtccgtcgccaccaatgctagcggcggctcgccctcttccagcgccgcggcggtgcggcgaggcacgccgccggatatcagttacccgcccgacctgcggcggtctgacacgtacccgtggagcgccggcgccgtggagcagaagctggcgtcctgcgccaccgagtgccacgacgccttctcggccggcgccgtgccggaggaggtggtagatgcaggcagatttgggtctatcaggttcttccattttttgtaaattcatcggtggaaggcaactgattttactttgacaactaatatgatacag

SEQ ID NO: 170283 - DNA, 2000 bp, Zea mays
  Clone ID: MRT4577_86881C.1
tcgggttctctctcccgccccttctctcttcgtgatgctcctctgcttgccttgccctggtgtggtggtgtctagtcaagtacgcttccgaattaaaagcgctctggcctgcaacctgctgtctgctccgtcctcccacggccggccgcctgcccgcgtcttcttcgccacccctcttctccggtcccgcacctgcatttcttgaccccttcctccaccgcagccaaacaatgtctccggcgccgagttcgcatcactcgcagatcaattcgagcaggaaggagaagcggatgaggaaggtggacaccttcgcgccgcacaacgatggccaccaatggaggaagtacggcgagaaaaagatcaacaacaccaacttccccaggtccggccggattctacatgttttgtttgtttttactttaccgtggggtgacaaatctatcctcgccagcgaagaacccggcttttattagccagcctcctttgacttgaatgtttggtaacttcctcttattctccgcatcaactatcggcgggccaaatcccagcaaatgttctttttcactcgctcacaggttcttgtcccgctgcaggtattactacagatgcacgtacaaggacaacatgagctgcccggccacgaagcaggtgcagcagaaggaccacagcgacccgccattgtacgcggtcacctactacagcgaccactcgtgcaacagcgccttcctcccgctctccccctccgagttccagctgcggacaccgtccgggaaggccgtctccatctgcttcgactcctcgtccggggcggcggcggccgtggcgtcggtcgccaccaatgctagcggcggctcgccctcttccagcgccgcggcggcgcggcgaggcacgccgccggatatcagttacccgtccgacctgcggcggtctgacacttacccgtggggcgccggcgccgtggagcagaagctggcgtcctgcgccaccgagtgccacgacgccttctcggccggcgccgtgccggaggaggtggtagatgcaggcagatttgggtctatcaggttcttccattttttgtaaattcatcggtggaaggcaactgattttacttcgacaaactaaggccctgttccaatctcgcgagataaactttagcagatatattttagctacttttagccatttataatctaaacatgagagctaatggtggtaattgaaactaaactttagcacttcaattcatatagctaaagtttagcaggaagctaaagtttattccgtgagattgaaacggggtctaagccccatctggatctcaaattctcaacggatttcaaggacctgacaaaaagaatcccagaataccacaagtgcagcacagtagcagtgccctctgcacgtttatagcacatagcagtatgatttcaaggccacaggtgggatctatttggcgtactcgtttccgctgaggtgctcagcgtcagctcacagcagaaataatacaggcaacgaaagcaagtcccgaggtaggagtgtaggacgcggtagatcctccactactgcggcttctcgtagctgttctggtccctgaactccccgatcttgctcctgatcatgtgcgccacgtgaggctgcacgaacatgttggtagggtcgagcatgtgcacgatgaacctctccgacggcggcatcgacgcgttcaggttgacgatgaactgcgccataggtacgtcgcaggagatgaacagccccttgatcgcgttaaccatcttgcctgtgctctggacagggacaactgccgttgcttggcaccgacgacgacgctcgtcgtggtcccgcgtccctcccggccgcaggattcagtcctctcgcttcggatcggatcctccactcttcgctcgccggcggcgccgcagctcctctatctatcggcctcacctttcctcgcttccccttcagccctctttgcggcagacaataaagatgctcccggccgg

SEQ ID NO: 170284 - DNA, 511 bp, Zea mays
  unsure (1)..(511): unsure at all n locations
  Clone ID: MRT4577_86882C.1
tattcggcacngaggctcttacccgtagcggggaatcacgacacatcgcctttgtctcgtagctcgacctgnctgcaagtcgttgatcagcctcactgaccacattgcgcccatgtgtacccgagacctagacctttttctttcaagctgagatcaaccacctgctctctcttataaaacacttatttcgacggggggacgtcctcctttgtctaactgcaactctgccgaggcgcttgacacaatttggatgagagagcctaactgacaagagaaagatcaaatgccccaccaaccctgctcatctcacagatgttccagaccgacttcgaacactctctacatcatcagacacgagctctgtatgactcaactgccatcttgtcaacaactctctgtctccatcttacagtgcacgagaccaaagatttcatggaagccattggtgctggggctaatctgactataatagcccacctcccatgtagcattctactgtgtctaactactg

SEQ ID NO: 170285 - DNA, 394 bp, Zea mays
  unsure (1)..(394): unsure at all n locations
  Clone ID: MRT4577_86883C.1
cgccgatccaatccatccttcttccagctctgctaccgtagcgtagagacgcgtgcggagcagcctgagacctacagtagaactagaagttagcctgagaccagcgagttttctcagcaccggcctgtggtcatcagatcagctagccatggacggcggtttcccagctcttcttgaccccaccgcgctctcactcgcgctgccggtgacccagggcccgcaagggcacaataagctcagcaaggacgactacctcgctatctgcctcgccgcgttcgccggcacgcgaggaagcagcctcgtcgtcaaggccgccgctgggctcaggcggcaagagaccggcggcattaataagcagtcgtggtgcccaccgnagccggcccccgccgcgcac

SEQ ID NO: 170286 - DNA, 644 bp, Zea mays
  unsure (1)..(644): unsure at all n locations
  Clone ID: MRT4577_86884C.1
ccggccgggagcttcgactccatcaattgaccacccgcagccggtctttccaccctgaggagctccgaatccgaatctacgaggcatctcgtactctcttcacagtcttaaccgccgcaatgtcttccctcgctcgtcccatgctccgctcgccggctctacgtgtcgccgcccgacgcttcgagagcaccactgctcagaaggctgccgagaacgctaagcaggctgccaccagagcccaagaaggtctatcgcgtgtcacatctactgctggtcctgccattgctggttacgcaaagggtgttgctagcactttgggcaaggttggcggacgaacgggcaagatcatcggctttgttgagcgacaagtccccttcgtcgtctactactccaaggtcggcctcgagctcggcaagtttgttttccacaaccagaagatgagccctcctaacatggccactttccaaactacctaccaaaacctcatcaagtccatccagaaccgtaccatcatccagtcttcccagaaccttgtccagcaggtgcggaatatcggccctgcccagcttgctgctggcggcgtcgttgcggctgaggtcctcggattcttcaccgttggtgagatgattggncgtttcaagctt

SEQ ID NO: 170287 - DNA, 282 bp, Zea mays
  Clone ID: MRT4577_86885C.1
ccaacgctacaagcgcagacggtcacgacatcaaaggcgcggcggacgaacgtgctgtctctgcaattccgacttgatgcgcgtgcaccaactgttaccaatggcgccaatgctgcacaattctttttatttgctcccgcccacctccaccataatgagaatactaatgaagtgtgcctcgcacaagcaccagatttataccctagcagcgatccgcctcgtgaccccgcactcgaagtccagcgtgccagtgatgctcaacacaatctcgcggatgctgtg

SEQ ID NO: 170288 - DNA, 275 bp, Zea mays
  unsure (1)..(275): unsure at all n locations
  Clone ID: MRT4577_86886C.1
atacgtctctgacaaacgacgatcancgatcacagnactgacgcgcacactctgcgcgtactccgnacgtacacagncatctgcacacgatcaccgcgcaagcatcaatcgcgccaacatgcagtcagcgcagctaaacaagaaagcgtgactccttaatggccactggcgaaatgcttaggagattcttcactgccgatggtagaagggttccacgctgtgcttgtgctgaggctattgatcccggtaatagtattggttgcagtttgtgtggg

SEQ ID NO: 170289 - DNA, 407 bp, Zea mays
  Clone ID: MRT4577_86887C.1
cacacaaaacaagcagagatggatttttaaaaaagccaagcctaacaacatgattgagagtcattatgtgcctgttcatgattagtacttaattagacatgcatctcattgttttgtttgaggaaattttataacaaaccataatgacccagattagctataattcaaccacttagcaatgcccatccggggctgctgcagcttaattatccttactttagtaactaagccaactgggcaccgcatttacaaaggatggggcaggtcatgaattgggcgactaggctagctcctgttcttggattttgccatggcttttggggcaagaccaagaccaagggcctcctttcctttcatgatgcgaaaacgcttgcatgattaaacaaacatttcccatgggacattac

SEQ ID NO: 170290 - DNA, 217 bp, Zea mays
  Clone ID: MRT4577_86888C.1
cgttgctcggaatttggctcgggcccatcggttttttttatgtaatgatgtctatgatgcgcaatgttttttatattatcaagttggcgaagaggaaccattcctgcaaagtgttcatcacattggcgctcgggaggtgaatccctgtcctggtcaagagctttgtcctatgacatgtgttgaggatagagtacacctttaattctaagctttgtga

SEQ ID NO: 170291 - DNA, 456 bp, Zea mays
  unsure (1)..(456): unsure at all n locations
  Clone ID: MRT4577_86889C.1
ctctaatttatataaactcccgatctagctcggaacgattcccgggcgcnatcccggcacaaaccgaacaagcgcctaaaacgcggacgcataaccacgntcaactcaaaagnctaagcagatcgggagaagatactcgatccgccggagactacttttancaggcactcctatccaaaaccgcctgcaagagctccggnctttgcttaactctctcctgcccaaaatnntncattcatcccacaantntgaggaacggnttaatgcaccatttgcatgcgacgccagccttaacgacgagcgaaccactactaatcatacatcgntcgcatcaagctctcgccncccatntttgctgaggaggaacaccgacgacctacagaactatctccccgcgaaaacacaagccattctcacgcgcgacccgtccgcttggcaaaaagcgcactaccaaca

SEQ ID NO: 170292 - DNA, 1086 bp, Zea mays
  unsure (1)..(1086): unsure at all n locations
  Clone ID: MRT4577_8688C.1
tggtgtccgtgaactctccttttttcggttcaccagaccatgatcctgatagcaaaccagttccccttttattcgatccatttataaggagccgctcctcgtcctgggccggggtgtgggtgtgcccacggcatggcgttcttcagcagcggatcccgggtgctggtcgaaatcctgacgaggatgcagagcgctgaaagaccaatgcctgtcgaccacaccttcttcgagtcgggatccattcgctaccatgtggaggcttcagcgtcggatcccgagaacgtgttcctatcgatatcgacgccatcgctctcctacgactacgaggaggctgcagctgcaccctcgtcgagccgcctgcctgagctgaccctgcaggaggcgaggaagacgtatcacaggttcgccgagatggtggagccgccgagggaagggtacgtcctgacgctcaagctcaacttctccggcctcacccggcccaaagatcgcgtcaaggccattaaccaggtgtcgctgctgcaatccgtggtgctgagctcgcagctgaagcacatgctggggagcctcggctcgtcgggcacgatgaggctcgtgtacaacaaccagagggagcccttcttcgtcagcaagacggctgagaagataaacgctatcttccccatgcgtttcagggatgacacggacgcgtgggtgttgttgtccttcttgcaggagctgcaggaggtcgggaactcgttcgcgagggcgcccaagtgcagctggtcgccgatcccaccgccggagctgcgcggggagaacgtgcaccacctcaccaccaacggcggcttcgtctccttcggcgtcctgtcgcggcacgtgagggggaagcgggccgccaagaccgcgtggatcctgctcaacttccagtcctacgtcaagtaccacatcaaggttctcctgccactggcagccaccgtccaccgacccgtccacgtccgtttccattactaccgtaccgtgggtggctgatggcggcggtggcgtgacgccttgcagtgcacccggagccacgtncagagccggatgcgggagcgcctggaggccctg

SEQ ID NO: 170293 - DNA, 528 bp, Zea mays
  unsure (1)..(528): unsure at all n locations
  Clone ID: MRT4577_86890C.1
cgaattcgcggccgcgtcgacgagacatagnaaacaagtgaagtcagagtcatagaagtcaactgaaacgttcagtcaatggagaaacagtgtaactatggcctgaaaggcttctgattttgagccatggcgatgtctatcgagatgcaatgctgcttgcttatccatctacgcttgcagtcaagtttgatcactttcgtggtttgggtcataacggtggaagcactgagttctggtcactagcattgtggagcaactttgcaagtggatggagccatgcatgctaaaagggcatcctctgtcacagttcgcctagcaaatgatttcctttcagttgtgttgacatcaaatcacaggggatgcacgcactcccatccaggttagtgccttgagcttatttggcgttgaaaacttgcatgcttccttatcgtggagagccatgctgctaaaataaatcgaggttgctttaaaaaaaaaaaaaaaaaaaaaaaaaaaaaaaaaaaaaaaaaaaaaaagtcgacgcggccg

SEQ ID NO: 170294 - DNA, 254 bp, Zea mays
  Clone ID: MRT4577_86891C.1
cttcaggcgaccaggtctgggtcgctcactacattgtggagaggatcacttttatggccgtattaatgatgacgttctacccgtagccgatccctggctactgtaacgactcccccccgcacaccaactacatcaccgattatacctggtaggaacacgtgaacgagttgcacaacccgaacatcaagtagctgctgcacctgaacatggagcacatcgagagctactgctacgccgacccgcttcccgtcaac

SEQ ID NO: 170295 - DNA, 983 bp, Zea mays
  unsure (1)..(983): unsure at all n locations
  Clone ID: MRT4577_86892C.1
tacccctcgaggggccggccgggccggggaaanaaaaaaaaaaaaaaaaaaaaaaaaaaaaaaaaaaaaaaaaaaaaaaaaaaaaaaaaaaaaaaaaaaaaaaaaactccagtcccccctcccccgtcccccacccactccctcgtccagagtccagacccagaaggagagggagacagaggagaggaggagcagcgtggcgacgcccaaatcgagcgacctgatcgagtcccctcgccccaactcactgaatcccaatccgagcccgccaattgggcgccccgcccacgccaagatgaagcgagctcgaaggcgtatgtgcaagagatgactgatgagggatgctagtgacattgatgaacttgttacgggcgtgctggcgaccgtcatcgaaccggcatgcccgaacaggctcagatgttaccggtaggcaggatggacttctatggtacaaggacgccgggcagcatgtcaacggggagttttccatggctgttgttcaggccaataacttacttgaggaccagtgtcagattgagtcgggcccactgagttttctagattccggaccatatggcacttttgttggcgtttacgatggacatggtggtccagagacggcctgctatatcaatgatcatctcttccagaatctgaaaaggtttgcatctgagcagaatacaatgtctgctgatgtactgaagaaggcgtatgaagctacagaagatggattcttttctgttgttaccagacaatggcctgtaaagcctcagatagcagctgtcggctcatgctgcctggtcggtgtaatttgtggtggcatgctttatgttgccaatgttggggattcccgtgttgttttaggaagacatgttaaggctactggagaaagttttggctatccaattgtcagcagagcataatgttagtattgagtcagtgagaaaagactgcagtcaatgcacccagaagatagcacattg

SEQ ID NO: 170296 - DNA, 339 bp, Zea mays
  Clone ID: MRT4577_86893C.1
caagggaaaagaaggaccatgttttttgttcgggggaaacctgtagggtatgaaaaccccactatccaagcgggggtttttgctgccctgctccggtggaacccaaaaaaaaaccaacccacctcgatggcaaattggaggcctccttcatccccttaatctctaattttttttttcaagcgatggtcctgtcctgggcaggagcagcagcgggcagcagttagctggcctccacagtctggggagggccggtcggcaatggcaaattcggggaagacaaatcagggcccctcattgttgcattttgtcaggcgcttgcagaaacccgggccgaaacat

SEQ ID NO: 170297 - DNA, 207 bp, Zea mays
  Clone ID: MRT4577_86894C.1
gcgctcttgtctcaccttacacaaaatctctctgtctcacgtctctcccgcgcgcccttctcccgcgcacgggcggctccgccgccggtcgcgccgccccgaccgcgccccgccctcgaggagcccaccccggccgtcaccgcggccgcctctccagcccccaatagcgccgcgtccaagtggagaaaacccaattgttgaaccctc

SEQ ID NO: 170298 - DNA, 1269 bp, Zea mays
  Clone ID: MRT4577_86895C.1
ccggccgggctgtctacccacaccaacgtcgtcgtctagcgtgtctgttgcaacggccagcccacgccacgcctacggttcgcgccacttgcgggcgcggatcaccaccgccgtctgacggtgatcccctcgcccgccgccgccggttcggctcaccctcgccgtccgtcgtctctgactccggcgggtcgtgctcacacgcccacccaagtctccccaaccctgcacctggtctgctcccagctccccacattcacctcgtgtcgggtcgggtcagtccgagctgggccgggccgggccggagcgcgccacccgacccgttttgcggctgctccggtctgcttttcccctcttcctctgctattctccagtcccccctcccccgtcccccacccactccctcgtccagagtccagacccagaaggagagggagacagaggagaggaggagcagcgtggcgacgcccaaatcgagcgacctgatcgagtcccctcgccccaactcgctgaatcccaatccgagcccgccaattgggcgccccgcccacgccaaggacagagggagttctcagttctcaccaacattcagaaaactgttggcgcgctgacaagtccaactgtgtttttcttggactacagatgaagcgagctcgaaggcgtatgtgcaagagatgactgatgagggatgctagtgacattgatgaacttgttacgggcgtgctggcgaccgtcatcgaaccggcatgcccgaacaggctcagatgttaccggtaggcaggatggacttctatggtacaaggacgccgggcagcatgtcaacggggagttttccatggctgttgttcaggccaataacttacttgaggaccagtgtcagattgagtcgggcccactgagttttctagattccggaccatatggcacttttgttggcgtttacgatggacatggtggtccagagacggcctgctatatcaatgatcatctcttccagaatctgaaaagatttgcatctgagcagaatacaatgtctgctgatgtactgaagaaggcgtatgaagctacagaagatggattcttttctgttgttaccaaacaatggcctgtaaagcctcagatagcagctgtcggctcatgctgcctggtcggtgtaatttgtggtggcatgctttatgttgccaatgttggggattcccgtgttgttttaggaagacatgttaaggctactggagaagtttggctgccaactgtcagcagagcataatgtaa

SEQ ID NO: 170299 - DNA, 264 bp, Zea mays
  Clone ID: MRT4577_86896C.1
ccagcccaaattttttttattccgggacatgcacgagggggggttgaataactctgtagaaggttatcaggagataaagctaccctatcaaatcgtcgccattgtttttggcgctcttaaagatgccgctgccaaaaaatatgatttggaagcatgggttcctgcatctcaaacttacacagagctggtgtcttgctcgaattgtacagattatcaatcaaggcgactagaaaatagataccggcagaaaaagaacaatgaaca

SEQ ID NO: 170300 - DNA, 399 bp, Zea mays
  Clone ID: MRT4577_86897C.1
ccccgggaaaaacacggcccaccaaaaccaaagggggcaaggggggggggcccccccccccccaacctagggggacgggggggcatcaaaaacccagggggtccaaatttgggggcctttttccccggaaaaacggcccaccaattccaaaggggccaaggggagggggcccccccccccccaatctaagggaacgggggggcctcaaaaacccagggggtcccatcttgaggccattttaaacggggggggggaaaaacggacaataccccccccccgagggggacccaggaaaagggaccccgaaaaacaaaccccccgggtctggccaaaattggggggggaggggacccccttggggtaaaagggggcaaaacccaccacaggatggggcccccc

SEQ ID NO: 170301 - DNA, 419 bp, Zea mays
  unsure (1)..(419): unsure at all n locations
  Clone ID: MRT4577_86898C.1
cccgcggtgggtgtggcaccggtccgaggcggnggacacggatgccgtggtggcgcgtgctgcggcgacagggggtaagagagacagggagatggcagagagagtgtgcaaggtggcgctgtggtgcgtgcagtatcggccggaggataggccgtccatgggcagcgtttgtcaggatgctggaaggggaggaacagatcgccgcgccacgcaatccgttcgcgcatctggcgccatacacctctagtgcgattcagtcgtccggagacaccacagtaggccctgtggtcagtgctaggtagatgaaaattcttgggctatttaaatttgtaactttagttttgctatctttctcatttttaatcttggtcatatttttttcttaagttttgccttctgctttatagtactagaaggac

SEQ ID NO: 170302 - DNA, 634 bp, Zea mays
  Clone ID: MRT4577_86899C.1
cattgggtacctcgaggccggccgggatcttatcttgatcctcagcgctgtgccagggcgtcctccatctactccgctacctccgcggcactccacgaggatggcgcgctgttcgagctctccaccgtcaccaacaccccctccgtgcccatgcggcaccaatgccacctcacaccactgcatgtgcgacggctccttacggacccacccaggcggcacaaccacatatccattgcgccacgaccgaacgagaacaaaatgaagatggccatcgatgtgaacagactaatcgaacacaacgtactgaagcgataacacctgcgcatcacactccacgccctcgcaatcgatcttcacgttcacgacaacgggactgacgaacaagatgaccacctgaacgagtaccactccgcgcacctgaacctctatgtcaaccactggcccgtcagagacaacaacgtcaccaacaacagccctgacaacaatgtcacgcccgacctcaatgccactaacctggcaagggaaaagctatataacgatctcaaaattcacggtatcggcgtgatcaactactcctaagacaacattgaagcacatgcatgctgtagctcataaagcgcccattgctgatccc

SEQ ID NO: 170303 - DNA, 546 bp, Zea mays
  Clone ID: MRT4577_8689C.1
gcggcctctcctcactcgctatcgtagccaagaatctcccgtgtctcctggccacaatgcacacggagcgaatgctcctaaaaaggtgtgaacacccgaacaagtgtgctgctgctgcacgacccgatacaggaacgaagcgtccggtaaagcacaagaactaatctgcctgccttgtcgctggcgatatcctccccctcaatgtacctgctatagattcccctcgtgtcatggatgttctgagccaatccaaatattgccagtaatctctagattccgcctcaagtccactacgagtgtcaacgagatttccgtgaccgtcaaaactagcgtatactcgcatcgcgtgtgatatgccgctatagctcctccagcctctatgaagatgctaagcatatgataggattctgataacgtatgatcccgcagaattgatgacttactgttgacaacattaatctgattgcggagaagaatgaactaaacgcgtgcccacttacctcattgttttgatccctgtacagatgcgttgtctgcgctcttgac

SEQ ID NO: 170304 - DNA, 388 bp, Zea mays
  Clone ID: MRT4577_868C.1
gacatgcacctcctcccttaccttggctcgtatcctgtggaccgcccgtcctttttttttttttttttttttttttttttattgtcgaatgcaacggtgattcagaaaaaggaaatccgatttacagtccacctggccaaggaagtcatcatattttttacttaatatcgagatgggcacagcacaccagaatacatgattggggacttctctttgaacgacaattcaatgttcaaaggcccccaccaaggccttcacccgggttttcttctacacgaggagctcgatttgggtttcctgaattacgaaattgccctttggatcaaccttcctgcatacctgagccatttaaggacttcggcactgtcttatccacactccggtcagc

SEQ ID NO: 170305 - DNA, 236 bp, Zea mays
  Clone ID: MRT4577_86900C.1
caccagtcatggtgcgacttactaaggtccatcactaaccaatgcattagatgtggatggtactcccggggacacatatggaacatggggactgactcgacagctgaactatatacgaacgacatgggagactctcgctgctctcgatactataaatatagttgaattcaaagctctcttgatgttgaagagacaatgacgatggccttcttatgttcgatgaggacccaaggcaa

SEQ ID NO: 170306 - DNA, 179 bp, Zea mays
  Clone ID: MRT4577_86901C.1
tccgcaaaatgttgggagtctcaagcccgcactactgtgcgtagtagagacaccccacttacaagaagctgctcaagacacttattgttcagagtttgctgcgcctagaaagaaccagctgtgcttctccgatgcagaaggaggatgttcaacttgatgattgaggtggtgaagtctgc

SEQ ID NO: 170307 - DNA, 748 bp, Zea mays
  unsure (1)..(748): unsure at all n locations
  Clone ID: MRT4577_86902C.1
ttcgtcgaatcctcaaccagcaaacccagatcatgttgtggtgccagtcttgggaggtgtgaatcaggttgctcctagacagcaacagagggatgattgggatatactgaaagcgatagtgtatggaggcttagtggagtcagtcaccagcctctccgttgtttcggcagcagcgtcaagcggcgccaaaacattggacatattcatcctgggaatagccaaccttattggaggccttcctctcattttccacaatatcgctgatctgagagacatccgagacgtggacgggaacgacgagcaggtcggccactactggctgcagctcgggaagcggtcgaaagcccggctccacatggtcatggccctgctctcatacatggtgttcgggctgctcccgccggtcctctacgggttgtcgttccgcgagagcaacgaccgggagaacaagatgatggcggtcgctggtgcttcgctcgcctgcatcgctctgctggcgctcggaaaggcacacgtccacaccaggacctacttcaagaccctcatgtactacctgatgatcgccgtgagctcatcgggtctgtcgtacgtcgccggcgtgctgatcacgcggctactggtgcagtacggaatcattgagcaaggcggctcggctcgtgctcctcccgggntggtcgtcgcggttcgcttatgctgctggtgcagagtcgtctgcatgggcctcattctgaaaagtctgaagttcctt

SEQ ID NO: 170308 - DNA, 637 bp, Zea mays
  Clone ID: MRT4577_86903C.1
gccggccgccggccgggagaccctctctcgcgctctcaccctgtctctctctctctctaacatatgcagtgagcatgttcttccggcggcacttgctctcttgcttcctcctgctcctgctactgtcacgcttgccaagctcgatcgtcctcggcttcagaacatcgagaggagaggaaggcaagagcgagttgatgaggcgccatgatgagcatgagtttccgccagccgtatctccttcaaaagaggtggacgccgccagtaagttcacggtttcaagaagaatggttcctcaaggtccgaaccctctccacaacagatgagaggatcggagcagcacatgcatatgccacctcttctcaagtctcagctactacgggtgtgcagtgcactcgacaaagtacccttctcctcttcctttttttttttgtttagcctagactggacgatacagatggatgcatatataattcctatggatgtaatgtagtgtgtgtgtgtgtgtgtttttgttgcattgatttaatttgcaggcggctcagctctgtacatacatctttttatctttatgatactattaaggtgtacctgtatggatctgaattctctacgtctatttaatttacgcattggctgt

SEQ ID NO: 170309 - DNA, 311 bp, Zea mays
  Clone ID: MRT4577_86904C.1
gaaagaaaacacgaagttaaatcaggaaagaagtaagtctgaattctttgttaaagaagatgaggctaatgacactgtccagaatgctctatgccacaagagtaataggtatcctccaagaccattattatctgattcatctaggcatcaaggcgaaagtgacttccagaagccatttgttggagggtttgcgatattgccagatgatgaagaaccatgtgagaaacgctatggtggcgctaatataaattgcagaactgtgcagcctactcataatactaataatttgctctgtccagttcacgatgatt

SEQ ID NO: 170310 - DNA, 347 bp, Zea mays
  Clone ID: MRT4577_86905C.1
ggtccaatgcagtggtcggttagaccactgtatatgtggcataagtccattacacactggacgcactgacaatgtccaacattaaaaaaacagagggggctatgaaacagttgtaacaaaataaagaatggtggcgcagcaacacatgacccaaatgaacttgcttttatggattttgcgtgagttcgatacagtgcacagtcaaaaccagacattattacaaaatgcgcgtaccacaggacaatcgatgagagtcggttacgtgatgtgcgcgtgcatagtgcattgcacggatcataacgactggagacttatgtttggagattgtatcaacaatcggggatatt

SEQ ID NO: 170311 - DNA, 310 bp, Zea mays
  unsure (1)..(310): unsure at all n locations
  Clone ID: MRT4577_86906C.1
aaagataagtttttttagatatttagnnggcatcaaaacccatactatatatagatggaggggtccatatgtttgataaaaaagggaacagggcccgaaaacaaaaccggggttgatccaaaacccacatgccccttgttccggttaacaaaattaacccccctctgcacacaatttaagaggaacccccgactaaaaaaatgtaaaggcccaaaaaaagggtccaaaaaaaaacccaggcaaaacttttcctttccacacaaccaccactaaaaactgatgaaaatgactccactctcccatcactaca

SEQ ID NO: 170312 - DNA, 481 bp, Zea mays
  Clone ID: MRT4577_86907C.1
aaaaaaaaaaaaaaaaaaaaaaaaaaaaaaaaaaaaaaaaataaaaaataaaaaaataagggaaaaataaatgcatagtgcatctatattatttatactctcctaatttaactcttgcccccccctcttttagtcccttatttcccttccctttctttcccttcctttttttttttttttttccccctttattaatttccttgtccgccatattaccaccttcttccttttaaaccccttgttttacctactttttttcctttttaaccacatccccttttcccccctttctccattaatcacatgcccctgccctgtgttccctcaccataaccgcctccccttttcttcgcctttatccccccccccttttgcttttcttttatccctttctggttcttttttttcccctttttctctcccattctatttttccttttctctataccccccgttctttttatttttttccctttttttt

SEQ ID NO: 170313 - DNA, 786 bp, Zea mays
  Clone ID: MRT4577_86908C.1
attcaacgggctcgcctcctctccctctcgcccaagtcctcgtcgctgccgccgccaccaccacccacgctgtggcaatctccggcgagctccgtcgccgcacaacacaccccagagctccccacggtccgcgtctccctcccctccggccagattctgcgctcccgacctctaccgcccggtcgcaacgccacccttgtggctgggtttggggcagggcttcgccgccgcgtctccggcggccccgggttcgtccctcttcctacctggtcgggatccaccacccctacacctcaccttcgacgccatgggagttccccatccaccatggttgtcgccgtcaagggcttcttcacgaagatgtgaaggacgccatggatctgcagctccttttctcctccaccacggacgccgcctcacccttccaagccaacaggcaccctacaaacgggtcggcccacagctcctccgctcctctgccatcttgagatgcacctggatctggcgatttcagggccttcatggctttagaatcggcctctcgttcgggatcagtttggatctaggacaagccaaccatgctgctgcgccaagctcctcttgatatagtttacatgaatgctatccgggagaaggcaaatatcaggagcaaataaaatcaatccctgtacaaataaaaacactccctgcaatctatcatttttttttgaggaattagccacattagagtagttgatacattggatgagtattcagaaggtgcagtcaatttgtcctttggcatct

SEQ ID NO: 170314 - DNA, 139 bp, Zea mays
  Clone ID: MRT4577_86909C.1
caccgcgccgtgaaccgccgggaccgaacgcacgccggctggatacgcgtacgcagagaacgaccaggcaacgggcgccatattttacatcttatcggccgaagaacaccgcattactccaaagaagctttctatttat

SEQ ID NO: 170315 - DNA, 450 bp, Zea mays
  Clone ID: MRT4577_8690C.1
gatgttaaggtttaatagttttgattaaaggaaacaaggacttacccaaaacaggggggtagggggacagagaaaaacgaaccccgcaagccaaaagcccaaaggccgagaacaaaaacgctgcggcccacaagcggacacgcaaaagggccaaaggcccaacaaaggagaaacaggccccaaggttaaaaggtaacagaccacaagacaaacaggagacagcaaaaagaaaaaagggggcaaggccgaacaaacccaacgcccaaagacccaaaaacaaacaaccacaaaggtctggcccaaccagggaaaaaccagcgggctaaaaaaaacaaaaaacacccttaaaaagagcggacaaatgccaggacaaacaccccacatagcaaaaggaccacagcgccaaaaaacaggtttccaagagggaagacacaagccccagggggggaa

SEQ ID NO: 170316 - DNA, 682 bp, Zea mays
  Clone ID: MRT4577_86910C.1
aagcagcaacgtttccccgcgccgtcttccccgtcaccgtcgtcgtcgccgcggtccagccctccggtcggcgctggttgctggcgcgtggccaaaatccgtgcagttctgcaggtcgtcgccggcggacaatgtggggcgagagggctcaccacaagcacgggcaccatcacgacaacgtcggttccagggaccagcagcccaagttcatagcagacaactacagctcggtggatgaggtcattgctgcgttgagggaagctggccttgaatcgtcaaatctaattctcggtattgacttcaccaaaagcaatgaatggtcaggtaggcattcctttggaagaaaatctctgcatgccattagtggcaccccaaacccatatgagcaagccatctctataattgggcgaacactatcaccttttgatgatgataacttgataccatgctttggatttggtgatgcttctacacatgatcattcggtcttcagcctttaccaagaaaaccgtccttgtcgtggttttgaggaggttcttgatagatacagacaaattgttccacatttgaacctttcaggaccaacttcttttgcacctcttatctatgcggcgatgtcagttgtcgaaagcagtaactgccaataccatgtcctcgtcatcatagctgatggacagttgta

SEQ ID NO: 170317 - DNA, 596 bp, Zea mays
  unsure (1)..(596): unsure at all n locations
  Clone ID: MRT4577_86911C.1
gggncccactcccttctccgcctcctctcgtcgtgttgtctgcggcgagctctacgccccatcccacgccgcgctcgccgagctcgatgccttcgagtctggcaggaaacaagttcttttgcaattcctcaattatacatggttgttcaaatctaacaacaatgactaatggtacaactcaatagactggttctaggatcagtacagaatcatcaatatcatccgcgaaggaattgataaaagacatggaagggaatttgcatcgattatctgaaagctcaaaaagggagaagaaaaaccttattaagaaactctcttatatgaaagaagacctatccagatctgcttccaaaaataatgttgaggctcgtatgtttatactatcacaatatctatttgtggttgcatgttgactcatctattttaaacatttgaggttcatatgagatcagatagtactgctcaccctagattcttttattatctgtctccgcctagcaaagaaactaacctagaattagagcaaagagattgcataaaggagggagcactggagcagtgacaacagtatagagatccgccaggtctgcttgcct

SEQ ID NO: 170318 - DNA, 449 bp, Zea mays
  Clone ID: MRT4577_86912C.1
tttttttttttttttttatggtcctcagggccggctgttgatgctattgatgtttttttgactgaaaacctgattacagacgccagaatgtgaccgatgccgactaccagatgcgattggccaaaccagccccagttgaagacctttccatttctacaacgtctttgcgacgccgaagtttctcttcccctggttctttcgtcccaggctactgcatctcaaaccccctgcagcttcacaacctccttctttcaaccacatgtgctaagaccccgcttccagaattctcggaaaagagagaagaagcatcccccgatgtccttgtcccaccgccttctttcgtttcttcatgcgtttggaatttgttggcgtaagaagacttcccagatcttccccgtttaccacttcatctcgtggggcttgtcgccagaccgcaggctgaaggagct

SEQ ID NO: 170319 - DNA, 185 bp, Zea mays
  Clone ID: MRT4577_86913C.1
agctcggaattcggctcgagcgtcattacccaaaatatcatctcccacatagcctgctgacacacaggttgatttttttgaagacgcagcgggattacatcccacccccacaaatgcagaacatacagagcatgccaatgcaaatactaaaaccactgcggtactgccctaaatctggaaagatg

SEQ ID NO: 170320 - DNA, 613 bp, Zea mays
  Clone ID: MRT4577_86914C.1
ccggccggggcatccacggccgggccagcctccctcatcatcggcccctactcgtctggcaggaaacaagttcttttgcaattcctcaattatacatggttgttcaactctaacaacaatgactaatgaggacaaaaggatgcaactcctggataaacttaagtacatggagcgagaattggttgcaaccaaagggtgggagagtgcattacaggaacaactactaaaggagttgggtgactataaggggcgtattgtggtcaagtaatgaaaataaacgaacttgaggtacaactcaatagactggttctaggatcagtacagaatcatcaatatcatccgcgaaggaattgataaaagacatggaagggaatttgcatcgattatctgaaagctcaaaaagggagaagaaaaaccttattaagaaactctcatatatgaaagaagacctatccagatctgcttccaaaaataatgttgaggctcgtatgtttatactatcacaatatctatttgtggttgcatgttgactcatctattttaaacatttgaggttcatatgagatcagatagtactgctcaccccaaaaaaaaaaaaaaaaaaggggcggcc

SEQ ID NO: 170321 - DNA, 421 bp, Zea mays
  Clone ID: MRT4577_86915C.1
caccatctaacgcacaataaagtaccatcaatggccgacaaagtattctgcttgcttatgcttcctgatccttctgcaagtgttggtacctgatccatcttccaacattgctcacaagctcctatagcttcccttatttccccatacctctcaccaccggtgacttgaatgtgtgaaaacccaattgttcaaccctacaggatccaacaggctatagcaacaggcatcttaccataatcacccttgatcatccatcatccgtcagccctattacagcagatacctgcggtccattgggtggcacataacatcacggcacatcaactaccacaacctgcgctagctaaccttactgcatactgtcagctacatcaagcaattgcattcaaccaactggctgcattgaactctgctgcttatt

SEQ ID NO: 170322 - DNA, 204 bp, Zea mays
  Clone ID: MRT4577_86916C.1
aatccaaattttagttacttattttcacaacaggcatattgccaatttttaaacaaacccacgggtccggaattaacggttacaaacaagtaaacctgacgggcactactgttggtccaaggaaaagcaaacaattcaagcggggccggctcatctgtttcctgtgacaatttacggtgcatccccgtcccccagagaaactaa

SEQ ID NO: 170323 - DNA, 209 bp, Zea mays
  Clone ID: MRT4577_86917C.1
tgttgtaccattcccctccatggtacctccgcgtgacattcagagatgcgcggcagatcctaatccacaatctggcctagcttaccaaacctctatgactttctgccaacaggcattcattgtttaccatcattcctaaaaattttatgcacccttagctaaagctctagctctttttgctacgaaatctgacttcttcttgttatccg

SEQ ID NO: 170324 - DNA, 259 bp, Zea mays
  Clone ID: MRT4577_86918C.1
aactaatactatatatgcttcttcacatgctctgcaagccattccaacaatcatacctgacaatgctgagtttagatagcactttattaaaactctaaaataaggggctgcccttctaaaagagcaacgctattgatcgcattgatgccatcacatacactttttgagacatgcaaaagctcatgattcaagagtcgttcaaagagaagcagaccattcatctgtctgcaacacacgctgctcaatatgcttcgcaaaa

SEQ ID NO: 170325 - DNA, 737 bp, Zea mays
  unsure (1)..(737): unsure at all n locations
  Clone ID: MRT4577_86919C.1
cattgggtacctcgaggccggccgggtatttagatctagtgtatatccaagtgaatagcgaaagttatgtatctagaaaatctaaaacattttgtaatttggaaagaagggagtacgaagtagttagtttgatttagctgttctacatcaaagtactctgcaaatcttttacatattaaactactgcttgaactgcattgtgaaaggacctctagctgatttgataggaggcccaagtagcacactttagttcttgggttcgactccaggtgagagcgaattttcaggctagggttaaaaaagatccctttgtctgtctcatgccaaagcacggggctaaggttcgatccgattgtggtcgttctagtgggaaaagggtttcagggttttctcgacctaagatcttcttaatgcaatgtctaggggctgtcttactccctgcacgttgagtttttttttttactgcttgaactgcatcttgatagcagtactcagagttcatctacttgcagtgagtcaaggatgtgcatatcttgctagatattagtgaatgcaacctttggtttgacttagtttgaacgtctgtttgcaggttatgcatgatgcttttggagttcggttacatgccgnaaagcaggcagaagtttgcccacgccaccctaaaatgtcatatggccttctgnttaaacggagcggagagcaccaacattttctgcaaattttctattttacgttag

SEQ ID NO: 170326 - DNA, 609 bp, Zea mays
  Clone ID: MRT4577_8691C.1
ccaaagcgacgaggccagttccaatgagcggcatcgactgatcgagtgaccttgcttgcatagttgcattgcgagcgtgcgcgctagcataacaaggtgctatcctatagccggcaccaagcaccatgtcgctggcaggtggaggtgatggctgtagtcggcggggtgaatgcggcggcaggctcgagttgccgcggcagcagccgcccatggtggtggatgtcggctgcaactgccgcgcgccgaggctgctcagctccctcatctcctcgctcaagtcccacgctcgcggcgtcggcaggcccaaccccaactcgtctaggcacgcctcatcgtcgtcctggtcgtcctcggccaccacggccttcacgtcatccacctccctcaccaccgccactactaccttctcgtcgctggaccaccacccgtcgtcgtgggtcccatcgacgtgcgccgcagacaccaacgcggccgtctacgtggtcgacgacgacgccgaacccgcaaggccggctcagaggcggcgccggcgtcggcagcggaggaggggcaggtgcgggagggcagcgacgtgggaggaggcggcggtggcggtggaggtggagtccg

SEQ ID NO: 170327 - DNA, 769 bp, Zea mays
  unsure (1)..(769): unsure at all n locations
  Clone ID: MRT4577_86920C.1
ctccctcctccctcctccctctctcttgtcttctcccttgcggcgatccggattccgccgcaacggcccctctcgccttctccctcgcggcgctcgatccctccggattggcgcgtggaggggacagtgatcagctggttcaacaaaactagtaaagatggcatcagaagggaacaaagacgtacctcatgaagctttgaccgtggatcactcatcgatttcgggttcaaagcgcaagcgtggccgcccaaggaaatatgagtatcctgtaaatgaactaccacagaaggtacagcccatccagagcgccccacctcttcttcactgcacacaagatggctcaagtctggccagccatgcatctggtggcggtgctcatggtaattggtccgctcaacctaggaattcagctaatgcttctcttcaaggtaattctggcaaagatgactttcttggcaagcattttgtgggcaagctgaccaagaaagttcctgggttttcgctcattacggtaaaagtgaaggacaatcaggtgctcaaaggttgggttccagatgaaattaatctccgcccaataacacctaaggatgaccttgccccagagctacccatgctgcgaccgagtcaagttcgaaagcgagcatcagcgatccatatgcaacctgctcttcctgtgnccatgcacttggagaatgttacacttgcaaagcctctgcagatgaggagacctgntgagaaaactattgctaagcatgctgtgcctcttgct

SEQ ID NO: 170328 - DNA, 466 bp, Zea mays
  Clone ID: MRT4577_86921C.1
tggctctcctcgcctaagcgagctcgcgcccgccccttgctggccatggcgctccagctccggcgcttcctcccgcacggctacggccagcgacaccgcgctgtcacccacgtgctatcaccgccgccgccactcgcgatgggtggcactgcgaaaagcaaggttctgtggggtgtgccatggagtatatcagtgtattatcccctggttacacagaaagacatcctttgcctttgcacaacattgtgcaagcctgatttggaaggaataaaacataccagctactatcgaccaccattgcgtcaatcaccttatttttcttttgtttcatctactttttcttaaagaattattcaactacgaacgtttactgaatatgggacttaagttaaaatgaagcacctattttcgggttgatgtcgaatgtatacaaaagaaataatgactttggctctttggtttcttt

SEQ ID NO: 170329 - DNA, 164 bp, Zea mays
  Clone ID: MRT4577_86922C.1
cccacgcgtacgaccacgcggccgcaagtacaagaacgcgggcgggggaactagaggaagcaaacttacaaacacgtacaaccgaagtcaaaacaaagcaaacgaacacccaaaacaaagaaacaggccgacgaaaaacaacaagagagcgcggggaaacccag

SEQ ID NO: 170330 - DNA, 846 bp, Zea mays
  Clone ID: MRT4577_86923C.1
ggttttccttccgtcgcccactttcttggacgctccctcctccctcctccctctctcttgccttctcccttgcggcgatccggattccgccgcaacggcccctctcgccttctccctcgcggcgctcgatccctccggattggcgcgtggaggggacagtggtttagaggagagaaacaagtgccgattgacaccaatagggtattcttaccattttcagatcagctggttcaacaaaactagtaaagatggcatcagaagggaacaaagacgtacctcatgaagctttgaccgtggatcactcatcgacttcgggttcaaagcgcaagcgtggccgcccaaggaaatatgagtatcctgtaaatgaactaccacagaaggtacagcccatccagagcgccccacctcttcttcactgcacacaagatggctcaagtctggccagccatgcatctggtggcggtgctcatggtaattggtccgctcaacctaggaattcagctaatgcttctcttcaaggtaattctggcaaagatgactttcttggcaagcattttgtgggcaagctgaccaagaaagttcctgggttttcgctcattacggtaaaagtgaaggacaatcaggtgctcaaaggttgggttccagatgaaattaatctccgcccaataacacctaaggatgaccttgccccagagctacccatgctgcgaccgagtcaagttcgaaagcgagcatcagcgatccatatgcaacctgctcttcctgtgccaatgcacttggagaatgttacacttgcaagcctctgcagatgaggagacctgttgagaaactatttgctagcatgct

SEQ ID NO: 170331 - DNA, 634 bp, Zea mays
  Clone ID: MRT4577_86924C.1
accagtcttaatagtgtaatggtctactctatataggaataccctgaggtggtaggttcgactcctatcaactatgttcaactattcccttttttaaaaaaaaaaaaaaaaaaaaaaaaaaaaaaaaaaaaaaaaaaaaaaaaaaaaaaaaaaaaaaaaaaaaaaaaaaaaaaaaaaaaaaaaaccttagggcccccggccccggtttccgcccccccgccttcgccgtcgggggggggccccatggggggaaagtcgcgaccgcccaaggggatcctcgagtcctataccatcaagggttcggaaagagtcatcaagcctggcgattgggggctaatgagggcatctgatgcttcaaagccaccctatgtggaaagagttgaggaaattgaagaagaaggatctcgaggcaccaatgtgaaagtacgagtgggggggtattatcgaccaaaggagtccataggtggtcgggggccatttcatggttccaaggaggttttcctctctgaccattatgatgtacaaagggttgacaccattgaggggaaatgaaatgtccacagtttccgaagctatacaaagcttgattttgccaatggtgaggatttcttatgccgctttgagaataaatcac

SEQ ID NO: 170332 - DNA, 583 bp, Zea mays
  Clone ID: MRT4577_86925C.1
taggggccttttttttttttttttttggttttttttttttttttttttttttttttttttttttttttttttttttttttttttttttttttttttttttcccccaaaccgctactaaaaaaaaaagaaaaaggggaaaaaaaacgaaaaaagttcaaacgcccctccaaaagggaaaaaaaacactggggggagggaggaaaatcgaccgacggggcccaaaaccaaataaaatccgacccaccagggatcggggaagggcaccacggcccgggaaaaaagcgaagggggggaaaaaaaaaaagcacccattggattggaggaacgggcaaggggcccagggccgccgggaacggggcaaagcaacccacccaggggctgggcgggggggggcccacccgggggacggggccccacaccgggcgggggcacttgaagccccacccaaaggggagttgccaaacggggcccccggggggaacgcgcccctgggcccccaggaaccccagctcgaaccaaagggtggtgtttgaggggttgccaaaggggggcaccgggggggggaaggcccccaagtcggggt

SEQ ID NO: 170333 - DNA, 183 bp, Zea mays
  Clone ID: MRT4577_86926C.1
gggggctatattttaatcctcctatttaaaagtcaaacgtttgatgtgacccagactaaactttagtccacagaacccaatacccccttaatggcgcagcttccccttttggtttttgaatcagagggggggacaacagaaaaactaccagatagtttgcttaccagttagaaaaggaatttt

SEQ ID NO: 170334 - DNA, 323 bp, Zea mays
  Clone ID: MRT4577_86927C.1
tcgtgtggttttagagagctggtattctccataggatgggcgcagatcccgtgatacatagcgtgtggcgttgcgttcatcccttgtgagtggaagcatgatgtatttgcgtgctcgcaacaaagatgtgatgcaatccatctcccaaatacctccaaggcgacgttatgaagagattgtgaagagaagtctcatcctacctcaagaaagttgggtacaaccctgataagattgcctttgttcccatttctggttttgagggcgacaacatgattgagaggtccaccaaccttgactgggacaaaggcccaaccctgcttgag

SEQ ID NO: 170335 - DNA, 305 bp, Zea mays
  Clone ID: MRT4577_86928C.1
tcgtggaatggagagagagagagggtaattatgtgcaccaggaccaggtcatgctgtagtttcatctgctggtggccgcacatcgaaaaccctagctagctagctagctagctcatcctcgtgcaattcatatccatgctgcactagcttatttccgccgttgacgacgctgattaattattcgtgataataatggccttgtcgatctagtttcctctctcttttttttattatgccattgcttctctcttggttcggtatgtgtatgggctgtctttcgtcatcacttgagtgtggcctacata

SEQ ID NO: 170336 - DNA, 541 bp, Zea mays
  Clone ID: MRT4577_86929C.1
gtacaagcttttttttttttttttttttgtacaagcttttttttttttttttttttttttttgttttttttttttttttttttttttttttttttttttttttttttttttttttttttttttttttttttttttttgtggccatgaaaaccgaatttttttttatacacatgattttttttgggttctccccaaaatataaattttttgggttgagggtgtttgtaaatgttatttggaaaaagaggggggttggggggtttgccgaaaagattgaaaacaccccagggggggtggggggggggaaaccccacagggttgggggggggtggtggggaataggggctcgcccccgcgcccgggtgaaagggggaaattaaatcccacgtgggggccatttttggggtttccaccttgcaaccaattttgggggaaaaaggggaaatgtgtatcctgggggaaaaaatttgtgcgctaaaaaataaaaaaaaaaatcgggcgggatgaaaaaattaaaaaccccgaagtggttaagaaagga

SEQ ID NO: 170337 - DNA, 510 bp, Zea mays
  Clone ID: MRT4577_8692C.1
agaatggggaggaatagggggcccccaccggaaaaaaaaaagggcgggtatatccaagggggggggacaaaaaacaccccggggaaaacaaaacccaaagggggcaaccggtcttaaccaaaacaaaaaaggggcctttagacagcacaaaccaccccaagcccctacgggcccagggggggccccaagcccaaaaccccgggggggcctcccccgcagggcccggtaccgggggaacggggtcaaggaaaacctgggccgaccccaaaaatcaggcggaaggaaaccccagggcttcaagaggcaaacaaagggggccctgaccaaattgccaaggggcttaggggaccccccggaccaggggaaaacatccccaaggcccgggaaccggagcacccttttgggcccccccccggggaaaaagccaaaaccccggggggcaggccccaaacccccggggacgggcccccacttgccggggaccctgcagggcacgggggggggctcccc

SEQ ID NO: 170338 - DNA, 280 bp, Zea mays
  Clone ID: MRT4577_86930C.1
cgtattttctgattatttccttttctcgcattctaatgattaggctcggggaggatatacggggaatggcttccaactacccaattcctccaaagctgcttccactgcagaagccagaacaaagaagaagaaaacctgtaaggatttcagtgctctgaaccggcacagataccgcagaggcccatccctcttgacagttcgtcctgcatcagatgaacctaactgcacctgctccattgggaaagaccgagacgcacgagaggacgcaccccattcctta

SEQ ID NO: 170339 - DNA, 177 bp, Zea mays
  Clone ID: MRT4577_86931C.1
acgaggaagagaagagacgcagccgggatcataggaagctgcacactttattgcttaaggagaaggcgttgattttcgggtcgccacctagtactagtaagacatgcagcttcaattggaggaccagcaactaccatacaaactcaaatagcgctggatgcatgaacttctgtgcca

SEQ ID NO: 170340 - DNA, 501 bp, Zea mays
  Clone ID: MRT4577_86932C.1
cctttatctgggcactctatggccttggttaaataaaagtggtatgttgttgcaaaaaaaaaaaaaaaaaaaaaaaaaaaaaaaaaaaaaaaaaaaaaaaaaaaaaaaaaaaaaaaaaaaaaaaaaaaaaaaaaaaaaaaaaaaaaaaaaagggaaaaaaaaaaaaaaaaaaaaaaagttccttgggcccaaaaccaccttaagggaaaattttaaaaaaatccataaaaatggggcccgctgaaacatccattaaaaggccccaattccccctataggaagccttataaaaattaattggccgccttttaaaaacgggggaattgaaaaaaccctgggtttaccaaattaaatgcccttgaaaaaaatccccttttcccaagttggctaaaaagcaaaaagcccccccccaatcccccttccaaaaagtggccaaccctaaagggaaaaggaacccccccttaaacggccaataaacccggggggtgggggggttaaccc

SEQ ID NO: 170341 - DNA, 2379 bp, Zea mays
  Clone ID: MRT4577_86933C.1
atggctactgcgactgaggatactatcagtgacgctagggaaggggatgattggacacaaccccatatgactgcaaagatcaacaacaatgtacaatgtaggaatcaatgtcatggtgctatcgtggcaacaaatgagagtgcaagtatgaccgaacaaggaagtggggtggatcatacccagtcgaagccaagggataccgatgaggatatagaggtcgatggtagtcaagatgaatcgactgccactaatgttcctaacccatacgacaaggtgtacagcaacatccctgaagaaacacatatgctcagtgacacaaccttgcaagggaaggattcgtaccctatttacagacattgtgacgataaccataaagaaaaggtccgagggtacgaactggacaatagatgggttgtcccttataacccatacctcctttgtctctttaactgtcacatcaatgtcgaggcatgtgggagcatcaaggctgttaaatacctgttcaagtacatatacaaaggccatgatcgtgcgtctgttgttatgagagatgcgagcaaggcagccgatgatgttgatgagatcaagcactatagagatgcaaggtgggtgactcctccagaagccttgtggaggatatacggctttgaacttagtcagatatctccacctgttatgcagctgcaaatccatcttccaaacatgcacatggtggcatttcatgagcggcaaatggtcgagcgagtcgtcaaccgtccaggtgttgataggtcgatgctcacagcatattttgaggcgaataggctacacgaggaggctcgtggcatcctatatcgtgacttccctgagtggtacacttggcagagtggtaagggcaaagtatggcaacagaggaaacgagatacaggtggacaagtcggtaggatagtctctgctcatccggccgagggggagcgctactatcttcgtgttctcctaaaccacgtgactggcgccgcctcctatgtggatctaaggacagttgatggtgtcaccctaccgacttttcgtgaggcagcagagagaaggggactacttgagtcggacaacacactggatgagtgtctcactgaacgtgctcttttccagatgccatcggcgctgcgacgactttttgccacaatactgaaacacaaagattctatgcccgaggactaccaacacaggagtcagaacaaaactcatgttgagcagatggtattgattgacattaggaacatgctgcagtcaatgggaaaggacataaagacattccctctacctcctatcatcgacatgtatgatgatgctattggtactactagggaggtttacgaggaggaaagtatccaaccgacagtgggagatgtggctcttaaagactctcttaacgaggaacagagggccgcctatgataagattatgtctgtcgttgacaccgatcagggcggattattctttatggatggacctggaagaaccacccattcacgcttcaagataccactcactattgacgatggcgttgtatgtagcttcacgaagcagagtggaacaacagagttgctacggaaagcatctctcattatctgggatgaggcttctatgactaagagacaagccgtggaggcactggacaatagcatgcgcgatataatgggtcgccccgcactgccatttggtggtaaaaccattgtcttcggtggagatttcagacaggtcttgcctattgttcgtaaagggtcaagggctcaagtggtcacgtctttgctatggatgtcttacctatgggagtccatgtcccacttaaagcttgttagcaacacgagagcaaaaaatgacccttggtttgtggagtttttgctgtgcgtaggcggtggaactgaggaaacaaatagtgacggcgacattcgtcttcctgacgatgtgtgtgtaccttacagtgggagtgacaacgatcttgacagcctaatggacttcgctttcccaaatctcaacgaaaatatgtctgattccacctacatcacttcaagggtgatattgtcgacacggaacgactgggttgatatgataaatgttaagatgattgatcgttttcaaggggagcatatggtgtaccatagtttcgatatcgccatggatgatccccataactactacccacccgagttcctaaacacattgacgcctaatgggctgccacctcatgttttgaagctcaagattggatgtcctgttatattgctctggaatatagaccctgcaaatggactttgcaatggcaccaggctggtcgttcgtggcttccaaagaaatagcattgacgcagagattgtactgggtcaacacgttggaaaatag

SEQ ID NO: 170342 - DNA, 294 bp, Zea mays
  Clone ID: MRT4577_86934C.1
cccacgcgtccgcggacgcgtggggtcgcatcctttccggtttgccggttggggggcaaacgagaactaggaaagtgttaagtcttgctgaatcagtatttactcctttccagagttcgcggaagccggtcagggcctccgactttaatagcaataggcgttatagtaggacgcacaatgcgttactttggggatcctttgtgtggctggttcagtgattgagatagatttggaaagagtttgttttgctgaattgttattcaatactcactaaggcgtgtccctgtttacatg

SEQ ID NO: 170343 - DNA, 754 bp, Zea mays
  Clone ID: MRT4577_86935C.1
aagcatggtaacaaccgcagggtacgcgggaaaagtatggcaacggaggaaacgagatacaggtggacaagtcggtagaatagtctctgctcatccggccgagggggagcgctactatcttcgtgttctcctaaaccacgtgactggcgccacctcctatgtggatctaaggacagttgatggtgttaccctaccgacttttcgtgaggcagcagagagaagaggactgcttgagtcggacaacacactggatgagtgtctcactgaatgtgctcttttccagatgccatcgtcgctgcgacggctttttgccacaatactggtgtactgtgagccaagcgatgtgggtgtactctggcagaaacacaaagattctatgtccgaggactatcaacacaagagtcagaacaaaactcatgttgagcagatggtattgattgacattaggaacatgctgcagtcaatgggaaaggacataaagacattccctctacctcctatgatcgacacatatgacgatgctattggtactgctcgggaggtttacaaggaggaaagtatccaaccgacagtggaagatgtggctcttaaagactctcttaacgaggaacagagggccgcctatgataagattatgtctgccgttgacaccgatcagggcggattattctttgtggatggacctggtggcaccgggaagacttatctatacagagtgctgctcgcgacgctacgcaaccagggcaggattgca

SEQ ID NO: 170344 - DNA, 4134 bp, Zea mays
  Clone ID: MRT4577_86936C.1
tcaagggtctatattctggagcaatttaacaggacatccaatcttgagcttcaaaacatgaggtggcagcccattaggcgtcaatgtgtttaggaattcaggtgggtagtagttatggggatcatccatggcgctatcgaaactatggtacaccatatgctccccttgaaaacgatcaatcatcttaacatttatcatatccacccagtcgttccgtgttgacagtatcgcccttgaagtgatgtaggtggaatcaaacatattttcgttgagatttgggaaagcgaagcctattaggttgtcaagatcgctgtcactcccactgtaaggcacacacacatcgtcaggaagatgaatgtcgctgtcactatttgtgtccttagttccaccgcctacgcgtatcaaaaactccgcaaaccaagggtcgttttttgctctcatgttgctaaaaagctttaagtgggacatggactcccataggtaagacatccgtagcgaagacgcgaccacttgagcccttgaccctttacgaagaactggcaagacctgtctaaaatctccaccgaagacaatggttttaccaccaaatggtagtgcggggcgacccattatatcgcgcatgctattgtccagtgcctccacggcttgtctcttagtcatagaagcctcgtcccagataatgagagatgctttccatagcaactctgttgttccactctgctttgtgaagctacatacagcgccatcgtcaatagtgagtggtatcttgaagcgtgaatgggcggttcttcctccaggcattatggaagccgcaacaccagatgtagctgttgccactgcaatcttgccctccctagcagtaccaatagcatcgtcatacgcgtcgatgataggaggtagagggaatgtatttatgtcctttcccattgattgcagcatgttcctaatgtcaatcaataccatctgctcaacatgagttttgttctgactcctgtgttggtagtcctcggacatagaatctttgtgtttctgccagagtacaaccacatcgcttggctcacagtacaccagtattgtggcaaaaagccatcgcagcgccgatggcatctggaaaagagcatgttcagtgagacactcatccagtgtgttgtccgactcaagtagtccccttctctctgctgcctcacgaaaagtcggtagggtgacaccatcaactgtccttagatccacataggaggcgtcaccagtcacgtggtttaggagaacacgaagatagtagcgctccccctcggccggatgagcagagactatcctaccgacttgtccacctgtatctcgtttcctccgttgccatactttacccttaccactctgccaagtgtaccactcagagaagtcacgatataggatgccacgatcctcctcatgtagcctattcgccttaaaatatgctgtgagcatcgacctatcaacacctggacggttgacgactcgctcgaccatttgccgctcgtgaaacgccaccatgtgcatgtttggaagatggagttgcagctgcatcacaggtggagatatctgactaagctcaaagccgtatatcctccacaaggcttctggaggagtcacccaccttgaatctctatactgcttgctctcatcaacatcatcgtatgccttgctaacatctctcataacaacagacgcacgatcatggcctttgtatatgtacttgaacaggtatttaacagccttgatgctcccacatgcctcgacattgatgtgacagttgaagagacgaaggaggtatgggttataagggacaacccatctattgtccagttcgcaccctcggaccttttctttatggtcatcgtcacgacgtatgtaaatagggtacgaatccttcccttgcaaggttgtgtcactgaaaggccgagggtaatgattcttgcacgatttacgacccttagtgcatgggcagtgagggtttagcgacccacacgggccatgcatcatatgcttgataaccatctttcgtagttctaggtacttgttgcttgggatctcggctgagatcaaaaggtcgtactgctcatgacatgtgagcttgtacttcctctgcattatgaatagaaaatgggcatgcggcaaaccccgcttctgaaactccatgacatagacgtaggctcggaccttaccaagaatatcctgtttagtcagcctatgctttaactcttgtagcttcgcatgaaagacacgcactacaagatctggacgatcttgtagcgtctgcccagggagaagctccctccttatctcatcacagttagggttacatgtcatggtaagaaatatgtctagtttaccaaacttccgcaccagagccatagcatccatataccgacgtctcatgtcatgaggaccaccaataaacgacgtcgacaacacagttcgcttgccaaccttctctgctctaatatctccatctagcatgctatccaccaagccgtggtacaggtctacccttaaccgacccccggggcgaatctgaaatttgtagcagtagtagtcacgtacagacacagataaatggctaagagattccgcatcttcatcatttgcattacttgccctatgtgtcacacggtatgcatccacttcatccatggatactccaacctttgggatatttgcgtgccagccaagttcgcctctagggaagaacaatggatatgatagtgcatcgtagcatccatggtatgagtggatgcagtggcttgaactgtccttcccatggagcataacactcttgctgaactggccttgcctttcgctcccttcgatattagttgtcatactatcgaggcaacagtatagggaagtgaaagagaaatggccattaaaaaacctaatgttatcacgaaagtgcctagcatcagagtctgcactatcccacaacctcttgagttggggaggggtctccagtggggctagctcaaccttcccaccacgacaacaaaaaccaggtgtctcatactcaaacttcttcgcggtgcaataaccgcagttgggaacagtcttgagcatatgtgtttcttcagggatgttgttgtacaccttgtcgcacgggtcaggaacatcagtgacagtcgattcatcttgacttccatcgatctctatatcctcatcggtatcctcatattgcccagcgaataggtatccctcgttctcatcagcatcgtcttcaaatacgacaccgtcatcgtcatcaacattggaaatgacccttggctttgactgggtatgatccaccccacttccttgttcggtcatacttgcactctcatttgttgccacgatagcaccatgacattgattcctacattgtacattgttgttgatctttgcagtcatatggggttgtgtccaatcatccccttccatagtgtcactgatagtatcctcagtcgtagtagccatgttccttgaaatggatgcttcaaattgccggttttgacgggctaagatagcttgtctttcaccacgtggaacatgtttacgtcttagtggtccagtagacatatgcagtgaattgacatcctcagtctgtgttgaagctggcaggaacgggttactggcgatttcagggataacccagtcgcaggggtaacgctctctaaagtaggtggccctttccaaattatggttaggcgtgttactaacagtttcatgcacaccacctggtgtcagaaggtctctcattgtgaaaacgtcgtctgccttgaatgtctcattcctatgcaaccaatcgctatcatcatcttgattcacatttactttttcgtctacatctcctgacacagtggacatcatatgttgtcccttgttttgttgtcgcgcctcacgatgcttcttattcaactcgttcctttggtctactgacatttttgcacgtctttctctatgcctttgcctttctcgttcgataaaattatcggtcggtgaagtgttattatttggaacttgtgttgcaaagtttgtgaaatcaattgcgctacagccatctgaaagactaactgaaccaagatggacatctccacttatttcaaagttaaccgtctcacatgtcttcat

SEQ ID NO: 170345 - DNA, 323 bp, Zea mays
  Clone ID: MRT4577_86937C.1
gggggcaaaaggggttttttgccttgttcccagaaaaataattttttgcttagccctactgggttgaaccaaagggggcagtacccttttgccctttattttttaacacagggggccctctccccttctttggagaaaaaatattttttcccccccggggggtgggatcgctattttccctttaagatatttcatcccgggggctttttttttccaatttggttgcgtgcccaaaaaattggccctccccccttagccctgtttaaaaaagtttttttctgttaaaacccccacctttttgtgaaaacaggctcttttttttt

SEQ ID NO: 170346 - DNA, 326 bp, Zea mays
  Clone ID: MRT4577_86938C.1
tagcagcagagccccaatgtaagcagcagacaccaaactgtaattgccttccctaccaggtttactactcattgcatgggcactgcaataaagcaatgcattcattcatacctgcaatgctatgatcttgacaaaacacctttagagtctgagatagttccttggtagcgcaagtcataatctattgctcatcgaagggtcctaccaaatgctatgaaatatgccttgatgatatggtgtgagtttttgctgacatatgtgaagagtcattccagatgtgctcatcggatattggaaaaaatgctcaccaactgacattcgagcaa

SEQ ID NO: 170347 - DNA, 266 bp, Zea mays
  Clone ID: MRT4577_86939C.1
gcacgaagctgaaacagggcggccggacgccgcctctacccttcgatcccggttctacgatgcagccgccgatggggagcgagaggaggacgcagtccagaaggcgcaggaagtggaagaacatcctgtgggcggagctgcaaatgaggccgactaccaacccaacgagccgcaagggaaggaaaataagacacagctagaagaacaaggtgggggggcgggcgccaaaggccaaacagcgagaggggagggacggtcaagaaaac

SEQ ID NO: 170348 - DNA, 198 bp, Zea mays
  Clone ID: MRT4577_8693C.1
aacgaatagcttgcttggggattcaccagagcttgaggagtaagcacgacctaaggagagtagagaacttgacgataaagatcatggtccgagtgaatctttatcttattggacaccaaacgtgacagtaaatcttgttgaagactacacacggtatcccaacaataatgaacctgccatcgctgcttcaatgtgaat

SEQ ID NO: 170349 - DNA, 355 bp, Zea mays
  Clone ID: MRT4577_86940C.1
aaaacaataacgccaaacttaataacccaggagcaaagcgggggaataaagtcttacaacgtaaggtgtaaaccacacaacgacggattgtttttaaccgacagaaacataacacgataggagccattgagggcagatcacaggatatcaggggcacacaagcccgacgaccccgggccagtggagcgtctagtactcgtcacccttggcgccgtcctcacccttgtgaaactcagcaccgaccttcttgtagttcttctcgagggcaggcagatccttacgaggcttggagaaattggccttcttcataccctcaccgacgtaccagtgcaccaaggcccccttggggtacatg

SEQ ID NO: 170350 - DNA, 348 bp, Zea mays
  Clone ID: MRT4577_86941C.1
ggacccacatgaatcccggaaacttaaatccgcagcagggaacaaagggacgggcccaaaaacattaaccccagaattgaacaaaatgtctgtttgaatgtaaacaacaacaacaacaacggggtgaccttttaactacacacaaaaatgtttttggtcaagcattcaacatgtacaccaccaaacgcctgccttggatgcgatttcagtttttacaggagcagcagtgggctttacaaacttttgaagacacactacacacttgttggagcggggggaccaagcaatcactgggtgacgtttttcactttctgctgggtctgacttggaaggcttcttaagctccga

SEQ ID NO: 170351 - DNA, 496 bp, Zea mays
  Clone ID: MRT4577_86942C.1
gggggggtgttttttttttttttttttttttttttttttttttttttttggctcataattttcaattgcacataacagaggcgcggggtattacacaattgggacagatgaattacaaggctggggtcggataaaaccaggggggggggggggagaatataatggaatggaatggaactccccctaacatagtaggggatcatttgaaacagccaccaatccatccttttaaaaccggcatcatctcgaagcaacagcatcggctcccttaaaacctactcttgaacgggattgccctgatgatcacctggggggagatggcagccaacccaacccccattaaggggcccacccaaaaaatccagtggtcaacccaagcatggggctgggtgtaaatcacgggggcgccaaggctccccgcggggttgatgccggtgcccgtgatagggatgggggccaggtggaccaggaacacggcaaaccctattggaagagg

SEQ ID NO: 170352 - DNA, 471 bp, Zea mays
  Clone ID: MRT4577_86943C.1
aacgcccccggggattttaagaagcaacagtcctagttaagcaagcgtttttggggggggtacatcacaagactcggtccaagggcaaacatgggggggggacgaacgggaaacagaacagcaaacatagggcccaaaggggaattaaagggctttgggaaccaaaccaaatctaataaaaaaaaaaagacgggatgggggggtgaacaaaactagctagctagtaacaaagcattggggccggctttttttttttttttgggggaaaaccactacttttttttttacgttacgacgggaagaggactccttttgggggcgcttttttgggggctggaaactttttaacttggtcgatcctacaccttagggcaaggagttttcggggggcatgggagcgctaccaaagtcccggggggggttgcccccgaagcactccatcctgctgggaaagttgggctcgttgcatcc

SEQ ID NO: 170353 - DNA, 904 bp, Zea mays
  Clone ID: MRT4577_86944C.1
taggcgccaaggtgggcatccgccgcgccaccgaggccgcgggcataccctacacctacgccgtgccggctcttcgcgggcttcgcgctccccaacatcgggcagctcctcgccccgggcccgcccgcggacaaggcggtcgtcctcggcgacggcgaacccaagcggtgttcgtggaggagggcgacatcgccacgtacacggtgctggcggccgacgacccgcgcgcggagaacaaggtgctgtacatcaagccgccggccaacacgctgtcgcacaacgagctgctgtcgctgtgggagaagaagaccggcaagacgttccggcgggagtacgtgccggaggaagccgtgctcaagcagatccaagagtcgccgttccctctgaacatcatcctggcgatcgggcacgcggcgttcgtgcgtggggagcagacgggcttcgagatcgacccggccaagggggtggacgccagcgaactgtacccggatgtcaagtacaccaccgtcgacgagtacctcaaccgcttcctctgagcctgaggtctcaacaaacaggacgtcacgtacggccgcgccggggccatgatgtgtggacgtcctcatcgtcagctgcttacctaaacatcactagcagcataccgtagtgtacgctacggtagaaatggaaagacaatatgttttctaaataataagatagattaaggttcatgtcaaaagggatttatgatgagttatatcacattgttgagctaacaaaaaatatgcttaaaagagtaacattatcatagctccaatatcttttgaagccacctaaattctcacgcgaataagatgtttctgtatagcttccgaaatgtcgtctttagatttctcgtgcttcaacatctttatcaagaatttcg

SEQ ID NO: 170354 - DNA, 424 bp, Zea mays
  Clone ID: MRT4577_86945C.1
ttgtattgtatacctctgtcatctctccagcgacggtcttttacgacggtgacgcgaatgcgaaccggagtagtggaagcagatgcggcattcatggccgtgatggagaagctcaagatctttgtcgtttaggagcccgttgtctagtgcttcttccttatatgtggattttagttttcctcttccaacataacctccttatctatgctatttttattctttttctttgtattattgttttttccaacatattattaatttatcgtataattcatcatttttctctattttattttatttttttttttattaaattacttttatttattattatttttcatttatgtttttctctttattttgtttttttttttcattttatattttttttatttttctttatcttttatcttttttgtttttt

SEQ ID NO: 170355 - DNA, 1557 bp, Zea mays
  Clone ID: MRT4577_86946C.1
caaatttcacagttcgccaatcgaacgcaacgacaaccaccagtccgtcgccttgcatcgacatcgatcgataacctatgcacggacggaaccagctgcgctgcctgctaggagtgttttcctttcctatatatagtggtgtttgattgtccgctccacaaatcgataggctaaggaaagctccatcgtcgatcggctgcgttattttgccggtaattgattgatagatggcgtcggagaagagcaagatcctggtggtcggcggcacggggtacctgggcaggcacgtcgtggcggcgagcgcgcggctgggccaccccacctcggcgctcgtcagggacacggcgccgtccgacccggccaaagcggcgctgctcaagagcttccaggacgccggcgtgacgctcctcaagggcgacctgtacgaccaggctagcctggtgagcgcggtgaagggcgcggacgtggtcatctccgtgctcggatcgatgcagatcgccgaccagagccggctcgtcgacgccatcaaggaggccggaaacgtcaagaggttcttcccgtcggagttcggcctggacgtggaccgcacgggcatcgtggagccggccaagtccatcctaggcgccaaggtgggcatccgccgcgccaccgaggccgcgggcataccctacacctacgccgtggccggcttcttcgcgggcttcggcctccccaaggtcgggcaggtcctcgcccccggcccgcccgcggacaaggcggtcgtcctcggcgacggcgacaccaaggcggtgttcgtggaggagggcgacatcgccacgtacacggtgctggcggccgacgacccgcgcgcggagaacaaggtgctgtacatcaagccgccggccaacacgctgtcgcacaacgagctgctgtcgctgtgggagaagaagaccggcaagacgttccggcgggagtacgtgccggaggaagccgtgctcaagcagatccaagagtcgccgatccctctgaacatcatcctggcgatcgggcacgcggcgttcgtgcgtggggagcagacgggcttcgagatcgacccggccaagggggtggacgccagcgaactgtacccggatgtcaagtacaccaccgtcgacgagtacctcaaccgctttctctgagcctgaggtctcaacaaacaggacgtcacgtacggccttggcgcgcggggccatgatgtgtggagtgtggacgtcttcatcgtcagctgctagtcgctagcgacgacgacgtgccaacctaaacatcactagcagcataccgtagtgtacgctacggtagaaatggaaagacaatatgttttctaaataataagatatatagattaaggttcatggcaaaagagatttatgatgaattatatcatattgttgagctcataaaaaatatgcttaaaaaagagtaacactatcatagcttttttttccccaaaaaatgtttctgtataaaaaaaaaaaatttaaaaaatttttggggttcaaaaattttaacaaaaaatttgtccccgggggatttccctcc

SEQ ID NO: 170356 - DNA, 339 bp, Zea mays
  Clone ID: MRT4577_86947C.1
gaaaaataaagcctttattttaggaggtttgtccccccgggggggggccaaaggggcccccccccccccttttaaaaagtggttcttttgttcccggggggcacctccccccacagggggcccacaatgtgcttttaaaaggaagggtgaaaaaagggttgtaacaccccggaaaatacccctttttttgcggggggcataagggggttgggggttttaaaaacaggagacgggggggttagatacttatttttttttcttaaagcttaaaatgggttcgtcgtgcccctttttttgggggaaattgtgtgggtttttttaagccctttctttgggccc

SEQ ID NO: 170357 - DNA, 231 bp, Zea mays
  Clone ID: MRT4577_86948C.1
gcggcgccgcaccacctcaccggccccggggcccaagtccaacccggcaacccccctcaaaatcgcattcgaaacctcgcgattcgctccacgaaatttacaaaaccacagcactcccgccaatctcccgcacgtttgggacccaaatccgcgatcccgttgcccagccgcagcgtacggaaacctagctccccccccgccgccgccgccgccgctgggatggacttctcg

SEQ ID NO: 170358 - DNA, 296 bp, Zea mays
  Clone ID: MRT4577_8694C.1
cggcggcggatcggcagatccggatggcgggatttggctgcacgacgtaacaccagctagcagctcgatcgctctgtcctgcaataatggccgcctcgctcctcctcccagcagctggtcgcgccggtggccctggcagcggcgctgctgctgctggcggcggggcccgggaccgcgtcggcggagctgagctgcatcgaggtgacgtcgtcggaggcgcacgtgcctcgcgtacgccatgcgcagcgggggaccatcctccgcggagcgctgcagcagcgtgcgctcgctaccac

SEQ ID NO: 170359 - DNA, 505 bp, Zea mays
  Clone ID: MRT4577_86950C.1
ggtgttgcggaggttcactcttgatctcctacactctgctctcgctttgaaggtggcatgtgagggaccgagtgaaagggatcgacctggagtggaggctgtgcaccagaattgttggctaaggtgcggcgcataggagtttggagcaaggactgtatcttgcatggaactgagacaacctcatatatgcaggaacaataatcgatcatggataaaagacgttgccacgaaaacattcaagatagaaacctagaacaaactacaaagcgcacagacattactcacaaatcatcgtatgcactgcatacacgcgatagacaacctatctcaatcatcccatcaatagcaccttcaatggacaaagctagctatgggaatgaaggaggaacatactaagaccacgagagtactctccacgtctcatggggacgaccatatgaccacaaatgaatctgctgtgactcacacatgacatagaaccactgaacatgtgtgaagagcaccc

SEQ ID NO: 170360 - DNA, 403 bp, Zea mays
  Clone ID: MRT4577_86951C.1
cccacgcgtccgcccacgcgtccgccctttctttcgcccacgcgtccgaagattttggtgaggcaatggggttctagggacaagagaaggtgaaggtcaagcagatggcttgaggatcgaggtaccatggctaatgtgaagaagcgattacttgcaagatgtcgacggactaatcagattgtgaagagtcatatagtgatgaagaccacaacattagaagacatgatttgaagtcatctgtttaactcataaatgatgagatgatttaaatcataacactcgagggtttctagctcaagacaagtgacaaagcatggtcaaaagtccaaggaagaaggtatcaaagatagaacctataaagggctcacagttgtgcagactttaagaagaagatagcagtgcg

SEQ ID NO: 170361 - DNA, 256 bp, Zea mays
  Clone ID: MRT4577_86952C.1
gctcttctaagcatgttgcgactcttcctaagtccagggtacccttactaataaagggctggggacattccgcgagcgggcgggcatcttcatgtgctcatatttacctgtattcaattcatgtaacttcacctaaggaaggtgatggtgatagtacttctctgtttatctgctgcttggtccacagaacattatcttttagctaatcaatgggacattttttttcgcaggaggattaatacagctcaaccatgga

SEQ ID NO: 170362 - DNA, 680 bp, Zea mays
  Clone ID: MRT4577_86953C.1
ctgtgcggcgctcgaggcggccgtctaggaaaatgggctaaaataaaacatttcggtctcatctccgtccacatccgtcctccagcactccagctgcatcgacgaggaccgccgtagcgatttgcgaagcaagggacgggagaggaacccgaggaaggcgaaaatgatctaccgcaactggtcgctgctctcgtccacagtcgtcatttggggcggcgtcgccaccgccggcctcgccggtatcttcctcttgggcggcaaggagaaattcaatggttatctgtgccgcgaaggcgagaggcttaggcagcaggacagagccacgatgggccgaagctaagcgttagcttctttggtatctcaagggagcaatagcccttggaaatttcacaagattcctgcgtccctaccagaacaagtccctatctagggactaggatggaatccatccttctgcaggctttcactttcctgataataacagtaacaataaattgacaatggtttgtgttcttctgcaaaaaaaaaaaaaaaaaaggggccctctctccgataacattgcaaagcactggaaatccaatgaggtagaagctgttgagacagccaaggagtggactcgcctgtatgcgagcggtgcatgacagcgcactgctgttcttgctgtaataaccgcatcatac

SEQ ID NO: 170363 - DNA, 265 bp, Zea mays
  Clone ID: MRT4577_86954C.1
ctgcccgagtcgatcgtcaagattgaactgtgtacgaacgtgttgtgttgatatgtgatcagcatggatagttgtgagctctgtgttcacagctacagtgcagagcactgtgtcggtagaatgagagatgagctcgtgatgttcagggatagagacgtctgacaacatctaatagcgattctgaggtacggccgagacacaagagaattagggctcttatggttctgatcttgtagctgactcgtgcatctaatctatgctctgt

SEQ ID NO: 170364 - DNA, 849 bp, Zea mays
  unsure (1)..(849): unsure at all n locations
  Clone ID: MRT4577_86955C.1
ttgggaccctcgaggccggccgggatctgcatgctctatctcaattcctcccttctagcacttctctctacattgtttgataccccctagctattcaagatggcgcccaagattgcaattgtctactactccatgtacggccacatcaagaagctggccgatgctgagctcaagggtatccaggaggctggtggtgacgccaagctcttccaggttgccgagacccttcccgaggaagtcctccagaagatgtacgccggccccaaggctgccgatatccccgtccttgaggaccccgctgtcctcgaggagttcgacggtatcctcttcggtatccctacccgttacggaaacttccccgcccagttcaaggctttctgggacaggactggcaagcaatggcagcagggaagcttctggggcaagtacgctggtctctttgtctccaccggtacccagggtggtggccaggagagcacctgcttggctgccatgagcaccctcgcccaccacggcttcatctacgtgccattgggctacaagaccacattcgccgaccttgccaacctaaacgaggttcacggtggctccgcctggggcgctggtacctttgctggcggtgacggttcccgccagccctctgagctcgagatcagggtcgccgttgcccagggcaaggccttctacgaggncgttgccaaggctcaccagtgactagatgatggtactgcgggcgaaaagaagcggcagaaactacgaccgctacgactaatggcactacacctgcgncagcggacagactttccagcaccctgctgctgctcctactcctgctgctggaccttcatc

SEQ ID NO: 170365 - DNA, 278 bp, Zea mays
  Clone ID: MRT4577_86956C.1
aaaaagtaaaaagtatatgtatataaaaaggtcagaacggcataccaattttggaatgaaaagggagtactaacctaaaattgcttagctgctttagttcgagaagctcaatggaaaattgcaaactacttaaaatctaaaaggattagatttgaaggtaaattccactaaccgaagccagtagttttgttgcttcctatatctctgaaatctttctactgttctgtgaaaagctgaagcactcatgctgtctctattccgtgcgtgtcttctatgtt

SEQ ID NO: 170366 - DNA, 454 bp, Zea mays
  Clone ID: MRT4577_86957C.1
aagatgaagaccagcagatagctaaaatctttggtaggcgcgcgcaaaaaccaagggagagtgacaccccacctaacaatgaaacaggaaggacagacacacaggaccaaatgaaggggtggagcctgaacagacaaaagagggagccgatcccaaacaagactctatgtgcgagggaaacagaaaaagctattggggaaactggccacacatattgggctaatgggacgggacataagacgccacttggtaccgaccaggaactggtgaaaccctagaaacacagccgatgaacaattgcggaaccagactggatgttactccggccatctatacccacgtgagggggaaacacatgcccgaagctaacatgaacccttcgatccggacactgcactatctgtaaagcagtgcaaccacctggagattcatgccgctgggtgcacgggaaggg

SEQ ID NO: 170367 - DNA, 714 bp, Zea mays
  Clone ID: MRT4577_86958C.1
cctcgaggccggccgggacgacactgcaaacaacactatatgcccctgctctgaacctagatctctgctctctgcctctccttgcctcgggccgtcttccctcacctcaacacgaccaataagagtttcgtgcgcatggcatctccccgccccccccatggacatctcaccctgcgcatcatcaataaggctgtaaacatcacaccacccacgaacaacaaaaggctactaccatctctcaagacagctacgatcaacaccatccctgtgatcgacgattccaacatattcaatgaaaagcacgtaatccacctctttaaccacaaaatgactcctctgatcgaaaatgagaattgctggcgctctggatctcctgataatacacaactacttgatgatcatgctggcaatttcctccaccttgaccctgaccacattgaacaactgaataccattgccgatgcagatccacaagaatatggttgttgcttatcgcaacaacacacgtgttggaagatgacattaatgatgtaccatagcatgatcatgaagaaactcttaattaatcagctcctcatagcaagaaactagtatttaagctctcattagcgaatagtgatactgcaccaacgctgaccaatattgtcttcctggtgatgaaagtcatcttcctcgcactctagaacaggcacagacactctttgtgaacgcagt

SEQ ID NO: 170368 - DNA, 249 bp, Zea mays
  Clone ID: MRT4577_86959C.1
agcacgcgtgcgagtacagtagggtaccaacaatggcgggcaaaatagggcgctggctgattgctcctagggcgtacagctagtgaagctaccgccaccatgtaaggacgctgcttacaagctcctatagataggcttattcccacatagctatgacgaggggggtcttctgcgagggaaaggacaattgttaaaccctgcacgatccatcatgatatccatccgggctttttgcccctacccatgttc

SEQ ID NO: 170369 - DNA, 519 bp, Zea mays
  unsure (1)..(519): unsure at all n locations
  Clone ID: MRT4577_8695C.1
ttgcgcgctctcccgccggacgcgccgttgcccttccccgtccccgcgccgttccacccccaagcccccggccccggtgggaccgtcccggccacgcccccgaacccgacccctccgcaaccgttaacccccgccgngccgccttcctccttttcgacgcggccgccgcacccatgggagatctccgcgcgagcatggctagagtccttccccgacggacggccgcccaccgagcccgaggtcgacgcctacatcgacgtgcaccgccccgagctcccttccctcccccgctcccagctacaccagcgcctcctcgccctccgcggcgaccaggttctggatgcagaccagagcgcattcccgtacaggttccagcgtactgatctatggaagcctgtgtaccagtggttggaatctcttgagctggactcactagttgctacacagcagatatcagactggcttacatcgaacccaaagataatggacagaatggttgagaaacattcaaaataccat

SEQ ID NO: 170370 - DNA, 773 bp, Zea mays
  unsure (1)..(773): unsure at all n locations
  Clone ID: MRT4577_86960C.1
atgcgcactcgcttgccgcgccgagagtagcacagtgaccacaaagcgaccggcgaggctctccgacaccgagacgagctccgtggagaacacaacgcaacgatgcccttcctgctcacgccgggacgctcggatggtgccctcaccgacaactctctcgcgcctactgcattccgctccaccatagcaaattactaatgatcgtcgtcaaccaccagcatggccacgtaccccgcctcccccttcctataccctcgcctccacaaccgccgcaagcgatactgcgcggcctcctcctcctcctcgcctttcagatgatggtgcctgccgacaacgccgcggaatcccctgacgacaacgacccgcatatcgactcaccgcaaaaagcttatctaatttcttcagttaaagaaatactgaccattatggacctcaacgtcaaaggcgatctctatctacccattctcacgataataatagcatatccatcgtgcgtcaacgtctgattctgcatgctatcatgatgcctaacccatatcatgagtgagaaatctataactgcattagcagaatctctctgnaaaacctatatgctcacttcatgctgacaaagaacctgaatacataactgatactgtaatcactgtatatgatgatgctgttcctgtatacgacaaataactacattccgtgaaaagtgcttacctacgccgccaccctgatgctattcttggttgacttttgcggacttcaattgcctgcacatcaaacct

SEQ ID NO: 170371 - DNA, 274 bp, Zea mays
  unsure (1)..(274): unsure at all n locations
  Clone ID: MRT4577_86961C.1
ctcaggccgagcacaagcagctgggcatcatcagtgtggtagcctggtaggtacggtactctctctctctctccttgtccaagagacgaagaagactgacctgctgtactactgcgctgctgcttctgcacgacaagatacgacgcggcgcctactctttacccgagtttaatagctcgtccaggtacagctcctcgtgctactgcttgcttcacaatgtgcgctatcatggggaaacaaaagaggggtaggtgacggtggngtgtcctcaagc

SEQ ID NO: 170372 - DNA, 193 bp, Zea mays
  Clone ID: MRT4577_86962C.1
tggatagccagcggatatggcactatgtacggtcattctctatattcaacttgcggcatatctacccttctgggatgaagaccaacacagactctatcagcatatcatggctgatgcgaatgatattccatgaccgcgaatgtaacacggtgactcctgaagctaaaaacctgatcagtacaatgctgactat

SEQ ID NO: 170373 - DNA, 306 bp, Zea mays
  Clone ID: MRT4577_86963C.1
gggtttgttgttgctactaggcagcgtacgtctgcttatcgttcgcttgcagcggccgtctctggagagcagcagccatggccctacgctaccctatggccgtgggcctcaacaagggccacaaagtgaccaagaacgtgagcaagcccaggcacagccgacgccgcgggcgtctgaccaaacacaccaagttcgtgcgggacatgattcgggaggtgtgtggctttgccccgtacgagcggcgcgccatggagttactgaaggtctccaaggacaaacgggcactagttctagatcgcgaagggc

SEQ ID NO: 170374 - DNA, 333 bp, Zea mays
  Clone ID: MRT4577_86964C.1
ccggccgggaatccttcgtcactcaacttcacaagccattcgctttccataatgtcgcaaccaaccctcaccgcagactacacttcccccgagagtgagcctttccaggtctcgcacacactatccgccatttcttctacggcctcaacgaccgacaaggcgtcatatcttaagggcctccgcgcatctatcgctgaaacccgggccacggtcaaccatgagctcagcgaaccagggcagtgcgagattgctggcgagggggagagggactcggacgagtctcggcactcgcggcagtcccgcagccactggacccggggccgctgcccaagc

SEQ ID NO: 170375 - DNA, 233 bp, Zea mays
  Clone ID: MRT4577_86965C.1
tccttaagcagtggtaacaacgcagagtacgcggagcagtgctaacaacgcagagtacgcggggaaagtgatgagaagcaactgccaagtacgctggcgggctcacttggattcaactctgataggtactgtgagtagcactgtggtatattaatgacagcaatgatggatctgtaggtatattagcatccatatttggcatgaaggaaaaaaaaggttgctagtcaacattt

SEQ ID NO: 170376 - DNA, 388 bp, Zea mays
  Clone ID: MRT4577_86966C.1
ttttttttttttttttttttctttttttacctgaggggggggttttttttttttggttttttttaaaaaaaaagtcagagctcttggctttataaaaaaacattttactgaattcatggcgttatggtttttttccccacccttttgttttcagggccgtgaaccccccccgaaagcgtttaatttgggactacttgttttttttaaaaagtgccacccagtatagggggccatgtctttttgaaaaccatatttgggggtttccttttttcaagcccacaaatgactaaacaggggggcatcttctttgcgggtttttttggggggagtctattctttggtccgaagccttaattaatttccaagccgctttttttttttggttaag

SEQ ID NO: 170377 - DNA, 665 bp, Zea mays
  Clone ID: MRT4577_86967C.1
cggggccaaactactattcaggaactatccatatccatttcggccccttttaaaaaaaaaaaacaaaaaaaaagggctctgcttggttttcctgcacactgctcctctgtttgcgtcttctgtggcggcggcggcaatggaggctgtcacagacgaaggatgtcatgtaactagttccggccggggccaacactaatattcaggaactatccatatccatttcggccccttttaaaaaaaaaaaaccaaaaaaaggggctctgcttggttttcctgcacactgctcctttgtttgcgtcttctggggcggcggcggcaatggaggctgtcacagacaaaggatgtcatgtaactagttccggccggggccaacactaatattcaggaactatccatatccatttcggccctttttaaaaaaaaaaacaaaaaaaagggctctggttggttttcctgcacactgctcctttgtttgcgtcttctggggcggcagcggcaatggaggctgtcacaaaccaaggatgtcatgtaactagttccggccggggccaacactaatattcaggaactatccatatccatttcggccccttttaaaaaaaaaaaacaaaaaaaaagggctttgcttggttttcctgcacactgctcctatgtttgcgtttttt

SEQ ID NO: 170378 - DNA, 206 bp, Zea mays
  Clone ID: MRT4577_86968C.1
attcggctcgaggtcgacgcccgctttgtatcacactgcggctggaactccacaatcgaggcgatgtcgcacggatgacagcggatactactcttgacggactcgtgacgaccaaccgacgaactcctacttgggccatgacgaccagaagatatccatagaaataaatgcgaagacatacacggagggctgatatggacaaacaa

SEQ ID NO: 170379 - DNA, 448 bp, Zea mays
  Clone ID: MRT4577_86969C.1
ctcgattaggacatcatgaccttgctgactccctgatcatgttctagccacaggccttcgacgatacagcatgctcgaagttccacgtacctacggagtgccaaaacggactgtcaagtatatgcatacctgctgaaaccagacatcttcctcatacagtttgcttctaccagatagatggagataatgcatcactcacgcatctcttacatcactacaacagctgaacaaatgccatatcatgtctcgattgcacaaacgtcgtgactctctcatttcctacacgccgtatcctcacattgaaataggcgcatcgtccgatcttctaactgatcactactaggaaaggggtacattcagacggcagactttatgactcattctgctgctctgactgccacagaaggtaggacgtataagattcttagagagagagacaatcacagat

SEQ ID NO: 170380 - DNA, 338 bp, Zea mays
  Clone ID: MRT4577_8696C.1
cgccgaagctcgtagatttgaaagaagaagaaaattagagacagaaaagtactgaaaaccaaacatctcaagctgaagccataacactgtaggagtatgctactagccctactgtggcaatcttaggctgctagaaccaaaagggtctaactgcagatctcaaaccctgactcgatcgactcctaacatatgcaaccagctaaatcaccagcttcgtcgtctaatgcgaccgctccggctccctctggtgatcccttgtcgcgtcgcggtcgatcagcccgacgcgcaggccggcttgcgaggtgggagctggtgatggggcgtcctctttagctttg

SEQ ID NO: 170381 - DNA, 348 bp, Zea mays
  Clone ID: MRT4577_86970C.1
atacgctgcagtacggtcggaatccgggtcaccacgcgcggacgcgtgggttgatgaatgccatcacgcaactggtaaccacccatatactaggataatgaaggaattctatcatggatcagagcataagccaaatgtgttcggtatgacagcctctcctatcataagaaaaggggtctcctctgatttggattgcaaaaatcagctatctgagctggaaaatattttagattccaagatacactctgtggtggatagagaagagatagaactttgtgttccttctgcaaaagaagtgaatagatactatgagccaagaactgtttcttttgacgatttaagtgaaga

SEQ ID NO: 170382 - DNA, 459 bp, Zea mays
  unsure (1)..(459): unsure at all n locations
  Clone ID: MRT4577_86971C.1
ggacctttgggctggtttatgtgcttgtttatgtgcttgtttatgtgcttgcttatgtgcttgcttatgtgcttgtttatgtggttgggtctccacttacgggtcgaatagatatcatcatctgaccgtaactaaccattgaaaaaacgaatccgaggagaaaacgccgtcgaatccgtataaaaagaaacggatagacgggtcaaccccgaagaggcccgatatctacctaaaaattaatgagtagatcgcttaagaaacgtcaaattcagttactaagcataataaggtggcgtaagaggaagatgaatcgttattcgagaaatccgtgacagtaaacgcaggctggtaagacgtaaaaaagtacccggaagagtacgcgcttaacccgacgctactaaatacagcctagatttcaggaattacgtctgatatggccgcaccncagctctcatcaac

SEQ ID NO: 170383 - DNA, 217 bp, Zea mays
  Clone ID: MRT4577_86972C.1
tcgaaaacacatacggtctcttgcaaaatcactttatcatatgctcacaagactttattcacggaatcgcgacaatttaaccttacttcctagaagcatcaacgttcctcatgcccttcaagctctagtttccacataggacgcttcacatgaatagcaaaccctacattgattgctgctactcttacaaccatctcgactatatcaactaactaat

SEQ ID NO: 170384 - DNA, 1923 bp, Zea mays
  Clone ID: MRT4577_86973C.1
tatatcttggggttccagcatgtgaattcaagggaaacagatactgatgcttgctcggaagcttcgacttgaagggcaatttgactttttaaagatagcaagggccacaccaggttttgttggtgctgacttgaaagcattagtcaataatgcagggtatctggcaatgaagagaataattaataaaagaagagctcagtattgttctgaggtaaaggtaaaatggtggaagcagctgtcttgggatgcaggcgagatggagagtgtacatgtcaccatgaacgactttgaggaagcaacaaaattggtccaaccctctttgaggagggaaggattttcttccattcctgatgtcacatgggatgatgttggaggtcttgattcgttgaggaaagagtttcaccgctacataagatgtattaagagccctgaagattgtgatgtatttggagtgagaatgcaagatggcttcctgctgtttggacctccgggttgtggcaaaacactcatagcaaaagcagtggcacatgaggcaggggctaattttattcatattaaggggcctgatatattgaacaagtatgttggcgagagtgaatcagaaattaggaaaatattcaaccgagcacgtattaatgccccatgcattgtattttttgatgaggtagattcattgacaacaaaaagaggtaaagagggggggtgggttgttgaacgtctcctaaaccagttacttatcgaacttgatggtgctggtcagcgtaaaggtgtctacgtgataggagctacaaacagaattgatatgatagatgatgctatgctacggcctggtagattcgggaagaaacattatgtacctatacctggtgctcgcgaaagggtttcaatattaaaggcactagccagacgcatacccgtttcatcaaccgttgatttggatgtgttggcacttcgagaagagtgcagcaatttcactggcgccgacctagcatcactggtggatgaggcagccatgttagctatggcagagagatggatgtacctcgatagcaggacatcaacgagtccatcttctctgattgagccatcacactttgaagaagccttatcaaaggtgaagccatcaatatccaaaaagcaaaagagactttacgaaaaaatgcgcaagaaacacttgtcaacaacctgatcagatcaccatacatccatcttgtgtgtgtggcacaaactatgccatcgctacctatgaaaatggttctgccggcactgcagaatgctactataaatttgtgcattacaatcatgcttgaaatataatgataaaccgtatactcacactatttttttacttgacatttttagttccgcgaaagggtttcaatattaaaggcactagccagacgcatacccgtttcatcaaccgttgatttggatgtgttggcacttcgagaagagtgcagcaatttcactggcgccgacctagcatcactggtggatgaggcagccatgttagctatggcagagagatggatgtacctcgatagcgggacatcaacgagtccatcttctctgattgaggcatcacactttgaagaagccttatcaaaggtgaagccatcaatatccaaaaagcaaaagagatgttacgaaaaaatgcgcaagaaacacttgtcaacaacctgatcagatcaccatacatccatcttgtgtgtgtggcacaaactatgccatcgctatctatgaaaatggttctgccggcactgcagaatgctactataaatttgtgcattacaatcatgcttgaaatatagtgataaaccgtatactccctctgtttttttacttgacattttttagttcaaaaacacactatccggcgtcaaatatataagattggaggtagtaccagacatgccgtggctt

SEQ ID NO: 170385 - DNA, 4078 bp, Zea mays
  Clone ID: MRT4577_86974C.1
aattcggcacgaggcagcacccagcagcgcaaactcccgatcagatccgcagcgattcggccaagtccccagcccttctcccgctgcatcaccaccacctctttttctctgccccttcgatctcgatcgccctcgcaattcctccgtaaagcgcccctgtcctgggcgagctatagcgcgcgcgcgcgcccagatctgcgcggtctcgccggcgatggcgtgcattaagagcgcgcagcgggcggcgctgacggcgttggcgccggacgcgccgtacctcgccgcgggcaccatgaccggcgccgtcgacttgagcttctccgcatccgccaacatcgagatcttccgcctcgacttccagtccgactccccggacttgccgatcctcgcctccgcgccctccccggaccgcttcaaccgcctctcctggtcgcgcccaggcgccgtcgagggcgactccttcgcgctcggactcctcgctgggggcctcagcgacggctccgttgccgtgtggaacccactgagcatgatcagctccgaggggaaagcggaggacgccatggtcgcgcgccttgagaagcacaccggaccggtgtgtggactggagttcagcgagctcacgccgaatcggctcgcttctggggctgagcagggggagctttgcatctgggatctcaagaatcccgttgagccaatcgtgtacccgccactcaagagtgttgggtcccatgcccaagctgaaatctcttgtttatcctggaatcccaagtttcaacatatagttgcctcaacttcgagtaatgggatgacagttgtttgggatttaaggaaccagaaaccactgactagtttttcagattcaaatagaaggaaatgctctgtgcttcaatggaatccagatatgtccacccagctgattgttgcatcagacgatgacaactctccctcactgagagtttgggatgtgaggaagaccatttcaccagtaagagaatttgttggccattcaaaaggtgtaatcgctatgtcgtggtgcccctatgatagttcattcttgcttacatgttcaaaagacaataggacaatttgttgggacactgttagtggagagattattagtgaactacccgcaagtgctaattggaactttgaccttcactggtaccggaaaataccaggtgtcattgcagcatcctcatttgatgggaaaattggcatatacaacctagagttctctggtctttatgcgactggtgatgctgttggtgccccagtgcgtccaagggctccagctccaaaatggttgaaatgccccaccggtgcatcttttggtttcggtggtaaacttgtttctttccatccggtggcacccacccaaggtgcacaaacatctacatctgaggtgcatgtgcacaatttggtgattgagcaaagtctggtgagccgatcaactgaatttgaagctgctattcagaatggtgacaaaagttcgctgcgtgctctgcgtgaaaaaaaatcacaagaatctttatctgacgaggagagagaaacatggggcttcttgatgattatgtttgaggacggggattttgcaaggacaaaattgcttgctcatcttggcttcgaaccacctcaggcaccacctgcaagttcacctgatgaattgagccaaacattggcagatacacttaatcttgatcacgccacaataaccgattatgcagatgcccaatttcttactgataacggggatgattttttcaacaatcctcaaccttcagaggctagtttggctgaagatttagtttctacaaatggtcaacagacagagcaggaaatgtctggagatgttgtgccgtcagatccatcaattgacaaaagtattcagcatgcattggtggttggagactacaaaggggcggttaaccagtgtctttctgctaatcgtatagctgatgctttggttatagcccatgccggtggttctgctctctgggaaagcacaagaaatcattatcttaaaaacagtatctcaccttacttaaaggttgtctccgctatggtgggcaatgatttaatgagttttgtaagtacctggccactaagttcatggaaggaaactcttgctctgctctgcacgtttgcacagaaagaggagtggcatgttttgtgtgacacgcttgcgtctagacttctaaatatcggagatacactagctgcaaccctctgttatatttgtgctggaaatattgataaagctgttgaaatatggtcccgcaccttgaaatctgaagatggtgggaagatttatgttgatcttcttcaggatttgatggaaaaaaccagtactcatgcctgttgctacgggccacggctcttgaatctgatcacgcgctttagcttgttgagaactatgctgaattgctggctagtcaaggtctttcttaaaactgcaatggagtatttaaaactgttgggattacatgaacattcaaatgagctggcaattttgagagatcgaattgcatgttctatggaagagaatgataatgctaggagttatgtttctgaaagcaccgccactccttccctttatggcacaaatcaatcttatacagccccagaccattctcagaatgtttaccagcaggtacctcagccatacaatgtaccaagtaatacatattcagaagcttacccacaacaacctactggcgcctatggatacaacaacacatatcaacctcaacaaccaacccatatgtttgttccacctagcgcccctgccagctctcagcaacagccaggcccttcgcctgtaccagtgcctcagcaaacagtgaaggcatttactcctgcgaacccagctggtctaaaaaatccgggacaatatcagcaacctaataccctaggttcccagctttacacgggcactgcaaaatcaacagtatccttctggaccatctgcttcttatccaagcggacctccaacaacatttcatcagcctgtatcacctgttcaatatcagcctgttgctccaccagtatcttcttttggtccgagcgctcctgtaccagcaacagtccctaaccagatgtttccccattctgctgctgctaactcaacttcaaggttcatgccatcgaacaatcaaagctttgctccgaggccaggtctaagtcccgcacagccctcaagtccaacacaggtgcaggcacagccagctcctcctgcaccgcccccgactgtgcagacagctgatacgacaaaagtgtctgctgagttgagacctgttattggtacactaactagactattcgatgagacgtccaaagctctgggaggatcacaagctactcaagcaaaaaagcgtgaaattgaggacaattcaaggaaaataggggcattgttttcaaaactaaatagtgatgacatatctccaaacgtttcatcaaaactcaggcagttgtgcagtgcaattgatgctagcgattttgccactgcgatgcacctccaggtactcttgacaacaagtgactgggacgagtgcaacttctggctcgcggcattgaagcggatgatcaagacaaggcagaatttcagaatgtaaaccttgtggcctttttctgcagccagttctgtacacacctttttctgctgcttgccagaaatgatagctgtagcagttcagagagtttgcctgcacaggggtgttatcatgctgctttgttctcggctcttgattctgcctaagcgctttggtacctcagtgctgttatacattttgataatagttttttgttttcgacatctgctataaggtgacctgcggctgggttgttcgttatgaatgttaattgtaagaggacacttagtctgttatagctggtggatcacctgtttcaattcttcctcttagatttcgtcagtttggacattccaagaactctagatggttaatacaagtgacagtggcttgttttttttttggtaatgccaacagaaatcaataaacctgtggatttttgaggtcaaaaaaaaaaaaaaaaaaaaaaaaaaaaaactcgaggggggggc

SEQ ID NO: 170386 - DNA, 2010 bp, Zea mays
  Clone ID: MRT4577_86975C.1
atgacttctcatatttcttatctatggtataaatttgatatgagcctgtttatgaaatctaaattaactgtgaaactgaaacagtttgcacagaaagaggagtggcatattttgtgtgacacacttgcgtctaggcttctgaatgtcggtgatacactagctgcgaccctctgttatatttgtgctggaaatattgacaaagctgttgaaatatggtcccgcaccttgaaatctgaagatggtgggaagacttatgttgatcttctccaggatttgatggaaaaaaccattactcttgcccttgctacgggccacgaagagatttagcgcgtcactgtctaagcttgttgagaactacgctgaattgctggctagtcaaggtcttcttaaaactgcaatggagtatttaaaactgttgggatcagatgaacattcgcatgagctggcaattttgagagatcgaattgcatgttctacagaagaaaatgataatgctaggagttctgtttctgaaaacaccagcactccttccccctatgtcccaaatcaaccttataccaccccagaccatcctcagaatgtttaccaggtacctcaaccatacaatgtgccaagcaatacatattcagaagcttacccacaacaaggtacaggagcctatggatacaacaatgcatatcaacctcagcaaccagccaatatgtttgttccacctagcacacctcccaacactcagcaacagccaggcccttcacatgtaccagtgcctcagcaaacagtaaagacatttactcctgcgaacccagctggtctaaaaaacccgggacaatatcagcaacctaataccttaggttcccagctttacacgggcgctacgaatcaaccgtattcttctggaccatctgctccttatccaagcggacctccaacaacatttcatcagcctgtagcacctgttcaatatcagagtgctgctccaccagtatcttcttttggtccaaccacccctgtaccaggaacagtccctaaccagatgtttccccattctgctgctactaactcgacttccaggtttatgccatcgaacaatcaaagctttgctccaaggccaggtttaagtcctgtgcagccctcaagtccaacacaggtgcaggcacagccagctcctcctgcacctcccgcgactgtgcagacagctgatacgacaaaagtgtctgctgagctgagacctgttattggtacactaaccagactattcgacgagacgaccaaagccttgggaggatcacaagctactcaagcaaaaaaacgtgaaattgaggacaattcgaggaaaataggggcattattttcaaaactaaatagtggtgacatatctccaaacgtttcatcaaaactcattcagctgtgcagtgcgattgatgctagcgattttgtcaccgcgatgcacctccaggtactcttaacgacaagcgactgggacgagtgcaacttctggcttgcggcattgaagcggatgatcaagacaaggcagaatttcagaatgtaaaccttgtgtggccttctcctgcacccagttatgtacacaccttttcccgctgcttgccagaaatgatagcgtttgcggttcagaggattctccagcacagcggttgttatcatgcagcttttgctctgggcctttgattctgcctgcgagttggtgaaatcgccctgatacttccgtgctcttatatacatttcgataatagttttggttttctgacatctactgtaaggtgacctgttgctgggttgttggttatctgaatattaattgtaagaggccacttagtctgttatagctggtggatcgcctttatcaaacaatatttttttttttttttgcactgagaattctgtcagttcggacattcgaagaactctagatggttaatacgagtgacagtggcttgtttttttattggtactgtcaaaaagaaatcaataaacctgtggatttttgaggtc

SEQ ID NO: 170387 - DNA, 422 bp, Zea mays
  Clone ID: MRT4577_86976C.1
ccggccgggtagagatattctatttgttagattaatctacaactatttatttcctaataatattatttgaggcctaattgttggagtaattttttgaggccctaaacactttaaatatggttctatttcaatttttgggctctattttagagctcattgttggagatgctctaacaaatagctagctaactattagctaatttgctaaaagtagataatagctgaactattagctagactgattggttgttttcaactaattttagaagataactattatctctagtgcatgcaaacagggcctaagccacagagatttgatgtctgaatgaactagatgtccatcacctttaggctctgttcttggtatgctgcaatgtgcctgtatgcggctccgcactaggtgtactgcatatacctgc

SEQ ID NO: 170388 - DNA, 1294 bp, Zea mays
  unsure (1)..(1294): unsure at all n locations
  Clone ID: MRT4577_86977C.1
cattatctcaagaacagtatctcaccctacttaaaggttgtctctgctatggtgggcaatgatttaatgagttttgtgagtacctggccactaagttcatggaaggaaactcttgctctgctttgcacatttgcacagaaagaggagtggcatattttgtgtgacacacttgcgtctaggcttctgaatgtcggtgatacactagctgcgaccctctgttatatttgtgctggaaatattgacaaagctgntgaaatatggtcccgcaccttgaaatctgaagatggtgacaagacttatgttgatcttctccaggatttgatggnnnnnnccattgcgcttgcccttgctacggnccagaagagattnnnnntnnnnngggctgtttgaattcggcacgaggctgaattgctggctagtcaaggtcttcttaaaactgcaatggagcatttaaaactgttgggatcagatgaacactcgcatgagctggcaattttgagagatcgaattgcatgttctatggaagagaatgataatgctaggagttatgtttctgaaagcaccgccactccttccctttatggcacaaatcaatcttatacagccccagaccattctcagaatgtttaccagcaggtacctcagccatacaatgtaccaagtaatacatattcagaagcttacccacaacaacctactggcgcctatggatacaacaacacannnnnnnnnnnnnnnnnnnnnnnnnngtttgttccacctagcgcccctgccagctctcagcaacagccaggcccttcgcctgtaccagtgcctcagcaaacagtgaaggcatttactcctgcgaacccagctggtctaaaaaatccgggacaatatcagcaacctaataccctaggttcccagctttacacgggcactgcaaatcaacagtatccttctggaccatctgcttcttatccaagcggacctccaacaacatttcatcagcctgtatcgcctgttcaatatcagcctgctgctccaccagtatcttcttttggtccgagcgcccctgtaccaggaacagtccctaaccagatgtttccccattctgctgctactaactcaacttcttggctcttgattctgccccggcgtgttggtgaaattggtctgatactttggttctcttacacattttgataatagttttggtttttgacactgtaaggtgacatgttgctgggttggttattctgaatggtaattgtaaggccacttagttcgttatagttggtggatccccgttttc

SEQ ID NO: 170389 - DNA, 1335 bp, Zea mays
  Clone ID: MRT4577_86978C.1
ggccgggccggggtttctacaatggtcaacagatagaacaggaagtttctggagatgctgtgccatcagatccatcaattgacaaaagcattcaacatgcgttggtggttggagactacaaaggggcagttaaccagtgtcttgcttctaatcgtatggctgatgctttggttatagcccatgctggtggttctgctctctgggaaagcacaagaaaccattatctcaagaacagtatctcaccctacttaaaggttgtctctgctatggtgggcaatgatttaatgagttttgtgagtacctggccactaagttcatggaaggaaactcttgctctgctttgcacatttgcacagaaagaggagtggcatattttgtgtgacacacttgcgtctaggcttctgaatgtcggtgatacactagctgcgaccctctgttatatttgtgctggaaatattgacaaagctgttgaaatatggtcccgcgccttgaaatctgaagatggtgacaagacttatgttgatcttctccaggatttgatggaaaaaaccattacgcttgcccttgctacgggccagaagagatttagcgcgtcactgtctaagcttattgagaactacgctgaattgctggctagtcaaggtcttcttaaaactgcaatggagtatttaaaactgttgggatcagatgaacactcgcatgagctggcaattttgagagatcgaattgcatgttctacagaaggtcacttcaaacagaatgacaatgttagttctgtttctgtttctgaaagcacgggcactccttccccctatgtcacaaatcaaccttataccaccccagaccattctcagaatgtttaccagcaggtacctcaaccatacaatgtgccaagcaatacatattcagaagcttacccacaacaaggtacaggagcctatggatacaacaatgcatatcaacctcagcaaccagccaatatgtttgttccacctagcacacctcccaacactcagcaacagccaggcccttcacatgtaccagtgcctcagcaaacagtaaagacatttactcctgcgaacccagctggtctaaaaaacccgggacaatatcagcaacctaataccttaggttcccagctttacacgggcgctacgaatcaaccgtattctcctggaccatctgctccttatccaagcggacctccaacaacatttcatcagcctgtagcacctgttcaatatcagagtgctgctccaccagtatcttcttttggtccaaccaccctgtaccagaacagtccctaccagatgttccccattctgctgctactaa

SEQ ID NO: 170390 - DNA, 530 bp, Zea mays
  Clone ID: MRT4577_86979C.1
gttaatatataaatctattgtaccatggacgaaataatatgcaggcttggggactaattgtattgttaatatcgaaagcagctggtcaagcaccaggtattccagaaatggaacatgatagaagcgctggcgttttacattcacaacgtgcattggccgaagtttgtgaaatgattcgtatatcacatttggtgcatcaaggtttggttaatttacagccacttacacaagctggacaagatttatcattgcacggtgacatgacatttggtaataaaattgctttattaagtggagattatttgttgggaaattcttgtgctgaattggctggtttaagaaatcaagatttggttgaattgatatcatcagctgtacgtgatttaactgaagctgaatttattggtgatcgagatgaacaaaataatccattaccttcagcaccaccaaaagttccaagacgtgttacatctgatattcatgatgattatgatatacatttggccaatgatgtacttgaaccaattgaa

SEQ ID NO: 170391 - DNA, 421 bp, Zea mays
  unsure (1)..(421): unsure at all n locations
  Clone ID: MRT4577_8697C.1
ctttcatttttgtttatttgtttaaccgaaaaccggctggggatgcacagttatttttggtcatgttctaacacggatgaaccatggaccggaacaacttattcacacacatgcgacggcctcatattaagcaggggaaaagagtaaaaaacaccnncctttctagaagataagaaactgagaatgtccgactcctacactaaacaataacggcgggctacgggagcggcggatactgcttctgcgcggtgtccgtgggcacggtcaagggtttattgaacgagaacaacgccttgcctgcgataccgtgcgaccttagcgagatgggtctgtccagagccaacgccgccgtatatgtggcgtacaggctatggacccagtgggtcccctggaacacggactgtcactagctttgggacga

SEQ ID NO: 170392 - DNA, 300 bp, Zea mays
  Clone ID: MRT4577_86980C.1
gtgtctggggtttttttttttttttttttttactttttttttttttcccagcgaaatttttgcaaaataccgattttccacctccagttaacaacaaggtccccgttgatggaaagtcccactgggccacaaatcttcaagtcacccggggggaacagtcttttctatggagggggaagacgaatctgaaataagggttttttatgaattcccccgggggtttttgttgggttaaggttaaccccttgtctttttggtggaggccgtggagaattttccctgggggggggggttgtttca

SEQ ID NO: 170393 - DNA, 361 bp, Zea mays
  Clone ID: MRT4577_86981C.1
tcggtttgctgttcttctgaaaagaatctcataggacattgtgggccatttctctcaaaactctgcaggaatcttgcattgctgcaaaagttcccagaccttcaagcttctgcaatgcttgctctttgcaggctaatgatcattgatgcagagttctgcgaagcaaatcttcaaatcctgtttactgttgctgagagtgcgccttctgaaactgtccgatccaattgcactatagcccttggtgatttagcagttcgcttcccaaatctcttagatccttggacagagtatatatatgcccggttacgtgatccttcagtgtctgtgaggaagaatgctgggctggtcctttctcatctta

SEQ ID NO: 170394 - DNA, 335 bp, Zea mays
  Clone ID: MRT4577_86982C.1
gtcgtcgtccttctccgtctcctcgtcctcctcgtcgtccgcgccgcccgtgcccaggggcgtgaccttctcgggcgcgtcgcggccgtgccgccgcgtgacgggcacgctctacggccaccgcaggggccgcgtcgtgctggcgctgcaggagacgccgcggtgcctgccgagcctcgtcgtcgagctggcgctgcagacgcacgcgctgctgcgcgagctcggcaaccccgcgggcgcgcgcatcgtcctcgagaccgagcgccgcgccggcctggagggccgcccctcagcccgccgccgccgcccggacggaagaggcggggcggtccggg

SEQ ID NO: 170395 - DNA, 159 bp, Zea mays
  Clone ID: MRT4577_86983C.1
tcttcctacagtcactaatctctaaaaatcattccaaacttttaaactattcactggggcaagctatattacctactatcaaagctttccacaccatttcatcatcaattcactcacaacatatcttacatctacaaagatctgactaccacccttctt

SEQ ID NO: 170396 - DNA, 305 bp, Zea mays
  Clone ID: MRT4577_86984C.1
ggggcccaacaaattcgatttttaaggaacggggacccttaaaacacacccccaagagcgacacgtttttccatgcaaacccaacgacatggatttcattcattacacactggggggggggggggaggttttccaacggatcccaatggaagaggggaaaaactcccaacaatagcaaaaggtacgtcaacagcaaggaggggggtgcttcaaaaaatggaagcaaccacgagtcccacccccttggtttatcaaaagggggtttttcaaaacctttctataacagacaagcgggaaaaaaataa

SEQ ID NO: 170397 - DNA, 251 bp, Zea mays
  unsure (1)..(251): unsure at all n locations
  Clone ID: MRT4577_86985C.1
gttcatgatcacttggttggatgaaatcgtaaagagaaaananacacagtgattcaagaagggagttgtattttttttgtgtcaaccaaataatgaagatgtagtgacatatttatatgatattcttcattatgaggtttgaggttcaaaaaaaaaaaaaaaaaaaaaaaaaaaaaaaaaaaaaaaaaaaaaaaaaaaaaaaaaaaaaaaaaaaaaaaaaaaaaaaaaaaaaaaaaaaaaaaaagggggcg

SEQ ID NO: 170398 - DNA, 1026 bp, Zea mays
  Clone ID: MRT4577_86986C.1
gcacgagataactggcagtagaagccgagaaggtaggcccgctcgttccaacatcacaaactccacacggctctcctgtctccgctgcccgctccacctccctccatgccgtcggcttccctccgcctcgccgtcgtcggcgcgggcgcggcgggcctggttgccgcccgcgagctacgccgcgagggccatgcgcccggtcgtcttcgagcgcgccgccgccgttgggggcacttggctctacacgcctcccgccacgtcctccgacccgctcggcgccgcggcgacgcattccagcctctacgcatcgctccgcaccaacctgccgtcgaggaagctcggggataaggggagcggcgaggaggagttctatgatgccgtcgtggtctgcaatggtcactacacggagccacgcctcgccgtcattcccggggtagatgcttggccagggaagcagatgcatagccacaattaccgtgtgccggagccattccttgatcaagtagtgatcataattggggcctcggcaagtgcagttgacatttcgagagacatcgcaagcatggcggaagaggtacatattgctgatagatcagcaccggcttccacctgtaacaagcagcctggctatgataatctgtggcttcattccatgattgaccatgcgcaggaggatggcactgtggtgttccaggatggcagctcaatcaaagctgatgttatcatgcactgcactggctacctgtatgactttccattccttggagatgacagcactatcaccgtggacgacaaccgtgtcgatccactatacaagcatatttttccacccgaagtggcacctcatttgtccttcatcggattgccttggaaagttaccccttcccactgtttgaactccaaagtaagtgggttgctagagttctatcaggacggattaacttccatccgaagacaggatgatggaagatgtgaaggctttctatttgaaactagaacacatggatggcctaagagatacacaca

SEQ ID NO: 170399 - DNA, 1577 bp, Zea mays
  Clone ID: MRT4577_86987C.1
cctcgaggccggccgggggagacctcgaggggaggcccgctcgttccaacatcacaaactccacacggctctcctgtctccgctgcccgctccacctccctccatgccgtcggcttccctccgcctcgccgtcgtcggcgcgggcgcggcgggcctggttgccgcccgcgagctacgccgcgagggccatgcgcccgtcgtcttcgagcgcgccgccgccgttgggggcacttggctctacacgcctcccgccacgtcctccgacccgctcggcgccgcggcgacgcattccagcctctacgcatcgctccgcaccaacctgccacgcgagaccatgggcttcctcgacttccccttcgccgctggcgccgcgggctcccgagacccccgccggtttcccgggcacgaggaggtgctccgctacctggaggcgttcgcgcgccggttcgacctgctccggctcgtccgcttcgagacggaggtgctcagtgtgaggagggaagacggagggaggtgggctgtgacgtcgaggaagctcggggataaggggagcggcgaggaggagttctatgatgccgtcgtggtctgcaatggtcactacacggagccacgcctcgccgtcattcccggggtagatgcttggccagggaagcagatgcatagccacaattaccgtgtgccggagccattccttgatcaagtagtgatcataattggggcctcggcaagtgcagttgacatttcgagagacatcgcaagcatggcggaagaggtacatattgctgatagatcagcaccggcttccacctgtaacaagcagcctggctatgataatctgtggcttcattccatgattgaccatgcgcaggaggatggcactgtggtgttccaggatggcagctcaatcaaagctgatgttatcatgcactgcactggctacctgtatgactttccattccttggagatgacagcactatcaccgtggacgacaaccgtgtcgatccactatacaagcatatttttccacccgaagtggcacctcatttgtccttcatcggattgccttggaaagttatccccttcccactgtttgaactccaaagtaagtgggttgctagagttctatcaggacggattaatcttccatccgaagacaggatgatggaagatgtgaaggctttctatttgaaactagaagcacatggatggcctaagagatacacacataattttgcaaattaccagtttgagtatgatgattggctcgctgagcaatgtggccatccaccagtcgaagaatggaggaagcagatgtatgctgtaacttcaatgaacaaggcagctcgtcctgagagttaccgtgatgaatgggatgacgagcatctggtggccgaagcaaatgaatacttcaagaaattcttgtaaattctttcttactattctcatcccatattctttcggcatacccgaggctgatctcaactgcaatatgcaaatatgaataaccatttaactattttatgtgatgtggattggatccacccaaaaaaaaaaaaaataaataaaaaaaagggag

SEQ ID NO: 170400 - DNA, 481 bp, Zea mays
  Clone ID: MRT4577_86988C.1
acacattactgcctgtttatacttttggtattggtttttttttttccttggaacaaaaaacggagccggaaaataaaggaagaggtgctttacacccgcgggaaactatagcgcaccccaccatgcatggagaaaatcccttacccggggaaatacacttgcccctctaaagggggccaccacttggcccatatttcggttaaaataaacgcccccccaacgggggagctaacttaggctagattatacgctctacaaaaaggggggaccaaataacaaacctaattctccgagacatgcggactctgctgggtgaaagtggaacaacaaacaaaggcctcaaaacactcggaaattgctccagtgtgagggaaaccacacaaaacatgcacggatcttgcattagtggcccagggaaccatgataccgcccaaatagtggacggtttttgcatgtcccacatgggcacccgaagaagggc

SEQ ID NO: 170401 - DNA, 530 bp, Zea mays
  Clone ID: MRT4577_86989C.1
tgattgatatcggcccgggggcaggtgtccatggcggggaaatcatttcggcaggccggcccgaggaggtcatgaatgatccagcatcgctcacaggccaatacctttcaggcaaaaaattcattccgctgccgcttgagcggcgccaggacaatggccgctttattgaagttaggggagccagggaaaacaacttgaaggacacgtcagtgaaattcccgctcggcacgtttattgccgtaacaggggtttccggttcagggaagagtacgctgattaacgagatcctccataagtcgctggcgatgaagctccaaagggccaaaagcaggccaggggagcacaaggagatcaaaggggccgagcatcttgacaaggtcatcgatatcgaccagtccccgatcggccgcacgccgaggtccaacccggctacttatacgggtgtattcgatgatattcgtgatgtctatgcttccacgaatgaagcgaaggtgcgcggctacaaaaaaggccgttttagcttcaatgtc

SEQ ID NO: 170402 - DNA, 326 bp, Zea mays
  Clone ID: MRT4577_8698C.1
atcgcatggtgctgtgtatgagttacttcacgatacctgaatcactagcaaggccagtaagacgtggacggactggcaagttgaagtagcactgagacgaagccacacgggttcagatgacactgctggcatcctggtcacattctctgtctcctggaatgctcccacctcaagtggagttagaaggaaggtagaggggctctcccccaggatttcggtgttttgactaacgccagttcctgaccaacctctgttgccaccacctttccttccaggccctaagcacgtgcagcacagcacaccacagcacctttgatagcctctct

SEQ ID NO: 170403 - DNA, 200 bp, Zea mays
  Clone ID: MRT4577_86990C.1
cattttggtcggatctggtgtgtccttggtggaggttgggtttctaccgtatcgtggtgtgtgtgtgtgtgtgtgtcggttgtgtgatctgatgatccccccttgtagatactctgctttcatctcgccgtgatcgtgagtggtgattctgtctggttgctactgatatattattatttcttcttattattattggtccc

SEQ ID NO: 170404 - DNA, 977 bp, Zea mays
  Clone ID: MRT4577_86991C.1
gcacgagctgaatgctagcagtttgtatgattatgggagtctaaactgagagatgcatcggtagaattaatgggtacaaaacttggtccaagctagctttcggggtcggcctggtcgttaaaatcaatcagctagtagcatgcatatatacgtagtcgtagcagaggttgttgtgtgaagacgaaaacatgtagagatggacagatcggcggagtacaaagcaggaagcaacagctaatacatgaatggatatcgatcgatagctagcttaattagttgacggtgatcttgccgaccattccggctccttgatgcggctcgcagtagaagccgtaggttcccggcacggtgagggtgacggagtaggtctcgcctggcgcgttgaggtactcctcctgcgagatcttggtggcgtcgacgccgctcggcacctcgtcttcgtcgaagacgacgttgtgcgggaagccggcgttgttcttgaaggtgatggtgtcgccggccttgacggtgaactggctgggctcgaagacgagcccgccgtcgcctgcgcccagcagcacctcctgggccatggcgccgccgccggcaagcaggacgctggcggcaacggccacggcggcggtggcagtggccttgcggagagaggcacgcacggtgaaggacctcctgctgaccactgcgcgagcgggcgcggccgtgaaggaaggggcggtgatggcggcagaggagagggacgccatggtcgtcagctagctagcgatcgatggatcgatctacgtacgtacgtacgtcctggagcaagctatcagagcaagagaccggcggatttttcaactccccgaagcatttcgtcgcttgctacgcccttcctcgtctctgggtgcctaggtatccaccgcaagcctttcctcttttgaacctcgccattaacgttaaggctatgccatctaaggtgctactaaatggaaggatcctcg

SEQ ID NO: 170405 - DNA, 882 bp, Zea mays
  Clone ID: MRT4577_86992C.1
tcccaaagactgtgctgcatggcatgcatttctatttcttgtgcctgcttaagtgcttattgctgggctatccgccggtctcttgctctgatagcttgctccaggacgtacgtacgtacgtagatcgatccatcgatcgctagctagctgacgaccatggcgtccctctcctctgccgccatcaccgccccttccttcacggccgcgcccgctcgcgcagtggtcagcaggaggtccttcaccgtgcgtgcctctctccgcaaggccactgccaccgccgccgtggccgttgccgccagcgtcctgcttgccggcggcggcgccatggcccaggaggtgctgctgggcgcaggcgacggcgggctcgtcttcgagcccagccagttcaccgtcaaggccggcgacaccatcaccttcaagaacaacgccggcttcccgcacaacgtcgtgttcgacgaagacgaggtgccgagcggcgtcgacgcctccaagatctcgcaggaggagtacctcaacgcgccaggcgagacctactccgtcaccctcaccgtgccgggcacctacggcttctactgcgagccgcaccaaggagcaggaatggtcggcaagatcacagtcaactaaagctagctatccattccatgcatctcgatctgtatgtactccgcccgtcgatgggatgatgcatccatctctacttgttttcctcacatgtacaacaattaatgcaacaaattaagtacgtacttgagagagagacccttcttcttcttttctttttttttaatgcagcggtattgtttgcacatgctgtcacgaaaatttatatatatataaccagatatacttttaaaaaaaaaaaaaaaaaaaaaatttgcggcc

SEQ ID NO: 170406 - DNA, 1428 bp, Zea mays
  Clone ID: MRT4577_86993C.1
tgcgtgacagccataggctgggataagaaatccgtggcgcgcgtcgctgggccacccattcgtcgtcgtctcgtcacgatctcatcctccgatcctccatgacctgtgctgcatggcatgcacttgtatttcttgtgcctgcttattgctgggctagccgccggtctcttgctctgatagcttgctccaggacgtacgtacgtacgtagatcgatccatcgatcgctagctagctgacgaccatggcgtccctctcctctgccgccatcaccgccccttccttcacggccgcgcccgctcgcgcagtggtcagcaggaggtccttcaccgtgcgtgcctctctccgcaaggccactgccaccgccgccgtggccgttgccgccagcgtcctgcttgccggcggcggcgccatggcccaggaggtgctgctgggcgcaggcgacggcgggctcgtcttcgagcccagccagttcaccgtcaaggccggcgacaccatcaccttcaagaacaacgccggcttcccgcacaacgtcgtgttcgacgaagacgaggtgccgagcggcgtcgacgcctccaagatctcgcaggaggagtacctcaacgcgccaggcgagacctactccgtcaccctcaccgtgccgggcacctacggcttctactgcgagccgcaccaaggagcaggaatggtcggcaagatcacagtcaactaaagctagctatccattccatgcatctcgatctgtatgtactccgcccgtcgatggatgatgcatccatctctacttgttttcctcacatgtacaacaattaatgcaacaaattaagtacgtacttcaaaaaaagccccttttttttcaaaaaaaaaaaaaaaaaaacaactaaagctagctatccattccatgcatctcgatctgtatgtactccgcccgtcgatggatgatgcatccatctctacttgttttcctcacatgtacaacaattaatgcaacaaattaagtacgtacttgagagagagacccttcttcttcaaaaaaaaaaaaaaaaaaaaaccaactaaagctagctatccattccatgcatctcgatctgtatgtactccgcccgtcgatggatgatgcatccatctctacttgttttcctcacatgtacaacaattaatgcaacaaattaagtacgtacttgagagagagacccttttttttcaaaaaaaaaaaaaaaaaaaacaactaaagctagctatccattccatgcatctcgatctgtatgaactccgcccgtcgatggatgatgcatccatctctacttgttttcctcacatgtacaacaattaatgcaacaaattaagtacgtacttgagagagagacccttcttcttaaaaaaaaaaaaaaaaaaaaaaaacaactaaagctagctatccattccatgca

SEQ ID NO: 170407 - DNA, 1910 bp, Zea mays
  Clone ID: MRT4577_86994C.1
gccggccggttcgagtaccctcgccacccattccatcttctgctgggtagcagctagcagtatacaagagcttgcttgctgtcctagtcctacctactgacgagctcgccatggcctccctctcctctgccgccgtcaccgccccttccttcgccgcaccagcgccagcccgcgccgtggtcagaaggaggtccttcaccgtgcgcgcctctctccgcaaggccaccggcaccgccgccgtggcaatggctgccagcgccctgcttgccggcggtgccatggcccaggaggtgctgctgggcgcaggcgacggcgggctcgtcttcgagcccagccagttcaccgtcaaggccggcgacaccatcacattcaagaacaacgccggcttcccgcacaacgtcgtcttcgacgaagacgaggtgccgagcggcgtcgacgccaccaagatctcgcaggaggagtacctcaacgcgccaggcgagacctactccgtcaccctcaccgtgccgggaacctacggcttctactgcgagccgcatcaaggagccggaatggtcggcaagatcaccgtcaactaattaagctagctatcgatcgatatccattcatgtattagctgttgcttcctgctttgtactccgccgatctgtccatctctacatgttttcgtcttcacacaacaacctctgctacgagtctacgactacgtatatatgcatgctactagctgattgattttaaataccctgggaccctcgagcggccgggctcgccgggacctggacggcccgccgggccggggcctggtgttcttctataccacgcgtccacgccactgctaagctgctccctgttcgccaggtcggcgaccaggcgaaacgtgctgctgctgccgctgcaagaagaagaataggtacacagacagcatgtccggagttcaggcgatgccgacggccgtgggcgtggcggggctgagagggtcagggttggttagcagcagcagtaccagcttgttcgccggcgactgcaagaggaaggctcgtcgcccggcgtgctcggcctgggccctcaggcagagccggatcggcagcaggagcaggagcaagaggggcctcggcatcgtctgcaacctcgcgggacagtacgaggattccttcgacgacgtccagcggcaactgatgaactacttcacgtacaaggccgtgaggaccgtgctgacccagctctacgagctgaacccgccgagctaccgctggttctacaacttcgtcgctgtcaacaagcctaccgacggcaagcatttcctccgtgctctcggcaaggagaggcaggagctcgcagagcgagtgatggtcaccaggcttcacctgtacgggaaatggataaagaaatgcgaccatgccaagacgtacgagaagatctccgacgagaacctggcgctgatgcgggagcggctgatggagacggtcatctggccgaccgacgacagcagcacggagaagatcggctgatgcctgatgcctgcggaggcgccgagtcctttcgggttgctgatcaagcttagctccttctattagcatgtagagcagcactctgggtttctctatcagtcagtcagtcagccagccagtcagtgggttgtatataatcggagttgtagtagacagtatacatttctctgggcaggcaatcactgtttgaggtgttaacagtgccgttttgccctcccaattaagcctctacagtcggtctaagtgaagcaaaaatgcttaccttgtagtagctaaatttacatgtgcggggatatacgttgtaatagaatatttctgcgccccgtacgtggctgtttgatgaaagcattctgtacggtagtcaggaacacactcccacttgaaccagtcgcgagcgtt

SEQ ID NO: 170408 - DNA, 213 bp, Zea mays
  Clone ID: MRT4577_86995C.1
gacacacatcggtgattcatcagaccaccgtgagctcaacatcatactaatcagattcagcagagcttcagggtcattatcgttggtcctgacagcaacgctagttggctactaggagtacttactcatctgaacctaccacttctacgtcctgcacccatcgtcactcttgcgaatggcaacaacctcgcttactcatacagatactacaaa

SEQ ID NO: 170409 - DNA, 1441 bp, Zea mays
  Clone ID: MRT4577_86996C.1
ggccgcgggtggccgcgggtttttttttttttttttgggaatctcgttagaatttttgatcaccatccctcttctagctggactttttttatgctccatgccagttcatacctgacccagcccaaacgcgaggcgtaacgaaccaacccttgacaccgatgcaatggaatgattggttaagatacaaaaagaaacaaactgccgctttaagcggaagaaaggtccttcttgagagtaccctggtactgcttcttctcggcaggggtctggaaagcaccgtgtccgaactcggacgaggtgtcgatccacttgaggctgaccttctcgagggcccttcgggaggtctgggggaacatggtctttcggagggtcatgacacgcttcttgacaccagggatggaacccttgagcatgacgaagtcgttcttgacctcaccgtagcggacgaaaccaccaagaggagtgatggtcttcttggtgacatcgatctcggtggcggcgttgtcgtcagcatcgcccttaccaatacggtagatcttgtggttgaccgaggttcggtgatggtaacccatctgaccggcacgggcaacagtccactggacgtgggaaggatgccaagcaccaatacaagcgacctttcggagacccttgtgggtcttgcgaggaagcttcttggtaccccaacgggcagtgacaccgttgaaaccgtgacccttggtgacggcgacgacgtcgatcatctcgtcctgctcgaagatgcaggccggcccgatgggcttctcgaagagaccgtggccgtaggagaccttgtcggcgacggagccaccgttgacctggatctccataaggtgggccttcttctgcttgaggggagtcttgtggatctgggtgtgggcgaggacacggacgacggtgcagtacttcttgatgcgctcgagctcacgggtgatggactggccggaggactcggagtgcttcttggcgtacttggtgaaggccttcttcttgctcttgtaccagttgcggtagaagcggcgcttgacctcgtcgctcaagtgctcggcccagacggtggtgagcgagcggagaccgcggggagtctcgatgtaaccaacaagaccgacggcgatcataggaggagtctcgatgacggtgacggcctcgacgatctccttcttgtgcagcttggcaccggggcggtccaagtcacgcacaatcgtggtcataccagccttgtagcccatggcggccgtcaggtggacgggcttcttggggtcgtccttagggaagctcttgacctttcccctgtgacgggcagcgcgcttgcgcggcaagaaggccagagacccgtggcggggagcttcgaacttcctgtgggacatggcgagttcgatgtgttggttagtagtagaagttcccggccggcctcgaggtacccaat

SEQ ID NO: 170410 - DNA, 509 bp, Zea mays
  Clone ID: MRT4577_86997C.1
aaaactcagaatcatcaataagttcaggaccaccttccataatgcgcccctgagttatagcaaaggcgatgaaataagctcagggggggtaaaccgcattatatcttctatttgcccaaatagtagcatcctgatcgcaatgctagtgtaacagataaatagccaaggttatgatagaaaaggggaaatcatctcaggggaaaaaatgagcttgaattaactacaggccgatacacttcagtacactgatggagaccaaatacggtttgaaatatttttaagggaaatgtagtaaatgctcgaacctcctcaggtgttccaggttctcccacatcctttccaaatactctaacagcagagttggtcaagtccatcctgttaatcatccggcttggatctctcatgtaaccagcaacttgatcactaatgttctgattaaatgcatgtagctttcctttaagtgcagcagcacccgttgccacctggattttcctgggccatttatctat

SEQ ID NO: 170411 - DNA, 320 bp, Zea mays
  unsure (1)..(320): unsure at all n locations
  Clone ID: MRT4577_86998C.1
agaccaattggtaccgggccccccctcacgcgaccgctatattcttctctagagctttttttttcaacttcttaaccatagactatcgagatttagttgcactacaaggttcataaatcaactanacaaaaaggaatgctaggtccccacctttgctttcttctataaagactccaaccctcttataaccatcgacgagctctcacaagcatgctaacagatccgtaactctgatatccatgtcaactatacgaacaaagatttttaccaccacattcactttcacattcattataatacctttccctttatgatcataa

SEQ ID NO: 170412 - DNA, 896 bp, Zea mays
  Clone ID: MRT4577_86999C.1
cccacgcgttccccctcccctaacactgtagccgatatccgtgttggaacactgtagccgctccttcaacggcgtcctcctcctcctcctctcccttcctgattctttctctctcccgctaaatcgatgggcacgctacgccgtattccttccccgcagccccgcagccgcttcttcgcccgcgcgctcggaatactccgcaccaatcctagctgcgggcaggggttccagccgcttcttcgcccacacgcccgctcgctcggaatactccgcaccaatccgtgtcggaccggtacgtgtgcgagatctgcgggcaggggttccagcgcgaccagaacctgcagatgcaccggcggcggcacaaggtgccgtggaagctgctgaagcgggaggccggggaggcggcgcggaagcgcgtgttcctgtgcccggagccgagctgcctgcaccacgacccctcgcacgcgctgggcgacctcgtcggcatcaagaagcacttccgccgcaagcacagcggccaccgccagtgggcctgcgtcttctcccgcattgtgtggggatcaattgcttggcttatctagatggttccatatttagtacaagtgatcatcttttttgcgggagccgtgatggtaccttgaaaagatgggaattaaataatggggatgcaagcttctcaggaacttttgagtctcatgttgattgggtatgcttttttctgtttttaattaagtaggcttactgtttcatcaatcagtgctttaaatagacattatgtttataaattagttatgtttatgtttaacatggtgtctgtggtcttgctcctggagccaaagctgtgcacgcttctggggtccaggttccttagcgtcaccccgcgcctgctttgacaa

SEQ ID NO: 170413 - DNA, 357 bp, Zea mays
  unsure (1)..(357): unsure at all n locations
  Clone ID: MRT4577_8699C.1
nnnntnnnnnntttttttaattttaagacaaanngccanaaaaccagaacggtttttattaaaaacaacaccaccccccacccaanggactttaaaataaaaaacacatttactttctaataaaatattgctcaaaaaaattaataaaaaaacattctttccattaaccaaaactccaaaaccatcttcatttaatacacatttgcttaacaactcgtaattaacaaatattcttaaaaatataaactatacctcttcaaaaattacataaaacctatcttaaggataaacccaaaaacttattagtaaaataaactcttcgaattttacattaacatcactaactctataaaattt

SEQ ID NO: 170414 - DNA, 288 bp, Zea mays
  Clone ID: MRT4577_869C.1
ctctggggttcttggggttttttttttgggccaaaaaacacatcatggcacatttcaagcactaaacaaatgcccctcaaacgggtcattattggcactggggctatttccaacgaatagggtcgagtacacaaactatgtacagttcttgcagaaagagaacaatcttaactcttgtttttaaaagattgggtgtcccacgatccaaagggggggccaaaacttgtcttgccaataaaccacccgagaacccacttcagattgcacagcatgttctttaaagccctg

SEQ ID NO: 170415 - DNA, 303 bp, Zea mays
  Clone ID: MRT4577_86C.1
aaggacgcgggagaccggacggactcccgacacaacggtaagctgaagaggcgaacaagcggcggacagaaacaacgaggatggcaggagacaccgggaacgaagagagagcagcccagcccgtcatcgtggcggccccagcgcccgaaggggaggcgggagaggcgtcaacagagacggaccgggccggagtactccggagagggacgcctgcgggggtgagagccaccgccggccctgaccctgtcgaccaccaggcgcggccaacgagtgggcttgttcgggaatgctggccaacccggg

SEQ ID NO: 170416 - DNA, 453 bp, Zea mays
  Clone ID: MRT4577_87000C.1
taggggccttttttttttttttttttaccactgaaatgcctaattattaaaaaaaatcagcagtgaagccaacaaagtttgtgaatccgagttctttgcatcctaaaaaaaacagaaagaaaagcacccaacagaatcaaaccgctgaggacaagggatacagtgcctttgttccaatgtagagttgatcagttgaggcagaatcatcatgcctctgttcttgctccataagcttccagtacttgaggaatctcttcctggtgcttatcaacgtacctttccttgaacttcttttccggcattgtcagatggctcatcctgatgccttttttgatgacaccacgggacgccagtatatgaagcaccctgtacctcggcagtacccgcttctcgtggctgaaggaaagaatagtcgggtacgacgacagaacatcagggttccagccaagcttt

SEQ ID NO: 170417 - DNA, 127 bp, Zea mays
  Clone ID: MRT4577_87001C.1
gacctaggcgtacgcgtccgcaacgaagcccgaatccgacttatctagaatgatatcaggcttgccaatccttatggatagaactggattgatccgcatgggaccatgatcttcatagacgccactg

SEQ ID NO: 170418 - DNA, 254 bp, Zea mays
  Clone ID: MRT4577_87002C.1
aaaaaaaaaaaaaaaaaaaaaaaaaaaaaaaaaaaataaaaaaaaaaaaaaaaaaccaaaacaaaaaaaaaaaaaaaagggggccctttaaggacccaattccgccccttccatccccggctggttccttgggcccccaataatccctggccggcttcccatccgcgctggaaaaccccgaggcccaacctatcgccttccaaaatccccctttcccatgggttaacccaaggtccccccctatccccttccaa

SEQ ID NO: 170419 - DNA, 283 bp, Zea mays
  Clone ID: MRT4577_87003C.1
ggcgcgagggtggcggtggtgctggagtcggagagcgggaggttctcctccttcggcaccccggaggccagccccatagtggacgctttacttctcgggagcgcgccgacggaccttgacaccagcgaacagacaaggcttccatcaccaacctgcagaacgaggtgttccagctggagaaagacaaggccatggaggacaagcggaggaaggagagcctggcgcggtccagcaggaaggtccagcaggcctcgaaggtggccaggtatgtttacggcagcgt

SEQ ID NO: 170420 - DNA, 168 bp, Zea mays
  Clone ID: MRT4577_87004C.1
agtcctccatagtagaaacaggcaggaccggactaggagtttggttctcccttaagctaactgcactttgatgttcagaaacctcactctgttcttagacctgtcctctaaagttgattttcctcccagggaatacacaagtcaggggtgggaccttagaccatgcta

SEQ ID NO: 170421 - DNA, 234 bp, Zea mays
  Clone ID: MRT4577_87005C.1
gtaaacacccgcgcaccgaagaccccaggggtggggaaaggaacgacaccgccccgaccaaacacggaggcagacaccatcgccgagagagcaaacagaaggcgcgcagggaagctgggcgcgcacacaaaacgagactgggaacagcgaacacacacgacagggcccgccggcagcaccacggcaggagcagcgaaaacggcgggggagggcgcaccacaccgggggaacgga

SEQ ID NO: 170422 - DNA, 240 bp, Zea mays
  Clone ID: MRT4577_87006C.1
tactgctgcgaggacaactgacgggggcgttttttctggttgatgccacgagtgaagagagctgtttatgagaccaatccgtcgccggcgactgaggcgccgtgttcgacggcgagtcagcgggaccagtggatggtacagacgcaggtgtttcagatttaccaactcttcgcctccattccgcgtaacgctcaaaagctgatgttggtgcttcttcgcgattatttcgtctacaaagat

SEQ ID NO: 170423 - DNA, 804 bp, Zea mays
  Clone ID: MRT4577_87007C.1
cattgggtacctcgaggccggccgggaacatccaccactgtcaaaaccgcatcaccatgtcacagcttgccatttcacgcgtagccctacggtacagcttacatggcacctctcgcacatcactgaggctcattgaggcgccaggccgcattctgcctgctctccgcttcacaacaccacaatgctcttcgcacaccgcccgcgggttctcctcaaacccgcagctgcagaaaaaggcgggtaaagcgaatagatcacacgcccgaaccgactcgaacccaccagtgaacaaaggtgttgcaccaacccccaccgatgaagcctacgacgtctctgggctggagttgcagatactcaaagcaattgagaagctcacgcatgagctgagtcagctacgcagcggagggaagctcaacccggatatcgtagagagcttgaaggtgcaattgggcacggctggacatggcaaagagactgtaaggttgggagatattgcccaagttgttccaagaggaagagtactgaatgtcatctgcggagaggaagggcacatcaagcctataacaaccgccattgccgcttcaccacactctctcacacctctcgcccccgaaccctccaatcctctaaccatccaggtccctctgccgcccccgactggagaatcacgtcgtgcagcggtcgagtcggctgtcaaggctgccgagcgtgctgacaagctcatacaacagggcccggcaggaacacaacaagaagctccgaaagtacgacatcaaccgcgaagtgctcccgggtgatatccaa

SEQ ID NO: 170424 - DNA, 248 bp, Zea mays
  Clone ID: MRT4577_87008C.1
tggccggcctttttttttttttttttgtatggagaacaacaactaaggactgggggaggggaaggggacaactattcaagccatgactgacagccagaataacatggaaaaaccctaccttgcgtcggcagcacccgaaaccgatcatgaacacggaataaaccatcagaacattccacaagatccagatccaacaaaaggacaccaccagagacgcttataaggtcgacaaataaaatgttccaaaa

SEQ ID NO: 170425 - DNA, 877 bp, Zea mays
  Clone ID: MRT4577_87009C.1
cattgggtacctcgaggccggccggaccaactgcatatccattgcatctcattttgacgatcagccaaagttcttgccaagatgaaaacatccgtcgttatactcgccgccgcttctttggccagcgctcactacacgctcccaagtctcaacggcgacgcagcctggtctcatgtccgccaagccaagaactggcaagacaatggattcgttggtgatgtgaccagcaatgacattcgttgcaatcagctcaaggccggcacgtcgactctcagtgttgctgcgggttcaagtgtcaaggtcagcgtcaatcccaacgcgtaccaccctggacccttccagtcatacctcgccaaggtaccggaaggacaagacatcaacacctgggaccctactggcgctgtttggttccgcatctatgccgaacaacccaagttcggctctcagttgacatggttgagtgctgccacctacgacatcaagatcccccaatgcattgcacccggaaagtacctgatgcgcaacgagcacatcgccattcacaccgctcagagcaagggtggagcgcaattctacctttcttgcggacaacttgaggttactggtggtggtagcaaggcaccctcgaacctcgtcgcctttcctggcgcgtacaaggctaccgatccaggtatcttgattaacatcaactacccaattcccactagctacaccaaccctggtccccctacgttcacttgctaggtcccttctatgggggatgagattggcaactgaggtgtatcaagtgtgatagtggagatagaaagtatggaccgtacccaggatgtaaataaacttcccatacatattttggccattctgaaagtatcgagag

SEQ ID NO: 170426 - DNA, 659 bp, Zea mays
  Clone ID: MRT4577_8700C.1
tgttctgccgctcagatcgcagaggagcgctacacatcggagtttttgccgcctccctcctctccaccgttctggtcgctcgccggtagctgctccccgctaactactcttccccgccccgccgccatcggtcctcgcatcgcccctctccactgcctgtcctgctgccccacgccgcggacagatcacctcgcccccctccgcttgcagccgcgccggcacgaaggacggaaggacgggacatccgtggggaactcaaaaaagatcccgatacctggtcgccacaatggactacggcggcggcggcggtagcggcatctggatccgtgcggcagtggcggtggcggcgggagccgccatcgcggcgcgcgctgtccggcgcaagtctgtcgactccagcgccgtgttcgtcggagtccccgccatggtggctcataccgtcgccgggtacaggttcgcggggctgctactggtgttcttcttcacgtcgtcgcgggtgacgagggtcggcgaggcgaggaagcgtgctctcgatcccgagttcaaggagggcgggcagcgtaactggaagcaagttttgtcaaatagcggtattgcaagtatcttggttgttttgatagcatcagttaccggagggacagataggtgtttggattcaa

SEQ ID NO: 170427 - DNA, 270 bp, Zea mays
  Clone ID: MRT4577_87010C.1
atatagaagcaatatccgttgtgcctcagactacaggtggccgggtctactactactatccattttctgctctttcagatccagccaagctcttcaatgatctcagatggaatatcagtagaccccaggcctttgccgctgttatgcgtgtcaggtgcagtcctgaccttggcgaccctgactgcaccttacacgcataacagccccacaacccgagtctactttatgcgtgtaaggtgcagtcagggtctccaagttcaggactatttt

SEQ ID NO: 170428 - DNA, 203 bp, Zea mays
  Clone ID: MRT4577_87011C.1
gcccgacgggccaaaaaacgatgtgccgtgccatagccggtgactaattatcatacaatgagaactagtatcgctcgttgtataagagtaataaatgtgtcacgcataaccatagggtggcggtcgctagcgggagcaacgacctgaatgaacaattgaaatgaactcacggacgaaactaaaagaaaccaaaataagcttgc

SEQ ID NO: 170429 - DNA, 340 bp, Zea mays
  Clone ID: MRT4577_87012C.1
aaaaaaaaaaaaaaaaaaaaatcaaaaaattcaaaaaaaaaaaaaaacaaaaaaaaaaggaaggaaaaaaagagggaaaaggaaaaaacaataaaaacaaaaaaaaacaacggcggccgttttaaaaaatcaaaacttacgtccccttccttgcaacttcataccttttttacggggtcaccaaaatccattcctttgcccccgtttttccaaatttataatcttggaaacccttttctttaccctattaattggaattcctcccctttccccttttttaagttgttgtaaaacttaatagtccctccccgatcccccttaccaaaatttcccctccctt

SEQ ID NO: 170430 - DNA, 214 bp, Zea mays
  Clone ID: MRT4577_87013C.1
tggcacccaatctaagctaagcactcaactcgactctactactaccacgatactccactgtcgggtacccagacacaccatctgtatccaccatgacatatacgccagcgtcaagtactactagtcgtatgaggagtgttcgaaccaagggcaaggctgctgctgcacttcggttggttcgacatgctccacggacttgagaaattcggggcgg

SEQ ID NO: 170431 - DNA, 367 bp, Zea mays
  Clone ID: MRT4577_87014C.1
ctttgggctgatttatgtgcttggtagattatttcggatattagtaagacttaccctaataaggacgccgggtaagtgacttcggagagtcatctgagggcgccggagagtccggtccctaataccgccctgcgggctgatgacgcttcccctgctgataggctgaccaggaaatcgagcgacaattctaagcttcgagcctcccacttcgtatcgaagtcctttagtaaaaaggccccagacgctcggcggcgaagtcgtataagaaaggcgtgcgatcgcagcactggcatcagggcgaccccgtcgattcagagagacgtaagttctcaatcccgtaagaacgtataacgtaaagcagtgcgct

SEQ ID NO: 170432 - DNA, 942 bp, Zea mays
  Clone ID: MRT4577_87015C.1
aattcggcacgagggattccgagcccaaacccctctccgagctcgaccaaaaaaccaccctctctgattcattccacccacgtccacgtacgtacgtacattcccaccacctctcccagtgcagcgccagtctgtaacccataaccataaccataaccatggtggtcctcaccaagggcgagctggagcagattccgctgccggcagtgcagcgcgccgcgccgccgccggccgccgtgccggaggtcgacctggcagccggggacgccgccgccgcgcgcgcggtggccagggcgtgcgaggaccacggcttcttcaaggtgacgggccacggcgtgccgccgcacctcctggcgcgcctcgaggccgccgcggccgcgttcttcgcgctcccgcagcgggagaaggacagggccgccggctgcccgttcggatacgccagcaagcggattggcgccaacggcgatctcggctgggtcgagtacctcctgcttgccgtcaccgccgccggcgcagcggctgcgccggggtctgcgtgcgagggcgcggagccgacctgtttccggtgagtccgtcacccggcccgttactttacttggtagtagaatcaaattctgcgctggccactatttcttttactgggtattacttacccaaacccgtacccgcgaagaaaaaatacgcccgctaaaaaacccatacccgtgacgggtataaaattttgcccaaacccatacccatgcgggtttcgggtacccaacgggtttcccatacccactaacatcaacataaaaaataattcatcatgtaaatgacaatcaatacattaataagctagcataaaagaaacaggtgataactaattttagcctaaaattttttacatgaagttatttcaattagacatattcattaatatattatggacatatttataagaat

SEQ ID NO: 170433 - DNA, 2509 bp, Zea mays
  unsure (1)..(2509): unsure at all n locations
  Clone ID: MRT4577_87016C.1
cattgggtacctcgaggccggccgggctgcctcttcttaatcttaaagtcagtcagtccccgggccttgctctccctccacttcgccgcgacgatctcctcccacccgtagaccaacaacaacggtactaaccagtaccagccccgcatgcctctcgcggcggctgccgcggccgttgccgcatgtccttcgccgatcggcctcacccgctctttgtgccgtatcgaggcgcatccgcggcgccggcggaggttccggttggaggcaaattcgtcggcgtctacgtccgctcccgcgccgaccgcggcggatgagggaggcggagcggggttgtgccccgtggtcaggttcgacatggccgacttcaccgtcgccgaccgcgtcagcgtcgggctccatggacggtcggatgagatgatcttcgaggccacggtgtgcgatccgagcagcgagctgtatgggtcaacggtggtcctgcggcagctgaagagtttgcaggcgaagcgcagggggcgtcgcgctctcgaggtgctgaagaagctggctcgtcgccaaatgatgtaccactcctacgcacttcaggtccatggttacattgctccgtgcaatgccgtggaggaggaagatgtcccgttagtattggttcatgggtatcatgggagtcattccctgcgtcactggttgcaactctcagattggatcccaaccttagaggcaacattagcgttggacgaagaacaagtgaggagggtaggagatgactctgttggaggaccagctgtaactcgacagctgcgtcttatcaggatattgatgagagaccttttgattggtgtaaattatctacatagccatgggctggcacacaccgagcttaggatagagaatgttcacgtgagcccaatagacaagcatgttaaagtcggtattcttggaaatgctgctgattttcaagacaatgatcttagcagcagtacaattgcaagtaacaatgacaggcggaaaatgatgatagcctttgacatgagatgtgttggcttcatcatggcaaagatggttttgagagagctaatggatccttcgactttctttaaattcaaatcattcctgacaaagggaaatgacccatcctgtttgcgtgagttcctactaccaaccctctaccaaaattctccatctgggaatattggtttgcagatgctagataggcagtggggtgctggttggaatcttttagccttattgctggcaacaaaaccagaggaaaggataagttgtgttgatgcattgcgacacccgttcctttgtgggccaaaatggcgtataaatccgtcagcaaatctcattcggtggggcttgggatcaactgctgtccgcatggctgaagattatatatatgggcgtcatcagcgtagacgtttatcatattttgttgaattgatggaggttctaaaccctagtttaagaacacagaattggcttcacctcctacctggtcgttggcgcctcttgtactgcactggacgacacattggcctaacacttcgtcagccttcccctagagttctcatcagtgctgtgtaccttacagttagttcagagtcagtcgatcaagtcttctctctgacctcagatgttggtttcagaattatgccagaacccaattggcctcacgacaaatctggcagtgagggagttttgtctgtcaccgcatcagcaaggatagctgctggtaggatttatattaacgaacatgacagtaaagaggatatggtcacatcttctatgagatatcttcatggtaataaatggagaaaattctcgcaaataaaggagctgccatctagtctccctgcagtaaacattgctatggatgaaatccacgtatcgataagctgcacctcgactatgacagttaattctgcacaaaaggcgctgaaagagatccgtacacaaaccccgccggaaatgttcgatttgtcaaagattgtttgtgggacatacattgatgcgaggttgatgattcttcgtggtgttaacgggtcggctctgctcttcactagagcaaatccaatgattgacgcctgaggagactccgtccgccgccatgtaacgtgtattctttctttccctgtacattattatgtatttctagccgtacaatcaatttgtaacgagtgtagataacaaggtgtgtaggccatagttagaacgttgaaaattccttctcaagatgatctgttgcttccaagtacggagccttgacagggcttgagctgataaattattactctttccgtttcaaaatgaataaaattcacagttattgaggtcaactacaaaaaaaaaaaaaaaaaaaaaaaaaaaaagtactctgcgttgttaccactgctgggggcattcctatatctgtggcgggttgtatagtattcacagtctttgaccgctttgtgcngtttcggggctattggtttgttttggaaagtactttgcgtcgttaccactgctc

SEQ ID NO: 170434 - DNA, 1078 bp, Zea mays
  Clone ID: MRT4577_87017C.1
agtgagggagttttgtctgtcaccgcatcagcaaggatagctgctggtaggatttatattaacgaaccatgccagtaaagaggatatggtcacatcttctatgagatatcttcatggtaataaatggagaaaattctcgcaaataaaggagctgccatctagtctccctgcagtaaacattgctatggatgaaatccacgtatcgataagctgcacctcgactatgacagttaattctgcacaaaaggcgctgaaagagatccgtacacaaaccccgccggaaatgttcgatttgtcaaagattgtttgtgggacatacattgatgcgaggttgatgattcttcgtggtgttaacgggtcggctctgctcttcactagagcaaatccaatgattgacacctgaggagactccgtccgccgttatataaggccttgttcggttaatcccgttacctatggattggatgggattggaaaaaaatatgaagaagtttgacttacttgtgatttaaacccatccaatctcactcaatccacatggattgagagctaaccgaacaagccctaacgctgtattctttctttccctgtacattattatgtatttctagccgtacaatcaatttgtaacgagtgtagataacaaggtgtgtaggccatagttagaacgttgaaaattccttctcaagatgatctgttgcttccaagtacggagccttgacagggcttgagctgataaattattactctttccgtttcaaaatgaataaaattcacaggttgtaacgcgacagctgcgtcttatcaggatattgatgagagaccttttgattggtgtaaattatctacatagccatgggctggcacacaccgagcttaggatagagaatgttcacgtgagcccaatagacaagcatgttaaagtaagcagcctttttttttgtttgtgtaaaattgttgttttctatccttacaatcatgcgttggtagtttaccatgtacattaaataacattcttgtgcattgtagccacacaactgaaaattacactgcttattccacatgatttttgcattaa

SEQ ID NO: 170435 - DNA, 828 bp, Zea mays
  unsure (1)..(828): unsure at all n locations
  Clone ID: MRT4577_87018C.1
ccgtccgggaccatcgatcgagcttccaactcattcatcgttcgttggcttggtcgtagcttctttacacatatattgaccacactctcgttactagcattttcacattgcattccaacagccatgttgttcaaatctctagcggtttggctctcactgggctcgctcgcactaagcagtcctctgagggccgagccgttggatgcctctgacgactttccatcatttgaagagattgtcaagaggcaagatggtgcttgcaccaacacaccaaggacgaggagctgctggagtaatggctacagtatcgccactgactttgacgccaagtcacctccggatggaaccactgtcacttacaactttgaaatttccaatgtcaccaagccgaaccctgatggaagcggtggtaataggccgatgatgctcatcaatggccaatacccaggcccagttgtgcgagccaaatggggtgacaccatcattgttaacgtcaagaacaatcttgcgcacaacggaactggcatccactggcacggtatcagaatgctcaactcctgccaggantgacggagtccccggtattcaccgagtgtccaattgctcctggaaaggactcgtcagtacaagttcagggctacccagttcggcacaacttggtaccactctcactggtctgctcagtacggtgatgggntggttgttggcacccatgatcattggatggtccagccactgccactaacgattgtcgatcctcggtactctgcccttgactggattggtactacacccccggcctttaccctaaacgaggtggcgcaacac

SEQ ID NO: 170436 - DNA, 462 bp, Zea mays
  Clone ID: MRT4577_87019C.1
gttttgggttttttttttttttttttttttttttttttttttttttttttttttttttttttttttttttttttgggaaccaaaacctatttatttttgaggaaggtcaccccaggccctattttttgggacccccccccaaaaacaaccgtggggggggggggccttaacaccccaccaaaccaaaccttgaaccctaaccaacttaaaccccccccccgatcttgggacccgcccccctcccaccaaacggggcatccccatccatgccagcaggagcgcccatgcccccccccttgccctgggacattttcgggaagggggggggggagatccccccaagccccttcattttggttttgaacccccccacccaaaccaggtgggtggtgtcccccccccttatggccccgccaaccggatctttaatctttttcttggcctcaggggggggcctggggg

SEQ ID NO: 170437 - DNA, 701 bp, Zea mays
  Clone ID: MRT4577_8701C.1
ggagtccccgccatggtggctcataccgtcgccgggtacaggttcgcggggctgctactggtgttcttcttcacgtcgtcgcgggtgacgagggtcggcgaggcgaggaagcgtgctctcgatcccgagttcaaggagggcgggcagcgtaactggtgcaacccactcttattggcaggaagcaagttttgtcaaatagcggtattgcaagtatcttggttgatagcatcagttaccggagggacagataggtgtttggattcaaaagagtcgactcttactgctcttattgatggtgttatcggacattatgcttgctacaatggagatacatggtcatctgagctcgacattctttgtaaagctgagccacaaattatcacaacattcaagagtgcggaaggctaccattggtggtgtaaccatagatgggcttcttgcagcagcagctggattcttgattgggcttgcatttgtgctgataggatttttcaccactcaatgtgatcctgatgtattctggaaccagctgctagctatacccttggcacagctgccggcctatgtagaaagttgatcgattccttcttgagcgcaaccagttaatatagtgggttctacagtgttcgcaaaaagggtaagccaacaaatttcaatatttaaaataactcgatgtgtccagggtttgcaagacaagatta

SEQ ID NO: 170438 - DNA, 357 bp, Zea mays
  Clone ID: MRT4577_87020C.1
acatcttcaaggtgctcaagcaggtgcacccggtcattggcatctcgtccaaggggatgttcatcatgaactccttcatcaacgacatctacgataagctcgccgtctaggccgccaagctcgcccgctacaacatgaagcccaccatcacctcccggtagattccagacctcggtgcgcctcgtcctccccggtgagctcgccaagcacgccgtatcctaagggaccaaggcggttaccaagattacatcctcttagggtgccgtctcacgttgttactttcctgtctaattcttatatataggctcttacttgggtgtcttcttcaactaatgtataaatttgattataattgct

SEQ ID NO: 170439 - DNA, 387 bp, Zea mays
  Clone ID: MRT4577_87021C.1
caaaaaactccatacagagacaaataatattatccttttaataaaatgtactagttatttacagcggattcatgaaacgggaacagtccttatacaaacatatagataatgtatgaaatcttgctctgggggagtcacattttactggggaggaccagatcgacgtccttatgcagtgctcaatttggagaaggtgcgcttaaaggactagacactcagcgagctgttcttgctcacctaccaagttccaactctgacgttgtagacatgagaacccggcggacagcacctggcgtgatccttgcagcaggtggcgcccttgacagggcagctcccccaaaccaagctgacgttgctgatgccaaacctcgcaaagcaggtacctgc

SEQ ID NO: 170440 - DNA, 307 bp, Zea mays
  unsure (1)..(307): unsure at all n locations
  Clone ID: MRT4577_87022C.1
accacgcggccgcggacgcgagggngggaatttgaacaggaataggaatggcatctactgggggggcaacaacggagggcaaggggattgcaagccctttacttgccgcagtgcatatatagggggtcatccaagagatgagagcaactactggaaacacactcaacccacaaagaacagcaaagaacgaggctaaaataaacaagagaggaaaggaatctagccccgccgagctaaggcacaaggaagacctgcttgttcccagccgaggtaaaaaagaagccggcagtgggaaaaatggacagac

SEQ ID NO: 170441 - DNA, 308 bp, Zea mays
  Clone ID: MRT4577_87023C.1
cggaccgtggcggaaatagtgaggagcggagaacaccggaatgatccatcctcttgtgctttccctgcccttccccgctataatatcgcgccctcgtcagcatcgtcaccacaccagcactccctcactgccctctcactcccgatccctgcaccactaccgcctcctccgcttcagccctctcgtcgcctcttgcggcgaccggcggcggatcgtccgcggcgcaacgcaaccatggggctcttcaccgtgacgaagaaggccaccacccccttcgaaggccagaagcccggtagctccggcctccg

SEQ ID NO: 170442 - DNA, 1486 bp, Zea mays
  Clone ID: MRT4577_87024C.1
caccagaggaagaggaagaggaggatgtcggggtcgaaggtgtacaccagaaccacggcggccccgacggcggcatggataaccgcagcaagcagcaacagcctgccagcccgcagtcctcgcctccgcctcctccaccctgaccgtcaacagaggaagacgaggatgtcggcgatccaaggtgtacaccctcgaggaggtggctaagcacaacaccaaggacgactgctggctcgtcatcggcggcaaggtgtacaatgtgaccaagtttctggaggatcacccttggaggcgatgatgttctgctgtcttccactgccaaggatgctaaccgatgatttcgaagatgtggggcacagcagccactgcccgtgcactgcatggacgagagacttagcgatggcgcaggatcatcgatgggcaaggccatcgccgccgacgtccgccgcgaggtcgccgccgatgtggccgcgctctcgtcggcccacggactcgtgccggggctggccgtggtcatcgtggggagcaggaaggactcgcagacgtacgtgaacatgaagcgcaaggcgtgcgccgaggtcggcatctgctccatcgacgtcgacctcccggaggacatctccgagaccgcgctcgtcgccgaggttcatcgcctcaacgctgaccccgccgtgcacgggatccttgtccagcttccacttcctaagcatatcaacgaagagaagatactgagcgagatttccatcgagaaagatgtggatggcttccatcctctcaacattggcaagcttgcaatgaaaggcagagagccactgttcgtaccatgtacgccaaaggggtgcatggagctcttgtcaaggagcggagtcactgttaaaggtaagcgggcagttgtggttggtcgcagcaacatcgtcgggctacctgtatccctgctccttctgaaggcagatgcgaccgtatctgttgtgcactcgcggacccctgatcctgaaagcattgtacgcgaagccgacatagtcatcgcggcagctgggcaggctatgatgatcaaaggtgactggatcaagccaggtgctgcggtcatcgatgtcgggacgaactccgtcgacgaccctacccggaagtccgggtaccggctcgtcggcgatgtggatttcgcagcggcgagcaaggttgctgggtacctgactccggttcccggaggcgttggcccaatgacggtggcaatgctgctgaagaacacggtggatggggcaaagcgggggatagtcgagtagctacgttcatctcacttctcgttgctgtacgactgtgttgcaaggatgtgagctgactcgaaaagcgtgtgttggttggtgtaacaatctgtttcccaagaataagaatgatagtcacagctgctttcctgtttaataaatgcagtgaagaaagaattttggctttgctgctgcaataaaaaaaaaaaaaaagcatatgattttaa

SEQ ID NO: 170443 - DNA, 392 bp, Zea mays
  Clone ID: MRT4577_87025C.1
gaaatgtcatattagtgcatttttgattggatggttcaatagtcattacacgagttgtaaaacaaaaggacatgatactgcataacgacgagtccatattttccttctacagaatggatagaaccacatgaacatgacttaaacctttatttgcctggacagttgcgcgaatcatgaagaaccaactgtttgcagatcttgcataagcgtggcactcttccttgcttctttttgctaccaccaccttctttacttttcttaatccttttgcttctcccttttgaacagatatctgttggtggataaactgttacttcatttggaatatggcagccgatgaatgcctcatattcaccctccctagaatgtgtagctgctggcaatatctggtg

SEQ ID NO: 170444 - DNA, 172 bp, Zea mays
  Clone ID: MRT4577_87026C.1
ccagcgcgagcctcctatagagttttgagcccctgccgtgagaacggggagggcacagtttgcttgatatattttccatggcatagctgttgggcaaggtggcgatcgtcacgggcgccgactgcaaactgtgcgaggccatcaccaggaagttcggcgacaacggctccaa

SEQ ID NO: 170445 - DNA, 671 bp, Zea mays
  Clone ID: MRT4577_87027C.1
tatagggcgattgggatcatcaaggccggccaggagcagccacaccccgtccgtcaccagaggaagaggaagaggaggatgtcggggtcgaaggtgtacacccttgaggaggtggccaagcacaacaccaaggatgactgctggctcgtcatcggcggcaaggtgtacaatgtgaccaagtttctggaggaccaccctggaggtgatgatgtcctgctgtcttccactgccaaggatgctaccgatgatttcgaagatgtggggcacagcaccaccgcccgtgcaatgatggacgagtacctcgtcggtgagattgatgcggccacgatacccagtaaggtgaagtacacgccccccaagcagccgcactacaaccaggataagaccccggagttcgtcatcaagatcctccagtttttggtccccctggcaatactgggcctggctgttgctgtaaggatctacaccaagtcgggatctgcctagtcatctgaaccaagttagcgagggttgcatcttgtaccagagtcgcatgtcagaaacttgagtctttgctgtcatacggttatatttatatgagacttctatcggtaaaatgaaatggatgtcagaaacttcattgttgttaaaaaaaaaaaaaaaaaagaaaaaaaaaaaaaaaacccgcggcc

SEQ ID NO: 170446 - DNA, 1491 bp, Zea mays
  Clone ID: MRT4577_87028C.1
aagagaagaggagatgtcggggtcgaaggtgtacacccttgaggaggtggccaagcacaacaccaaggatgactgctggctcgtcatcggcggcaaggtgtacaatgtgaccaagtttctggaggaccaccctggaggtgatgatgtcctgctgtcttccactgccaaggatgctaccgatgatttcgaagatgtggggcacagcaccaccgcccgtgcaatgatggacgagtacctcgtcggtgagattgatgcggccacgatacccagtaaggtgaagtacacgccccccaggcccagtattgccagggggaccaaaaactggaggatcttgatgacgaactccggggtcttatcctggttgtagtgcggctgcttggggggcgtgtagatggcgcagatcatcgatggcaaggccatcgccgccgacgtccgccgcgaggtcgccgccgatgtggccgcgctctcgtcggcccacggactcgtgccggggctggccgtggtcatcgtggggagcaggaaggactcgcagacgtacgtgaacatgaagcgcaaggcgtgcgccgaggtcggcatctgctccatcgacgtcgacctcccggaggacatctccgagaccgcgctcgtcgccgaggttcatcgcctcaacgctgaccccgccgtgcacgggatccttgtccagcttccacttcctaagcatatcaacgaagagaagatactgagcgagatttccatcgagaaagatgtggatggcttccatcctctcaacattggcaagcttgcaatgaaaggcagagagccactgttcgtaccatgtacgccaaaggggtgcatggagctcttgtcaaggagcggagtcactgttaaaggtaagcgggcagttgtggttggtcgcagcaacatcgtcgggctacctgtatccctgctccttctgaaggcagatgcgaccgtatctgttgtgcactcgcggacccctgatcctgaaagcattgtacgcgaagctgacatagtcatcgcggcagctgggcaggctatgatgatcaaaggtgactggatcaagccaggtgctgcggtcatcgatgtcgggacgaactccatcgacgaccctacccggaagtccgggtaccggctcgtcggcgatgtggatttcgcagcggcgagccaaggttgctgggtacctgactccggttcccggaggcgttggcccaatgacggtggcaatgctgctgaagaacacggtggatggggcaaagcgggggatagtcgagtagctacgttcatctcacttctcgttgctgtacggcctgtgttgcaaggatgtgagctgactcgaaaagcgtgtgttggttggtgtaacaatctgtttcccaagaataagaatgatagtcacagctgttttcctgtttaataaatgcaatgaagaaagaattttggctttaaaaaagcaaaaaaaaaaaaaaaaaagcggccaaggaccagttagtacgcggc

SEQ ID NO: 170447 - DNA, 206 bp, Zea mays
  Clone ID: MRT4577_87029C.1
cctacacgacggggaagggcttcatccagccgcgtgcgagcctgaccgccagttagagatgagccgcaggctcagtattccggtgaagcttgtgcatgaggcggcgggccacattgtcacgggcgatctcaagaccggcgaggtctaccgcggcttcattgtcgagtgcgaggaccactggaactggcagcttggaaacattaact

SEQ ID NO: 170448 - DNA, 874 bp, Zea mays
  Clone ID: MRT4577_8702C.1
gccggccggttcgggaaccaaacgcaaccgcagctacagcacagcacagcacagcacaacacgtcggcatgtatccgcccaaggccagcggcgatccggccgccggggcggcgccggtgactggcttccccgtcggcgggcctgccgcctcctcccagtggtcctccggcctgttggactgcttcgacgactgcggcctctgctgcctgacgtgctggtgcccgtgcatcacgttcgggcgcgtggcggagatcgtggaccgcggcgcgacgtcgtgcggcacggcgggggcgctgtacgcggtgctggcctacttcacgggctgccagtggatctactcgtgcacgtaccgcgccaagatgcgcgcccagctcggcctccccgagaccccctgctgcgactgcctcgtccacttctgctgcgagccgtgcgcgctctgccagcagtacaaggagctcaaggcccgcggcttcgaccccgtcctcggctgggaccgcaacgccgccgccgccactatgctgcctccgtccgcacaggggatgggccgctgaccgctgaccggccagcgcctctgcgtaaataaataattaatccttataggtttactagtatagtgcccgtgcgttgcgacggcacacaaatatagtgtccgaacttggcaaagacgatgcccatgtccatgcgtcctaccagatactggagatattgtgtttcagattcactgctagaagcaatcaacatatgcaagtcttaatagctttatgtgttgtgacaaaccacctctcattggacgacaaacatataccaaagttacaaggctagagattttgatgtttgcggtttcgcaaaaaaaaaaaaaaaaaaatttgcggcc

SEQ ID NO: 170449 - DNA, 828 bp, Zea mays
  Clone ID: MRT4577_87030C.1
gttatacagccattccaaactgagtatcatagtagcaaataacttttccacgggccatcacgcgtgctggtggccgcactcccccgcgcgtgccagatcatgaatagcaggcatgaacaggggcgagggagggaaaacctggacaggcggggcggcgaggatcgtcgacctattgttgtccgattgtacagtgggtgtaggccctgcaaagggcgatcgatatgcagttctggcgacatcaacgatctgtttcgggatcggcggactgcaggtcgagtgccggggcgtctcaagtggttagtagtgtggttattagcctactaaaaactttataaacacacgcacactgcacggaaggagatgattccgtctagatgccgcctctaaagaacgggtcgccgaggaaggaggcagagtaggtcccgccgccgttggggaagagcgtgaggaggcagaccaaggcgagcacgaacccccacgcgaggcgctcgttgccgagcggcgtgatctcgtcctgcgccgggatctcctccccgccgcggatgaaggtggcgaagaggccccacgccaggcacagcacgctgccgctgatggcgcccgcgcccagcaggacggacgtgccgaacgacagcagcgccgccgtgccgcgcccgaacagcgcctgcgcgatgcgcccgccctccagccgcccgatcgggagcaggttcagcgacgtcaccacgatgcccagcagccccgagaacgccagcgggtccacgggcacgcccacgctcttcaccgtgttcgtgagcacgttcccgagctcgtttgcgtagggcccgatcacca

SEQ ID NO: 170450 - DNA, 349 bp, Zea mays
  Clone ID: MRT4577_87031C.1
ttggttttttttttttttttttttttggagtcggaaaaaaaggtaagcaaactacaccctatacggaacgggcctaacaaacactgaattgtcaacttatttaccagtgacattttcaccagcttcctccattaagaactggacataatctgcattccacaactggggaaaacagcagattgctcctatatcaaagtctgaaggatgccaaccagctagatcccatggaaccggcccccgatccgatcacaccattaataaataaaagggtcacaacatgcagaggaatcgccacggtgctaacaaggccaaagctctgaccgaatgcagaaaccaactcctatctgga

SEQ ID NO: 170451 - DNA, 311 bp, Zea mays
  Clone ID: MRT4577_87032C.1
cccacgcgtccgggttgaagaagctttgaccatgatggtcatactgaatgctaaaacatgtactcctagtaacatattgtgattgttcacgtatacaggtttgaatttagctttgatatgaataatgagaaccaagtgtgtatgatgggtgaaggggtgtaaccggatcggatacgaacgaatattgcttgtaccatatttatttcataaaaaaaaaaaaaaaaaaatttaaaaaaaaaaaaaaaaaaaaaaaaaaaaaaaaaaaaaaaaaaaaaaaaaaaaaaaaaaaaaaaaaggggcggccgttttaa

SEQ ID NO: 170452 - DNA, 190 bp, Zea mays
  unsure (1)..(190): unsure at all n locations
  Clone ID: MRT4577_87033C.1
ttttctttgcagcggggncgcgcgcgggggacgggctgctcnnnggctgttnaggctaccagatctgcacgcgccccttgcgacgccctattgccgccattgccttcacctgcactgccctgtcggggcggttcgctcgtaagggacatgcgtgttactgccatcacacatagactgtcggggggggggg

SEQ ID NO: 170453 - DNA, 1087 bp, Zea mays
  Clone ID: MRT4577_87034C.1
taggggttcaagttttagatgacaacgataaccttcagataataaagaacagtgaccttgaagaattgcgtgaacttggttctggaacctttggtactgtttaccatggaaagtggagaggttcagatgttgctataaagagaatcaacgatcgatgctttgctgggaaggcttctgagcaagagcgtatgaggactgatttctggaacgaggcagacaagcttgcatctttgcaccatccaaacgtagtagccttctatggtgttgttgtagatggacctggtggatctgttgcaacggtaacagaatacatggctaatggctcactccgacaagcattacaaagacatgaaaagatctttgatcggcgtaggcgtctactaattgcaatggatgttgcatttggaatggaatatctccatgggaagaatatagtgcattttgacttgaagagtgacaatctgcttgtcaacctaagggatcctcaacggcctatatgcaaggttggtgatttgggattatcaaaggtcaaatgccagacactaatctctggcggagtaagaggaacacttccttggatggcccctgagttgttgaatggcagcagcagccttgtctcggaaaaggttgacgtcttctcgtttggcattgtgatgtgggagctacttacaggtgaagagccttacgccgagctgcactatggggccattataggtggaatcgtgaataacacgctgcgacctccggtgcccgagtcctgtgatccccagtggaggtcactgatggagcggtgctggtcagccgaaccgtcagagaggccgagcttcaccgaggtcggcaagagcctgcgcgccatggcttctcctaccaaggcacaacaatcgaaatagatgctttagccttgcctctcgcgtccttctgttcagcagattgtttcagtcttcaaaccgaggaggtgccaccatggctggcctgccttttgtacatgaataagttgaagaaaaatacgagaatgtggcatgcttatgtcagccgaaccctcggcgaggccgagcttcaccgaggtaggcacgaatctgagcgccat

SEQ ID NO: 170454 - DNA, 2078 bp, Zea mays
  Clone ID: MRT4577_87035C.1
ggcccctcctcgagtttttttttttttttttttttttttttttttagcatcaaccatccatcgactctataagcatgccacattctcgtatttttcttcaacttattcatgtacaaaaaaaaggcaggccagccatggtaggcacctcctcggtttgaagactgaaacaatctgctaaacagaaggacgcgggaggcaaggctaaaccatctatttcgattgttgtgccttggtaggagcggagccatggcgcgcagattcgtgcctacctcggtgaagctcggcctcgccgagggttcggctgaccagcactgctccatcagtgacctccactgggggtcacaggactcgggcaccggaggtcgcagcgtgttattcacgatcccacctataatggccccatagtgcagctcggcgtaaggctcttcacctgtaagtagctcccacatcacaatgccaaacgagaagacgtcaaccttttccgagacaaggctgctgctgccattcaacaactcaggggccatccaaggaagtgttcctcttactccgccagagattagtgtctggcatttgacctttgataatcccaaatcaccaaccttgcatataggccgttgaggatcccttaggttgacaagcagattgtcactcttcaagtcaaaatgcactatattcttcccatggagatattccattccaaatgcaacatccattgcaattaatagacgcctacgccgatcaaagatcttttcatgtctttgcaatgcttgtcggagtgagccattagccatgtactccgttaccgttgcaacagatccaccaggtccatctagaacaacaccatagaatgctactacgtttggatggtgcaaagatgcaagcttgtctgcctcattccagaaatcagtcctctactgacaaaagaaaagatagaacatggtggattcaatttaaaacacagcatttcataccatacgctcttgctcagatgccttcccagcaaaacatcgctcgttgattctctttatagcaacatctgagcctctccactttccatggtacacagtaccaatggttccagaacccagttcacgcaattcttcaaggtcactgttctttattatctgaaggttatcgttgtcatctaaaacttgaaccccttgacttattttgtctgactgattgttcccttcatcctggaacttgacatcaacttctgctccatgcgaatcgatgtgatccccagagaacaccactgttttttcaggaaagggtggctgaagaactgatgcggctaccccttcagcaacagcttgtaattgtcgcttgatactatcttctccaggtcctttgttcaatttaactgtgtgcatatccttaaaacatgagtcttcttctgagggtatggcagcatgcatgttcatatcaggcatatggccatcaatatattgacctccagaaacaacagactccttagttagcttgtttggtcttggaggcactaaagatgcattgcccactgttctcaaatgagctggatttcattaaagtgaatatacataagccggttcctgtgtaccttcaacacgatcaataccaacagtagactgcaatggaaatttgttactgccattggggggagttgaaaccaagtgattggccatttctttaggacgctgtacaggtgatccagaaggaacctgagcaccagagttagatggtagcacagtaaccttttcattagaaccaggtggttcaatgggagctataaggttgctctggacagccacttattgggtggttgctggattatgtcaggatggacattttgtgtaccaatatcaaaagcgttacgtggcttctcactgtgcctggaaatgttttcctcttagttgaatgcaggagaagcaaaggcgttaataatccctatatgataccctccagattgagatttgtagatagaactaccatcaatattaaaaggcagctttccaaataacccattgtaaatgatactttaagtagaatgttccccatgcacagttcaatggcacgcagtggcaatggttccagacccc

SEQ ID NO: 170455 - DNA, 419 bp, Zea mays
  Clone ID: MRT4577_87036C.1
gccggactgcctctctttctcctctgtctccagtctccactgcgagggctactcgtaataaccatgggtctccatcgcgctgccactaggccgccgcggtggacgatgacgcgtgcatgcccgccatgcagctggcgtcgcagaccatcctgtccatgaccctcaagaacgccctccagctgccactgctggacgtgctgcagaacgaggccggcggaggcaatgcgcagctgccgcacgaagaggaggtgcctcggatgtcagagggttccgatgatcccaccgacgtggcggccatggcgcaccgtctgctccggctgctctcgtccaacgaattctcccggcgtccgacggaagaactgggacaaccaagcacgagcgacgttactccgacgagcccgtctgcaagtggctcaccc

SEQ ID NO: 170456 - DNA, 545 bp, Zea mays
  Clone ID: MRT4577_87037C.1
cccacgcgtccgggcaaagctgcgacaccttgatgtgcaaaaagaatcgggcaacattattgttggcatgcctcatggtataggatatctgacagatctccaaactctcacaatgttcaacattgggaatgatatgttgcattgctcgatttcagagttgaacaatctgaatggactaaggggacatgttcatgtaactaggcttgagaatattatgacagccaatgatgccagagaagcaaatatgatgggtaaacacttgctagaggctttgacactggagtggtcttaccaggatgaaggcatggacgatgacatgggcaaagaaattgctagtgagattcttcaaaatcttcaacctaacagcaacattatggagcttatcattcgaaattatgctggagatctgtttcctgtctggatgcaggacaattacctttgcaagctcacctcagttacacttgataactgccatggcttgagtgagctcccttaccttggtgatctaccatctcttaaatatctcttcatacagagaataaata

SEQ ID NO: 170457 - DNA, 494 bp, Zea mays
  unsure (1)..(494): unsure at all n locations
  Clone ID: MRT4577_87038C.1
ccggcggcagccanggnngaaaanncgacggagccaaccaaccccaccaagncaaccaaggccangggccgngaccnacgngnncacnncaagaacacccgngagacagcnnnngcccnnaggaagnngncacncaccaaggccaaaaggnaccnngaggangnganngcccacaagcaggccancccgnnccgcaggnangggggcggngnnggacgnaccgcncaggcnaagncncgncacncaaanggacagggacgcnggcccgncaaancngcnaganncanncnagaccnncncaagaangcngagagcaangcngaggnaaaaggncnngangncganacccncnangngncacacanncaagngaaccaggcncagaagcagcggcgcaggaccaaccgcgcncangggcgcancaacccnnacangnccnccccgngccacancgaacncancnngncagagaaggaagagcccgngaagaaaga

SEQ ID NO: 170458 - DNA, 242 bp, Zea mays
  Clone ID: MRT4577_87039C.1
acggaccaaaaggaaattgtaacgcggattggaagcagcgcaaaaccacccgtggttgttgcatttgttagggaagcgaccactaacatacacggtgagaggaccgcatttgcttcacatgtttacacgagggggctaacacaggccatatgcattacgacaaccactgtcctctaacagccgggaggagcaagaccggatacgcctcgggggacgcccgtgccattaacaaaaggctcttt

SEQ ID NO: 170459 - DNA, 244 bp, Zea mays
  Clone ID: MRT4577_8703C.1
ggcgcctgccgcccctgtccgggggaggcacgcgtacgggcctacaccgccatggcacattttgatgcgcactttcgtcagcccaatgatccagatgaggctccgagagtacccaagcttgagaccagggcaacaaacaagccttgaatcacgaactctcagccgctgcgacggccaattaaagcaccagaccagctccttatgtatgacccacatagcggccgcacatcttctgggcatccat

SEQ ID NO: 170460 - DNA, 349 bp, Zea mays
  Clone ID: MRT4577_87040C.1
cgcgcgctcgtgaacgccagagtctccctgctcaacctgctcacgcccacgttctgactctgacgccatctgctcataaaaatttcttggccggacaaacgtttttttgccatcttgagtgagtcgtttgcggtgtgtaaatgatgtaaataccccccctagtgcttcggattgcaaagggaactagtcctggttagccgagaacccttgcggcgctttgtctcccatttccgtggccctcttctctgcttctgcacaagtggccaagtagacagacatttcaatggttttgcaagaaaaattagcaggcgagcggatgacaaaaaaaaaaaaaaaaaaaaaaaaaaaa

SEQ ID NO: 170461 - DNA, 281 bp, Zea mays
  unsure (1)..(281): unsure at all n locations
  Clone ID: MRT4577_87041C.1
cggccaagcgtccaggcgaggctagaccctccccttgcagctttgggagcaccggcaaccgcccgggcgaggcgcgaccggnacaggcacgcgcacaaccccgcccaccaaccgggaagccagagcggaagcgagaaggcagccgcggaagaggcggccaccnccgcggccnccnagccgacggacgcaggggccgacgcaggcacagggaaggaccccgagaaagcccccgcgcgaacgcccacgcaggaggccaccccgggagcggacaccaccagcga

SEQ ID NO: 170462 - DNA, 422 bp, Zea mays
  unsure (1)..(422): unsure at all n locations
  Clone ID: MRT4577_87042C.1
accacggccttcttgtgggtgcacgactcccaggcgtccctcagcctctccagccagaacctgccgtatcgtgccagctgcgtggagtaagaggagcacaccttggggatgatgaagaccccaaagaacaccagtttggccagcgtccagagggtgacaaagttgccgcaccgggccatcgcgaacagtatcagcgccagcttcatggtggtcgcaggctcgccggagaagagagacctcaggtttagcagcacctcgttgacgtacggcagcaccagcctcagcagccacacggcatcctcctccccgaccaggtagcagcacctatcgccgccgacgcctccatcatcgtcgcactccacactttcacccctgctcagtatggacttgcgcaggaagcgtagaccgaggtagatcaggcn

SEQ ID NO: 170463 - DNA, 429 bp, Zea mays
  Clone ID: MRT4577_87043C.1
attggatttccagaaggccccgatcgatcgaccgaggcggcgaatcatccgtccactcgctggcctcatcacctccccgtgcgcagccgtcgtcgtcctctcctcccttatcgatcgggttccggttccggccgctcaactcttctagtcttcttccttcctttccttcctttctcccccgtcccgctctggcctcctgcgtcctgctgccctgtgattgaagcaggcaacggccggctgttgggacggtagataaatagtaaatcggttgatactactgctgctgctgctattaaccgctcgggctggccggggcccccctcctcctcctgttgcttcgattccatcacacatcagcttggtgcattcgtcttcctgcttcctccttgcttcgtctctcttcagttcagttctcccttggagcgagga

SEQ ID NO: 170464 - DNA, 508 bp, Zea mays
  Clone ID: MRT4577_87044C.1
tctgatggcttctcctccccctctcggtgagggttcgggtaccttgagagatcttcgaccctggggcccctggttgaccacatctagatggcggcaccagatgatcagagtaccgctgcattggtcagcagcctctcctgcgccacggacgaccactccctccacaacgccttcagcacctacggggagggactcgactccaagatcatcctcgatcgagacacgcagaggacccgcggcttgggctacgtcaccttctccacaaaagaggcgatctcgaacgccatggatgtcatgaacggctaggagcttaactggcgcaacatcaccgtcaaagaagcccaaacccgcgcaggacgtacacgcgtctactgatggtacggaggtgaccgtggaggcggcggctacggctgtagcaaccgccgtgatggcgagctctgctacagctgtgaaggtacatacactggccactgcatctacggtggcggaggctgcatctactgcaaaa

SEQ ID NO: 170465 - DNA, 653 bp, Zea mays
  Clone ID: MRT4577_87045C.1
ctttccgcccgccccccgtctcctcgcctcgccgtctcgccccacgccgccgccgcaaagatgccgttcaagaggttcgtcgagatcgggcgcgtggccctggtgaactacggcaaggactacggccgcctcgtcgtcatcgtcgacgtcgtcgaccagaaccgggcacttgtggatgctcctgatatggtcaggtgccagatgaacttcaagcgtctttcgctgaccgacatcaagattgacatcaagcgtatccctaagaaggcaactttgatcaaggccatggaggaagcagatgtgaaaaccaaatgggagaacagctcatggggtaagaagcttgttgtccagaagagaagagcatcgctgaatgactttgacaggttcaaggtcatgttggctaagattaagaggggtggtgctatcaggcaagagcttgccaagctcaagaaggaggttgctgcttagaatatcttagtggatggcatgttgagttttttgttccaagttggatctgctctatgttccagtgttcttaaagccagaattagtacaactgttttcagcgaactatttcatattttgtcatggctgttattgaatacccaagctagtttgctacagatgtgcctcttgccttattcatatgtgatatg

SEQ ID NO: 170466 - DNA, 344 bp, Zea mays
  Clone ID: MRT4577_87046C.1
gtaccctcgggtcctgccgggcctgtattgctgttgattcaatcttggtgtattaccatatatgtagaggtggtatccacactattggtaggtcatttgtattaccgctggcgctgggccaaatgggaacagtacttcgcaggtgggcggtagtcgctggttcagatcaggccaggccacgccacgccacaattatgcatttgagttagaatccgtactaactgaactgaaacatcagtatcaaaatatctgtatcgattctaatggtctgttcggttggaatatagctgtaaaaaaaactgttggagactgtgagatgtaaaaaaactaaaaccgtttggtaa

SEQ ID NO: 170467 - DNA, 625 bp, Zea mays
  Clone ID: MRT4577_87047C.1
ccattcaccgggcccgtgaacaaacaacccggatgctaatgagaagcatgtagcacgaaccaacccccgtttaaaacactatgtcaagccaggacaaccacagagaacacctgtatgctcgtgtacatgtacgtccaactcactccctcgcctcagcccaatcgagagggagataccgctgttgtgctacagactcgacgagcaccaagccgggcatagccttatgcaaactgttcagcaccgtcagagacgcagacctggtgacgctagccgtgggggtgctgcgccaatatccgccagacggaaaatgggacgcaacggccgctaattacgaggaggcagggcgctgcttcctttaaatatttggtggaacaagatcaacagcaacctaagattcagcgtcaggatatttacaatgaatatcaacaaaccgaaggcgttctgactatagaacaattcaaggagttggaaattaaaaatctttcccttgcggttaaacaatgcaaagggaaaatttttggtgataacggcgcagcgagattgttgggaataaacccaacaaccctgatctcacgcttaaagaaattagggattgaatattaaaaatctcatccagaggcaggct

SEQ ID NO: 170468 - DNA, 575 bp, Zea mays
  unsure (1)..(575): unsure at all n locations
  Clone ID: MRT4577_87048C.1
accttgccccagaccggtgggcatccccctcatcgctacagcattgaaccctattggtacctcagngacggattgcatatatcctataagcatgacgctcaaactggaaggaacggcggacgcaacaggcatgagacgcgaccacgtgaagtacatactctggtttaactgcctcctttgctgtccaaaggataacgctatgaagcagtgcttgttgaggaacattacctagcaggatgctgcgaggtacgcgcaggaggcactggtgcatgatgggtatgtatttcccaaaatggacgcaaagggtctcactgagtatgatgcgcaatacatgcacacattgatacctgttacctctaccgagaacaggaggaaccgacagcccccggaacggtccaggctccggactgatggcccaaggccaggagaggggccaacaggcccaggtgctgctgccacaaaagctccccctgctgccgttcctcgtgcctaaaatcaggaatgcgatccagagcttaggtctatcacctatctgataatggactttgcctgatatgaaaaccaatgtactgtga

SEQ ID NO: 170469 - DNA, 427 bp, Zea mays
  Clone ID: MRT4577_87049C.1
taactcgccgagtaatgggctttactgctttgaaactgtcacctcttttactccactatgagtgtctccctcacatcctactcctcgttatagaaggctctttcatgaccctacgggtaacatcgctttcattcaatgcgcatgatctctctcatgtgcaataacatcaactgcattgccaagctccaaatctggtgctagcttaaggcgcctgaccgactctcctcctgcagctaccaatcctccagagacaacagcgtacgcacttaacagcaagctagcggaatcaatcccgcttgctccaggattcttttcatctggtaaagccctttttactataaaatccaatgtcacttggaaagcccaatacttgctacttcaccacacgcatcttcccgcattccacaattccgctacagattccctc

SEQ ID NO: 170470 - DNA, 398 bp, Zea mays
  Clone ID: MRT4577_8704C.1
cgaggtatcgataagcttcagagttccagtgatatacaaccatccatacggcaacattcaaaataaaacacacttggagcgtgacaagtctcgaacgtcagaccccatggaacactgcacatgcctctatcccctagactagtaggcattttatgtcatgttttactcacatttatttaaaaatctaccaactaaaggcaagggtttatttcataaaaataaaactttcttgcaaaagcccaggtttgaacctaagacctctcagacactcccagaacatgtaaccactgaagcagacatgcatttgtgtgcaacacaatatacgtaaatagatatttaaattttggggcggtataactctaccccactaaaaaaaaattttggccttaaaaattaac

SEQ ID NO: 170471 - DNA, 230 bp, Zea mays
  Clone ID: MRT4577_87050C.1
aacctttttggaaggcccaaatttctaacctaaggcagtgtatccgtatgaataaaacatgggctgccttccctgggtctttgggaaaattattccaacaccatcttcaaaaaaaagggtgtaggatgaatatgccaccttaccattagattagttggtttttgcaatggttcctttgggggtggtcattaataaggttgactgcttagggtaaagcaatttcttttttt

SEQ ID NO: 170472 - DNA, 205 bp, Zea mays
  Clone ID: MRT4577_87051C.1
gccgccctttttttttttttgaagttcgggtaaatcgctaccaagggggcattagggacattttccttagatataccaaataaaaacacaagagatgccgttttgccaaataatttattaaaaattcctcttggaaaaatgttggacccggagtcaatttaaaagtagccggagccgggcaagacaaacacttgggttagctcca

SEQ ID NO: 170473 - DNA, 896 bp, Zea mays
  unsure (1)..(896): unsure at all n locations
  Clone ID: MRT4577_87052C.1
ggccgctcgannggccggccctcgggtcgacccacgcgtctaataatccggcacgtcgacactccacaagcagccatggcgccacccatcacgtccctgtcgtctctgatggcgtcggtgtcggcgtcggcgggcaggagggggctgctggcgctgggcgccgggttcctggcctcggccgcgctgctgtccccggcgggcgacgccggcgccacgcgcatcgagtactacgcgacggtcggggacaagatgtgcgacctgagcctcgtcaagtccggcctcgcgtactgcgacgtcgaggttggcaccggcgtccagcccccgcgcggcgagctcatcaatgtgcactacaccgcgagatttcccgacggtacgctgttcgacagcagctacaagcgcgggaggccactgacgatgcgcataggcgcaggcaagatcctccgagggcttgaacaggggatcagtggcggcggcggtgtgccgcccatgcttgttggtggaaagcgcaagctgatgatacctgcgtcactggcgtacgggcctgaaccggcaggctgcttctcaggagactgcaacatccccggaaactccacacttctatatgaccttttcctcgtcgggatctacaagtgagccctcgatgacagggaatgttcagaacctaagagcagacacatggagggtttcaggaggaattcttggcggtgaaagcacctgcagaggcagagccacttgcagaagcttctgtactccagagagctacctggatcgaataaaatgatgatatataaaccatccttgttacataataacgccattgtggaactttgtaaagaccaatcatattgttgactaaaaaaaaaaaaaaaaaaaagggcggccgccaccgcggtgga

SEQ ID NO: 170474 - DNA, 365 bp, Zea mays
  unsure (1)..(365): unsure at all n locations
  Clone ID: MRT4577_87053C.1
agcggacgcgtgggcggacgcgtgggggcggcggcggtgtgccgcccatgcttgttggtggaaagcgcaagctgatgatacctgcgtcactggcgtacgggcctgaaccggcaggctgcttctcaggagactgcaacatccccggaaactccacacttctatatgaccttttcctcgtcgggatctacaagtgagccctcgatgacagggaatgttcagaacctaagagcagagacaaggaggaattcttggcggtgaaagcacctgcagaggcagagccacttgcagaagcttctgtactccagagagctacctggattgaataaaatgatgatatatataaaccatccttgttacgtaatana

SEQ ID NO: 170475 - DNA, 1126 bp, Zea mays
  Clone ID: MRT4577_87054C.1
tccctgtcgtcccacgcgtcccacacacgtccggccaagcgtcccgcattgcctcgaggccggccgggaagtctgggggataataatccacactccacaagcagccatggcgccacccatcacgtccctgtcgtctctcatggcgtccagcccaatcccgacgccgccgccgctcccgaagaccagcggcagagcgctctccgtcgcgccctgcggctccgcgtcgtcctcgtcgccgtccacttcctcgactcctcatccggtggcggcgtcggcgggcaggagggggctgctggcgctgggcgccgggttcctggcctcggccgcgctgctgtccccggcgggcgacgccggcgccacgcgcatcgagtactacgcgacggtcggggacaagatgtgcgacctgagcctcgtcaagtccggcctcgcgtactgcgacgtcgaggtcggcaccggcgtccagcccccgcgcggcgagctcatcaatgtgcactacaccgcgagatttcccgacggtacgctgttcgacagcagctacaagcgcgggaggccactgacgatgcgcataggcgcaggcaagatcctccgagggcttgaacaggggatcagtggcggcggcggtgtgccgcccatgcttgttggtggaaagcgcaagctgatgatacctgcgtcactggcgtacgggcctgaaccggcaggctgcttctcaggagactgcaacatccccggaaactccacacttctatatgaccttttcctcgtcgggatctacaagtgagccctcgatgacagggaatgttcagaacctaagagcagacacatggagggtttcaggaggaattcttggcggtgaaagcacctgcagaggcagagccacttgcagaagcttctgtactccagagagctacctggattgaataaaatgatgatatataaaccatccttgttacataataacgccattgtggaactttgtaaagaccaatcatattgttgacttatatagcagtttgataccaaaaaaaaaaaaaaaaaagcggccagccaaagcgggcaagttatcggaggtgttgttagttttgaggttgctggagactttgatgctacgaggaaattcattgattct

SEQ ID NO: 170476 - DNA, 652 bp, Zea mays
  Clone ID: MRT4577_87055C.1
aatccacactccacaagcagccatggcgccacgcgcatcgagtactacgcggggagctcatcaatgtgcactacaccgcgagatttcccgacggtacgctgttcgacagcagctacaagcgcgggaggccactgacgatgcgcataggcgcaggcaagatcctccgagggcttgaacaggggatcagtgtcgcggcggcggtgccgggcatgcttgttggtggaaagcgcaagctgatgatacctgcgtcactggcgtacgggcctgaaccggcaggctgcttctcaggagactgcaacatccccggaaactccacacttctatatgaccttttcctcgtcgggatctacaagtgagccctcgatgacagggaatgttcagaacctaagagcagagacaagagtaaccgatcgttttcgtgtgtcacacatggagggtttcaggaggaattcttggcggtgaaagcacctgcagaggcagagccacttgcagaagcttctgtactccagagagctacctggattgaataaaatgatgatatatataaaccatccttgttacgtaataacgccattgtggaactttgtaaagaccaatcatattgttgactatatagcagtttgatacaaaaaaaaaaaaaaaaaaggcccct

SEQ ID NO: 170477 - DNA, 2848 bp, Zea mays
  Clone ID: MRT4577_87056C.1
cctcgaggccggccgggttcttctcccccatctccatttttctcctcccactgattttgcattttagcccctcaggaagctccgatttcggccccgctccggcggaccgcttccgttcgtgctctgctccgaccgagcgcgccgcgccgtgggggacagctgcgaggactctcgttcggcggctctggttctcggcttggtcccgtttcttccccaacaaatctcgtaatttttcgttcagatttggcttctcgccgcccgtctgggtctttctcgtgcgtttcgcctttggtttcgccgatttggtgccggattcggtgggttgcggccgagtagcctggatctcgggcgcgggtctagcgctaggagccctcacactggggatttcctgccggaggaagcttttcaagggagctagtagctagtagctagctgcctttgggagcagtagctcttctagtctctgaaggtttcaccatacgcggtggagagcgctattagcttgaggagtagatttcgtgtagcggtgagcaaagtttgggtgtcaagtctggtggtggaagccttcaggcttgagattttctccctcacgacaccgaaggagcacgccggctctggaaggaatttcctgccatcccagaggctgccgatttcctccctcccgggaagcaagcaagggctttcttctagacgagctcttctggttccttaagtttgtgggccgtggctatttaatctccaactgcatccccagatattcaccaaattctgtgagactgggaactccgggattggtttggataaggtgttctgggaatggggaaccaatgcccaaacgggacccttgggagtgactactacaaccgccccgcttccaggttcgctgatggttgccttgaggacgatcgctactctgacttgaagaagtttgacaagccatggcctgaggtgaactcgtttaagcccactgctgttggtattttgaagaggggattggatccaacgtcaatcactgtccttgaaaggaagacggccgacgtaagggaacattatatcatcggtcggaggcttggtcaaggccagtttggcacaacattcctctgcaccgagatcagtacagggtgtgagtatgcatgcaagacaatcccaaagcgaaagctcatcaccaaggaggatgttgaggatgtgcgccgtgagatccagataatgcaccatttgtcaggccacaagaatgttgtttccatcaaggatgtatacgaggatgggcaggcggtgtatattgtgatggagctctgcgccggtggggagctctttgatcgaattcaggagaaagggcattacagcgaacagaaggctgcagagctcataagaatcattattagccttgtggctatgtgccattcacttggggttatgcaccgtgatctaaagccagaaaacttcctcctttgggataaagaagatgacctgtcaataaaagcaatcgattttggtctatctgtgttcttcaaaccaggtcaggttttcactgagctggttggaagtccatactacgttgctcctgaggtactacacaaacggtacggaccagaagcggatgtgtggtcagctggagtgatactgtatgttttgcttagcggggtgccacctttttgggcagagacgcaacaaggtatatttgatgctgtcttgaaggggcacattgattttgactcggacccatggcctaagatatctgaaagtgcaaagaatctcataaggaagatgctctgcccttgtccttcagagcgtctgaaagcccatgaagtactacgccatccttggatctgtgaaaatggagtggctactgatcaggctcttgatcccggtgttctctctcgtctcaaacaattctccgcaatgaacaaattaaagaagttggctctgagagctgatagctgaacgactttctgaggaggagattgctgggttaagacaaatgttcaaggcagttgacgttcaaaatagaggcgtaattacttttggtgaacttagacaaggtttaaaaagatatggtagcgaattggagaatagagaaattagtgatataatggaagtggctgataatgacaataatgtgaccatcaattatgaagaatttatcgctgcaactgtgcctcttaacaaaatagaacgtgaggagcacctgatggcagcttttacctacttcgacaaagatggaagtggttatatcacagtcgacaagctgcaacgagcttgtggagaacatgacatggatgacactttccttgaagagataattttagaagttgaccaaaacaatgacggtcagattgactacgccgaattcgtagcgatgatgcaaggcaacaaagttggacttgggtggcaacaaatggaaaccactttgaatgtaaccttgagagatgcacctcaagtacactgtcactgacgcgctcgccatgtacagattttgttctcttctcgtgttcatcgtttctccacacgacctgagagttccggtcgacatgacatgtatcacgaggagagagcaaatcaatcgattcatttagtggtatttatcccaaataaagtgtgggctggcaggcagaatatggtttgtcatgagagacactagtatgggtttatatgtataaatatatagtagtggtggtatattggtttatggtagcgggtgatcctgtcaagcgattcaatcgaaataccaaaagaagtgcgttcagtttgcccgttttgttacgggtttcatgaagatgaaggtgattatgttttctcatgtcgagatttgcacttccttaaaacgcagctgatttaccaattctttttt

SEQ ID NO: 170478 - DNA, 368 bp, Zea mays
  Clone ID: MRT4577_87057C.1
ccaaatggggtaattcatttctggggggtccgggcttacggggccccccgccaaccaggtgggggggcgggggggaaaactattgctggcctgggggggccgccccggctttggccccccccaacaaaagaaacgcgggggccccactaaactacggggggatcctggatttgccctccggttgaactggaggggggggaaccaaggttttttttttccaggcccaggtggggcctcaccttcggccccgcccaggaaaaaaactggaatcggactcggacatgcgtgggtccagggccgaacatagggggagccctcttggggaaccactgtcccccggaggaagtggggaccaggccggagagggg

SEQ ID NO: 170479 - DNA, 313 bp, Zea mays
  Clone ID: MRT4577_87058C.1
gaagcaaacacgagggggatacccctactgaacttttttgggatcataaaaaagcaaaaaaaaaaaaaagaatccctgtattttgaaaagacaaaaaatgagggaaattaccggtgtggaggtcttacccatgacaaataaatttggggagccttgaatccaaacaaaatttcacagctctgctggggttaattgaattaaaactggggggtgcagggcaggcttgattaaattgaggtgcttgttgaaccagctgaccatgtaggcaagggccgtttctgcggtcttgacggaaaaagggcccggggtgttt

SEQ ID NO: 170480 - DNA, 449 bp, Zea mays
  Clone ID: MRT4577_87059C.1
cggccgggaccttttttccgctgcattactgctctcttgatctcctcgctctcagaccaccgatgccgccgccgccgccctaaaacatcatgctgaggccttctccgggctcttcgacggcagcgagaactcaccattagctctgcagaaatggctgatggacggtgacatccagccccttgtttgcgcacaatgccaccgtacatgctaaaggcatcgtttctcgccggcgaagatgcaccaaggcctgcatatacctagcatctttgtccgttctcgccacaccggcgtcatgctagggatggggcacaaggacgcatatgtcggcgacgaggcacagaccaagagaggtattttctcgctcaagcaccccattgagcacggtatcgtaagaaactgactatgacatggagaaaatctggcatcatactcctctacaatgagactcc

SEQ ID NO: 170481 - DNA, 1580 bp, Zea mays
  Clone ID: MRT4577_8705C.1
tttttttttttttttttttttttggttcaattctgtatattaccataccaatgcgcattcctaacaagatcgacatcacttaccccactaatcggttgacgccactcagcaatttgacactgctgcgaatctctcatggtctcacacttctcatgccttggacacagttcactctagcgtacctctcttccagttcaaactagaccatatgtgtatattagctctagtacatttggatacacatgactctgatacaactagccttcccttcatacttgagcctagctgtagagttctccaatggaatccatcatcatattcgcgatgacttggttcgtcctttccgttggatggacagcatcccagtacaggtacttgctagggtctccacatgttcttcgccctcggcatgtttgcccaacttcgatcacccccgatccgcagcaccctcttgacacttcagttaggccgttgcatcatgtatggtagtataggtgtctatgtatgaagtccgtatctggtgctgaaaatttatgaaattcaacagctgaatcagctttgagttgaacgaattggcaagctgatttaacgtctcgtcgcatctgtccgatcctgtgcccactaaagtccgggcaatcggcaagcaacccatcgggggcagtccaacaaaaataaatctccttcctccaagcattatcatggcctgggtataattagcgacatgtgctgtcaggtgattctcatacagttccatactaattgcattcgaccgattcgatgcaaggtagactgaaagcaaatcgtttgtaccagtgcttatcacaaaggcagccctgttgccaagtcgctccgctcttcttggtccaagcagtgttcggataagtagcttgtaacggaagaggttgtgcacttgttcagagaatgacccacatttattctgttggcagtgctgtcgtcatatccggagccgcctgatgaaaagctcacacccctcctgagctgggccagcctcagatttgggtcaaagaaacctggaataatcctggatatgcctagtttctcagctaacatatctgtggctaaccggccattggtgaatcggccagtcggcctgcgaccgtagaagttcaagccgtacggcaagaaatttgccctggctgtggtgggcagatggttgttgtttccagggtccacggttgagtctccaagtacaaggagtgtagtacagcccgtagtgcggttgatcgtcattccaggtggtgccggtgcaggaggttcctgtggtggcacgaccaaccttggcggtgctggatcctgctgatccgtcggtgctggtggccgtcgatgtggtgatccccgacgtcgtggaggtggaggtggtgatgttggcccaggcgcctgcggtggcgtttgctcatctgctgttggtgcttcgggggactgtggtgcagcctccggtgcatctgctgctgatgctgctcttgcgcagtgcaactccccggcaagcaatgccactatgatgagtagcagctggaaacccctcatggcttgtgttgtatgagcaggacaaatcctcgtgc

SEQ ID NO: 170482 - DNA, 1624 bp, Zea mays
  Clone ID: MRT4577_87060C.1
gcagttctcgacctctcctcctacctcctcttcactcccttcctccctcttgcatcactatcaccaccaacaacaaggctaacgcacaccaatccaacaaggagaacaaaaaacaattaatcgtgttttgagcttttgatatcacctcgttcgagttaagtgcgtgaagaggcaataatggtggcagtggaggttgtgccggcgtccgcggagtccccgattccgatcgaggctaagaccgcggtgacgtcggaggcggaggcggaggcggaggccgagggcgaagtggaggcggagatgaagggtgatgcggcagccacggcgggagaaacggcggaggaggaggaggaggagaaggtgtacaagagcgacctgaagaagctggagaacctcatgtccaagcttaacccctccgcgcaggagttcgtgccgtcgtcgcgccgcacggccccagccgccgtggcggcggcgaagccggcgggaggaagggtgctctcagccgacgcgcccgtgttcgtgtccgccgccgagtactacggcgctgccggtgggcacctggagataggcggcggcggcggcaaagtcgtcgttggcggcgagggcagggactccagcagcgacggatccagcaacggcggcggcggcggcagtcgccaccaaccgaatcgccggaggaggaacagcttcaaccacgggaggcggaggggggccggaggccggccccggcggggtgatagggaggacagcgtgcgccggaccgtctacgtgtccgacattgatcagcatgtgaccgagcagaagctcgctgaagtgttctccaactgcgggcgagtggtagattgccgtatctgtggcgacccccactctgtcctacgctttgcgttcatcgagttttctgacgatgctggcgcaagagcggcgctaacactcgcgggaaccatacttggctgctatcctgtcagagttttgccttctaaaacagcaattctacctgtcaacccgaaatttcttcctcagactgacgatgagaaagaaatggtatcaaggactgtatattgtactaacatagacaagaaggttacggaggaggatgtaaagggtttcttccagcaagcctgcgggaaggtttctcggctgaggctccttactgacatagtacactccacatgcattgcttttgttgagtttgctcaggctgaaagtgcaattatggcattaaattttagtggtatggtccttggctcacttcctatcagggtgagcccttccaaaactccagtccgtccacgttctcctcgtgtgatgtccaattgatcaggctgctaccaatagcaaatcatcctaggcagagcttattgtagctatgatcgccctagaacccttgcttcacggatcaatgacgtcgttgtcctgagagtgtccaagtcagtcataggaaaccaacttgttgccaaatgctaatgtttttctgtttgccagatccatgcaccatttcccttcttttttcattccccccttatgttaattatgaacataattgtttataatcgccttcctcaggcatcagaataagaatgaataactctggcatttttttgttgtaaaaaaaaaaaaaaaaaaaaaa

SEQ ID NO: 170483 - DNA, 402 bp, Zea mays
  unsure (1)..(402): unsure at all n locations
  Clone ID: MRT4577_87061C.1
aaaagggggaaatcaaataattaatgcgcgtgacggtacaactgatttgaagtttttggacagccgtttggctaaagcaaattaaataatttattcccccggcccggcccacaagagaatgagaattgacaacgagacatgaaccaaattaaaagagcccagttaacggcgaacttgagcgaccacacggtgttgttgacgccggggtagcccgcggagagcacggcggggcagctgacgaagaggtggtagctgccggagacccagttgccgaccttccacttgacgcggccgtccaccttgacctgtagcgcgacgaagcccgtggngacgtcctgctttatggcgtcggcgacgtaggcggcaacgggcacggactcgggcgacagcacgggggaccag

SEQ ID NO: 170484 - DNA, 1317 bp, Zea mays
  unsure (1)..(1317): unsure at all n locations
  Clone ID: MRT4577_87062C.1
ggcaaaatggaattcatagatttgcctttgtcgtttaatctgatgcactgtgttttcaaccggatttctggttcttgacctaaataatggttgggagcactacaaccatggtgctgtttgtttcaagagggagtgcgggaatggtaatgcaactagctactaacagtgctaactgttactactacagaggaactaaaaacgttatccgtttggttcggctctggaagtgcttcactcggcctctaatagaagttgttgccattgatgaaaggccatgcacggatgaagatgaagtggtccagctcctagggaagtgacgtgccatgaatgggttgcgccgtgctgcgaaccagtctgcgtcgactgcttggattgatgcagcacgcagactccaacctcgccctcccgccacgcctggcggctacgagcaggatgccacggtggttgtgctgctgagactccgtcaagggaattaataacgctggtaggggagagctaaaagagttctactgtacagtagcaggtttttgagactttcaattgtccaatgtggtagctgcaattcctagactgcctgttcaatttgtgggattccttgtctttggaaccactctggcatgtgaaatgcttcatacaatgcaggcctcacatctttttggagagcgagatgcttgagaagcggaaacatcgttcccataagctggtcgtcaacaggttgtccagccgaaaacgtaacgcatggtattccattcaatggttgcagtaagaaactgtatgggttgttgtcaacaaggacaattctctggaaatctttggacaaacaagaaaggtcttttacatgctctctgtattcccttccaaaccagctgtaaagagaacaaggtcagcaaattcgctagttcgctgcaaaaactcatgtaagccaggacgctcaaagacagttacacgatttatcctctgccttccctcagtatccttttcagacaatacgcactccatgtcaaagcgatgcaatcctgcctcaacagcatgtgtgcgcatagtagaaggaaggctcgatgactcgtacgcgcaaactaaagtctcatccaagtcaagcacgaccaatctgcgtggcgggaggtgcccggactgcgtacccacgggcgagcaggattttgacgatccacgacccgatgaagtcgccggcgtcggtgacgcacaaggcggcagtggccatcgtgcgctgacgcccagtcccttcctctcgcgagcgaaacggggggcggtggtgccgccgggcgaatggattctcnccggccggcctcgagggtccca

SEQ ID NO: 170485 - DNA, 328 bp, Zea mays
  Clone ID: MRT4577_87063C.1
gggacccctcgagccggccgggccgggccttcggccacgggccacctaccgacgctccccactgcttggtcccgcgctcccgccctctactgcaggtcagcacccagcaggagggaaagggcgactcgccgactccgaagcccaaaccctcaacctacagcagcgcgccagcgccgctccgcccgcccatgggctcctcatcccactctctcgccgtctcacggcgcggccgcagcgcgcggcagtcccccttctttcgagacctcgccaccccgatcccgtcccatcgtggcgggtccgctttgcctcggggggttccccctcctcc

SEQ ID NO: 170486 - DNA, 1013 bp, Zea mays
  Clone ID: MRT4577_87064C.1
cccagcaccgcggatagcagagcagagcggtgagctgcagagcagggcagccgaggtcggccgtcgtcgtcgtcgtcagccatgagcaaggacaagcaccacaagcacgagcaccacctgcggcgttgctgcgggtgcatggcgtcgtgcctcctggcgctggtcctcatcgtggccttcgtctcgctggtggtgtacctggcgctgcgcccctcgaagccgtccttctacctgcaggacctgcagctgcgcaggcccatctcgctgggcgacccgtcgctgacggcgtcggcgcaggtgacgctggcctcccgcaaccccaacgaccgcgtgggcatcttctacaagcgcctggacgtgttcgtcacctaccgcgacgaggccgtgacggtgcccgtgtctctgccgccgcagtaccagggccaccgcgacttcaccgtctggtcccccgtgctgtcggccgagtccgtgcccgttgccgcctacgtcgccgacgccatgaagcaggacgtcgccgcgggcttcgtcgcgctgcaggtcaaggtggacggccgcgtcaagtggaaggtcggcagctgggtctccggcagctaccacctcttcgtcagctgccccgccgtgctctccgcgggctaccccggcgtcaacaacaccgcgtcgtcgctcaagttcgcccagcccacaggatgcagcgtcgaggtgtgatgagtttgtgaccaaacaagtgccctgccccctacgtattgttgcgtgctgctcaaatttcatcttttgggtgcgacggccgccgttaactgggctcttttaatttggttcatgtctcgttgtcaattctcattctcttgtgggccgggggaataaattatttaatttgctttcgccagacggctgtccacaaacttcaactcagttgtaccgtgacgtgtattaattatttgatttcgtccttttattatccgtaaaaaaaaaaaaaaaaaaaaaaaaaaaaagtactctgcgttgttaccactgct

SEQ ID NO: 170487 - DNA, 993 bp, Zea mays
  Clone ID: MRT4577_87065C.1
ccacagcaccgcggatagcagagcagagcggtgagctgcagagcagggcagccgaggtcggtcgtcgtcactcgtcagccatgagcaaggacaagcaccacaagcacgagcaccacctgcggcgttgctgcgggtgcatggcgtcgtgcctcctggcgctggtcctcatcgtggccttcgtctcgctggtggtgtacctggcgctgcgcccctcgaagccgtccttctacctgcaggacctgaagctgctcaggcccatctcgctgggcgacccgtcgctgacggcgtcggcgcaggtgacgctggcctcccgcaaccccaacgaccgcgtgggcatcttctacaagcgcctggacgtgttcgtcacctaccgcgacgaggccgtgacggtgcccgtgtcgctgccgccgcagtaccagggccaccgcgacttcaccgtctggtcccccgtgctgtcggccgagtccgtgcccgttgccgcctacgtcgccgacgccatgaagcaggacgtcgccgcgggcttcgtcgcgctgcaggtcaaggtggacggccgcgtcaagtggaaggtcggcagctgggtctccggcagctaccacctcttcgtcagctgccccgccgtggctctccgcgggctaccccggcgtcaacaacaccgtgacgtcgctcaagttcgcccagcccacaggatgcagcgtcgaggtgtgatgagtttgtgaccaaacaagtgccctgccctgccctgcccccaacgtattgttgcgtgctactcaaatttcatcttttgggtgcgacggccgccgttaactgggctcttttaatttggttcatatctcgttgtcaattctcattctcttgtgggccgggccgggggaataaattatttgcttccgccagacggctgtccagaaacttcaactcagttgtaccgtgacgtgtattaattatttgatttcgtccttttattaagaaaaaaaaaaaaaaaaaaggccccta

SEQ ID NO: 170488 - DNA, 1171 bp, Zea mays
  Clone ID: MRT4577_87066C.1
cccgcttggtgtgccactacagttttttttaaaagccattacgctttcctagaccgcacggctcagtcaccaacccactcatcactcctcactcactcactcaaaagttcaaaacgaaagccagctcagctcagctcagctcagctcatctgctcacacctcacacccacaggccggccgccacagcaccgcggatagcagagcagagcggtgagctgcagagcagggcagccgaggtcggtcgtcgtcgtcgtcgtcagccatgagcaaggacaagcaccacaagcacgagcaccacctgcggcgttgctgcgggtgcatggcgtcgtgcctcctggcgctggtcctcatcgtggccttcgtctcgctggtggtgtacctggcgctgcgcccctcgaagccgtccttctacctgcaggacctgcagctgcgcaggcccatctcgctgggcgacccgtcgctgacggcgtcggcgcaggtgacgctggcctcccgcaaccccaacgaccgcgtgggcatcttctacaagcgcctggacgtgttcgtcacctaccgccgacgaggccgtgacggtgcccgtgtctctgccgccgcagtaccagggccaccgcgacttcaccgtctggtcccccgtgctgtcggccgagtccgtgcccgttgccgcctacgtcgccgacgccatgaagcaggacgtcgccgcgggcttcgtcgcgctgcaggtcaaggtggacggccgcgtcaagtggaaggtcggcagctgggtctccggcagctaccacctcttcgtcagctgccccgccgtgctctccgcgggctaccccggcgtcaacaacaccgtgtcgtcgctcaagttcgcccagcccacaggatgcagcgtcgaggtgtgatgagtttgtgaccaaacaagtgccctgccctgccccctacgtattgctgcgtgctactcaaatttcatcttttgggtgcgagtgcgacggccgccgttaactgggctcttttaatttggttcatgtctcgttgtcaattctcattctcttgtgggccgggccgggggaataaattatttaatttgctttagccagacggctgtccagaaacttcaactcagttgtaccgtgacgtgtattaattatttgatttcgtccaaaaaaaaaaaaaaaagggcggccgc

SEQ ID NO: 170489 - DNA, 1622 bp, Zea mays
  Clone ID: MRT4577_87067C.1
cattgggtacctcgaggccggccgccacagcaccgcggatagcagagcagagcggtgagctgcagagcagggtagccgaggtcgtcgtcgtcgtcgtcactcgtcagccatgagcaaggacaagcaccacaagcacgagcaccacctgcggcgttgctgcgggtgcatggcgtcgtgcctcctggcgctggtcctcatcgtggccttcgtctcgctggtggtgtacctggcgctgcgcccctcgaagccgtccttctacctgcaggacctgcagctgcgcaggcccatctcgctgggcgacccgtcgctgacggcgtcggcgcaggtgacgctggcctcccgcaaccccaacgaccgcgtgggcatcttctacaagcgcctggacgtgttcgtcacctaccgcgacgaggccgtgacggtgcccgtgtctctgccgccacagcaccagggccaccgcgacttcaccgtctggtcccccgtgctgtcggccgagtccgtgcccgttgccgcctacgtcgccgacgccatgaagcaggacgtcgccgcgggcttcgtctcgctgcaggtcaaggtggacggccgcgtcaagtggaaggtcggcagctgggtctccggcagctaccacctcttcgtcagctgccccgccgtgctctccgcgggctaccccggcgtcaacaacaccgtgtcgtcgctcaagttcgcccagcccacaggatgcagcgtcgaggtgtgatgagtctgtgaccaaacaagtgccctgccctgccctgccccctacgtattgttgctgttgcgtgctactcaaatttcatcttttgggtgcggtgcgacgccccccgttaactgggctcttttaatttggttcatgtcctcgttgtcaattctcattctcttgtgggctgggggaataaattatttaatttgctttcgccaggcggctgtccacaaaaaaaaaaaaaaaaaaattttaatttggttcatgtctcgttgtcaattctcattctcttgtgggccgggggaataaattatttaatttgctttcgccagacggctgtccacaaaaaaaaaaaaaaaaaaaattttaatttggttcatgtctcgttgtcaattctcattctcttgtgggccgggggaataaattatttaatttgctttcgccagacggctgtccacaaaaaaaaaaaaaaaaattttaatttggttcatgtctcgttgtcaattctcattctcttgtgggccgggggaataaaatatttaatttgctttcgccagacggctgtccacaaaaaaaaaaaaaaaaaaaattttaatttggttcatgtctcgttgccaattctcattcttttgtgggccgggggaataaaatatttaatttgctttcgccagacggctgtccacaaaaaaaaaaaaaaaaaaagttaatttgggtcatggctcgttggcaattttcattctcttgtgggccgggggaaaaaaaaatttaatttgttttcgcccgacggctgtcctcaaaaaaaaaaaaaaaaaaaattaaaccgggttcagggcttggtgcgaagtcccattcttttgtgggccgggggaagaaaatatttaattttttttcttcagacgggtgcgcc

SEQ ID NO: 170490 - DNA, 641 bp, Zea mays
  Clone ID: MRT4577_87068C.1
gtccggaacactccctgaggtcgacctcactgctgtccgcgccacgctgtccggcccacgcagtacgaaacgcccgacatggctcgcacgcaatctgccgcagcgggcgccgagggggccgaagcgctgctgctagcagcggcggcaacgacctcggaggccgacatcacctgcagccaggagagctacgccatcgcgcactgcctctactacgcccgcggcacggcgtccggcccctccgagagctgctgcagcggaggcaggaacccaaagagcgccgacagcagcgccacccacaggacgcgccgatctgacaactgcactctaagacacgccagcagcgggcgtcagcggcctcaacgccggaaacacccccagcatcccgtccaagagctagcggctagcaaaactctacaccatcagcacctgcacctactgctgcaaggggaactaacatatacaccacgcacgacaacgagtcgactgatcgagcgaccaaccattccgcccatgccggcggacgcatcatcagaacgtaggatgatgacacatatgaatctaccgtgatgatcgatggtactagactactgctatgtgctactaaataaaatctctccgagtgtgcacgtacgcttgcatgt

SEQ ID NO: 170491 - DNA, 1262 bp, Zea mays
  Clone ID: MRT4577_87069C.1
aattgtgctgtgctagcaagggaagggaacccttttgagtggacatgcatgcgctgtgtttcgtgttgtgtagtgtagtgtagtgtaggggtagcccgcttggtgtgccactacagttttttttttaaaaaaagccattacgctttcctagaccgcacggctcagtcaccaacccactcatcactcctcactcactcactcaaaacgaaagccagctcagctcatctgctcacacctcacaggctcacacccacaggccggccgccacagcaccgcggatagcagagcagagcggtgagctgcagagcagggtagccgaggtcgtcgtcgtcgtcgtcactcgtcagccatgagcaaggacaagcaccacaagcacgagcaccacctgcggcgttgctgcgggtgcatggcgtcgtgcctcctggcgctggtcctcatcgtggccttcgtctcgctggtggtgtacctggcgctgcgcccctcgaagccgtccttctacctgcaggacctgcagctgcgcaggcccatctcgctgggcgacccgtcgctgacggcgtcggcgcaggtgacgctggcctcccgcaaccccaacgaccgcgtgggcatcttctacaagcgcctggacgtgttcgtcacctaccgcgacgaggccgtgacggtgcccgtgtctctgccgccgcagtaccagggccaccgcgacttcaccgtctggtcccccgtgctgtcggccgagtccgtgcccgttgccgcctacgtcgccgacgccatgaagcaggacgtcgccgcgggcttcgtcgcgctgcaggtcaaggtggacggccgcgtcaagtggaaggtcggcagctgggtctccggcagctaccacctcttcgtcagctgcccccgccgtgctctccgcgggctaccccggcgtcaacaacaccgtgacgtcgctcaagttcgcccagcccacaggatgcagcgtcgaggtgtgagtttgtgaccaaacaagtgccctgccctgtcctgccccctacgtattgttgcgtgctactcaaatttcatctctgggtgcgccggccgccgttaactgggttcttttaattttgttcatgtctcgttgtcaattctcattctcttgtgggccgggggaataaattatttgctttcgccagatggctgtccagaaacttcaactcagttgtaccatgacgtgtattaattatttgatttcgtccttttattaaaaaaaaaaaaaaaaaaaaaaaaaaaaaaaagcggcc

SEQ ID NO: 170492 - DNA, 260 bp, Zea mays
  unsure (1)..(260): unsure at all n locations
  Clone ID: MRT4577_8706C.1
cccccggactcttccccagactcgactgagatcgctcgaccgtcatcggcgccgttccacgtcgctcgcggagcctcccgcccgacagtcttcggcctcctacatcatnnctccatggcgactggccccctcggaccgtgctcgccgtggagcctcctggcagcgcgagtgccggcgtgcgccatgccgctgctccgtggtgccccgctgttcgagaaggctggccgaccatgcagtcggcagcccgcgtncgtggaagc

SEQ ID NO: 170493 - DNA, 837 bp, Zea mays
  unsure (1)..(837): unsure at all n locations
  Clone ID: MRT4577_87070C.1
cccacacgtccgcccacgcgtccgcagcacaaggagtacaagctcaaacaatagcgaacttttaccttgcatttgaatcaaatttgagcatcattcctgtgattaacaagattgatcaaccgactgctgatccagataatgtaaaggatcaattgaagaggccctcgcgtccgcccccgcgtccgcccccgcgtccgtctgccaagactggtagaggccttgaacaggtattgcctgctgttattgaacgcataccttccccgcccgggaaatgtgatgcacctgtacggatgttgcttttggattcctactatgatgaatacagaggagtgatttgccatgttgctgttgttgatggtgctctgcgtaaaggtgataagattgcttcggctgcaactagccgtgcatatgaagttcttgacgttggcattatgcaccctgagcttacacctactggagttctctacactggacaagttggatatgttattagtggaatgcgttcaactaaagaagcacgcatcggtgatacccttcaccaggcaaagagtactgttgagccacttcctggtttcaagcctgtaaaacacatggtcttctctggtctctatcctgccgatggttccgactttgaagctcttagccatgcgattgagaaactaacatgtaatgatgccagtgtctctgttacaaaggagacangtaatgcacttggcatgggattcagatgtggcttcctaggattgctacacatggatgtgttccatcaacggcttgagcangaatatggagctcaagtcatatcgaccataccaaccgtaccttatatttttgata

SEQ ID NO: 170494 - DNA, 1166 bp, Zea mays
  Clone ID: MRT4577_87071C.1
aaaaaaaaaaaacaaaaaaaaaaaaaaaaaaaaaaaaaaaaaaaaaactcgtcatgcgcatggccgccgaccgccaagccgagctccaccgcctctcgcagcaccgcgccgtctctgactttccgcatcgcaacagaatccatgcgctgctccggggtcggtttctgcgcaacagcggtttaccagaggagaggaggcccccatctgtggccgcaagggagcttggccagctgcggcaaaggcatcctgtctctgtttgaggaatgggaggctatcaatgatttaagagctgatatggctagacttcagcaaggcatgagccatatgcaaaggatgttggaagcttgcatggatatgcagctagagttgcagcgttctgtaaggcaagaagtatcagcagccttgaatcgtttcattggggagcaaggtggtgaaagtaaagaaataatcgatgatggatcgaaatggataaatgtgagaaaagggacctgctgcatatgctgtgagactccgattgactcccttctgtacagatgtgggcacatgtgcacttgctcgaaatgcgcaaacgaattggttcgaggtggagggaaatgcccgttgtgccgcgcacccataatcgaggtcatccgagcatacttcatcatgtagatacaaaaggaagacagcaagaagatagaagaggcccaaattgtttttggtctgtgtggagtcgttagcgggttgtgtattcaattttgttcattctctctaatgcgtttggttaagtttttttccggcttcatttcgttttggtctgcttgccctattgtaagtaatgtacggttttgggtgtggcggcaggacgggaaggtggtcttctctcattaggacttgggtcactgctaattatgttccacaacgactaatggggttggaggttgtcgaaacacgagatgaggaaacttttggtatctttttgttcgtgtagcaccagcaaagtgcggcttggtcgcttcagtgtttcgtgtgattttgttgttggtcttggctatgtggtcatgatattttaggcttctagtttgcagatggatgtaaaagtggtactttgttgtcatgggcgatgctatttcctggatgtttgctttttctttccgccatagtacaccagatcactctcccgccta

SEQ ID NO: 170495 - DNA, 289 bp, Zea mays
  unsure (1)..(289): unsure at all n locations
  Clone ID: MRT4577_87072C.1
cgcgccggcaaaacangcananggagaaaagagagnacagnacnacacaaaccaacnaggcacncacnacnananaccaggagngacggcacananancacccacggggggggagaggncaaannaaacggcggagaacaccagcagaacaagaacaacaanacacaaacacaagganagagagagggaagacgagcganaanagagcaggcgggcggnnaagaaaaccacaaggaccagcaaacagggcccgcacggacgcgaggggcaacccggggaaaccggaccg

SEQ ID NO: 170496 - DNA, 112 bp, Zea mays
  Clone ID: MRT4577_87073C.1
aggcatttgcatgaacttggtggacatgatgctgatagggatgatggaggccgtgaaaggcatggtgctcggactgtcaggaggctagctggtcctaataatagggttcctg

SEQ ID NO: 170497 - DNA, 856 bp, Zea mays
  unsure (1)..(856): unsure at all n locations
  Clone ID: MRT4577_87074C.1
acatccaacacaattttattttataaggttcagattcacaagtacacgctagtatattacattttattttataaggttcaggttcaataagtagtttgtatattacatgttccaaatccgatagataaacaacatatttaaaaagtcttacaacaagataagtccaaatatagctagttggataaccatctcagttcaccaaaagcataagagggatttaactgagtccaccagcctctactcaatcattattcactacgggactgaaaaagtgatgccctacccatggtagatagtatcaccctaagtcaaatttccccattgggttaccactccctcagatctggactgtcaaaccagttgacccgcatccgtctaacctgctttgtcattggacactggattgtaagttatcgagacatctgaagaggagccagatgcaaatagtgcactagaacttgatgcaatcgaagaaatacgacatgtagatgatgggaactggtgcctgggggttagttgtaccgtctctgtagttgagttcttggtaatgaaattaggctcttcacttttatgtccatccatatgataagataatgtcaatttttgtttcagattattatgtggataaccaacttcatcaatttctggaaaacttattcctaatgccacatctctgtttgcagactcctttagaatggtatctgagatatcactacttgatccaacttccttgacttcttgtgagcatgtatgggactgtgggcttaaataacatgactgcactatgcaatcctggcacccaaaaacctcaatttggagatttttttctcgagccgaattcccagcngccgtggcg

SEQ ID NO: 170498 - DNA, 383 bp, Zea mays
  unsure (1)..(383): unsure at all n locations
  Clone ID: MRT4577_87075C.1
tcggccggggctcgctctcctacagtacacactcgtctcgagcgccgcccgccggccccaaacttccagcaaacccttggcgccgtccacggccatggatttccgccggccgccacgctcctcgtcgggcggcgtggagcccaagatccgccaggtcgggttcttcaccccggacgcctccgcgccgtccgagctcctgcccccctctgccgcggtcccggcgccatcgtcacagcagaggtcggccggggggtcgccgccggcgtctgaagacctctccccggccgactctcccccgtcatgatccctcccccgcgccacgtcgacaacctcgccccggncccaccctcccccgcggncctngncgctggcgcgccggggct

SEQ ID NO: 170499 - DNA, 1334 bp, Zea mays
  Clone ID: MRT4577_87076C.1
gccttggagtcccatcagtaaagcacatgtttcctttctgtgattcctcaagccccatggacttaccgctttaccaacaactgcagctaagcccgtcttccccaaagacggaccaatccagcagcttctactgctacccatgctcccctcccttcgccgccgccgacgccagctttcccctcagctaccagatcggtagtgccgcggccgccgacgccacccctccacaagccgtgatcaactcgccggacctgccggtgcaggcgctgatggaccacgcgccggcgccggctacagagctgggcgcctgcgccagtggtgcagaaggatccggcgccagcctcgacagggcggctgccgcggcgaggaaagaccggcacagcaagatatgcaccgccggcgggatgagggaccgccggatgcggctctcccttgacgtcgcgcgcaaattcttcgcgctgcaggacatgcttggcttcgacaaggcaagcaagacggtacagtggctcctcaacacgtccaagtccgccatccaggagatcatggccgacgacgcgtcttcggagtgcgtggaggacggctccagcagcctctccgtcgacggcaagcacaacccggcagagcagctgggaggaggaggagatcagaagcccaagggtaattgccgcggcgaggggaagaagccggccaaggcaagtaaagcggcggccaccccgaagccgccaagaaaatcggccaataacgcacaccaggtccccgacaaggagacgagggcgaaagcgagggagagggcgagggagcggaccaaggagaagcaccggatgcgctgggtaaagcttgcgtccgcaattgacgtggaggcggcggctgcctcggtgccgagcgacaggccgagctcgaacaatttgagccaccactcatcgttgtccatgaatatgccttgtgctgccgctgaattggaggagagggagaggtgttcatcagctctcagcaatagatcagcaggtaggatgcaagaaatcacaggggcgagcgacgtggtcctgggctttggcaacggaggatacggcgacggcggcggcaactactactgccaagagcaatgggaactcggtggagtcgtctttcagcagaactcacgcttctactgaacactacgggcgcactagacttcgtaattggctgtgtgacgatgaactaagtttggtcatcgcatgatgatgtattatagctagctagcatgcactgtggcgttgattcaataatggaattaatcggtgtcgtcgatttggtgatttccgaactgaaaaaaaaaaaaaaaaaaaaaaaaaaaa

SEQ ID NO: 170500 - DNA, 423 bp, Zea mays
  Clone ID: MRT4577_87077C.1
gggcaacgggccaattttttaggaaagaaataccagtccttttgattgcgtgttttctaggagccaggaaattggaaccccattaaatgggaggcgacagtctggatgggggtccaggcgaggcacttgactactttttggcttcaacttaaataggatgctagtcgggggttgttttttggtttgcgggtgggaggctgttctaacagctgatggacttgttattggatcgacttttttttttttgcctttgggcatttttctcctaaaaaaaatataagacagatctcctggctgattggttaaaaaaaggttaatttaaaaacttaagtgggtgaaaaaagggggcaatttccctggactggggaccccagaatttacaagcccggattttagtaattcaaataagggcccgggccgggg

SEQ ID NO: 170501 - DNA, 649 bp, Zea mays
  Clone ID: MRT4577_87078C.1
gggccgcttttttttttttttttttacgcgacgaggcatgtcaaatgttgcacgagtagagtcaggcatgatgaatatggctacatgtatttgctatgaatactggtgtgatcctgatgcgcagatgacggacaatgtctataattgatctgtgctagcccgacaccgctgttcagagtccgaaccacctcttcttctcggccatagctcgtcgagccggcgcggacgcagacgggaccgggagtccagtaagcgccggggcctcgctggagatgacgctgaggatgctggcggtaccggtcgggagcacggccgaggttgcgttcatggtggggaggacggcagaagtagcgttcgacgccgaagtcgagttcgacgtagcgttcgtggcggcctcaacaaccgactccgggagctcgccgtcgttggtgacgttgtacggggttccggcacaagtggcgttcaagtagctgtcgatcgtggcgttggtggccctgttgacggtgatgttgccgaaggcagggaatccctcgttgatcaactcgacggcagcgaagatgcagtcggtgcagagcgcctggggccgggatggcctcgagggcctgcagcgccgaatagtttccgccgagaacggccgtgtcgacttacg

SEQ ID NO: 170502 - DNA, 1396 bp, Zea mays
  Clone ID: MRT4577_87079C.1
atggacttaccgctttaccaacaactgcagctaagcccgtcttccccaaagacggaccaatccagcagcttctactgctacccatgctcccctcccttcgccgccgccgacgccagctttcccctcagctaccagatcggtagtgccgcggccgccgacgccacccctccacaagccgtgatcaactcgccggacctgccggtgcaggcgctgatggaccacgcgccggcgccggctacagagctgggcgcctgcgccagtggtgcagaaggatccgttgcgtccgcaattgacgtggaggcggcggctgcctcggcgccgagcgacaggccgagctcgaacaatttgagccaccactcatcgttgtccatgaatatgccttgtgctgccgctgaattggaggagagggagaggtgttcatcagctctcagcaatagatcagcaggtaggatgcaagaaatcacaggggcgagcgacgtggtcctgggctttggcaacggaggatacggcgacggcggcggcaactactactgccaagagcaatgggaactcggtggagtcgtctttcagcagaactcacgcttctactgaacactacgggcgcactaggtactagaactactctttcgacttacatctatctcctttccctcaacgtgagtttctcaataatttgatgtcttaatctatgcgtgtgtttctctttctagacttcgtaattggctgtgtgacgatgaactaagtttggtcatcgcatgatgatgtattatagctggctagcatgcactgtgtcgcgtcttcggagtgcgtggaggacggctccagcagcctctccgtcgacggcaagcacaacccggcagagcagctgggaggaggaggagatcagaagcccaagggtaattgccgcggcgaggggaagaagccggccaaggcaagtaaagcggcggccaccccgaagccgccaagaaaatcggccaataacgcacaccaggtccccgacaaggagacgagggcgaaagcgagggagagggcgagggagcggaccaaggagaagcaccggatgcgctgggtaaagcttgcttcagcaattgacgtggaggcggcggctgcctcggggccgagcgacaggccgagctcgaacaatttgagccaccactcatcgttgtccatgaacatgccgtgtgctgccgctgaattggaggagagggagaggtgttcatcagctctcagcaatagatcagcaggtaggatgcaagaaatcacaggggcgagcgacgtggtcctgggctttggcaacggaggaggaggatacggcgacggcggcggcaactactactgccaagagcaatgggaactcggtggagtcgtctttcagcagaactcacgcttctactga

SEQ ID NO: 170503 - DNA, 1213 bp, Zea mays
  Clone ID: MRT4577_8707C.1
ccggccgggctgtcctctccccaccacctccttgtatctctcctccccttctggccgacgaaaccctacgcgcgcgcgctgccaagccctcgccgccgacgcctactccgactccgacgccgcagtagtgatgtacgccgacaggtcctcgggcaggaaacgctctgtaatggaccgcctcgggtcgggcggcggctcgcgctcgcggtccgacgacgcaaaaaggttttgccaggatgatgggacatggagacgtgagctttataaggattctagaggaactcagacttcatctgaacctacttccagaaatctggaatcgaacaaaaaatcccaagtgcagcaaaaggttgtgaagaaattaccagtttcagatcttcgtggaaagttatctggtgtcgcgagccagcgccctcaacttagcagtactgttcaggtcccaaaacctgtaaaagaggttattaagagcaacaaacctgttcaaaagagagaccccgctccaactactgcccctcctgacatcaagaaacccagtgcacctgcacctgtaccagcaccatctgcactaccaaagcaatcccagaacaagattgatgcttcgcttgacagtttactgaagtctcttgatctagagaagtatttgataaatttccaggctgaagaggttgatatgaaagcattggtttacatgaatgaagaagatatgaagtctttaggaattccaatgggtcccaggaaaaagatactatcagcattggctcacagaaagaacaagtcctcgaagtcattgcctaccagtaccagttgaggcatctttaagcttgtgtggtagctagacaacttgttgatcttggatatgtgcaagtgcatcatcgacctgcagagttaactccactgacgagcaagattcctatccatcaaggctgatgcggtgtataagtagagaactccgtgatgttggtagttgaaggcaaccaactgattgttgatgtccctcctattctgtgatctccggaatatttgttgatcattgggtgttaattcatgatgatgccttggggattgtttccccttgtccggcaaacccaattcttgcttcttgcgtctcccctactgcatatccatccaaaaagaattgagttcacagagaaatgcttgagtttaactaagttcacagaaaaataacaggcaacatttatgtctccaaacaggt

SEQ ID NO: 170504 - DNA, 314 bp, Zea mays
  unsure (1)..(314): unsure at all n locations
  Clone ID: MRT4577_87080C.1
aaaaaaacacgcgcaagggggaagaaaatttagtttctggggggaaggaaaaggggcacacctaccacacaaaaaaaagatcacaaaggcattctggctactggacctttttttcaaaaagaggaggacttttttttaagggtaacaaaatcatttttacccttggtgggaacgttttgggtgctgggccgtaacggggctagggacgggcgtgccaaggtccccccacatcccgacggtttttttttcaaaaagattaaaagaggggcgggtaaaaaaaaaaagataaccttnaaacannggaaagggactag

SEQ ID NO: 170505 - DNA, 584 bp, Zea mays
  Clone ID: MRT4577_87081C.1
agagatcaccacactgctcttagtgccaggacctagagaggggagcgtggagagggcatcagggggccttggagtcccatcagtaaagcacatgtttcctttctgtgattcctcaagccccatggacttaccgctttaccaacaactgcagctaagcccgtcttccccaaagacggaccaatccagcagcttctactgctacccatgctcccctcccttcgccgccgccgacgccagctttcccctcagctaccagatcggtagtgccgcggccgccgacgccacccctccacaagccgtgatcaactcgccggctacagagctgggcgcctgcgccagtggtgcagaaggatccggcgccagcctcgacagggcggctgccgcggcgaggaaagaccggcacagcaagatatgcaccgccggcgggatgagggaccgccggatgcggctctcccttgacgtcgcgcgcaaattcttcgcgctgcaggacatgcttggcttcgacaaggcaagcaagacggtacagtggctcctcaacacgtccaagtccgccatccaggagatcatggccgacgacgcgtctt

SEQ ID NO: 170506 - DNA, 826 bp, Zea mays
  unsure (1)..(826): unsure at all n locations
  Clone ID: MRT4577_87082C.1
attgggtccctcgggccggccggaaaaaaattattgtaaacggcgtttactacatgagctgtcaatttcactcttgaaaggtcaaaagatgtcaaacagacaaagtgatgacttgtgcagcatttgttcagatggtgggcaactactcctttgtgatacctgtccaagagcttttcatagagaatgtgttggcttatcttctgccacaaagggaacttggtgttgccgatattgtgagaatagacaacagagggaaagttgtttggcatataacaacaatgcaatagctgctgggagagttgaaggagttgatgccttggaacaaatattcacgcggtcgatacgtattgctacaacacttgagactggatttggtggttgcgcactgtgcaagtaagtgtccttccatggcatgttgcttgtatatccaccctggccttcttttcttttgtactgataataaattacatgtactttcaatcttacctaaaacatttcgtatgctggcagagaaaatttggcaaacttctcatcaagtaatgatatttgttgaataagctggttaatgaatcggaagctcaatgttcgagcgctaaatctctttacccatttcgaactctctgattacttttgcatcaatgttagtttcattaatcttactttaagctttatttgccctagttaattctgtgttagcattagtcgtggttgtttatggggtgtttggcgctaagtattgaccagtttgtgggaagtcatatcattgntaccttctatcanaaaagttacatattgnttttcgtttaatgcaacttgccaagtacta

SEQ ID NO: 170507 - DNA, 288 bp, Zea mays
  Clone ID: MRT4577_87083C.1
acacaaccacccacagtttggatggcgacatgtaacttttcgagaccttacatttttgtgtcatgctgcgacgatatattgataatagtggaagaactggcacgcgggcgaactacctcaggaatgccatatatcttcccatggccaaaacacaagattcctcagaactcgatgaatgacctgatagtttggtatccatgactggccggaagcgggctattttcagggcgaatggacatttttggcttctaaccagcgtttttagctttaacggctccttgcaagacc

SEQ ID NO: 170508 - DNA, 293 bp, Zea mays
  unsure (1)..(293): unsure at all n locations
  Clone ID: MRT4577_87084C.1
tcccctggccctgctcgtcgtcttcctccgaacgcgcgcgggccgccgacctgcttgtgctcctggaggagcgcgcccggcgggcaggcgacgcagtccagcggcgggttgaggaagaaggcgagcgaccggnggatccccgtnctgccgnnccctgctcctcttcctcgggtcgggcgctcgttatttattcttcctccagncctctatgggggggggggtggaccgtnccttgnttagattactgaagctaggttgctgggatgattaagaggtattggtttatttagtgt

SEQ ID NO: 170509 - DNA, 110 bp, Zea mays
  Clone ID: MRT4577_87085C.1
attcggctcgagcccaaacgctcagatttttttacggaacgagctctcctatgaaaatggcgtgagacctaatataaccctgtagcagttccacctgctacttctacctc

SEQ ID NO: 170510 - DNA, 214 bp, Zea mays
  Clone ID: MRT4577_87086C.1
cacactcactcatacaacgtgcgattcacactctccaatacctcaacactatggagccccagtttttacccccttatggccctttatcccttttaattgagttcacaaaacgccattttattacaatgtattcattctctcttagctcccttttttcccccatacttccactcattattaaattagcttgaaaaaacccacctttccaacctta

SEQ ID NO: 170511 - DNA, 575 bp, Zea mays
  Clone ID: MRT4577_87087C.1
gagaagaaccaaacacaattattgcaaagtttatctcttttacttattagtattacaaagttttgagttgcatgtttcaaagttgtgctactgctgcccaatggaagtcatatcatacataaaaaatcatgttttgatgcccagattaactgttaattgcatgctcaagatatggttgcatttgaccatgttaccttgctgtgaaaacttcatttagccactagttatttggcacatctgagaagcggcaacagtgacttcaaccgctttatcaatcttttcttaccatatgctgctgagagagaatgatgcaagtaacaggtgctggaaaacacaggtaccagaggtggaagatgattgtagttggctagttgcttatctgatagttttagacacttagacataatattgtgaattttgtttctgcttcatctgaaggaggctctgggcccatgcctgcatacaccactggtcattgataatttggtatctccttgtgatggtgttaaactaagccaattttccttcccaatcttatcagggcagagtgagtacatctgacgtgtttggtgtca

SEQ ID NO: 170512 - DNA, 196 bp, Zea mays
  Clone ID: MRT4577_87088C.1
gcagcgtctggacccccgtccgccgttgcctatcccgcttccttaggtccgaagccacttatcgccgctggggaaaattccaaccggccgcttgtccatgaagaaggtccgatccttgaaccccgcgatgtaaccgccggtccagcttcctgaccagcccctacgcccgtgatagcagcgccccccgcttcgcaag

SEQ ID NO: 170513 - DNA, 237 bp, Zea mays
  unsure (1)..(237): unsure at all n locations
  Clone ID: MRT4577_87089C.1
cccacgcgtccgcccacgcgttcgtccacgcgttcgaccacgcgtacgcccacgcgtgcggcagcgtacaagcaatgtggtattattgcgatgcgttgatcatgcacaacagcagcaaggcggatgggaggcagttgcagcaatggatgctattgnaaaaatcgtagaaattgcaccaatcaaggtttatgaaggtgcaacattttatactatgattaacaggactaaggatggtaa

SEQ ID NO: 170514 - DNA, 559 bp, Zea mays
  Clone ID: MRT4577_8708C.1
ggtgttttttttttttttttttttttttttttacaaaagacttaaatatttcaatttgcagcttgctaatgtccaaaactcacaacattattacaataagactgggacagtgacaacgagcacaaacatcagaaaatttagcagaacacatgggggggttggacatcatgatatgtggctgcgggcataacaaacaaaagtgttacaagcctacttgagattgataatcagcaagaaatatctaaaccggtatttatataatgaaaagatgcagaaggaaactatgcatataacggagcagcagaaacaggccgattgagatataacaaaagaagtcgttccaagagatctaagacgatctattaagtagccatcaaatgatcgtgcaaaaagtccgatagcatggactgcatggttaatcatgctcatttgaagaaacagggcagatttcatctcatcatcatggctcatcagtgaccacactttgaatatatgctggaaacacatcccactggattcgggataaggagcctataacatcttacttttcaaacatctc

SEQ ID NO: 170515 - DNA, 137 bp, Zea mays
  Clone ID: MRT4577_87090C.1
atatgatcattagtatttcagtcacagactcacatgcatggatgtaaagctaagaattcactttccagattcgaaatccactcagtcacaatcagcttgttgatgcgacacaaatcaaacatccattttttttttgc

SEQ ID NO: 170516 - DNA, 232 bp, Zea mays
  Clone ID: MRT4577_87091C.1
ctcacgcgtctctagacctcgttcaacgaagtgcccaaactcacgtgcagcgcaaggtgtggaccacgcatggcctgtggtattttaacgtcacttaatttttgccattcttcccaaggtcaatttaattgtggtgatcctccttttaacgtatgtctcccgggaggttattgaaagtttgtgagctttgcgttagcactactaggagcgcgacaaattaaaaatttgtagc

SEQ ID NO: 170517 - DNA, 197 bp, Zea mays
  unsure (1)..(197): unsure at all n locations
  Clone ID: MRT4577_87092C.1
cngacgccgattcatttactcatttctccatcattatttccaaattaacatattctattttctaacaaattttatcattttacaccattttcacagatttcacttatttttttttctatgtatcctacacaacaaactacattcctatcttattaccccaatataaaattaaccaacatctttaaaactttctcata

SEQ ID NO: 170518 - DNA, 927 bp, Zea mays
  Clone ID: MRT4577_87093C.1
atgaagataaagaagaaagagtttctgtcactgaagcagagaagcatgtcagtcagcgagtaccacgacagattcattcagctctcaggatatgcacctgatgaagtagctgaagatgagaggaagcaagagcacttcattgaaggactcaatagacctctacagtatggtccagtggctcacacatttccgtcattccaaaggctgcttgacaaggccctagctattgaacacaagcgtgttcagctgggagatttgaagaggaaggcgatatcccaggggttaatcaagtcagcgctgatgctactgctgaaggggctgacattgcacttgaagaaagatggatcacaaaggatgtgtgtggattatagatcccttaatgatgttactgtgaagaacaagtatccgttaccctgcattgaggatttatttgatcagatgagaggtgcaagggtattcccaaagattgatctccgatcgggttatcaccaaatgaagattaggccatctgatattcccaggacggctttctcaacccgatatggtttatatgaattcacagttatgtcatttggactaactaatgcacccgcctattttatgaatatgatgaataaggtgttcatggagtatcttgacagattcgtcgtggtgttcatcgacgatattcttatttattccaagaatgacagtgatcatgaggaacatctgagatttgtgctacaaaagctacgggataatcaactctacgccaaatacagtaaatgcgagttctggattgacgaagtgccaatccttggacatatcatttctaatggtgggatatcagtggatcctgctaaagtcaaggagatagtggagtgcagtatacccagtacaattactgaagtctggagtttcttgggacttgcaggctattatcggtga

SEQ ID NO: 170519 - DNA, 2460 bp, Zea mays
  Clone ID: MRT4577_87094C.1
atgagctacaagccacctaccttcgctagctctatgaatcctcttcacgctgatgattggttgaagtctgtggaaaagttgctgattattgcacagtgctctgaccggaagaaggttctctatgcttctggtcgtcttactggtcctgctgctgattggtgggattcttacagtactgcccacgatgttgctgatactatcacatgggcggagtttgctactcagttcagaaactatcatactcctactcgactgatgaagattaagaagaaggaatttctgtcgctgaagcaggggagcatgtcagtcagcgagtaccacgacagattcattcagctctcaagatatacacctgatgaagtggctgaagatgagagaaaacaagaacacttcatcgaaggactcaatggacctctgcagtatgctttagtggctcatacatttccattattccagaggctgctggacaaggccctagccattgaacacaagtctgttcagctaggggacctgaagaggaagaacaagcagcagactacaggatctagcaagggattcactattgccagggttaatcaagtcagcgctgatgctactgctgaaggggctaacatcgcacttgatgggaagtttgttggtgacaacatccgtgtggttagggattttccatatgtctttccagaggagttatcaaggatgccaccagatagggaagttgagtttgtcattgatctcttacctgggactgctcctatttctaaacggccatacaggatgtccgcagaagagttaaaagaacttaagaagcagttaacagagttacaggaggatgggtacatttgtctgagttcctcaccttggggagcgctagttctgtttgtacagaagaaagatggatcacaaaggatgtgtgtggattatagatcacttaatgttgttactgtgaagaacaagtattccttaccccacattgagtatttatttgatgagatgagaggtgcaagggtgttcatggagtatcttgacagattcgtcgtgttattcatcgacgatattcttatttattctaagagtgatagtgatcatgaggaacacctaagattggtgctacaaaagctacgggataatcaactctacgccaagtatagcaaatgcgagttctggatcgacgaagtgccattccttggacatatcatttctaatggtgggatatcagtagatcctgctaaagtcaaggagattgtggagtggagcatacccagtacatttactgaagtccagagtttcttgggacttctacccgatgagattattgaggatttcagaagactcaacctaggaatagttgcgcatactgaaggagttactattgaagtgaaacctaccttggaacaagaaatccgtaagggtcagataggtgatgctaaaatacaagagatcaaggatcttattactgaaggtagagatccagaattcacggaggatgagcaaggaacagaagcccatgactctgattattctattcatcctggtagcactaagatgtatcaggatttgaagcagaagtactggtggtatgggcttaaaagagatatggctgcacacgtggctatgtgtgatgtgtgtcaaagagtcaaagctgaacatcaaagaccagctgaactattgcatccattgaagatacccgaatggaagtgggaagaaattgccatggatttcattactgggttgcctcgcaccccgaaagggtatgatgccatatgggtgattgtggatagactgaccaaagtggctcatttcattccggtcaagactacttataaaggttctcagctggtagagttatgtatagcttggattgtgtgtttacacggagtaccaaagaagatcgtgtctgatcgaggatcacagtttacctctagattttggaaaagctttcatgagaatatggatacgaagttgaacttcagtttggcctatcaccctcagactgatggtcagactgaaaggactaatcaagtactggaagatatgttgagagcttgtgccgttcagcatgaggcagaagaacaagtccgcataatctgggagaacttgagggtagctcaaaccaggcaaaagagctatgctgataatcgaagaagacccgtggagtttgaggaaggtgatcatgtgtacctcaaggtgtcaccactacgtggaatgaggacattcaaagtcaaaggcaaattgtcccctcgctttattggaccctttagaatctttaggcgagttggggagatggcataccaactcgagctacctgataatctgtctgatgtgcatgatgtattccacgtgtctcaacttaagaagtgtctctgtgtccctgaggaacagttaccaatagaagagctcggtgttcagggtgatgtgacatatacggaatatcctatcaagattcttgacactttgacttga

SEQ ID NO: 170520 - DNA, 1664 bp, Zea mays
  Clone ID: MRT4577_87095C.1
tgagagtagacttcataggcagggaatatacaaggcatcagatgtaacattgtcaccttctgctgtcgtcggcgcaaattctgttgttggtagtgtgactagtattgcaggtcactgcaaagttttaaattcagttattggacaaggctgcaagattgggaaaaatgttctgattaacggctcatttatatgggacaatgtcataattgaattctttcatgcattgagtaactctttagtctgtgatggtgtccatctaagagctggtgctgttgttgaacctggttgtgtactgtcatttaaggttgaagttggaaagaatgttgttgttcctgcccactcaaaagtttcattacttcctcagccttcaaatgaagatagcgatgaagaacttgagtatgctgacactaactctggaattgcagatagtccaccattttccagtatgaggagtaatggtgatcaagcaactgttccttcagaagaagatgagttgggaacatccgagactggcacctgtggtgttgtcggttacatatggacaagtgttgatactgggatcatggaagaatggagacaatcaattgccccgattcctaaagaaaagcttgaagagctgcagcatgctgtgcctgatgatgataggtcagaagatgaatccaacaatccaactctaccagataaagatgattcttcagacagtctggttgaggatgatgatcatatttctaagtttgagaaagaggtggaagagacattccaacgagctctgggtggcggcgttaatcgagataatttgatactagagattaatggcctaaggttagcctacagccttcaacatgcagattgtgctggagctgtgttctattctgtcatgaagagtgcattactggctgcacaatctagtaatgatactcttttgaagacaactgctgatgcacttggcaagtggaaggatcttttgcgcaattacaccaagacagttgatgaagagatggagatacttttaaagtttgaggaaatgtgtcaagagaccacaaaagatttttctccgctgtttccaaagatcttgccatacctctatgatacggaggtagtaagtgaagatgcaattttgagatgggcggaagagaaagaacatgctgatgagtctgataaagtttttgttaaacagtcagaggcttttattcagtggctcaaggaagctgaagaggaggatgacgaagaagaggaataaccctggagttgagctggcactcgaattctttcatgcattgtgagcgcaggatctgatttgagtgggtctctcggtgagttctcgcgagcagcaagttttgcaacctgtaattgcctgtacatcaacacaacacaattttgtccctaaccgcaactggtggagagtagcaaggagcgatttggcgtgaatgaaccaaaatgatcccagtgtagatgacatgctataactgtgctatctttgcttggttgacgcttgggcgaagtcttcgccacatttgtttaactggccatcacctgtttcttggcacccagccggcactcgcacagatctttaataaaagcttgtttagataaaaaaacactttttttatcttctttctggtgagaaatgtagtgggaaagaaacaatggacgcttcctcgtgc

SEQ ID NO: 170521 - DNA, 468 bp, Zea mays
  Clone ID: MRT4577_87096C.1
tcggctgagcgaggctaggacgggccttcagacaagggctccggcatagactggtcggccatagttcgactggcgagctgtgcgggcatattcctcagcgcgcgctgcgcgcggcaccatggaactatagagccgctaccccaagaatgacatgcggctggcagtagagtccctatgtgccaggagactcgcgcgacacatcaccagaaccgcgcgggtaccgcaggtcccagcctatgcgcgggtacggccatgctgctgtaactggtaactccctgtcattggagctcgctctgcacaggcacgacaagctctgctcagctaccatgagctatcctgaaaacaacatgggctacagcgagctatgctgagacctggcggatccgctcagagagctcatcgtggtgaacatgtgctggtgcatacggaagacacagcaagcgacattgtatgtatggtgtacacaat

SEQ ID NO: 170522 - DNA, 367 bp, Zea mays
  Clone ID: MRT4577_87097C.1
ctggggtagtgcatgctctccggtcgactgtggcactgctgtaggaggggcggcacatgttccgagtttgatcgggctcaggacctttgggtttctgcccatgcgctgtaatgccacctgcgataatttgatgactgccacgtccttgacgacccattcctccgtgaccagcgaaaggccgaggcagggggccgagcgaggcgaacctgatggtgaacatctgtgggttggtccgcatctgccgcaacttcctacggtgctggcaccggctcgtcctacgcctggctcctcgatatcatggacatgaacgacaccgagggcgaaaagcaggattactagctgctcaaggacgacttcacagctcggc

SEQ ID NO: 170523 - DNA, 225 bp, Zea mays
  unsure (1)..(225): unsure at all n locations
  Clone ID: MRT4577_87098C.1
gggggggggggggggggggggagganngggggnggggggagggggaaaaaaaaaaangagattagggatatgaggtggacctcttatgagggactatgggagagcgcatgcacgcgctacgtgaagcttgggatccttttaagagcgggcggcctcttttttttctttttttttttaataaggcaagaacaaacaggatgaagttcatattatgttggagttttc

SEQ ID NO: 170524 - DNA, 250 bp, Zea mays
  unsure (1)..(250): unsure at all n locations
  Clone ID: MRT4577_87099C.1
aaaacacatttttttttttgggttttatggaaaaggcatggcctaaaaagaaccacttgcatttccaggtctttaattttaatattttcagcgtataccggtntatacagagaacaacttgtgagcagaacatacaattatataagacgagtattggggtaatctacagaaccctcgcctatttttattggggaagcttggtgtttgggttcaaccacaattttacatcttcggcttgggggcggacaaa

SEQ ID NO: 170525 - DNA, 192 bp, Zea mays
  Clone ID: MRT4577_8709C.1
aacctttggtctgatttatgtgcttgataagaatcaagacgtgcctttcccagacccaactagaaatacaggaaattagggccatggggtacataaaatcggacgtcgattacttgatttcacacacattacgaaagtcgtcatagatgcataactatgtactgcagaagttcaaatatatccactcagatt

SEQ ID NO: 170526 - DNA, 257 bp, Zea mays
  Clone ID: MRT4577_870C.1
gcacattggccgggtcaaggcaatgccggaatgatgaccgaacaccagggggcgggggggcaactcccagtttgcacacacacacgacaaataattttttttgggctgtataaaccaataccggggatcggcccgatttctccggcatggaactagaacaggctttggttaaaatctgagaaaaaaatggccaccgggggacagggtggtcccaaaatagtgccaaaaaaaatactggcttgaaaaaacctttgggg

SEQ ID NO: 170527 - DNA, 896 bp, Zea mays
  unsure (1)..(896): unsure at all n locations
  Clone ID: MRT4577_87100C.1
cctcgagcgggccgggaaactaccggggccacaaataatccgatgcctcccaaccgcacgtcgaacggcccacggagcatcaccaccgcggcagctgagctcggccccaacattcagattcttcgaggcgcggcgagccggcgacggcggtcggcgacatggaggccgcggtgcccagccgtgttgcgctctccgcggcgagccgcctcccaaatccccacgccgtgacaggagatagatctttcatttacaagggaagatgccaaagtcttgcaattcctatggctttgtcagcagctgcgccaggcaaaggtggtggtgtgcttgatcggccagttgagaaaactactcctggtcgccagtctgaatttgatgtgaagaaatcccggaaaatgtcgcctccataccgtgtcatcctgcacaatgacaactacaacaggcgcgagtacgttgtcaaggtcctgatgaaagtgatccctgggatgaccgtcgacaacgctgtgaacatcatgcaggaggcgcacgtgaatgggctgtcagtggtgattgtctgttcccagtccgaggctgaggagcactgcacgtcgctcaggggcaacggcctccggagctcgatcgagcccgcgagtggtggctgctgaggttcgagaccttgggtataccttgttttgccagcgtatagtttgtaaatacacagcgtatcaagctaaagctgaaacggattggttatatgcacttatcgatacaacgaagctgagtacccctctcgggtttgtagaagaagaaacatagtattttcggttatgatttataaaatatttagttgcacatgtctactcaaattatagaaattgcttctactgcttntttacagaagactaagaaggacttgttcg

SEQ ID NO: 170528 - DNA, 241 bp, Zea mays
  Clone ID: MRT4577_87101C.1
acgtaagctcggaattcggctcgaggagttgtggcaacccctagtaggaccacacggccgcaaaaacggatgcggaggagttttatgctgagaagcggcgagaccccccacaaacaatgagatcagataaatgtgtggaagaaaacaacgaggtgcgtgacatataccttaatcggcatgaacatgctcgatacttaacccttggcgagggacttaacatacattgtcagggatcccttta

SEQ ID NO: 170529 - DNA, 866 bp, Zea mays
  Clone ID: MRT4577_87102C.1
ctcgagccggcggggacggccccggagcatcaccaccgcggcagctgagctcggccccaacattcagattcttcgaggcgcggcgacggcggtcggcgaaatggaggccgcggtgcccagccgtgttgcgctctccgcggcgagccgccttccaaatccccacgccgtgacaggagatagatctttcatttacaagggaagatgccaaagtcttgcaattcctatggctttgtcagcagctgcgccaggcaaaggtggtggtgtgcttgattggccagttgagaaaactactcctggtcgccagtctgaatttgatgtgaagaaatcccgcaaaatgtcgcctccataccgtgtcatcctgcacaatgacaactacaacaggcgcgagtacgttgtcaaggtcctgatgaaagtgatccctgggatgaccgtcgacaacgctgtgaacatcatgcaggaggcgcacgtgaatgggctgtcagtggtgattgtctgttcccagtccgaggctgaggagcactgcacgtcgctcaggggcaacggcctccggagctcgatcgagcccgcgagtggtggctgctgaggttcgagacttgggggtataccttcagcttgttcgctgcagcaatccaaacagctgcaacagtgtcggcttgtagccagccgaacacgccccttgttttgccagcgtatagtttgtaaatacccagcgtatcaagctaaagctgaaacggattggttatatgcacttatcgatacaacgaagctgagtacccctctcgggtaggtgtaaatcgtgcaagggtaccctgtagaagaagaaacatagtattttcggttttgatttataaaatatttagttgcac

SEQ ID NO: 170530 - DNA, 219 bp, Zea mays
  Clone ID: MRT4577_87103C.1
acataaccaaagcacacccatacccccaaaaacattccccaaaaaaaaacacacactccaaacttagaacacatcttttaaccccgaaccctaccaatgagaggttaacctaacaccaacacccctgaattcagacccaacccaccaatttttcaaaacaacatgtcttattccccgctatcaaacacatggagctattaaaccaccctcattttcccc

SEQ ID NO: 170531 - DNA, 1014 bp, Zea mays
  Clone ID: MRT4577_87104C.1
cattgggtacctctcggggccggccgggaccgggccgataatccgatgccgcccggaccggccggcgaacggcccacggagcatcaccaccgcggcagctaagctcggccccaagattcagaatcaccgaggcgcggcgaggcgacggcggttggcgacatgatggcctcggtgcccagccgtgttgcgctctccgcggcgagccgcctcccgaatctccacgccgtggcaggagatagatctttcatttacaagagaagatgtccaagtctttcaattcctatggctctgtcagcagctgcgccaggcaaaggtggcggtgtgcttgatcggccagtagagaaaattactcctggtcgtcagtccgaatttgatgtgaagaaatcccgcaaaatgacgcctccattccgcgtcatcctgcacaatgacaaccacaacaggcgtgagtatgttgtccaggtcctgatgaaagtgatccctgggatgaccgtcgacaacgcgttgaacatcatgcaggaggcgcatgtgaatgggttgtcagtggtgattgtctgttcccagtccgaggctgaggagcactgcacgtcactcaggggcaacggcctccgaagctcgatcgagcctgcgagtggtggctgctaaggttctagaaatgggtgtatcttgttttgccaagtatagtttgtaaatacccagcatatcaatctaagctgaaactgaaacgggttggttacatgcagttatcgatacaacgaagctaagtacctcttgggtaggtgtaaatcttgtaagggtaacctgtagaagaagaaacatagtatttttggttatgatttatgaaacatttagttacacttggtctaaaaaaaaaaaaaaaaagggccccttcttctgctttttaaaacaatttgaaaaaaaaaaaaaaaaggcttgttcgctgcggcttgctgcggctgcaatccggctgcggctgcggcttctacagtatttttctctctatggattgcagctgca

SEQ ID NO: 170532 - DNA, 579 bp, Zea mays
  Clone ID: MRT4577_87105C.1
gccctcctccagtctcctccctcctcaatcccctccgcctcaacacgcgacgaccccgctcgcgctaggttaccacctcccgtccacccccctcctctcgccatggccggccgccgacgagcaccacgaggaggccagccccctcctggccccgcccgccaacgagaagctccccccggcgcaggatcccgtcaagggctgcgccgacggggtccccgtcgtcatgggcgagccggtcaccgcccctgccggcgccgagccgcgtgaaagctgggactctgggatcctctcctgcctcggccgcaacgacgaattctgcagcagcgacctcgaagtctgccttcttggaagtgtagcgccatgtgttctgtatggtagcaatgttgagaggcttgcagcagcaccaggaacttttgcaaacagctgcttgccttacactggcctctatatgctcgggaactctctctttgggtggaactgcctagccccatggttctctcatcccactcgtacagctattcgtcgaagatacaatcttgagggtagctttgaggctttcactaggcaatgtgggtgctg

SEQ ID NO: 170533 - DNA, 420 bp, Zea mays
  Clone ID: MRT4577_87106C.1
tgaatgggtcggcgaagtggccttcagcggctatgggccggtcgtgcaaacgactggcgcagattgctgtgatggctggcttaacagcgggtatcacctgcaaggcgtgaccgcaaactcggaaagcatgggtgtcggtgtcgctacgacggtaacgacgcacgcggccgggcagcaaccggcgatgtggtcattttgcgttctcgacatggggacgacgacgggtgttccggccgcaccgaatctcagtgtgccgacgcaaacgaactcgattccttcgagcggtggacagcaattcgcgacgaacctgatcgttcacgcgccgtacattgacgaggccagtgtggcgactgcactgacgcttggggaagtcccgaatccggcaccggatctgggggcgcctgggcgacccatcatggt

SEQ ID NO: 170534 - DNA, 547 bp, Zea mays
  Clone ID: MRT4577_87107C.1
tttttcctgctttctttggatatttatcaccttgtacgtggtattctttagacctttctctctacttaatataatgatgcgcagttctcctgcgtgttcgagaaaaaaaatcaatcaatactattctagctacatttctacacaaacgtcactctatgaacagtgtaaaacagtgttttacacaaccatatgcacgatctactggagacagcctacgcacttataggggttttaaaaaaatttgtcccaaaatagatgtacttttagacataggacaacctagctctagtaatttttctcctttctgtatttccaaagtacattagttacatgttagatcaactttagaggtacataggtaatttcctagtagcattgatcttatcattcattacctagaagtgtgtttattttacagagggagtactctatgcacattgtgccgtagcaaaaacctaccacacagcacattacacaatttggcaacctgggcaacagcaggactttatgaaacatacacaacagaaactcgatatcatcaaaagat

SEQ ID NO: 170535 - DNA, 252 bp, Zea mays
  Clone ID: MRT4577_87108C.1
acgccacccgtgcctctcaagctatcacacacacgctacctcatggcatttgactatctctgcatgtgcattattcaaaaagtatgaaaatcatgaacgtaatcaaatttcaattactgatgcacattatcctgagctacattctacatacaccaagcttatacagaaaaccttctgtcgcttatcctaaaacgaatgcttgagaaacttacacacacctgactgacactcacaggcataattgtcacccta

SEQ ID NO: 170536 - DNA, 603 bp, Zea mays
  Clone ID: MRT4577_87109C.1
cccctccccccctcctcccctacccctcccactccccctcggcttcctcgctcgctggttcgctccgggtctccgtctccctccacggtcagctcctcgtgtgatctcgtcgcgtggttagcagggaaacccagaggtggaaagaagctaacccggtgaagactctgaaggaatctgagccacctgcgctccgatctgccatctgaaggacgcggaggaagccccgaatcggggaatttcgtccttccggcacgcccgccctgactggagcaaccacggaggctgtcggaggacctccactgttacatacatactacttggcaggctgaagccccaagtttcctgcgcctgttctagctagttggcgaagaaagatgtcgttccgcagcatcgtccgcgacgtccgagacagcatcggcagcctgtcgaggcgcagcttcgaggtgactgctgcagccgccgccggcggcctctccggacgcaccgccgcgcaacatcgcagggggaggtctcagagcacggtgcacgagctccgggacaccggtgtcgtggtccagcaagacgagagccgctggggcaagctccctcccgagctcctccgcg

SEQ ID NO: 170537 - DNA, 283 bp, Zea mays
  Clone ID: MRT4577_8710C.1
ccgaaatgaggctgcctgctgccgactgggcgcaagtacgtcttcttgctttgactatccgatcactcctcctgaacacaccggaggaacacgaggggaataatcgatgcgcgcgaccaaagaggactgctaggcggccatcacctctgctctcagtccttcctctctcgcgtggacagacacgtcgcggacgtctggcgcctagctacgcagtatccaggtgtctgtcgtgagaagttctgaggtaaattcgagtgcctggagaggcaccgctatgtgcgaa

SEQ ID NO: 170538 - DNA, 3037 bp, Zea mays
  unsure (1)..(3037): unsure at all n locations
  Clone ID: MRT4577_87110C.1
ctcatggagaacggcaagttcctcttatcagctaaaaggagccgcagaacaacctgcacgcagtatatcatctcgtctccctccacggtcagctcctcgtgtgacctcgtcgcgtggttagcagggaaacccataggtggaaagaagctaacccggtgaagactctgaaggaatctgagccacctgcactccgatctgccatctgaaggacgcggaggaagccccgaatcggggaatttcgtccttccgacacgcccgcgctgacacgattccctacccgcccctaaggacctcttgaatgccgattttctcgcggcggcacggtggccaggaacaccttgccggcctgggtgctgaggaacacgcgggcggacccgtccgggtgcgccgccatgttgaggtaggagccgttgcagacgcgctccaggaacatgccgcggagcggcagcgccgccgggcgggtggagttgaacgccgctccgccgccgtccaggcacggcgagccgcagaactcgcccgcggactgccacagggtaacggatgtagagacgacgtgagtatcactggtttaatcatagacgttaccttgtaatggcgtgatcatgttcattttggagtgtgggtagtcctctagttttttataacagcgaatccctcgcctacgcccccaaatcgtcgaagccgcacctaaggacctctataatggcaaatttctctctatcagtggagcaaccacggaggctgtcggaggacctccactgttacatacatactacttggcaggctgaagccccaagtttcctgcgcctgttctagctagttggcgaagaaagatgtcgttccgcagcatcgtccgcgacgtccgagacagcatcggcagcctgtcgaggcgcagcttcgaggtgactgctgcagccgccgccggcggcctctccggacgcaccgccgcgcaacatcgcagggggaggtctcagagcacggtgcacgagctccgggacacgggtgtcgtggtccagcaggacgagagccgctgggccagcctccctcccgagctcctccgcgacgtggtccggaggctggaggccagcgagagcgcctggccgaaccgcaagcacgtcgtgtcctgcgccgccgtctgccgcgcgtggagggagatgtgccgggagatcgtgctcagcccggaggtctgcgggaagcttaccttcccggtctctctcaagcagcctgggcctcgagacgggatgattcagtgtttcataaagcgcgataaatccaagtccacgtatcgtctctacttgtgcctgagtactgctgtgctcatggagaacggcaagttcctcttatcagctaaaaggagccgcagaacaacctgcacgcagtatatcatctcgatggacgccgacaacatatcgagatctagcagcacgtacatcggaaagctgaggtcaaacttcctgggcacgaagttcgtggtctcagacacgcagccgcccccatacagatacagcggggctgcaccccctccccctcgtgctgctgggcggcgggcaagccggcggttcgactccaggaaggtctccccgaaggtgccgaccccggccggtgccggtggtggcagctacagcatagcccaggtgacgtacgagctgaacgtgctgagcacgagaggccccaggcggatgcactgcgtcatgcgctccataccggcgtccgcggtggagccgggcggcacggtccccggacagcccgagcggatcctgccccgggcgctgctggaggagcaggaggaggaggaggattcgtcgtcgttccgccgcaccggcaccggcaccacctccttctccaagtcgtcagcatccatcatggaccggtccgtggacttcggcggcagcagcagcagcagcttccgcgacttcagcagcgcccggttctctgacattgtcgacggaggcggcggcggagatggggagcaggatagggagaggccgctcgtgctccgcaacaaggccccgaggtggcacgagcagctgcagtgctggtgcctcaacttccgcggccgcgtgaccatcgcctcggtgaagaacttccagctgatcgccgcggcgccaagcctgcaggctcaggcccccgctgctggggctggggctcctctagccccgtcgtcacagccggctccgcaggaccaggacaaggtcatcctccagttcggtaaggtggccaaggacatgttcaccatggactaccgctacccgctctcggccttccaggctttcgccatctgcttgagtagcttcgacaccaaattggcctgcgagtaaaggagggataggagcagtggaaccggagccttttttttttttttgcattttgttcgtgcatggttgtattctgcttcctgtctgttaacctggaaccgggaccctctttgcattttgttcatgggttcgatgggaatgtgactctttgtttgcgagttttgtaactgtaaactggctaactacaaaggaaacgaggccaaaaaaaaaaaaaaagggggggggggggggggggggggggtccggctcgagggggggccgcgggtacccaccgcgtgatggaagggccccgatnatcgggtgaatttcgtcccttcccggcaccgtcccgtccctgacatcgtattccctgtcccgtccggaaacatgctcgtgcatactgtttactgtgcctgtggcgcgacgcggtggtcgctggtcggtggaatcccactccactatcactagccgccactggcaagtgcgatgcgacggaaccaaggattggattctcctccggcgttgcggcgaatgatggccgatgctgtgattgaaccaccggaacgtggggggcattggctgcttttttaccaggtgggacattgacacggcctgacgggagtgcggagtaggggtgggaacggattgaataggtaaggataggaattcgaatgttataattgaccatattttaatccgattcgcatatgaatctaaaaaaaaaaaaaagttctagatcgcga

SEQ ID NO: 170539 - DNA, 217 bp, Zea mays
  Clone ID: MRT4577_87111C.1
gccccttgtgttttctccatctttgttttcgcttgagcaaaaagaaaaagactcaacggttccaaatggtacaaagacgggaacactgggaccacttcataaacaggtccttgggcataaacccagttcatagatagaaagatttttttcatcggtggggccccttctttttccttcactttaaaatatggggggcgagggcccctccgctcttttt

SEQ ID NO: 170540 - DNA, 291 bp, Zea mays
  Clone ID: MRT4577_87112C.1
ggtcagaccgggggcatatatactcataaggagatgcaaaacgcgtaaatgcctatctctaaacagagaaacctactagctagccatatacgtaaagctattaggcctaccccatgacacaaaaattcttgaagaaccatccggacgaagactcgagaaacacgactagaggactacgcacgtgcgtactacatcagcatcggaaacagtgcagaagatatcacagggcacccatgaataggttctctcgtgcacggcgagagggtggaccaagatactacgtgctagagg

SEQ ID NO: 170541 - DNA, 154 bp, Zea mays
  Clone ID: MRT4577_87113C.1
atctttttttttttcttaatcaacaccgaccacccctttcggtggcgttcctctcttgtcaagactcccctgcatcccaaggaattttaattttctcctcctcacaaaaactgaattttaacatggcaatactgtccccattgattccacaact

SEQ ID NO: 170542 - DNA, 1021 bp, Zea mays
  Clone ID: MRT4577_87114C.1
cctcgaggccggccgggaccggattcccaggacgcagctgcccttgcccgccatgatgcctccacccgtgcagccgctgcgccttcacctcctcttccgctccgaaaccctaatccctctactccggctacgacccagctgcgacgcgccccattgccggaccaggaggtacatctccgttcgcgcctccgctgcacagctcgccgccgcggacgtctcgacggcgcagcagcctgcacttgaacttgggttggaggcagcggcggcgggcttcgtcaccggtaagaggaaggccaccgaggtagcccacgcgtaggttctggagaaatattgttcagaaaggggatacggtggtggatgccacatgcgggaatggcaatgacacgctcgctctgctgaagatggtggctgatgaaacaggccgtggacgtgtttatgggatggacattcaagattctgcgatagagaatacttcctcttttctgaaaatggccgtggatgatgaacatcagcggggactggtaaaactgtttcctatatgtcatagtagaatggaagagattgttcccaaagatgctcctgtcaggcttgttgctttcaacttgggctaccttccaggaggagataaaactgtaatcacagtgcctaggacaactgagttagcattgcgagctgccagcagaattctcagttctgggggactcataagtgttcttgtatacattggacatccaggtggaagggatgaactcgatgttgttgaatcattttcatcaagccttcctgtggatacctgggtgacctgcaaacttcaaatgctcaataggccagtttctccagtactcgttcttctgaacaagaaatgatgacagttccgatacacaaaaagatggggcttttgggggttgacttatgagtaatgacgcttgctgatggagctcaatacagccaactagcttcatgccatccgtgcagacttttgattggcagctgcagtgtaacttgtcataattttgatacc

SEQ ID NO: 170543 - DNA, 2333 bp, Zea mays
  Clone ID: MRT4577_87115C.1
ggcttgaaggataattatgttcagttctctgagctgctggctaaacattgtaggccagttgatacaaaagatacaactagcagtaatgaagtgctttcttctgtgcaaccagagcaagaatctgactggaagctagcttttcgaatatttggaaatttcgcacttttgtcctcagtttttgcatttttttatgtttctgcacacatcatccttgcaagccctagtataattcaaggtcttgagttcccgggcctggacctgccagattctgctggtgaagttgtagtttgtggagttcttgttctacaaggacagcgtgtgctaaatatgattgcacgatttatccaggcgaaaaggcagagaggtgatcatggagtcaaagcacaaggggatggctggttgctgactgttgctctgatggagggaaccaacttggcagcaaccaaatcatctggttactctgatccatatgttgtatttacatgcaatgggaagacaaagacaagttcgattaactttcacacccttgaccctcagtggaatgaaatttttgaatttgacgccatggaagatcctccatcagtgatgaaaatacatgtgtatgatttcgatggaccctttgacgaagttgcatcccttggtcatgctgaagtgaatttcttgaaatataataatatatccgagcttgctgacatttggattcctttgaaaggaaagctggctcaagcatgccagtcaaaattgcatctaagaatcttcttaaacaatacaaggggtactgaagtcgtgaaggattacctggataaagtggagaaagaagttggcaaaaagattgctatgaggtctcctcacacaaacttagcattccagaaaatcttttctttgccaccagaagaatttcttatcaatgattttacttgtcacttaaagaggaaaatgctaacacagggtcgtatttttctatctccaagaatatttgggttttacacaaatctttttggccacaaaacaaaattcttctttctttgggaagatattgaagacatcctactggtccctgcaaccctatcttccatgggaagtccgtctctggttattattcttcgaaaggacagaggaatggatgcaaagcatggggcaaagcaactggacagtcaagggagactaaagttccatttccagtcttttgtttcattcaatgtggcacataaaacaattacagcactgtggaaggcaaggtccttaacccctgaacaaaaggtacagcttgtagaagaggaatcagaaacagaagacttccaaattgaggagggagaatctttgttagggatagaggatgccaaaatgtcaggagttttttcatgtacaaaaccttttgatgtatcaacactaatgggcatatttgagggtggtcctttggagtgccgggtgatggagaaagttggctgtatggactactctgttacagcatgggaacctgtcagagctgatatttaccagaggcaagttcattataagtttgacaagaaatcagcacggcacggaggagaagcaatgagcacccagcaaaagtcccctttgcctaataagaatggctggcttgttgaagaagtgatgacacttgaaggtatccctgttggcgaatgtttcaatctccatatccgataccaactggagagcaatgcatccaagcagaagacatgcacaatccaggtatttattggcatagtatggctaaagagctgcaagaaccgaaagaagatcacgcaggatgtagcaaccagtgcatcttctcgcctgaagaagatattcaaccaacttgagaaggaatctataccagcaaagtaggaaccttgtttttgtctgcgtcctacttttgctgctgcacatatgctggcactatgtttgtccttgctggctgctgcccatgctgagcaaagatcagtgacctaatgaggaagttgcagcacaagccatgaagccaaagccctcaggcagagttttataaagcaacacgaagcaaggaccgcattgcaagatttcagattagagaactaactgtagagcctggaacgtggtttagcttaaccatgtatacataacggtcaaacatcgttctgacttctacaaaaagttaagaggatctgaaattttaaatcttgcctacgcctttttagttagattggaagcaaaaaaagcttccatgaccccagaaaaaaaactattcttttcctgtggtaatttctagaagttttgagataaaaaaaaaaaaaaaaaaaaaaaaaaaaaaaaaaaaaaaaaaaaaaaaaaaaaaaaaaaaaactcgagggggg

SEQ ID NO: 170544 - DNA, 260 bp, Zea mays
  unsure (1)..(260): unsure at all n locations
  Clone ID: MRT4577_87116C.1
ctgtacgcctgaggaccgggaggaacgggggttttacccatttgttactaacatgcgntttttctgccaaaaggggggaccttccaacttcgagcggctcaagtacggggaagggcttcaccccggaaccttcggcggttattggtgaagagggaaacacccacaggggtttttacaccattgggggaggaccagaacccgggggcccagatctttaacccccccaccaggccttccgccgcngcccccctggattacca

SEQ ID NO: 170545 - DNA, 543 bp, Zea mays
  Clone ID: MRT4577_87117C.1
ccgccgcttttttttttttttttttttttttttttttttttttttttttttttttttttttttttttttttttttttgagcaacaaacaggcaagccaccccgcctcaggggaaaaaaacatctggaacaaccataaaacaaaaagaaaggcaggtggggggggacaacatcgcattcataagcaaaaccccccatctaggacctaggagggatcaccacacgaacctcaaacgggcgaggactaacagggatacaaggaatatcatatttggaccaagcaccggggaaaaagaccaagggctcttcctctttttccccccccccctgggacccctcaacctcgggagggggatcccgggaccggggaaacccggccaccagggcggtcaaggtaccctctgccccggggaaccccatttaaaccaaaccctcgcctggggaccagggcaagaaagccctccccctgaacatggccgggaactggtcgctgacgcgggggaacaactcttggatggagggtgagttgccaaccaatggggggg

SEQ ID NO: 170546 - DNA, 373 bp, Zea mays
  Clone ID: MRT4577_87118C.1
atcacaaataatgaaacttctatgcggcaccttagtgctatcttccttcttagggacgctggcgcacttcagaaccaaattcttccaaaccccaaagccagttgatggtgtcaaagtccttcacctctaaaccctagaattgtgcgcctcttccgttcttccaccaatctattcgactccatgttcccccggtcagctttcttccagtgaaggctacatctgatccgttgctcgctcattcctgatctttacaccttgaaagaccggcttaatcctccgctagctactcttagcgaatccacctaatcctccaattgcgcttgaacctgagttcccgaaagctgccactttccttactctgctcaagtccatt

SEQ ID NO: 170547 - DNA, 336 bp, Zea mays
  Clone ID: MRT4577_87119C.1
ggggctgccttggttaaacatcccaaaaaaaaggcccgataatataagggggccaaaaagaatcaccgggcccaagggggctgactgaaaacatgcccaaaggtttggccatccaaaaacgggaattggccggccggaaaatagagaatcaggggattgatcagatgcttcagcacaattttgggaaaacccgtccaaacccccctggggcaaggttttccatcccccaattccccataacactttccactcatgaatatcccattggggctaccggtttcaagagccctccttacggaattgggtagctggaataccccatgggacccgggataa

SEQ ID NO: 170548 - DNA, 171 bp, Zea mays
  Clone ID: MRT4577_8711C.1
caataccgggggaacagtttttccttttcgggcgcgagtttaatattacacaagagatggactacaaggacgttggatcctcgttttcgttcgcccacactttaaactaggctatgggaccacctgcacttattgaaaacggcactcgaattagattacttattctttaat

SEQ ID NO: 170549 - DNA, 328 bp, Zea mays
  Clone ID: MRT4577_87120C.1
gaggattcgaaagttcagtacctggcgtctagtgaagcacgctcccggcgccccgtggtgcgcagcgcaaagtcggcgggacactcgctctttggcggcggcggcataaaggaggtgcgaacgattttttttataggaggtgcgattgatatctggaagactgaaacgaagcccgagcatgactgtccgaggaatcgagaaaaactaatacgtaagattttaatggcccaacattagagtctcccgtgatatcacctaaattccatctttaaattcgttttttatggttttctctaaaaaattttttatttatatctcatttctcttt

SEQ ID NO: 170550 - DNA, 302 bp, Zea mays
  Clone ID: MRT4577_87121C.1
ttttgggcagtctgcgtctgagtaaacccggggtctctataaactccacgggggtgaacatctctccactgtccctaccataggctccaatctagagaaggtccagtacaagaatctatatctcaatgcgtgggatgtcggttgcctccacaaattcaagcccctgaggaggcactacttcaacaacacataggctctgatcaatgtagttgattcactggataatcagagaatccagagagccctagcgcagtctcaggctataaacaatgacccctttatgcttaacagaaccctattgg

SEQ ID NO: 170551 - DNA, 532 bp, Zea mays
  Clone ID: MRT4577_87122C.1
atatacgtacacagttcactctcatctatcctctatctcttcctccatttttggctcgagaaacagagcaatggttcttggactgctggtgagtcccccagccacggtgctatggacattcctgggcctggcgcttctctggcaggtcaagcggctggttgactacacgtggtggcggccgcggcgtctccagagggcgctgcgcgcgcagggcctccgcgggacgccataccgcttccccgtcggcgacctcggcgactacgggcggcagggcaaggaggcgtcgtacctctgcaacaccgtccgggagcacggcaagacgtgcgtctcctggttcggccccgtccccaaggtgaccatcgccgaccccggtgtcacccgggaggtgatgtctaacaagttcggccacttcgagaagctccagttcccgacgctgaccaggctcctcgccggcggcgtcgcggtctacgagggcgagaagtgggtcaagcacccggaggattctcaatcccgctttccctatctagaagtt

SEQ ID NO: 170552 - DNA, 319 bp, Zea mays
  Clone ID: MRT4577_87123C.1
cggggcaaaccaaacccgaaccctggcaaagaccctcggaaccacctaggaccgccaccctaataccaaacccacggcccaaacctataccccctccgcataacacagctaacctcaggacccaccgtccctaacagcatccttggccaccaggagccaagggccccgcgcgaaggctcttcctgcacaaaactagccagcccgacactgccaaacagctccaaaaagaccagggcaaattctacacaccaacatggcagtaaaaccatccaccccacctgctacacagcacctgatcgattcacaccaaccatcccta

SEQ ID NO: 170553 - DNA, 274 bp, Zea mays
  Clone ID: MRT4577_87124C.1
gccgaccgagaacatccgtctccgtgcgtcaccaagagaatggcggacggcgaagttgccgcgccggtgttctgtgatcgggggcaagctcgggggttcgctcaagatcggggatcacgtctgtggtatggccaaaccgtggaagtgcgtgctggtgaggaaatttctcgccgtcgcgcagcaatccatggatccgccgtgcgccgtggattgtgatccactgtgcacgtgacgcgtgaggacacgtgtcacccgaagatcatcagttacctgg

SEQ ID NO: 170554 - DNA, 335 bp, Zea mays
  Clone ID: MRT4577_87125C.1
aaaagaccctcgcggggcactcgacagaatatgaatcatttcaccatgaacatccaagggacgaaccctactttggctttgctatcgaatctaaaaaagcacttacgtacacgttattgggtgcacccttattggccacctactacttaccatttttctaatggcattgaagggacgggcattgtacatcccatccataacacatttggcccgcttcaacccacctggatagtgcttaaaaaaatatccctaacctcctgtagtcgaagataaatgcaccaaaaaaaaccaccttttagaaaccgcccacgaacccccccccaacactacccaaa

SEQ ID NO: 170555 - DNA, 230 bp, Zea mays
  Clone ID: MRT4577_87126C.1
ctacatcctcatagttcttacctatgaattctaatccactgggacaggggtccatgacccagagacttggccagttcattcatatccagggtgatcagaggaagaacgtctcgaatttcctcgtccaggccggcattgggaataaggatcacatcaagattcatggtttctgagcaaccggcgtgtccatagcaaaccaaccctgcatgcagggccagcttattatatat

SEQ ID NO: 170556 - DNA, 108 bp, Zea mays
  Clone ID: MRT4577_87127C.1
accactacttcgctgtggcatgtagttagggatccaaactcactctcgcgcgatggcgaccgatccgattatttatatttgcttgacatagcgaagtgtccttcaagc

SEQ ID NO: 170557 - DNA, 532 bp, Zea mays
  Clone ID: MRT4577_87128C.1
gtaagctcggaattcggctcgagctaagatcaagtgtagtatctgttcttatcagtttaatatctgatatgtggaccatgtgttcactttgatattaaatttattttttgtgggggagggctcgctacagtggcttgctactggggccctcaagcgtcgctcggccgttgcactataggctgagcctggcgcgccccaaccaatgcaatttcagctttaagtatgtctttagactatacgaaatgtatggttccatatcaataaatttggtcgtaagtaatgaagaagctaatatcgcccatatttagtcatcaagcagcatgccggtctagcagcatgtccctgtgctgcccggacctggtggaggccgctctcgccacgagcaggagagacccgccggttcaggtacaggcaaacgacaacaccatggacgcctatgacgggtcgggcagagaaccataacatctgagagctttcgtctactgtataaataaaccattatcagctaaaactccattgaatcgtcttagat

SEQ ID NO: 170558 - DNA, 282 bp, Zea mays
  unsure (1)..(282): unsure at all n locations
  Clone ID: MRT4577_87129C.1
gagagaatttggaggccaaagaaagcangggcattgtttttttaaaattttttcggtttccaacaaatcaatnatngggcctctgcctctccgccgacgtgtgggcgtcctcctgttcctggccctcgttcttttgggcagtagctgcacagacaccggcactacaagcttgttcaggctgaagctgtaggcgactgtggacatgccgctggactccgatctttttctcatctcttctggctacaatgctcaccattatgtgcacattacccttggctacca

SEQ ID NO: 170559 - DNA, 378 bp, Zea mays
  Clone ID: MRT4577_8712C.1
taacccttttttttttttttttttttttttttttttttttttttttttttttttttttaaacaaaagtatacagggcattttcaattcatttccgaaagcacgtttgtaggggccaatcataccctaaaaaaaaaaaggaaaaccacgtggggccccccccaccgatggtcgaccacacacatttttgatgcaccccccccccccgggcgtgcacgtacggggggggatatttatcgatcatttggaggcgaacattatggcgacggggcatgatccggcgggtgaggctgacgggaagggcaacccccggcgaccgtggtggtggcaccccatgaggtaaaacgcgaggcgctttttggccctgcgtaacaacaaca

SEQ ID NO: 170560 - DNA, 388 bp, Zea mays
  Clone ID: MRT4577_87130C.1
ttccggtgcagtgcgctacgagcttcgacggacctcgatctccacctgtgaagtgactacttgtgatctagatctgaagctgtagcggtcacgcagctatgtgtgaatcgaagatgagcgaggtggagctcgacctcctgaatgagagctgcatcgaggcggctgcgcggtagcgaggcatcgacgtggttctcaacgaggagaccaagcgcgagacacccggcatcgctggcttgggagacaagcagcggttcatcggctccgtcggcgccgcgttcttcaccatgatcccctatacctatatctctcagatgaagcgcctgctcggtcgcaagttctcagatcccgagctgctacgcgatctcgcctccttcccgttccactttgc

SEQ ID NO: 170561 - DNA, 267 bp, Zea mays
  Clone ID: MRT4577_87131C.1
aagcgaacatggacccaaaaccacccaggaggcccctgatatttgacacacatgaattccacatccctcttgtcacatagtttgtggcaagaggttgccattcctgaccatggctccttgtcctatgtactgctgaatggaatgacttagtttaacttggacagatgtctacgtgaacttaacatggttagacgaagcccatgccctacagcaggagctccttgattgggacgctgggattctctacactgaggggcgtcgacgctg

SEQ ID NO: 170562 - DNA, 278 bp, Zea mays
  Clone ID: MRT4577_87132C.1
atgaatcagtatgaagacactgtcaatgaggttatgagaaaaaaacagcaggggcattagtttcaggcaaggcagctcccaggtttagagattaatttttaccccctaaggaatatccagtcaaagacgctgagtgggagctgtcagcagtagcagctgtgtttgagtttctggctgaaaatggtgaagaatggacttaattatgctaacaaactgaaaaatctagacatagatcctctgatatacaattagagatatttttatatagaccccaagca

SEQ ID NO: 170563 - DNA, 306 bp, Zea mays
  Clone ID: MRT4577_87133C.1
acgcgtgcgacagacaccaccacacacacccaccccaaatttaatttatcccctacccacccacaacgaagggaccggcgacaaccaaggagaagagaaagtcagccccaaagccaccgccaaaaaagcggatggacaaagctcgacaacggaacatcctgcccaatctgcaaccacggcagcagagcagagcgccgaatagacatgaaaaaactgattggccaagcatcacgaataaacaggcaagaaaacttcaccacaactgtaaaagccactactgagccaagtgacatatagagcgaacgg

SEQ ID NO: 170564 - DNA, 723 bp, Zea mays
  unsure (1)..(723): unsure at all n locations
  Clone ID: MRT4577_87134C.1
cgaattttaccaatatcatagatctgagaatatatggaacgaaacttcgagggcctattccaaaaaacttctctaagttgaccaatctgaaaattctgatgcttggtgatcttgatggtggaaattctactttcgatttcatagcagatggggcaaatattccaatattatcactgagaaaatgtggaattggccagtttcctagtaaccccccaaatctacccaatctaacatacctagatttgaggtcaaacaatttatcaagctcaatagaaccattgcgtcgttatgggagattaagctacctatatatgggtgaaaacaactttagtggacctctgccttctgaaatgtttcaatcatcccgtggtttggatgtttcttataaccctttacttaatggaaaccttcctaacaacccccctgatcgcaagtggtcaataaactatatcgggacttcaattgatgcaagcagaacaattaacagtgagaaccttactctcctcaattgtctccacatgaaagaatgcaacaagttcaacactaaaccaataacttcattcgctgtaaactgtggcggcaagcaaaggatttcttcagatccattgccaattacgtttgacgatgacaccagtatccttggggcagcaggctttcatgttaatactgacaggcaatggatagttagccatgtgngttctgatccttttactaactcttctg

SEQ ID NO: 170565 - DNA, 644 bp, Zea mays
  unsure (1)..(644): unsure at all n locations
  Clone ID: MRT4577_87135C.1
ccccaaacanccngccgacgccancagccggcgggacgcacacacgagggcgaccggcgaacccnagnccngggccgagccgccnngcgggancgnccccgccgcgcggcagcncggccncgacccnnnaagncnccgnccgacaccgcnngganncagagaggaancaccaccccncacaacngaagcaanngcnnnnaccgagaaaaagagggacangacnnnggaggananaancaagangncaaagaaaaagaanccnggaggcaagaaccccccnaggcagccgancaaaaagcgnccannccagaaggccaacacnaanaaagggaagggcaaggnncaacggnnnanggaancnagancaaccannagacaaggngnncnngcacagagaaggncaaancnnggnggaagncagnnngcngccacaaagcaggcngcaaagaaggcngcggcnacgccaaggcgcagcggggcgggcaaaaggaagaagccnagngcaagnaccnnagngcagaggaggncaggaggngaggcnnnncaaanaaccaagggcaaggagncgcagaaccaggcagcaccaaggacganggangcacncnnggcacgggagaaggcgcaacgcaggaggaccgcaccac

SEQ ID NO: 170566 - DNA, 300 bp, Zea mays
  Clone ID: MRT4577_87136C.1
aacacaaaacataaacgtttggtgcatacaaaaacagactgtcacccattttatttggatcccaacttattgggatgctaaagaatttctcgggggtgggtccctaatgatcctgccggtgagacaattaatttttgggggtgtgggggacattttgcttacccttttgcctaaaacaaatgggacagctttttgtgttaaccaaagcttgttttcgggcttttgattgacccggggtggaattacaaagcccccaggttttgtggaagtatcaaccccagcctttttttgcaggttttt

SEQ ID NO: 170567 - DNA, 808 bp, Zea mays
  Clone ID: MRT4577_87137C.1
gggtacctcgaggccggccgggagccgactcctttgaaccgaaggcaccgctgcgccccgagggcctcctcgctctccaccagctcacgaacacagagagagaggccgatggcgagctcgctggcccgcctgggagcggcgctgccacgcgctcgcccacgctccgcggcgctcggcatcggcgcctcccgccgcgccgcgccgaacgctttcaggtgccaagttcattccgacattaaagtagcccctacatcggacttgaaggacgatagcaaatctgaaacttggaggatcaagatgctctatgacggtgattgccctctctgtatgcgtgaggtaaacatgctgagggaaagaaacaaatcatatggggcaataaagtttgttgacataagctctaaagattactctccagatgacaatgaaggccttgattatgaaactgcatttagaaaattgtacgaggaagtaggactcggctgggtttatgctgttactaagtatgaacctgtagctacgatggcaaatgcaatatatggcgtgtgggcgaaataccgaatgcaaattacaggtcgacctccgctagaagagattatagcatccagaaaagctgcagtaagttgtcaaaagctgcaggcgaatgtaaagatgacaaagtatgcaagatgtgagcataaaaaatgttctactgtgctacatacctcactcacctatgttcatgcttagataggctcatatacatagttttaacaccaaatattcacaatggcatttgaaaaggccgaatagcctatgtaatgggttgtcg

SEQ ID NO: 170568 - DNA, 477 bp, Zea mays
  Clone ID: MRT4577_87138C.1
ggaattgaacccggctgcgtccggcgaaccgacggtgtgtcgtcgtgtaaccaccgtacctgctacctccataaactttgagagaggatccgagcgccgggagcggtgctcaactcattcccaccaccgtgctctaacatatccacgcgccgaacgctttcaggtgccaagttcattccgacgttaaagtagcccctacatcagacttgaaggacgatagcaaatctgaaactaggaggatcaagatgctatatgacggtgattgccctctctgtatgcgtgaggtaaacatgctgagggaaagaaacaaatcctatggggcaataaagtttgttgacataagctctaaagattactctccagatgacaatcaaggccttgattatgaaactgtcatggggaagatacatgtcattctttcaaatggaactgttgtcacaatgttgattatttataaattgtccaaggaagtaggac

SEQ ID NO: 170569 - DNA, 646 bp, Zea mays
  Clone ID: MRT4577_87139C.1
gcttgaggaaaagttggaagtggaagaagcaaaaagcagaatgcagcatgaaggcaagatttttgtccctgatgctcaaagggaacgccaagttgacaataaatacaagcaggatgatgatgaagaaggcattgaatacctgccccttcagcaaaaggaaagccatcgaagttgcataaaaggagatggagcttgcagaataaataattaagaagaacaaaagaaaatcaagaataaagactaaaacctactcacattgaaaacttgagcctatgggatatgtgttgcataacaatttctttctctttgagaacccccaacttgaactaccttgatctctaagtaatatgtcctaaaaatgagcaccaaaagataaggacctgaatagtccagtgttaaaaacaagtgcccacatggtggatgataacgataaagaactggatgaggatgtgcaatgcaagaactgaagaagtccggaatcaaaaaaaaaaaacaaaaaattcaaaaaaaacatgtaaaaaaattaaaaaaactcaaatatcaagctctatagcaaaatacaacataaaaacatttttttttaagaaacgaaaaaaaaaaaaaaaaagggggcccccaggcccccgtttttgtcccctttaggggg

SEQ ID NO: 170570 - DNA, 561 bp, Zea mays
  unsure (1)..(561): unsure at all n locations
  Clone ID: MRT4577_8713C.1
gtgtctgaggatctcctgatctcctttccttcctccctgtccttctcctcccctccccggctacggaggtgctggtgggtgctacggaggagtactacgacgacgacggcgaggaggaggtaagaagcaccaccaccttcctctcttctcttgttgggaatcgtcctggtgttgagttgcctggagctggattcgctcgctcgttcattcattcctctcgctcatcgtgccccgtcttcgagcaaagcgaaagcaaatcgcggtcgttaattccgagatcgatccgtgtcgagttttccgggcccaagctggaaagattcggcaagtacatctgatcttgtagcatatactagtgttgtacactgtcctcccatgccccagtggcttgctttcctgcagtgagtgaagtatactcaaaccagattcattcattcattcattcattcattcatttctaaattgcagtatgtgtttttgtttgtagacaagtgaacccacatncttcttacctcagcagcctcaccggccattcgagactctgcgcggctgctgacaaagagt

SEQ ID NO: 170571 - DNA, 777 bp, Zea mays
  Clone ID: MRT4577_87140C.1
gcatttgaaccgaaggatacgcgctgcgccccgagggccttctcgctctccaccagcgtacgaacacagagagagaggccgatggcgagctcgctggcccgcctgggagcggcgctgccacgcgctcgcccacgctccgcggcgctcggcatcggcgcctcccgccgcgccgcgccgaacgctttcaggtgccaagttcattccgacattaaagtagcccctacatcggacttgaaggacgatagcaaatctgaaacttggaggatcaagatgctctatgacggtgattgccctctctgtatgcgtgaggtaaacatgctgagggaaagaaacaaatcctatggggcaataaagtttgttgacataagctctaaagattactctccagatgacaatgaaggccttgattatgaaactgtcatggggaagatacatgtcattctttcagatggaactgttgtcacagatgttgaggcatttagaaaattgtacgaggaagtaggactcggctgggtttatgctgttactaagtatgaacctgtagctacgatggcaaatgcaatatatggcgtgtgggcgaaataccgaatgcaaattacaggtcgacctccgctagaagagattatagcatccagaaaagctgcaggcgaatgtaaagatgacaaagtatgcaagatgtgagcataaaaaatgttctactgtgctacatacctcactcacctatgttcatgcttagataggctcatatacatagttttaacacaaaaaaccaaacac

SEQ ID NO: 170572 - DNA, 596 bp, Zea mays
  unsure (1)..(596): unsure at all n locations
  Clone ID: MRT4577_87141C.1
gccggctttctcgggatgaagagaaaaaaagatcgtcacttccagcaatattagcgccccagcctgtatagccacggcgatgaccacaatggttgttgggtacgctgtaggctggcgaggcggtgcttggtacgctcgaaggggcttgagaagagagcaacaaaagctggcggggatgggtcacatgaaggcgcacgacagatggcactggcggcccttcaacaggctcaggaacagcaggttagcctccaagaacaagcgcgccgacgcccatccaagcaccgaggccccctcgacgtcaagcaacgcggcctctgcggacgttagcagtgcttctcagccggcagcgggcagtgcatgagcttatacatccacaacaatggactaggatgtgagcttgggggtcgcgttgtaatccatacagaccatgtgagtcagctcgatctgtggtggatcttctttacattcgtgaaccagtacagtgtacatacaaatgtacaataatatgtaagctattcacctttttttctgataaaanaaaaaaaaaaaaaaaaaaaaaaaaaaaaaaacccaaaaaaaaaaaaaaaaggccccta

SEQ ID NO: 170573 - DNA, 468 bp, Zea mays
  unsure (1)..(468): unsure at all n locations
  Clone ID: MRT4577_87142C.1
tgccgttctccctcggggtggtgggcgtgtgccgccgtggtggtgtgtctgcctccgctgcctctgggcttcttcctggcttttctttcgggggtgttgtctccttcgtgcggtgccgtggcccttttgtctcgcccgcttgcggctccccttcctgggcttcctgcgttggggggtgcctgggggcttctttccgggcggccgctcttgtgggtccgcgcttccgtgcgcgtgcgtgcgccgtcgtggctcttcttggcgcccccttttttcttttcgctggccgtcgtgtttngtcgtcgggtctgggtggtccctggcgtttccctgcttgatcgccttgctgttcgtccccctttcgcctgctggcgtcgtcgcgtagaggccctttcctgtcgcccttcccggcggctccccggcctgggtggcgggtggggcgcgccctgtcgcggtccctttcgcgcgggg

SEQ ID NO: 170574 - DNA, 1886 bp, Zea mays
  Clone ID: MRT4577_87143C.1
agaagccggccgggacaaatcgtttggctacgcggcaatccacgaagctaggggggttcgcgtcgcggtggagcgaggccgaccaaggagccgatccatttgaaccggaggctaccgctgcctcaagggcctcctcgctcgctcgccagtcgccacccgctcacggagacagagaggccgatggcgagctcgctggcccgcctgggagcggcgctgccacgcgcgcgcccacgcgctgcgacccgcaccctgccaccgccgcggtgggacgccgcggcgctcggcgcctcccgccgcgccgcaccgaacgtttgcaggtgcctagttcattccgacgttaaagtagcccctacatcggacttcaaggacagtagcaaatctgaaacttggaggatcaagatgctctacgacggtgattgccctctctgtatgcgtgaggtaaacatgctaagagaaagaaacaaatcctatggagcaataaagtttgttgacataagctcgaaagattactctccagatgacaatcagggccttgattatgaaacttccatggggaggatacatgcggttctttcagatggaactgttgtcacagacgttgaggcatttagaaaactgtacgaggaagtaggacttggatgggtttatgctgttactaagtatgagcctgtagctagcatggcaaatgcagtatatggtgtgtgggcaaaataccgtatgcaaattacaggtcgacctccgctagaagagatcatggcatcccgaagagctgcaggtgaatgtaaagatgacaaagtatgcaagatgtgagcataaagatgttctactgtgctacatacctcgcctctagccatgctttatataggctaaggctcgtatatatggctttaacagtacaaatagtcgcagttgtattagaaaaaaaaaggtgaatagcttatgtaatggtttatcaaagtacatatgattgtacatttgtatgtacactgtactggttcacgcatgtaaaaacgatccaccacagatcgagctgactcacattgtctgttctaccaagtcgtatggactactacgcggccccaagctcacagtcacatcctagtccattgttgtggatatataagctcatgcactgcccgctgccggctgagaagcacagctaacgtccgcagaggccgcgttgcttgacgtcgagggggcctcggtgcttggatgggcgtcggcgcgcttgttcttggaggctaacctgctgttcctgagcctgttgaagggccgccagtgccatctgtcgtgcgacttcatgtgacccatccccaccagcttttgttgctcttttttcaagccccttcgagcgtaccaagcaccaccttggcagcctaccgtggacccaacaaccattgtggtcatcgccgtggctacacaggctggggcgctaatattgctgtaagtgacgatcttttttatctcttcatgttcaactttgtggttacccttcagagatgattcaattgactcaagcctctgttcaatccttgattgttgcacgtggcgaagtgaatagcctgcccaagccgtgaggacggaggcgatggaggtgccgacggtgaagacgatgcggtggttctcgaacacttgcttagtggagaagaaggtgtcgcagacggcggcccaggagttggacgcccgcctccggatgttggggagcgtgagcagcgtgcgccccgcgccgcgcagccgccgcaccaccatcgccccgccttttccgcgtgttgcttgggtgggggtgtgttgaggcgagcggcttggctcctcttcctcctccgctttcccctcccacggcggagggagtcagggagcccgccgaacagcttacggaaaaacggaat

SEQ ID NO: 170575 - DNA, 292 bp, Zea mays
  Clone ID: MRT4577_87144C.1
gttgtcgagggaagcgttccagatccaaccgcactcttggtccagacatgggctacgaccttctacacaggtactggacctgtaggacgtatagtgctggcagcagccgccaagcatcctcaccccggccagctctgcgagcttgcgtgggaaatcccctgcttatcgtgccattcacatgctctatctgcactgtcgctgccaacaccgattccccgttccgcgaatgcgggcgcgcaacaacggccaagcatgcattgctccacattacatcataacgacaaaatcattt

SEQ ID NO: 170576 - DNA, 487 bp, Zea mays
  Clone ID: MRT4577_87145C.1
gatccagcgaggcggcgaccctccctcctccccttccttcgctcgtccagccctgaccacccgcatccctgtcctcaagttcgctcagtacactggcgctcatgccatcgctgggaggcacacccgtgttttcttcactaaccagctccagacctccttcagcgagcctcggctgctcatccttaccgacccaaggactgaccatcagccaattaaggagtctgctctggggaacatccccaccattgccttctgtgatactgactctcccatgcggtatgtcgatatcggcatcccagcgaacaacaaggggagaaacagcattggatgcctgttctggcttttggccaggatggttctgcagatgaggggcactatcctccctgggcacaagtgggaggtcatggtcgatctgtttttctacagagacccagaggaagcaaaggagcaggaggaggaagctgccgttgcccccgagtttgccgca

SEQ ID NO: 170577 - DNA, 2013 bp, Zea mays
  Clone ID: MRT4577_87146C.1
ttttcagagaaccgcaagcatcatttccagttttaagattaaccaaaaaaattcaatgtcagcaatattggacaacgggttcagctagaaagccctaaaacataagtgttcaaagcaaagcagagctatagaagatgccaccagattttggacattcagaccacagaaaaatactgaacttcagccgcagaagacaggtctcagagtggacaacgcctactcccagccttgggcagtcggtggcggggctgcttgatcccaaccagtaggagcaaccacaggaggtacagtgccgtccaccacaggtgcaggggccccagcttgatcccagccatcaccagtaggaaccggagctggagcagcacccaaatcagcaccagtaggagcaacaggcggcgcagtcacatcagaggtccactggtcaccaccccactgatcagctccttggtaatcagtgattgcggcaaactcaggggcaacagcagcttcctcctcctgctcctttgcttcctctgggtccctgtagaagaacaaatccaccatgacctcccaccccacgcgtccgcccacgcgtccgcccacgcgtccgcccacgcgtccgcccgatccagcgaggcggcgaccctccctcctccccttccttcgctcgtccagccctgaccacccgcatccccgtcagtcatggcagcggcagcaggcggaggcgcggtgcgtgcgctgtcccagaaggagcaggacatacagatgatgctcgccgccgacgtccaccttggcaccaagaactgcgatttccagatggagcgctatgcctttaagcgccgcaccgacggcatctacatcatcaaccttggcaagacatgggagaaactgcagcttgcagcgagggttctcgatggcaacgataacccgcaggacatcatcgtccagtccgcccgcccctatggccagcgtgctgtcctcaagttcgctcagtacactggcgctcatgccatcgctgggaggcacacccctggtaccttcactaatcagctccagacgtccttcagcgagcctcgactgctcatccttaccgacccaaggactgaccatcagccaattaaggagtctgctctggggaacatccccaccattgccttctgtgatactgactctcccatgcggtatgtcgatatcggcatcccagcgaacaacaaggggaggaacagcattggatgcctgttctggcttttggccaggatggttctgcagatgaggggcactatcctccctgggcacaagtgggaggtcatggtggatttgttcttctacagggacccagaggaagcaaaggagcaggaggaggaagctgctgttgcccctgagtttgccgcaatcactgattaccaaggagctgatcagtggggtggtgaccagtggacctctgatgtgactgcgacgcctgttgctcctactggtgctgattggggtgctgctccagctccggttcctaccggtgatggctgggatcaagctggggcccctgcacctgtggtggacggcactgtacctcctctggttgctcctactggttgggaccaagcagccccgccaccgactgcccaaggctgggagtaggcgttgtccactctgagacctgtcttctgcggctgaagttcagtatttttctgtggtctgaatgtccaaattccggtggcatcttctatagctatgctttgctttgctttgaacacttgtgttttagggctttctagctgaacccgttgtccaatattgctgacgttgaaatttttggttaatcttaaaactggaaatgatgcttgcggttctctgagaggtcctgatacctgatcattgctaggaatgaattgcagcgctgctactactgttttgactgagtgtgcccagctgctagcagttatggcagtgtgctatctgcatctgttcaaactagtgtcaaacctcacttttgtcgtgatgtgacagtgaagcgaaatagcaacttgtatcggttcc

SEQ ID NO: 170578 - DNA, 1664 bp, Zea mays
  Clone ID: MRT4577_87147C.1
ccgggatcttgaccaaacgagcccatttgctcttctcaactactcccgaattggtagctagcacagagtagacggggtaactcaaagaggcccatatttttgcaacggcccaacgcacgtctttgcagttgcagaagtttcctagggttttcgaggcgtcgcagataagagacccctcccgcacctccgagccgccactcccaagacacagagcgtcagagcccgatcccgatccagcgaggcggcgaccctccctcctccccttgcttcgctcgtccagccctgaccacccgcatccccgtcagtcatggcagcggcagcaggcggaggcgcggtgcgtgcgctgtcccagaaggagcaggacatacagatgatgctcgccgccgacgtccaccttggcaccaagaactgcgatttccagatggagcgctatgcctttaagcgccgcaccgacggcatctacatcatcaaccttggcaagacatgggagaaactgcagcttgcagcgagggttatcgttgccatcgagaacccgcaggacatcatcgtccagtccgcccgcccctatggccagcgtgctgtcctcaagttcgctcagtacactggcgctcatgccatcgctgggaggcacacccctggtaccttcactaaccagctccagacctccttcagcgagcctcggctgctcatccttaccgacccaaggactgaccatcagccaattaaggagtctgctctggggaacatccccaccattgccttctgtgatactgactctcccatgcggtatgtcgatatcggcatcccagcgaacaacaaggggaggaacagcattggatgcctgttctggcttttggccaggatggttctgcagatgaggggcactatcctccctgggcacaagtgggaggtcatggtggatttgttcttctacagggacccagaggaagcaaaggagcaggaggaggaagctgctgttgcccctgagtttgccgcaatcactgattaccaaggagctgatcagtggggtggtgaccagtggacctctgatgtgactgcgccgcctgttgctcctactggtgctgattggggtgctgctccagctccggttcctactggtgatggctgggatcaagctggggcccctgcacctgtggtggacggcactgtacctcctgtggttgctcctactggttgggaccaagcagccccgccaccgactgcccaaggctgggagtaggcgttgtccactctgagacctgtcttctgcggctgaagttcagtatttttctgtggtctgaatgtccaaaatctggtggcatcttctatagctctgctttgctttgaacacttatgttttagggctttctagctgaacccgttgtccaatattgctgacattgaatttttttggttaatcttaaaactggaaatgatgcttgcggttctctgcattataggtcctgatcattgctagtaatgaattgcagcgctgctactactgttttgactgagtgtgcccagctgctagcagttatgccagtgtgctatctgcatctgttcaaactagtggcaaacctcacttttatcgttatgtgacagtgaagggaaatagcaacttgtatcgggtccaaatttctctgctattggatttctgtcacaat

SEQ ID NO: 170579 - DNA, 2077 bp, Zea mays
  Clone ID: MRT4577_87148C.1
gtaccctcgggttcggccgggacggcatcgttctccctgcgctctctctctcacactgcgtctttggctcctgctccatctcctttgctgcgaagctccgagctctgctcggccggatttttcatggcgcccagccccttgcgtcggccagcccctgccatggagccttcggctgtgcagctctctccctctcgcgtgccttggatttgtgccgcgccctgcagagctcccttggtgagcgcccaggtcgtccctctccgactctctctgctggcggctgagttccctggaagccgtgctctgctcgccatggatgtcgtccaccatggtgctcggtctagacgtcgattccctcgtcgcagtgagctccagccgattccttgcctcttccccgtttaaatcatggagcatcagccgctgctccctgtttccggcagccaagcccctgcgcgcgcatcctcccgcgcagtccccagcgccaccggccaacctcgccggccaagctccctcgccttcaatcctttagccgtcgcgcccctcagctcgctggccgtgacctcgccgaggtttttcccatggccggctcactgctcaacccaagccgaggtcttgtacgaaacagcaccttccatggccgctgcgtcgcgctccttgtgcttgcgcagctgaacgccatactgcgcagtgttttgtccgatgtcgagcttagctcagtctctgtttctctgcgcacgtcgagttccttgccgcgcgctgagctttctgtcggtctccaactcgccatggtgtccaactcctgtaccaaccgtgacctacgcttggtcttcccagctgcgttgacctgcgttgacctctgctcgcttcgctcgggatgtcgtgctgggtcgctccatacttggtgcacacccagctgggcgtcgcgatgctgtgcaccatgcgtcaccagtcattctcaccatggtcagcagcttcaaaaacatggacgcccaagcctttttcccatctttcacgcccacctcggtcttcatcctcaacctttgccagaaatttggttaaatggacgaaccagaagatctccagaattttatggatgaagaagaaaataaagtcgaagagtgacgctcgctagatgctcgacgaaaggcgtgaaccgaagatttatcactattcctcaattgccgaattaaattttattgaggtacgcttatttatcgcgcgatgcggaagacaagccaagtcgaccccaagcgcgggcaaatccgcaggataatgctgatggacgaacctacctgatccagtgctaggacaaggatgatcgccaagtggacgtcgtctaaccaacactaacatagtgtttattccaggttatagttttgtgctgctgttgatggtgttaagtgccggtgggctcggccttcttatataagtataccccgcctttatcttcttattgaggatggtcacttgagctagcatatatttcaaaactataaataatttataaccgttcaaagtttctttctttgaatcaatgtagtaatcactctgatcatgtacgaagtaaaatttttgtaatttgtaaaatttggtaataagatttccgctgcaaaatattggtgtgtgtgatttgtattacttaatcccgcggttctggttgtaagtggtttatccggtgtccgtggggcaatcagacggatcctgttaagttatctggtgcacatgcatggccgtctgagttctttaagacaaggacaggtgcatgtgagcccgataccttgggaggttctgccacatcatgcttgcgactatcgcgtcgaattagtaagggtaagtaaatttgttattcgtgttagtgggttggtggatggtctgacttggtttaatatttattagattgcctgagtcgttttagtaatttggtcgatgtcgtaggatgaaaaagatctcaataggtctcagtgtttgcgggattgtaggtgttaaaaatgggaagttatattaatatatatatgatacacaggttaatcggtaaatcaagtaattaagatacacagtttaaagagttaataaaaagcta

SEQ ID NO: 170580 - DNA, 414 bp, Zea mays
  Clone ID: MRT4577_87149C.1
ttttttttttttttccgtgtgtacattttcttttttctttcggggggcgatttacagtcaaaacgaaagcacaaattctcgaagcaagtgaagaatatactgttgggtggacaaggaacttgctgggttctacaacatgtttttggggtgttacgtgtatgaattgatagtacaaacgcgactttgagaatgggcttgataaggattatgaggtgagtcggtgagaagatagataagtgcgctagatgatataaaaatgggatgcaaagcaaactttgagttatgccaatgtggatagcggtgagccctcgaaaagcactgcaggtgattactaggaattgccaaacttttcatgcggtcgatttatataccggaacctcgcgcatcggtcccttaagaccggtcggttgggac

SEQ ID NO: 170581 - DNA, 399 bp, Zea mays
  Clone ID: MRT4577_8714C.1
ctatcaaaaatttaatcagcccccggccgggtgcgacaacatataacgggggggcaatacaatagcccaaatctttaatctggggcgggggttttcgggttcaccaacctagggcccttgatctaccaacaaagtttcagggaaaggacactttggggaacttaatttattgccacgggttttttcccccggccgaaaggggggaactagttttggcactggccttaaactttttaagcttgcctcaaaccctgttttttgggggtttaagtttatatatgcggaccatccaatggggggttgaaaatacctcctaaaaatgggttagcttgaaaggcttctttcctatttaaaatccccttactctggaaaagccttttccataagtctccacaaacc

SEQ ID NO: 170582 - DNA, 346 bp, Zea mays
  Clone ID: MRT4577_87150C.1
ggcacgcaggagaagcaggagccgcccaaacccccgagcaaattgccaccaacggaggcacgcccgcccacagcccggaagacgacccgggtacgcgacggcggctgccccacgcaccagacgggcactccgagatgagcagcaagaccagccaataaagaaagcgaagggcccacacaccaaacgcaacacagagcccagcacgccaggaacgctacctgcagccgcaacaactaacacagaaacaacgccaaaccccgcggaggcttgtcgagcggaccctgatgaaatgtcagaccaagccccgccacagggaaaaagacaatgcgcgaggcagcgcccaggg

SEQ ID NO: 170583 - DNA, 448 bp, Zea mays
  Clone ID: MRT4577_87151C.1
aaaaacttgaagggtacaaaagatcaatttgggacaaaacatcaaaccaaattggggaaacccaaaaggccctgttggggtgcatagggggggggggattgggggaaagaaaaccccttttttttcagtttaaaaagattgggttatttttaatccggttaaaaccactcctaaccgaaaacacccaaaatgggggccgggcactttagctacttaacatctaaaggacatttcccatggggggcccacgtttcggatcccgctaaaagcacttaaaccccacctttttgcacctattaatttttatcagctgaaactcgttagctagcgccggataaaaaaaccctttcggtgggggaaacatttaaaaaactgaaccccattccgggaaaaaaacaaaaggggaaactctcccgccgggaatgatcccaaggatgaggattccaaa

SEQ ID NO: 170584 - DNA, 735 bp, Zea mays
  Clone ID: MRT4577_87152C.1
ggtccgaactcaagaagatggggtttcgaggttcttggcgacaatgactctcctgttatgcccataatgctttacaatccggctaagatccctgcattctctagggagtgccttagacaaaaggtcgccgttgttaccgtggcgtttccagcaacacctcttcttcttgctagggcacgcatccgcatttcggcttcacacactagagaggatttgatgaaagcccttgatgttatcagcagagttggtgatcttgtgggcatcaaatacttccctgcagaaccaccaaagattgctgaagctggtcatggtaagcgggagtaggagcgaaccctgaatcgccccatgagtgattgaagttgttagaatcccttccggagttatcaacagatcattatggaagcaagcatatatggagccgtattaggcagctgacagttatttgttgattgtacaactgttcttgcaattgtgtatagctggttgaaatttagttgttctgttgctaatctgttccaaatacgtagtagattcggaggcaatataaactttcagcagagcattactgagtttcccctcgcagaccactgacgacaatgaaggcctcttgcttttatgtatttttctttctttctttttgtaatcagtctgttatatgggatcagtaggtgtccctttggatgaagttataagctactttgctgaaaaaaaaaaaaaaaaaaggcccctagggcc

SEQ ID NO: 170585 - DNA, 152 bp, Zea mays
  Clone ID: MRT4577_87153C.1
cttgggcgacatccacaggggggttcaggaaagcaggggccttagggaggaggcccgctactactttcatcgtcatcttatacggcctgttctgtgccggggctggcacctgcggcctcctggacctccacgactactggatccacgggcac

SEQ ID NO: 170586 - DNA, 561 bp, Zea mays
  Clone ID: MRT4577_87154C.1
tcgttcccctcctctctcagtccaaccacgcttctatctccggtgagactcgtgacaccctcgtcaaccgcatccagttcggtggtgatgaggtcgtcaaggccaaggacggtgccggctctgccactctctccatggccatggccggtgctcgcttcgctgagtccctcctccgcgccgcccagggcgagaagggtgtcgttgagcccaccttcgtcgagtctcccctgtacaaggaccagggcgttgacttcttcgcctccaaggtcgagctcggccccaacggtgttgagaagatcctccccgtcggtgaggtcaacgagtacgagcagaagctgatcgacacctgcctcgtcgacctgaagaagaacatccagaagggtgttgacttcgtcaaggccaacccttaaataatgtctccttctcttatcactttgtaaaactaccccacctctacccatctttcctggttcagtgagtcttggatgacgggaaaagatggcccatgtacttttagatcgatatgcatgccataatcaatgtcggtcttgaagcaccgtt

SEQ ID NO: 170587 - DNA, 464 bp, Zea mays
  Clone ID: MRT4577_87155C.1
cggacgcgtgggctcccccacccgtccatcgccccctccctccggtctgcgctcccacaggctcgcccctgcgcccccgccgattcgcgtcgccctttgttggaaggaacgatggagcagaccttcatcatgatcaagcccgacggcgtccagcggggcctgatcggggacatcatcagtcgcttcgagaagaaagggttctacctcaagggtaagtgcgtttcattttgttctcgaattgattgctggaacacgtactctgtttaaatttcctagctatacgcatgaacttctctgctgttgaggcaagatttgatgtgcagattctggtgatatcttagaattgtttaatctatgtatacgttcggttgcgtgtgatcaccatctgaaaaaggatgttggtcgtggaagcaggaatattgcgtggagattagatttgattgaaaaccattatcttgatgtca

SEQ ID NO: 170588 - DNA, 130 bp, Zea mays
  unsure (1)..(130): unsure at all n locations
  Clone ID: MRT4577_87156C.1
gtttcattactgagactgcgcgccgcgacttcgccctcttttctccacgccgacttcacggctgccagccgtctcgccttctcaccacctgccgactgagaatgcctattatatgagttatangagagaa

SEQ ID NO: 170589 - DNA, 449 bp, Zea mays
  Clone ID: MRT4577_87157C.1
tttagtcgcattaatgaggttcctgatggcgggctttattgccctgcattcggggaacacattgatgaatggataccatgctaaggtcctcatgacgaagcatacaatgaataaacgcctcctgggaagcgttgctcctgaccataactagataacaaacaaagaaaagctggccgtgaaataagcctggctattggtctgccaagataccacccgatattatcctccaacagaatgtacgaagcaagggactaattctgcgatgattgcatgcaatgcgtgagatgctgaacgctggcaatgaatgtgcacataagcacgttctatcagggaatgaggctacttgctcgacaaagacatgcacagaatcctaaatctactctggatcactggccgcatggacataaatggtcaggtttcatgatgattcattaccatatgcgcacaca

SEQ ID NO: 170590 - DNA, 283 bp, Zea mays
  Clone ID: MRT4577_87158C.1
gggaaaaaaaacaaactttcttttagccctgccctgaccctttgatttacagtttttttttttttatttgggggtggggccaactttaaagcccttttttctaacaggcaaacagaaatccccaaggaaaaaaaaaagaaagagggccccggccggatgggacaacccgggcagtaacattaggtggggggggattcaaaaacaatgctggtggtgttttgggtcggggacttggaaatttttttgaacccccggccccaatggcggcctttttcccgggggc

SEQ ID NO: 170591 - DNA, 214 bp, Zea mays
  unsure (1)..(214): unsure at all n locations
  Clone ID: MRT4577_87159C.1
ttctttctgctccaatctattttttctactcgaccancaaaangggaggggaggtcgatatactgtttataaggtctactcttttctttcctacttctaatcccactttcatcgcctcttcgctttccctgactccttctcctactgcaaggtgaatctgctgctcttcctggccgaccgcaagcctgactctctcctctcctggtgccccgac

SEQ ID NO: 170592 - DNA, 1725 bp, Zea mays
  Clone ID: MRT4577_8715C.1
gcttgtctttcctttctccctccccttcgagccaccaacccgggatgcagcccactacgcgggaaatgcaggccatggccgccgccggccagcagatctccctcgacgacctccgcgcggcagcaggcggcgtgcacgacgacttcctggaccagatgctcggaggcctgccgccgtcggcatggccggagctgtcgtccgcggcgggagggaaggcgccggatggcggcgcgcaggcggagcagatgcagcaccagccgcagcacttgggtgggggtgggggcctgtacgacgactccgccttgctggcgtcgcggctccggcagcaccaaatcagcggcggcggcggcggggaggccgtgaagcagatggtgctgcagcagctggccgatctgaggcaggaacaccatgtgttgctgcagggcatgggccgctcgacctcgacgggcggcagcagagacggcggcctgctcctcccgctctctctcggcagtggcggatcgggcggcgacgtgcaggcgctactcaaagctgtagccgactccgccggaggagaagccgcaggcgtcttcggcggttccttcgccggatcgctccaccaccaccagcagcagcagcagcattttcaatcacatccgcagcagcaaacggcgccgttgccggggcacgggtccggtggaggcgcgggcgcgtccggcggcgtgtcgcagccgcaggccggcgctgcgtgcggaggcgccgccgcgccgcccaggcagcgggtacgggctcggcgcggccaggccaccgacccccacagcatcgcggagcggctccggagagagaggatcgcggagaggatgaaggcgcttcaggagctggtgcccaacgccaacaagacggacaaggcgtcgatgctggacgagatcgtcgactacgtcaagttccttcagctccaagtcaaggtgctgagcatgagccggctaggtggtgccgccttccttttgtggaccgtgcgtgtgtgtgttgtgcagggtcgaggcggcgtggcggtcgcggccgggagcgatgatgggctggcggtgacggagcagcaggtggcgaagctgatggaggaggacatgggcaccgccatgcagtacctgcaagggaagggcctgtgcctcatgccggtctccctcgcctccgccatatcctccgcgacgtgccacatgcgacctccggtgggaggaccgggcctcggggtcgccgccgccgccgcgcaccacatggccgctatgcggttgccgccccacgccatgaacggcggcgccggagccggagccgacgccgtgccggcctcacccagcatgtccgtgctcacggcgcagtcggccatggcgcccaacggcgccgggggtgggactgatggcgagggctcgcactcgcagcagcagcagcggcatcatcccaaggacgccgcgtccgtgtcgaagccgtgatccgctcgtgaacgtgaaggcaacggccgccgtgacactaacggcgcaaccatgacatgacactcggagctgacaaagtgggctctttggcgggcccacccacgggctctcggcactgcagctggccctccgaccttcccccttttcgcattttattcccagtgtaaccattgtttttttttccttgtttaatattaatcccatgtattatcgattcgcaaatgcaaggctggttctcctctgcttgctttgcgccaaaaaaaaa

SEQ ID NO: 170593 - DNA, 329 bp, Zea mays
  unsure (1)..(329): unsure at all n locations
  Clone ID: MRT4577_87160C.1
atgttggggnnaggccgggatcaaactnaacgggatnggggaacctttgcaacaggtcatacattggaacgtggcacttcacaaacactttacatacacacgtgccgcaaactgaattttccgtaatgcaggggttcgaatgaaaatatcggtcccaagatacaaaagggtggggatcttgtatacagtcactgggaagctctgccatagaccgggttctcgtatttgccggtccacctgttggaatcatcagaggggacctgaagttccagctccggactgaacgggtggaacagacggtcgatgtcccagtactttaccttctaagg

SEQ ID NO: 170594 - DNA, 380 bp, Zea mays
  Clone ID: MRT4577_87161C.1
ggggaatgggtttttggaaacaaaaaaaacaacctccccaaccaacatgcatggatacacacaaacatgaccacatttactgacgccatacatgcaaacagagatatcaaaccttagaacactacaactttgaacctcaaaaaacaccaaaacaaccccacaaaaaagaaccccgctcggacaaccttattattgaccaaccaccaccacccgctcatatagatggaccccatattacacccacgcccaagccatgatatcagcaggaacatggggcgtacttgcaccccctaccttagtctgcagaccgggagcagacaaaccggactccgccccaggctttatgaacttcgacaccaccttttttttctgagccaccc

SEQ ID NO: 170595 - DNA, 517 bp, Zea mays
  Clone ID: MRT4577_87162C.1
atattataccgcaatccctctcaagaagtctccaccctcctgcgcctccaccctcctcgccgcctcactccctctgaggtcgcagagccgtccgggtagacgaagccgcccgcacccatggtctccggagagctcacctgcagctacgccgccatcatcctcagtgacgaagggatcaccatcaccgccgagaagatcgccaccatcgcgaaggcgggcaacatcaagggcgagacctactgcgcggcgctcttcgctaagatcctgcagaagcgcacagctgaggatctaatcctctccggtggatcgtggtgatggtgctgctccagatgctggtgccgccccagctggaggagctgcagctgctgctgcccctgctgcagatgagaagaaggaagagcccacaagatgagtctgatgacgacatgagcttcagactgttcgactgacgaggccctcgctacgcagccattagcagattcccatgatgctggccaagacttatcttacgctatgt

SEQ ID NO: 170596 - DNA, 328 bp, Zea mays
  Clone ID: MRT4577_87163C.1
cttctgtttatcgatttatatcccctctgtctttctttttttttttttttaaaccaaaccccgacggggacattaaataacgcgccattttaaagacgggggtttttatcatttatggggcccctgcggaacacgcactgtatgttttccccggtggctgctgccctgaaaaaccccccccccttttgccggtcacttttttagctgcaaatgatagcgtttgattaaacataagcccttcgggggggaggggggatcttgctcggaaaacagaaaatttccgatagggggccccaacaggttttttgctcctgccctacaaacctta

SEQ ID NO: 170597 - DNA, 1112 bp, Zea mays
  Clone ID: MRT4577_87164C.1
cattgggaccctcctgtgctttgagattcgcgcgtcgcgcctgccgacctcgtgcctcccgcggactcgccggcgaacgcctcttggagatgccgcccgccgcggcggcgctcctccggtgcgctccggcggtcccattcgcggcccgcagtagcgctgtttcccgctcaggcatggcgcggcgtctggtggcagcgagcgctgcggccggcaggctggcaccggcgtaccgcgggctgctgctcgacgccggtggcacgctgctgcaggttgcgcggccggtagccgagacgtatgcctccatcggccgacgttacggtgtgacgaagactaagaagagaatcatggaggggttcaagcgggcattctccgcgccatggccgaagacactcaggtaccagggagatgggcggccattctggagaattgtcgtggcagaagcgaccgactgcactgatggtgattatttcgaagaagtgtatcagtattatgcgcatggagatgcttggcgattgcctactggagcagacgcagcactgcgtgagctgaaggatgctggagttaagctcgctgttgtatctaacttcgataccaggctacggaaattgcttaaagaccttaatgtctccgagatgtttgatgccattgtggtgtcatccgaggtcggatatgagaaaccttccccagagatcttcaatatagcattggatcaaattggcgtggaagccagcaaggcaatccatgttggagacgatgaaactgcagacatggcaggtgccaatgctacaggacttgagtgctggctgtggggtaaggatgtgacgacgttttcggaaatacaggagcggattctgacaacagatgatcctcaatgagtgaatttggaatgttgcaaaaaatgatagttgtttcttttttccctcagttccttctttttggtttccttccaactcgtgtgttggcattttcattgtgctttcgtgaaataagctcatgccatggctaggtactgatgttccttcacattcttctcacatatgagcatttaataagaagcacaaggactcttgataattggtgactcttgatacttaaaaaaaaaaaaaaaaaaa

SEQ ID NO: 170598 - DNA, 193 bp, Zea mays
  Clone ID: MRT4577_87165C.1
tgttttttcttctgctattaccgcaactaggggggtttttcaaatcccacggggtgcacccatcacacagtcattactttccaatgtcctccaaaaagcagaattagtcctattcatttttccctaacatgaagaacgcctactacatatagagtctctcactctgaataacctttagaataattttttaatt

SEQ ID NO: 170599 - DNA, 592 bp, Zea mays
  Clone ID: MRT4577_87166C.1
tttttcattttcgaagccgggtttagccgttacaagatcatacctgttctcggtgttcggtcgataatcgaggtctacccataaaaatctatgcaactcaagtatactgcatgcgtcaataatctgcgtgtgaaatcaaaactaggtgtgaagaagtgagtatctgcggggctgggctgcaacgccgtaaactccattggagtggtgcctcctgtggcggaatgatcgcttctccccccttggctgtccgtggcggggctctctgccgtcacaactgtagtcgatctgttgccggtctatggtctgtaatgtcaaccagttgtctctttaagtctgctgtcaggtcgtgcctgtctttgtgctccttaggtcggtgttgtgtgtgcccctctgccgttgtcgtcgtgtgctctttggtgttctgtttgttcagtcatgagtccagtttgtaaaagttgtaatgttgtcgtcgtgtgctctttggtgttctgtttgttcagtcatgagtccagtttgtaaaagttgtaatgtgctatcgtggaacgtccgtggtttaggcgatccggataaatgcactatcgttcgtgatgct

SEQ ID NO: 170600 - DNA, 469 bp, Zea mays
  Clone ID: MRT4577_87167C.1
gtgcggcaatgggcccttggtgtgctgttcagcgcaggcactttgttcaaagtctcagcccagggcctgccccgtcgggtgtggggacgcgggaatcctcaaacccatttgcagatgccagctcgtggcggcgcctgcaggcatgcctgtctcaggccccgaagtctgcccttctcacacacggggaaggctccagaaacacctgtggaagggggttctgtgtgtggaagaaacacattggacatgcgtttactgttctcacgccaccacaggcggctcacacactttgctgtgcaagagtgcatgggtttctccccagcaccgagccggccttccttcctgcaggaagcactgcgtgtaccgtagcgctgaagctacgggagcaccgcgggtacggtggcaccgagggtacggttgcactgcggttacggagccactgcgggtaccggggtactgctgctggggagca

SEQ ID NO: 170601 - DNA, 576 bp, Zea mays
  Clone ID: MRT4577_87168C.1
tccgcaaacttgacctttaacgttgctttagtctccgaaacctacctcagtgcatgacttctttgagtcatctagagacagtggatcttggatattgtgctgagcttgccgaattgcctgaaggcatagggaatttaagaaaccttaaagttttgaatctgaagaaatgcaaaaaattgcgtggactaccagctggttgtgggaaactaactcgtttacagcagttgagcttgtttgttattggagacagtgccaaacacgcaagggtctctgagcttgataatcttgataagttggatggtgagctgcaaattaaaaacattagatatgtgaaagatccaggtgacacagacaaagtttgtttgaagaaaaagaatggcatacataaattgtcgttggattggtattcaagatgggaggatcagccaaatgacatggaagaagagttatctttaaatatggagaaggaattgcatttgctcgacagtcttgaaccaccatcaaaaattgagaagctgagaattcgtggctatcggggttcacaattgccacgttggatggcaaagaaaatgactc

SEQ ID NO: 170602 - DNA, 342 bp, Zea mays
  Clone ID: MRT4577_87169C.1
cggacgcgtgggcggacgcgtgggctgcatgccaggtccggtttcatcgcatgtcgccggccgctggtgcttccgtgtcatgggagggagcttcgtttatctttctgaccgacatgtaatgtgctgtgcgaggagccgaggactgctgctacaacgcttcgcgatgcaaggacgttgttccagcaggacgattctgtttggactccggaactgcggtttggagttctgaaggcgaatatgcgataataatgcggtgtaaattgcgatgaaacctgagattctttgtatgaaatacagaatgtatcgcttggacactgttttttagaaactattttaatttat

SEQ ID NO: 170603 - DNA, 1200 bp, Zea mays
  Clone ID: MRT4577_8716C.1
ctatcgaagagctatgacgtcgcatgcacgcgtacgtaagctcggaattcggctcgaggacgaatttcagaagatgaatctatggctgatgcaaatattgagcactctatggtcatggttgatgaaactgtggaggcaaaagtagtaccactcgaggagagtacagagaataatgctgctaccataggagtagttgaggagacagctgaaggtgaaactaaggaggaagcaccagacgagaaggggaaaatagaaaataatgaagatgctgacaaattagctggagagaccagggcaggtgaaattacagttgaggcaccagatgagaaaacagaaattaaagcagatgctgacacaccagctggtgagaccaaagaaggtgaaattacagtagaggcaccagatgagaaaatagcaaacaaaggtattgttgaaccaataatcggggagataactgaagatcaaactgcagctggagaaccagatgaagaagctagaacaactgaggaaacggtagaagatgttaaggtgctagatgataaatctacagcagatgggaaacctgtagagaatgccacagttgtgacacatgagaattcgacaacagttgagaatactctgaaggatgcgattgtcgcgccaccaggtgcaaataccaccaacgccgaaaaaactgctattggtgccacaattgaaacacaaaatgaggacgctccagcggagaggactatagaggatacctcggttgaggcaccagatgtacaagcaggtgcaagtgagtaaaccagcttagcgatcctttgcattcctgtcagtttctgttgatatcgacgtagtttgctcaactgattctcttgtctagatgatgtgttctgtatagaaaacctggaaccactttagcatcataaggctgttaggttttaaataacttgggcatctatattttgccccttatttttcctatataaacttcatctagttgtattcgatgcgcacgtgtgagtttgtcataaacacaattttctcctatatgtcagttcagtgctcaggcgatcagtgactgagtggaagtctttgggctatctacttggatcaaatgattctggtaccatttgtcgtctgtaaccaactgtgttctcgaaaaaaaaaaaaaaaaaaaaaaaaaaaaaagggcggccgccgactagtgagctcgtcagc

SEQ ID NO: 170604 - DNA, 681 bp, Zea mays
  Clone ID: MRT4577_87170C.1
cattgggtacctcgaggccggccgggattcctttttcaccatgcgacccctccccgccgtggccatggccaccgtgatgctgtccctccgcctcctcacctccaaaacgctgactctctgcagtctcgcctccctgtggcgctcactctccgtagactctttgaagcccccgtgctgacgcctccgagccgcctgcgcaaaggcgcctgagggcagagaggttgaatgcgcggagcccaggagagaggctgaggagtaacccctgagaccgaaggccatagagggtcacctgaccgacgcgtgggccgagaaaagacgcggacatcttcggctgttgtcgatgatgggatcaacacagtacatagtgatgcgggggatgtatatatacacactgagactgaaaggtgtcccatgtcaatgatcacgatcatattaaacaaggagccactggtgtcgtctagcgaaaaaggttacgttgtgatgccagcgatgaccaaagctgatgttcacgcacaggttgaagaacagggactggatgataaagctctagagttcaagtgacacgaagaataagaagttccagacgaaacttgcacgcagacagtcaaacacaaggttaagaaccagaggcataagtggatacgaacagaagcctgatgatccaatacttgagcctgctgc

SEQ ID NO: 170605 - DNA, 352 bp, Zea mays
  Clone ID: MRT4577_87171C.1
gagctcattgatggcggccgccctttcttttttttttttttttagattattttcaacaatgtccgccagcgcatctatagctgcagattattgtccatcctcaaaccggcgttcaaagatatagctacaaccagccgcggtcgagcttccaccttcagaaaactcttgctaacacatttggctgttgaaacaaaaccaccaaatttaaccatacatgacttaatattaccgattttcccatgaccgaatcatcgatgaataacttgcccttaccaacagaaaataattggcctttacttcagataagcacaggagagcgggcacccggcccaatttgttcaacttatttaaa

SEQ ID NO: 170606 - DNA, 404 bp, Zea mays
  Clone ID: MRT4577_87172C.1
ccggccgggttataaatagtattaatatgccaaaatttcaatacattataaatagtaataatatgccaaaaacatgtgtctgccttctcaaggtcgtacacggagaatgtttacatatattctctattggctattactatcaatacatgttgcctcattggtacttaaatgtcctaatgttttatttgaataccgtaacttgaaaatttaaattaaaactcagtatcaggtttcttacaacgatgagggcaatggaatggcatttattggtttactatcttcttggctaggtttatggtggtggtttgccccctttcatagtccttactaggtactaccttaattttggtcttctggaaacctcttggagaaagcaaatactctacccaattacttggtggggg

SEQ ID NO: 170607 - DNA, 563 bp, Zea mays
  Clone ID: MRT4577_87173C.1
cctcgtctccctccatcgctgccccacgccggcctcgaccctcaccttcctccgcaccgccggtgactgcagccaccgacgggaagccaagcagatgagcacgcccccctgcccgttctcccctccccctctccttactccttctcacttcttctctcagcaggagcccgccatggacgcccctgcctcgcactacccaccggatctggttctccatgtcgagatccgcccgttcccgacctccactcgcccgctcgccaaccgccagaaccccaagtcccgccagccgccaggagctcgggttcaagccgcgacgactgcctcctccgcacagcaccccgtgcgcccaaatcctcctcctcctctggttttatgagaccttgagcattgttttcgccaccattcccttcttttatcgattcgtgtatgcctcatcctcctgacctctgcttgcagattagtttggtcgcttgttgaaatcattagtttgtacgtactagtaagcatgcaagtgcaacacgcacgtctcgactaatattatattctttggcaagaatctatcc

SEQ ID NO: 170608 - DNA, 538 bp, Zea mays
  Clone ID: MRT4577_87174C.1
ccggccgggacgccacgatctccaacgccacagcttgcgtccgcgatgggactcgtttccggctcctggtcctccaccagccgtcgtcacggcgctccccaggaatgggtagcgaggcgtcgtcctccttcctcgacggcaatacgctgctgagacaagccgaggcgccccgaccgacattcgccgtgcgcgccgaggccggaccccaacaggacgatctggttccccgggagcacccctccgccgtgagtcgacggcagccttcccggcgacttcgtctgtgatccctggggcctcggatctgacccggagagactgcgatggaacgtcacgcgtgctcgcgcactgccggtgcacgatgctcggtgcgatgcacatcttcataccggagctcctgaccaagatcaacgacctcaacacgcccttctggtacaccgacggggaggatcagtacttcaccgacaccaccaccctctgcatcatcgagctcatcctcatcggctgaaacgagagccatcgttagcctgacatgatcaag

SEQ ID NO: 170609 - DNA, 226 bp, Zea mays
  Clone ID: MRT4577_87175C.1
tctctggcctgtgggtgattgggtgtgggcgtgtgggcctaaaatgggagggcgcatccaagcccgacccgtatttgccagattcgagtgaactggatccaactaaacaaacaattttccccatttgccattcccgacgagcaccttcaccgtctcctcccacctcgcgtggcacgccatggctttctccccgcgctcgccgtggtcgcgtgccaagaaaaaccga

SEQ ID NO: 170610 - DNA, 575 bp, Zea mays
  Clone ID: MRT4577_87176C.1
atataccaattaattcgtgttcaatttgtttgtccactacgtttttaattacgtacaaattaagcatatacctacctttttacatacatgcatgcatgcacagtacactatacgccattgatgaggtgagagctagttttttccatcggcaccacccgtacgtacgtatcacgaggtcgtcgccgacggctgccggcggagcagtggggggacgacgacggtgaagggtccgaaatgaggaggccagctggcgaacaaggtggatggcggtggtgccgctgctgatggagcgccactgatagcagcctcgctgacgtcgttatcgcatgagctagggcacactcgggctgtggccacgccgaaccctgctgctgcaccgtaaaacgggtaggcggcggagcaaagacgccgcagatccgccacctccctctgcagcctccggttctcctgcgctagcttctcgcaccaacgcttcaggtactcgcagtccacctccgtctgctttagcttacttcttgctcttctgttctggaacaagacctccacctggcgcggtcgaagtttcagccgcttcg

SEQ ID NO: 170611 - DNA, 825 bp, Zea mays
  Clone ID: MRT4577_87177C.1
gatttgcgccgccgagaagaacaggcaggcaggaggagtaggcgagtggccaacgactccctcctcctccacctccccccttcgcaccacgggtctccaccgagaccaagcacacgccattcccctcctctcccccgagctccgagagatccccagaccctacgcgcgagttcccatggcggcaacccagctccgcggatcggcggtgccggggacggcgaggaggtggcgggctccctccggcgccatcctccgcttcgcgccgctcgccacgtccaggctcccagcagcgtctcttcgtcggaggggagccttcagtggcctttccgccagtgtcaccagggagtcattgactacaatgtgcatgaagtcaaaatgtactagcactcccattgatcatgccactgctcctgagcatacagaagatgaagttcccgagccaaccgctgtggtgactgctagtgaagagataaatatagaccaggaagttgctccgccacataagagtgctataatacatgatttctgcctagggatcccttttggtggattattattttccatgggccttgttggatttctattttggaggagtcctgtaagtcttacttttggcgttgcacctggtcttgctatattgggacttgccgtgcttagtcttaagggttggaggagtggaaagtccagcttgccatttatactggcacaagcagctgttgctgctgctgtagcatggaagcactgccaggcgtatgccacaacaaagaagctgcttcccctggggcttttatactgcgctcagtgtcttgatgatctgcttctact

SEQ ID NO: 170612 - DNA, 411 bp, Zea mays
  Clone ID: MRT4577_87178C.1
acctatctctcttttttttcttttttttctttctttttgaaaaaggggtacaccgcggtacacaaagggtgggcgtatagatcatattataaatggactggggacacaccacaaatgggcacatggctagcctgctagcgtgcgccacccacacaacacaacccaacacactgttcgacagaagcgccccatgggggcatgggaagacacaactccgccctatggcctcatgataaatatatgactcgagtttgccctgcctcacaactgactgactgactgtctagaaaccacactttttacacccctatactttattaagggggataatgagctatcttaattcggtcgccccgcaaccaggagcacctatctcattttcacacatattcagggggcgcactggcagtt

SEQ ID NO: 170613 - DNA, 389 bp, Zea mays
  Clone ID: MRT4577_87179C.1
ttttagtccaagtgggctgaggactgtggggtcttctcttcccaactccggcgaaaggagcacaaactttggcatgtcgggcggatggtgtcagcattcactaacttcctatgcacaatgtggatgctacacagcttgagatgctcggaagttccgatatggaatccgtaactgaagacaaggtcacgcgcccatggcagtaaccgccttcgcttcagctcgccattacgaccgcgagctcttgtgttcagggcttcattgatgaagacctactttaactctgctgctagtacgaggctaaagccgatgaggatggtgtaagttgccgggagagcactggcactgaacgacgacaggaggactaacaggatgagcatgatgatgaggat

SEQ ID NO: 170614 - DNA, 120 bp, Zea mays
  Clone ID: MRT4577_8717C.1
ctcccgcctgggttcccgcaattataaaaactcttacagtacaaacaacaaaaggaagtgtggaacatacacttttgtgaacacctccaacacaagtatgatggtaataatttatataaa

SEQ ID NO: 170615 - DNA, 353 bp, Zea mays
  Clone ID: MRT4577_87180C.1
gagctcacttttcggcggccgccctttgcttttctatgctggagcgcattctaaagcccagggcctggcacatggagccctggcggatgacactctgacgattgaactacacctccagcagatcgctatgaatcgagctcgcttactagaaagccaaaggcacaatccacaagggcagacacgtgtctaggcagatcgcctactgaaaccggctatctgcgcaacagcatcagacaggaaggcgctaacatacggtggaccgccagcgaggaacggtagccagtgcacgcccgaggtgcatgagctcccgatcgacgtgcacccaggcgatcgagcatcgacgagaccgaata

SEQ ID NO: 170616 - DNA, 334 bp, Zea mays
  unsure (1)..(334): unsure at all n locations
  Clone ID: MRT4577_87181C.1
cgccgctgtcgaaaacctacctaccctgttatcaccctcactctnctttcatctccattctagaggacggcccaacccgtgcggggaatctgctggcgcttgtatgtactatctctatcaggggctgagaaatcctactgaactttccccgccggcgctgacatggacaccctaaaccctggccaactcctcggaacacggctacaacgactagcccgacgcatgctgattgcatgagcggcagctgctgctcataaagccgacgcaaagaagtgcgccgtggcgcctgctgagaaggctgcccagcctgctgacaccaccaaattaccgacca

SEQ ID NO: 170617 - DNA, 836 bp, Zea mays
  unsure (1)..(836): unsure at all n locations
  Clone ID: MRT4577_87183C.1
gcaacggncacagcagagagaaggcagcacagttagagagagagagagagagagagaggcgcagagccaaggaagcggagcagagcaacagcagcaggtcgaggaagaggagaagagaaggtccaggagacagcacagcagccaggaagagcaagagcaagatgctgcgcgggggcacgggcatgctgggggttgtcaacttcataaccttcctgatctcgatcccgatcctgggcggcggcatctggctggcgtcgcgggccaactccaccgactgcatccgcttcctgcagtggcccatcatcgtggtggggctcgtcctcatggtcgtctccctcatgggcttcgccggcgcctgctaccgccagacttggctgctccgcctctacctcttcgccatgttcttcgtcgtcctcgcgctcctcttcttcgtcgtcttcgccttcgccgcgttccgcaacgccaagaggatcgacaacgacgagccggtgggcatggcgcggatgaccaagtcccatccaagcaggttccagttctaggcaggcagctgctgccgtgggttcggaagcttctgccttgtacagatgatggccagtgggtggtgctaaggcttgggctttgctatatctttactgagatgtggattgtactgcatttgggggtgaaaaggggaagttcagtgtggtttgatttagtgtttagggtaggtatgttatgtggtagggggtacaatatgggatctgcaagaaacaagagaagataaatcatctaggaactgttctgtattggagattttttttttaaaaaaaatctgggggatatttgtaaaaaaaaaa

SEQ ID NO: 170618 - DNA, 1814 bp, Zea mays
  Clone ID: MRT4577_87184C.1
cccccgcggccgcctgccttcccccccctcgcccggccgccccctgcgccccccccgccctcgctgccagccgcccaccctccctcccgccgggaaaaacccccccgccctgtctccctccggctctgactcaccacgcacgcacaaagcagagcaggcaacggcacagcccagcacaggtagagagagaaagagaagcgcggagtcaagaagcggagcaacaacagcaggccgaggaagagaagagaaggccaggaggcagcagccaggaggaagagcaagagcaagatgctgcgcgggggctcgagcgtgctggggatcatcaacttcatcaccttcctgatctcgatcccgatcctgggcggcggcatctggctggcgtcgcgggccaactccaccgactgcatccgcttcctgcagtggcccatcatcattgtggggctcgtcctcatggtcatctccctcatgggcttcgccggcgcctgctaccgccagacctggctgctccgcctctacctcttcgccatgttcttcgtcgtcctcgcgcttctcttcttcatcgtcttcgccttcgccgtcaccgaccgcggcgacggccaggtcgtcatgaaccgccgcttccccgagtaccagctctccgactacggaggctggctccgcgaccgcgtcgccgacccacagtactgggccaccatcagcgcctgcctccgcgacggccacgcctgcgccggcatgaggcgcctcgcgcgggaccccaacactggcatgctcgtgccggagacgcccaccatgttctacggccgcaacctctccccgatccagtctggatgctgcaagccaccgacgtcatgtgcgttcagctacatgaacgagacgtactggacacaaaaccccggtgtcccgaccgtgaccaatgaccctgactgcagcaggtggagcaacgaccagcagatgctgtgcttccagtgcgactcgtgcaaggccggcgtcctcgcgggcatcaagaagagctggcgcaaggtggccgtcctgaacatcgtggtgttgatcatccttgtgattgtctatgtcgcgggctgcgccgcgttccgcaacgccaagaggatcgacaacgacgagccggtgggcatggcgcggatgaccaagtcccatccaagcaggttccagttctaggcaggcagctgctgccgtgggttcggaagcttctgccttgtacagatgatggccagtgggtggtgctaaggcttgggctttgctatatctttactgagatgtggattgtactgcatttgggggtgaaaaggggaagttcagtgtggtttgatttagtgtttagggtaggtatgttatgtggtagggggtacaatatgggatctgcaagaaacaagagaagataaatcatctaggaactgttctgtattggagatttttttttaaaaaaaaatctgggggatatttgtatgatggtgccagccatgatggaatattttctgaatttctcactgtatgggaatgctagaggtatgaatgtatgatgatatggctgtcagtgttttctgaatttctcagattgtatggcaatactagaggtatgatgatatggctgtactgcaggggtgcttcagctctgtgaactgtgtgggaatttcctgtatgccaaaaaaaaaaaaaaaaaaaaaaaaaaaaaaaaaaaaaaaaaaaactgtaggggtgcttcagctctgtgaagtgtgaactgtgtggtatggggagaattctgatgcctgttgcaatttgtcaatggccaagtcctaggtgattgttgtgggccaaaa

SEQ ID NO: 170619 - DNA, 1381 bp, Zea mays
  Clone ID: MRT4577_87185C.1
cattgggaacctcgaggccggccgggactcaccacgcacgcacaaagcagagcaggcaacggcacagcccagcacagagagagaagcgcggagccaagaagcggagcaacaacagcaggccgaggaagagaagagaaggccaggaggcagcagccaggaggaagagcaagagcaagatgctgcgcgggggctcgagcgtgctggggatcatcaacttcatcaccttcctgatctcgatcccgatcctgggcggcggcatctggctggcgtcgcgggccaactccaccgactgcatccgctttctgcagtggcccatcatcatcgtggggctcgtcctcatggtcatctccctcatgggcttcgccggcgcctgctaccgccagacctggctgctccgcctctacctcttcgccatgttcttcgtcgtcctcgcgcttctcttcttcatcgtcttcgccttcgccgtcaccgaccgcggcgacggccaggtcgtcatgaaccgccgcttccccgagtaccagctctccgactacggaggctggctccgcgaccgcgtcgccgacccacagtactgggccaccatcagcgcctgcctccgcgacggccacgcctgcgccggcatgaggcgcctcgcacgggaccccaacactggcatgctcgtgccggagacgtccaccatgttctacggccgcaacctctccccgatccagtctggatgctgcaagccaccgacgtcatgtgcgttcagctacatgaacgagacgtactggacacaaaaccccagcgtcccgacggtgaccaacgacccagactgcaaaaggtggagcaacgaccagcagacgctggaaccggtgcttccagggcgacaaaaaaaactggcccaaggtggccgtcctgaacatcgtggggttgatcacccctgtgattgtttatgtcgcggggtgccccgcgttccccaaccccaaaaggattgccaacccccaaccggtgggcatggcgcggatgaccaagtcccctccaaacaggttccagttttaggcaggcaactgcttccgtgggttcggaagcttttcccttgtacaaataatggccagtgggtggtgctaaggcttgggctttgctatatctttactgaaatgtggattgtactgcctttgggggtgaaaaagggaagttcagtgtggttttatttagtgtttagggtaggtatgttatgtggtagggggtccaatatggggtttgcaaaaaacaaaaaaaaataaatcatttaggaactgttttgtattggaaattttttttttataaaaaaatttgggggatttttgtaaaaaaaaaaaaaaaaaaaaaaaaaaaaaaaaaaaaaaaaaaaaaaaaaaaactc

SEQ ID NO: 170620 - DNA, 2461 bp, Zea mays
  Clone ID: MRT4577_87186C.1
gcatgtgaccgagcaacccactgcccgcccgggatcgagccgccgcattgccgcgtcccttctggagccgccgccgcccacgggggtaccggatctgaggagcaaaggccattacttatcgtaagcaagatttctaattggcggaagcttttatgtgtacctgactgttgaatttactggtctcaagtatagagtaggcagacaatctgcagtttagtggaacccaatgggttcttctccttccaaagccactggagaggacgccctggttctgtgcaaggatcggatgcgccacatcagacaagccattgactcgagagatgcactgtcagcagcgcacttatcttacacacaatctctccgtagtgtgggcactgcactgcggcagtatgctgagtctgagatctcaccggaatcatcgctctccatttcagaagtggataagtcaccatcacattcctctatggcatctccctcgccttcgcgtgcagtagagagtgttgcctctctggggcatcgagcaagtccatctattactccaccctcaacacgaatccattgcatgaaagcagcagcaaccactcctttgacctttgtgatagatcaatctactgctgaatttgtggggcgcgaatccccagtatcagcttttgtcccacccccaccaccattgcctccagaattatgtaccacgtgggacttctttgatcccattgatgctgctggtacctcttcctccaacaatgagaatgaggaaagagagccaaagcaaggtgggaccgggaaaccaagtcagttggtggacacttcaaccaaagctacatctgagcaggttgctgcaaagttggaggaaagtgaaatggaaaaagaattatgtgcagaggcagaggacccttcagagttcatcactcatcgagccaaagattttgtgtcgagcatgaaggacattgaaacccggtttatgcgtgcagctgaagcaggaaatgaggtttccagaatgcttgaaaccaagaagatccgacttgacatatgtgctaaaataccaggttctccagtcaagctaccttctgcccgatttgtgtcagcacttcgagtgtgctgcaatcgtgatgttattctcaaccaggaaactgcgcagcatgtttcaaaggttgtcacatggaagcgttctgtctcatctctttcatcatcatctaagagtgcacttatgacatcgataattaaagatgatgtggatgacagtaatagtgattttgttgaggaattcgccatggtatctggaagccattcttctacgttggacaggctacacgcatgggagagaaaactatatgatgaaatcaaggcaagtgaaaatgttaggaaggcctatgatgagaaatgtaacctcctccggcgccaatttgcacgaggcctaaatgcgcaggtgattgataagactagagctgttgtgaaggatctccattccagggtatctgttgtgattcaagctgttgatgcaatctccaaaagaattgagaagataagggatgaagaactgcagccacagcttgtcgagctaattcaagggctaatcagaatgtggaaactgatgctggaatgtcaccacaaacagttcatcacgatcacattagcataccacgtgaaagactcgacctcggcgcgtcaaggtgagcaccaccatcaccgccaggcggcgatgcatctgtggaatgagatggacagcttctcctccagcttcagaaactgggtcaccgctcacaaatcgtacgtcgaggccctcaacgcgtggctccagaagtgcgtcctgcagccgccccaggaccggcgcaggcgcaaacgcaaggtctccttccctcctcggcaggccgtctcccctcccatattcatcctctgcggggactggctcgccaggacagaacctctccctgctgacgagctatgcagatccctcaaagacgtgatgcagctcctccgcgactcgttcgagcaccgcgacgagcagaacaggcccagaagcggcgagtcgcaggagtgcgggatgctggagaacagtagcgagcaggaggcggcggctaagagtgggagttgtgcagcatcagctgaagggctgcagtcgagactgacggcggttcttgaccgcctgacaaagttctcggaggcatcattgaagtgctacgaggagctcaagcagaactacgagatggcctgtgctgattataggagagttggaccaaatgctcagcttgcttaggattgatgttggttgtggtgtgtgacttcttgctatctctgttctggatgacaaattctctagtgttttggtatatattttgtgaacaatcaggtgatagcacaatctttggccgaatattactgatgatttagtgctatcagttatgtaagcttcatcacttgccctgccctgatgcttcgaaaggcctatgagaaccgttttcac

SEQ ID NO: 170621 - DNA, 1665 bp, Zea mays
  Clone ID: MRT4577_87187C.1
aaaaaaaaaaaaaaaaaaaaaaaaaaacacgaggccggccgggagtgggtggggctggcctggcctacgcggctgccttgcatctgctctcccgtacagccgcagcgtgctcctcgacctcgctaaaaaccaaccgccctgtctccctccctcactcaccacgcacgcacaaagcagagcaggcaacggcacagcccagcacaggtagagagagagagagagagaagcgcggagccaagaagcggagcaacaacagcaggccgaggaagagaagagaaggccaggaggcagcagccaggaggaagagcaagagcaagatgctgcgcgggggctcgagcgtgctggggatcatcaacttcatcaccttcctgatctcgatcccgatcctgggcggcggcatctggctggcgtcgcgggccaactccaccgactgcatccgctttctgcagtggcccatcatcatcgtggggctcgtcctcatggtcatctccctcatgggcttcgccggcgcctgctaccgccagacctggctgctccgcctctacctcttcgccatgttcttcgtcgtcctcgcgcttctcttcttcatcgtcttcgccttcgccgtcaccgaccgcggcgacggccaggtcgtcatgaaccgccgcttccccgagtaccagctctccgactacggaggctggctccgcgaccgcgtcgccgacccacagtactgggccaccatcagcgcctgcctccgcgacggccacgcctgcgccggcatgaggcgcctcgcacgggaccccaacactggcatgctcgtgccggagacgtccaccatgttctacggccgcaacctctccccgatccagtctggatgctgcaagccaccgacgtcatgtgcgttcagctacatgaacgagacgtactggacacaaaaccccagcgtcccgacggtgaccaacgacccagactgcaaaaggtggagcaacgaccagcagacgctgtgcttccagtgcgactcgtgcaaggctggcgtcctcgcgggcatcaagaagagctggcgcaaggtggccgtcctgaacatcgtggtgctgattatccttgtgatcgtctacgtcgcgggctgcgccgcgttccgcaacgcgaagaggatcgagaacggcgaggcggtcggcatggcgcggatgaccaagtcccatccgagcaggttccagttctaggccgctgctccgctgccactgcgggttcgaaagctcttgccttgtacaaatggcctgtggggtgtggtcctaaggcttgggcttcgctatgtcttgctgaattgcggattctactgcatttggtggtggaaatggaaagtccagtgtagtttggggttgtgtttgtttgagtgtttagggtaggcctattatgtggggttggctggggtacaatatgagatctgcaagaaacaagagaagttgaatcatctaggagttgttttgtaaggggagatctttaaattctagggggatagttgtatgatggtgccagccatgatgcagtgttttctgaatttctcagattgtatggcaatactagaggtatgatgatatggctgtactgcagcttccaggaccaaaaaaaaaaaaaaaaaaaaaaaaaaaaaaaaaaaaaaaagaaaaaaaaaaaaaaaaaagcggc

SEQ ID NO: 170622 - DNA, 294 bp, Zea mays
  Clone ID: MRT4577_87188C.1
gcttgcaatcgcctctgcttcctccagctctggtagccgcgtgtccctgcttctctgctttgcgccctctccgtcgatggctgaatcacaacttctggatcggaggagcatccccgcctaggtctctacagccatgtttcgtggatcaatcgacaagcttgcagctcgcgcgtgcccctgctcagactacgtctctctcatcctctcggggtggcggtgctcggttcctgcgctcgccggccgtccccttcttcctgcgcgtgtggccctctggctccgccccccctcttgtcg

SEQ ID NO: 170623 - DNA, 1528 bp, Zea mays
  Clone ID: MRT4577_87189C.1
aaaaaaaaaaaaaaaaaaaaaaaaacgtcgaggggctctgtctcatcacccgacgcccaaagaagcagagcaggcaacggcacagcagagagaaggcaggacagttagagagagagagagagagagagagagagagagaggcgcagagccaaggaagcggagcagagcaacagcagcaggtcgaggaagaggagaagagaaggtccaggagacagcacagcagccaggaagagcaagagcaagatgctgcgcgggggcacgggcatgctgggggtggtcaacttcataaccttcctgatctcgatcccgatccttggcggcggcatctggctggcgtcgcgggccaactccaccgactgcatccgcttcctgcagtggcccatcatcgtggtggggctcgtcctcatggtcgtctccctcatgggcttcgccggcgcctgctaccgccagacctggctgctccgcctctacctcttcgccacgttcttcgtcgtcctcgcgctcctcttcttcgtcgtcttcgccttcgccgtcaccgaccgcggcgccggccaggtcgtcatgagccgccgcttccccgagtaccagctctccgactacggcggatggctccgcgaccgcgtcgccgacccgcagtactgggccaccatcagcgcctgcctccgcgacggccacgcctgcgccggcatgaggcgcctcgcgcgggaccccaacacgggcatgctcgtgccggagacgcccgccatgttctacggccgcaacctctccccgattcagtctggatgctgcaagccaccgacgtcatgcgcattcacctacatgaacgagacgtactgggaacaaaaccccggtgtcccgaccgtgaccaatgaccctgactgcagcaggtggagcaacgaccagcagatgctgtgcttccagtgcgactcgtgcaaggccggcgtcctcgcgggcatcaagaagagctggcgcaaggtggccgtcctgaacatcgtggtgttgatcatccttgtgattgtctatgtcgcgggctgcgccgcgttccgcaacgccaagaggatcgagaacgacgagccagtgggcatggcgcggatgaccaagtcccatccaagcaggttccagttctaggcaggcagctgctgccgtcgcgggttcggaagcttctgccttgtacagatgatgaccagaccagtgggtggtgctaaggcctgggctttgctatatcttactgagatgtggattgtactgcatttgggggtgaaaaggggaagttcagtgtggtttgagttcgtgtttgatttagtgtttagggtaggtatgttatgtggtagggggtacaatatgggatctgcaagaaacaagagaagatcaatcatctaggaactgttctgtattggagatttttttttaaaaaaaaatctgggggatatttgtatgatggtgcttggtgccagccatgatggaatattttctgaatttctcactgtatgggaatgctagaggtatgaatgtatgatgatatggctgt

SEQ ID NO: 170624 - DNA, 395 bp, Zea mays
  Clone ID: MRT4577_8718C.1
agcagtggtaacaacgcagagtactttttttttttttttttttttttttttttattttttttttttttttttttttttttttttttttttttttttttttttttttttaaagggaacagggggcatggcctggggctggactggacactcggcccacacaggacaacacaacacaggggggctggtttttgagccccaggaaggacaggacagggcacgacccgacacgacacggggccaacatttggggacaaatattcggtcccccccccggcccccccctagaacaaggcatgcctagaaaaagagggggccgatagagcaagggctgctttgccctggcccatggcccgcgggtggctggctgactgacctcgccaaaacacaacaaacga

SEQ ID NO: 170625 - DNA, 599 bp, Zea mays
  unsure (1)..(599): unsure at all n locations
  Clone ID: MRT4577_87190C.1
cttttacagactttgctatatggagtgctagtctattcaatgattgggtttgagtggactgttgccaagttcctctggtacctgttcttcatgtacttcacactgctttacttcacgttctacggaatgatggcggttggcttgactcccaacgaaaccatagccgtcattacctcatcggcgttctacaacgtgtggagcctcttctcaggatatctgatcccccgacctaaactgcctgtctggtggaggtggtacagctggatctgcccagtcgcatggacactctacggattggttgcctcccagttcggcgacatcgcgcatccgctggaggactcaccgacaggccagacggtggcgcagttcatcacggattacttcggcttccatcacgacttcctgtgggttgtcgcaggggtgcacgtcgggctgaccgtgctcttcgcgttcctgttcagttttgccatcatgaagttcaacttccagaatagatgaggacaggaggcccaggccattggcaatttttgcattcgtttgttggctgtgggntggggtgggtggacaagcatacctgctgtgcgtgtagcatctacggc

SEQ ID NO: 170626 - DNA, 749 bp, Zea mays
  Clone ID: MRT4577_87191C.1
ctggcggacgaacacacccagtcagccgccaggccgccgctgtgccttccgccgtccgccgaggcaccgagccgctgtccctccccgtccgccgagccgttgcccctgtggctgtgctgtgcctccgttcgccggccgagccgctgtccgcctgtcactgtccctcagtccgccgagctgctgtgctttccggcttcgccgtccgccgaacaggttcgtccgcgagcgcgacgcgccgagcttccgccgtccgccgagcaggtccgtccgccaagccatacctaaatttttttccgtcctccgccactgagggcaggggagcggagagccgccgccatggcggaggaggcggaggggatggaccggttcgatatggagggggacttcgagggcgggcggttcggccgcgacggggagttttactaccggagccggcgggagcgggcgccgcagacccgggatgacgccatctacggggtcttcgcggagggcgactccgactacgattcggaggacgacgaaggtacccgccgccgccgccggaagcgccgcaaggacggcggcggggaggccgacctcaccaagcccgtccagttcgtctccaccggtaagttcatgcccacccaggagcccgagcctgaggagaggccggggctcgggcgcgccgccgccgctgctgccgataaggaggaggaggaggaggaggaggatcaggacgatgagggggacaccgagatgctgccggcgat

SEQ ID NO: 170627 - DNA, 162 bp, Zea mays
  Clone ID: MRT4577_87192C.1
tatagatgtcatcgaggtggaggagtacaaggtggtggtacggatatagctatgaggtgtaatggatacggctctaggtaggctatagtgatggtgatgacggctgggggtgtggatatggtgacgatggtagtggttgaaatagtgagtcttgctatagtc

SEQ ID NO: 170628 - DNA, 799 bp, Zea mays
  unsure (1)..(799): unsure at all n locations
  Clone ID: MRT4577_87193C.1
ccggccgggacggaacgttacacagcgctgcagcacgcgaggcccttcgtgagcgtaaatgggctgctttgagcgaaaaggcggaccagcagagacaaagcaacggcaacggagtggctgatgctcctgctcagatcacacccatgccccgtgtagacgaaaacgacgctgccaccgaggacaattcaaagcgtctcgattcgcttaagttgcaagacggccgacccagtcttcacgagagagacaactctgtaggatccgcccgaagccggtaatccaaaccgacagctctatccagcatacatcagtgcatcgagcttggataaaagagcgcagacccctttccaaaatcgaagcatcaagatgggatatagtaggttcgaataccatcattgctgtatagtcttgtttgacggtggtattatgattatgaggaggaattggttttttcgcagttcaataatggacttaagaacatgcgtactcgacatacggtcactttgctgggttggaattggccaatgtggacaccaccattgctctgcaacgcttttggacctttcaaccttctttcttggttcgcgcggcagctagaccacattcagggctgccttggggagggggaaatatgcgcaggcgacattacaatgctatcgtgtttttctcttgtccacttcccgtgcactgaatatgacaagcgaagccgaatgctatattatatctgtgccgtggttatgngtgggatacgggcataaaagggcatggacgtctacgctttttcgtgtactctttgggcgaa

SEQ ID NO: 170629 - DNA, 407 bp, Zea mays
  unsure (1)..(407): unsure at all n locations
  Clone ID: MRT4577_87194C.1
tttttttttttnnnnnnngcctgatttttttatttaaaaaaaactcagctctgtgcatatcattatttgatgggtccacctttcatctttgatagtagtagtgcgtgccaactagcaactggggggtcttaattcgacaagttgctactagtacgtacagtactgattctgctagtaggctctagtgatgttgttttccggtgggggccgccgagctacggcttgtgtctgttgccatttgccagccagccgcgagtgtttggtggtttaatcatacagcgggttgtggcggctcttgcttctttttctttgtttttttttttgccattgattcatccatctatgctctctttgggcgagtgatccaacaccatctgcaacgccatccgtctttggatccaacacca

SEQ ID NO: 170630 - DNA, 232 bp, Zea mays
  Clone ID: MRT4577_87195C.1
cacgggcgtttttttttattccattgaaggaccgggaaaaacttggtttatggaactgaaccttttcctggttctttaaaggccacagggggcaaaaaaaaaatccccttcccggattgaaagggtcatcctgtgggaccttccctcaaccttaaattcttacccataaaaagaaaagattccctcttcattgtgggtggagttagtgaatttatttttggagggccttctc

SEQ ID NO: 170631 - DNA, 210 bp, Zea mays
  Clone ID: MRT4577_87196C.1
atagaagagtatgaagtagatgaagggatagtaagattgggatgtatagagcggacgaatttatttttttttttttttgtgttttatatttttatttttttggttttttttggtagttagtatatatttagtgtggtattatataggatatatggagaagttgatggggaattgtattaagaagtggaaataattttaggaggggattgg

SEQ ID NO: 170632 - DNA, 299 bp, Zea mays
  unsure (1)..(299): unsure at all n locations
  Clone ID: MRT4577_87197C.1
ncccacgcgtcctaccagcggcaccacccatttcttcngcagcggcaagaggcggtcttgcgatcttcttcaatcccccccaccccattaaggcaccacatgtcctcctccgtccactacaactcctatgaaactgccaagtggtaaaagatcacctacaccttaatcttatacctacaccctcctatcgttttacaacctgtccaaagaccacccccacttctatgatcctccttcttacccctatttttaaattcaaaacaaataattcccaaatgacccctatttcttattttata

SEQ ID NO: 170633 - DNA, 141 bp, Zea mays
  Clone ID: MRT4577_87198C.1
ggacgattgtacacatggctgacaacattaaaggagtgatgctgtgctggccataatcacagatgggcacactgcgaacaacgagcgaccgtaacgaaacatacggacacggacacgaccatcatacgaagataaaccccc

SEQ ID NO: 170634 - DNA, 1164 bp, Zea mays
  Clone ID: MRT4577_87199C.1
gcgtggtccgtcaagcccacgcatcatcactcgcgcgcggggccgtccgaccgggctctcctccctcgttttacccgcacccgccgcaacgccgagaagacgcgagaggaagggaggaggtgagccaccggaagcggagacgtgagtagtcgaccaaccccgtcgatccggctgcggcgcggcgtgctagatcgctaccgaccatggtggtggaggagatcgccgagggggtgaagaacctcaccgtcaccggagatgcggcggcttcaggcggagaggggcagaggaggggcggcggcggcagcagcaaccgcatccaggtgtccaacaccaagaagcccctcttcttctacgtcaacctcgccaagaggtatatgcaacagcacggcgatgtagagctatccgctcttgggatggccatagcaacagttgtgaccgtggcagaaattctgaagaacaatggatttgctgttgaaaagaaaattaggacctctactgttgaaataaacgacgaatcaagagggcgtccattccaaaaggccaagattgagataatcttgggaaagagcgacaaatttgatgagctgatggccgctgctgcagaagagaggggcgaagtggaagatggtgaagagcaggcttgaaaacagtaccgatgacaagctgctgctgttgtgctctgttagtgttgtttaatttagtttaataccgtgtgcatgagatatggcacgcgttcttgctcaactacatcaccatggcaatgtctgcaaatccatggattgatggatggatgttggttgtttcttaacattctggacatgttgttcattctttggctatgtatgttttagcagtccagcgttccccttacaaaatatggcgtgctttgttgactacacagaccgtagttcctttcctgaattattgtctgcaaagataagagatatcaatgggtaactaatacccgaatgaccaagaactccacacggaactgctcgaattcttcccatgttcgacatgggtcttttttgctagttcttttttccctttcaaacgtgaccagtttatgagctgattgggacttgggtgctctgagatcttgatacctaccttatatgattagatttgaataattcacataaaaaaaaaaaaaaaaaaaaaaaa

SEQ ID NO: 170635 - DNA, 300 bp, Zea mays
  Clone ID: MRT4577_8719C.1
cataataaagtaccattatctgcatactgcaagcaacataatccagatagttgcattacacataattttcataaatcaactcaagaagttcaatctccaatgtctgcatccagattctttgtcctagccagttcttcgcatgcacatcagatggtttaccctgatagctagttttcagctcgcttaccttaatcaaagagaatagctcatgttttgaatgagaaaaaaaattatcacatcaagaattattatttgtatccaacaagaacaagtctcatgtttatcagtaacttgcaaaaa

SEQ ID NO: 170636 - DNA, 238 bp, Zea mays
  Clone ID: MRT4577_871C.1
gtaaaagacaattcacaggtggagaacatctttttacagtccaaaagcactccaccgggtacgtgagttcgtgcgcagttgtgcagtttgccaacgcaacaagactcagcaccttcatccagctggtttgctgcaacccttgcccattccttctatggtttgggctgacatatcaatggacttcattgagggctttccaaaggttggtggcaagtcagtagtgctgacaattgtagac

SEQ ID NO: 170637 - DNA, 345 bp, Zea mays
  Clone ID: MRT4577_87200C.1
tgcaagggttgacaggggtagccgagaccacaccgactgtgacgcgggaggcggtccctgtccaatgacagagcgctgcactgacgacacagcggataccactgtttggataggacaaatgagcacatgtcctcttacggactgagctgtcttgaggcgcgtgaacttgagcacctgggactcgctgacgcacataaatccatattgaataaccctgtgcttgataatttgatgcctttgtatgaatttttgtttgactcatcacttctccattttggtgtctttgcttttcacaacaagatcttgtttgacctaagggtccaatggaacgcaacaacctgatct

SEQ ID NO: 170638 - DNA, 112 bp, Zea mays
  Clone ID: MRT4577_87201C.1
catgatgtatagatggaggagtgtgcctagtagtactcacctaagggttgagcttgccgaccaaagatgaaaagtttccatgctttaaatggaaccggagggagggcccccc

SEQ ID NO: 170639 - DNA, 266 bp, Zea mays
  unsure (1)..(266): unsure at all n locations
  Clone ID: MRT4577_87202C.1
ccagcgtttttttagagcacagnattagcggccacgctggtgcagtaataatgcataaaaatctccttgtctctctttgttgttgttgttgtttccgatcgttgtaatataacgccaactcccagtgtttagttgagttgtaggatcagaacaatagtaaatcccagggaaactttggtgagatctgggagggggggggatcaataatcatcatgctactcctactcttaanggggggggggggaaaaaaancnnnnnggggaggg

SEQ ID NO: 170640 - DNA, 204 bp, Zea mays
  Clone ID: MRT4577_87203C.1
ctcattcatacgcgtgagccatgctgagcaacaccggtcctatttgagcgatcggggagtactacaccgcttcaatagatggcgccaatcaaagaatatgacacaggggagacaatgaaaaaagtgcgtgaaagtgaatatatgatacaatcaaatcttactacacatacaaggggcagctgaatatcacagacacacaacctg

SEQ ID NO: 170641 - DNA, 754 bp, Zea mays
  Clone ID: MRT4577_87204C.1
ccgtgcatgactaccatcgtcggtgatggcaccgcagacggcaacgcgggtcgcctccggccggctcgtgttcggcgcgccaacaacaacagatggcaagctggtaaaaggtggaagcaggctgcgtgtgaggagccttgacaataatggcaggcgtgttgcggtggaagccgtcaacggcgctgccaggccgaacggcgcagcggcggtggccgacgtccggcaagtgcccgcgccgccgccaccggaaggcgacggcgacggcgtcgccttccggctgggtaagtttgcggaagggaggctcgtgtacaggcagcagtttgtggtcagatcctacgagatcgggcctgaccgaactgccaccatggagaccctcatgaacctcctgcaggagacggcactgaaccatgtgatgtgctctgggctcgccggagacggtttcggcgccacacggcagatgagtctcaggaagctcatttgggtcgtcacaagaatcaacatccaggtcgacgagtacagcagatggggagatgtcgtggagatagacacctgggtcgcgtcgtcagggaagaacggcatgcgcagggactggatcatccgcgaccgcaacaccaagaacatgatcgcaagagccacaagcaactgggtgatgatgaacagggagacccggaggctgtcgaaaatccccgacgaggtcaggcaggaggtgctccccttctacctggacaggagcatcatcgccgccgccactggc

SEQ ID NO: 170642 - DNA, 296 bp, Zea mays
  Clone ID: MRT4577_87205C.1
gggccaagggaggggggatttttgggacaataatagggggggggggggcaagattcatacaacaggtttacaggcctttaaaaagcatttttccggggaaaaagaaaatgcgcgcgcccacccccaagatcacattaaacaggcccttagggttttcaaacacacacaagatcacattaaacagacccttatggttttttaacgggggggcatataagaacaagattttattgggggggggggggcccggatgggcacatttccacgatgatgggggcccatgcccttaaaggagg

SEQ ID NO: 170643 - DNA, 347 bp, Zea mays
  Clone ID: MRT4577_87206C.1
cacacacgtacattcacccggcggcactaatggcctcggttccggctccggcgacgactaccgccgccgtcatcgtatgcctatgcgtcgtcctctcctgtgccgcggctgatgacccgaatctcaccgattatctcatccacggccgcgtgtactgcgatacctgccgcgccgggttcgtgactaatgtcacggagtatatctcgggcgccatggtgaggctggagtgcaagcacttctgcaccggcaatctcgagcgcgccagcgacggtgtcatcgatgcaactggtaactagactattcatctcatcgacagccacgatgacgacatctgccaggtggtgctg

SEQ ID NO: 170644 - DNA, 375 bp, Zea mays
  Clone ID: MRT4577_87207C.1
tcaggatcctattgccctcacgctaccatttccgccaattcatcacagccaccagacttcgctcgccttacgtatacaccaacccacctccataaaccgtatgcacagccaccttaatggtatctcttcatcttctctttcctacaacaggactacttccatctagctcatgacagataccaccttatctacattttctcatcctgtattgctaattttatctccctatttcttcttttttatttttttttttttatttttttattttttatttttttatttttttatttaatattattatttgttttatttttttatttttatttttttttttttactttttttcttttttattttttttatttattttttttt

SEQ ID NO: 170645 - DNA, 510 bp, Zea mays
  unsure (1)..(510): unsure at all n locations
  Clone ID: MRT4577_87208C.1
tggctgcataactgccatangaatcagatcacctctccctacgaggaccgactgcaagctgcctagaacccaagacccatggccatgggcgccgccaccgtcacagcgtctctgcccgtggcgaagggtctcaggaagcccctctgcgccggcaggaacacgccatcgatccaaggagtacagggagccccccgctgtggcgctcttagaaccaggatgagctgaagtcctggtgcttctaccgaagcggcatcgccgaaggagtgggcaccttcctcttgctctacatctgcatcctcagcgtgatgagggtctgcaagttcaccttcaagatgcgccacacggcgtaatacagggcatcgcctgtcccttcggaggcatgatcttcgccctcgattactggaccgccggtatctccggtcgaacacatcaacccggcggcgaccttcggattgttgctggagaggaagttgtccctcaccagggaggagttgtaaataatcatgcagt

SEQ ID NO: 170646 - DNA, 204 bp, Zea mays
  Clone ID: MRT4577_87209C.1
aaattagcaacaaccccgccatttttccctttcctgcggaccgggaactggcacaagaaaagggcgtattttgctttgtccacctgggcaaacacccgcaaggtgcattttttccaaaaaaaactgcccccaagcttggtgaaacaataactcatgggccctttgttgaagtccgaggcatactattttacaactagaaacttt

SEQ ID NO: 170647 - DNA, 157 bp, Zea mays
  Clone ID: MRT4577_8720C.1
cccacgcgtcctcagacgcgttggctcaaattgcatgacatcatctcctggtaagtaaccttacaactttcgccacggccaccaatcacaagacctacaattctctcctattgaaagttaaccaaatcagatctgtgaccaatagtatctaatcttt

SEQ ID NO: 170648 - DNA, 575 bp, Zea mays
  Clone ID: MRT4577_87210C.1
tcggctcgaggatgcacgcaggcaagtttaatttggaggatcaatagtagctagctagagctactagagacatacatggcggatcctctggtgcgagcgcgacccaaaaggaagaaggtcttagcggactacttggtgcgactccgatggattcctgccctcttcgtggcccttccaatatctgcgctgatctacctgagcgtcttcctggtgaacacgtggtccgccatgaaatccgagaagcgtcgacagaaggaacaccaggagaacgtagagagggtcgtgaagcgtctcaaggagagggatccgaaaagggacgtgtcagcatccctcggctgggtgagcacaagggagagtgttagcacgtcaagcagtaccgaggaagcagcggttcgcacgtcgcggcggaaaatgtgagactgtttgggccagaaggggccatgtaagagtacgtgggccgtaggcgcgtgtgggctaacaccgtgaacgagagtatattactgaacctttgtcgctgagaagggacatgcaaaaacagaattgttatccaagtaataaattcttcgttctccttt

SEQ ID NO: 170649 - DNA, 347 bp, Zea mays
  Clone ID: MRT4577_87211C.1
cccactcgttcggccgtagttgttatttttcgaatgtcggcgctgccggagttgttgggaagagcattcggaaacaactcgtccgattactgggttcctggaacatgactacttgacatgtgataggcgtatatctgatctgtggactgttggcgtatcaccgcattctacacatctaatggtagcgtatgtgcgagaactggagcatgtaaatgtctttaaactggcatctgattgagatgcggcacaactgctgatctggcatgagacatgtctgctatcggcgaaaacgattcaaacagcgttacggtcgaactcagaggctgctgtacatgaatttggttgcg

SEQ ID NO: 170650 - DNA, 283 bp, Zea mays
  Clone ID: MRT4577_87212C.1
aagattttgggatacttaacaaaagtaattttatttaatgtttatagctgccttcatacagtttagatttatatgcaaagtatcaccgtgtcatgaaccttcttggttagcagataacttgcgtgtaggcttgggtctgaccattctcaccgtgtttccttgccagtgctgctgggagtcagaccaaggggaccagagtgcccctgtcttgatgatatctcctagggacccagtggccctggagagaagaggaaaagaaggtactgggtggcatgaaatgtct

SEQ ID NO: 170651 - DNA, 502 bp, Zea mays
  Clone ID: MRT4577_87213C.1
gagagaggctgtgcactggactcagcctgacaaacaggaacaggggcgggcagggcacccagacccagcaaggccaaactgccgccggtagccgacacagatctgaggcgagcccggtccagcggggccgcgcagccgcacggagatctgtgactgtgagcttggagtgcaagggagccagccgccagcgaggaagaggccgatgccgagctggatggaaccaaaaggcattgcgttgcgtcctctcatctgatctgatctcatgactgaccagtgttccatttgagacgacggtgctctgatctgctcgagatcctccaggatacaatacatacgataagagctgcgagcgcataccaatgccaaaatggccagaaccaaccacttttcatgttgctgcataagcataactgcacgcgtgctgtagataattacgctgttctgttcgttgtacactcaaccgcgtcgctgtcgaaccatacaattgtgagtgcatagcaac

SEQ ID NO: 170652 - DNA, 203 bp, Zea mays
  Clone ID: MRT4577_87214C.1
ggaagagggcggtatttcctgcacacgtgttgacattgcaactaccttttgagcgcatcaagatatctgatggactgttggggcatgctacatgtataaacgcatgaatcccatgttagctcactgtgcgcggtgaggatgctgaagaatccgaaccattctgaaacgcgcctagaaagttgcatacgaaggcatcaaaaagg

SEQ ID NO: 170653 - DNA, 334 bp, Zea mays
  unsure (1)..(334): unsure at all n locations
  Clone ID: MRT4577_87215C.1
tttaattcggcacgaggctggtgcttgaggtcctgcggaagaaccggntcgccaaggcagaggcagctctccgtggggagctcaccggctgcgccgattcgaacggcatgaccgggcagaggtgtgtcgctgcgctggttgaagacgacgagctggaggactcggcgagctcctttgggggtgcgggcggtgctgcgaccgagaggagcgcggcctcttcccgggagttcatcgtggcggaggctgatgttggcgccctgccgaccgggtggggtggtttgaagggctccggcattggccagcctccggagaacaacgggggggatctgcgtcc

SEQ ID NO: 170654 - DNA, 536 bp, Zea mays
  Clone ID: MRT4577_87216C.1
ccacgcgtccgctagtggctagcactgccgcagtaggtcagtcgggtgtacgtacggtgccatggcctcggcctcgctgccgctcctcgtcatcgtcctcctcgtctcggtcgtcggagcttgcactcgtgctgccgaggcggcggctacccgtaggaaggacgatgtcatcacaacaaccaccagcagcagccgtggatcatcctcaccgtcgtcgtcaccctccccaggagcagcagcagagaagaaggagaagcccaagggcggtggcggcgcgacgtccgcgaagaagccgtcgccgccggccaagtgcgtgacgagcaaggactgccacctcaagcggctggtgtgcgccaagaagtgcaccatggccgcacacaacaagtgcgccgccaagtgttcccactcttgcaacgccctccccatctgcacctagctgacatgcatgctatgtaacccccagtaaaaatattatttatttaataaaatggaccacatgtctgtagttcaatccgtaaaaaaaaaaaaaaaaaaaa

SEQ ID NO: 170655 - DNA, 259 bp, Zea mays
  Clone ID: MRT4577_87217C.1
atcgggaccagcgcgagcaggcccaacgctgctaacgcggtcccgtcccagactgcggcctggcctctggccctgcgggggcgcggtcgcgggccacggggcctcccgcgcggagggcagatgacctggcgccgcgcggcgcacacggtggggggacttggcgggggcacggacattcacaccggggtcgtcggggacaccgtgagactggcagggcggtgcgtgatgcgactgccgggcaagttgtactgtccttaac

SEQ ID NO: 170656 - DNA, 2463 bp, Zea mays
  unsure (1)..(2463): unsure at all n locations
  Clone ID: MRT4577_87218C.1
ggaaccagctttcaacctccccttcgccggggacagccgcgacttcgcgggcggcactgccttcgccgccgccggcttggctgactcgtccacgagcacgacggccagcggggagatgacactggctggggcgggtttcaggttgtagagggagaaggcggagagatcggtggcgaggccggcgccgacccaggaggctgcccggcggcggcgctccgccgcgacagccatggtttcctcgtcggctgttgacgcatcgccggctgctgattgatctggtgaagtcgcggtggagaccgtggtcgtggccttggttagagactcggtgacgatggtggctcgagagattgctccatgcagagcgaggaactgctcgacagcctgctgtgggttctgctcctccgccgacgagctcacctccgcgtacgagcttaaacatcgaacgatgctctctgccgcagaagcttcttgcatggcttcaacagcagccatttgtgctgcatccctgtacttcagaagctccttccctagtttagcgagtgatggaggaagcgttgtccacgaagcgctagcatctgtcagtttcctgttacttgcagcaaccttcactagattagtgacattcgggttatttaaaacccctgatgtcctccttataggagaagaaagcttgttgttcacaactttgtcggaatcgtctgcaggagcactcgctgagctcttcctgggtggagtcagaatcttactgtcatccttattcgatggtttctcttctgctaatgattttcgtctgggagtcgaagagcttcgattttcagacttcttttcagctttggcaggctttgaatccgaattgcctttgtcctttgcatctgctttcccttcccagcttcttctcaaggccttgggcccagattcgaagctcaacaaggtgttactaatggagttacccagggaggacttcctccctgccgtagtggccttcaacacagacgcagccttttctagcaaggacagccttgacggcggcgatttctctgctcctttggttctcactctctgtttcatgtcactcgagaatttatcgaacgacgcaggcagagaatgggcgctggtcggggaagacggcgtcgacctagcgctggttgattttgccttcgagctaaccacgtccttcttgtccgagaggaggccattgagcgcctgtttcgagaggttggagttcgacttggtgagctggggcttcttgctctctgtgccgttgctcttgggaggagcattgatcttctctaacctgccctgctctttctctagcgacagggcaccggcatccttggaactaccattggtggaggaggcttgggcggccttgccgctgccaagaagaaaagtggaggagctggtcaccacaagatcctccgggctgccgacgcaggcatggcggcccgggaccggcctgacccccctgaggatcggcaccggggtggctgcctcgagacggtcgacatggacgaactgccccagctggatgacgtcgctgaggatgaggtcgtgctgctcgtccggcagcgacacgtaggtggcgtgcgacgagtcggacaccttgaggtagaacccctggttggtgaacaggtcgctcccggcgagcgcgggcacgatgctgacgacctggagcagcgacgaccggtgctcgcccgcgaccttgacgtcgctgttcatgtgctgcaggagcttgaggaggaccccgggtaccagcgacgccatcgctgcagctcctagcgccgcatttacctcgtgatggactgccgaatcccgcaaggcccgatcccttcctccggcctcacttcggtctgctcttcttcagtctcttcttcgtcctcctctcaacgctcgccctgagtcggcggctgctgcaggcgtgcggcctacgatctttgaaaagcgcggaaggctttccgcttcctgctcagggagaagaaggagagggggagggtctctcctgctggccttgtcgcatccaggacaggaatccccgccggttggctgcaggaggcggtgacgactgacgagatgaaccaaccaggaggcgacggtgtcctcctctcctggaccctggtgcgtgcgcgctgggagcctgggaggcgtggtgcttctctctcctctcctctgcgcgtgctcgctgtctctctctaaaaagcagaggagggtcgcacgcgaggcagggcaggctgctcctgcgccggcgaggacagatggcaactgtgctgtggaaaagctgcgtggaaaggagccaaggaggtgcgggccccgccgacccagtgtccgcgggcggccttgtgttgcggtgaggcgtcgctttcgacggaggagggtagtaaactggagtggagttccaagtatgggcaggtcagtcgaggaagccccaaaaccttncttattattattttaatataaattcagttg

SEQ ID NO: 170657 - DNA, 443 bp, Zea mays
  Clone ID: MRT4577_87219C.1
acgcctacctcgataaagggttcagagaatttagacagagcccggcgtgctcactcggtccgagccctgcacgtgcgagactgcgacgagtctcatggcggtcttggcgcccgggcaaaatggacggagtaaggggaccgaggggcactgcctttgcaaacgagggactattaaacgctgccggttacgtgatggagcacgaaccgctatagggagtatccgagctcacacagagtagtacgagaactagtgagctcggagattgtggtaaaagcagctgtaggtgcggcttagtcgaaccagacgaagcgaacggcgtattgcttcatagatcctgatgagtgcgcgctgaaccgattgcagctgtctatctatacttgaatactactggcaggacaccagcactatgtgacattcacaccactcgcgtgagaattatatgg

SEQ ID NO: 170658 - DNA, 369 bp, Zea mays
  Clone ID: MRT4577_8721C.1
gcgccgtctccttcctttcaccgtctcgatccaatctgctagcatcccccctccgccgctcctctccagcagcccccacgctcccactcccgccccgtccacctccgccgctcccaccatcgacgtaaaaaccaccgccaccgccgttcatcgagaccgcggaggaagacgttgcatcaacggtggtggaagaggcgccgccgacgtcgaaggtagtcgcgttcggtaggagcagcctctgcacgggacaattctccacataatctgatgatccaacgtctccgatccaccggtatgtactccgtcgtcttgcgagatgctcttctggatgcttttttttttttgtttccatggcgcgatctccgctac

SEQ ID NO: 170659 - DNA, 298 bp, Zea mays
  Clone ID: MRT4577_87220C.1
gggcgacccacgcgttcgctaacacattcccaaaaaccatcaacattttctttatattaccgatcctaaccagggtggggactatcttcataattacccaccacaaatccttatatccaatccaccacatcttctaaatcagacatctttaccttctgactcccacacatctgacttctcaattatagcctaatctatatgcaacactgtatacattacacacctacctacccaaccctattacttcttatcttttaacaatcaaaccctcctacttatttttacaaagaccaaaaac

SEQ ID NO: 170660 - DNA, 738 bp, Zea mays
  Clone ID: MRT4577_87221C.1
aactacacaaaaaaaacacaagggagcctcccgattttctctgttgcgatctcgaataagatccgggggtgcgcgatgatttgaatctctcgaactgatcatgacaggaatgccccctgcagtctgcagctgattgcaggggacgtctgctgcctcccgcgtccggtctcggatgccatagaagagttggtcctcatggactgcggacaccacggcgttgttccacggcctgaacaccaggcgccgcccaattgctgcgccaccgaggtcccgcagagcccgacgctctcttccgaagaattcctccagttcaagaggaaggccaccacgatcgtggaggagtacttctccacggacgacgtcgccgcgacggcgaacgagctgcgggagctccgcgtcccgtgctaccacttctacttcgtcaagaagctggtctccgtggcaatggaccgccacgacagggagaaggagaaggcggcggtgctgctgtcctcgctctacggcgacgtcgtcgaccgcccgcagctctgcaaggccttctgcaagctcaccgagtcctgcgacgacctgtccgtcgacacgcccgacgccgtcgacatcctcgccgtgttcgtcgcccgcgccgtcgtcgacgacatgctgccgccggcgttcctggccacgcagagcgcgcgcctgccccacgggtgcaagggcgccaaggtcctccgcagggcggagaagagctacctgtccgtg

SEQ ID NO: 170661 - DNA, 275 bp, Zea mays
  Clone ID: MRT4577_87222C.1
tcccgatcaacccacctccgcccacctccaaacccatcttctacttccaacactctttaaacactggggcgcacaactacggtctagtacacaatcaacaaactaatctcaaaacatactcaccaaaacttactatattcaacataaaaacacttactcaaaacactccttacatcctctacaacattatatttccacatctctaatacacaaagtcatctaatctctttcaacgatcaatccaaatgtcacaatgctatgctgaatcaatatat

SEQ ID NO: 170662 - DNA, 121 bp, Zea mays
  Clone ID: MRT4577_87223C.1
gagatgcggtgcgactccctcagggtgacgtcgacgtacgggacatgcagtgcgactccgtgaccatatgcactacgcagagaacctgcaatcgggccaatttcgcttcaacggggccgaa

SEQ ID NO: 170663 - DNA, 620 bp, Zea mays
  Clone ID: MRT4577_87224C.1
ttttcgaatccccctgcgcccttgacccgtggcgccgccccgcacgatcccctccgcacttcttcgacgccggtctccgcaccgcgcaggtccccgagccgacaggagccggcgcctggggaccgggaaggatgttcttgactgcattcgcagcctcgtcttcaagcaacagacgtcgctctccttgatagggctccaagatgctgcgaatacgtcacttgcgaactctatcgccaccacaggatctaaggaggctatgatccctaccgacggatccactacgaaaaaagatacgctgggagatgcgacgatatcggtgtgcgatgttggaggccaaccaggattccggcagatgcgggacacatactgccgcgcgggctccgcgagtgtgcatgatgtggacacggaacaccgagagaacgtgatcattgcatagggagagctccagtgacctcttgcccagccatctatggccgtgattccgcttactacacattggcaatcaaaatgacaagcctgacgctatccccaagcgaaccgtctcccacactatatgcgactagagacaatctgctgagcgataagacgcctgttccctgaacatcttgcgacaactctac

SEQ ID NO: 170664 - DNA, 577 bp, Zea mays
  Clone ID: MRT4577_87225C.1
tatacactagcaccatattatcggttggggggcggggatccagcaattcttgcccttctggctctttcagcatagcgctggtacctaacatattattccacaatgctcacaacattactctgctttccgagtgacagcacgcggacagttcaatacccacctatacaataactacatgtggggaggggggggtgcaaacaaccatattacggaccttagccttaaccctagaacaaccatatgctctattgcaacatccatacttaatgcatttgcatatccaaagaacaaggcacaacaactacaacaacacatagtaccaacaatcaattaagtaatctaagcaaaccttactgtttaccttacatcaacaacagattttttcatttaataaactatctgtggtgaaccctgatatctacttgcaggcccaacacatactacacatttaaccaacttgtctgaagcactaatgccttcttactgtaacaacatcttttcaacatcccatattgaatctatgtcaaacattggtgtttgctagagacaacaacattccgttgacattctacccaca

SEQ ID NO: 170665 - DNA, 681 bp, Zea mays
  Clone ID: MRT4577_87226C.1
gccacgggccgcgtgcagaccacgccgctcctccagagcccccagaacccgaccttctactacgtacacttcacgggcctgaccgtcggcgccaggcggctgcggataccggagtcagcgttcgcgctccggcccgacggctcgggcggcgtgatcgtcgactccggcacggcgctcacgctcctcccggccgcggtgctcgcggaggtggtgcgggcgttccgccagcagctgaggctgccgttcgcgaacggcggcaaccccgaggacggcgtgtgcttcctggtgcccgcggcctggcggcgctcgtcgtcgacgtcacagatgccggtcccgaggatggtgctccacttccagggcgcggacctcgacctgccgcgccgaaactacatcctggacgaccacaggaggggccgcctgtgcctcctcctggcagactctggcgacgatggctccacgattggcaacctggtgcagcaggacatgcgcgtgctctacgatttggaggcagagaccttgtcgatcgctccggcacgatgctgacacgcgcgcaactagtagaaaggccgccgactactcgactctccctgtatgcaagatagtgttaaccatgcaaatgcatgccaaccataccggatcgcactttgcacgcagcaaacaaaatttttttttcggtctaaa

SEQ ID NO: 170666 - DNA, 206 bp, Zea mays
  Clone ID: MRT4577_87227C.1
ctctgatgagatcctctgctagcaggcgtcccctctctcttaaccatggctgtcggggccccaggcgacttaagtggggacgtaatttctggggatgtactacaaaactgctgcaacaaacacaccgatgtcatgcatcttttctacagccgaagtagtatctatgggccggtggtttagacctaactgagcacaatactgcaaca

SEQ ID NO: 170667 - DNA, 137 bp, Zea mays
  Clone ID: MRT4577_87228C.1
ctgggcaaatagggtacattttaattatgctgcacccataacaacactcctacacaaagaaaaaataatggggcggtttgctacaccagaaaactcaccagggggggggaaaatacatcatacccggacgggggccc

SEQ ID NO: 170668 - DNA, 403 bp, Zea mays
  Clone ID: MRT4577_87229C.1
cgcggagcgaacccgaccgaccgccgcccccagccaggattaattggcttcttccgtgaaagggggactcatcttcttgggagcccgaggggctttcaaggcgccatgctgctactgctgctgggcctgctgagcccggcggcctacggggctccgggaccggccccggggtccgcggagctgcgctcggacttctcggcggcgcgcaccaccccgctggagggcacgtcggagatggcggtgaccttcgacaaggtgtacgtgaacgtcgggggcgacttcgacccggccaccggccagttccgctgccgcgtgccgggcgcctacttcttatccttcactgcgggcaaggcgccgcacaagagcctgtccgtgatgctggtgcgcaaccgctacgaggtgc

SEQ ID NO: 170669 - DNA, 279 bp, Zea mays
  Clone ID: MRT4577_8722C.1
cagcatttagcacttgagcggcaaaatatcggggacacatcaaaagtcacttgctaacctgcagtgcgattgactgccactgggggggcaagatgtagctgtttgagccacctactactgtcagtttttcagtgccaagctgttacatactggtttcaatccatcagatttgctgtgctcttttcttttccagtcgatgtcgagcactggcgctacatttattatttgttttttggaagaatctaaggggtgtgatgcaaattgaagagctatgtgcca

SEQ ID NO: 170670 - DNA, 2066 bp, Zea mays
  Clone ID: MRT4577_87230C.1
tctcgtcagccacaatagtaatgcttagtacccgctagaacttcctcgttaagctgcttcctcctattaaacacgtcttccacaaaccaccaaagagcggagctgcttgcttgaattcccggggttatcaaaaggggggcttgcttgaacttaaagccctgcgccatctgccccggagcgccgccgcgcgagatgccccccaccgccaccgaagccacctcgtcgtcggcgaccagtgccacctcgtccacggatgccgacgccccgggccccacctcgccatcgccgtcccggcgcgcggcgcccactctgctcctcgtcgccttcctcgccgcactcctcatcctctccaccggcgacgatgccacggcgcagccgctcaacggtgtaagcttgcaaaacccagaggtttcatttgttccctcccccttggctggacaattttgtgagcgagtcctactatctggagtgccaaggttacatcttgatagttatgcaagccaaattcgtgtcaaaatgaatgtgtctcaatctattcctgagaagttccattggaaaatagaggtttgctttcataggaatgcctctatgggtttatgccagtgcgaggcgggtgagtggcaaggttttcaaggtgggatgtggactgctgtaagttctccatatggaaacaaatatgttgatctgaaattggctgataagaaacctgctaggttcactctttccattcaggaagagtttcagaaatggcgtctggcttgccttggtattggatttgtattgctattcctgtcaccaattattagcaaatgggttcccttttactatagcagctctatggctcttggaatcctggctgttgttcttattgttattttccaggggatgaaactgctaccaatgggcaggaagagtttattttaccttgcaatttatggatctgtgttaggtgttggttcctatgctgtacactacttctcaacattggtctcttctattcttgaaaacttcggcttgagtgaagagttatacaaccctgtttctatcttcctgctggtagcaattgtcttgactggagctggttttggctattggatggtcaggagatttatcctttccaaagatggaagtgtagatgctgggatagcacagtttgtgaagtgggctatgcgtgttgttgctacatttttcattatgcagagcacacttgatcctcttctagcactggttgctcttgcttttagctggtggttatgctctctgttgactacaaagaaagttcagaagaccatgacccagaaacaaaagcaatcaaaggttctttctcagcaaatgcttactcaaggattgcccacgggtcctaaaatccagtttttaagtccatctaagacaggctttggaggaaccacatctagaacttccgccacacagtatggtcggagcaatttggccaatcgaggtatggtctgctcagcacttgcaaagcgcgcagtgcccaacgaagacgaagaccactactccaccttccacaacatccagccacggaaatatacgaagcaggaatgggaggacttcacccaggaatcgactaggaaggcgcttgcggagtgcacagctaccccagagtttgcccagtgggtcggtgacaacgctcgtcgtctgcaagtagagaaagaggaggacaacttgtcagaggaagagatcatggagagctccagctcgtcggaagaaactggggatgaagctgatggagctcctggcctgatcagactgtggggctagcatgccggttgaacttgtaagagccccaagcatatatgctcctgccatttcacgtgtaaagagtagcaaccggtcattttaactagtgtagcagcagggtagggtggtaccaacgaaaatgctttcgcagttgttcggtgccagtacctggctagccatctcgggccaattaatgttgggttaacctactggtttgttattaacggatttttagttttttaaaagttgatatatgggtaatggtttacccattttaatcagggattgcccccagcattttgttg

SEQ ID NO: 170671 - DNA, 266 bp, Zea mays
  Clone ID: MRT4577_87231C.1
cttgctcacacatcggcaattacagctcgaatcacagggtagggttctagactaagcctggaaatgcctgctcttctccggcaccaacccaggcaacgcagccagactggccgtctgtcggatattgaagatggaaatatccgccgtcgcctgcaatgcaagcatattcctcagctctaccgcaatcagcgagtcgaccccataacgggccggtggcttgctgagatcaatctccgctatgggcgtcataaaaatgtcacgaagct

SEQ ID NO: 170672 - DNA, 412 bp, Zea mays
  Clone ID: MRT4577_87232C.1
ctcgagccggccgggccgggtatttccttcgctccagtcttgtgcacctcgcgctcctcctccttactgtaccctgttactgcactctctaatcgccacaagatgaataatctgatcattgccagtggcgtctttgctctggattgtcatgcatttatggcaccaccatgctgatcatcaccatctgccactggagggcatctccttctgccatagcacgacttgcaaaaagatgtctcttctctatcttctctaactaccttgcgataattccttgctggacgctcaatgttgtagcaccctttatgcctacttcatccacgcagacactgaagccttccatctgatgcagtttcttcgtgcaggaaactacagcctctcttttagatatctgtaggcctgactcccaaac

SEQ ID NO: 170673 - DNA, 2224 bp, Zea mays
  unsure (1)..(2224): unsure at all n locations
  Clone ID: MRT4577_87233C.1
ccggccgggccgggctcgccatttccatttccttgcccttgccagccagagcgagactccaccgcttcctctccgccgcgtcctcctcccctcccttccgttcctcacggctctccggactcgccccgcggctggccgtgctgagtttcgttctctggccggcaaagaagcgatttttttgtgctttctggacggatcccggccggagaagggaccgaatttccacgacctcgaccgccggctgctcctctgctgggctctccgtgcgcaagaagagcctaccaaggtgaatccggagatttgagctccgggcccgcctcatggagtccatggcgcaggaaagggacgcgttggattcacctgccttgtcgattgacaaaaggctgcggtcggatgctgtcgaatcacccctggtggatgatgcaacgcaacccaaggagggggcggacggttaccctgtcaaggttcggaagccttacacgatcacgaagcagcgagagaagtggacagaggaagagcatgggaagttcctggaggcactgaagctctatggtcggtcttggcgccagatacaagaacacattggcacaaagactgctgtccagattcggagccatgctcagaagtttttctccaaggtcgtgcgtgaacctggggccagtaattcaattgagatcccaccccctaggccaaagagaaaaccactgcacccataccctcgcaagtgtgccgactccaccgtgacaaatgctccaatgggcgaaccgaagaatgctcctgtttcatcaccatctggttctgaccaagagaatggttcgcctgtctcggtgttatctgcaatgcagtcggatgcttttggttcatcaatatcaaacccatcaactgggggcacgtctcctgcgtcatcagatgatgggaataatgtccctgagatagtgaatggggaggaaaatttgctcactcagcaaatagaagaccgatcccatcaggaatcaaagcaggacaacagtgatggtgagctgtctgaagaagattcatcacgagtccaagaaaccagtttgaagctttttgggaagacagttatcatcccagacccaaagaaagtctgttcctcggatgggggagctggagatgatacacaagaagtgatgcaaacatcctgggttggaggaggggtggcagcataccctgcccataacggatggtttcttccgttccattctttccctgctcatatgtatgagtcaggggatgctaggatttcccctcttcatatgtggtggccttactacggttttccggccggccatccaagagggtttggcacagggctgcttaacgaaggcgccattgagagtgatgccgacaatagcccatcggttgaaactaattctgatcgcacgggcaatgttcatgttcagacgacgacccctaccattcacaacaatgctgtcaaggagtcagttgggccagttgagatgccagagtcgggtccgagcattgagctgaaacccagcgcgaactcggcctttgtaagagtgaagccgagcagcagcgtcagcggagaccaatcactggtaagggggttcgtgccatacaaaagatgtaaggtcgaataacccaacccaacgacatacctgtctgctgctaatcttactggagattgattgatcctgaacagtgtagggactcgagtggcacacatcccttgttccagtgtgcctgccattttttgcctgcaaaattggctgctggtgtatgtgtaatattgtcgttttactgcctgcagcggaatgtaagatgccgcaggcttgttgctgtcacctaggcgtagactgaacagatgttgtgcagggatcgccgatctctgcacccttatgtttgttgtacgaggaaaaccggattctgttgaactctcgtgttcaaaaattcattgattcctgatggaaactgatttgtaaatgaacatggcaatgccgccggacaggtcacagtgtatcctgtaagaccaattcttttggtccttgaacaatggaatgcagactaggttttggtcattcaaataaaaaataaggtaagatgttagagttcgaattcttctagttgcttgttttttgtttttgtgattttctgaactgaaagagtgcgtctgggctgatgctgtganagaaagtgtaggatgataacatataaaaaaatatagaaattaaaaaagagaataagt

SEQ ID NO: 170674 - DNA, 1657 bp, Zea mays
  Clone ID: MRT4577_87234C.1
gtaccctccctcgaggccgggagtcgagctcctccggtctctgccatgaacagcaaatgagcagagctcccaagccgttcaatctccagatcatttccctctcgtcctgctccaatccactcgccggccatctccacaggctcgcctcggctgctgcagctgggttttgctccctgagccgccggatttcgacaggggtcgggtcggccgtccgatggggagcagggtgaaggaggacgagaggaacgagaagatcatccggggtctgctcaagctccctggcaaccgccggtgcatcaactgcaacagcctggggccacaatatgtatgcacaagcttctctactttcatctgtactaattgcagcgggatacaccgagagttcagtcatcgtgtaaaatcagtatcgatggctaaattcacttcccaagaagtttcggcacttcaggaagggggcaatgagcgtgctaaggaaatctatttcaagcattgggacttgcaaggccctgttattgacagtagtgatgtacatagactcagaaatttcatcaagaatgtatatgttgaacggagatattcagaccaaagaattggcgaacatttagcgcaagcaaagaaaccatcatcttcgaggaccgacgatcccagccctgcaacattcaaagatgctaaattatatatgtcaaaaaatctgattgacttcgattcagatctggaacctcctcaaggtgttgctcagactgatattcagaagggctcttcacctcaaacagatgttggttgggcaacttttgatgatgctacatccaaaaaaactacaaccatgccttcaacttccagtactaattttttggagggtccaatgctacagatcgccgatttgacatcagcaccacaaattagattttcaaatgccaagtccttgtcttttgccccgtcaaatcgtggaaaccaactgaaccaacagaatttctctcctgtgaatactacacagtacagcaatactctgttgaacagagctactagtgctccagtgcatagccaggatatttttgcaatgagctatcgtccagtatcttcagcctggaactggcaaccaaatcccagtgtaaacatgcagtacggacaacatcgcacgcattatcctgttgggattgtaaatacaactcaacttgcccatccatatccagtgaatcctgttagcttggcaggagggcctgcatcggctcatgcctccaccaggtttccttctttaacttctatgcaagaagcattaccaaatctgggcagtaccgcagtgctgtcgcgtgctccagttcatcagtacatggttcagcaacatacagttcaagtaccgaattatactttcccctccggatatgaaggaaccagagggatcgccgcaactgccagcacatacggattacctccaatggatcagcgtttggctgcgcagaatctgcaggtcatgaaccacggttctttaccccgagttggtggaaacccgtttgcttagtgttgttacttcggtcacctcagttcggtcgtttgtgtatagttttagcatttgatgatacggttttgtcgtgagaagacgcgagtggaataatgtagctgatcaagcagagtggcaacaagtgcctgacaggttttgtgc

SEQ ID NO: 170675 - DNA, 184 bp, Zea mays
  Clone ID: MRT4577_87235C.1
ggaaagcaggcaggcaaaaatgtactatatcatcaattcatcatcatctactaggggctccagactactatacctcatctttcaatatcactgcctgccggtggcgccggcgtgtggggagggccgcggcatacccggggtccgtcctgctttctctgttcgctggttggcctcggccgccccc

SEQ ID NO: 170676 - DNA, 289 bp, Zea mays
  Clone ID: MRT4577_87236C.1
gaacttacaggttcgtataggctcagagctggttatgtgatcacattaagtttctttaacactgagacaaaacattataaatacattaggacagcaagcttatattatgttggtttgtgcataccttactattcgtgttaatgatatttaactctatgaccagttttacctgttgtataatgctcagtattgcaagtagacaaaactaatgatacaaacgagcatgcatgtaaaagtttttgaagatttactaagattcatagtatcaaaacatgtcccgacagcaacg

SEQ ID NO: 170677 - DNA, 296 bp, Zea mays
  Clone ID: MRT4577_87237C.1
aattcccgctcgacggcgcgtccagctagtcataatctcaccagagaactatgtctagacacctgactccatatttctaggcgcgagtagctatgtcttagagatgacaccctttgccatacatcacataaccgctgtatattgctaacgctgaacttggaatctccaatagggtcatgcgcaacctcttattcattgaccggctataaatcattaccactgtctccagaattgcatctggcctaaaacctggcctccatggatttcatgtgcatgcgcttggtgacaccaccaat

SEQ ID NO: 170678 - DNA, 430 bp, Zea mays
  Clone ID: MRT4577_87238C.1
cggggacaccaccggcgactccgaccaaaccacagccaccgccgcacatggctagactgcagcacgacctctccgtgctgccgtgaaaagtccctggagggtgacatggcgcacgtgacgcccccgggatacgtcttgacgaccgtctttggtgtgccgatacgtccggacgagaagcagcttgacaacacaagatgctggtgtgcaacaagtgtcaaggttacccatggtgccggggggctgtccaccataccactgacgaggaatgtagtaccgttcgtgctggggagccaatctacgggagacgatgtgtcggcatacatggtgcgccaccacgggaccacagaacgcgggggcagagcaatacaatgttctaaattcacgtaccgcgaagatgaggagcatgaaggatgttgtgatgagtctgtga

SEQ ID NO: 170679 - DNA, 363 bp, Zea mays
  Clone ID: MRT4577_87239C.1
cttatattctgagactcctgcctacttgcctcttctactacaacctaggttgttcaaacctataaataaccctatgataattatgccaatagcctccacagcatatcatgaaccaatccttagtagccttcaatataacatccatgagagaggataaggcccaatctaatcaataattaactggggctcctcatatggcgactaacatgactggtctaaactacgtcactccgccgagtgacagaaccaaagcaccatcacgcgaggcatcattcgcaaaacacgtgggggcggattctgatcctgctaccgctaagcactcatttacattacataacaacagtgaagtatagacgttataga

SEQ ID NO: 170680 - DNA, 248 bp, Zea mays
  unsure (1)..(248): unsure at all n locations
  Clone ID: MRT4577_8723C.1
ggaaccaatgtcgaaagactaggatctgatcctgggacatttgtgaatcactgcttgccatactcggttctttacttaattggtaatncattttttggctggaattgccttgcaccatggttttcgtaccctactcgtactgccattcggcgaaagtttaatcttgagggaagctgcgaggcactccataggtcatgtggatgttgtggaagctgcgtaaaagaataattgcaacgtgaacaatgtga

SEQ ID NO: 170681 - DNA, 337 bp, Zea mays
  Clone ID: MRT4577_87240C.1
cactatcatgttctggactgcgtacgctcagattaccaccttttcggagtggcagggcaacaccatcgacctccgcgtctaactctcaaaccagatcccctcgggctccctcagccattgattgctgagaataataatgctcacctggcccagctacgcactcctaatagagccataagatggaccagacattggtggacaaaaagaatgcataccaccccgatgcacccaactataatgatttcgactgccggccaagaaagctccggcttactgctaaacaagcaccttctgtgaagaatacgattcacactcacccagccaagatgtagctgct

SEQ ID NO: 170682 - DNA, 119 bp, Zea mays
  Clone ID: MRT4577_87241C.1
ctatgaggaaagttggcgcgcccgtagagcctcgggtcctgtatagcgggcgcgatccacgcgtcgctcggtctaagctcaaatcatcctgtgatcccaaagcagcgaagtttgtccgt

SEQ ID NO: 170683 - DNA, 133 bp, Zea mays
  Clone ID: MRT4577_87242C.1
ggtggtttaatgagaccgcctctggccgaaccgttgggttttgcaacgcgtttgatcaggctgggcgggaccgatgcgaaacacgacattgtttaaactgcaccagccttcttggtgggccgtatcaaagaca

SEQ ID NO: 170684 - DNA, 121 bp, Zea mays
  Clone ID: MRT4577_87243C.1
ctagccccgcaaacacctaaacaagtgggatgtttcatttaaaaaggcgcaggagaattccatacccgcacaggcgaacagacagcagcacgaaaccccacgagtggccccgccgagacag

SEQ ID NO: 170685 - DNA, 116 bp, Zea mays
  Clone ID: MRT4577_87244C.1
cccacgcgtccgaacgaacggacttatactattgtttttaaaagctacatgaggatcgggaggcccaaagaccttgtcaactagcgagacatgcgcaggctcagcctgtgactacc

SEQ ID NO: 170686 - DNA, 903 bp, Zea mays
  Clone ID: MRT4577_87245C.1
ctctctggctctctctacatgcctgcgtactactccctcaagcaagcaagctgcaagaggtcaagacgagcagtgactgtgagtgagcggcgtctggtcactctggtgtgaactgtgaagtgaggacttgttggaggaggacggagcgcgggccgcggagggtcatggcatggtgatggacctgctgctccccctcactttgcccctagtgctctaggcagccttagctagcctcgcagtcctgggaggaggagaaggacaaggtctctgatcagctccagcttgtctggtcaaagctgaggagcctgcttgggctgcctgtgagtccaagctcgacaggaccactgccactgtgaagcacagcggcagcggcgacgagacgaggacgcggaagctgccaagcggatagatctacgcaaaatggagaccaaggacgtgtcgccgcttgccgccgccgccgcggcgcccgtgcttgcaccggcctctcagcagcagcagcagcagccgccccagccgcagcagcaccaccaccagccaccgcagccgcagcatcagcaccagcaccagccgccgccgccgccgttcccgcagcaggcggccccggcggcggcctcgtcgcccgccgcgtccatgcccggcggcatgcgcctctcgttcgaccatatgcccgggaaggcgcccggggagcagcaccaccaccaccaccacgcggcgccgcccatgctgtacgcggcgccaccgcagggcgcgggtgcgccggggggcagtgtgctcggcatgggcgaactgatgcgcaagaagcgcgggcgggcgcgcaaggacccgcccgacggaagcatgggtttggcgctggcccccattttttcgcctcggccggcgggggggggggggcccgagcccccg

SEQ ID NO: 170687 - DNA, 156 bp, Zea mays
  Clone ID: MRT4577_87246C.1
tatcatttggttcactgggaacatgatgaaaaagcctaacaagtacagctatccagttggaaaaaggctcctgcaagcactggcaataatagcttacacatcaacgatggtcacacttggctcacaagtgctgatcgattcagggcgccagctcat

SEQ ID NO: 170688 - DNA, 325 bp, Zea mays
  Clone ID: MRT4577_87247C.1
tttttctcactgactgactactgtaataccagagatccggcaacttggcctggatcctcgactagatgactttccgcatttgggggccgggggcaagagagagagagagagagccattgcggcggaccagcagccgcagctgcaggaggagatgaacgacgcttccggcggcgggcttaagctggcttcagggttccgctttcacccgagcgacttcgagattgtcaggttctaccttaacaacaaggtgcttaacacgcgctttaactggaccggcattacggagggcgaccttaacaagattgagccattggaccttccgagc

SEQ ID NO: 170689 - DNA, 332 bp, Zea mays
  Clone ID: MRT4577_87248C.1
cttaggcgctttttttttttttagtaacaacaagtagtcattcgtcaactagggaacagcctaaaaatgctagctatgcaaggatttacatccacaggtattgtacatggtgtatcgcgcgcaaccagagacatcacgttgatggcgactggagaagacgacctgtcgcgttcatagggcgcatgctgattgctagcttattacaggagctaccgctcccgacatggcgccttctattgagcatagtgggactgaatctgcgtcagtttctgtttgacggacggcacagcgggctcacccaactcaaggaccgtcttctctagcgcctgaaa

SEQ ID NO: 170690 - DNA, 340 bp, Zea mays
  Clone ID: MRT4577_87249C.1
acactatcgaagagctatgacgtcgcatgcacgcgtacgtaagctcggaattcggctcgagcccaaatctaccttatcatattataagcgcgcgtagccttggcaggtcgacgcatcttcgcctccgctcaacgctcggccacgcccgccggccccccaccgatccacgagaaaccttctcgcctccgcgggacgattcgccagggagagcaaaggtagcagaggcgccatggacgctggcaagtcggtgacgccgggcgccgtgtcctacattctggcgcacccgtctacgggctccgatggcgccgtgtcggatcttcgcgttcaaggcctcgatctc

SEQ ID NO: 170691 - DNA, 120 bp, Zea mays
  Clone ID: MRT4577_8724C.1
atgattttttttcattgtgtcaataaggcaggggcgggcgggctctatgcaggggggggcaacacatgtagataaactcaataccactgaatagatgtggcactaccgtattatagtaag

SEQ ID NO: 170692 - DNA, 581 bp, Zea mays
  unsure (1)..(581): unsure at all n locations
  Clone ID: MRT4577_87250C.1
gccggggttttcttctcccgttcgcttctctttggccccaatccgagagctantgcttgatgcgggcgtgtttgggcaccgaacacgttcttgggaccgcggccgccgccctacttccantgccaggtgctgangggtccatcgggctcnagccctttgccggggacgagcgctcacaacaccantgttgtgagaggggatctgtgccattgagggggagcggcancagcgggggggtgttctgggttgtgtgggacctanagggagcgtacacaacaggggagagtattgtgtgagggggtgacaatgtgttcttcaatgggaatcggataccttcctgcgacaacggaggcattancccaagcgcaagagggaaggaggcgtcanangccatttcaatcctttaccgtgtgattcaggacccatcttcttctgcgtgggcgctgagaacaaaagaaggggcgattacaaatcttacaaactacctcactaaagaaaacagggcggaggagggtgcggaatcttttgacccanctcanaccattttttgcggggattcctaaggggaagactggaaaaat

SEQ ID NO: 170693 - DNA, 406 bp, Zea mays
  unsure (1)..(406): unsure at all n locations
  Clone ID: MRT4577_87251C.1
aaatgggcgcctccaccacgccgctcgcgggggggggggggctgcttctgctgctgctcccgccgctcgccgcggggggggacagcatgtggatcgtgtcctaccgcgagccgacccaggaggaggcgcggggggggggcccccantggatggcggcgcacgggccgacctacaacgccgtcggcgagggggagcgcatgggccaggggtgcaggggcaacctccgggtacgggacgcccacaacgccgccgccgacgcgggcgtgcactccttccggctcgggggggggcggttncccgacctcaccaacgacgaggaccgggccacctaccttgggggcaggagcacgccggacagggagaggaggctcggggaccagggcctggcccggggacaacgagggac

SEQ ID NO: 170694 - DNA, 245 bp, Zea mays
  Clone ID: MRT4577_87252C.1
gcccaaaaccaccaaccagcccgagcttttctttgttgcctgccgcggagcgaggggaccttgagcgtctagatagggtcggaaagccccgccgccgacggcgtcggctacgccgcgcgcaagcggtccagcggcgatgttggccccaccccggatccagccatcaagcgccgccggccggagcacccttttttcttcttcgagggcttctgcaacggggaacaggatgatccccttgcgttttc

SEQ ID NO: 170695 - DNA, 1083 bp, Zea mays
  unsure (1)..(1083): unsure at all n locations
  Clone ID: MRT4577_87253C.1
tcccggtgcaaanaaacaaaaaacaagggaacagctgcacgcacgccgtcgcctggccggccatggggttcccgtcggtgtgctactgcgtgatcctgccgcagccgctcatcctggtgctgcagctgctggacttcctgcggcacgccgtgctgctctgcctctcctcgctgggcctcgcggcgccgccggccgccgacgaccatgcggcctacgcctacgcggcggccctggcgccgacgaccacgccggcagccatcaaggcccgcctgcccgccgtccggtacgccgacctgctcggggcccgccgcgccccgccgggcccggccgtctgcgccgtgtgcctcggcgcgctccaggcgcggcaccgcgtccgcgagctcggcaactgcgcgcacgccttccacaaggcctgcatcgacaagtgggtcgacaagggccaggccacctgcccgctctgccgcgccttcctcctccccggcctcagcgccggagacggcgacggcgacggcgacggcgagctcgcctcctcctccttccctttctccttctgaacccacgcgtagtacgtacgtacgtacgcgcgcgtgctccagccgacagcaaaagtgaaggcgcacggccggcggcgtgcgtagtacgtgtacgtacgtccctgcagcccggcggccgattgggaggcagagcaaggtcagtagcaaacccacctacctacttactacactactcctgctagctgatgagacacgagccccgttgtacggccggccccggtcctgtgaccatccatggatcccgatgagccgagcaaggaaacagaggagagagaagaggaggtgtcagtgagcgtgaggtggtgcagtattattggtaggtgaggcccaaattatgaggaggacagggatggctacctgcattggatttggtgcacgcgtagatccatccactccgcantgctccccccttttctcctgcagtgcagctccaattcacacccccccctctctctttctctctcttttgtttattaattaataattattagtttccttttcaaaaaaaaaaaaaaaaaaaacaaaaacc

SEQ ID NO: 170696 - DNA, 1111 bp, Zea mays
  unsure (1)..(1111): unsure at all n locations
  Clone ID: MRT4577_87254C.1
ttgggaccctcgaggccggccgggaaaaaactgccagcccgacttcggtcgctggacctcgaagcaatcggcagccaggttggtgccccatgcggcctctgtttgttcaacacctcatgtttcacggattcagggttccctttgcctcagatcactgacatggagatctcgaaagaggccgatccatctgagttcgtcaaaccgatcctcccaatccttgagcaaaacggcgtcgttcacttcctcgggttcggaaaccggctgggcttcgactcggtacctgttcatctgcagaggctgaggtgcagatgcaacttccacgctctcaagttcgtcccagagctccagcgagcaggctccgtgctggtccagcggctgcgccaggtgggcgggatgcagaccgagatcgacaagcagctgttcggcaacaacatgcttgaccaggccttcgccgagcaggacgacggcgccggcaccggcacgcccaacaggtacctcgccctccatatgaggttcgaggaggacatggtggcctactcgctgtgcgaattcggcggcggcgaggaggagaggagggaactgcaggcctacagggagacccacttccccacactcgcgctgcgctcccggaacaccacggtttcgccggaggagcagcgtacctgggganntnnncactgacgccggangannnnggtctcgtcctctccgcgctcggctacgaccgccggacgtntatctacgtngccgggtcgcagatatacggcggcgcgccacggctgcngcccctgacgcggctgtacccgaatctggtcaccaaggaggataccctcaccgccgacgagctggncccgttcaagaatttctcttcacggnttgcggccttggacttcatcgcgtgcgcctcggcggacgtgttcgcggtgacggactccggcagccagctgtcgtcgctggtgtccgggtacgcatctaccacggcaggggccgcgcgccgacgctgcacccgaaccggaagcgctacgccagggtgctttccgaggaagggagcattgcgtnggggcgggttccagaagagggtgaggcagatggtggacgagtacaagcgggt

SEQ ID NO: 170697 - DNA, 486 bp, Zea mays
  Clone ID: MRT4577_87255C.1
ttcttcgcgtccgccacgcgtccgagcagctgcaggcactctgacgcctggccggccatggggttcccgtcggtgtgctactgcgtgatcctgccgcagccgctcatcctggtgctgcagctgctggacttcctgcggcacgccgtgctgctctgcctctcctcgctgggcctcgcggcgtgcgtagtacgtgtacgtacgtccctgcagcccggcggccgattgggaggcagagcaaggtcagtagcaaagccacctacctacttactacactactcctgctagctgatgagacacgagccccgtcgtacggtcggccccggtcctgtgaccatccatggatcccgatgagacgagcaaggaaacataagagagagaagaggaggtgtcagtgagcgtgaggtggtgcagtattattggtaggtgaggcacaaattatgaggaggacagggatggctacctgcattggatctggtggatgcgtag

SEQ ID NO: 170698 - DNA, 313 bp, Zea mays
  Clone ID: MRT4577_87256C.1
gttctagatcgcgagcgccgccctttttttttttttttgttgtttcattaaaacatattattgggctctgggcttttttgtcagacttattcatcaccttgtgctagagttttggtttaaaccactctatgaagaggcgtaatgaaatgtgggcatattaaattttccgacgagggcatgataacaaacaagtgcccacaagatgctgatatccacatggaaacgatgctatgcaaaagcggaaaaaaaaacacaccttgaatatgcccacgccgccaacttattattaccctacatcctggagatgggaaag

SEQ ID NO: 170699 - DNA, 1380 bp, Zea mays
  Clone ID: MRT4577_87257C.1
ccccacgtccgccctccgccccatcatctctctctccccagctctttctaccgtttctcttctagtcgagcggggaaaacaaagaaacaaaaaagcaaggaagcagctgcacgcacgccgtcgcctggccggccatggggttcccgtcggtgtgctactgcgtgatcctgccgcagccgctcatcctggtgctgcagctgctggacttcctgcggcacgccgtgctgctctgcctctcctcgctgggcctcgcggcgccgccggccgccgacgaccatccggcctacgcctacgcggcgccgccgccgccgccgtcggacctctgggcactgcagccgtcgtccctgcagcagcagcagcagcaggcggcggcggcggccctggcgccgccgcccacgccggcagccatcaaggcccgcctgcccgccgtccggtacgccgacctgctcggggcccgccgcgccccgccgggcccggccgtctgcgccgtgtgcctcggcgcgctccaggcgcggcaccgcgtccgcgagctcggcaactgcgcgcacgccttccacaaggcctgcatcgacaagtgggtcgacaagggccaggccacctgcccgctctgccgcgccttcctcctccccggcctcagcgccggagacggcgacggcgacggcgacggcgagctcgcctcctcctccttccctttctccttctgaacccacgcgtagtacgtacgtacgtacgcgcgcgtgctccagccgacaagcaaaagtgaaggcgcacggccggcggcgtgcgtagtacgtgtacgtacgtccctgcagcccggcggccgattgggaggcagagcaaggtcagtagcaaagccacctacctacttactacactactcctgctagctgatgagacacgagccccgtcgtacggccggccccggtcctgtgaccatccatggatcccgatgagacgagcaaggaaacagaggagagagaagaggaggtgtcagtgagcgtgaggtggtgcagtattattggtaggtgaggcacaaattatgaggaggacagggatggctacctgcattggatctggtggatgcgtagatccatccactccgcactgctccacccttttctcctgcagtgcagctccaattcacaccccccctctctctttctctctcttttgtttattaattaataattattagtttccttttctttttttttctttctctctctatctttctttcttttttctgtggtccctcctatatattattaacttgatctgcgaggggaaccaggagagatgtgcgttgtacatagctgcctccacttgacaataatattattgcaacggaacaaaaaaaaaaaaaaaaaggcccctagggcc

SEQ ID NO: 170700 - DNA, 760 bp, Zea mays
  unsure (1)..(760): unsure at all n locations
  Clone ID: MRT4577_87258C.1
gagcacacacatcctctaagtgctatctaatctacaatctaccaccagacactgtcgtcagtcgtccctcatcaaccgcgcgcgcgcgacttcaagcatcagactaccataatcatggctccgccgccggcaatgcagagcccaggagagctaaacgacggcgcctacgacgcgccgcacatcctattcatcccgagcgccggcataggacacctgacccccgtcttccgcgtcatcgccggcttctcgagccggggcatcgacgtctccgtcgtgaccgtgctgcctcttcgcggactaccccgccgtccgccgcgtcgacatgcacctattgccgctggacgcctccgaattcacgagagaggacccgttcttcctccggtgggaggccctgcgccgctccgtccacctcctccgccccatcatcactaacgccgcgccgcgcatcacggccatcatcaccgacatcaccctgacctcctgcgtcatccccatcgccaaggagctggacgtcccgtgccacgtcctcttccccacagccgccaccatgctctcgctcaacgcctactaccccgtctatctcgagaagctcaagggtggaccggagccgggcttgatcggcgacgtcgtcgacatccccggcgtgttccacgtcccgcgctccgccctcccgncggngctcctcgacgtgaaacagctcttcacgaagcagttcatcgacaacggcagagcgatcgtcaaagccgacggcgtcctcgtc

SEQ ID NO: 170701 - DNA, 289 bp, Zea mays
  Clone ID: MRT4577_87259C.1
tagggaaacgtgggcgacgcggccatcacccacgttctacacagcaagcaagagttcacgctcgacaacggcgtacgccacctactagtgctctccatcagagccagcgcctgctacaccggcgagtgcgacatttccagtactcccgttcccgctcattccttgtctgcgaaagagctgactcacgagaccaacgaggatgtcgagaacatcgaggactagtacatggtcacaggctacgggaacgcatacgtacacaactacttacgcgttcagtacggtatggagt

SEQ ID NO: 170702 - DNA, 302 bp, Zea mays
  Clone ID: MRT4577_8725C.1
ctaactcaagacgcgacatggatgtgaatgtgagaaccatggcgacgacgatgccggcacacgttgcgatagctatcgtgttagagttcttggtgagcggcgcatggtgcggtcctcccaaagtcccgccatgtaagaacatcacggacacctatggcacggactggatggacgctaaagcgagatcggatgacaagtcgacggatgtcggtcccgacgacaacggtgatggctgcgggtacaaggacgtagacaagccccccttcaataggatgggcgcatacggcaacatccccatcttc

SEQ ID NO: 170703 - DNA, 960 bp, Zea mays
  unsure (1)..(960): unsure at all n locations
  Clone ID: MRT4577_87260C.1
gtgagaatgttaacattngaaaaattttgtgagtgttaggtcgaatattagcatatcagatttacaagacatgatttagctaactattctattcatcctcactcctaccaaaaaatattgactaccataaaactcaactaaacatacaacttggatgatcatatccccagaaagatgatcccattcccatccaacctcgccttctaactaagcacactcttttatggctcttcagtttggctttggatttactgacttgagcaatgttcatttgcttttcttggggtagccgttttatatgtttctctaaagaatacatttggttgatgcagctcttggaacgggtgacgccagtcattctgaggaaaaaaccatcaggagatcttagaagaacgaactcaatgcagtggtagattggagccaagctcagtcgccgtctctttactgttataacatagaatttgcgccctgtatgtcatttttctatttatatgcgccaacttagttgtagtaccttaactgaaattgcatgggcaattagccgacacaaagcttaaatgaaatcatgttgtgtaggtcatgaccgaaaaaaaaaaaaaaaaaaaaaaaaaaaaaaaaaaaaaaaaaaaaaaaaaaaaaaaaaaaaaaaaaaaaaaaaaaaaaaaaaaaaaaaaaaaaaaaaaaaaaaaaaaaaaaaaagggggggccgttttaaagaatcaaagttaactaacccgggcttgcaaggtaaaattttttttatagggcccccaaaataaaattaatgggccggggtttaaaaacgtggaaatgggaaaaaccttggggtaaccaaattaaatcgctttgaaaaaaatccccttttcccaagttggggaaaaaccgaaaaaggccccccccaatcccctttccaaaaatttgcccaccctaaatggaaaagggaacccccctttaacgggc

SEQ ID NO: 170704 - DNA, 699 bp, Zea mays
  Clone ID: MRT4577_87261C.1
aatccatcgaccaccaggccgcccaagtccagggacaaccgcacccctgatcatcggattcaacacctctggactctggtgcacatgccccggagccggactacaccggagagaagcgcgccattgccaaaccgtgctacagcttgcagtatacaagagcctatgtccatgactgtgatttggagggtatacggggaaccgaattgaacgccatggcaacaacagttttcctgtctaatgttgttgtaaatcgcgactgctacctatccttcctgctgagcctatatatgtttctattgctaaaaaaaaaaaaaaaaaaaaaaaaaaaaaaaaaaaaaaaaaaaaaaaaaaaaaaaaaaaaaaaaaaaaaaaaaaaaaaaaaaaaaaaaaaaaaaaaaaaaaaaaaagggggggcccctttaaaaaaaccaaatttaactaccccgggattgaaaagaaaaagtttttttaaggggcccccaaaataaaattaacgggccgggttttaaaaacggggaaacggaaaaaacccgggggtaaccaaaataaatcccttggaaaaaaatccccttttcccaagttgggaaaaaaaaaaaaaggccccaacaaatcccctttcaaaaaatttgccaaccctaaagggaaaagggaacccccccttaaccggccaataaaccccgggggggggggggttaaccc

SEQ ID NO: 170705 - DNA, 102 bp, Zea mays
  Clone ID: MRT4577_87262C.1
ggtggaatgacattcatcatgactcttggctgccttgtgaactcttacatgctgtgtccgacggccgggtgcatagggtgctacactggtatgattctgaag

SEQ ID NO: 170706 - DNA, 586 bp, Zea mays
  Clone ID: MRT4577_87263C.1
cccacgccgtccgaaaaaaaaaaaaaaaaaaaaaaaaaaaaaaaaagaaaaaaaaaaaaaaaaaaaaaaaaaaaaaaaaaaaaaaaaaaaaaaaaaaaaaaaaaaaaaaaaaaaaaaaaaaaaaaaaaaaaaaaaaaaaaaggggcgggcccttttaaaaaaaccaaatttaacaaacccggcaaggcaaaagaaaaaattttttaaaagggccaccaaaataaaattaatggcccgggttttaaaaacgtggaaatggaaaaaacctgggggtaaccaaattaaatccctttgaaaaaaatccccttttcccaagtggggaaaaaacaaaaaaggccccaacaaatcccctttccaaaaatttcccaaccctaaagggaaaagggaacccccctttaaccggcaaataaaccccggggggggtggggggtaaccccaaaggaaaccgtaaaatttgcaagcccctaaacccccgttcttttcgttttttccctttcttttttcaaaaatttcgcgggttttccccgaaaagtttaaaatgggggcctcctttaaagggttcccaattaagggtttaagggaccct

SEQ ID NO: 170707 - DNA, 555 bp, Zea mays
  Clone ID: MRT4577_87264C.1
cccacgccgtccgaaaaaaaaaaaaaaaaaaaaaaaaaaaaaaaaggaaaaaaaaaaaaaaaaaaaaaaaaaaaaaaaaaaaaaaaaaaaaaaaaaaaaaaaaaaaaaaaaaaaaaaaaaaaaaaaaaaaaaaaaaaaaagggggggcccttttaaagagaacccaattttacttccccgtccttgcaaacgtaaaattttttttttagggcccccaaatttaatttccttgcccgtgttttaaaaacgtcggaattggaaaaaccttgggtttcccaaattaaatccctttgaaaaaaatccccttttccccagttgggtaaaaaccaaaaagccccgccccaatcccctttccaaaaatttgcccaccttaattggaaaatggaaccccccttttaccggccctttaaccccggggggtgggggggtttccccccaggggaaccgttaattttgccagccccttagcccccgctcttttcgtttttttcctttcttttttccccactttccccgtttttccccgtaaagttttaaatggggggctccttttag

SEQ ID NO: 170708 - DNA, 508 bp, Zea mays
  Clone ID: MRT4577_87265C.1
ggaaaacagctttgtcgacttccattcagtatatattacaggttttatttcaaaaaaaaaaaaaaaaaaaaaaaaaaaaaaaaaaaaaaaaaaaaaaaaaaaaaaaaaaaaaaaaaaaaaaaaaaaaaaaaaaaaaaaaaaaaaaaaaaaaggggcgcccctttaaaaaaaccaaatttaactaacccgtccatgcaacgtaaaatttttttaaaagggcccccaaaatcaaattaacggcccgggttttaaaaacgtggaaacggaaaaaaccctggggtacccaaattaaatccctttaaaaaaaatccccttttcccaagttgggaaaaaacaaaaaagcccccaacaaatcccctttccaaaaatttgcccaccctaaatggaaaagggaaccccccctgaaccggccaataaaccccggggggggtgggggtaaccccaagggaaaccgttaaatttgcaagcccctaaacccccgctcttttcgttttttccctttcttttt

SEQ ID NO: 170709 - DNA, 211 bp, Zea mays
  Clone ID: MRT4577_87266C.1
cttcagaccattagctttatctactccagagtcgcataataacccgatcgacaccatgagggtgttgctggttgccctttgtttgctggctctagtttcctgcgtctccttcatacatacaagtgctggcattcaatgtcaggctgcggttgtcatccaccgacgtctgttcatctaccgtcttcggtgcattctgtcaccttcttttcat

SEQ ID NO: 170710 - DNA, 482 bp, Zea mays
  Clone ID: MRT4577_87267C.1
cccacgcgtccgcccacgcgtccgcccacgcgtccgcccacgcgtccgcccacgcgtccggtacaattcatccgatgttttacagctttaaaaaaaaaaaaaaaaaaaaaaaaaaaaaaaaaaaaaaaaaaaaaaaaaaaaaaaaaaaaaaaaaaaaaaaaaaaaaaaaaaaaaaaaaaaaaaaaaaaaaagggggggccgttttaaagaaccaaagtttacgaacccgggaatgcaaggaaaaagtttttttatagggcaaccaaaattaaattaactggccggggtttaaaaacgtggaaaatggaaaaaccttgaggaaaccaaattaaatgcccttgaaaaaaatccccttttccccagttggggaaaaacgaaaaaggcccgcacgaatcgcctttccaaaaatttgcccaccctaaatggaaaatggaaccccccctgtaccggcccataaagcgcggggggggtgggggttaccc

SEQ ID NO: 170711 - DNA, 500 bp, Zea mays
  Clone ID: MRT4577_87268C.1
ttactgctgtgtcattcacttagtgtgatgaaatgcatgagttcgcagtatctaattgctagaagctcggttctgtaatcagttccgtcatactttaaaggtctttactttgtcaaaaaaaaaaaaaaaaaaaaaaaaaaaaaaaaaaaaaaaaaaaaaaaaaaaaaaaaaaaaaaaaaaaaaaaaaaaaaaaaaaaaaaaaaaaaaaaaaaaaaaaaaaaaaaaaaaaaaaaaaaaaaaaaaaaaaaaaggggggggccgttttaaagaaccaaatttaactaacccgggcatgcaacttaaaattttttttatagggcaacaaaaataaaattaacggcccggggtttaaaaacgtggaaatggaaaaaaccttggggtaaccaaattaaatccctttgaaaaaaatccccttttgccaagttgggtaaaaaaaaaaaaggccccaaccaatcccccttccaaaaatttgcccaccctaaatggaaaatggaaccccc

SEQ ID NO: 170712 - DNA, 1078 bp, Zea mays
  Clone ID: MRT4577_87269C.1
ttgggtacctcgaggccggccgggacctgtgctttctttatggataacgatgatgatgacgatgaggcggccgttgtgggcgcgccattccggaccctccactccagctccactctcccatggcttcctccgccctgccttccagaaccttgcaccgccgcgcgctcccctcgtctaccccgtgccaccctgcgacggagaccttcgcccccggcgccgtctcccggcggcgggcagccgtgcggctcctctccgccgggttcctgaccgccgtcgcgccgccgccgtcgctcgccgcgaggaggggacgcgttgtcgtgcctccggaggactacgccactgcacccgatggtctcaagtactacgatcttgtcgaagggaagggggcaactgctgagaagggctcaaccgtcctggtccacttcgactgcatttaccgtggcatcaccgcggtgtcgagccgtgagtcgaagctcctggcggggaacaggagcatcgcccagtagccttacgagttcatcgttgggtcgctgcctgggaaagaacgcaagcgggatttcgcggacaacgccaacgggctgtactcggcgcaggcggctccgaagcctccggccgccatgtacaccataaccgaggggatgaaggtggggggaaagaggagagtgattgtccctccagagctggggtatgggaagaggggaatgagtgagataccgcctgacgctccttttgaactggatatagagctactggaagccgtttctcctgccaaagaatgagcttttctgtttccagcagacaggggggcacttatggagtgtgccagatttcagaggaatggattacataatctactgacattttgaggtccatactggctagatatgcaattgaaggcagccgcaattgaaataacctatgattagatgcatgctgagatggtggttgctgggacaatattatttttttgggttcaaggcacagcaatttctttttggacaataagcagaaatgtggtgtgtaaattgtttcccctcctcgaagtaaaatacgtgtataaatttccttcattattttc

SEQ ID NO: 170713 - DNA, 262 bp, Zea mays
  Clone ID: MRT4577_8726C.1
gcttggaactttgggctgatttatgtgcttgttcgcgctggccctgggcataggcatttccccgccgaaggctgcctgagtccccttcgggagcacggtacgggccatacatcctagtgttgcagtgttcggcacgagttctgcggagaagtaacggtcagcttatggggtctacatcctagtgtcgtagtgtccggcatctggattctggtctgaggtacccctctcattttcctccatttcgaaaaagtagggctattcc

SEQ ID NO: 170714 - DNA, 612 bp, Zea mays
  unsure (1)..(612): unsure at all n locations
  Clone ID: MRT4577_87270C.1
ggcccccctttaatacctgtgaattctcccactcgagnagaggggaccgaacggataactttttctagccatgtaacatctctagtgtacttgtctccatttgcttttgacattggcacggtggattgtgttgctggcgtcgctgttgtagtgttttgtttcgcaaacctgagaattatcgggacattccggggaaaaaaaaaaaaaaaaaaaaaaaaaaaaaaaaaaaaaaaaaaaaaaaaaaaaaaaaaaaaaaaaaaaaaaaaaaaaaaaaaaaaaaaaaaaaaaaaaaaaaaaaaaaaaaaaaaaaaaaaaaaagggggggccccttttaaagaaccaaattttactaccccgggcttgcaacgaaaaactttttttatggggcccccaaatttaaattcatggcccgggttttaaaaacgggggaacgggaaaaacccggggttacccaaattaaatcgctttgaaaaaaatccccttttcccaagttgggtaaaaaccaaaaaggccccaaccaatcccctttccaaaaatttgcccaccctaattggcaaatggaccccccctttaaccggcccttaaagcccggggggtgggggggttaccccc

SEQ ID NO: 170715 - DNA, 617 bp, Zea mays
  Clone ID: MRT4577_87271C.1
gcgcgccttccggaccctccatccactccatctccctggcttcctccgccctgccttccagaaccttgcaccgccgcgcgctcccctcgtctaccccgtgccaccctgcgacggagaccttcgcccccggcgccgtctcccggcggcgagcagccgtgcggctcctctccgcggggttcctgaccgccgtcgcgccgccgccgtcgctcgccgcgaggaggggacgcgttgtcgtgcctccggaggactacgccactgcacccgatggtctcaagtactacgatcttgtcgaagggaaggggccaactgctgagaagggctcaaccgtcctggtccacttcgactgcatttaccgtggcatcaccgcggtgtcgagccgtgagtcgaagctcctggcggggaacaggagcatcgcccaggtgagtaggtgacgcggcaaatactgcacctgatcctcgtgtgtcgattccggtggtgtttcctgcctgctctagaaagaacaaggagggttaagatgcttgtgtgtcttcttctagtagccttacgagttcatcgttgggtcgctgcctgggaaatacgcaagcgggatttcgcggacaacgccaacgggctgtact

SEQ ID NO: 170716 - DNA, 649 bp, Zea mays
  Clone ID: MRT4577_87272C.1
tcgagttttttttttttttttttttttttttttttttttttttttttttttttttttttttttttttttttttttttttttttagcagggaaaggcactggttaaaaataccctaaacagcataaggcaaatggcagttacatattcaaacccccaaaatagctcctaattttaccaaacttccacagggggcgggccacgtgcatgggcctgtaaaccaaccatttggcataaacggttaaacctgatcctaaaagcctagggttagaggcataactatggaactccatacatgtttggcaggaaagcaattagcagcgaagttgttgccaaaaacagggctaaaacaattttaacccatgaacccccacacattgggcaagcatgggtccaccgactgatccaccaagcctcacgtttatttgtctgatttggggcaccaggatgcccaaatgcacaagtttgccgaaaacaacgtatgcccttgtaccaatcaccatggaaacctgttttccacacagccgggacaacattttttggagatcccatgacacctaaataacctccaaaacctacagatgttttaaaaccaaatgcagcatttttttaaaataacctacgctttcttggccaaagatcaatcccaagg

SEQ ID NO: 170717 - DNA, 608 bp, Zea mays
  Clone ID: MRT4577_87273C.1
cattgtccagttttgtttgaaaataatgaaggaaatttatacacgtattttacttcgaggaggggaaacaatttacacaccacatttctgcttattgtccaaaaagaaattgctgtgccttgaacccaaaaaaataatattggtcccagcaaccaccatctcagcatgcatctaatcataggttatttcaattgcggctgccttcaattgcatatctagccagtatggacctcaaaatgtcagtagattatgtaatccattcctctgaaatctggcacactccataagtgcccccctgtctgctggaaacagaaaagctcattctttggcaggagaaacggcttccagtagctctatatccagttcaaaaggagcgtcaggcggtatctcactcattcccctcttcccataccccagctctggagggacaatcactctcctctgcatgaccaacagcacaacaaagatggagttagcagtataataatacactagaggcagaaaggctgaattactgacctacctttccccccaccttcatcccctcggttatggtgtacatggcggccggaggcttcggagccccctgcgccgagtacagcccgttg

SEQ ID NO: 170718 - DNA, 557 bp, Zea mays
  Clone ID: MRT4577_87274C.1
acagggaagagggacacgacaggatactcctacgagcagtgtagaatactgggacaccatggctcccctacaacgtctgcgccggcccatgtcctgcaacctgagcaggcgcgtcaccgagctgattcatgctggatccgacaaaaacagcgagaccctcaaattcaacaccgccgatgacattagcccctagcagcccaggcacatccctatcgcccaggattcacctcagcaagacggtaacttgaaccccctcaagtcgagggcaatccgcatgttggatcatcgcatatgcgagttcttgatgatgacgaaacgaaaacaccaggatgcacgagtggcggatgtttgactccacgtgcaggctaatcatgacacggctgcaccatatcacatcctcttccctgtcctcatcatggctatgcctggggtaaccaccgatcaaaaaggtgtgaaagagatacttgtgcttatgaagaaggtgctagatacctacaaggtacacacagaccaatggtaacaatccttgctaggagagctcctcatgcacgccaacc

SEQ ID NO: 170719 - DNA, 299 bp, Zea mays
  Clone ID: MRT4577_87275C.1
cggcagtggcggcgttgtgtgtgcagtacgagtcggatttccggccgaacatgaccatcgtggtgaaggcgctgcagcctcttgtgaaggccgccgcagccacagctgggggggcctagcagtacatgaacatgatagatgataatgatacacaagcatatatatctccagcacatgtcctccaaagatgtgttcttggttatctgtcgcttgtgtgtacatctcaccttcagtgtggttgtaatgcaacatgtactgactgatcaatctgcaaaggattcaagtgttcatcacctttt

SEQ ID NO: 170720 - DNA, 810 bp, Zea mays
  Clone ID: MRT4577_87276C.1
ttttctccctcgctgaccgctgtttggattgaagggagctctgcatcttgatctactgtcaattagtttcgtctgccgtctattgcatgctagctgctgcaaatctttaaaatgccccacgttccagatctgaacggaagctatttcttcttctcgagatctctccaggagcttggtatttattgtgtatttgctaccaagattcgagtgagctttgtattttcttgggttatattccaagccaagatttgaatagcctcggtattttgttttctccccaagttagtgaataaaagattcaggttgtgctttgtacttcgcacgcacctttattcccttgcttttgagccgtggtgtcactgttgcttcgtattcatcccttccctaccggccgtctgctctacaggaccggtgtccatttgtggcagatctcttagatctccccatggatgcgtttatcccctcgtcctacttgtggccacatgattttccatggtagatttgcatcagattccttacggctgctgcttggatctgggcgcttcgtgcagcacgtgcgccattacttttgctgtctctgccccatgcgcttatcacgtgcttgctgtcgcccttgtaccatttgatgtgtctgggatgagggatttgccatagattgattggatgcaaacataaaatgccgtgaaactgatactagtcttttatttttttgcaggcttgacatgacgatggtgattgatccctttgctctggtgaaagctttgagacgttgaagctctagcaatggttaagctctagttaggctatatc

SEQ ID NO: 170721 - DNA, 228 bp, Zea mays
  Clone ID: MRT4577_87277C.1
cccacgcgtcggctgcgagacctgcaccaagaccaacatggtgatggtggtcggcgatatcacgaccaaggcgaccgtgggctacgagaacatcgtgcgcgacacctgctgcgagatcgcggtcacctcgcgactacgtggggctctacgccgaccgctgcaatgtgctggtgaacatcgatcatcagtcctccgacatcgcgcagggcgtgcactggcacttcacga

SEQ ID NO: 170722 - DNA, 163 bp, Zea mays
  Clone ID: MRT4577_87278C.1
gtgcctggaattaagtctttaattggcttaactttgtgaaataatcactactcttttacttgccatgcacaactacagataacgatagagttacaattgcttacccatattgcatcatatatttgcgaacgttcaacatggtatgtctttatttgtgtgactt

SEQ ID NO: 170723 - DNA, 435 bp, Zea mays
  Clone ID: MRT4577_87279C.1
gggggggggggttttttttgttttgtttttttttgggggtttttttttttttttttttttttttttttttttttttttttttttttaaaagggaaggccctttattaaaaaccccccgctaatgcaggctacgggttacaaatttattattattgggggaggcgggggggttaatcccacctccatgcaattttttggccccctcaaacaagggggagccaatgaaatcgagttgggggacccctccttactccgccccaagggggggaagcataatatccccaaaatctctagggggtttttgggccacagcaccctccagggggacacggggttttttttgaaaagcccccttttttagcttcggggcgcccccggggcggggggttccccccctggggggggggtcctccggggggcccctgcctccatggg

SEQ ID NO: 170724 - DNA, 408 bp, Zea mays
  Clone ID: MRT4577_8727C.1
attcatgtgagatgccttatgcaagatataccttgcccacagaatataagaaggccttttgtgattttttgcgggaggtgaagtttccagatggatttgcatccaacatatcaagatgtttaaatgctgagggaaccaaattacaagggcttaaaacacatgatcgtcacattcttttgcaaagaatattaccagttgccatgagaggatttttggacaaggatatttatgaagcactagcggatctggggaaattttttagggaattgtgcagcagaactcttaaaaaggatgtgttggctgaaatgaggaaagaaattccaataattttggtgaagctcgagaaaatatttcccccagctttctttgatgtgatggtgcatctagctgtgcatctacctgatgagg

SEQ ID NO: 170725 - DNA, 351 bp, Zea mays
  Clone ID: MRT4577_87280C.1
gcgacgccactgcgtgccgatctccgcatgtcgttaccatactgcttgagcgactttctacctcgtgcccagacaagtccatatcgagagcgcgagatactgaccagtggacgtgcacctggcacctggagcagcggggtaatggggaagaagtggagctggcctggcgcaaggtgctgcgggccataggaagaagtcaggagtctaggtccgtgaaagccgtgctccagttccccgtcggccgcatcgtgcgctacttgaagaatggccgctactcgcagtgtgtatgctccggctcccgcatctacctcgacgctgtactagaatacctaggcgatgacgatttttagc

SEQ ID NO: 170726 - DNA, 868 bp, Zea mays
  unsure (1)..(868): unsure at all n locations
  Clone ID: MRT4577_87281C.1
ctgaacccggcggcggcggaaccaatggtgtggccgtcnccgctcaggttcatcagcgagctcagcccggaggccaaggcgctnctggagggggctctcatgaagccaacagggagcgcgagaagcgcatcacggacaccacaaccaaaacaaacaacgacggcggccttgacgacgacgacgagcagctgtgcggcatctgcctggagcaggcgtgcaccatggaggtgcaggactgcgggcaccagatgtgcgccgcgtgcacgctggcgctgtgctgccacagcaagcccaacccgacgaccctggcactgcagccacccgcctgccccttctgccgcgccaccatcacccggctgctggtggccaacagcaagactactgctacctccaacagcttcaggggactcacctcggccatcaggtccttgtccttgtccaggattgctcgtggctccgggagggtagccgacagctcattaccccagtcattctttgaggaacaaggatccaaatgattaccaagcctcattacctgcaataatccactccagtcattctttgaggatcaatcaaggatccaaatgattatcaagcccaagcaagatggagtattacaacaactaattaatggtgcccgatgcaatacaagtagatgtttttttatacaagggagggaatgagcagagttagtagccactaaattttggatttgttagtcaatgatatgttgtgaaaaaaaaaaaaaaaaatgcccctatgtgagtctgggacatcagcattcagcgtcataaaggccggagcatgaacagattcagaatgcatgcaatatgatccgcatggagatatatgtaaaggatgtgtttcc

SEQ ID NO: 170727 - DNA, 461 bp, Zea mays
  Clone ID: MRT4577_87282C.1
gggggggtccttggccaacctgatggtaaaaaggggccttgaaaccccagaaaaaacatccctaaggtcctcgggttttggagtctttacataaaaaaaaatttttggttaaaaaaaaggcaaaacagccctaaggtttttccaaatttttttttccaaagcaaacaatttttttttgcaaaaaaaccaaacggggcagcagcccccaaataagggggaaatccccaacaaaaagtttgggttggttaaactatgcttaaaaaaaagggcccccgaaacatttggagctttgggggggaaaaacttttgaccccccaaaaatatccttggggccaaatttttcccctcgttggaccctttggccagaaagctgaaaagggggggggggaactttttccttccccccggtttaaagattttttaaacctggtgaaaaaccccttccccccggggggaatccc

SEQ ID NO: 170728 - DNA, 259 bp, Zea mays
  Clone ID: MRT4577_87283C.1
acattcgtcatgcacacctataactagtcacacacgctgcaaaattgccaggggcataacacattcgaccggacacatacgccggacgcgtgggctcccaacccatctatgcgcaagctgtaactggccacccaaccaaatactccgcaaactaacaggcgcttagcaagaatagagaccattcatccattggaagagataaatgttgggaagaacgcccaataaccaacaataggtggtcaaacgggtcttcaataat

SEQ ID NO: 170729 - DNA, 128 bp, Zea mays
  Clone ID: MRT4577_87284C.1
acgactgaaggaattctgatcactccaagggttgagtgcggacgaccggtcgaaactagagggggccccccggcaccaaagaaatcctatataaaggttttcattatcgcgcgctccctgaggggggg

SEQ ID NO: 170730 - DNA, 401 bp, Zea mays
  unsure (1)..(401): unsure at all n locations
  Clone ID: MRT4577_87285C.1
ctccaacttccactggaagatgttcctacctgtggcccagcgccgccgacaacaagtctgtcgcctactgtgacggttccacccgctggtgctccagctcgacgacgacgtcgccgacctgcgggcgctggtgggctgcctagcgtcgccggtctccgtggaggccgtggcgcggctgggccgcgtgctcgtgtcgctctccggcctgttgcaccaaccgcaggcgcaggacccgctgtgccgcctcggcccgtccccgttcgcggagcggacgacttcctccacctcgtcgacgcgcacggcagcttccgcgacgctctggtcgcgctcgccgcgctccaggttgagggcccgcgtcgcgctgcgcaaggaggagccggccccgcctcgcgtnggccgcg

SEQ ID NO: 170731 - DNA, 812 bp, Zea mays
  Clone ID: MRT4577_87286C.1
ccggccgggaaaatccactcatcttgtgtgtgtcgcttcaaaccccaacgacttctttcccatttcttccacaaattgattttttgtaagtacacaatttacctcgaaatacttcactgtgtaaaatatttcatctttgagagatcaacgtcactcgtcccactggatcaagagcccatcaaaccaaccaacccttcaccagctcaaacacacctctcagtggcgctttttttgccttcatcaatctcctttgcttgattgtttgctttccttcacatcttctctgctttcaaacaacccacgaactcataatgaatgcacgcttcgttttttgtgttctgagcctttatgccggcacacaacttacgatggctgcccctttgggaatgctaggaggcttagttggcggcagtggtggcggcggtcctatggaaatgctaggcggaataatgggaggtcgccgctatggtagacgcgaaagcagttcgcaggagggtggaccaatggctatgctgagcagcctcacaggcagcggcagagccagcggcgaaaaaagtgaaggagacagcggaaaaggcgagggtcatcaaggtatgcttggcagtctcatgggtggcggcggaagcagccctttgagcatgatatgaggaccaatggccgacggcggtggcggctccaagacatgcccgcacggcacccactgtatcaacagcggcctttcgggacgagggcacacctacagccaacttcaacttacctttcttctccaaatcctactcctattgtccggcttgtcaaggaacagctgtact

SEQ ID NO: 170732 - DNA, 508 bp, Zea mays
  unsure (1)..(508): unsure at all n locations
  Clone ID: MRT4577_87287C.1
tgggtacctccaggccgggcggggtgctctctccatttccgntggattctcctcccccttttactaagtcgtcctcgagggtagggatcgttaaggctttgtgaacgatggatgtctctgaaggatgcgagacccagctgattcgtggggggggttgaggggccggccggccaagatcagcgtgacgatgacttacgccttctaccgcgaaatagcggagtcgttaagaatgctgagccgaagccccgggaaaccaaaagggtggtgattagctacattctgctggcggaccgccataaagtgacgtacagtacgtgtgaagtgtaatggagcttccatgcatgagtgaatccatgccatgttatgaatctagtccttcctttcttgtatcttccatgtgacgcggggtgtgcgtcccctcatgtgtgatgatgccagatgaatactacaantaagacgttgttgtgactgtgtgcagaaaaaaaaaaaaaaaaaagcgggcctccac

SEQ ID NO: 170733 - DNA, 474 bp, Zea mays
  unsure (1)..(474): unsure at all n locations
  Clone ID: MRT4577_87288C.1
gaagcaaaggattgttgaaccttttgtctataacacagaaaggggaaaccagaaatacgttaaaataaggaccaagtgcgaagctaacttttcagttacacatcgaaagacactagggacaaatccccccaaggtccaagcttaagcgactagcgggatcctaaccaaggcagggagccttgaaggatctgatatccaaccccaacaccagtgcccgataccagcttttaaacagggccaaaagtttttgggagccgcctcgcaagaacggaagctccacttttaataaaaacaaaaggcaaatggaccgctgcctcttttaaaaaaaaaaaaacccgggccccagatcctntggggcacgaaaaccaaccccggacggaagatggggggggggaagaaccctctcctcggaagaaaaaattgtggggggaaaaaacaatctgccaagggaaaaaggccaaatgggggggaaaa

SEQ ID NO: 170734 - DNA, 778 bp, Zea mays
  Clone ID: MRT4577_87289C.1
cggaggtcagggccttctccccgggagaatcgtgcgcgccgacataactgcatccgcgatctccgcctctgctcgcgtcgtgaccccctggaatctagctagcctaccctacgcatatatgatggggagtagggcgctcggccggctcaccatgttccaaatcaccgagaaacttgccaccgtctaagagttctgcgagtgaagagatcaggcgccaaggacgcgttccttgcctcccgtgccctggctgccattggttgaggtcgaccgtcgccggggaagcctgcgcggaggtgtccttgtgcgtcgggcgcttggaattggcccaattccacgccggtgagctaccagacttgcggatccgccgcttgccgtcgccgtgatagtctacgaggaattgaggagtaagtacccatccatcctgttcgtctagcatagagcattgtgtagcaccgatcgaattgaagtttggtgcgtcatgccagagatctgcgcgatccggccatggcaccaccgcgtcgaacttccgcgccgcccggttgggtcggtcgggggagggaagggagttttccaccatccgatctcgaacgggtggcctacattagatagctcaccgcttcacctatttatgaccagggccattcgatcacattggatggctgggtgtgggccgtggcgtggatgcatgttaacccttggatctggatccaaggatcgacatagtggaacgggttcgggctagcgaaatttaatcctgactgtccttgttcgatcgaaa

SEQ ID NO: 170735 - DNA, 220 bp, Zea mays
  Clone ID: MRT4577_8728C.1
atttggctcgaggatccatttgtcttttttgcacacccagacccatcaaatgtgaccatgttagttctagtcgcgcctgctccacttggatcacctacttgctcttgaatgctctgagccgaatgtcgcttacggctgccagggatcttgaacgaccgttgctctgaccatgacgagctactgctgtagctgacgcctcatcatgccagcctgaagcatg

SEQ ID NO: 170736 - DNA, 363 bp, Zea mays
  Clone ID: MRT4577_87290C.1
atatgttgagctcagatcctttaaggacccatataattagccacaacaccagaaaagtcctacttgctgaccttccagagctcaggtttctcggtgtacgaccatgggttttcccgtaatgactgggcgacccattttgttaaacataacgcgtttataaggtaatccgagcaactgtccatgttgctgcaattaagactgttcacctgcgatgggcctggggcgcatctccgcgttaccataggacctaagatgcgtgttccgttgtaacacgagttcgttgaacactatagccttgctattagtaggccagaaaccaagtgttgtattcatctgactctatatacgcgacttcggacccat

SEQ ID NO: 170737 - DNA, 104 bp, Zea mays
  Clone ID: MRT4577_87291C.1
cggtacgcgtgggctttaatagatgctggaaagcccatgcatcacgctgctgtgtccgtctctatatatttaaggaccttcaaggagtatatattaaacataga

SEQ ID NO: 170738 - DNA, 314 bp, Zea mays
  Clone ID: MRT4577_87292C.1
acttttctacaccgacggaagtcgagaatgaagtttttttactccacaccgcagagcaacaaccgcggcgaactttcaacgagcagggcgggactcaataatacaaaaccacaccataacaaaatcgaatttatcaactacaacaatcattaatccaccctctatagactaaaaacaattaatacaaaaatttaattaaattttagtgccgaacaaaacctaacaccaccataattattaggttttctactagtcaaatacctcaaattttatacagttatacaaaaaaataaatgactgtttacttcttcttg

SEQ ID NO: 170739 - DNA, 111 bp, Zea mays
  Clone ID: MRT4577_87293C.1
tcttggtactcgcgcaaaactggcatccgattcatgacctgtgtgtcagttgtagatttgacatgccggattgagaaaagcgcctcctatgatgatgtgaaaccagccatc

SEQ ID NO: 170740 - DNA, 152 bp, Zea mays
  Clone ID: MRT4577_87294C.1
gacttacttttttttatatttttcacatttactatgaaaagtattgaacaacctactacagggtttgaagatacttactgggagccttacctctttatatatgatctaatacagtattcttcggtagaacgagcttccttttacacgaaatt

SEQ ID NO: 170741 - DNA, 254 bp, Zea mays
  Clone ID: MRT4577_87295C.1
gcctaacgcgctacctatccaattagatctactttcatattacaactaccccggggacgcgtaacaatacacactctacaaaacacactctgccccaccttttccgcaacaacgtcatatttcataccatagacttcaacttcctccactcgaccaacataattacagaactttcttattttcacgcggagctccatacacaaccatcagaacttggttttcttttacattctaactcaccctaacatgaaatt

SEQ ID NO: 170742 - DNA, 811 bp, Zea mays
  Clone ID: MRT4577_87296C.1
acccaggggccgaaaatgcagtcattcccatttgcattttgcataacaaataagttttggttgtcccagaaaatgcaggccactctccgtcagttattaccattctgcacagctgcatttgcacgcggatcatcctcaccaatctctccatcctggtttatgataccttcctcatcgaaaaggatgaccacatgggagatgggaagatggaaagggttgatcttgatcgctcgcccagcccacaatatgataagtctgctccatatagtcctgcgtacaatggcaaagccagtgactcgatgagccctaatgttcagccaaaggcagatgccaaatatgtcaaaccttctgggaaacctgagcctgcatctccattgcgccacagcaaaggcagagatgatgatgaaggtatcatagacgacgatggagagattgctgagggtgagatgatgatgaaggtatcatagacgaggatggagagattgctgagcgtgatttgcgtgcaagtgcagctgtgtagagaatggtaataactgacggagaatggcctgcatcttctgtgacaacaagactgttatgcaaactgcagtcgttcccatctgcaagagtccagaatgtagaaatgcatttgtgccattaaatgtctcgtaggacctatgataatacatctgccatatatgaacaaaaactgttgatgtatgtcctgttgtttgttaaacttcaatgacttgtgttctggtgttttacagccagttctgtaagtgatttatgataaaatatattgtcaggtctggaagtggtagtttatgat

SEQ ID NO: 170743 - DNA, 1443 bp, Zea mays
  Clone ID: MRT4577_87297C.1
atgggggcaatttttgatcatcacaagcagaaggttaagcacgacaaagagcccgatggaggcatcgggggacgtctcgataagagaaagaagaagggtaagcgacgtcacgccgatatgctagttgccgcagcggttcagaaagggaggaatttctcgaccgaggaggccatcgaccatttcaagaagatgctcgatgccccatgtacaaaccaccgctaccccgtcccgcacgcctacaaagactatgggcttctgaagaagttgctaagcaaagatgtgtcgtctgggaggagccctgagcccgggtctgactactacgtgtcatggaggcaccgaaagctcgaacgacgtgaaggcagagatgctgacagtcgacatagttgggttccgaggaacctagcacgccatccttggaagaccatgctacaaaacattcatggtcgtacccaattacacctacctaaatctcaaaatgctaggtcccacaggggcatgctgctaggcttcttggtctccgaatgggggatcgaggaaaacccagagaaggtcgccaccatctcaaacatgggaccaatagaagacattaaatggatacattggatcatggggtgcctggcctcccttagtcgctttatttcatgccttggagagcgtgtactaccactctgcaagctgttgtggaaggcaacagtttctctaggggttttctctaccaacctctttgagctgaccactcattacaatcaatcccgctgtgaggacggacagtctttgaacatagacccaccgacccatgaacccatccctatcattgaaggcaaaaatgacctggcataccctgcaggttgccaatactatgcacaacaaacccacctactagcgcaagaactgcagatgatcccaatcacttggtcattcgtggtcttggggctcgatctggttggaactctcagaaaggtgccatggggctacacgcacgtcctagtcgttgtcggcatgttcaccaagtggatcgaagcttggcctatcacaatgatcaccactgatcaagacatcaagttgatcactaacatcatccatcgctttgaggccctaggagctaaccgttgtcctctagagcctgaggactacccaaaccattcgaccgagtacatgcctatcttcatggcttatggagctaaggtgatcctccccaccaatctcaagtacggtgccccaagggtgaaggagtacaccgatgaaaggaacgaaccgagcctccaagatgcgctagatcaacttgacgaagcctgtgatgtagcgctccatggttggcatgataccaacatacactatgaaggtacaaagcaacaaagatcatcacatgttgtctccaaccttggaggggccattcataattggagaagtactatggctgggcacctacaacttgaaggatga

SEQ ID NO: 170744 - DNA, 379 bp, Zea mays
  Clone ID: MRT4577_87298C.1
ggcacctcataataacaaacttgtatgtgccaagcgctataaaccaagaacactactaaggtaatcacaacagtgactgaccacatacaatggcgacggggaactttgtgcagagcaaacgcggtggacaatttaaggggaaagtgatattgctcctctcccgcagcgaatgagtcggaatgcccacgtggcggaggcgatgcgttccgaatggggtataccggtggcacggggccagtgtacaatggcggtggagagggctaaggcggaacagggacaaacagtttgctctggatagaggcacatacaacgggcgggtgcgattagaacgcggcgcactgcttgtgtgggctctccccggggcatctgggaaagcaat

SEQ ID NO: 170745 - DNA, 380 bp, Zea mays
  Clone ID: MRT4577_87299C.1
gggccgagacacgcgtcagtctgttttctttatgtcgatcatatgggatagctcccaacgcttttgttgcagatctttgctactcgataatgtcacttcaatatcatgacatcaggaaggacatagctgctgccagtcgtccgatgatctgcacgtcacatgtccaaacttcaagccgtctcgcagcattaaatatcaaacctagggtgccttgggccagttcaaccacatgttcgtagcttcactctaacgatcagcgtcccctgcacgacaccggccaaggcatccacggtggtggagctgccaccgcagttgcagatccggtatgcgccgtcgacgtccgccggggttagcggtaagcaacacgggaagggcaaatt

SEQ ID NO: 170746 - DNA, 319 bp, Zea mays
  Clone ID: MRT4577_8729C.1
acttaaacaacggggaggggtttttttataattcctatcccacaaacaccaaatataagcgcataaaaccaaacccaaagcatggggtttaacaaattaaaacgaacgaaacaaccaatcccttaaaatacccacaaaataatgaccatcccaatcaccactaagactttgaaaactttacacccatcctaatctataaaccggcccaaaaataccccctccaaattgggtaacaacccaacccaaccaatccatacctgcaccaccggggccaaagggggcgctcaaatacataacctttccacaatgcagggaacgg

SEQ ID NO: 170747 - DNA, 124 bp, Zea mays
  unsure (1)..(124): unsure at all n locations
  Clone ID: MRT4577_872C.1
gccggccggngcttcgtattccacttacaatcaccagaggcacatacacccacgatacgacatcaatcgacggaacgtcgctcggctcctacagccgcgccgccacgggatacgtgtcagcgct

SEQ ID NO: 170748 - DNA, 831 bp, Zea mays
  unsure (1)..(831): unsure at all n locations
  Clone ID: MRT4577_87300C.1
gtttgccgacaaggaaattcccaatggaatgttgctagtgttatacagaatctgagcttctttcaggatatcttataataccagaagtgaagcacgatgacttgaaccatcttaacttggaggaaggtctctcaaaaagcgagaatataaacccaaataagattactgagggccctgggaactgtcagctcgaagggaccattcgtgggaatctatttgacaatttggatactgatggaattgaagaaggtgaagagatctgcccactggacaaggatgaaatcacccccaatggatcaggtaacataataatggagaggagcaatatagttttaaagcctaccatttcccaacagttgatggattctatttcccctctcaatttagatcatggcgacttttctgaaaatgagaactccatgctgaacactggagatcagatgaaattaaatgaacctgtctctgagaatcttaacccattaattccaactgatgaaaaatatctgaagagccaaacggaggagtgtatgcccatttcatatctggaattcaaagatgatccttctggatagggaaaactcagtgctggctccgagaaagtacgaggctatgtcccctgtgaggcaggaaaatctgttctcagacaaagagaacgtgactcctgcctctaaggtgaagaccgttgttaggggagttcttggtacaaggatggataattcagtgtcagcagcaaatgcttcaaataagaataaagttcttgggtcaagggtcgataattcagtgtcaacagagaatagctcannatagaaagcatgtgaaattatcatcgag

SEQ ID NO: 170749 - DNA, 500 bp, Zea mays
  unsure (1)..(500): unsure at all n locations
  Clone ID: MRT4577_87301C.1
aangctctttttttttttttttttttttttttttattctttttttttttttttcgggaacaatactttttttttttcatttcaattggtcattcagggcaatggtaacaccgaccctggccccccaggggaagcgggacccatggggacgcaaaaaacgccgcacccgcccgggcgggccccccaaaggggggggcccagcacaagggggggcccaaccaagggggccgaggccggaaccaaaccgggggggagcccgggcaaaggggggtcccgggggaaaggggtatccgggcaaaattccacaccacataccaacccgaaacaaaaaaggaaaagcccggggggcccaaaaaaggggggaacccacaaaaaatggggtgggcccactggccccgttcccctccggaaaaccttccggcccgggaaacttatgaaacggcccaaaccccgggaaaggccgcccgcgggttgggggggctttccccttctgggccaatt

SEQ ID NO: 170750 - DNA, 1833 bp, Zea mays
  Clone ID: MRT4577_87302C.1
cccacgcgtccggacccaatcgccgcaaacccctccggaatttcttatcccccctcatctgctccacctccgacctcgcgcgagacgagcaagcccaagtatggccggagcagcagcagccgccgtggcgtccggggtctcggcccggccggccgcgccgaggagggcttctgcgggacgccgcgctcggctgtcggtggtgcgggccgcgatatccctcgagaagggcgagaaggcgtacacggtgcagaagtccgaggagatcttcaacgccgccaaggagctgatgcctggaggtgttaactcgccagtccgtgccttcaaatctgttggtgggcagccagtagttttcgactctgtaaagggttctcgtatgtgggatgttgatgggaatgagtacattgattacgttggttcctggggtcctgcaatcatcggccatgcagatgataaggttaatgctgcattgattgaaactctgaagaaaggaactagctttggtgctccatgtttgctggagaacgtattggctgagatggtcatctctgccgtgccaagtatcgaaatggtccgctttgtcaactcagggacagaagcctgcatgggagcgctccgcctcgtgcgcgcattcaccgggcgggagaagatcatcaagttcgaaggctgctaccatggccatgccgattccttccttgtcaaagccggcagtggtgttgccacccttggcctccctgactcccctggcgtccccaagggggccacctacgagactctaacggcaccctacaatgatgtcgaggcagtgaagaaactgttcgaggacaacgcgggggagattgctgccgtcttcctcgagccagttgttggcaacgctggtttcatccccccacagcctggtttccttaacgctctccgcgacttgaccaaacaggatggtgcgctcctggtcttcgatgaagtgatgaccggcttccgtctgtcttacggtggagctcaggagtacttcgggatcacccctgacgtgacgaccttgggcaagatcatcgggggtggcctccccgttggtgcctacggtgggagaagggacatcatggagatggttgcccccgcagggccgatgtaccaggcaggaactctcagcgggaaccctctagccatgaccgctgggatccacacgctcaagcggctgacagagcccggcacctacgagtacttggacaagatcaccggcgaactcgtccgtgggatactggacgtcggtgcgaaagcagggcatgagatgtgcggaggacatatcagaggaatgtttggcttcttcttcaccggcgggcccgtccacaacttcggggacgccaagaagagcgacaccgagaagttcgggaggttctaccgtggcatgctggaggagggcgtgtacttcgctccctcgcagttcgaggcggggttcaccagcttggcgcacacctcccaggacatcgagaagaccgtcgaggccgctgagaaggttctgaagcggatatagggggtccgcttcaagcaagcatgcagagagcatttcctcgtatctacgttcttgtactcttagttctatatgccaccgaggttttgtattgtgcagcagcaggacagcttctgtaagttcctctttctgaattagtgggtcttgtttttgtcagtgccaataaatctcgtggtccacgattacggtttcgttgttgtactgatgttcagatacaggattgtctagaaccttttttttttagaaaaaaaaacaatatccacattagtaatgcactgacccgggacttgcataagccctctcggactcttccc

SEQ ID NO: 170751 - DNA, 293 bp, Zea mays
  Clone ID: MRT4577_87303C.1
ggcgacgagaagtggcgagcccgtagagcgtttttagttagaggctactggcggtgggccgctgcggtggcggcggccatgagcagcgtgagcgagagcactaccgtcagcaggtggtccgagctggccacgctgcgcgcgctggcgcgcgacgccgtggagcaacttctgctgtcgtggtccggcacagttgcgtgggcgtcgtcgctcgaggcgcgggccctatgaccacctgcacggtcacggtacgacagtcaaggtgatgcacctgctgctttgaggacccaagtgaa

SEQ ID NO: 170752 - DNA, 244 bp, Zea mays
  Clone ID: MRT4577_87304C.1
cgcaagtgacagagaaccagagaaaccataatcccatatcaagctaaagcacaggagcgcatgaggccatcatgggccatgaaaagcaccgtccgtctgatcctctccatcgcagtatggtgacggcgatcgcggtggcgtctgctgggctcgggatgctggctgtcgtctcgttggccaacatgtcttctccgtcgttcgcgggcgcggctctgtggaggctcctgcgggggctccctcgctg

SEQ ID NO: 170753 - DNA, 152 bp, Zea mays
  Clone ID: MRT4577_87305C.1
tcgaaaatctcctgtctttccccctccattttttcctttatatcacctactagggaagtccttcaatatccgactcttacctacctcatgatgctctttcattctctgacctccactccaatctctatgttttcttagatgaatacatatac

SEQ ID NO: 170754 - DNA, 793 bp, Zea mays
  Clone ID: MRT4577_87306C.1
ctcgaggccggccgggacttctctagtctagcccctctgtcgctctcagacgacgggtgcgccgccgccgccgccctaagccaggtgctgactgctgaggctttctttggtctcttcgccggcgacgacacccgccagtatccacggtgtcattgcaagacaagatggtttccttcgagatgaatgacctcaagaagattgggcttggcctgacaggctttggaatattcttctcatttctgggaattgttttcttctttgacaaggggctcatcgcaatgggcaatattcttttcctgtcaggtttgggtttgacaattggtctgaaatcaactatgcagttcttcaccaagccaaagaattacaagtgggttctggccaacactttctgtgttcttgcagaggattcctatcatcggctggattttccaacaaccatttgtgacatcgttccttgaccgctacagaggaaaacgtgttccggtctagcaaccttttgcgcaatatatgcttgcggtgtagcaactagcagcctgtatttttttaactacagtagcaaactgattataccgatgtctgatccctcatgtttatatgttttctttaggattgctctttgtaaattacagccccaaactggccaaatcaaaggtccattcctttgagaccaggatgcaggttcacccatgaaatggatctgttgaagaaactcttaagcttgtatggaagtaaaagctaatatgttcctttatatgataatataagttatatattattgtgtggaccgagtttc

SEQ ID NO: 170755 - DNA, 1074 bp, Zea mays
  Clone ID: MRT4577_87307C.1
ccggccgggccgggatctctctagtctagcccctctgtcgctctcagacgacgggtgcgccgccgccgccgccctaagccaggtgctgactgctgaggctttctttggtctcttcgccggcgacgacacccgccaggtactcccacccgttcttttcccttcccttcatcctgttcgaagctgagcaccgaaaccctaacctaaagctatttagctatttgacaaccctcctaacttcgaagttttttttgttgttgcaaaaatcacccatattcctttactggatctgcccctgctagtatccacggtgtcattgcaagacaagatggtttccttcgagatgaatgacctcaagaagattgggcttggcctgacaggctttggaatattcttctcatttctgggaattgttttcttctttgacaaggggctcatcgcaatgggcaatattcttttcctgtcaggtttgggtttgacaattggtctgaaatcaactatgcagttcttcaccaagccaaagaattacaagggtactatctcatttggtgctggtttttttctggttctcattgggtggccgttttttggcatgctcttagaggcatatggctttattgtactcttcagtgggttctggccaacactttctgtgttcttgcagaggattcctatcatcggctggattttccaacaaccatttgtgacatcgttccttgaccgctacagaggaaaacgtgttccggtctagcaacctttgcggtgtagcaactagcagcctgtattttttttaactacagtagcaaactgattataccgatgtctgatccctcatgtttatatgttttctttaggattgctctttgtaaattacagccccaaactggccaaatcaaaggtccattcctttgagaccaggatgcaggttcacccatgaaatggatctgttgaagaaactcttaagcttgtatggaagtaaaagctaatatgttcctttatatgataatataagttatatattattgtgtggaccgaatgagtttctgaacacgcaaaaaaaaaaaaaaaaaagcggcc

SEQ ID NO: 170756 - DNA, 565 bp, Zea mays
  Clone ID: MRT4577_87308C.1
tcgagcgggcgcccgggcaggtgtaaaaaaaaaaaaaaaaaaagaagaaaaaaaataaaaaaaaaaaaaaattttataatttaaaagattctttttttattattttttttttatagccatgaaaaattaaaaaaaaaaaaaaattattttttttccccttgggccgcaacccccttgggggggatttttgcaattttccttccctttggggggggttcgggcttgcttttagggggcccatttccccttttaggggggggttttacatttcattggccggggttttaaaccggggggttggggaaaaccttgggtttccccaatttattccctttggggcaattccccttttccccagttgggttattagcaaaagggcccgccccgttcgcctttccaaaaattgggccaccctaattgggaatgggcccccccttttacgggccctttaagcggggggggtggggggttttcgcccagggggaccgttacctttgccggggccttagcccccggtcttttggtttttttcctttcttttttgccccggttcgggggttttccc

SEQ ID NO: 170757 - DNA, 335 bp, Zea mays
  unsure (1)..(335): unsure at all n locations
  Clone ID: MRT4577_87309C.1
gttcttacgaggccgctgggtgagcacattccattcgtcgtggccggggtaaaacaancncaacaggctngataattacggcaccggcgaatggattgcgcccactcggcggtcttaaccgacttaagcgttagactattggacaacgtgttggtgcttgctaccaattgaaattgcgtactttgggtcgacttgccgataaaaaattacaaaacaaggaactcagggtggaagaatcacacgctaagactttgcgtactgttttgtttaaagttgtgcctggacgtattgcattaaagactccatccaagcatgtacgtgccgatatttcgatc

SEQ ID NO: 170758 - DNA, 215 bp, Zea mays
  Clone ID: MRT4577_8730C.1
tttatacatccatccaggactccacatccgggggtgagccatacaacagaggaccgtccacccactattttctggcgcacacttatttcgctgtcctgcttgactattaaaccatccataacatccgttctcgttttccagacattgagcgcccaacctacaccaacctctacaggcttttgttccattttatctcatccctgactgtttttctt

SEQ ID NO: 170759 - DNA, 357 bp, Zea mays
  Clone ID: MRT4577_87310C.1
attaaatattatggaccggttctcagtgtttttatgctgctgcctttaacatatcgttcgtactaggtccgagtcgttgtccaactagtccctatcgtcggcagatgctataagaagctattccatgtactgctatggctactaactggactggtttctgacagagttcgagaagcagtgcctctatggatatcccgattagacatgggaggtgaccttaccagctgaggaagtgcccccacagattcctgaaccagcattaggagtcaactgtgctggggatggcatgaatgagaaagactgtctggcgctatttgcagttcacagagattcctggctactatatgtcgcattcta

SEQ ID NO: 170760 - DNA, 425 bp, Zea mays
  unsure (1)..(425): unsure at all n locations
  Clone ID: MRT4577_87311C.1
cccacgacttaggcccancccaaagcgggggggcgggggggacccnaaagccgaagagaaggccgaaggacacccgccaagcccacagccaaaccagctgccaaggccaaggccaaaaccgacggcgcgaagccgaagccacacgcgaagaaagccgcccgccccgccgaggcggacaacaccacgggggggggcgccccagcaaagaaggagccggcggccacgaagaccacngccgccgcgagaaaggcccctgctcacaatgccgatgactcacaacaaagcgcttacccctgtgcggaaagcgccggcccgtaaggcccacaaataaagcggccaagaacgggggcgctacgctgtagaacggacatcgcagaggctcgggcacactggtcatgcaaggatccgagaccgatccgctgagg

SEQ ID NO: 170761 - DNA, 569 bp, Zea mays
  unsure (1)..(569): unsure at all n locations
  Clone ID: MRT4577_87312C.1
ctcccacattactgagtcaaacagtcttcttacataacaatgcaaccaaatatatgttgaattaaagacccatttataattctgctttaaatacatctgcttgctaagaacagatttcagtgctccaagcttcaaatatggagatttgtaagagggaattcaatattattctaatttctctcttacagagtacaaataaaaggtgtatacaaactccgaacatatccagtattccaattcctttgtcaatcagaagagtaaaataattaacaaaagactgttgttatggtttgcattgtaaccgatacgcagagtctgaccgttgggcaacaagtttttctatcctgatgcgcaacacagtctctagagactaatccaggaagactttagcctcctttccatattctcacccccgaatcaagatttacagaagcccacgaagaatttacagcctgcttgagatcatcttgcctataaactgagttattgctttgtcctaaaaattagtcggtttttttttttctatgaggctnttcagaaatttacaggatgcccagactttacatgtg

SEQ ID NO: 170762 - DNA, 260 bp, Zea mays
  Clone ID: MRT4577_87313C.1
gcaggtccgcgaggacttgcataaccagatcttccagacgggcggcgcacgagggtggcgactccatcgagagcggggagaagcagcggtggacggacttttttaccagctcgacaaggctatcaagggcgagcgcgagtttacccttgtgctctcggatccattggccatgagctatgtttagagcctggcggacgacccgggtcagccggacgaccagatggaggtggtggagtacgagcggacagccgacgaggagg

SEQ ID NO: 170763 - DNA, 171 bp, Zea mays
  Clone ID: MRT4577_87314C.1
cgtcgacgcacgctgcagtaagtcgtgtgtcggctcgagggcgaatcctccagcatggtgactgtggtgatgtccatgagtcagcaagaggattcgtcggttgcactaaagcatggaagaaaatcttagagaaaggagctttcctgctgattctgacggtggtaacccaag

SEQ ID NO: 170764 - DNA, 264 bp, Zea mays
  Clone ID: MRT4577_87315C.1
gttatttaccacaacatagccttacaaggcgtgcgtgtccgtatagtgatcaagacagactacaaccagcacccacacaaaggctaccacctattggcctttacccaccaccgataatatctgtaacacctcaatccatgggcatcgtgtgccagtaccgatcacgatacagggaagcgcgcatatctctgtgaagaatgtgacctatcatgacatgtcaatcggtctaatagacaataaacaccatcgttgccactgcttctt

SEQ ID NO: 170765 - DNA, 442 bp, Zea mays
  Clone ID: MRT4577_87316C.1
ttttttttttttttttttttttttttttttttttttttttttttttttttttttttttttttttttttttttaactccctttttaacccagctaaccctttcacatgggttaaaaaaccacattaaacccgggggcccgccccgcaattattttaaaaccaccccagcttttcacgaaagcccaaggcttgggggtaaaccccggccctatcttggggggggcccccaaaacccaaccggaaaatttttttccggaaaagcccatcctaaaaaccctatcaaactagaaacaaatttccaacaaaacggggggggccacttgacgggccccaggctcattttttttttttgggaacccacccgaattacaggggggcggggtgaaaaaccctaacaaagggcccttggccggttttaccccccttaatttcccccccagccc

SEQ ID NO: 170766 - DNA, 264 bp, Zea mays
  Clone ID: MRT4577_87317C.1
ccacgcgtccgctctgtcgtttgcgcacgcaatggcaaagtcgtacgctcgggcaggtaccaggcctaagcgaagtggcgcccgctgggtctatatataacacacatgcattatacattggtgggcgattgtaactgactgcatggtaactgatggttcttgcctcgcaaatgtgaggagtataccgaaggatgcgggtcaactatatgatgatgaatgtataggtgtgacaaccaaatatgctgatgagaaaagtatattcat

SEQ ID NO: 170767 - DNA, 353 bp, Zea mays
  unsure (1)..(353): unsure at all n locations
  Clone ID: MRT4577_87318C.1
caggtcatcatatgtnagacgttttatagactggcngacagagaataagaggcggaaaaaaaaagggctaaggattggtctatttcaaacgngacatgacaagcagctctctctgnncggcccaggcgaaatggactatggtgttnngtnctagaaacgnccatccacaacatgtggcnnacacatatggcntcgttgggacaggacagttatgatgtccacgcggnngggcgcctntgtgtntgtntggggagatttttcagcttttgggccttctgcccccccttccggtagcttatggtccttcaggttcggttccttgttccctccctagnccgtaggatttcctttcc

SEQ ID NO: 170768 - DNA, 578 bp, Zea mays
  Clone ID: MRT4577_87319C.1
gccggccggtttccgaacttccacaacattcctctatctagtctccgctccgctcatggcgatccgcgccgagcaccacgggggccaacctcgggccctctctgagtgcgcacttctccttagacccacgcggcggcaggcttggggacgcatgccggctgcgccgcggtaaggccgggcagggcgaatgccgtgcgtcgccaggccgggtcgctcgccctcgcgggcgcggtcggggcggcgcgggggcactgccgattggataagcatagttccccggggcaggtgatggcaacatcagctgcccactgctcgtgacacttacaacgagactggtgcgggccgtgacgtgtcatgacaactagtctgctcgactgggttcgtggaggtaatatgaagaagcgagtaaaaatcaccaagattgatcaccacacaaatccaaagctgattgaagagtacaagggctatgggattacgacaataattatcatagagagtggacgacagtgactatagacacggtgagaaggagcaacgacaagagatgaagtgaagtaatacctgaaaacgctcttgac

SEQ ID NO: 170769 - DNA, 120 bp, Zea mays
  Clone ID: MRT4577_8731C.1
atgataacttggcggaatgatatttcccataacatgattgctatatcagatatgtatggtgaagctcccaagagaatggcgattcattgttctaccggaggaccatcaggagagagcact

SEQ ID NO: 170770 - DNA, 598 bp, Zea mays
  unsure (1)..(598): unsure at all n locations
  Clone ID: MRT4577_87320C.1
gacaagctttttttttttttttttttttttttttttttgttttttttttttttttttttttttttttttttttttttttttttttttttttttttttttcttttttttgtttttttttttttctttttttttccccaggggggggggggggggggcaaaccccccccccgggggaaattgggggccgttcacaatccccccccccgttctttccgggagcctccgcgtaaaccctgggggggcgaatgagggggcaaacctcccttcccgggaaaaagctcactccccccttttcccccaaaaaaccggggggggcagttgaatttaaaaaccttgcggcccccggggggaggcggcccccctaaaggggggggacccccctcccccctttctggccgggaaacccccgcccccccgggtgggttatgtggttccccccaccccggggggggggtacggttttttccgccctcccgggttatccccggtccgaccttgcgggcgcctggccccctcnggggccgggaaccgcgtatacggcgccgcgggggggggaaccctccctgggggcccgggcccccgcgggggcgccttcccg

SEQ ID NO: 170771 - DNA, 899 bp, Zea mays
  Clone ID: MRT4577_87321C.1
ctggccgtcggtggtatatctatgtgcatgtagtggtttcattcgaaccatactgtactgcagcctaaaaccctgctaatctatgctttactggaatgggcttttatagctagatgcacattagtttgtttagaaccaaatgttggatccataatgtattgcctgtcaacgaatttcctcttgctgtctaggaaaattaaagctacattttattataactaagtaattttttggactttatggtgttgaggtgctcattgatttcttctcagttcactctactattattctataatagtttggtggatgcaggtttttacatccagtttcatcttttggaaattgacaatcaatgaatatgttggagttgtgttatactctgtactgaagagtgcataatagctgcaaagtatactaacggtctaccttatagaagattttatccccttatccaccccaaaatggccataggaaaatgcatttattgttgaatatgtgctaccaagcataaggttcggtggaacaattattggcaccgggagtttgccgggcatgtcaaaatctctatgggcagattctgacaggagatctctaaaagggaaaacaacaggaccggaggagtagatcaatctgctcagtttcatcaagcgaggataaaaagttaacagaccatctcggatggaggagactttctttgcccaaatctttctcactacaacctatctcggacgagatttttttttaaggaggtagaatttgtaacaccctaaaattcaattttggtaacttagaagatttataaagtgtctttcaaacaaagttatgtattgaccaaagtatttgaccaaagtaaacaaatttctatgtttttttttactgatttgtttatttgtccagat

SEQ ID NO: 170772 - DNA, 347 bp, Zea mays
  Clone ID: MRT4577_87322C.1
aggaggtcgacttcaggagctgcgtgttctgccgatgcaatgagtaagcatgatgtccctcttttggggacctgcaccctccaaatttttccgggggcccaacttttaatcttgtaacggtgaaacttgcatcatagcttgttctaattggaaggatggggagcaacaccaatgactgattgctggagagtttggtaaacgctaacaatgttcactctggaattaatggcgttagtcaaggaggcctttcagaatagattatgtttgaacaactgtacatcatggcaataatctctgtggatcaggggctgctactacacataattggaggcagacttgtggagata

SEQ ID NO: 170773 - DNA, 244 bp, Zea mays
  Clone ID: MRT4577_87323C.1
ggttggaatttgggctgttttgtgctgatgggacctatattagttccctgggttcgtttccccaagtcctgtggggtgtgtacgtcggtcggaatcgctcctagactacggtcacgtggtcgctagaatttggtctcctcgatctctctacacgtacgaatggaattacggcgctacgactctgctgctatttgggtagtggtgctggaatgagtcggtgtaatttaggtgtggctctggtcac

SEQ ID NO: 170774 - DNA, 2019 bp, Zea mays
  Clone ID: MRT4577_87324C.1
tgtgctagctttgtaatctcaaaacattgtctttgcatgaataatgtaggttacccaaaaattactgcataccaagttacaaagtgttgtagctgacatatgaggaacactttaattttaatcttcatataaaaaaaaaaaaaaaaaaaaaaaaaaaaaaaaaaaaaaacattgggtacctcgaggccggccgggacgctccggcagcgaagctcccccctccctgcctccttccccggcgccccgctcttcctccttccgctccggcgatgggcactggccgccgcggcggcggcggcggcggcgtgttccaccgcctcctcgccctctcgtcgctgctgctcctcgcttccggcgaggtcgtcttcgaggagcgcttcgaagatggttgggagactcggtgggtggaatccgactggaaaaggagtgaagggaaagcaggaaggttcaagcacacagcggggagatactctgcagatcctgatgacaaaggaatacaaacaacaatagatgccagacattttgctatctcagccaagttcccggaattcagtaacaagaaccggacgcttgtggtccagtactccattaagtttgagcaggatattgaatgtggcggtggctatattaagcttatgtccggttatgtcaaccagaaaaaatttagtggggacactccgtacagcttgatgtttggaccagatatatgtggtactcaaacaaagaagctccatcttatactctcttaccaggggcagaactatcccatcaaaaaagatctagaatgtgagacggacaagttaacacacgtgtatactttcattcttaggcctgatgcatcttatagcctgcttgttgataaccgtgaaagagaatctgggagcatgtacactgattgggatattctccctcctcgtaaaattaaggatgttcacgccaaaaggcctaaggattgggatgacagagaatatattgaagatcctgatgaagttaagccagagggctatgattctatcccaaaacagattcctgatccgaaggacaaaaagcctgacacatgggatgaagatgaggatggaatatggaagcccagaatggtatcaaatccagcatacaagggaccttggaaacgcaagagaattaaaaatcctaactacaagggtaaatggaagaccccatggatcgataatccagagtttgaggatgatccagatctttatgtgctgaagcctttgaagtatattggaattgaagtttggcaggtaaaagctggttcagttttcgacaacattctgatttgtgatgaccctgagtatgcaagaaaggttgttgaggaaacttggggtgcaaatagggaggctgaaaaggaagcttttgaagaagctgaaaaggagaggaaagctagggaggatagggaaggtcaaaaggcaaaggacgatggtggccggcatcgaatacacaggcgtcataaaaaacactacagagatcactgggacgactaccatgatgagctataaaagtccccaaatattgcattcctcaaaagcataagctggaagttgcttcggacattgtgggtgcttttcaataataataattgattcgcctggtcagaacaacctgaagtgtttcttgctatgcgccaacaaattattgaactacaggatttgatatgtaatggacaaccgaagatctgcagggcattccagcgaaaacttggctctggtactgaaatagaggggacgagagactgtagtttgtgtctgtacaacggtgccggccatgtgctagctttgtaatctcaaaacattgtctttgcatgaataatgtaagttacccaaaaattactgcataccaagttacaaagtgttgtagctgacatatgaggaacactttaattttaatcttcatatatatacttctgtaatcttcaaaaaggatacgatgcaattggtctatctctgtcatcaccttgcacaaaaaaaaaaaaaaaaaaaaaaaaaaaaaaaatccgagggg

SEQ ID NO: 170775 - DNA, 285 bp, Zea mays
  unsure (1)..(285): unsure at all n locations
  Clone ID: MRT4577_87325C.1
gcggacaccaaccaaacgaatttcccctccgggagggagctctagagcctcgcgcgcgaattcnccctcgcgcgctgtctcgcagcgcgcctcgtccctccctcctggctgttcggcggcgggacggaccggatcccgctccatggcggaaggcttcaggcggtgggagtcggatctgctgttccccgccgccgaatgcgtgcaggattccgccgatagaatggagggtgtctaccgcttacttttgcatgaaaggaaagttatgcaggatggtacttctgatgc

SEQ ID NO: 170776 - DNA, 287 bp, Zea mays
  Clone ID: MRT4577_87326C.1
ggccgcgggttttttttttttttttttcgttgaaatatagattaaatttaattggagatataataaatatacaaaaaagcatactttatttatgggtgtactacattggttacaggtctgaggcctgcctccgcagctgcaggcttgtggccttcctcccatcttatcccacacctctctgatactgtgatatggattagatactcctgccatccggttgcgtgcatttatatatatagtgttcatcaccatggtcacacggcgctggacctcagcagcccggccgg

SEQ ID NO: 170777 - DNA, 1029 bp, Zea mays
  Clone ID: MRT4577_87327C.1
atgaggactatggcgataggcgatgtgcgaccacatgaacaacaagtacaagatcaaccttcttcctcaacaatggtgcaacccctaactcaagatgaggaacatgtacctcaagatgattgcatgggtcaagggggagcacaagaggaaagagacaaagaggaggaagaagtatcacatgcaccttcaacccaagtccacaccaacattcaaagggatcatctggtggatcaaatccttggtgacatcagcaagggacttactacgtgttcacgtattgctaaattttgtgaacactactcctttgtttcttctattgagccttttaggagcgccttcctcaatgggtcaatcaaggagaaggtgtacgtggagcaaccccctggcttcaaggatgacaggtacctcgaccaagtgtataagctctctaaggcgctccatgtacttaagcaagtcccaagggcatggtatgaatgccttagagatttctttatttctaatgttctcaagccttgtgaggagtttagtggggtgatgaaacagaaattcgagatgtctatgatgggcgagctgacctacttcctaggattccaagtgaaacagctcaaggacgacatcttgatctcccaaatgaagtacacgcaagatcttcttaagatgtttgggatgaaggacgcaaagcccatcaagacactcatgggaaccaacaaacacttggacctcaacgcaggaggtaagtccatagatcaaaaggggtctacctttgacttgactggatactcagactccaattatgtcgggtgcaaggttgataggaagagcatatttgggacttctcagtttctaggaaggtccctggtgtcgtggagctctaagaaacaaaattatgttgccttatccaccgtcgaggtcgggtggattgaatgggaaaaggtggacttggacaaaggaaaaggcttccactgcataacaatatcaatgtaccttgttcaagttatctttggtgttttcattgccttttgctcttaa

SEQ ID NO: 170778 - DNA, 446 bp, Zea mays
  unsure (1)..(446): unsure at all n locations
  Clone ID: MRT4577_87328C.1
aaccccaccgcagcacagcgccggcaaccgccgccatggagcgagcgcccggaaactagacctctaccgaggcgggagccggcgaggagganaagaagcccgcggagggcggcgcccacancaaccnnaaggggcaagggacaggaggcaangaggngnncnnncgcanaaagaggnccacccagcngaagaaggggaggagcgccnanngcgaccgccagncngnggacangaangccanngcannccggggngagggccgcaggcnncgcggcgagcagaccccnngagagcnggaganggaggacggcgacgagaacgacgccaggcnncaccagaccggaggcagcgnngcaagcaccaccaaaaagcagcagcggcggagccnngnnnggcncnccggccggcgnagnacaaaacaaaagggaaaaagnccnnnnaaggaa

SEQ ID NO: 170779 - DNA, 721 bp, Zea mays
  Clone ID: MRT4577_87329C.1
ccggccggagcccggcgatccatcgtcgtcggttaatcggatgagatgggtgacgaagccaaatgctccgtcgatgtcgccgagggcgcctacatcatggccagcatcatggccgtctccggcatcatggtcactgtcctcgtgctctcggccctcttccattttgtgcttcgacgtctcggacagcccagcgttatctcccacatcctggtacggcaggcatcgtggttggcccgacggtgcttggccgtgccatggacctccgccagctggggatgcgcgacgcgggcgacgcgcttgggggcacaatttacttcgtccgcatggtgttcatgttcttcatcggcctggagctggacctgcgctacctgcgccgcaacctacgtcgctcgctagttgtggcctgcggcggctccgggttctgcttcgtcctcgccgtgctgaccgggcccttcacctacggcttcctgcacccgggccagggccacttccagcccagcaacatctacgcctccaccgcgctcttcgcgatcgtgatcaccagcaccgcctcacccgtcctcatccgcatcgtcaccgagctcaagctcagcggttccgagaccggccagatcgccatcggcgccgccttcgccaacgacatggctagcctcaccgctctgagcgtcatcgtcgtcacccacaccctgtatggcacgatgcccaatgagaaggagtcctc

SEQ ID NO: 170780 - DNA, 548 bp, Zea mays
  Clone ID: MRT4577_8732C.1
gcgtttgcagcaagctctactctagttatgtactggcagggtgactagcaaacaatatgcgagaaccatggccggacgagtacggaacgaagtggcttctgcaggtccagacgcgcggcgacgactactaaagcggctacaatagcaagtgctgaattgatgactatagcagcggcaaaggttgctacaacaagtcgggcggcgatcaccactacggccgcatcggctgctatgggtacgggaggtccggcggcgaccactacggccgtggcaccaggggtggtggctacaacaagtgctgtgggggcgacgactacagccgcagcggcggccatgggtatggaaggtccgggggggacgactaccgccgtggcaccggctgaggtgggtacaacaagatcggaaacaactgctacgacagagggtacaacagatcgggcaccaccaacgacgacgaatacgggcgcggcaccagaggatggaaccgaagcaagccctgtggtgacgacacttacaccgaaagctgaggtggacgatacagcaagcag

SEQ ID NO: 170781 - DNA, 320 bp, Zea mays
  Clone ID: MRT4577_87330C.1
ccggcccaccgggtgtcccgcctcgcgcgcctggccctcatccgcaagccctctatggcgggccctcggtgctgcttgggccgcctccgatggctgggccaccttcacctggcccacccctgccggcttcccctggatttgctggtgccagtccaccacctcccggctggctgcacaactctggcggtttctcctaggacacaaacatgctggcttcaaacttcaacacgatgaccctccagccaccgccaactcaagaatggtatatggatacaggtgccgaaactcacatgacgaaaaaaaaaaaaaaaaaagcggcc

SEQ ID NO: 170782 - DNA, 303 bp, Zea mays
  Clone ID: MRT4577_87331C.1
gaagcaacatcttttttttttagatgaatatgagcatcaaacttttttgcccaattttttaacaaaattaaaactaaacatgtgcaaggaggcgtcagcattttccggcatattggcaacaggtgcgttcgcaccacaaagttaaacaaaaactatggaaggggtggtcctattccaaatatttctagcgccaacgttgtctgcgacagacatgaaacccttagacaccatattaatgccaatagaagctacagatagggtgcaggaaaaggcagtgtagcctagtgcgggcatttcttaggg

SEQ ID NO: 170783 - DNA, 202 bp, Zea mays
  Clone ID: MRT4577_87332C.1
cgacatgttcacgcctgttggttcggttcggtttcggcatggaggtagctgagagaccgatggcctcgtcccacctggcagctctcgtctccctgctgatcccctgcctccttgcgcttctgctgctccgcctcgccgccgtgctggacccggaccccgacgccgccgtgccccgcatcaaggcggccgcgcccctccctct

SEQ ID NO: 170784 - DNA, 207 bp, Zea mays
  Clone ID: MRT4577_87333C.1
ttcgctctttgcttcagagctccgttctgttccggtacaccgtcgtcaacgcgaacaacattacattggaaaatcaccaagaagatgtcatcctccggataactaataactgtgaaaccagcaaggccgtttttgaaatcctgtgtgaaggccagacagccagaaagcagggtggaacccattctgattgagctgctcccaagggcg

SEQ ID NO: 170785 - DNA, 506 bp, Zea mays
  Clone ID: MRT4577_87334C.1
catacctcttgtaagtatagtcatgccggttctagaagacgatgggcaaggacaaagtgttcgagagtggggctggcggtggggagttcgctgccaaggactacacggaccctcccccggcgccggtgatcgacgcggctgagctggggttctggtcgctgtaccgcgccgtgatcgccgagtatatcgccacgctgctgcacctgtacatcacggtggccaccgtgatcgggtacaagcaccagacagcacgcgtcggcgtcgggtgccgacccgccgtgcggacccctgcgggtgctgggcatcagctgggccttggccggcatgatcttcgcgctggagtactgcaccgtcgacatctcggggggccacatcaaccccgtcgacaccttcggactcttcctggcgcgcaaggtccgcctgatgcgcgcgctgctctacattgtggcacagggcctcggggccatctgcgctgtcggtctctacagggcgtctcatagcgccta

SEQ ID NO: 170786 - DNA, 759 bp, Zea mays
  Clone ID: MRT4577_87335C.1
aatccccattctccattcccccctcccacgccgtctcgtcccagctcgccctccagaggttttagtcttcctccatggcggccctcatcaagctcggaagccttcttaggcagagtgctttggcgagcagtgcctcgaccggctcggctcctgccctgttcaacgctgcccgcttcatgtgcgccggccagccagctggtggcaataagcttttcgtcggcggtctggcctgggctactgacgatcattcgctgaaggaggcgttccaaagctttggagaggtcgttgaggcacgtgtcatcactgatcgagagactggaaggtctagagggtttggttttgtgagctttgcgaatgaagctgatgcagatagcgctgcaaaaggcatggacggtcaggagcttgcagggaggaacgtccgtgtgaacttcgccaatgagagaccttcgggtggtggcggcttctcacgcggcggcggtggctatggagggaggtggtggctttggcggcggcggcggctacggcggtggtggccgaggtggcggtggctatggtggtgaccgtgaagctttctaaggagagcgcagactatcaaatttaaaataatgcgcttttaggacagtgtcttgattatgtggaacctatgtcacgtctgtctgttatctgcgatagttgaactcaataggggcagagatgtgggtctagtattttttgtttttggttcgcttcttgatggtgcaagagtttaagtcatgctgc

SEQ ID NO: 170787 - DNA, 1471 bp, Zea mays
  Clone ID: MRT4577_87336C.1
gctcgaggccggccgggaccacctgttctagttctagtgatcagaggggagggaaggggaggtgaacggagggagcggaggaagatctcgggctctcagagctgcatcctgaacccatcgcgtaggaaggggcaaaggagtcggagctgatccggcagtcgctctctctcggattgagtacgatttgacgcatttgcggccgagctttcttgcacccaagatgagtgggcatggtgacactgcgacctcagctaagatggcgaaactgaaggagttgttgcaaaagagtgaaaaccacatttgtgctgactgtggtgcatctgatcccaaatgggcatcagctaatattggggtattcatttgcgtaaaatgttctggcgtccatagaagtctcggtacacatatttcaaaggttctgtcagtgacactggacaagtggtctgacagtgaagttgactccatgatagaagttggtgggaattctcaggcaaacgcaatatatgaggcttttataccagagggctaccagaagccacattcagattctacccaggaagagcgagaaaaattcatcaggtctaaatatgagctgcaggaatttctgaagccaagcttgcgcattgtttctcatcagcctagtgactctggaaaacatgccggaaatgcttctcattctgatggttccaagagtcaagtcggcatgatcgagttcattggaatattgaatgtcaaggtgattggaggcaccaacctagccatcagggatatgtcaagcagtgacccttatgtcgtcctgacacttgggcaacagaaagcacaaacttcagtaatcaatggcaacctgaatcctgtctggaatgaagaactgaagctctctgttccccagcaatatggacctctgaagctgcaagtgttcgatcatgacatggtgtccaaggacgacctcatgggtgaggccgagatcgacctgcagacaatgatcaacgctgccgcagcatttggcgacccggagctgctgggcgacattcagatcggccggtggctcaagtccgaggataacgctctcgtcagggacagcgccgtggtggtctctggtggcaaggtgaagcaagggatggcactgaagctgcagcacaccgagtccggcgagctggagttggagatggagtggatgccgcttaacgtgtagaaatctgctcaagttgccacctttataatgggtgtgggatacaaagaatttgttttgcttttgttgccaagagaaattgttatattttggtaattggcaagggctctcttcaaaataaagatctgaatcgctaaaaggtgtgttgtggatactaaaatttgagagatgattcacaagaaactcctttttttctaaaaaaaattaaagataaaaaaaaaaattaaaaaaaaaaaaaaaaaaaaaaaaaaaaaaaaaggaaaaaaaaaaaaaaaaaggccccta

SEQ ID NO: 170788 - DNA, 230 bp, Zea mays
  Clone ID: MRT4577_87337C.1
ggcaagaatctgtcaccgtttcaaacacccggtagctttgaagcagatgtgctagtgtagtgtgtgtttttttttacttccatggttgaggaacctgctttgtactgtatcatctgcaaacggaataatgggcatagcattacatgtgtgtgtgtgtgagagagagagagagtactcaaagcccttgcatacaggttgtgatttgtcaagatgttgtattttttgcctgc

SEQ ID NO: 170789 - DNA, 324 bp, Zea mays
  Clone ID: MRT4577_87338C.1
accgtctcgactcgtggggaatattcgttctcgccggcgtcgacggcctaggggtctatgaacgttcttacgtccggccggggaatgagcggtagggaggctgagatgatcgatgtggtgctcaacgaccgcctggggaagaaggtgcgggtcaagtgcaacgatgacgacaccatctgcgacctcaagaagctggtggcggctcatactgtgacgcgccccgagaagatcctcatccataagttgtacaacatctacaatgaccacatcaccctcaatgactactatgtccactacagcatggtccttgagctctactacaac

SEQ ID NO: 170790 - DNA, 1405 bp, Zea mays
  Clone ID: MRT4577_87339C.1
gcggaggaagatctcgggctctcagagctgcatcctgaacccatcgcgtaggaaggggcaaaggagtcggagctgatccggcagtcgctctctctcgtaaaatctacgcattgcgtggccacgttggctaggaatttggaagcaagtactctccgctttcagtaatcccaacggattgagtacgatttgacgcatttgcggccgagctttcttgcacccaagatgagtgggcatggtgacactgcgacctcagctaagatggcgaaactgaaggagttgttgcaaaagagtgaaaaccacatttgtgctgactgtggtgcatctgatcccaaatgggcatcagctaatattggggtattcatttgcgtaaaatgttctggcgtccatagaagtctcggtacacatatttcaaaggttctgtcagtgacactggacaagtggtctgacagtgaagttgactccatgatagaagttggtgggaattctcaggcaaacgcaatatatgaggcttttataccagagggctaccagaagccacattcagattctacccaggaagagcgagaaaaattcatcaggtctaaatatgagctgcaggaatttctgaagccaagcttgcgcattgtttctcatcagcctagtgactctggaaaacatgccggaaatgcttctcattctgatggttccaagagtcaagtcggcatgatcgagttcattggaatattgaatgtcaaggtgattggaggcaccaacctagccatcagggatatgtcaagcagtgacccttatgtcgtcctgacacttgggcaacagaaagcacaaacttcagtaatcaatggcaacctgaatcctgtctggaatgaagaactgaagctctctgttccccagcaatatggacctctgaagctgcaagtgttcgatcatgacatggtgtccaaggacgacctcatgggtgaggccgagatcgacctgcagacaatgatcaacgctgccgcagcatttggcgacccggagctgctgggcgacattcagatcggccggtggctcaagtccgaggataacgctctcgtcagggacagcgccgtggtggtctctggtggcaaggtgaagcaagggatggcactgaagctgcagcacaccgagtccggcgagctggagttggagatggagtggatgccgcttaacgtgtagaaatctgctcaagttgccacctttataatgggtgtgggatacaaagaatttgttttgcttttgttgccaagagaaattgttatattttggtaattggcaagggctctcttcaaaataaagatctgaatcgctaaaaggtgtgttgtggatactaaaatttgagagatgattcacaagaaactcctttttttctaatctaaattcaaggttcacc

SEQ ID NO: 170791 - DNA, 366 bp, Zea mays
  Clone ID: MRT4577_8733C.1
ccggtattcccgggtcgacctatcgcgttcgcgcacatccacatcttcgctgctcctgatagaattgtttttggttcccacataaggtcacctggccagggattgattgatcatccaatgttatctgcatgtctgtgcagggctttatacagatgatcttctgcaactggtgcgcctacaagcatcatcaacggacttgaaatggcgctcccgcacttgctggcactcctgctgatacgactgtcatgatgctggatgctgcagctgacttgtttgctagctacaactatgtcgttagggtattgcggccactgaggtctctggctgaaaagggttgatggcctgatcgtaagcgttagattgcat

SEQ ID NO: 170792 - DNA, 241 bp, Zea mays
  Clone ID: MRT4577_87340C.1
cctccgctccctagcaaagttaaatcagagctgctgaccataacagcttccggcattatggcccatggatgtcctaggatacctgcgaataattcaccaacttgaatgaccaacagctacaagtgattaggccctaccctattaaatatacgaccttacgtactcactgatttgaaagaatcagatcttttatatggtcaacgctataccatcaactgtacgtagttgctcacccatgcct

SEQ ID NO: 170793 - DNA, 107 bp, Zea mays
  Clone ID: MRT4577_87341C.1
tggacgggcgagagttatcacactcctagtaggcatagtatcgaatgcctaggcatgacattgaacagacatattccacaacacgcgcccacagtcatagggggatg

SEQ ID NO: 170794 - DNA, 442 bp, Zea mays
  Clone ID: MRT4577_87342C.1
accccgcgtccgccaatatgttcaaccttaacaccctttttgttcgtcgcatccagccggctctctgggttggagtggcgaccacaggtatcgtgctcactcgggagatggggagccacaccgtcccatctacagggatacccctcccccacgccatccttcgccttgatctggccggcgcgacctaccgactacctgatgaagatcctgctgagcgcggctctcttaccaccaccgtgacggaaatcgtgagggacatgaggagaagctcgcctacatcccctggactcgaccagatatggagaccgcaagaccagctcttcgggagaaagctcgagcccccgacggacaggtataccatcgggccgagcgcttcgctgcccgaggtctcttcagcatcttatggatggaagtgcggattacagaccacctcactcatatg

SEQ ID NO: 170795 - DNA, 395 bp, Zea mays
  Clone ID: MRT4577_87343C.1
tttgatgaatcattatgtgggtgccctggtgattatgtcttttgaagatgtctatcagtcagacagtttgaggtatgttgaaatggactgctgctagagacgccctggtgttctttggacttgctgcttggctcatctttggcatgttttgggtatacaatttagaaggaagttgtctcatgtccgcaatgcactctaattacgatgaaatatgttgtgctgtgtactgtgacaacaaaaagtctatccgtaaggtgctggagaagttctcttgctatggtgatctctttatatttgtgtgtgaattttgctatgattgatgatcgtttgccccttctagtcagggtttttttttatcacttgtcctgttgaatgaaagccgatcattctcagtt

SEQ ID NO: 170796 - DNA, 281 bp, Zea mays
  Clone ID: MRT4577_87344C.1
agcataaaggctgcaatcgatgcatcctcatcaacccctcaagggcaaccagggtaatttcaagctggaaatggccgacccaggggcaccgaagacagagacaacctcagtgggaatagaagccatgtaacagagcgaaatagcggacgtggactcaacgctatgaaccgcacgagcagggcacaggctgggggacaagaaaggactggatggtgagatctaaaccgtggcgctggaccggcgtgagctggtggcaaaccgtaatgcaggtgcaacagaag

SEQ ID NO: 170797 - DNA, 362 bp, Zea mays
  Clone ID: MRT4577_87345C.1
aagttggctctattaattttagcttcaacacaaaagcccccccaaaaaccatcacgggcggggggccatacgtacaggaaggaacacaccgggggggacgcgagacacaaaacacgccagcgggaaacgagccagcagacgcgtaacacaacaagcgaaggcggaggaagaaaaaggcaaaaaccagctatgcccaaaccagggagggggagaccaaaaaaagggcacaagggagcccccgggaggacacataggccgaacgccccaggaacgagcaaaagcggaaggggctcacccgaaccaaaggccctcgaaaactaataaaaggcccccagggcgaaagggcccctcacaaggccccg

SEQ ID NO: 170798 - DNA, 113 bp, Zea mays
  Clone ID: MRT4577_87346C.1
ctccgttgtgccatttttgtcctcaccatccgctcaccacttaaaaccctctcctcttcatcgcttctgcaagcgggacagggacatgactgcccgagaaacgcagaagcgag

SEQ ID NO: 170799 - DNA, 467 bp, Zea mays
  Clone ID: MRT4577_87347C.1
ggggcacaaacccaaaactgggagggcatttgggttccaacaaacacaaaattcataggacacaaattatacttgaaccggggggctaaagggcaaggcgtttgaggaccatcaatgattaccagggggtttgggccctggtgaggaaaaaaccctcgtacttaacctggaaccactttaggggggtttttttgggcaccccgggctggaagccaacgcgggacttgcacctggcccggggggcaaaaaaaaaaccaacttgttccaaaacgacgtaaaagtccctgccataaaaaccagaaaacggggcaaacctgggaaaaaacaaaagaacaagttttttacaagcaagggggggaaacccggaatccaggggccccaaaaatatccagttccaacaaaaaataggggagaaaaagccatacccccaatagaaaggaaccgacaaaaaaacttcacccccccca

SEQ ID NO: 170800 - DNA, 289 bp, Zea mays
  Clone ID: MRT4577_87348C.1
tttctctttttttgcctgtgtcatgatgtctctgagtttcattcactccaacagttcaagaacagcaaaaagaaaaactatatacggaactttttttaaaagttccactaacacattcggttgtacacttgtaccctattttaagctgcgcggtactaattaaaatgcgacttgctcaacactggcacatgcttggctcggtacctatctatcaatagcagttgaaatgaaagggcgcagcatggacggcaccttttttccttctgccagtcggtcctggatcgggcgt

SEQ ID NO: 170801 - DNA, 293 bp, Zea mays
  Clone ID: MRT4577_87349C.1
ctaatctcgtatgatacctacacatttggtgggcgacgcccacgctcgatacgcacacctatacctccaatgctcaaacttgatctctactatctacccgccccttccttggtcgccttgcgctgcctttatcgcctgacaagcttcaacctcccctacgcgcatgaagtcgccagcccccctaagatcttttatagccctgccgatgtatcctaccaccccctaacctgtcttcctacccatcatttacaccgatgccgataccaattctaaccactatgccttttaatttt

SEQ ID NO: 170802 - DNA, 273 bp, Zea mays
  unsure (1)..(273): unsure at all n locations
  Clone ID: MRT4577_8734C.1
cagggcnggcaccaacacgccaccgnaccnngcnnngcncgcacncgcacacagnngcgagcgcanngcnngcanngcgcagccgcaggccgcagcacgaagcnagccagnaggcgngagaaggcgagcagcgcggggaaccgcnnccngaggcagcngagcgcgagcaacggcgacgaagcggncngcggcggccngcagaaggaccagcaagagnacggcggcgccggcgnggggaggaggggancccggcggnggncgaagaagcgggcc

SEQ ID NO: 170803 - DNA, 1106 bp, Zea mays
  Clone ID: MRT4577_87350C.1
aattcggcacgaggcaaagctgtttttcgtccactgacaattctctcaacttagatgtcagacttgtaaatgcggtctcaagtaatgatcctgatgtcatcaaatttctgttggttatggctctttgcaatacagtggtccctatcaaaagcaatgatggtactgtgtcatacaaagcacaatcccaagatgaggaagctttagttaacgctgcagcaaagctgaatatgatgctcatcagtaaagacaccattacagctgagatttgtttcaatgggtctaagttttggtatgagttgttggacattttggaattcacttctgatcgcaaaagaatgtctgtagtggtaaaggaaggggagactggtaagatccttcttttatcaaaaggtgctgatgaagctctcctgcctcgtgcctgtccaggacaacaaatacagagatatcttgaagcagtagaaatgtattctcagttgggattgcgaaccttatgtttggggtggcgtgatttaaaagaaaatgaatataaggaatggtccaaaaactttcaaaaggctagctgctcattggacaatagagagtttaaaattgctgaagtttgtaatagcttagagcaagaccttcaaattcttggtgttactgctatagaggatcgtcttcaggatggtgttcctgaaaccattaaattgttgaggaatgctggaattaatgtgtggatgctaacccggtgataagcaaaatacagcaattcagattggacttctctgtaacctcataacttctgggcccaatagtcaattgttatctatcagtgggaaaactgaagaggacgtgctaagaagcctagagagggcattatttattatgaaaaatacatctgaaacaaagggtcttgcatttgttttggatggttgggcacttgaattaattttgaagcattccaaggagtcttttactaggttggcgatgctgtcaaaaacagcaatatgctgtcgaatgacacctttgcagaaagcacagagttcaagtttcttaagagattgatacttattcatgggcgttattcatacaatcgaacagcatttatttcacagtactccttctac

SEQ ID NO: 170804 - DNA, 725 bp, Zea mays
  Clone ID: MRT4577_87351C.1
gcatcattaccggcagatcgtatactgctacttgatgcgtactttagtgttgtcatttccgcgggcatgacaattgctcagtggagaaacatgggttatcagaaccaacctgagcatgagcaatttgcacaactattacaagcaccacacgaggatgcgcagatgataataaaaggtcgatttccagttccaagactagttgtctgtgaccaacatggctcacaggcaaggtttttgttggctaagctgaatccatcggccacatataactcagctcatgatgttgctccaggttccgacatcattttcaccgatgatgttagcttcctggtcttctgtgagcacctacaaaggctggctgttcagtcttaaggacctgtatgcaatagttgtacaccctattggatagttgctgataattcattaggctcttaggttggacttgttagaaaatctcccttttttgttcctctttgcccacagttttctgaggccagactatttttcgggaaacagtcctaaaggaaggtgtaaattgccccggaggtctggtatctgcatactatttatgttgacatcgcccagcttttcttgtggaaagtcatttgggcagcttaggcaattatcctttcaggcacgtgagtttgtaaatgtgacatcgtggacacttgacatgctcttcgacatttgattttacagctaacttaaacagagggaaatagcgc

SEQ ID NO: 170805 - DNA, 679 bp, Zea mays
  Clone ID: MRT4577_87352C.1
ttgggtccctcgaggccggccgggatcacatctcactgaccaagacaggagctccgctcgtcgatcttttctcggctgaccactcatcgatcagtgggtggctgccgatcaggtctcgtcaccggcggcgccgccgtggtaaagaggggagggagagggagaacttactgaaccatattgacaggtacagcacgatactgagatgcatgagagataagggatcgtgatgcggcgcttcggatgccatgaccgatagggctcgtgcgctcgaacctgatgaggttcctgtttctcatacccttcggctgccgtgctggatctatcctcgacgcgacgactgccgtgaaccacgctgacggcgtcgtcgatacgtcgcgtcgtatagactagggactataggttcgttcatctgatgctgtctgctgagagtgctcctttgcatggactgccctcgctcgacgacatctgtatcgagtactgcattcctaccgacgacgtcatgtcacgaatgccgatgactgatacctcagacggagatctgccccatcgttgcggtgtgcactaataccgccaacttgagggattactctgcctgccagagttcgcgcctacggcgttgctgttctgatcatggcttcttcgacgactagcgactcaatgtcatccaccacgatgactg

SEQ ID NO: 170806 - DNA, 383 bp, Zea mays
  unsure (1)..(383): unsure at all n locations
  Clone ID: MRT4577_87353C.1
cggctctaggtcatctaaatgaacatgtggagcactacactgcatcaccacgccttcnacaatcttggctatcttagttcccccccccccccccccccccaaggttttgagttcatgccttgtgagatatcatttgatgaaaatatgcaaggactgtttgccgaaaaaaaaaaaaaacggaataaacaaaaaaaaaataagcaaccccaaaacaaagaaaaaaatggcgcggccaccctctaatgatcccagctacccggggctggatccccacccactcccttcaggacctccagttttccctatcttctggcatgtctaaaacttggcgtaatctgggcatagctttgcccttggctaaattttttccccatcacattgcc

SEQ ID NO: 170807 - DNA, 229 bp, Zea mays
  Clone ID: MRT4577_87354C.1
cagccgccgacaccgcctttctttgtagaagaggggcccaccatcggctcgccccgttggcgggcgggaagaaccaccccaacccgatgcgggagatcaaggtgcataagctggacctaaacatatccgtaggggagagcggataccgcctcacccgctccaccaatgtgctcgagcagctcagccggcatacccgcgtcttctccaaagcgaggtacacggcgcgctc

SEQ ID NO: 170808 - DNA, 485 bp, Zea mays
  unsure (1)..(485): unsure at all n locations
  Clone ID: MRT4577_87355C.1
aaatctcgcctcctcacccaacgccatcagcgctgccctccgctccatccctgcagcgcagacctccgccaccgtcaccgcccttcctcaccgcgcaatcaccgcccttccccacgcgcctcggtcgccatccgcggcatcaccttccttccccatgcgtcgaggccgtcatccgcgccatcaccttccttccccacacgcgcgccccctcctccatgcgtgccccgcccccgtccttcgctcacccgatgccctgccacctccgccgcgatagcctcccccacgaaatgcccccgtgatgttcgccccgctgcgaacccctccccctagatggaataagcagaggtccaatgcggatccgcggcccccgaccctccaccttggtgtgacagtcgcggctccgtggaggcaacttgctccctcgctcccacctcccacgccgccactgttgtcgccttagcacgctgccagnccacgcccccccc

SEQ ID NO: 170809 - DNA, 712 bp, Zea mays
  Clone ID: MRT4577_87356C.1
cgctgggcggtgtgggggcgcgtgtgggtggagagcagccacgcctggcgagacttctacacccagcccatgaatccctgcagcgtccacgctgcctgtggacctttcactgtctgcaccaccaccggcggcggcgacaacaacgcgaacatgtcctgcgattgcatggagggattctctatcaggtcgcccagtgaatgggacctcgacgatcgagcgggcgggtgcacgaggaacaaccaactcgattgcgccacggacaggttcttgcccgtgcctggcgttcagttggcctacgaccccgtgcccatgaaagcaactgacgctgatggatgtgggcaggcttgtgccagtgattgctcttgcactgcttactcatatgctagcactacgtggtggtggtggtgggtgctctatctggcgtggagaattgcttaacaccgcaacagcaagtaccaccggcgacactctctaccttcgcctctctgccaaggatctgcagacgctgagagagaaccaaagatcaggcgacagcacgcccatctaataaggcgacagttgttactgctgcaagcattgcggccggtggttttgtgataattgcgctcatcgtactactcggttgcagctggaggagaacaagcaacacccaagattgcgatgggacgattattagatcattcacgtatagtcacctacgccacgcgacaag

SEQ ID NO: 170810 - DNA, 1135 bp, Zea mays
  Clone ID: MRT4577_87357C.1
gtgtgtggtggttcgtcgatctcctgctaggtgctaagcttagctcgctcgctggcaacaacaatgaaagccgcaactggctcatcatcagtctctcgcgctcttgcgttgctcttggcggcgtgccttctctggaaggaagccgcgtgcttctcggcgtccgggctaaacaaggcgttcgccaccttctatggcggtagcgacgcttcaggaacgatgggtggggcttgtgggtacggcaacctgtactcgacggggtacggcacggacacggcggcgctgagcacggcgctcttcaacgacggcgcctcgtgcgggcagtgctaccggatctcctgcgactaccaggcggacccgcggttctgcatccgcggcacgtcggtgaccatcaccgccaccaacctgtgccctcccaactacgcgctgcccaacgacgacggcggctggtgcaacccgccgcggcagcacttcgacatggccgagccggcctggctcaagatcggcatctaccgcggcggcatcgtgcccgtcaactaccaaagggtgccgtgtgtgaagaaaggcggggtgaggttcagcatcaacgggcgcgactacttcgagctggtgctcatctccaatgtcggcggctgcgggtccatccagtcggcgtccatcaaggggtcgcgcaccgggtggatggccatgtcccggaactggggcgtcaactggcagtccaacgcgtacctcaatggccagagcctgtcgttccaggtcaccagcagcgacggccagaccaaaaccttccccgacgtcgcgcccgccagctgggggttcggtcagacgtttgcgacctcgcagcagttctcttagtatagacacatctttgttttctgcctcgttcgcttgtcgtttatatatatgcctcactcggctcgactcggctcggctcggccctcgatcaataccttgtaaagtttacccggcctttgttgaaatgccccaccacctgccgcgcgcgatgcaggagatatatgatatatatgctttgacttgtgcttaatttcaaaaaaaaaaaaaaaaaagcggccaaaaaaaggggcggcctaaaataaaatataaataaatataataaattttaagtttttttttaata

SEQ ID NO: 170811 - DNA, 149 bp, Zea mays
  Clone ID: MRT4577_87358C.1
atcagtcatcgttcggcatgtctccttcctatcgcactagcagcatgcgatggcgatggggctgatccacatctacaaatgcacaacactactatgacgtgcttaggcatcaaagcagtccaatacacgcagagatcttttcagcctat

SEQ ID NO: 170812 - DNA, 557 bp, Zea mays
  Clone ID: MRT4577_87359C.1
gttgtgtggggtttttttttttttttttttttttttttttttttttttgttgtttgtttgttgtttttttcctttttgggtttcttctcttctttctcttttcgtatcattcggtctcttttcttccacatacgaagataaaccccctgggggggggggcgattttttttgcggaagcgaacaagataactaggcctcagggggccccaccggtcagttacaccaggtcccggggccggtgccgtagccgccgccgcggtttgcaccaccgggtcccccaccgccgccggagcctcccccaccaccgccgggggccccaccggccccgccggagccgcctccatcacggcgcccgccaccccatccgccaccgccccctccacgggcgccgggggaccgggcctccctcacggggatgcccgcgggcgcccagaccccttgccggtcatgccctcgacggcgctgcgcatcgcctcctccgcggagaaggtgactaagccgaagccgcggcaccttttggtgtcccgatccaggatgatcttcgactggaggacctc

SEQ ID NO: 170813 - DNA, 603 bp, Zea mays
  unsure (1)..(603): unsure at all n locations
  Clone ID: MRT4577_8735C.1
gccggccgggttggaggcaaacaaccagccacccctgctctctgctcactcaccttccttactactgctcactagtcactacacaccaaccaaaggaaggcccctcgcacctcttctgtggctgtcgtcgtttgcctttccgtccgttagccaagccatgggcaactgcctcaacacggcctccaagcggagtcaccggggcatgcttttgccggaggaggaagagagcctctcggagataagaaggataagccagctgcttcgggaggaggaggaggacggctacgaggtggtggccgtggctccgggggtgacggcgcccgcagagggcctcaaggtgaagatcgtgctgacgcgcggcgagctggagtggctcatggcgcagctcaagagcggcgagcagcgcctcgaggacgtgctccagcacatgcaggctgctaagggagctggcggcggcggtggctccttcgctggcgacaacaaggccggctggcgggcgcgcctcgagagcatcctcgagagctcggagacccnaagctgataccggcctgagcatgccctcgctggaccggctccttgaattcagatcttagccatgcctga

SEQ ID NO: 170814 - DNA, 349 bp, Zea mays
  Clone ID: MRT4577_87360C.1
gttctagatcgcgagctgccgcccttattttttttttttttttgataataaaacatccaaacacacatttgatatttcgagagctccattgtactagtacaactatgccccaagttctcatgtaattaaacatagtatagttaagtaacctgacacgtatcacatccgtgagttaacacatgcacctcccactacatgcaaaaactaccaactacacgacattaacctgcagcttaaaactcgtaaggaaaaaaacatgcagcgacccaaaacaagatcgatcaccagccctaattgaagaagacgactccaattaagttccagaccacatagactaactgaggagagt

SEQ ID NO: 170815 - DNA, 252 bp, Zea mays
  unsure (1)..(252): unsure at all n locations
  Clone ID: MRT4577_87361C.1
catagacagagccatgagcaagaacgtcgacaataattccagggtcatgtccccccgctacaancacatgagcctcagcagtatcagcagggccaggccacatcagtacagcatcagtgtcattgccaggaagcggcaacagactaccagggtgcagctctcactactatagccagtcatcaactctagacagttgccatgacttcctaaggcagcagtgcaggcctcaggtaatgccttgtctccaatcac

SEQ ID NO: 170816 - DNA, 383 bp, Zea mays
  unsure (1)..(383): unsure at all n locations
  Clone ID: MRT4577_87362C.1
tttcttcaaaacggcagggcgtacagagggtggactaacagaacagcgtgaggatggtcatcgttgtcatggtgtgcctggatctaccagctgccatcccctctgcaatagcataagccctgcccctacgcggggctgcatggcttgaacagaactaacgccggcctgacgactatgataggcgccgtgcggctgaacccctacgctgattacctgatgcacacgcactgcatcctgctgccagagttgccctactactccggctgtgcacagacaagcgccgtgtaccanccgctccggcatcagtgctcccagcaccacatgaggatgatggacaggcagaacggcacgcagcacttgctgatcatgatacatgttgaaca

SEQ ID NO: 170817 - DNA, 398 bp, Zea mays
  Clone ID: MRT4577_87363C.1
gcttggcttggacctttgggctgatttatgtgcttgggtggagcctaggcctgcggttggtggcccttgtatttgttctattcctcatagtcttcatcattatattaaggctattgatggttctctgtctcgtggttttgcgtcggattaggctaaggccgcgttcgctaaggtgcagcgaaacgtactgtgagagtgttgagcgatggctcgtctcgtctgatgctcgcagtcgcgtcttctgcgaccaggagtggtgggccgtgaaagcgcggctgaacctcggatttccaggaacgcgactacggagcgtcgagtcgcgtgacgcgtcgcactgaaacccagctgactacgcgcctctcatatgcccgtaacccgtgcccctaacttggcaccga

SEQ ID NO: 170818 - DNA, 356 bp, Zea mays
  Clone ID: MRT4577_87364C.1
tctgcaactgttatctgcctgatcttatctgctttatttgaaacacgcacaaaattcttttacgcacacaacatcatgaggtccattgcaactacccttgcatacataacatttccttcacttacaactcattcaacacacactaatgattctgatactgtctacaattgagacattattgctaaaaacgcaagtccagttgtccaatctctttttggagcattgtctataccatatgacaataccaaagctcgcaagctcattagtaacgcatcaccagaaaacatgcctactcataattagcaaatattcaatgagatactacattatatacatcggtctcttcccgacatctc

SEQ ID NO: 170819 - DNA, 321 bp, Zea mays
  Clone ID: MRT4577_87365C.1
ttgctttatcgccaccctctcttcacaccccacaggccaagccagccgcaccgcgccgcaccgcattttggacatggcgtcgtcctcctgcctcgcctcgccgagtggcgccacgctctgccgcccgcggcggccgaggtgccgcgtggcgtgctcggcggccgacgccggcggcagcaccggtccggcgtgggccaagggcgcgggccgccttgcgtgcggcgtgctggcggcttggttcgaccagtgcgcagacaatccggacatggtcgcgagccatagattgcctctcctctcaacggtgcccaagctatgcgtgcg

SEQ ID NO: 170820 - DNA, 366 bp, Zea mays
  Clone ID: MRT4577_87366C.1
attcggctcgaggagactcactggggctttttataagctgggcgtttgtagctgggcaaagctgatgaaggtagtaacaggcactgcaaaagcggtcgcttacgttcatgaagctattgacccagcaggtgtgcatcgagagtataaagaaaaccacatatggattgacgatgaaaaggatggcaaagtgtctgacaatggatagaccaaactcttgggatcagacaaaaaccacattacgtactatagagatgggaacatccggatatgttgcacttgaatatgctcatactggaatgttcaatgaaaagaatgaccacaacagcttcgatgacctctcgtgagaaactgagacaggaaggaata

SEQ ID NO: 170821 - DNA, 433 bp, Zea mays
  Clone ID: MRT4577_87367C.1
ggggggaaaaccgcccccttgttttcaaaacagggccaaaaaaaaattccgggtaaacggccccccccaattctggaagggggggaagaaaccccttgcaaggcaggcaattcaaccgccccaaaaaaatttttgggaaattaatcctaaacggggggggcataaaagcttaaaaaatccgggggccaaaagggccccccaaataagggaaacccggggcaccccccagggaccccgggatttggggtggacaaaaaaaaacccccctcaacccaaaggggggtttttgaaaaaaaccttgaacccctttttttttggatttagggttggaaaacccgtttcccaagggggggaagtttctgggggccaaaattctttagggggcaaatttgttcctcccccataaaaaacgggacaggcacaaaaagatcct

SEQ ID NO: 170822 - DNA, 690 bp, Zea mays
  Clone ID: MRT4577_87368C.1
attgggaccctcgaggcggcgggatgacatcacacatggcctccctctcctctgcctccgtcaccgccccttccttcgccgcacccgcaccagcccgcgccgtggtcagaaggaggtccttcaccgtgcgcgcctctctccgacaaggtcaccggcaccgccgccgtgctaatggatgccagcgcacctgcttgacgacggcgtcatgacccacgaggagctgctggacgcaggcagactcgtcgatcgtctacaagcccaggcagctcaccgtcaaggtcggcgacatcatccacattcaagaacaacgccgaacttcccgcacaacgatgaattcgacgaagatgaagtgccgagagatcatcgacgaacacaaagatctcgcaggaggagtacctcaacgcgccaggcgagacatactccggcaccctcaccgtgccgggaacctacggcttctactgcgagacgcatcaaggagccagaatggtcggcaagatcaccgtcaactaattaagctagctatcgatcgatatccattcatgtattagctgttgcttcctgctttgtactccgccgatctgtccatctctacgtgttttcgtcttcacacaacaacctctgctacgagtctacgactacgtatatatgcatgctactagctgatcgaaaaaaaaaaaaaaaaaagcggcc

SEQ ID NO: 170823 - DNA, 225 bp, Zea mays
  unsure (1)..(225): unsure at all n locations
  Clone ID: MRT4577_87369C.1
ccctcccttctccnnnnaagggaggacagcactacagctttttttgtattgccacgcggtaattcagctacagacgcgatggtcaatctcttcccattgccaaaatcacaggttcagtttcatccgtgaggacaacatacaagttttgtacgtgcgctcttcgtagacagacattcaatattgtgccgacctcaaaagaattcaggacctattgctcgccccggt

SEQ ID NO: 170824 - DNA, 347 bp, Zea mays
  Clone ID: MRT4577_8736C.1
aaccccccaaaaaaactgtggcccgtaccttctttcattgttttaaacccttccaaccttagccgcaaaaccagaaacaattcttataagccccccttattatggccgttcaacacaaaccttaagccccgtgccgttcaagaaagaaccccaactttttgaacccctttaaaagccttgttaagccccgcagcccaccaaaagctttttactgaaaaaaaaggcccccttaagcaaaaggtttctccaacttgagtggctttaccacctcccaggggaaggcagggtcctcccttccaaagtggccataagccccccttttgaggtagacccccgccccccccttt

SEQ ID NO: 170825 - DNA, 1429 bp, Zea mays
  Clone ID: MRT4577_87370C.1
agaaagctcaatatgttgttttgcttagtggaactcctgctttgtctcgcccgattgagctctttactcagatccaggccttgtatcctacagtgtacaagagtgttagtgagtatggcaatatatattgcaagggtggttttttcgggttgtatcaaggtgctagcaatcatgaggagctgcataatttgatgaaagcaactgtcatgattcgtaggttgaagaaagatgtcctttcacagttgcctgttaaacgtagacaacaggtctttctagatttaagtgagaaagatgtgaaaaatgtccgcgctctgtttattgagttggagactttgaaggtcaaaattgagtcctctgactccaaagagatgatcgactctctcagatttgcttaccagaatattgtcaataagatctatactgattcagctgtagccaaaattccagctgtgttggatttcctgggtactatgattgaggaaggttgcaagttcttaatatttgctcatcaccaacccatgattgatgccattgagaaacatctcttgaagaagaaagtaaagtgtatcaaaattgacggcaagacacctttaactacaagacaaaccttagtcacagatttccaaaacaatgatgacgtcaaggcagcagtgttatccatcaaagccggaggctacgggataactttgacagcagcgagcacggtaatctttgccgagttatcatggactcctggggacatcattcaagctgaagatcgcgcgcacaggatcggtcaggtctcgtccgtgaacgtgtattatcttctctcgaacggtactatagatgatcttatgtgggacgttgttcagggcaaacttgagaacctggggcagatgctggacgggcaggagaagacgctggaggtttcccagagggactgcaggccaagcccctcgaagaagcagaagacactggtcggcttcctcaagcggcccagcgcgtccacgtccgcggaggagggtatgcccagcacttaatgaagcagcctcggatctgaggcgcggtcgtggcttgtgagcgaaccagatcaggtcataggcagccagcagccacaatggtgttcggctctatcacgttgtaacacttctccctccgtatttgctcgctctttcgtttcctgagagatgacagatgtattcatacttggaggatgtatcctgagaattctaacccaggttcgggactcgtggagtaattgcgtttggctgacgaagggaagaaaaggagcaaaacttgaagtatttgttagggaaggatcctaaacactgagttatatgataaatttaacataaataaaaaaaaaaaaaaaggcgggcacccccttttgtttttagttggcccgccccctatttgtttgctggcaaaaccaggcgggcgggcccccccc

SEQ ID NO: 170826 - DNA, 133 bp, Zea mays
  Clone ID: MRT4577_87371C.1
tagattttgaagactatctctcatatttcaatgccaaaggcgttcggcacagggctttaaaaattcaaatattaatttacaacttcacaagttgtatgcaaaacaacatctacttatataaccacataagtag

SEQ ID NO: 170827 - DNA, 330 bp, Zea mays
  Clone ID: MRT4577_87372C.1
attcggctcgagaatgtattgccagctcttttttttctccaggtgcgcgctttttataatgatcgggcccccgaggcaagctgtctgccaaatcttgcatgctgggtgacggttctgaaatgacgttggccaggacctgggtcatttctgtcattacgtcttccaatgaagcacatccgacctaggagtcggtgttaggatatcgtacacagatgctgctttatatgaggatgctcggtatttaggggcactgtaaatctagtacacattcctcagacgtggcctagatacatatgctgtccgggattgggtttactacctgtccatcct

SEQ ID NO: 170828 - DNA, 345 bp, Zea mays
  Clone ID: MRT4577_87373C.1
attcctgggcagcgcccctcatcacacaaaagactttattattgaactatcccttattgaaacctacggagccaccaccaatgacgggtggcaggtaaaacgctgcagggttggtcataccacgttgattgaacggctgccatcgttgcccttgggagagggtgctcgcgcaaagcgcagcgggccggcagatccgacacctctgcggttgaatcacgaggggactacggctaacaccagctagctggctgattggaccaagtagctgctgctgactataatcatgataggtcaaagctgccacttcctttaatggaagaaactgctgggggtaccgcagcaagt

SEQ ID NO: 170829 - DNA, 906 bp, Zea mays
  unsure (1)..(906): unsure at all n locations
  Clone ID: MRT4577_87374C.1
gcgttctgtagcttcttttngtcttctgcagggagagtatcatgtcatccaaaaaatcgaatggactcaatgttctctttgttcgacgagaagactacctggcccacccgcgccacagtggtaaggttgaatcgagactaagcaatgagcaggaggtgtatgatgctattgacaagtgggcacaaggcctgaaatgcaaagtgaatgtcgtgaacggtctttttgcccacatgaccatgaaggagcaactccgtgctatcctggaagcttcagtggtaataggggctcatggggctggtctaacacacttggtttcagcaactcctgatacaaaggttcttgagattatcagcagcatgtaccggcgcccacattttgcacttatctcacactggaagtctttagagtaccatgccataaatctccctggatcatttgcaagggtcacagatgtcatcaacgagttgagaaaaatattggaaggtctcggatgctgaaacagaaatactcttcaaggccaccacaggccatgtagaatggacatcgtgtctacttcatcacccatacttggtcacaccagttgcaaggggtcatatggattttaattcgaagacattttcacaggctattcaacattgtgccaagaaaccaatcattctcattttccagcaaagaattttattatgctgccaaatacagaaagtcaagaaagcaatcctctgtttggtttatgtcagcaaatgataacacgtaatccagagctttaggttgtccacccttattcttggacatgattttaggaccagaattttgacaaaactgtattctttgttggattatagattagtataccttttgtgtgttacatgttgatccccaccacccccccaccaacgcnnnnnnnnn

SEQ ID NO: 170830 - DNA, 304 bp, Zea mays
  Clone ID: MRT4577_87376C.1
accatgcttgcggtcctactaggtggtgaaaaattaaaagaaacaaaagaatgctggagtgataggtggcctcaatgtagatgcgggctggattaatgtagcggatccatgctgggttgcctactattcggaccagaccttccgtcattgtgctagctaaaattattctactggtcgacgttatacaacgtagtgtctgggaataccaactcacaaaccaggatagtcgctttgcagaaaatcccacaattagaggcagccatcttaatgttgaggactgaagaaatggcattaacaaacagtt

SEQ ID NO: 170831 - DNA, 566 bp, Zea mays
  Clone ID: MRT4577_87377C.1
ctgggggttggtttttttttttttttttttttttttgggggttttttttttttttttttttatttttttttttttttttaaaaaaaaaagggaatgggggccagggaaccggccgggccgcccggggggggcagcgggcccccccccctcccggcccagggggagtgggggccaccccccccggattcatttcccccccaaccccgggggcccggtaaacaagggggccacttgggaaaggggggcccccccccccccaaggggggcaaccacccccccggggctgccccccggttggccgggccagcctaagggggggcaaacaattttgaaccacaaaaaaaccgatttaaccctccccccctgggattaaaaagggccggctttaaaacaagccggggctttaccccccccgggccaaacaaggcccccctttggccaacccagggcaatcctaaggccaagcaagggggttcccaccccaaagagggggggggcaaaaaaagaggggcgggggcggttcccaaggggggggggcccccctcaaacggaacccgggccccaag

SEQ ID NO: 170832 - DNA, 414 bp, Zea mays
  Clone ID: MRT4577_87378C.1
ggaaaaaaattttgtaaggaataatacatgatcgaacaattacagggtttttttcgagggggattaccaacttttagaaacaaacaaaatgggtgctaatggggggcagagggcaacgaagcgaaaggttctttggttgacagagtcattatgttgccgtcgccgtgccggggaggttagggaaggcccacgaggtttttggtgatttcccagaggtttttgggcttttccggattggtgggcttctgggacaggtggtttttgaaagacgccgagtccttgttccaggttcagtacacccccgacttggggagggtgggggggctgaccacctgggccaggcttttgggggacttcgccttcgacacgaagcccttggtgaggaacttttggaacggcgggaagagcaggggg

SEQ ID NO: 170833 - DNA, 122 bp, Zea mays
  Clone ID: MRT4577_87379C.1
cccacgcgtccggcgacgcgtacgctctctggccaggttcgatatgaccggaatgtagaggattctgggtgctccatacatgctaacaggacttatacagaaacagctcgggcattgtagct

SEQ ID NO: 170834 - DNA, 185 bp, Zea mays
  Clone ID: MRT4577_8737C.1
caggtcaacctctaatagcgtgtttggctggaagagtgatgaattctatagaaactaaataaaataaaatagtaaagactaaaaattaggcctagaaactaaatatctctagtgtaaatctttttttaaagaacagaccatttctttaaagacgttgtaacgcacctgttaaaaccgactctctc

SEQ ID NO: 170835 - DNA, 724 bp, Zea mays
  unsure (1)..(724): unsure at all n locations
  Clone ID: MRT4577_87380C.1
cattgggtacctcgagggccggccgggccccgggaattnnaaannaaaaaaaaaaaaaaaaaaaaaaaaaaaaaaatcattttttctctctcctgcgccgcgacgtccctcgccttcgccgccgaatccgagactccgatctcgggttcaccgcagcgcacagagcagccccgactcccggcccgatccgcgctctcctctccgtcgcttcagtaatggcaggaatggcacctgagggttctcagttcgatgctaagcactatgattctaagatgcaggagctgctgtaagtaatatgaacctttctttttaatttttttacctacttgggtttatcatctttgacttgagagccaagtgatatctaataacctttacttctatatgtttatgtaatacaggagcactggtgagactgaggagttcttcacttcatatgatgaagtttttgagagttttgatgatatgggcctccaagagaatcttctgagaggatttatgcttatggttttgagaagccctctgcaattcagcagagaggaattgttcccttctgcaagggtcttgatgtcattcagcaagcacaatctggtacaggaaagacagcaaccttctggttctgggatcttgcagcagctggactatggccctggttgaatgccagggcctggtccttgctcccacccgtgagcttgcacagaaaatcgagaaagcatgcgcgcgc

SEQ ID NO: 170836 - DNA, 804 bp, Zea mays
  Clone ID: MRT4577_87381C.1
ctcgtttttctctctcctgcgctgcgccgtccttcacctccgccgccgaatccgagactctgatctcgggttcaccgcagcgcacagagcacccccgactcccgtcccgatccgcgctctcctctacgacgcttcagtcatggcaggaatggcacccgagggttctcagtttgatgctaagcactatgattctaaaatgcaggagctgctgagcactggtgagactgaggagttcttcacttcatatgatgaagtttttgaaagttttgatgacatgggccttcaagagaatcttctgagaggcatttatgcatatggtaggctgggagtcttctgttttagcgagtttttctttacatggtattcctcgtactatccattcttcgatgtgtaggttttgagaaaccatctgcaattcagcagagaggaattgttcccttctgcaaggggcttgatgtcattcagcaggcacaatctggtacaggaaagacagcaaccttctgttctgggatcttgcagcagcttgactatggtctggttgaatgccaggccctggttcttgctcccacccgtgagcttgcacagcaaattgagaaagttatgcgcgcacttggtgactaccttggtgttaaagtccgtgcatacgttggaggaacatctgttcgtgaggaccaaaggattctcgccagtggtgtgcatgttgttgttggtacacctgggtcgtgtgtttgacatgctgcgtagacagtccctccgccctgattacatcaagatgtttgttcttgatgaagctgatgaaatgct

SEQ ID NO: 170837 - DNA, 615 bp, Zea mays
  Clone ID: MRT4577_87382C.1
cctctcgctcgggtctcacctgcctcgcctcagcctcttgctcgcgccgccgcatccttgctccggcgaaccccaccaccagccacgcagggagctgcaacaggaggacaggggagctgtaaccggacacttcgggagctgcaaccagcgggcagaggagctacaagccgggaaccaaaccgccgaccatcgtgctggaaacaacacgcaggggtgctgcaaccggcagatcaaagagctacaactgcggttagtttttgctgggaccggtgagaaatttcgctgcatccattgacggtgagcctttctttgctggaaccggctttctttttagctggaaccatgtttttgttttgctggaatcttgtcatgcttgctagtagcttgcagcgagaacacgcatctgctcgccacggacgacgatctgcacgatccactccgctcgcaggagagggcaaccaccatcagaagatgctgcaacctcggcgcggcggagctacaagcgtaggcccggaagctgcaaccagccagacaaataatggaaccggcaacggccgtgctgcgacggcgacggcggcggtcgaccattgctggaaccagctactttttttgctg

SEQ ID NO: 170838 - DNA, 1929 bp, Zea mays
  unsure (1)..(1929): unsure at all n locations
  Clone ID: MRT4577_87383C.1
gcaaacacgggcctaggccctggatagcccaggagcggcccacgcgagaaagaaaccctaccgttcggggtggtggcatccgggattcgtccacacccaggcacataaaagccgcctctcgccgccgactgcaaagnntcatttttctctctcctgcgctgcgccgtccttcacctccgccgccgaatccgagactctgatctcgggttcaccgcagcgcacagagcacccctgactcccggcccgatccgcgctctcctctccgacgcttcagtcatggcaggaatggcacccgagggttctcagtttgatgctaagcactatgattctaaaatgcaggagctgctgagcactggtgagactgaggagttcttcacttcatatgatgaagtttttgaaagttttgatgacatgggccttcaagagaatcttctgagaggcatttatgcatatggttttgagaaaccatctgcaattcagcagagaggaattgttcccttctgcaagggtcttgatgtcattcagcaagcacaatctggtacaggaaagacagcaaccttctgttctgggatcttgcagcagcttgactatggtctggttgaatgccaggccctggttcttgctcccacccgtgagcttgcacagcaaattgagaaagtcatgcgcgcgcttggtgactaccttggtgttaaggtccatgcatgtgtgggaggaacatccgtccgtgaggaccaaaggattcttggcagtggtgtgcatgttgttgttggtacacctggtcgtgtgtttgatatgctgcgcagacagtccctccgccctgataacatcaagatgtttgttctagatgaagctgatgaaatgctttctcgtggtttcaaggatcagatttatgacatcttccagcttctgccatccaagattcaggttggagtcttctctgctaccatgccacctgaggcccttgagattacccgcaagttcatgaacaaaccagtgagaattcttgtgaagagagatgagctgacccttgagggtatcaagcagttctatgtgaatgtggacaaggaagactggaagctggacacactgtgtgacctgtatgagaccctggccattacccagagtgtcatctttgtcaacacccgccgcaaggtggactggctcactgacaagatgaggagcagggaccacaccgtttctgccactcatggtgacatggaccagaacactagagacatcatcatgagggagttccggtctggctcctcccgtgtgctcatcaccaccgacctgcttgctcgtggtattgatgttcagcaggtgtccctggtcatcaactatgatctccccacccagccagagaattacctgcatcgcattggtcgtagtggtcgtttcggtaggaagggtgttgccatcaactttgtgacccgcgacgacgagcggatgctgttcgacatccagaagttctacaacgtgttgattgaggagctgcctgccaacgtcgctgaccttctgtgatcattttgaagaaaaacagaactaaaagaacggtggtgggggtgatctggtaaggcttggttttgccgaaatattgtgggggaggagtgataaggtcggtggggtttctatgttaaagtcgtggtctcgggcaatatgcgatttttctttatgccatgttttgggaaattttgtagctgcctaggcctcgtgctgttgtggtggttcattagtatgaagacgaaggctctgctggctatgggagtcctttttctttttgttagtattttgtttaaaactatgtatgaccgaattatttgtcatccttgactcaattctgctgcaaccagttgtatcagaattgagtcaaggatgacaaataattcggtcatacatagttttaaaaaaaaaaaaaaaaaaaaaaaaaaa

SEQ ID NO: 170839 - DNA, 231 bp, Zea mays
  Clone ID: MRT4577_87384C.1
tttaaagaacgggggggtaacaacaaaaaccatagacctacctcctaaatactgccacagaattggacctatccaaacataacaagtttggaaagggctgataataccacagataaaaagggccctccctggcccatagttcgccccaggggactttggggcagaacacacagttaagcactcatcattcgaacaaggtcaagaaatctagattctacttattatattggg

SEQ ID NO: 170840 - DNA, 1802 bp, Zea mays
  Clone ID: MRT4577_87385C.1
gtttttctctctcctgcgctgcgccgtccttcacctccgccgccgaatccgagactctgatctcgggttcaccgcagcgcacagagcacccccgactcccgtcccgatccgcgctctcctctacgacgcttcagtcatggcaggaatggcacccgagggttctcagtttgatgctaagcactatgattctaaaatgcaggagctgctgagcactggtgagactgaggagttcttcacttcatatgatgaagtttttgaaagttttgatgacatgggccttcaagagaatcttctgagaggcatttatgcatatggtaggctgggagtcttctgttttatcttctgttttagcgagtttttctttacatggtattcctcgtactacccattcttcgatgtgtaggttttgagaaaccatctgcaattcagcagagaggaattgttcccttctgcaaggggcttgatgtcattcagcaagcacaatctggtacaggaaagacagcaaccttctgttctgggatcttgcagcagcttgactatggtctggttgaatgccaggccctggttcttgctcccacccgtgagcttgcacagcaaattgagaaagttatgcgcgcacttggtgactaccttggtgttaaagtccatgcatgcgttggaggaacatctgttcgtgaggaccaaaggattctcgccagtggtgtgcatgttgttgttggtacacctggtcgtgtgtttgacatgctgcgtagacagtccctccgccctgataacatcaagatgtttgttcttgatgaagctgatgaaatgctttctcgtggtttcaaggatcagatttatgacatcttccagcttctgccatccaagattcaggttggagtcttctctgctaccatgccacctgaggcccttgagattacccgcaagttcatgaacaaaccagtgagaattcttgtgaagagagatgagctgacccttgagggtatcaagcagttctatgtgaatgtggacaaggaagactggaagctggacacactgtgtgacctgtatgagaccctggccattacccagagtgtcatctttgtcaacacccgccgcaaggtggactggctcactgacaagatgaggagcagggaccacaccgtttctgccactcatggtgacatggaccagaacactagagacatcatcatgagggagttccggtctggctcctcccgtgtgctcatcaccactgacctgcttgctcgtggtattgatgttcagcaggtgtctctggtcatcaactatgatcttcccacccagccagagaactacctgcatcgtattggtcgcagtggtcgttttggtaggaagggtgttgccatcaactttgtgacccgcgacgacgaacgtatgctgtttgacattcagaagttctacaacgtgttgattgaggagctgcctgccaatgttgctgaccttctgtgatcaatttgaagaaaaaacaaaacaaaaaagggtggtgggggaatttggtaaggcttggttttgtcgaaataccgtgggagagggggtgataaggacggtggggtttctatgttgaagtcgtggtcatggacaatttgtgattttttctcctttatgccatgttttggaatttttgtagctgcctaggccgtgtggtaatgtgctgctgtgggggttcattagtatgaagaggaaaacgctgctggcgctgagtctttttctctttattagtattttgtttaaaactatgtatgaccgaatggtggtatttatttgtgtcatccttgactctt

SEQ ID NO: 170841 - DNA, 320 bp, Zea mays
  Clone ID: MRT4577_87386C.1
gggcgaccgacgcgtgcggaattcttccacacccattgacactaatagtttagcctttatcggcaccttcgtgagcggggttccggggtgcaatcacctgctggagcgcggctgccgtcccgcggtgttcgaggccagcgccgtcatgggcaccttgtggacgcgcgtgccgcacagcacggcgctgcagacgccgcggcctatataccagtactccgacttcccatggccacacaccgtcacctaagtgttctccgaccaccgacaggtcatgttctacctggacacctactcgcgccacttctgcatgctggactgca

SEQ ID NO: 170842 - DNA, 2126 bp, Zea mays
  unsure (1)..(2126): unsure at all n locations
  Clone ID: MRT4577_87387C.1
cattgggtacctcgaggccggccgggatttttctctctcctgcgccgcgacgtccctcgccttcgccgccgaatccgagactccgatctcgggttcaccgcagcgcacagagcagccccgactcccggcccgatccgcgctctcctctccgtcgcttcagttttggtcatataaaactgtcctgggaagctccgtagcttgtgtaccgtgcttgagtattggattcaagctgtttgagctgtgggatgctgcatgcttgatgtcatggcaggaatggcacctgagggttctcagttcgatgctaagcactatgattctaagatgcaggagctgctgagcactggtgagactgaggagttcttcacttcatatgatgaagtttttgagagttttgatgatatgggcctccaagagaatcttctgagaggcatttatgcttatggttttgagaagccctctgcaattcagcagagaggaattgttcccttctgcaagggtcttgatgtcattcagcaagcacaatctggtacaggaaagacagcaaccttctgttctgggatcttgcagcagctggactatggcctggttgaatgccaggccctggtccttgctcccacccgtgagcttgcacagcaaatcgagaaagtcatgcgcgcgcttggtgattaccttggtgttaaggtccatgcatgtgtgggaggaacatccgtccgtgaggaccaaaggattcttggcagtggtgtgcatgttgttgttggtacacctggtcgtgtgtttgatatgctgcgcagacagtccctccgccctgataacatcaagatgtttgttcttgatgaagctgatgaaatgctttctcgtggtttcaaggatcagatttacgacatcttccagcttctcccagccaagattcaggttggagtcttctctgctaccatgccccctgaggcccttgagattacccgcaagttcatgaacaagccagtgagaatcctcgtgaagagagatgagctgactcttgagggtatcaagcagttctatgtgaatgtggataaggaagactggaagctggacacactgtgtgacctgtacgagacccttgccatcacccagagtgtcatctttgtcaacacccgccgcaaggtggactggctcactgacaagatgaggagcagggaccacactgtttctgccactcatggtgacatggaccagaacactagagacatcatcatgagggagttccggtctggctcctcccgtgtgctcatcaccaccgacctgcttgctcgtggtattgatgttcagcaggtgtccctggtcatcaactatgatctccccacccagccagagaattacctgcatcgcattggtcgtagtggtcgtttcggtaggaagggtgttgccatcaactttgtgacccgcgacgacgagcggatgctgttcgacatccagaagttctacaacgtgttgattgaggagctgcctgccaacgtcgctgaccttctgtgatcattttgaagaaaaacagaactaaaagaaaggtggtgggggtgatctggtaaggcttggttttgccgaaatattgtggggggaggagtggaggagtgataaggtcggtggggtttctatgttaaagtcgtggtctcgggcaatatgcgatttttctttatgccatgttttgggaaattttgtagctgcctaggcctcgtgctgttgtggtggttcattagtacgaagacgaaggctctgctggcgatgggagtcctttttctttttgttagtattttgtttaaaactatgtatgaccgaattatttgtcatccttgactcaattctgctgcaaccagttgtatcgtgccatgtgtctctgcagcaccggtcgttgctgttctgagtaaaatctgtttactctgctttcacctgttgatgtacgatgtctaggataattttaagagagtaatgtttgtttaagtggcaccttttggtgtttaagcgcaaaaaaaaaaaaaaaaaaaaaaaaaaaaaaaaaaaanaaaaaaannnnnnnaaaaaaaaaaaaaaaaaggaaaaaaaaaaaaaaaaaaaaaaaaaaaaanncctttgcgttgttacccctgcttaagggg

SEQ ID NO: 170843 - DNA, 2117 bp, Zea mays
  Clone ID: MRT4577_87388C.1
cattgggaccctcgaggccggccggggggattcgtccacacccaggcacataaaagccgcctctcgccgccgactgcaaaccctcgtttttctctctcctgcgctgcgccgtccttcacctccgccgccgaatccgagactctgatctcgggttcaccgcagcgcacagagcacccccgactcccgtcccgatccgcgctctcctctacgacgcttcagtcatggcaggaatggcacccgagggttctcagtttgatgctaagcactatgattctaaaatgcaggagctgctgagcactggtgagactgaggagttcttcacttcatatgatgaagtttttgaaagttttgatgacatgggccttcaagagaatcttttgagaggcatttatgcatatggttttgagaaaccatctgcaattcagcagagaggaattgttcccttctgcaaggggcttgatgtcattcagcaagcacaatctggtacaggaaagacagcaaccttctgttctgggatcttgcagcagcttgactatggtctggttgaatgccaggccctggttcttgctcccacccgtgagcttgcacagcaaattgagaaagttatgcgcgcacttggtgactaccttggtgttaaagtccatgcatgcgttggaggaacatctgttcgtgaggaccaaaggattctcgccagtggtgtgcatgttgttgttggtacacctggtcgtgtgtttgacatgctgcgtagacagtccctccgccctgataacatcaagatgtttgttcttgatgaagctgatgaaatgctttctcgtggtttcaaggatcagatttatgacatcttccagcttctgccatccaagattcaggttggagtcttctctgctaccatgccacctgaagcccttgagattacccgcaagttcatgaacaaaccagtgagaattcttgtgaagagagacgagctgacccttgagggtatcaagcagttctatgtgaatgtggacaaggaagactggaagctggacacactgtgtgacctgtatgagaccctggccattacccagagtgtcatctttgtcaacacccgccgcaaggtggactggctcactgacaagatgaggagcagggaccacaccgtttctgccactcatggtgacatggaccagaacactagagacatcatcatgagggagttccggtctggctcctcccgtgtgctcatcaccactgacctgcttgctcgtggtattgatgttcagcaggtgtccctggtcatcaactatgatcttcccacccagccagagaactacctgcatcgtattggtcgtagtggtcgttttggtaggaagggtgttgccatcaactttgtgacccgcgacgacgaacgtatgctgtttgacattcagaagttctacaacgtgttgattgaggagctgcctgccaatgttgctgaccttctgtgatcaatttgaagaaaaaacaaaacaaaaaagggtggtgagggaacctggtaaggcttggttttgtcgaaataccgtgggagagggggtgataaggacggtggggtttctatgttgaagtcgtggtcatggacaatttgtgattttttctcctttatgccatgttttggaatttttgtagctgcctaggccttgtggtaatgtgctgctgtgggggttcattagtatgaagaggaagacgctgctggcgctgagtctttttctctttattagtattttgtttaaaactatgtatgaccgaatggtggtatttatttgtgtcatccttgactcttattctgctgcaaccagatgtatcgtgccatgtctgcaccactggtctttgctatcctgagtaaaacctgtttactctgtcgagcttgtcgctgatgcaccgatcctagctgttttgagtaaaacctgtttactctgttgagcttgtcacctggtgatgcaaggtgcttattgactggtaatgtattttgaagtcgttatactatctgaaaccccttcctgagcaaaaaaaaaaaaaaaaaaaaaaaaaaaaaaaaaaaaaaaaaaaaaaaaaaaaaaaaaaaaaagtttaattggggaggcggcggggtcttacctttt

SEQ ID NO: 170844 - DNA, 240 bp, Zea mays
  Clone ID: MRT4577_87389C.1
cccacgcgtccgagaagcggcggcggcggcggcggcgggagccgaggaggaggttccggacgctgcttaggaaccggggactcaggagtgcccgcgccctgagcgctcagctccagaggcgtactggccgagtacgggaccctcctgcaagacctgaccaacaacatcacccttgaagatctagaacagctcaagtcggcctgcaaggaagacatccccagcgaaaagagtgaggagatc

SEQ ID NO: 170845 - DNA, 1195 bp, Zea mays
  Clone ID: MRT4577_8738C.1
cctcgagccggcccggccgggctcttaggcaaacaaaccagccacccctgctctctgctcactcaccttccttactactgctcactagtcactacacaccaaccaaaggaaggcccctcgcacctcttctgtggttgtcgtcgtttgcctttccgtccgttagccaagccatgggcaactgcctcaacacggcctccaagcggagtcaccggggcatgcttttgccggaggaggaagagagcctctcggagataagaaggataagccagctgcttcgggaggaggaggaggacggctacgaggtggtgggtatgcactccgtctccgagcagctggtgcaggaggtggtggccgtggctccgggggtgacggcgcccgcagagggcctcaaggtgaagatcgtgctgacgcgcggcgagctggagtggctcatggcgcagctcaagagcggcgagcagcgcctcgaggacgtgctccagcacatgcaggctgctaagggagctggcggcggcggtggctccttcgctggcgacaacaaggccggctggcggccgcgcctcgagagcatcctcgagagctcggagacccaaagctgataccggcctgagcatgtcctcgctggaccggctccttgaattcagatcttgtccatgcctgtaggtttgtcgcttgctttcttgatgtttggtctggatcggtggagatggaggccgtcgatggatcggagtcagggagaggcttaaattcttgttgtgtttttttaacaagggactggccttgttacaactctgctactaggctggagcctggagggagggacgatgatccatcagatgggctatgttactctgtagatcatcgagatgttaattaggtctcttgtgcagtgcagctcagccaattagcatcttctttcactttttgcctttttgcgctgttacttagatcataatctttcgtaaatagcggtgcgaatgagatggcatctgaagccctctgtgtctgtaataatctcctctgactaggtcctgaatctgattgattcttcctaagtaggaggagcaccctgctcgctagatgtcaagacttgggacagtgctttcacttcggtttggaaccgtgagtaacgttctaatgaagatgaatatgaatttggtgtgctccaaaaaaaaaaaaaaaaaaggcccctagggcc

SEQ ID NO: 170846 - DNA, 155 bp, Zea mays
  Clone ID: MRT4577_87390C.1
cgcgtgtattaaccctcccgaaaccctccttccccgatcgaggccgttcgttcgacgcctcctccgccggagtgggccgacctcccggtggacgcggtcctggcggtgttcgagcggctgggcgcggcggaagtgctgatgggcgccggggtggt

SEQ ID NO: 170847 - DNA, 430 bp, Zea mays
  unsure (1)..(430): unsure at all n locations
  Clone ID: MRT4577_87391C.1
atcgagataaatctcaatgagtatatnntgattatttctagggaaacacacgtcggtatgagggcaccattatcgagtacatctcatatgtaatctaaaagaggcaccttcaacgatgggttgctgcctcnacagagggggggggggggagagaactgggtgtatggcagcaattgttgctggtgggggaaggcggcgaccaatgggttagccactgccaatgggttaagtaaccggtgcggctgttgtcggtacgcatcagagtctgacagagtcagttggtctgaatggaagcatgtgttgtgagtgagaaacagggtttgccacagttacgcagagtcataagctggcacaatctgttgcaacaaaggctggtgcgcgtattgaggggccttgcccacatcaagtgggctacactaaatgaccggtt

SEQ ID NO: 170848 - DNA, 366 bp, Zea mays
  Clone ID: MRT4577_87392C.1
accacacatcgaaaatacgacactgcattagatcaattgtacccctcaaaggggggagcttatctgaagtactaaaccctcggagcacaccacgttagaggaacccacaaaaacgatacttggtgcttccttcacttctgtatgatggccttctggagggtgtggcttcaaaagatacttggcatggcctcttcttgctatctacaaaaggacatgcaactcgatttgttaagactcaccgtgtgcaataagccttcctcatacatgcaactgaacatgcttacattagactggattactaacactggaagcaatcacttaccactgatgatgcaaaaagtacaatgggatatctgatatcctgaa

SEQ ID NO: 170849 - DNA, 269 bp, Zea mays
  Clone ID: MRT4577_87393C.1
ggccgcttttttttttttttttttagaaaaggggagagaaaaatcttaaccaatggatggatacatacataagaaacacatgccgataagtggactccattaatagaggcatctaatagaggagaccaaaaatggtgccttcaaggaaggagggctgtgtagataagcacaggaagcagaacaaagggcggcaagtgtggtagtagttagagggggtgggggaaggccgcaaactgtgggtaaaaaggtgtcaaaggatgaagtggcag

SEQ ID NO: 170850 - DNA, 420 bp, Zea mays
  Clone ID: MRT4577_87394C.1
atcttagaacatttacatcttgagccgagctgagctgactagcagcagagatcttctactcttctctcccagccaacccccttgtccaacggttcagcctgctcaattttagtgaccagttacggcaaatgcagccctcggcggacagcaggaagaagaagcggcggcggcggaggaggaggaggctggcggcatgctactcatcgagacctgctgccggcgccgctcaaggccagtgtcagtgcggctcctctagccccggtggcggcggcggaagcggcagcctcgtggcaagaacaccgcgcgcgttctcgagctgctccagctacgccgcctcgtctgcctgcgcgccggcggcggccgtccatctcggcacccagcacaagctgacggcgctcctcgtcgggcttgggcttcttc

SEQ ID NO: 170851 - DNA, 791 bp, Zea mays
  unsure (1)..(791): unsure at all n locations
  Clone ID: MRT4577_87395C.1
cccgggtgcgacgccaggagaagagcagagcagaagagaaacgctgcagacacgcgccaggaagcacgcaaacgcaccaacgtactagcagctagctagctagctagcaagctagggcaaacaagcgcatggcaatggtggagctgttgtcgactgagctggtcgtcccagccgaggagacgccggcgggcgccgtgtggctgtccaacctcgacctggccgcgcggcgcgggtacacgcccacggtctacttctaccgaacgaacggcaagccggagttcttcgagaccgacgccgtgaaggacagcctggcccgggcgctggtgtcgttctacccgctggcgggccgcctggggctggacgccgccaccgggcgcgtgcagatagactgcacgggggagggcgcggtgttcgtgacggcgcggtgggagcagtacgcgctggacgagctggtgggcgagttcgtgccgtgcgacgagatgcgggcgctgctggtgccgcccacgcccgcgccgaacccgccgtgcccgctgctgttcgcgcaggtcacccgcctccgctgcgggggcgtcgtgctcggcctcgccctgcaccactcggtcgtggacgccaggagcgccgcccacttcgtggagacgtgggcgagcatcgcccgcggcggcgccggcgctggcgccggcaaccccctgccgccctgcttcgaccacaggctgctgagcgcgcggncccncggcgcgcgcgcggtggcgtacgaccacccggagtacaagggccgagcaccggcggcggcg

SEQ ID NO: 170852 - DNA, 160 bp, Zea mays
  Clone ID: MRT4577_87396C.1
ggcgggaggagacatttcctacaagaagagggaagagcacgaatgaccttccgagcccggtgaagatcatttctccccgagcgagggaggtgtagtgagcactctcctcttaggaccacctcagaggcggttggagcagctggccactcgcactaatcaa

SEQ ID NO: 170853 - DNA, 243 bp, Zea mays
  unsure (1)..(243): unsure at all n locations
  Clone ID: MRT4577_87397C.1
tcttcctttcggctgccgcaaactgctantagccggggcgccttcaccgtagggtgggatcaccntcnagcaaataccacaccactctactgacgcccgacgagcagtgtaacattttccttcagccatgggtaaggagaagactcacatcaacattgtggtcattggccatgtcgactctggcaagtcgaccaccactggccacctgatctacaagcttggaggtattgacaagcgagtgat

SEQ ID NO: 170854 - DNA, 844 bp, Zea mays
  unsure (1)..(844): unsure at all n locations
  Clone ID: MRT4577_87398C.1
cgtcaaaacgttttgtaatcgatttcgtgccccttccgcgtgcgtgcgagcgaccttctccccctcttccctgccggtggcagccgtcggagcggacggggcgcgcgtcgtcgagtttgcccggatcccccgaagcgcgcgcggttccggcgggccatgggcacgccggagttccctgacctggggcggcactgcagcgtcggcgactgccaccagatcgatttcctccccttcacctgcgaccgatgcgacttcgtcttttgccttcagcaccgaagttatacatcacataaatgtccaaaggctaataacaaggatgtcactgttgtcatctgcccactatgtgctaaaggagttcgtctgaatccaaatgaagatgcaaacatcacctgggagtctcatgttaatatcgattgcgatccatcaaattaccagagagcaacaaagaaaaagaaatgcccagttcctgggtgcagagaacaactgacattttcgaacacaatcatgtgcaaagattgcagcaaagagcactgcctcaagcacagatttggtcctgatcacaagtgcccgggcccaagaaaaccagaacctaccttcccctttgccaacatgctaagaagaagtcagaaagttgagccacgcgcaaacagcagtggcagtggttcttcctggtggagctccagccttttgaatgcagcatcaagtttcagatcatcggcagaagcaggaatgcagaaactgagcattgccaccagcgaagccgtccagaaggctaaggatgnggtcaccccgagcagcagtggtggtggcctcgtggagcaatgtgttcagtggtcagcaaggt

SEQ ID NO: 170855 - DNA, 856 bp, Zea mays
  Clone ID: MRT4577_87399C.1
tgaaacatggaagttttttactaggttaatcagtcagtgtatacaatgttacaagcagtaattccacaggagggagcttttagtgtatttacactttacagccagtccccaatatcactttcatccttctttccttcccttctacacaaagacaatgcttctcagaaatattattgacgattaaaatgaacaccgctccatatctcagccgtcttaggaacgatgtcttggcgttcttccatgtcagatccctaaactactgaaactaacacaccacagatccaccggtactttgatcgtaggggggatagcaccactggttcacggctaaactcgtgggattgctgcagagggaaccaagttcagcagtggtatgtgttatacctattcatgagtgtttcttctccaccctctttctcctttcgaacaaggaacaattggatctataccattaaaagatccaaactcggacgcgtggccccattggtcttccccgttcttgcttgctttatttctcatccattgattacataaataggccgattggccgcccctatctagctactgatccttatctccttaaaactctcctaaaaactctcaacaaactactaactgataaccttcctagataatctcaactaatctcctaaataatctcaactaatcttctaatcttatctctaactatccttatctaatcccccttggagggcccatggctgctgctgtcgcagcccctccgtgggcctccttaggccctgacactatgcttgttccattttaatgccaaccggtagtcttggccatttgaaaataagaccaaaagttcatcaggtatgatcggacgcgtggg

SEQ ID NO: 170856 - DNA, 265 bp, Zea mays
  Clone ID: MRT4577_8739C.1
cacacgtgatttatggctattaatccgaggaaaagcgcccacgtataaattggcgaaagattcaacaccgagtgaccatgttcaaaaaccatctgcccccacccaggattacagacgcgagcgtctcgaccccaaagaacacgcccaacccgaaggaagctattgcaccccaacctatgatgacggtctcgcccatctgtcgggcaaagattatagcaaatcccgcctgacccacatccgggataccactgctcctggccctcat

SEQ ID NO: 170857 - DNA, 356 bp, Zea mays
  unsure (1)..(356): unsure at all n locations
  Clone ID: MRT4577_873C.1
aagnccaaaaaccaaacttcataaggattcaagccacaccgccgcaaaagagttttggggcccacacagaggacccaaccggtccattaaaccaacgaagccccaaccaccattcatgacacccaaaccccagatgtttattagacgaccacctccatatacaggcccccccgagggccccagacgacccaaataccccggtaccgcaccagcttaaatgaaccatggcttactcacccccccggaggccgagcaccaagtggagagggccccccctccggaagttggaccctgctagggggcggccatcctccaactgcttgcccgcgaagatcaaaccctactggtcccggggg

SEQ ID NO: 170858 - DNA, 749 bp, Zea mays
  Clone ID: MRT4577_87400C.1
gccggccgggtcggaaaaccacggagagactaggctacatctacagctctactattgcttagatctccaagagaaacgaggcatagcaaccgcaatggccgccgcgtcgtacaccatggttgtcctggtgtgatggcagcaccttgctgtaatgatggctgactccaccaccttcaccatcaccaagaagctgcagctacaccaagggtgccaagaacacccccccagtcagcaccaacgcagctgaacccgcgctgcacgcggaacgggaaggggccacccggtaccagctccccgcgctggcggtcgcgcaccagctgatgcttcagcaggaacacgggctgatgctagacgtcagaatgaacctgctggctgggatgctcctggtctggttaggcgtcgttgacgctctccacagcaactatacgtctgagctcagaacttcaacaagatctcggtgatctatcgctacaaactcaccctgtcctgctactgaactaaatgtgaacatggtgatgtgcactcgaccctgaatgtccacatgcgtatcagaatcccacagacatgaacacccgtgactagtgcgtggagagtaactacgaactaaccttctgcccgtgatcggccgtaataggctctgcatgcatgaactagtgaattcgacggtgcaggaataattctgatctggctttgcacaataatatatatataagcgtgcattacacacgcacgcatttgtatgtacgcgc

SEQ ID NO: 170859 - DNA, 338 bp, Zea mays
  unsure (1)..(338): unsure at all n locations
  Clone ID: MRT4577_87401C.1
agtgagtcgtattaaatnataccactccctacagtgagtcgtagtagcggccgaggtacaggacacaggcactcctttgtctggtagagacgaggaggggaaatggagggattcgaggatacaagggatggcactgagggatgcataagtcccctgcctcccttgtctcaacatgttctcctctgcgagcccagtcagcttggggagctaagtatcagaatcctgaaggattcaagccggctttgtcctactagtgtctagaagtctctgtcgtgagatcctggggctcctcctatttctagaagggatgacgtggcatcaacaataacttcgctggg

SEQ ID NO: 170860 - DNA, 527 bp, Zea mays
  Clone ID: MRT4577_87402C.1
gtaatgactgtataattaagctaatgtagataaataatatgcaatatctgataaatcagtatggtgaagtaataacttatacataagtgtgctctaaatttaaacacgctcatcaactgttggagctaacattgagcctaactaagcctataactagttgaagtctatgaaggggcaaatacaagatgatgaagtccatgatcttgttgggctccatattgatcttgatggtgtccttggcctaaatgaaagggtcgaggtagcggatggtgcggacctcctatgagttcaagttggggaagacataatggccaaactggacagacctgacattgccgagcttgagctttaaggtgtcaaccgaggttgtcgcagattcgcaagaattacaccctcagggtcactgaccgccgttgctaagatgattaaaccatagttagcaacgctgtggatatactccagaactcatgctgatgcaaagtttacaacttctttaccagtaacagtcaacaaatagatgtggttca

SEQ ID NO: 170861 - DNA, 262 bp, Zea mays
  Clone ID: MRT4577_87403C.1
tccacgcctacggagtgccattaccgcacacaggaaggtgtcatgagagccggagcatgttccccgcgctcacccaccctacacataccctatccccatcccatttcccagatcccaccaacacagcgcagggatcgagtggcctatcaccccaccccgagacgctaaccgacgcaatggcgacgctcaccgttccttactccgtaccggccgtcttcgaagactgctagcagctccacatggctttacaaggtttactcac

SEQ ID NO: 170862 - DNA, 182 bp, Zea mays
  Clone ID: MRT4577_87404C.1
tatccacgtaagatctatcgcgccggaatcctgcgtggcatgccacttgcaacgccatcttccacgcaggcgaccggagccagcaacaccaaccacaactcgatgcggaagctgaagaccaggctgaaaacagcgctcccctctggcctaaatcctaactttttagctgatccagtccgagc

SEQ ID NO: 170863 - DNA, 512 bp, Zea mays
  Clone ID: MRT4577_87405C.1
gggtacctcgaggccggccgggagaggcattgagcctgccggtcagccagaatacggaccgttgagcgacagttgctgcgcaacgagggcggagcacgcgacgcatgtttccataccagagtgtatacatgcctcgatgtgacgcgccaatcggtctaaatgacatctaaatctctactctagacatgatgacgacactatatcgattatggtatgatcgctgcttgagggaagtggactgatgagattactatccacgtgctgggacggaccatagatactacagttatgtcttggtgaattgatctgcagatagttcgctcgacgtcatcaaagcactgccactgcctctgatgactgctcagacgcagtgcgaacctttggaagaatgtcgtctcgcactagagacagctctgcatgtgacgatgatcactgggacactgcctgacattcctctgcagacatgatctccagaataccaagcacctatcccagctggagaggtgagacct

SEQ ID NO: 170864 - DNA, 284 bp, Zea mays
  Clone ID: MRT4577_87406C.1
ctatttatatatgaacatttttgggttcttgtttattgaaaatgtggaatttgaattcctctacgtatgcctgcccaatttacatatttttttggaaaagggtaataaaaatacatgtaagttcaatttatacttgacctctttttacttcttatttaatgaaaatgttccatggttattcaaaaaagaacaaaagtcttattttcttttttttcccgatatgcgctattccaaataggaatgattccaactgatatatgaacagtaatgcctccctattgatg

SEQ ID NO: 170865 - DNA, 113 bp, Zea mays
  Clone ID: MRT4577_87407C.1
ggtgtatatttcctcataatatggttacaaaaggcaacaccgctattcgcccgcgtttggttcttcttagaaaaacaggtgattttttcttcctatcaactaaaatttggtaa

SEQ ID NO: 170866 - DNA, 591 bp, Zea mays
  Clone ID: MRT4577_87408C.1
ccacgcgtccgcctcataccactgtggggggctaaattcagagaaaacaaacagagaaaattccttatttgacactcaaaaaacttgctcttcccaatttagcactttaaaactgctactcccctgcatctcttcaatcatccatcttgctcaaaaactgctacaatgtccgcggccgtttcgaggagacgtgccaagaacccatgccaagattttccctacgttgaaacagaagagtggctggcgtgggcccatgttcgcatggacctattatcaatgattctcagaggcgtatcatcaagaacctgggttactccactgatgcagcaaggattgaccaaagagcacaagacatacagtgagctgttcaagacggctatcaatgatgttcatctttctgctctagcggcgatttttggctggaggacagataaaatggatgatccttgtgcctctggtgcattggtgggtcattgagtgttctatctttcatcagtttcgtcgttctctgtctttttccatatgaatccttcaattttaatttggaatgtgagagggctcaaccagcgggactgctgcaattctgttggt

SEQ ID NO: 170867 - DNA, 288 bp, Zea mays
  Clone ID: MRT4577_87409C.1
gaccccataacatcattctacgcacaagcgtttaccaacactggcgactccatgatggtgccgctttatgctctttggtctctgtgtattgctgctagcggccactatactcatacaatggtgagatgctgctgtcagtcaccttcttcggttgatcctactgacgacggtgcatttgccaccgtgagaacacctgtcatctacggtgcatgatccaacgggggatcacatgtcgcctccggcctatatgacactggcggttcatgtgctgatgacggttaatacagc

SEQ ID NO: 170868 - DNA, 181 bp, Zea mays
  unsure (1)..(181): unsure at all n locations
  Clone ID: MRT4577_8740C.1
ggggaatttttttttattctnccngaggatctngnagagtgggtggaagcaataggtggngcaatttacgtggacagggggaacgataaagaggttgtttggagtggatnaggtgggtactggaatgtgttgtcagcgacgggaccatgtagactgatgtggtgtggggattgatggaatt

SEQ ID NO: 170869 - DNA, 193 bp, Zea mays
  Clone ID: MRT4577_87410C.1
gagacacacgaacgtgagctcaggatacgacacaagcgagaggcgaatgtgatcagagagtgatatgtcatattatctgaggaccatgacacgaagtgctttacatacgtcaaaaggatggagagcgtgctacgtacatgacgcgacgtgacgctcattggaatctataagttacggactgaaaccgctgctg

SEQ ID NO: 170870 - DNA, 617 bp, Zea mays
  Clone ID: MRT4577_87411C.1
cggaatcggaaggctcgattacgatctctttaacgaggcgtttcccacggcgccgagtctgggatgctcctccacgctcctccgtgtcttcttcgctagaagaatcggtggcttctgcgtcggtgaatgagattctgataatacgcttcatagtgaatttgcggaaattagggttccgtcttcgtctccattaaaaggaaagcatttgagagaaagaatatgtttttattctttcagaatctctttttctgatgcttttcatctttacttatttacttctctatttttttctaaccaatcctatgtgggccgtatgggcctcagagctgaaaatgcagtaaaatccatgaaatttctcaacatggcttgaagcccatcttctaaaggaaaaaacgctttactcttttttccttcatctatgtaataagaagcagaaatttaggaataagtttgaaaccttaatcacacataagagtaagtgcaaaaacatgaacaatgttcttgccttccgtgtcaattttgtatatatatatatatatatatatatatatatatatgtgtgtcagtatataatctccttttatatgattataaactcatttgtcccaaaaaataat

SEQ ID NO: 170871 - DNA, 2096 bp, Zea mays
  Clone ID: MRT4577_87412C.1
gccggccggttcgagattccacactaccccgcgctggactggagttgagttgagctcacgctctcgcacactcgcactcccattcccaccggccagattgatcttgcttcgctaatcatcctagatctccattcccgcccatgggatgcttccagtcgaaggtggcggggcccctgccgccaaacgacgccgccgcgctccccgccgacaagcctgcagatcctgaggcggcgaatggcggcgccgacggggaaggcgacggtgacgacaaggaggctgtgaagcgcgcggtgccggtgttcagggagtttgcgctggccgagctgcgcgccgccaccaagggattcagcgccgacctcatcgtctccgagagcggcgagaaggcgcccaacgccgtctaccgcggccgcctcgacggcgggcggctcatcgccgtcaagcgcttctcgcgcctctcctggcctgacccgcagcagttcctcgcggaggcggcgggcgtcgggaaggtgcggcacaggcgcctcgtcaacctcattggctgctgcgcagagggtgacgagaggctgcttgtcgccgagtacatgcccaacgacaccctgtccaagcatctcttccactgggataagcagccgttaccatgggaaatgaggctgagggttgcatatttcattgcgcaagctctcgaccattgcaatgctgagaacaggaaaatctatcatgatttgaatgcttatagggtactttttgatgaggaaggtgatccccgcttgtcaagttttggattaatgaagaacagccgtgatgggaaaagttatagcactaacctggcttacactccaccagagtttctacgaactggcagagtaattccggagagtgtgatctatagctatggaactgtcctgttggatcttttgagcggaaaacacattcctcctagtcatgccctagatttaataaggggaaagaatatactgttgctgatggattcctccttagaagggcagtatgctaatgaagatgcttcgaaattggttgatcttgcatcaaagtgtctgcaatttgaatctagggatagaccgaacataaagtatcttctgtcttctgttggtcctcttcagaatcaaaaggaggttgcatcacatgtgttcatgggtattacaaaagccacatcagtactgccaaccatttgttctccactcagaaaggcctgcactggtatggatctttcagcggtgcatgatattttgctcaaaacaggttataaagatgatgagggtgcagaaaacgagctatcctttcaagaatggacccagcaagtgcaagagatgctgaacacaaagaagtttggtgacattgcatttagagacaaggattttaagactgcaattgactactactccaagctagttgcgatgatgtcgacgccttcagctacagtttttgtcaggcgcagtttttcctacttgatgaatgggcaagcagagctcgctctacgggacgccatgcaagcccaggtctgcatgccagaatggcctacggccttctacctccaggccctggctctttcaaagctcggcatggaaaccgatgcccaggacatgctcaacgatggcgccacgtttgaggccaagaagcagaacggctggcgcagttaggagccgacgacgaacaaagtctctcttccaacgactccgtgccgttgccctttgagagaaaaaggtacaatggcgagtctcctccaaatcagttcactgggacacgcctgttgcactactagtagtgggattgaaacgcactgttttatcgtgcaatctcctctcgaatgtcggtaacgagtgatgatcatgatcaggggtggaaaaataggtcagggcctttgaacgcatagcgtactcttccgtgggttgcgctttgtgttgctggcgatggtggcaggatctgcctgattgttgcaactgcagttgtaattaaagggatgctttctaacaccttctggttttacgtggaatctttgggccccagagcacatgagcggtgcaaaaagccgagttcattgtgattagctacgaagaataaactagagccgtcgggat

SEQ ID NO: 170872 - DNA, 663 bp, Zea mays
  unsure (1)..(663): unsure at all n locations
  Clone ID: MRT4577_87413C.1
gccggccggagtcgaaaaactgcttcacacaatcaccaacaatcgaattgctgttttaggttttgccttcaagaaggatactggtgacactcgtgaatctgctgctatcactttgatcaaagactttattcaagaaaatgctcaagttgctatctatgatcccaaggttgaacatgaacaaatctacatggacctttcagaacccggtgttgttgataaccgtaagcaattagataagcaaatcaccatctgctccgatgcttatgaagctgccaagggtgccgatgctgttgttatcgtgactgagtgggatgaatttaaatctgatgtccttgactacaagaagatttatgaaaacatgaacaagcccgctttcttatttgatggtcgtttgttggttgatgccgctcaacttcgtgaaattggtttcaaggttcatattattggtaagaatgaacttgccggtactgcttaagagcaaagcaacacacttccttcaatttttatacatataaccccttctccctctttcatggaaaaaaaaagatatatactcttgtgtataaacaatcccatttagttcattaccgtgttgtgcattttacatttccacaaataaataaaaaattgataaactanaaaaaaaaaaaaaaaaggccccta

SEQ ID NO: 170873 - DNA, 726 bp, Zea mays
  Clone ID: MRT4577_87414C.1
gcacgagatttagagacaaggattttaagactgcaattgactactattccaagctagtcgcaatgatgtcgacgccttcggctaccgtttttgctaggcgcagtttttcctacttgatgaatgagcaagcagagcttgctctacgggacgcaatgcaggcccaggtctgcatggtacgtaagctcggaattcggctcgtccaagcccttgctctttcaaagctcggcatggaaaccgacgcgcaggacatgctcaacgacggagcaacatttgaggccaaaaagcaaaacggctggcgcagttaggaaataaaagtctcctaactactccgtgtcgttgcccttcgtggaaaaaaaaggcgcaatcggctagtgtcctccaaatcagttcattgggacgtctgttgcacgaccaaggagtgggattgaaatgcactgttttatcgtgcaatctctgccctaatgccggcaacgagcggtggtgttatgatcaggagtggaagaacaggtcagggggctttgagtgcataggcatagcttgctctcccgtgagttgcgctttgttttgcgagtggtggtggcaggatctgctgattgttgcacctgcagttgtaattaaagggatgctttctcacaatttctccttttggttcacgtcgaatctttgggctgcagaggacaagagtggtgtgcaaagagccgggttcattgtgattagctacgaaga

SEQ ID NO: 170874 - DNA, 489 bp, Zea mays
  Clone ID: MRT4577_87415C.1
cttggcaacgtgcggtcccaggaactgtgctcgtggaacctgggacaggtagtgtacgcagggctgcaaacacctgatgacaccggtgacaagtaccgagtatgtcattcgaggcaacgctctttactgtaggcagattcacaagctccacatggagcatactccgctccacatgatgggggcctgtgctgcagcgccacgctcgatggtgttcctagcgcgccggatgatcgggactgagctgctcctggccggattcttcgggctggcgcctaaaaatgagtgggaaccgaactatgaaccgaggcggcacccgtttatgaaggattgattaggattagaggctgtcggccgcgtcattacctattaaaattgcccatatgccagcagtggtggcctgcgcctgacttcctatggtgcaaaaatccctcgctttccctgctgtatgtgtgcgcgcgcgctcgcgcgttagttagcctctgttatgaa

SEQ ID NO: 170875 - DNA, 2342 bp, Zea mays
  Clone ID: MRT4577_87416C.1
aattcggcacgaggtccttctcctattctatctatatatcacccgcctcttttttctcggcccaattcggcacgaggcttccctcttcttcctcagctccgtcgcccaccgccggagctccgaaaggccccgcgctcgccgcctttcctgtaaaaaacccaacctttagctagctaaccgctcctcttctccccctacgtactccccttgcccaaatcagagaagatatttaacggaggaggggaaggagaggatatttagctgattgttgattggtggtccggggtacggtgttcttgagtcgtgaagcgaccgtacggtggctagggccgtctccgggttgcgtgcaggatggtcgtcagagatcgggagtgaggaggcagctcgtggtcgtggaggctaaatgtaccgcaagaacgactcggcactctcctgtttctacctcttcctcctctggttcttcttcttgaaatagaccagcgccagccaccaggtagctacctactagctagcagcccagttgcgactggggacgggctgctgcttgcaagttggaatcttggagcaggagcagaggagcgggagatggagctggatctgaacgtggccgaggtggcgccggagaagccagcggcggcgctggaggcgagcgactcggggtcctcgggctcgtcggtgctgaacgcggaggcggcgtcggcgggcggcggggggcccgcgccgggggaggaggggtccagctcgacgccggccgtgctcgagttcagcatcctcaggagcgacagcgacgcggccggcgcggacgccgacgacggcgacgccacgccgtcgcctcctcgccaccaccaccagcagctcgtcacccgggagctcttcccggcgccgcagcattgggccgagctcggcttcttccgcgccggcccgcagcagcagccggacatcagggtcctgccgcacccgcacccgcacccgcccccgccgccgcccgcgcagccgcagccggccaagaagagccgccgcggcccgcgctcccgcagctcgcagtaccgcggcgtcaccttctaccgccgcaccggccgctgggagtcccacatctgggattgcgggaagcaggtgtacttaggtggattcgacactgctcatgccgctgcaagggcgtacgaccgagcggcgatcaagttccgcggcgtcgacgccgacataaacttcaacctcagcgactacgacgacgatatgaagcagatgaagagcctgtccaaggaggagttcgttcacgccctgcggcggcagagcaccggcttctcccgcggcagctccaagtacaggggcgtcaccctgcacaagtgcggccgctgggaggcgcgcatggggcagttcctcggcaagaagtacatatatcttgggctattcgacagcgaagtagaggctgcaagggcgtacgacaaggccgcgatcaaatgcaacggtagagaggccgtgacgaacttcgagcccagcacgtacgacggggagctgctgctgactgctgaagctagcgcagaagttgctgacgacgttgatctgaacttgagcatctcgcaaccggcatcgtcccagagccccaaaagagacaagaactgccttggtccgcagctccaccaccaccatgggcggccgtttgacggctccgccgttctgaagaaaaccaagatcgatgctccgtctgagctgtcgtcggcgggccgccctcaccggtcgttcctccctcatctcgtggctgccgagcatctaccgcctcggtctcaccccttcttcatcacacaccatgagagtgatgcatcaagaagagatcccagctgggcagcagcagcagcatggaaggtgaccgcagctgcacctcctcctcctaccaccaccctgttgccgttgccgctgccgtcgacgtcgtccgctgcagcatcatcaggattctccaataccgccacgacagctgccgccgccccatcggccgcctcctcccgccggttcgacccgccgccaccgtcgtcgtcctcctcctcgagccatcaccaccaccaccaccgccgctgagaatcgaagaagccacactgtaaatctgccgggaagcggctggtggcatccggcccgctcctccctccggggcgccgcaacttttttcgatcggttttgcgccgcctgggacgggttgtagttgatcgattggattcttcataactgtatttgcgtactgcttacactacgacccaagtgaaatcgaaaatggtgccttctctctgaaaaaaaaaaaaaaaaaaaaaaaaaaaaaaaaaaaaaaaaaaactcgagaaggggcgccggtaccc

SEQ ID NO: 170876 - DNA, 355 bp, Zea mays
  unsure (1)..(355): unsure at all n locations
  Clone ID: MRT4577_87417C.1
ggcgacccagacaattataccctagccaaccncttaaacacccctccccacatcangcccgaatgatatttcctattcgcctanacaattctccgatccgtccctcaacaaactaggaggcgtccttgccctattactactccatcctcatcctagcaataatccccatcctccatatatccaaacaacaaagcatantatttcgcccactaagccaatcactttattgactcctagccgcagacctcctcattctaacctgaatcggaggacaaccagtaagctacccttttaccatcattggacaagtagcatccgtactatacttcacaacaatcctaatcctaataccaac

SEQ ID NO: 170877 - DNA, 709 bp, Zea mays
  Clone ID: MRT4577_87418C.1
cagtaaaagtatatgcttgcttgatcagtggttgtttcaatcagaagattaaaaaaacggaattaatattaaaaaaaaggggaagtggctagggaattcctcagtcctagctagctagctcaccggtgggaacgccatgcttggcttgggtgcaggtacatatatcttgggctattcgacagcgaagtagaggctgcaaggttgttcacctcggacgattctgccatttgttcatacacaccatgccttttgatttctctcttgcaatttctcttcttcttttatcatggcttttgattcccaaagggttgagtaccgactcgatattcgattctccctgccgtttcgtgaccccagggcgtacgacaaggccgcgatcaaatgcaacggcagagaggccgtgacgaacttcgagcccagcacgtacgacggggagctgctgctgactgaagctagcgctgaaggtaattaagtagctgctcgctgccatgtaatcttcagatgacgccgctgttaattattagctcatcagctttctgacgatcagcccttgtttttgtttctgcttctgcagttgctgacgacgttgatctgaacttgagcatctcgcaaccggcctcgacccagagccccaaaagagacaagaactgccttggtccgcagctccaccaccaccatgggcggccgtttgacggctccgccgttctcc

SEQ ID NO: 170878 - DNA, 2331 bp, Zea mays
  Clone ID: MRT4577_87419C.1
cctcgaggcggccgggcccaattcggcaccctccttcctcagctccgttgcgcaccgccaccgccggccggccagccgccggagcaccgaaagacccccgttctttcctgtaaaaaaaaacccgccgcctttagctagctaaccggtcgtcctcttcaccccctagctttgctagctctagctaggaacgaaagaaattaaaggataactgagattgctgattggtggtccgggtacggtgttcttgagtcgtgaagcgacagtacagtggctagggtcgtgccgcccctgcagtctccggggttgcgtgcaggatggtcgtcagggatcgggagtgaggaggcatcagctctcgcggtcgtggagcctaaatgtaccgcaacaacgactcggcactctcctgcttctacctcttcctcctctggttcttcttcttgaagtagacaccaccagttcgccaggtagttagcagcccagttgcgactggggatcggtggcgggctgccgcttgcgagttgtaagcttggaggggaggggagcaggagcaggagatgcagctggatctgaacgtggccgaggcgccgccgccggtggagatggaggcgagcgactcggggtcgtcggtgctgaacgcgtcggaagcggcgtcggcgggcggcgcgcccgcgccggcggaggagggatctagctcaacgccggccgtgctggagttcagcatcctcatccggagcgatagcgacgcggccggcgcggacgaggacgaggacgccacgccatcgcctcctcctcgccaccgccaccagcaccagcagcagctcgtgacccgcgagctgttcccggccggcgccggtccgccggccccgacgccgcggcattgggccgagctcggcttcttccgcgccgacctgcagcagcaacaggcgccgggccccaggatcgtgccgcacccacacgccgcgccgccgccggccaagaagagccgccgcggcccgcgctcccgcagctcgcagtaccgcggcgtcaccttctaccgccgcacaggccgctgggagtcccacatctgggattgcggcaagcaggtgtacctaggtggattcgacaccgctcacgccgctgcaagggcgtacgaccgggcggcgatcaagttccgcggcgtcgacgccgacatcaacttcaacctcagcgactacgaggacgacatgaagcagatggggagcctgtccaaggaggagttcgtgcacgtcctgcgccgtcagagcaccggcttctcgagaggcagctccaggtacagaggcgtcaccctgcacaagtgcggccgctgggaggcgcgcatggggcagttcctcggcaagaagtacatataccttgggctattcgacagcgaagtagaggctgcaagagcctacgacaaggccgccatcaaatgcaatggcagagaggccgtgacgaacttcgagccgagcacgtatcacggggagctgccgactgaagttgctgatgtcgatctgaacctgagcatatctcagccgagcccccaaagagacaagaacagctgcctaggtctgcagctccaccacggaccattcgagggctccgaactgaagaaaaccaagatcgacgatgctccctctgagctaccgggccgccctcgtcagctgtctcctctcgtggctgagcatccgccggcctggcctgcgcagccgcctcaccccttcttcgtcttcacaaaccatgagatgagtgcatcaggagatctccacaggaggcctgcaggggctgttcccagctgggcatggcaggtggcagcagcagctcctcctcctgccgccctgccgtcgtccgctgcagcatcatcaggattctccaacaccgccacgacagctgccaccaccgccccatcggcctcctccctccggtactgcccgccgccgccgccgccgtcgagccatcaccatccccgctgagagaatcaagaagccgcactgtaaatctgccgggaagctagcattttccccccggcccctccccctctccgggcgttgcgactttttcagttttgcgccgccggccggggtggtggtttcttgtagccgatcgattggattcctcgtattactgctgcttacactcccaattaagtgcttgttcggctattgatattacatgtgtattggagtgtattgagtgggattgtgatgtattttgacttgttatggatttaaaccggctcaataccacccgatacatgtggattatcccccaaaaatatggtgcaaaaaaaaaaaatatattcaaaaatcaataaaacaagaggggaccgctcgcgatcgc

SEQ ID NO: 170879 - DNA, 367 bp, Zea mays
  Clone ID: MRT4577_8741C.1
agctagcaacatcacaagcagagtagtgtactaacaatgacataccaaatatggcggttacggatgctccttggtttgtgtgtatgggctgttaacggagcgattttcatacaatgattataagatagtattgatttgtttctagtgccataattctaaacagcgttgtattaagtatgtgaaaacgctattattatacagtacaggatgcatcagggattcacataacgcatgttaccagtatcatacttgatcctataacacaagtgagacatattacagcagttaatttaagcgcatatactatcacaaagcatcaacgcccaccacctccgacaacgtgagctatgaaacctttatgcgtagt

SEQ ID NO: 170880 - DNA, 426 bp, Zea mays
  Clone ID: MRT4577_87420C.1
gggcggggggggggtactccctaaattgcgcgtgcgatccaactcctgaacactttctcctcggccccgacagggcaagccaacccgaaatacggacatgaactccagcggcaccgaaactagggataaggagaataagggagcgtgcgtagcacaacggcggcgtcacaatgaacaattcggcgtcgaggtccgtgagcgcggcgctccagttccacggcggacgtatcgggagctacttgaagaagggccgctacgcgcagcggggcggaaccggagccccctactacctcgccgctgccatcaaatacctcatcgctgaggttctgcagctcgctgagaatgctggcaggtacaacaggaacactggcatgattgcccgccacgtgcgttctggcgatccgaaatgacgaggagcttgggaag

SEQ ID NO: 170881 - DNA, 1039 bp, Zea mays
  Clone ID: MRT4577_87421C.1
ccgtttcgtgaccccagggcgtacgacaaggccgcgatcaaatgcaacggtagagaggccgtgacgaacttcgagcccagcacgtacgacggggagctgctgctgactgctgaagctagcgcagaaggtaattaagtagctgctcgctgccatgtaatcttcagatgacgccgctgttaattattagctcatcagctttcggacgatgcccttgtttttcggttgaaccggggtgaactttctgaatttgagatttgattttttttgtttctgcttctgcagttgctgacgacgttgatctgaacttgagcatctcgcaaccggcatcgtcccagagccccaaaagagacaagaactgccttggtccgcagctccaccaccaccatgggcggccgtttgacggctccgccgttctgaagaaaaccaagatcgatgctccgtctgagctgtcgtcggcgggccgccctcaccggtcgttcctccctcatctcgtggctgccgagcatctaccgcctcggtctcaccccttcttcatcacacaccatgagagtgatgcatcaagaagagatcccagctgggcagcagcagcagcatggaaggtgaccgcagctgcacctcctcctccggccaccaccctgttgccgttgccgctgccgtcgacgtcgtccgctgcagcatcatcaggattctccaataccgccacgacagctgccgccgccccatcggccgcctcctcccgccggttcgacccgccgccaccgtcgtcgtcctcctcctcgagccatcaccaccaccaccaccgccgctgagaatcgaagaagccacactgtaaatctgccgggaagcggctggtggcatccggcccgctcctccctccgggcgccgcaacttttttcgatcggttttgcgccgcccgggacgggttgtagttgatcgattggattcttcataactgtatttgcgtactgcttacactacccaagtgaaatcgaaaatggcgccttctctcgacaaaaaaaaaaaaaaaaaatttgcggcc

SEQ ID NO: 170882 - DNA, 426 bp, Zea mays
  Clone ID: MRT4577_87422C.1
gaaaaagaagggacgcctaaaaccgctttaacggtaacactgaggcacgctgatcctgacaagatgggaggcacggaatactacaccacagtccgcgggggagaacacctgacagacgctctcatacctcgcaagcgataaacgtgggccaccaagagcgaggcctccaacgtcagatagaccctcatcacaaacggcggacatatttcacgcgccgacgttctctctgctccgagccagggacgttgacgaagactcgtacgactccgactgcgacgagctcattaaacacctcatggcaaagtgggacgacgctgaggacatgcacaccgtcctgctgcactgcggcggctcaaagctgacgcttcggcggaccctcgcttgagtcgaggcgatgaccgccacggcagtgccgccaaagagcct

SEQ ID NO: 170883 - DNA, 398 bp, Zea mays
  Clone ID: MRT4577_87423C.1
ccgactctttggcggacgcgtggggaatcaatggcaagtggaactaaaggaattgccagagggggagaggttctgttgcatcagctgctctgagacactatcttcatactacatgataatctccgacggaactcaacttttggtggagccagatcttagaatcataaacaagaaacatgtcacaagaagtgtatttatggacaccattgaagatcttatatggccattactttgtggtaaaatgactactgcataccaaagcatattgctctcttctggagtgccaatactacatgaaccttttgatccagaccgagtaactgtcacttgttgtgacctgataccagagatggttaacggcatgggacctaaagagggaatgcctggacaagattaca

SEQ ID NO: 170884 - DNA, 1031 bp, Zea mays
  Clone ID: MRT4577_87424C.1
ttgggtacctcgaggccggccgggatccttatttccgtcaccgattgcttccgactctattaatttctgacacaaactctgcgtcctcctcctcttctcccgcgacgcagggattgcggcaggtgtacctagccgatacatgcaggtggattcgaccccgctcacgccgctgcaagggcgtacgaccgcccgaccgggaggtgatcaagttccacggcgtggacgccgacatcaacttcaacctcagcgactacgaggacgacatgaagcagatggggagcctgtccaaggaagagttcgtgcatgtcctgcgccgccagagcaccggcttctcgagagacagctccaggtacatatacattggactattcgacagcgaagtagaggctgcaagagcttacgacaaggccgtcatcaaatgcaatggcagagaggccgtgacgaacttcgagccgagcacgtatcacggggagctgccgactgaagttgctgatgtcgatctgaacctgagcatatctcagccgagcccccaaagagacaagaacagctacctaggtctgcagctccaccacggaccattcgagggctccgaactgaagaaaaccaaggcaagcgctaacgatagatataccttgacaagctagtatcaaacaaaaccagtaaaaaaagtttactttcttgtcgaatttcattgcctacctgtacgtacttgtgcttctgcacaaaataacgaaatccttttgccctctgatgatgatgcagatcgacgatgctccctctgagctaccgggccgccctcgtcagctgtctcctctcgtggctgagcatccgccggcctggcctgcgcagccgcctcaccccttcttcgtcttcacaaaccatgagatgagtgcatcaggagatctccacaggaggcctgcaggggctgttcccagctgggcatggcaggtggcagcagcagctcctcctcctgccgccctgccgtcgtccgctgcagcatcatcaggattctccaacaccgccacgacagc

SEQ ID NO: 170885 - DNA, 1265 bp, Zea mays
  Clone ID: MRT4577_87425C.1
gcggcattgggccgagctcggcttcttccgcgccgacctgcagcagcaacaggcgccgggccccaggatcgtgccgcacccacacgccgcgccgccgccggccaagaagagccgccgcggcccgcgctcccgcagctcgcagtaccgcggcgtcaccttctaccgccgcacaggccgctgggagtcccacatctgggattgcggcaagcaggtgtacctaggtggattcgacaccgctcacgccgctgcaaggcacgcactggactggacgcccagaattcttcgtcatgtgagtctctgaccgaattgattgattaacgagtctctggctcctggaactcgcagggcgtacgaccgggcggcgatcaagttccgcggcgtcgacgccgacatcaacttcaacctcagcgactacgaggacgacatgaagcagatggggagcctgtccaaggaggagttcgtgcacgtcctgcgccgtcagagcaccggcttctcgagaggcagctccaggtacagaggcgtcaccctgcacaagtgcggccgctgggaggcgcgcatggggcagttcctcggcaagaagtccacgcgtccgaacgcttcttttctttttcttttttttatagcatgcagtgatgattcaaccttagttgtgcctttcctcctaatcctatatatgtaggatttagtactggttgactatataagtatatatgtattgttcagtaaaagtatacataggttagctgcatgtttatgtatgtagctggttgtttcaatcagaagataaaaaaaaagggaagtagtggctagggaattcctccggtgggaacgccgtgcttgggtgcaggtacatataccttgggctattcgacagcgaagtagaggctgcaagagcctacgacaaggccgccatcaaatgcaatggcagagaggccgtgacgaacttcgagccgagcacgtatcacggggagctgccgactgaagttgctgatgtcgatctgaacctgagcatatctcagccgagcccccaaagagacaagaacagctgcctaggtctgcagctccaccacggaccattcgagggctccgaactgaagaaaaccaagatcgacgatgctccctctgagctaccgggccgccctcgtcagctgtctcctctcgtggctgagcatccgccggcctggcctgcgcagccgcctcaccccttcttcgtcttcacaaaccatgagatgagtgcatcaggagatctccacaggaggcctgca

SEQ ID NO: 170886 - DNA, 675 bp, Zea mays
  Clone ID: MRT4577_87426C.1
ggtaccgcggcctccttctcgagtttttttttttttttttttttttttttttttttttttttttttttttagaacaatccaagggctgaagttagtcaatctcaagctagcagcagcaacagcagctagcaagtacgtccaatcgatcagctaacagggggtgtagtgtaaagagtagaggagcgtttttttttcacttaattgggagggtaagcagcagtaatacgaggaatccaatcgatcggctacaaaaaaccaccaccccggccgggggggcaaaactgaaaaagtcgcaacccccggaaagggggaggggccggggggaaaatgctagcttcccggcagatttacagggcggctttttgattctttcagcggggatggtgatggctcgacggcggcggcggcggcgggcagtaccggagggaggaggcccatggggcggtggtggcagctgtcgtggcggtgttggaaaatcctgatgatgctgcagcggacaacggcagggcggcaggaggaggagctgttgctgccacctgccatgcccagctgggaacagcccctgcaggcctcctgtggagatctcctgatgcactcatctgcattggtgcaacacaagttcattcactgacatagtacgattaggattgactcaagaacaaaatgaacagctca

SEQ ID NO: 170887 - DNA, 313 bp, Zea mays
  Clone ID: MRT4577_87427C.1
ccgaccaggtacttatccgctattcgcctgtattcagccttgaacctaggacaccgcccagccgtgcgctgtgttctcgatcacaccaaacctccctaatcgctcacggtgcctcgagaggcgacagggccgcacgacgctctaagctttcaacctgccagttgtcactttacatagaacttggccccggtccatcactgatgaccccactacagattacaattcgggcggggaggtctttcaacatgcagtggacgctgctcgcgacccgctggccgttctagggcacttctcgggggtagggtccttcttc

SEQ ID NO: 170888 - DNA, 585 bp, Zea mays
  Clone ID: MRT4577_87428C.1
ccctctctcgagttttttttttttttttttttttttttttttttttttttttttttttttttttttttttttttttttttttttttttttttttttttaacaaaaaaaacctttttagggggggtttaacttgggttcaaaacctccatattttttcaaaaaagccccggttaaaccgttaaacaaaccccggggcgggggataaattttttgggcccccaaaacatacagaacccattgtttggccaaaaatttttggtccaaaacacttggggggcttttaaaccccccccacggcgaaaaaaaaaaaccggggggggggtttttttatcccccccccgccccttttttttacaaaactggggccccccttttaagaaactttggggggcaaaaagggctttttaacaacaaactcccccaaaaagctgtttccacaggggggttccgggctccccatgcgggaacccaagaccccggccccatgttcccttgaaaacccctgggggaaaccggcccccagggggggtaaccccttttggcccgaaaccaaaaacctgggggggaaaaggattttgggcaaaa

SEQ ID NO: 170889 - DNA, 860 bp, Zea mays
  unsure (1)..(860): unsure at all n locations
  Clone ID: MRT4577_87429C.1
gcggcatccgcaggccgcaccgcggcacctgcggccgcgccgtcgagcaagcactcgctcgaggaagcgtgcgagcagaccgcggggcacgaggacctgtgcgtggagacgctgtccgcggacccgtcgtccaagactgccgacactacggggctcgcacggttggccatccaggcggcacagcggaacgcgtcggagacggcgacctacctctccagcatttacgacgacgacagccttgagaacaagacggcgcagctgcagcagtgccttgaaaactgcggcgagaggtacgagtcggcggtggagcagctgtcggacgcgacgtcggcgctggacacgggcgcgtacagcgagtcggaggagctggtggtggcgagccaggctgaggtgaggctgtgtcagcgtggctgccaagccgtgccgaaccaccgcaacatcctctcggcgcgcaaccgcaacgtcgaccagctctgcagcatcgcgctcgccatcaccaagctcatccacggaccgccatcttgatacacaggacgtagtaaacatttagggcttgttcatttcgccgttaatccatgtggattgggtggtattgagtcggtttaattccatagcaagtcaaaatacatcccaatccannnnnnnnnnnnnnnnnnnnnnnggaattgaaggtggttccatacttgtaacgtaattggtaactaatgatgacgttaaatnnnnnnnnnnnnnnnnnnnnnnnnnnnannnnnnnnnnnnnnnnnnnnnnncagactatttaaatttattaccgctggtattcaagtgtgaatcatgtggctatatcaacttctattgtaagcagattgagagtagtcggt

SEQ ID NO: 170890 - DNA, 423 bp, Zea mays
  Clone ID: MRT4577_8742C.1
cttgggcgtacggacacagccccgatccgaatcgtcctcctcgcgagcctcgtcgatcccccactcccctcccctcgcttcaagatgcagatctttgtgaagaccctcaccggcaagactatcaccctcgaggtggagtcttctgacaccattgacaatgtcaaggctaagatccaggacaaggagggcatccctcctgcaccctccacctggtgctcgtcttcgcggtggttattaagccatcagtcgttgaagctgctgctgctgtatctgggttatctagtgtctctgccattgcccatggatggtactgtctttcaaagtatttgtatggtttgtgtcgtgagtcgtgactgagctggtttcatggaccagttgtgttctcgttacccaaaactatcgtgcgaccgcatatggcttaat

SEQ ID NO: 170891 - DNA, 1274 bp, Zea mays
  unsure (1)..(1274): unsure at all n locations
  Clone ID: MRT4577_87430C.1
gaattcggtcgttttctgcattaacggagtcaggcccaggcctaacctcagtacacgagaggagccgaacacgcccgcggcaaccgccgccattctaccccaggtcggacggacccttgccggagacgagcacacgccacagcagagcagcgcgaagcgagagatccaatggcggcggcggaggggcagtgggtgctcatggcaacggggcggacgccgaccaacattgcggtgatcaagtactgggggaagcgggacgaggcgctcatcctccccatcaacgacagcatcagcgtaacgctcgaccccgaccatctctccgccaccaccactgtcgccgtcagcccctcattcccttccgaccgcatgtggctcaatggcaaggagatctcgctattaggaggaaggtttcagagctgcctcagagaaatcagaaagcgtgctcgtgactttgaggacaaggagaagggcgtcaagatcaagaaagaggactgggacaagttgcatgttcacatagcctcgtacaacaacttccccactgctgctggtttggcctcttcagctgctggccttgcctgtttcgttttcacccttggaaagctgatgaatgcgaaagaagattatggagaactttcttcaatagcaaggcagggatctgggagtgcatgccgcagnatatattgggtgtttttgtgaaatggtgcaggcgaggaaagaaatggaagtgacagtattgccgtgcagcttgctgacgaaacacactggaatgatcttgtaattattattgcagtgggcagttcaaagcagaaggaaaccagtagcaccagtgggatgcgagatattgttgaaacaaggcctctcttgcantacagggcccatgggactgtgttttcattctaagggacttgaattgtgttcagctttaactatttggagactaaagtgctaaaaagatcatgatttactttcaattttggaattttaatattggaagtgttttggcaatttgatttgtggctttgactattatttcttttcctatgattaacgtgcgctgcactgggtgtgcatgtgtttcatacagtggggccagggcgggtgtggaaaatggaagaagctatcaagaaccgtgactttgaatcatttgccaaattaacttgtgcagatagcaaccagtttcatgctgtgtgcttagacacgagccctcccatcttctatatgaatgacacgtgacaccgggatacgcttttatcagtgtgttgggttgggtttta

SEQ ID NO: 170892 - DNA, 452 bp, Zea mays
  Clone ID: MRT4577_87431C.1
ctcttccagcccctccagagacgaaaatcccggatcagaaattcaagggcgatgttagctacttcatttccaccaggcttggcgctggtccaaaggttgtttctgccaaaggtcaagcattgatcgattcagtccccggacttccaaaaggcgggtagttctagatttaggttggaataatggtttaagctggggattaaagccaatggtatcatccaaccaacctgggccgggaaatggactaaggttccgggaaaatacattaggctcgtgtcacgttggtttcgtgctgattgacttgacggtgtattggtcatgtattatgcatttgcgctggtgttctttgctgtccaataaagatagaacacgttctcgccttttgtttttctccctcgcctagtatgtggctcaaatatttgtttcactattttattgagcacttcagctgagac

SEQ ID NO: 170893 - DNA, 2338 bp, Zea mays
  Clone ID: MRT4577_87432C.1
aagcaacctgggccgggaagatacattaggctcgtgtcacgttggtttcgtgctgggtgggttgacggtgtattggtcatgtattatgcatttgcgctggtgttcgttgctgtccaataaagatagaacacgttctcgccttttgttttaaaaaaaaaaaaaaaaaaaaaaaaaaaaaaaaaaaaaaaaaaaaaaaaaaaaaaaaaaaaaaaaaaaaaaaaaaaaaaaaaaaaaaaaaataaaacaaaaaaaaaaaaaaataaaaaaaaaaaaaaaaaaaagataaaaaaaaaaaaggggggccccttttaaggggcccaggtttacttccccgtatttccaactaattattcacgaccattctagttcacacaaaaaaaaaaaaaaaacaaaaataacggagtcaggcccaggcctaacctcagttcatccgagcagccgaacacgcccgccgccattctaccccctaattcggtcgttttctgcattaacggagtcaggcccaggcctaacctcagtacatcagagcagccgaacacgcccgcggcaaccgccgccattctaccccaggtcggacggacccttgccggagacgagcacacgccacagcaggaattatcgggcgtagagcagcgcgaagcgagagatccaatggcggcggcggaggggcagtgggtgctcatggcaacggggcggacgccgaccaacattgcggtgatcaagtactgggggaagcgggacgaggcgctcatcctccccatcaacgacagcatcagcgtaacgctcgaccccgaccatctctccgccaccaccactgtcgccgtcagcccctcattcccttccgaccgcatgtggctcaatggcaaggagatctcgctattaggaggaaggtttcagagctgcctcagagaaatcagaaagcgtgctcgtgactttgaggacaaggagaagggcgtcaagatcaagaaagaggactgggacaagttgcatgttcacatagcctcgtacaacaacttccccactgctgctggtttggcctcttcagctgctggccttgcctgtttcgttttcacccttggaaagctgatgaatgcgaaagaagattatggagaactttcttcaatagcaaggcagggatctgggagtgcatgccgcagtatatatggtggttttgtgaaatggtgcatgggagaaaaagatgatggaagtgacagtattgccgtgcagcttgctgacgaaacacactggaatgatcttgtaattattattgcagtggtcagttcaaagcagaaggaaaccagtagcaccagtgggatgcgagatagtgttgaaacaagtcctctcttgcagtacagggcccagacagtggtgccaggtcgggtgttgaaaatggaagaagctatcaagaaccgtgactttgaatcatttgccaaattaacttgtgcggatagcaaccagtttcatgctgtatgcttagacacgagccctcccatcttctatatgaatgacacgtcacaccggataattaggccttgtggaaaaatggaaccactcagaaggaaccccacaggtcgcttacaccttcgatgctgggccaaacgctgttctaatcgcacaaaaccgtaaaactgcagcacatttcctccagaagctcctatactatttccctccacaggataatgatttgagcagctatctggttggcgataaatcgattctaggtgtcgccggattgcattccatgaaagacgtcgaggctcttccagcacctccagagacgaagataccggatcagaaattcaagggcgatgttagctacttcatctgcagcaggcttggcgctggtccaaaggttgtttctgacgaaggtcaagcattgatcgattcagtcaccggacttccaaaaggcgtgtagttctagatttaggttggaataatggtttaagctggggattaaagacaatggtatcatacaagcaacctgggccgggaagatacattaggctcgtgtcacgttggtttcgtgctgattgacttgacggtgtattggtcatgtattatgcatttgcgctggtgttcgttgctgtccaataaagatagaacacgttctcgccttttgtttttctccctcgcctagtatgtggctcaaatatttgtttcactattttattgagcacttcagctgagacaaaagcggagaataactttgtatggctgcttgtcacagtggatgaaatgaaaagagagagctcttgacggctctgggggatgacatgtgagtcctgtggtctaggggcgtacgcgatcgcgtcgacccacccagtcctttccggtccgt

SEQ ID NO: 170894 - DNA, 1714 bp, Zea mays
  Clone ID: MRT4577_87433C.1
cgggatttacgaccattctagttcacactcaattcgggcgttttctggattaacgggggcaggcccaggcctaacctcagttcatccgagcagccgaacacgcccgccgccattctacgccctgctgcccaggtcggacggaccctttgccggagacgagcacacgccacagcaggaattatcgggcgtagagcagcgcgaagcgagagatccaatggcggcggcggaggggcagtgggtgctcatggcaacggggcggacgccgactaacattgcggtgatcaagtactgggggaagcgggacgaggcgctcatcctccccatcaacgacagcatcagcgtaacgctcgaccctgaccatctctccgccaccaccactgtcgccgtcagcccctcattcccttccgaccgcatgtggctcaatggcaaggagatctcgctattaggaggaaggtttcagagctgcctcagagaaatcagaaagcgtgctcgtgactttgaggacaaggagaagggcgtcaagatcaagaaagaggactgggacaagttgcatgttcacatagcctcgtacaacaacttccccactgctgctggtttggcctcttcggctgctggccttgcctgtttcgttttcacccttggaaagctgatgaatgtgaaagaagattatggagaactttcttcaatagcaaggcagggatctgggagtgcatgccgcagtatatatggtggttttgtgaaatggtgcatgggagaaaaagatgatggaagtgacagtattgccgtgcagcttgctgacgaaacacactggaatgatcttgtaattattattgcagtggtcagttcaaagcagaaggaaaccagtagcaccagtgggatgcgagatagtgttgaaacaagtcctctcttgcagtacagggcccagacagtggtgccaggtcgggtgttgaaaatggaagaagctatcaagaaccgtgactttgaatcatttgccaaattaacttgtgcagatagcaaccagtttcatgctgtatgcttagacacgagccctcccatcttctatatgaatgacacgtcacaccggataattagccttgtggaaaaatggaaccactcagaaggaaccccacaggtcgcttacaccttcgatgctgggccaaacgctgttctaatcgcccaaaaccgtaaaactgcagcacatttcctccagaagctcctatactatttccctccacaggataatgatttgagcagctatctggttggcgataaatcaattctaggtgacgccggattgcattccatgaaagacgtcgaggctcttccagcacctccagatacgaagataccggatcagaaattcaagggcgatgttagctacttcatctgcagcaggcttggggcaggtccaaaggttgtcgctgacgaaggtcaagcactgatcgattcagtcaccggacttccaaaaggcgtgtagttctagatttaggttggaataatggtttaagctggggattaaagacaatggtatcatacaagcaacctgggccggccaataaagatagaacacgttctcgccaaaaaaaaaaaaaaaaaaaaaaaaaaaaaaaaaaaaaaaaaaaaaaaaaaaaaaaaaaaaaaaaaaaaaaaaaaaaaaaaaaaaaaaaaaaaaaaaaaaaaatacctaggtcccttggcccgctaccagccttat

SEQ ID NO: 170895 - DNA, 478 bp, Zea mays
  Clone ID: MRT4577_87434C.1
atccgacgtctgctagaggtggcgctgccctgacccgcggtggaggccttgccggcgtgtggcgacacgacgcccaggtgcgcggatttgagtgcaaatacatgcaaaacattactgacaacatggtgcccttatcgagggacagtgccaaagtggagtcgttcacagtacgagcagttttatgacgttgtttgtgctccggcgagcaattgatgctgccacggtggctggctgatccaccctgtctcggccacgggcaccatcctggtgatatagtgaagttcctcgggttgactttgaggcctcctttatgacgaggacgcgggtcaacggcgacggcgtggtgcgactccgccacgatgactggctctggtgtatgatgctcctgcgctctgatggatcccgagcccgactaggtacgcacgcgtgcttccgatggtctcgcgatgcacatgggctacacactgaagccagagaa

SEQ ID NO: 170896 - DNA, 427 bp, Zea mays
  Clone ID: MRT4577_87435C.1
aacgatggcggccgggattggcgtcttcaccccaccaccctggggcctgtcgcgaagccacgatctccaatttcacatcttcccccgagacggcgcaggccattgtactatggtttgacaccaacgtcacgtggggggtcaccgctcctcacccgacaagctcattgacaaacgacgtatgcgccgcaagactatcgcgcgttgaggagatacaccctcggtcgagccatcgtcttcaacgaaggagctcaacgagagtcttgaccaagtgaacaagtggaaggactcaaacaacaacttcgtcttcataaccccgctctacttcatgaggcacaaaggccaccggctactatactaatccactgcaatctagtgtctgtcaatcaatcgcaaatcgcaataccgacccatctagaaagtattagat

SEQ ID NO: 170897 - DNA, 313 bp, Zea mays
  Clone ID: MRT4577_87436C.1
gcgaatgaggcgcattagcaacctaaaaaggacaatcgcgctcgaaccatggtagccacaatgggtagcttgggtatgctccttggtgtgcttgcaagcgctgctaccagaaccacatatgcacaaagtttacaagatcgtatagttgcttttattgccacatacctataaccagtggcgtctgtaacttgagaaaactcaaaacatcaaccttgcagggtccaactggcaaaacaagcacgcgtggtacgtgtattacaacagctaattgaacaaccgtaagacctattacagccgcaacttacggtgcatg

SEQ ID NO: 170898 - DNA, 986 bp, Zea mays
  Clone ID: MRT4577_87437C.1
catggatctgtcaaatatttcaatccagtggttccgtatacatccaaaagaaagcaacaaagagattatttcaggtgccacaagaccagtatatgctctagagccacatgacgtaggacgctatttgcaagctgaaatcgacgtaggcggcgaaatcgcagtagcaaagactgctgggccagtagaccctgatgctgggttggttgattatgtggagacgctcgtaaggaaacctgaaactgaattcaatgttgttgtgcttcaatccaatggcgtcgatcagccaaaagagtcggttcatgtactaaatgtcgggaggctgcggatgaggcttactaaagggaagtcggtagtcgccaaggaattctattcctcatcgatgcagttatgtggtgtgagaggcggaggcgaagcagcctcgcaggcgatgttttggcgacccagaaacgacctcagcttggtgctagccttcgagagcactcgagaacgcaacgcagccatcatgctcgctcggcgtttcgctgtagattgcaacgtatgcgccttcaccaagcgctatatcatccttgctgggccaggcgacaaaactccctggtgaacgaagatggcacctgtgctctgccgataccagataccacccagcacccaccactcctgactgtcctgctcttcctcgcgtcgtaggttcctgaaagaaggcgccgtccgcaccattttaaccgcctgggcgccgcctttctatgtccctgtgctatgttttcccagtccgcgagggttgtaatctgttgttgctgggagatgcgacagcaatgtaagctacaagtctaactgtgtttgacatatgtttaggcctcgttcggttggcctggaacggccctattccatccggatatatttggtcaggattgaaaccggaaacaactaataatggttgttcggttatgtctaactcataataaaaccagattgaaaacaggtcatttcaa

SEQ ID NO: 170899 - DNA, 287 bp, Zea mays
  Clone ID: MRT4577_87438C.1
cgactatcaacattataaagccacaataagtacccacaatggcagccaaaataggggctttcttatactccttggtaactctgcaattgttgctaccgcaaccattttcccacaatgctcacaagctcctatagcttcccttcttcccccatacctctcaccaacagtgtcttcaatgagtgaaaacccaactgtccaaccctacaggatccaataagcaattactaccagcttattaccattattacacttaatacttcatacaaccaacatacctattacaacaa

SEQ ID NO: 170900 - DNA, 1000 bp, Zea mays
  Clone ID: MRT4577_87439C.1
aggccggccgggccggagctcccactgccactgccagtaccagaggctaccagcagagagagaaggcgagcgcgcgggcagaacccgcgcagaaaagcaaccacctccctccgcctcccccgcagggctgggccgcaccgcatcaccctcgccctcgcgagatccccaattcgccgcaggttcctcgccggagcgagcggccccccattgtggcgtggggctgccggttccgcggccaacagtccccctcctccctgctgctggagctggcttgagtcccgtgactcgactcgagctctgctgccgtggaggcggccaaggccaaggcgcgcgcattgcgagggttttgctacctctcggattcaagggtattttatagatgacgaaggcagcaactatttatgggagcaagacacagagcgatgccttgcggccagggccattgcgtccagaaaatattttcagaaataaatttcccacatacaagaatggttcaaatggtatagtaatcaagctggctgatggtcccgaaataccacctctcaaggagatagttgcaaaggagactgcatatctacttgatcgtcgtcagcgtctctctgtccgtgaacttgcgatgaagtttgagaagggtctcagcactgccacactgttgtcgaatgaggttaaatggagacaagtagttttgatggagcgggatatccttttgaagaatctaaagagtgtattagagtcactgagaggtcaagtgacaggaaaaactaaggatgaaatcgaggagtctatatctatggtggagatcctcacggttcagctctccaaaagagaagctgagttggttcaacaaaaagaagaggtcacaaattagcaaaatcattaaagcaaatgtgttttacattgttgtataacttatgtaaacatgtgttagtaatttgaggaatgaaaatctatttacttcaaatattccaaagttcttactgtcatgattcagtcacaaaaa

SEQ ID NO: 170901 - DNA, 836 bp, Zea mays
  Clone ID: MRT4577_8743C.1
cctggccgggatctcatcttcgtctgtgttcttgggcgtacgcggacacagccccgatccgaatcgtcctcctcgcgagcctcgtcgatcccccactcccctcccctcgcttcaagatgcagatctttgtgaagaccctcaccggcaagactatcaccctcgaggtggagtcttctgacaccattgacaatgtcaaggctaagatccaggacaaggagggcatccctcctgaccagcagcggcttatcttcgccggcaagcagcttgaggacggccgcacacttgctgactacaacatccagaaggagagcaccctccatctggtgctccgcctgaggggcggtatgcagatctttgtgaagaccttgactggcaagaccataaccctggaggttgagagctctgacaccatcgacaacgtgaaggctaagatccaggacaaggaggggattcccccagaccagcagcgtctgatcttcgccggcaagcagctggaggatggtcgcacccttgcagactacaatatccagaaggagagcaccctccacctggtgctccgtcttcgcggtggttattaagccatcagtcgttgaagctgctgctgtatctgggttatctagtgtctctgccattgcccatggatggtgctgtctttcaaagtatttgtatggtttgtgtcgtgagtcgtgactgagctggtttcatggaccagttgtgttctcgttacccaaaactatcgtgcgaccgcatatggcttaatcatgaataaatgttgtttgaatttaaaaaaaaaaaaaaaaaaaaaaaaaaaagtactctgcggtgttaccactgct

SEQ ID NO: 170902 - DNA, 452 bp, Zea mays
  Clone ID: MRT4577_87440C.1
gggggtcgggacccagggacaccggttattcccgcataaaaatccactacacgcacacccccactggggggcggggggggggaaaaccacaaacgactcgacgggctaaaaaagccactgccactaccggatcgagcaacccacccacggccgccggggccggaagctaactaaagcaaatcaattgggggcggcgggggggtccccggccttggggcccccctcgggctcaagctgaaaggggggaacagggaaggccccgcccacccccccgggggggcggaacacaaacttggggccgggaggggctgacaacaaactcggaaatggggacccaaaagaggagctccttggttttaaccccggggagggcgggcatcccccccgggtccacaaacgccggaacctccctgtggaaccaaacctgcttgccaaaggaacccaaagggggg

SEQ ID NO: 170903 - DNA, 2278 bp, Zea mays
  unsure (1)..(2278): unsure at all n locations
  Clone ID: MRT4577_87441C.1
gccggccgggtcggggagcagaatccgcgcagaaaagcaactacctccggtcctctgctggcccgcaccgcatcactctcgccctcgcgagatccccaatctcgccgcaggtgtctcgccggagtgacccccattgcggcgcgggttatcgattccgcggccagcagttcttcccctgctgctgtgggtcccgcgactcgattcgagctgttctgccgcggaggcggccgccccagccgcgcccaaggcgcgcgcattgcgaggtattcaaggatattttatagatgacgaaggcagcaactctttatgggagcaagacacagagcgatgccctacggccagggccattgcgcccagcaaatattatcagaaataaattccccacatacaagaatggttcaaatggtatagtgatcaagctggctgatggtccagaaatgccacctctcaaggagatcgttgcaaaggaaactgcagatctacttgatcgtcgtcagcgtctctctgtccgtgaacttgcgatgaagtttgagaagggtctcaacactgccacgctgttgtcgaatgaggttaaatggagacaagtagctttgctggagcgggatatccttttgaaaaatctaaagagtgtattagaatcactgagaggccgngtgacaggcaaaactaaggatgaaatcgaggagtctatatctatggtggagatccttgcggttcagctctccaaaagagaagccgagttgcttcaacaaaaagaagaggtcacaaaatttgcaaaatcattaaagcaggcttctgaagatgcaaagagaattgttgaagaagaaagagctaatgctcatacagaaatagaaactgctaagggtgctgtccaaagagttcagcaagcagttcaggagcatgagaagatgtcccaaaatactgggaagcaaaagcaagacatggaagaactaaagaaagaagttagggaagcccggaggatcaaaatgttgcatcagcccagcaaggcaatggatctggaaaatgaaatacgaattttacgtaacacatttgctgagaagtctaaggattgtgttagtcttttgaaagagttggaaacgcataaaaggttaaaagaaaatggtaccatcccttcattcgatctggagggtctccaatgcttaggatcaatgctacgtatagttggtctgagtggtactcacatggatctgtcaaatatttcaatccagtggttccgtatacatccaaaagaaagcaacaaagagattatttcaggtgccacaagaccagtatatgctctagagccacatgacgtaggacgctatttgcaagctgaaatcgacgttggcggcgaaatcgcagtagcaaagactgctgggccagtagaccctgatgctgggttggttgattatgtggagacgctcgtaaggaaacctgaaactgaattcaatgttgttgtgcttcaatccaatggcgtcgatcagccaaaagagtcggttcatgtactaaatgtcgggaggctgcggatgaggcttactaaagggaagtcggtagtcgccaaggaattctattcctcatcgatgcagttatgtggtgtgagaggtggtggcgaagcagcctcgcaggcgatgttttggcgacccagaaatgacctcagcttggtgctagccttcgagagcactcgagaacgcaacacggccatcatgctcgctcggcgtttcgctgtagactgcaatatcatccttgctgggccaggcgacaaaactccctggtgatggcacctgtgctgctctgccaatccccaccactcttaacaatccgcgattcgcacagcttgcttgcaccagttcctctgattttccttcctcgtcagtctgggctgtgctgtgctgttctgctcttcctcgtgtcgtaggtttctggaaggaagaaggcgccgtgcgcaccgttttaaccgcctcggcgccgcctttccatctcgctgtgctgtgtttttttttcagtcgggtgggttgtaatctgttgctaggagatgcgacagtaatgtaagcttggtgcggtacacgtctaattaattgtgtttgacgtgttagcgttggtgttgaagcaatgctaggtaacatgtgtgcccaaatactggttattattactatcaccgtccacaacgcaaaccttgacaaaaaaaaaaaaaaaagagagaaaaaaaaagggggggggtattttagaagaaataaagtttaatgagggatgaatgcgaaggtattgtttttttataggg

SEQ ID NO: 170904 - DNA, 396 bp, Zea mays
  Clone ID: MRT4577_87442C.1
caaaaaaaaaaataaaaaaaactaaaattaaaaaacaaaaacaaaaaaaaatagaaaagctacattttcaaaattaaaacaatctccaactgcttataccaataccattttcccacaatgctcacaaactcctataacttcccttcttcccccatacctctcaccatctgtatcttctatatgttaaaacccaattcttaaaccctatacgatccaacatgcaatctcatctttcatcttacctttatcaccctttttccttcaacaatcatcaaccctattacaacatttacctttggttcatttattgtcacaaaacatcatatcacaacaactacaacatactgttctatcaaacctttctttataatcttaacatcaatattttctttctat

SEQ ID NO: 170905 - DNA, 146 bp, Zea mays
  unsure (1)..(146): unsure at all n locations
  Clone ID: MRT4577_87443C.1
cattcctatcctgtcttaatttcagttatcccagacaatttaatcatttgatgctatcagaaagcacattggggcaggatattcctgaatcagtaggtggcagnaacgcaattagtgcttnaaaattatggccaatatagtagtag

SEQ ID NO: 170906 - DNA, 366 bp, Zea mays
  Clone ID: MRT4577_87444C.1
gtctcttgggtcttccttttgtatttcttgatctggtactagtaagttccaccagctctcccgatacggagggggaacagagaaaggcggaaccagggccaaaggagtaacacggtggggggaaagggagagctaacaaagccaggcgaaaaaccaggcagaagcagaaagcggaaagaaaggggagcccaacgagagagcccacccaaataaaggggggggcgcaaaactgcaaagcgggagggggcaaaaccgggggcgcacagaaaaaaaaatggacccggcccaccgcgcggagagggggggggaaaacccggcgccagggggggtaaaaaaatcaccaaaaaaacggggaagaggtgatta

SEQ ID NO: 170907 - DNA, 309 bp, Zea mays
  Clone ID: MRT4577_87445C.1
cacgagctcgcgccatcagctcggggctacggcccacgtgccagtggtcagtctggagctgacggggctgcccggcgcagcaacagtccgaatacccggacaaggcagtcctggaatacgtgctgcggaccgtgggaacattcccgcccatcgtcgtcgccagcgaggcgcgcaccctcgaggagcgcctcgcggaagccgcagtcgggtgggccatcatcgtctatcgatgcgactgcgccgaaagcttcaacgagttcaacgccaacaatatcacggagaccttccgcgtcctcctggaaatgtccg

SEQ ID NO: 170908 - DNA, 764 bp, Zea mays
  Clone ID: MRT4577_87446C.1
cctcgaggccggccgagagtctccctcgctcttcttctccgcgaagcgacgcgtaggagaggggcgattagggccacgctgagctcgcatgcccgcggtagacccgggacgcagacgacgcgcgtcggaggagggacacgcaggcatggccgcttcctgctcggcgctcactacgctccactcccggtacctctgacgcagccattcgtcagccgacatgtgaagagctgccccgagcgcgagaggccgaagcgagtgaccctcgcatccgggcctatatgacctcgaccggaacagaagtgcgggcattacggggggcggcggcagcatcgccgggctaatatgcgtccctgtggacgaccatagccagaatcaccatgccggcaggaggcataatacaccgacagaggttcccctgaatggggtgtgcggagctcgcatggatgctatggagaggacaggacgtggtaactggaatacttgccgatggctgatagctgcagaagctaacggcgacaactgagaggcgatcggctctgatgagatgaagtacatggcaagggaccgtgatcgaccacgcgtatctagaccgcaacgaggtcaaggaggcatgatgagatgaacgctgtattgctcatgcagagcaagcatatggctgagatgtaacctcacctgtatctagttgaccaagatggggactcagaacagatggacctatcagctctacgagtcgactgagggcggtgtgtgaatacggaacaact

SEQ ID NO: 170909 - DNA, 141 bp, Zea mays
  Clone ID: MRT4577_87447C.1
ctggagggctgagccacagactttatccttgttctaacaaataaacagtcattacccaacacacgagctttctagtctctaaacgaagcactaacaaagacatatccaggttcgtttttaggctcacgtactactcgatct

SEQ ID NO: 170910 - DNA, 170 bp, Zea mays
  unsure (1)..(170): unsure at all n locations
  Clone ID: MRT4577_87448C.1
gccacgcgtcgccacgcgtcgagcatcattggtttgcnagcgcacctggagcgaggcacactggcttcaagccagatccaaactgcatgccgtccaaaatgctattggacagatagaactggtcaaacgcaaactggccacgaaaacagaattcgtgacagctgaaacca

SEQ ID NO: 170911 - DNA, 526 bp, Zea mays
  Clone ID: MRT4577_87449C.1
atcgtcgtcagatctgattcagcagctgcctttccttcacttcagtcgtgaagcaaaccatactccaaagaatggcgggggacggcgagcttcttccccggatcgcggtggtcggcgcgggcatcttcgcgcgcactcagtacatccccaggctccgcgagatctcccacctcgtcgtcctcaaggccatctggagccgcacccaggaatccgcagaggctgccgcggagctcgcccgcgattttgcgcctggcatcgagtgtaaatggggcgacgcggggctggaggagatcatgggagacccttccatcctgggcgtagccgttgttcttgcaggccaagtccaggttgagctttccttgaagatgctcaaggcaggaaagcatgtgatccaagagaaacctgcctctggatcgacaaccgaagcagaaactgcgctatcagtctacaactcattcccaaacaagttgccctataagccaatttgggctcttggagagaactacagatttgaacctgcatttgt

SEQ ID NO: 170912 - DNA, 1067 bp, Zea mays
  Clone ID: MRT4577_8744C.1
gggcgaccggggtaatcttctccggccggggagtctccttcgttccccttcaaaatggcgcccgcttttccgacgaccctcctccaccaggcgtcgacctccttccgttttccagccggcgccgcagggtgcatccgccctcactgcttggccccactggcggcccccacaacgctctctttggcggccacgccagcggtacctcgccggctcctcctcccagtggcggccggcatttgggacctgatctccggcggagctggcgccgccgccgctgcgtccctcgccgtccggcgaggtatgcagcttttccggcagggagatgtagctggctcgttggcagaatttgacaaggcgatcgagatggacccgcgacagaagcaatatctttggcaacggggcctctcgctgtactacctagacaggtttgaagaaggtgcagagcagttcaggatagacgttgcagctaacccgaacgacaccgaggagtccatatggtgctttctgtgtgaagcgcagctgtacgggactgaagaagcaaggaagcggttcttggaggttggtttggactcgagacctgtaatgcgtgaagcatatgcactgctcagaagtggtgcagatcctgaaaagttagttgcaaagttttcgagtggaactgatggtgaggtcttctattcttcactgtatgctggactatactatgaatctcagaaagatgcagatatggcaaaatctcacattgttgcagcatgcaagtcgccgtatggatcgaggtccggcgattacatggcttcccttgcacttgtccactgccagtgtcgcaactggaaagtagtttgaaagagatcaccaccatattcaagaggacccgacaattctgtttggaaattacttgcaatccttgatatatagactgcaaattacttgcaacaaggacatgggttttcagacaatgacggaccgagttaaggaaaatatgagaggctatcgagtttgggaaaaaaaaaaaaaaaaagaaaaaaaaaaaaaaaagcggcctagtactggattcacatgatattcacgtc

SEQ ID NO: 170913 - DNA, 328 bp, Zea mays
  Clone ID: MRT4577_87450C.1
aaaccccccaataaatttgggggttgggttggcacatttttcctttagtccttaaattaaattgcccttttgcccaacccatttttaaaggtttctttaaccacaaacgggggttaaaaatttttcttttccaggacccctgggaattaaatcactttttggtggaaacaaataaatttgcctactggtcccctggttgcttaaattacccaaaatttttttttttttttaaagggcccatcattatcacaattttttttttttggggcctaaaccccatttttcacctttataatgtcccttaaattgctttttttaccctttaaaa

SEQ ID NO: 170914 - DNA, 307 bp, Zea mays
  Clone ID: MRT4577_87451C.1
ggggcagacttgaaaatccatgcagagacccaaaaactggcacaagggtttaccatagtaccattcataccggaacacgtgcttttaaccattttattaattacaggcggggggtagataaaacaacaacaatactttaggtggtctttttagccttggaggctgtgggaagaacctgggctctgagcctttcagtccttttagacgcaataaaaccgaccttttggccagggggagcattgcgggggacagtaaaggcatgaccggtatgctggtggttaccttcttcggggggatgctccacggg

SEQ ID NO: 170915 - DNA, 269 bp, Zea mays
  Clone ID: MRT4577_87452C.1
gcctccagtttggtcagtatcgtgcaatttgatcttgtggcacttccgccaactgtcaccatgcagaacgaggagggtaagactgtggacctctatgtccccaggaagtgctcgggcacaaacaagatcatcactgccaaggaccatgcctctgtccagatgaacattggccacatggatgcgaatggcctgtatgagcggcacttcacaacgtttgggcactctgggtgttgtcaaggcgcagggcgactcacacaacaccttggaca

SEQ ID NO: 170916 - DNA, 426 bp, Zea mays
  Clone ID: MRT4577_87453C.1
ggtagccaattagcgcaatatctgatatgcaccttacgacttctaactttgcaagatttgttctctgatagacatgggcatgcagatgcacttatgggtagatatatgaatcagttagtattataggtatatgttgtgtgcattatattggctaccaaatcacaaataaaaggtgcagagtccgcagtcgcttcattactgttgctagcgcaagttataattttgattttttctttttttttatattatttttatttttttttttttttttttttatttatttttttttggggggggtttgtttttttttatttattttttatttttttttatattttttttttctattttttttttattatattatatttatatttttattttattatttttttttttaattttttttttttttttttttatttt

SEQ ID NO: 170917 - DNA, 1862 bp, Zea mays
  Clone ID: MRT4577_87454C.1
cgctgattgtgcgcacttgacatttggtagttttgtgtatggaacacttgatgcgtccttgacaacaaaacctcttgagagtcatggggatatcgtaacaattcctgacgatgattatgaccaatcagagggcagaatccatgacgatgaaagcaaggtaacattagcgcctgctgctaatgaatatgttacccccgcgtccgcaaacagcaatgtagagaatcttgatattacatcagtacagcaatctgaagtcactagatccaatttcctggatgtcacgagcaatacggaatacaacctatcatcacccccagattatgcaacttcaagtgcagcgctgcaagattctacttcacagagttatctacaggaaaatcgacaattccagagcatttctcctctcccaagcttcatgcaaatacaaaatggtctcatgtcaccagcaattccaccattgcgcgaatttgatccagcattctcactattgctcactaatcctcctattatgcatggtacaacgtcatcatccatgagcagtgcaactgtttctacgcagccccaagagaatgccaatccagttggtttacccaaccctcaattgactcaatctcagccaagcaccagcattgctccagggcctccactccctcagcatcttcttcatccctatgctcaaacaacccttcctcttggatacgcaagcatgattggctatccatctcttccaccaagctatgcatatctcccacctgctgcttttcagcaaccatacatgaacagtggcatgttcctcctccaagcagcagcagcagttcccaactcaagtgtgaaataccctctgccgcagtacaaaagcaacattgcccttgctagcttaccacagccaggctctttgctctcaagctatgtcgggggctttggaactgcaaacaacatgcctggaaatttccctctgaaccaaagcacaacgtcggcaaccgcaactcttgggtttgatggaacggtcccgtcacatttggaagatggaaaccagtttgtttgtcttcagcagaacgagaaccctgcaatgtggatgcatggagctggttcacgagggatgcccccacttgcagccagtaccatgtatggctatcaagggcagagtcatcagaccggccttcggcagggccagctaccttcacaatatggctctgctctagggcagtcacagccgggcctgggccccgaacaccgaaatcctagcgatagtaacctaagtggtgctgctcaggctaaccagatgtggccaaacagctactgatccacccgaccaccccccttatcaacatctgtggaagacggtcttgttgttgtgtgcgcaaacgccagaggccatgcaaatgcctgtggcctgatccaggcacgcggataccagctgcgtgtgcatgagttactgtcgtgacattttgagaggcgcaagagatatatgttggagcatgttccacctgtagggtttgtaggatatggccaaaaatgtagctggatctgttcattcaaattctgatagggaaagggccggtcgtttttcgttctatttcccccctttttttgtcgtttgcatatcttgtgacaataaaaccggaatatctaacacatcagcaccattagttccccgaggggagtgaaagatagtctgttgtctttgcatcaccagtattgcgcctgcctcgcttaaattttatgattgagatggttatttgatggatgagaatttcccaacctgtgccttgtctgatgagatgtatcgttgtatttgaacattgaatgcataaaaaagagagattgcagcacacatttgccagccaaatgttgattaaaaa

SEQ ID NO: 170918 - DNA, 1263 bp, Zea mays
  Clone ID: MRT4577_87455C.1
attcggctcgagagatctttcatttggtggatgaaagttctgcttggctgcttccttcttatattagtgggctatgtcttcgtgaaatggggggtcccctttgtctttgagaaggttctcttgccaatcatgcaatgggaagccagtgcttttgggcgtccagtattagctattgttctcgttgcatctttggctctctttccagttattctagttccttctggaccttctatgtggttagcaggaatgatctttggatatggttggggtttcttgattataatggccgggagtactattggcatggtggttccatattggattggttcattgttccgtgaacgtctgcatgtatggctgacaaagtggcctcagcagatagcactaataaaactcgcgggtgaaggaaattggttccagcagtttcgggttgtcgcgcttttcagaatctcaccattcccatatacaatttttaattatgccgtgactgtgacagaaattaagttcaacccttatctatgtggttctgttgctggaatggtacctgaggccttcatttatatctacagtgggcgtttaatacgtacattggctgacatgaagtacggcaactataaaatgacaccagtggaaatagcatacaacgccatttccttcgtcatcgctatcgccctcacggtcgccttcacggtgtacgcgaagagagctctgggtgacataaaaagtccggacgatggcatcggtaaagacgaagaagatcacggcccaaatggctcaggggtgcgtatgaatcgtcgtcaggagcgtgccgacgcacgttacatagaactagatgatatgtgatggtgtgttggcccggatcttgcttggaaggaggcaccagtaggtcattaggtgcacggctacggtaggtagctagctatagtttacaagaggaggctaaaataatccacacccagctgacgtggtttgcgtgattcgtttcgtgtgctttgcctactgcactgccatactgtctgaatctgaaggtgcagggctactcactactgagttactgaccgagcgatgctgctctcaacgatgtttctgtgaccatcagcgtatcaatcagtccttgatctgaagcctacactggagcttcatgttgaagcatacattggacttgagtagtacatttgtatataacgtaactgctaatagagttagcatatgatctagttttgaacatgaagctcgtgggctgttcagccatgttcggtccca

SEQ ID NO: 170919 - DNA, 689 bp, Zea mays
  unsure (1)..(689): unsure at all n locations
  Clone ID: MRT4577_87456C.1
gggtcagcactcctaaaaaggacttgataaataaacttgttcagcactccttgaaaagaacttgcatgcagtctccaaaacaactagtattactaccactaccaggctaccagacacggctggaggcatgactgtactgccgcttgatgattaggttacgccctctgcgctctgagtctagctgttttgaccaaacaacatttcttcccggtagcctgatgccaattatgggagtgagaaacactgcagttccctccacatttctcatccgggcttggaccggcaaaggcagtgttaaaccgcaaacaaacaacaaatcaggaaatacaaacaattacacaaagaaatcgtgttcccagacataatttgaaaaaaaaaacaaatcgtataaccggttctgcgtcgaacatattagttgaatggtcagagcacttgtatacctaattcgaataacctaatgatctcgaggactgaacagcaacaggaaccagctttaataaaaatcataccatcaacaaagatccatagaaatttgagcaagtgcaaagctaaaaaaacagccagtgtacaatgtacactcgtgcaatcttatgtacagttaagacttncaacatcctagcttgcatgaccaaacatatcctagctaggttaaggtactattgtcatcgccaaggtacctggacaatttt

SEQ ID NO: 170920 - DNA, 3119 bp, Zea mays
  Clone ID: MRT4577_87457C.1
aattcggcacgagggcaatatacggtgcgtgtgggggcggcggcgacgagggttttgctgctccgtacaccgcgtgcagcggcgacgcgaccgcagctggtcgccgccccggatcgaggagggggaggagccggcggaggctcctgtggtggctgcgggggcgggagcgggagcgccatgaggggcggtggccgtggcggcggcgggagacagccttcctacgcggcgccggatggggcggatgcggcggcgatcccggtcgcctcaaggaagatggtgcagagcctcaaggggatcctggccgaccgctcggagggcgagatctacgccacgctctgcgactgcggaatggaccccgacatagccgtcgagaggctcatctcccaggatacttttcatgaagtcagaagaaagcgggataggaaaaaggagactaaagttaatcacgaaacaaggcctcgacctttccagaaatatacataccgaggatataaggctgtttcagatcgaagtgggcgagaccctacaggcggtttcaaaggccctgtaaaaaaggaaccagagttgcaagctccactaaactcatcagccttggatgtcaagacaagtgacactacagaaatattttctgctactatcaatgttgcccagactgatgctaagaacaccacttctcagcctttatctaaagtgcagcatggttggggtggtattccaggtcgcccttccatggctgaaatagtgaagatgggcaggcctcaagctaaagttgggagcagatctgttgcaagtagcactgcgttgccaaccgttggtgattcagtcatttccaatacaccaaatcttgtgcccgaggaatataacagaactgtttttgcatcagaagcaggccatgtcgcagcagataaattgccaaacggtgctgttgaggtgcactctctacctaaagatgcttccgcatttgatatgttaccttcagctgagggaacagatgttgaagccccttccatgagtgctagtgcacaaggttcatcaatgccagatgccaatgaagatgacattgaaaaatatgcaaatttggaagagggcaatacagaaagcttgatatctcctggacaagtttctgcttctggtaaagatatacaatcagaatatactgaagttgtcagtcatgtggatgaaggctcgatagagaaaacagatgactttcagctcaatggccttccatttgagcacaaccaaaatctgaatggagatgtgtctacagcgacaacacaatttgatcatttgactctgcatgagggaccaaaattgtccgatgataatccggctgtaataattcctgatcatcttcaggtttcgaatgctgattgtgcacatttgacgtttggtagttttgtgtctggaacacttgattcatccttgacaacaaaacctcttgaaagtcatggggatgctgcgacagttcctgatgatgattcaattgaccaatcagatggcaggatccatgacgatgaaggcaaggtgacattagctactgatgttaatgaatatgttacttctgcggcaaacagcaacgaggagaatcttgatattacatcagtacagcaatctgaagtcactagagctgatttcttggatgtcacaagcaatactgaatacaacctaacatcaactccagattatgcaacttcaagtgcaccgttgcaggattctgcttcacagagtttacaggaaaaccgacaattccagaacatctctcctttctcaagcttcatgcaaatgcaaaatggtctcctgccaccagcaattccaccattgcgtgaatttgatccagcattttcactattgctcacccatcctcctatgatgcatggtacaatgtcatcatccatgagcaatacaactgtttctacgcagccccaagagaatgccaatccagttggtttacccaaccctcaattgactcaatctcagcaaagcaccagcattgcttcagggcctccactccctcagcatcttcttcatccctatgctcaaccaacccttccacttggatacgcaagcatgattggctatccatctcttccaccaagctatgcatatctcccgcctgccgcttttcagcaaccatacatgaacagtggcttgttccaccaggcagcagccgcagttcccacctcaagtgtgaaataccctctaccgcagtacaaaagcaacattgcccttgctagcttaccacagccaggctctttgctctcaagctatgtcgggggctttggaactgcaaacaacatgcctggaaatttccctctgaaccaaagcacaacgtcggcaaccgcaactcttgggtttgatggaacggtcccgtcacatttggaagatggaaaccagtttgtttgctcttcagcagaacgagaaccctgcaatgtggatgcatggagctagttcacgagggatgcccccacttgcagccagtaccatgtatggctatcaagggcagagtcatcaggccggccttcggcagggccaactaccttcacaatttggctctgcgcttgggcagtcacagccaggcctgggccctgaacaccgaaaccctagcgatagtaacctaagtggcgctgctcaggctaaccaaatgtggccaaatacctactgatccatcccccttgtcgacttctgtggaaggcggtcctgttgtgtgtgcaacgccggtgaggccatgcagtgcttgtgttctgatccaggcacgcggataccagctgtgcctgtgcgcatgagtcgctgtcgtgacattttgaggcacaagagacatatgttcgagcatgctctacctgtagggtttctaggatatggcaaaagaaaatgtagctcgatctatttattcaaattctgatagagaaaggacttcctcttttctattttattctcttttgtcattcacatatcatgtgacaaataaaaccgaaatatctaacagcagcgccattagttcccgaggaagtgaaacttttaaaaacgaggggagttgtctggcatttgatgaaaaaaaaaaaaaaaaaaaaaaaaaaaaaaaaaaaaaaaaaaaaaaaaaaaaaaaaaaaactcgagggggg

SEQ ID NO: 170921 - DNA, 1441 bp, Zea mays
  Clone ID: MRT4577_87458C.1
ggccgcttttttttttttttttttcggtgaaacgtgtaattgtcttcttctttgtttgtacatattttcctttttgcaatgaaatgcagtaagggagcctcccctcctgaacgcctccggtcagcatttgtatgccgtacgtcgcggaagatgcgcctagttttggtttgaccggacgcgaccggggagttgatcttcttctcgtctccttcccatctggagcggcttgatcaacacctcgtcgatggcattcgtgagcggagatgagtagccgtccctgtccatgtagaacaggtggagcaccttggacatgttccagaacagctgcctcgcagggcggggcaccgcggccccgtctctgagcaccagcctcagcagcttcctcctggaggcctcgatgacgctcctcacctcccgggttgccgcctcgacggagccgcagtaggacggatcggcgagcagcaggacgctgagcgttgatcttcccttgcttcctctccctctcgtacgtctggagtggggtcgttgaggaggcgccccgagaggttgacgaggctgagcatctcctcgtactcggcgctccccaccacgtcctccgggagctctggcccaaccaggtaggcggccatggggacgatgggtccgatcgcgaacgacacctccccgatcggcaggtactcctccatggacggcacccggccgctcatcctccactccgcctcgggcatcatggccctcacgacgtccacccaaaggtcggcgatgtggtccatgaccccgcggttctgcaccgccgcggccttgcccaccagatgcttgcacgtgtcgtagacggcgcggaagacgatctccacccgctccgagtagaagccagcctcctggtgcgcgtcccacaggtcgaacagcgtgacgagattctccagctcctccatggagtccccggtgtcgaacaggtcgtccacgatggtggtgagcacggagctcttgctccacgcgatgcgagcctccgacagttcggcggggaacatggtggctgctgccgagaaaaggatgggcagaggcagtactctcgcgaactccagctccggcagcctcacctctttcacccacctgttgagctgctcaatctcttgttggtacacagcctgggaggagtggaatccgtcggttgccagcgtcagaatttcctcatctgcgtgagaaacgcggaatgctgatttcagcatctggaagccgcctgtcttgaaacgctctatgttcctcctgtgctccagccggtccagggtcgcgtaggaggggaacttgagcacatgttctacctctgccggatcgtcggaatcggaacactgtttcgcctcagcagtttcctgaccatgaaaagatgctctctaggaccggctcctcctccaagatctgaacctgcgacgcctcggacgcgggg

SEQ ID NO: 170922 - DNA, 213 bp, Zea mays
  Clone ID: MRT4577_87459C.1
cagtgtatgggaaaatttttttttctcttttttgtatttatcgtcatacatagttattagtcgtgatttttgttttgagaagacgggggtatccaattttcgacccccagaaaattagaagaaaccccgaagggttctataaaacaccttaaaaaaaagtggggcgccgtgccaaccgcccgggaagcgccccttttctttgcggggaaaccc

SEQ ID NO: 170923 - DNA, 502 bp, Zea mays
  unsure (1)..(502): unsure at all n locations
  Clone ID: MRT4577_8745C.1
agtantcttgggcgtacgcggacacagccggggtccgaatcgtcgtcctggcgagcctcgccgatcccctactcccctcccctcgcttcaagatgcagatctttgtgaagaccctcaccggcaagactatcaccctcgaggtggagtcttctgacaccattgacaatgtcaaggctaagatccaggacaaggagggcatccctcctgaccagcagcggtttattttngccggcaagcagcttgaggacggccgcacacttgctgactacaacatccagaaggagtcaacccttcatttggtgctgcgccttaggggaggcatgcaaatctttgtcaagaccttgactggcaagacaattacccttgaggtggggtcttcagacaccattgattatgtcaaggctaagaaccaggacaaggagggtttccttcctgaccagtagtggtttattttctccggcaagaacttgaggactgctccacacttagttgatacaaaatt

SEQ ID NO: 170924 - DNA, 540 bp, Zea mays
  Clone ID: MRT4577_87460C.1
agctgtaatactagagtggatacactatataggtgaaacgtgtaattgtcttcttctttgtttgtacataatttcctttttgcaatgaaatgcagtaagggagcctcccctcctgtttataaaaaaataattacgccaactgccaaatttaacagatccttggagaaagaaatgtagattacgctacatacttttttgctatcgcctctcgaatgttttttttattttaaaaaatatttattttgggactacaaattaacctgaacgcctccggtcagcatttgtatgccgtacgtcgcggaagatgcgcctagttttggtttgaccggacgcgaccggggagttgatcttcttctcgtctccttcccatctggagcggcttgatcaacacctcgtcgatggcattcgtgagcggagatgagtagccgtccctgtccatgtagaacaggtggagcaccttggacatgttccagaacagctgcctcgcagggcggggcaccgcggccccgtttttgagcaccagcctcagcagcttcctcc

SEQ ID NO: 170925 - DNA, 328 bp, Zea mays
  Clone ID: MRT4577_87461C.1
gttttgcgtgggcggacccctaaccttaatcgcggcctttgattccatgtagatcattgcgagttcttggtggactgataacacattgggttcaatttctagactcacgacgttgactgtcatggtcatgaatcaggctttcgtgactgatatcctagttcagatctaaactgcgtactatcccttctctaaatccatggattgggactcttgagcaacaatacggaacttggactccacctacgtgggcaggaagaactttaatgatctcaagagcctgatgaccaagcaatgatgagagaaggagctattcgtcagcgagatgctc

SEQ ID NO: 170926 - DNA, 1815 bp, Zea mays
  Clone ID: MRT4577_87462C.1
cattgggtacctcgaggccgggccgggattctcagaacacgcgctcactcccgagtcccgatcgcaaccgccccccacattccccagagttagcccgatcagatcgtttttccctcgaggtgagagtaagatgagggagatcctgcatatccagggagggcagtgcgggaaccagatcggctccaagttctgggaggtggtgtgcgatgagcacggcatcgacccgacggggcggtacatggggacgtcggacgtgcagctggagcgcgtcaacgtctactacaacgaggcttcatgtggtaggttcgtgccgcgcgcggtgctcatggaccttgagcccggcaccatggacgccgtccgcacgggcccctacggccagatcttccgcccagacaacttcgtcttcggccagtccggcgccggcaacaactgggccaaggggcactacaccgagggggcggagctcatcgactccgtccttgacgtcgtccgtaaggaggccgagaactgcgactgcctccagggttttcaggtctgccactcgctcggcggtggcacggggtctggcatgggtaccctgctcatttctaagattagagaggagtacccggatcgaatgatgatgacgttctccgtcttcccatcccccaaggtgtcggacacggtggtcgaaccctataacgccacgctctctgtccaccagctcgtggagaacgccgacgagtgcatggtgctggacaatgaggcactatacgacatctgcttccgcacgctgaagctgactactcccagctttggtgatctgaaccacttgatcagtgccaccatgagtggtgtcacctgctgccttcgcttcccagggcagctgaactctgacctccgcaagcttgctgtgaacctgattcccttcccacgcctgcactttttcatggttggctttgcaccgctgacctcgcgtggctcccagcagtaccgctccctgacggtccctgagctgacccagcagatgtgggactccaagaacatgatgtgtgccgcagacccacgtcatggccgctacctgacggcctctgccatgttccgtggcaagatgagcaccaaggaggtagacgagcaaatgataaatgtgcagaacaagaactcgtcctactttgtggagtggattcctaacaacgtcaaatcgagcgtttgtgacatcccccctcgtggcctctccatgtcttccaccttcgtgggtaactccacctcgattcaggagatgttccggcgtgtgagtgagcagttcacggccatgttcaggaggaaggccttcttgcactggtacacaggcgagggcatggatgagatggagttcactgaggctgagagcaacatgaacgacctcgtctccgagtaccagcagtatcaggacgctacagccgatgaggaggccgactatgaggaagaggaggcggcggcggagtgaggccttctgccatcagttggtgcggggttggctttgtggttttctttgcacttgatgctacctcaacgtatgcaatatctcctgcttgatatatctgctgcttgtgtacgctaccgcgtacgttctgcactcttaataaatatatatatgttagttccgtaccagttcttcgctagtggattggaattctgattaaaatgtttcctgagaagtgtcgtggtgttcttggatgagattctgtgctgccgttgtatgctgttttgaccaaaaattacaatgtttgttgaaaattatgagttcgttcaaaaaaaaaaaaaaaaaaaaaaactcgagaaggggccgcggtaccc

SEQ ID NO: 170927 - DNA, 221 bp, Zea mays
  Clone ID: MRT4577_87464C.1
atgcttgttcgttttttttgcggacggacaaattttccgcttctattaaaaaaagattcgggaactaacttctcatccggttgatacaattcccctctaccgaatttgatcttggggaacacagaaaaaaaaaattgagccctggctttcaatccaacctttgctgctgtggcagggtgcacacctcccgttgttgggagtccaaccatgacttcgaatgc

SEQ ID NO: 170928 - DNA, 798 bp, Zea mays
  Clone ID: MRT4577_87465C.1
cagggacagtaccacgcgtccgcttttttttttttttttttagccaaaaaaatgttttcctcgacgacagttttctaaacgaatcgtcttccacaatccatctcttcatcaatgcagtcccgcgagcgcaggtcaactcatcctgttttcctcccaaaaaacagtaccacccctacaccactggcatacggtacaaaagctcggaccgaacgctcctacaaccctacgtcatttacacacggttgagctgggacggtctgagactgggcctacagcttcctaatgcttcccactccatcccacttggcttcacttcctgcccccgcgtttcccgccgccgccgccgccctttgccctcttggacggtggcggggatggaggggcagccgcgcgtttcggtggcctgccaacgttcctcctccccggcgtggccttcttggaaccggacccgcccgcgggctccttgccctcgcctttcccggccttcttctgctccgccgcggccgagagcttcagcgtctccagtagcgacacccgctccgtcgacggcgccgagccaccttgcttcatccggttgaggaagttgacggcgttgcgcttcttggcgacaccgccgccaccaccacctttcttgtcagcggcaggctgcttcttggcctcctcgggcggtgcgtcgctgtccgagccgttgtccgccgccgccgacgcccccttgtggctctgagccgacgccttccggacagcaggcccgccgcgggtcttgttcgttacacgggcccccacgccgccctgccttgg

SEQ ID NO: 170929 - DNA, 301 bp, Zea mays
  Clone ID: MRT4577_87466C.1
ccctcgcctccctcccacgccgttcccgcgaaccccgagacaacaaaggttacaccatgaagttccacttcccgaactaccacatcttccacatctccgagaccctcttcctcttccacaaccacgacagcggctgcatcaccaccaacgagctcctaaatgtcatcatatgactgcttcatataccaaccgacgctgaactccaggacatcatcaaccatgtcgatcccgccggccacgacaccatccacttcccccacttcctcaacctcatttttttttttatcaaccacacccactc

SEQ ID NO: 170930 - DNA, 480 bp, Zea mays
  Clone ID: MRT4577_87467C.1
ggcaaacaattaacagcttatgaatttttgccaaaggaaacattcgtctaaataacacactagcagaaagtataaactgtaactacaaggcaagtcaagggaataacaggataatacagagcagcaagataaaaacaaacaaaaactaaagggagaagcagaaagaattcattgattatcactgcttgcaactatagaaagtaaagctctttttactttcaacgggttaataatgaacattacacaaaaaaaatgaggaccacaaccataggcgaggcatggttggcccttgcttgccctttggatcccagtccagcataatcttaaccttgataccaagcacaccctgtctcaatagaacatgtctcacagctgaatcaatgtatagggtgacaggatgaccagaagaaatcatgtacccatccttgaacttaatagacttagctcggtgagccctgagcttggcactaacaaaaccct

SEQ ID NO: 170931 - DNA, 230 bp, Zea mays
  Clone ID: MRT4577_87468C.1
caaaaatgattttaacaaaacaaaaacggttttttgccagcaagggggggggcgggaggaagagacaccggtagaaacaaacacagacaagcatggggataacggggggggcctactaataaggggattgtatgagacacgttagggccggggacgaaccggcccaccgaaggacccaatacaggggaggatctgatgcactccagttgttggggaggaccggcccaagc

SEQ ID NO: 170932 - DNA, 957 bp, Zea mays
  Clone ID: MRT4577_87469C.1
cattggtacccccgccgccggccgcgccgtaccgccggcctctccaccgttcattctccaatggcgtcgactcacgcaatcagcaagaagcggaagttcgtggcggatggcgtgttcttcgcggagctgaatgagatgctgacccgcgagctcgcggaggatggctactccggcgtcgaggtccgcgtcacccccatgcgcaccgagatcatcatccgtgccacccgcactcagaacgttctcggcgagaagggccggaggatcagggagctgacttctgtggttcagaagcgcttcaacttcccggagggtggtgttgagctctacgcagagaaggtgaacaaccgtggcctctgcgccattgcccaggccgagtcgctacgctacaagcttcttggtggactagccgtgagaagggcatgttatggtgttctcaggtttgtcatggagagtggtgctaagggctgtgaggttattgtaagtggtaagctcagggctcagcgtgctaagtctatgaagttcaaggatgggtacatgatttcttctggtcatcctgtcaacctatacattgattcagctgtgagacatgttctattgagacagggtgtgcttggtatcaaggttaagattatgctggactgggatccaaagggcaagcaagggccaaccatgcctttacctgatttggttacaattcacgtgcctaaggaagaggatgagttcttgaggcctcttgcagctgaaatccaagttgcctgaagtaaaaaagttccagtgaggcctacgcctatggttgtggtcctcatttttttgtgtaatgttcattattaacatgttgaaagtaaaaagagctttactttctatagttgcaagcagtgataatcaatgaattctttctgcttctcaaaaaaaaaaaaaaaaaaaaaaactcgagactagttctctctctcctcgtgc

SEQ ID NO: 170933 - DNA, 554 bp, Zea mays
  unsure (1)..(554): unsure at all n locations
  Clone ID: MRT4577_8746C.1
caaaacgnngtcgacatggggctcgcgacgccaatnnctgccgtnagcgggtcnnngccgtgggtgggccccgcggtgcttgcttttgctgggcagcgggcgggcgaccgaccctcgggagggcccgccattcatcctgtcgtgggcaggtgaaagcgtccgccatnncgctcgcctgggctgctggctnacnngcctcgcggcnanccgggggtcccggccccctttccgcgtgccttgcgtgtggaggcggcnngtcagggaacccctcaaggaaggcgcgcgccagcgaccccgcgcgcccgacaggggcgcgccnnngcctgcgaactgcggctcaaggaanccgccgccagggggcggtgcaggggcgctttcaacgccgggcaaccgccgcgcagcgattccccctccaagtggccggcgtgcagcattccccttacccaccatcagcacctttccaccgactgcgtccaggggtgaaccctaaaacctagaccacgcccggcgacgacggccgcgctgggatcgagnccgaccaaccattttccgcc

SEQ ID NO: 170934 - DNA, 2201 bp, Zea mays
  Clone ID: MRT4577_87470C.1
ccgagtcgctacgctacaagctttttggtggactagccgtgagaagggcatgttatggtgttctcaggtttgtcatggagagtggtgctaagggctgtgaggttattgtaagtggtaagctcagggctcagcgtgctaagtctatgaagttcaaggatgggtacatgatttcttctggtcatcctgtcaacctatacattgattcagctgtgagacatgttctattgagacagggtgtgcttggtatcaaggttaagattatgctggactgggatccaaagggcaagcaagggccaaccatgcctttacctgatttggttacaattcacgtgcctaaggaagaggatgaattcttgaggcctcttgcagctgaaatccaagttgcctgaagtaaaaaagtagttccagtgaggcctacgcctgtggttgtggtcctcctttttttgtgtaatgttcattattaacatgtcgaaagtaaaaagagctttactttctacagttgcaagcagtggtaatcaatgtattatttctgcttctcactttagttttgtttgtttttatcttgctgctctgtattatcctgttattcacttgacttgccttgtagttacagtttatactttctgctagtgtgttatttagactgatgtttcctttggcaaaaattcatgagctgttaattgtttgcctactatggtcctgcaggatagtgtgtatcagctttacgcaattttgatgcgtcttttgctgaaagtgtttcctgctatatcaatctgaggaaaatgggcagttgggttaagcatatctgctttctccaacaatcattttcctctcatgtactcagaaacatattttgtttttttatatgctatcatcagctgttttgttggttagttttttttgtaatatatcatttccatagaatttggcagtattcttctatttgtctgctgtaaatttatagatgtcaggacatgtactctacattcatgttcttctcaactggactgtcataagttttcttcacttctgccgggctagttgctaagcaggatagtgtgtatcggctttatgctaacttctatgcattttgcgctgaaagtgtttcctgctatatagattgaaggaaagtgagcagttgggctagacttgtatcatgttttctccaacaatcattttcctctcatgttacataatacatatattctttaccagtttttgaattgcgggcttagtatttacatgctttaactgctttgtactgtatgaatcaaggagtatgtaaattggtctattgcatgtgccatagtttgaattccatgtgcaggacttgtctagacaggcatacacagattgtgttacttgccacctgaacattcctgctatatcagtttaagaaaaatgggcagttgagttaggccggatattttactgtggttttctcaacaatcatttttctcatattgtatctccacaaacaactccttggttaaaacttttgtttgccttgagaaaagctttaggtttaggcctatattcttgttttaatgatggattgatgtttcatgtgcttccatgattgcttggaattgtactgttaaagcatttgttggtgcaggatttttgtatcggcagcatgctgataattgtgcaatgttaccgagcggtcctgcaaaattgatttcagggaggatggccttctctgcgtttagtgttgtcactgaatgcattaagctgtcccctctatatgactttggtgaattctgtgtatttgattttggggaaaggaattgttggttaaacgcgtttttgtttttgtaaggattggatttagcatttcacttggctgctctatcattatggtgggcagaaatgctgatgtgcaaacagcgtaggcgagttgctactgtgtttgtttgggactggtaattccaccactacattacctctttaggtgctccataagggttcctttggagcaaggataccgggggctccaatatcctccactatcattgctcccaaacaagccctaaaaagggaaaggaatgtaaatgtaatgtaatctctgtaaaaacagtcatgatgatttttataataactctcactgtgcatgagctttcaaaaaaaaaaaaaaaaagcggccgtgatggtttatatatagtggttggtttgtaccggatatatatgaatacattgtc

SEQ ID NO: 170935 - DNA, 611 bp, Zea mays
  unsure (1)..(611): unsure at all n locations
  Clone ID: MRT4577_87471C.1
ccggccggacccttcatgcggcccgggaatcctaatcggacctccggacagggccactcgttgggccgttggcggccggactgacgaccggcaagccctcgtccaaaggacttttccttgccaagccgggttgccgactcccccctcccgggccgaacgccccgcccctaacgggccgaagcctcaagggcctcctgcctgggccgccgcccctcccacgaacccccggcccaacccaggccgccgaacgccgccgcccttcttttccctcgcccgcgcttccacccgccaccagcagcgcagctcgtcggccgccggcggactaacgcacgaacaattctttcgacgcttcggcttccgcatgcaggagctgctgctccaggataccgccaccgacataaccgcctccagcttcatcgccaccaagcccgccgcagccgcaggtttccaacaatnaaagaagttgacaatgatggagataccaagcatcttcattcctgaagattggtcattcactttctatgagggcctcaaccgtcatccagactccattttcagggataagacagtagctgagctgggatgtggcaaaacggttgatatctattgct

SEQ ID NO: 170936 - DNA, 339 bp, Zea mays
  Clone ID: MRT4577_87472C.1
atgcctgttggaattttggaattctgatccacgaaaactttaaagctgccaaaataaaaaaagaaaaacaccggctgccaggaaagcaaaaatggaaccaggttccaggtaccatctacatttgacacaaaaccaaagagcatatgagctcgctaaagctagaaggcctgacatggccctgtgtcgattgattggaggattataaagtgaccaatctgctaattggatcttgaaactcgaaaggctcttttgcagtatgagaggacgatgagattcacatttgcaaactggtagccgagacctgcagaccggtttaaaagtttcaaacttaaaactccc

SEQ ID NO: 170937 - DNA, 314 bp, Zea mays
  Clone ID: MRT4577_87473C.1
cagcagagccgggaagcacgaccggcccagacacacccaacaacggccagccgcaagcccaccagccgcgcaccagaccaacacttaagccagggaggacacaagcaaccacacaccaccacacccacccggaaaccaacaaacagcacgtgaacgacgaaacacggacccaccccagccccaacacacagcagctaaaagccgcgcagagcaaaacagcgctgcacaaaccagcccgaagccaagcggggcgacgcccgaaaaagggacagagcacaccgaaaggaaacagcaacggcggatcagggaaacaa

SEQ ID NO: 170938 - DNA, 286 bp, Zea mays
  Clone ID: MRT4577_87474C.1
atttatacattgaatctacatgatatatattcggtacatttgcccatggaacttaggttatttgcccatcaaccgaatatatatcctcttgattgaatgcatgaatgatatacgtattactcctttgatagtattaggaacattcctaaaactgtcggtgtatgacagacctatagataggcatgaaagctcattggctgaactatatgggtttgtgattaagattgtgtgcttaatcgatgctaaagcatatagacgctcaatatgttccgatgacacacgatta

SEQ ID NO: 170939 - DNA, 333 bp, Zea mays
  Clone ID: MRT4577_87475C.1
tttatatttttccagcgaataggttaaattcaaggatcatttatagaagcatagaagaacgacagggggtgtacaaagcatgcggagatggacccacctgcaccatgaaaccagggcagtcacgcatgacgacacggagcatgcaaggactttgaaggacagcgctatgcatggacattggcggagacactggactacggcatatgcaggatttgaagtcagagtcgatggggtgcgcctggacgtacacacgcgccatgcaggactttccgctgccgccgacgatgctcatgtggcggacgttgctgaaaacctccatgcggccaaggatgg

SEQ ID NO: 170940 - DNA, 313 bp, Zea mays
  Clone ID: MRT4577_87476C.1
gctcgttctttttttttaccagtaacagacacaactaagaaacatcgtacattagtaccctatgttgtgggggagtcttttagcgggtcttattctctggcggagggtgtacacaacctgtggaccggaccatcggtatccaatatattgagccaagaacatgctccctccacaaggtcttatatctactaaactctttggggtacttggccattacctggaagctagccgctttgtgtaaaaagtggttaagtcaaacgttcacaaatttcgaataaaatataaactttatacggagaatattctatccttt

SEQ ID NO: 170941 - DNA, 519 bp, Zea mays
  Clone ID: MRT4577_87477C.1
tggaattcggacgagggagagaaggcgcgttctactagggtacctgcgcggctgacacctttccgcctggtaccgattgcgtccgtgagccgtcgtttcatctcgctggactacaccttgaaggggtgtctcgagatgcacttagagctgtcaggtttccaaacgccaaacgctggctggtgagctgtactgccttgagcctgtatctggggggacgggcagatgcccggggactagaccattgcgggaggggaggacgctctgaacacctatgtaactgatactggcgcttgaaagcacgcgcgatgggctgttgttggcggcctctatcccgctgccatcgatcaggtgaggagctggacctaccgccagctcatgcactgtgagcagttcatcagctagcattgaggatgtcgtcaagcactttgctcgaggtcactacgcctttgatgatggatattgtgtgacctgtgacttgctcgcattacgaggattgccgacaggatgcactggggtaca

SEQ ID NO: 170942 - DNA, 170 bp, Zea mays
  Clone ID: MRT4577_87478C.1
atcagtaccatcaatcatcattcatcttagtagtataggcaccatatcacatctgcaatatcacttatctatctaccctaaccctgactatagtgcttgcggttgctgctctcattgctctagtatcacgtgctccttgtacatagacaggcggctgctactgtggtcaa

SEQ ID NO: 170943 - DNA, 271 bp, Zea mays
  unsure (1)..(271): unsure at all n locations
  Clone ID: MRT4577_87479C.1
agacgccgcaagcacgcagtacgcaagctcggaatccagcacaagaacatacatgtccagannnncccaaaaaaaagtgannctaataaagattcgcccnnnaaaccncnaanaannaaacaacaatagcccgcccacccacatcaactcacaggacaagaacataccctacaatctacatgaccacacaaaccacccacccaacaaatcaaatcccaacaaaaccaccacaaagctcaacaaaacacccactcaaaaccaaacaaacaaa

SEQ ID NO: 170944 - DNA, 1328 bp, Zea mays
  Clone ID: MRT4577_8747C.1
ttccttgtttacgcggccacacctgccgcctagaaaagctgcagcgagaactctaattaaatttggatctacatgtgctagcatatatgtttgtaattgatatgatggatgaatatgtgcttcagagttgagttcctgttgatgctgtagttctgcctgaattgttgaggctgtagcttctgcctgattaaaatgcaccgtgcctatctgttaaactctagggtgtgtgatttagccggtgacggtggtttaatatgtgtaatttcactgcttatagtaatgcaattcacctttgcttgaacatgcattgtcttgttgctttgttctatacacatgcttagctattatctgatgagcatgcactgttttgttctgtttgatatgcatgctcagaaatatgtagatgtgtggctcctgctcggttgttctttatcatccacctgttgaacatgcatgttcttgtggcttatctttattatgtattaccttcgttctcgaatatttgtcgcccgctagttcatttttgaactaaaccgtgacaaataaaatagaacgtagggagtggcatcatgctgctactgtaccttacggtggcaactacatcttgagcacgcatatatcttatagtgttccttttcttttcctccttggtctactgttatatgcttaccttttttggtttccttgcagatgcagatctttgtgaagaccctcaccggcaagactatcaccctcgaggtggagtcttctgacaccattgacaatgtcaaggctaagatccaggacaaggagggcatccctcctgaccagcagcggcttatcttcgccggcaagcagcttgaggacggccgcacacttgctgactacaacatccagaaggagtcaacccttcattggtgctgcgccttaggggaggcatgcagatctttgtcaagaccttgactggcaagacaatcacccttgaggtggagtcttcagacaccattgataatgtcaaggctaagatccaggacaaggagggcatccctcctgaccagcagcggcttatcttcgccggcaagcagcttgaggacggacgcacacttgctgactacaacatccagaaggagtcaaccctccacttggtgctgcgccttaggggaggcatgcagatctttgtcaagaccttgactggcaagacaaatcacccttgaggtggagtcctcagacaccattgacaatgtcaaggcaaagatccaggacaaggagggcatcccacctgaccagcaacgtctcatctttgccggcaagcagttggaggatgggaggacccttgctgactacacatc

SEQ ID NO: 170945 - DNA, 856 bp, Zea mays
  Clone ID: MRT4577_87480C.1
tcgaggccggccgggtatgattcttggtctccttacaatgatgtttccatcaacaaacagtacaattatgtcgaggattcgtttgctcgtagaaatgttggtaataatgctgcaccatcatcatcccagatgccacgaccagccgtaagatctaaccttaattctggattgcataatgatgcatcatatcataattatgatagcattatggctggtacctctgccatgaacattacatctacagctgagaccgggaaggttcctgaaagggttctgcgtggtgatttggacaagggtcaaacaaattatagattggaggatcaacatgtcatagttcaaccaccacagggaagacttccatggggtaatcctgcagaaggaagagttccaatgaatagagttcagagtcaagcaaaacaacacttggaaaacatggatgcaaagcaagaccataagaaattgctccctgatccaaaaaaatctccccttgacagattcatggacacatcattgccttcaagaaacatggacatgaggtcacagaggcttgacttcgatgatgtctctgagtgcgaaattccttgggaagatcttgtgattggtgaaaggattggcttaggttcatatggagaggtttaccgtgctgactggaatggaaccgaagtagctgtaaaaaaattcttggatcaagatttttatggcgatgctctggatgagtttaggagtgaagttcgaattatgcgtcggctgcgccatccaaatattgttctctttatgggtgctgttacacgccctccgaacttatctattgtatctgaatatcttccaaggggaagcttgtataagatccttcacc

SEQ ID NO: 170946 - DNA, 719 bp, Zea mays
  Clone ID: MRT4577_87481C.1
gggcttcgatgatgtctctgagtgcgaaattccttgggaagatcttgtgattggtgaaaggattggcttaggttcatatggagagatttactgtgctgactggaatggaaccgaagtagctgtaaaaaaattcttggatcaagatttttatggcgatgctctggatgagtttaggagtgaagcggcgaccagaatatgcatcaggcgggaggaatggggcggtcgctggagctgctgctgatccagtttttgatgccggataacgacacacgtcggcaggcggaggagcagatccgacggctggcccgtgacccgcaggtggtccctgcgctcgtccaccatctccgtacggccaagacccccaacgtccgccagctcgccgcggtgctactccgcaagaagatcacctcccactggcccaagcttccccctgactccaaggcatcacttaaacaagcccttatcgattcaatcacactcgaccacaggttctttgctaaatacctatcaccaatccttctacgcatgtctgccttagaatctgcacgctttcaattcactcaaattgtgcatttggccatttgcctaaggaacactttgagtgtattctcaacttattagtttgtgctgatcagaattgaactgagaggtccagctttagtgaaccttcctgtttgcgccccaaacaacatagaattttgatgctctattgtgaccgc

SEQ ID NO: 170947 - DNA, 393 bp, Zea mays
  Clone ID: MRT4577_87482C.1
ataaaaacaaaataaaggggttcaacaattaacccgcggggaaacaaaaacccccccttttgggcaaaccggggtcattttaggggccaacccccacccataatttcgacttgcctttgcaaggcaccgggaaacaaaaaacacccatgccttttgcagcatcaataaatccacgggcggacccccctttccatcccaaagacaatgaagttgcataacataccccgtgggcttatttgccggggaccaaattgggggcgtcggccccccccttgttgttgactgggtcagccatggggtccccgaggttcttgagcgggcccctgcccgggaccaaggcctggaccaaaaacccccacctgggaaaaagggggggggggcgggcttgggccc

SEQ ID NO: 170948 - DNA, 2165 bp, Zea mays
  Clone ID: MRT4577_87483C.1
tgcctcggcccaaatgaaatgcatgcaactgcagcggcattggggataacgcacccgtcccgcatcatatcataattatgatagcattatggctggtacctctgccatgtttattacatctacagctgagaccgggaaggttcctgaaagggttatgcgtggtgatttggacaaaggccaaacaaattatagattggaggatcaacatgtcatagttcaaccaccacagggaagacttccatggggtattcctgcagaaggaagcgttccaatgaatagagttcagagtcaagcaaaacaacacttggaaaacatggatgcaaagcaagaccataagaaattgctccctgatccaaaaaaatctccccttgacaaattcatggacacatcattgccttcaagaaacatggacatgaggtcacagaggcttgacttcgatgatgtctctgagtgcgaaattccttgggaagatcttgtgattggtgaaaggattggcttaggttcatatggagagatttactgtgctgactggaatggaaccgaagtagctgtaaaaaaattcttggatcaagatttttatggcgatgctctggatgagtttaggagtgaagtaggtgaacttttatctgtttctatcttggagttttcctaaataaactattcaattttcatatttactcagttcaattgttgatttattgtttgatatacggatatactttttgacaagattcgaattatgcgtcggctgcgccatccaaatattgttctctttatgggtgctgttacacgccctccgaacttatctattgtatctgaatatattccaaggtataatagttacttttactacacaatcactgtttatatggaatgtgtgaattaaatatcccactctagacaacacagaaggtatagactcgtgcccgcgcaagaacgcatgggcatattttcatcctttatttctctgacagcgtaatttaagcggtcctctaaatataaagaatgctactagattatctatatagagtttctctgtcatttcctttacctattttaatatttaaaacaacaaacttagcaaaaataaaatatgtaaaatatattttagagtatgacaaatacatatgtatatatatatatatataaagtaaaagtaaaatatgtttctaatatagatatttacatatagagaacaaaatatagaaaacgttattacagctaaaaaagacaaattatagaaccttttagagaagaatgtaaatgacggatttagagaacattgctggagacatagctatgcttcaacactcaacgtctacgagcgatgccctactcgatgggcctcttaccctggtcaaactcatgcaaagaaatcaagtttgttcaagcaaagaatcatttgaatcgtaattcataactagatcgctgcacgaggtcgcatgagtgcagccacgactagcctcataactaaagtaaaacacacaaaccactgtccactgagtacttgtgtattcgtgttgctgtcaatcttgatagtacgtccgcggcgaattcttaacaatatgttttcaccaccaggcggcgaccagaatatgcatcaggcgggaggaatggggcggtcgctggagctgctgctgatccagtttttgatgccggataacgacacacgtcggcaggcggaggagcagatccgacggctggcccgtgacccgcaggtggtccctgcgctcgtccaccatctccgtacggccaagacccccaacgtccgccagctcgccgcggtgctactccgcaagaagatcacctcccactggcccaagcttccccctgactccaaggcatcacttaaacaagcccttatcgattcaatcacactcgaccacaggttctttgctaaatacctatcaccaatccttctacgcatgtctgccttagaatctgcacgctttcaattcactcaaattgtgcatttggccatttgcctaaggaacactttgagtgtattctcaacttattagtttgtgctgatcagaattgaactgagaggtccagctttagtgaaccttcctgtttgcgccccaaacaacatagaattttgatgctctattgtgaccgcacaccacaattgctcatataattagttatatatgtcaattggggag

SEQ ID NO: 170949 - DNA, 282 bp, Zea mays
  Clone ID: MRT4577_87484C.1
gatctagactacgagcctatcccttctattaggactaggatacaatccgagggagggacaataagcatgttttgaggatgcgcgcaaaccgcaaccatacagtggactacttgaccacgaagaaagcccccgcggtacccaacgatgacgtgttggacgtccagcccatcaaaatacttgtactaaaacgtatccaccgctccgacctcgacacacgctgcgctctccatcccaccatccgggttaaagtcatatacaacggcgactacctcgagatctaca

SEQ ID NO: 170950 - DNA, 819 bp, Zea mays
  Clone ID: MRT4577_87485C.1
cggacgcgtgggcagctgcagcggcggcggcggcggcggcagcaggcagcagccgaggtcgaggtaccacacgatgatgtcgttcctgagcaagcacgtcaggcggtaccagtccctcgacgacaagatcgttgacctctgcgctagaatggaggagagcaagaggagcgcggggcggggcgcgggagaggagagccagagccagagcgcggcgctgggccagttcctggaggagacgttccagctgcagcgattcatggtggccacggggcagaagctgctggagacgcagtccaggatcgcggctggcctcgcgcgcgatcgctgctgctgtggcgacggagaagacggcgtggatatgaagaggctcatggaggtggctggggcgctgctgagggacgtgcagcgagggctggaggtgcggatcgcgcggatcatcggcgacctcgagggcacgctcaccttccacggcatcctccgaagcacgcgctgatatatatacacacacgcacaggcacacacacccgacgctgtcctccagacacagtaaggccccctttgggagggctcctggacggctccggctctagctctttgctggagccctcccaaacgcagcgtccaaaaacagctccggaggaggagctggagccaggaaacgggcaggagccggagccggaaattttggctctgcacggctccgttcgacacttcgcgtagtctgttcatctaccaagtttctttagtgtagttagcaagtagtttgaatgcagtttgaactccgtatcaaatatttccataaaatattttttattccat

SEQ ID NO: 170951 - DNA, 819 bp, Zea mays
  Clone ID: MRT4577_87486C.1
aattcggcacgaggggaaaaccctagacgagccccccttgcaacggtcagatccattcctatatagtattcctccgccgccaacctcctgagcatcccatatctgtgtgtgctcaattcgccatccacaaaatcactgcacccgatcatcgtatcaggaggagaaggtaagagacgtgagggagatggaggcggcgacggccatggatttccacacgctctcgcgccgggagctccaggcgctgtgcaagcgcaacggcgtccgcgccaacatgaccaacgccgccatggccgaggcgctgcagggcctaacctcggtcgacggggtcgacgagatcggcacgactctctgtctgccgacggcgacgccaggaaggtcggcgatgaagtcggcggcgaagatggtggccgtcgaggagcagcagcacggtagcccgctcccccgcggccgccgcgtatcggtaaaatcaccagaggccatccggatggaggttggaggagaggacgagatgaaggagaacgtgaagactcccggcgtggtgctgcgcagcactcgccgcggtattcgggccacacccgcgccgcttcctactccggttccggcgtgcagtgcgcgcgcaacagcgaggaggaccgacgttcgtaagacaggcgaggtggcgccgaccccagccacccgcaggaggacggcgtctcgcaaggccgcgggggcagtggaggctgaccgacacgccgaagatgtatccgaggacaagacatcgaagatgacgagagctttggatcaggaagccgaggtggtggcggtcgcatcaaaggagga

SEQ ID NO: 170952 - DNA, 407 bp, Zea mays
  Clone ID: MRT4577_87487C.1
tcggattcccggtcgaccacgcgtacgaaacccaccaagcgaacgcactaccatcacctaccaccacggcttccaagatattgggccctcctgggcctctttgccctttaaatgggcgcaaccaaatgcgggcattattactaagggctcacttgctcctagagccagatttccacagttactaccaccagttacttcaatgggctcagatcatccaaccgtgctagcctacaggctacaactagcgcttgcggcgagcgccttacatcaaccaattgtccaattgcaacaacaatccttggcacatctaaccctacaaaccattgcaacgcaacatccacaacaacaacagtttatgccatcactgagccacctagccgaggtgaaccctgtcacctacttgcaac

SEQ ID NO: 170953 - DNA, 1768 bp, Zea mays
  Clone ID: MRT4577_87488C.1
aaagaagatagctaaattacagcgggtcattcgtagcatgaaaaccaacagcggaaatctgtcgaggaaactggttccagtttctattcacccctgacatatttaaaagatgcccagggttttgcggagaagcttttctctcggttgcagaaatgcaatgagcgatttgaggtaaggatgatgatgctaaaagtaatcgcgaggaccattgggctgcatcacttggttttgttgaacttctacccgtatcttcaaagatacgttcaacctcatcaacgagatgtgacgactctactcgctgcagcagttcaggcttgccatgatatggtacctccagatgctgttgaaccactgttcaagcagatagtaaatcagtttgtgcatgaccgttctcgtccagaggctattgctgttggcttaaatgttgtgagagagatctgcatgagaatacctttgatgatgaatgaggatctgctccaagacctcgttttatacaaaaagtcccatgagaaagctgtttccattgctgctcgttcgctgatcacattgttcagagagatctgtccttcattgttagtcaagaaagatcgtggccgtcctgtggatccaaaggctcggcccaaagcatttggagaagtcactgttgctagcaacgttcctggtgccgagttgctagatgaaaatatttcttcagaaggggaaagttcggacgatgagtctgatggttttgactccgatgatgagatggacttgacacctgcccctcctggaacagaagaaaatatggagggttcatctgttgcaaacaaacatgatgccgatggagataccaaagaggaagatgacgcatctgatgatgaagatggtacggatcaagatgactccaacagtgatagtgatgaactagacgatgactctgatgtggatgtgggtactgatatatctgatgaagacgaaggtgacgacggtgaactgaaagaaagcataaatggttcagaggatgaagctttagaccagaatgaagacagcgaagaggaagacaagtcaaaaggcagtggctctaaagcgcagaagaggaagttaaatgattatattggacagctaagttctgctgatgcaagccttcgagttctgaagaggttagcaactgccaagaaggctgaagaaccatctgatgaaactggtaaaattctatccgatgaagatttcaaacgcatcaaagaactcaaggctaagaaagaagcgaagctggctttggctcagcatggactaatcaagggtgtcgacacaaggtctgtaacctttaagatgccatcatctgaccagctcagcaggaagcgtgtcgatccacttgagcttgaggctcacgtcaggagaaagatgtccaaggaagaaaggttggcgttggtgaaagctggaagagaggatagaggtccttacatggcaagggcggccgtgaaacagaaaaagaccggtggactgagcaataagcagaagcagcacaagaagaggatgccactggcagcgactagagccaaggcagcacgttcccggcaggagaagaagcagcagcgcaagcgctccgggaatcagttcaggggccgcaaggcgtggaagtgagagagcctctgctgccgctttgcgattcatctagccgaatggccaatttttttgactctttgtatcttcttctgccagttaatgtttccatataataccttgattctatgagaatgcttttccatattaaaacgttggtccccccccc

SEQ ID NO: 170954 - DNA, 1269 bp, Zea mays
  Clone ID: MRT4577_87489C.1
cttcgcccctacagatcgaaccaaggaggcagcaaccagcgcacgccactgcggcgctaggagctcgcagaagcgccgccccacgagagggagtccagagcatggaagagatccggtggcagagcaggtcggtcggagatgggagtcccggcgttctaccggtggctggcggaccgctacccgctgacggtgtctgacgcggaggaggaggagcccgtggagctcgagcccggcgccttcgtccccgttgacctccgccgccccaatcccaacggcctcgagtttgacaacctctacctcgacatgaatggtatcatccacccatgcttccaccccgagggccggccggcgcccaccacctacgacgaggtgttcaagtcgatttttgattacatcgaccacctcttcggcctcatccgccccaggaagcttctctacatggccattgatggtgttgctccaagggcaaaaatgaaccagcagaggtccaggcgattccgggctgctaaggacgcggctgatgcggcagcggaggaagagaggctgaggaaggagtttgaggcagagggtaggactctagcccagaaagagaagtcggaggcaattgactccaatgtcattactccagggacggagttcatgtttgtactatctacggcgcttcagtactacatacagctgaggctgaatcacacgcttggatggcagtctgtaaagataatactgtctgattccaatgtccctggagagggagagcacaaaattatgtcatacatccgcctgcagcgcaatcttcctggctttgatcccaatacacgccattgcttatatggcctggacgctgatttgattatgcttgctctagcgactcacgaggttcacttctcaattttaagagaggtgatctccatgccagggcaacatgaaaaatgttttctttgtggtcaagttgggcatttggctgctgaatgcagaggtcctagtcagcctgataattctgtggagctacctcctattcataaaaagaaataccagtttcttaacatatgggtgttgcgtgaatacctggcaaaggatttggaaattatagatgctcccttcaagataaactttgaacgtcttattgatgattttgtgtttatgtgtttctttgttggcaatgactttcttcctcatatgccaactttggaaattcgtgagggtgccattaatcttctcatgagtatctacaggtcggagttcacatcaatggggtgttacctaactgat

SEQ ID NO: 170955 - DNA, 999 bp, Zea mays
  unsure (1)..(999): unsure at all n locations
  Clone ID: MRT4577_8748C.1
ctgtgcggcgctcgaggccggccggtccgggagtctgcacactgccatcgctctcctacggtactgccgagcgttctgcctaccccgcgtctcgtcccttcgctgccgctctatctatctcggccggagcctgggcggcggtggcgcggngccgctgctgctgcggccgcgccgtcgccgcaccctaacgccgcgccgaaggccctctccgccagctccgtggtcgcggctgtcgccacgtccctgctctccctggccgcggccgtgctggcatgatcacttgatcaggatcgtgtagtgctggacaggggacggcgcctttgtgaattgtgagagctcgtactgtgtctgtgtgactgtctctgtggccgtatgagcatttagccctggatctgtgtttgttactctgtcttgctgactttgcttcgggaacatcgattatctcaaaaaaaaaaaaaaaaaaaaaaaaaaaaaaaaaaaaaaaagaaaaaaaaaaaaaaaaaaaaaaaaaaaaaaaaaaaattgggggggaatggaggggataaacgcatatatcttatagggttccttttcttttcctccttggcctacggaaatatgctaaccttttttgggttcccttgcaaatgcaaatctttgggaagaccctcaccggcaagactataaccctggagggggagtcttctgacaccattgacaatgccaaggctaaaatccaggacaaggagggcatccctcctgaccagaaggggtttattttccccggcaagcagcttgaggacggacgcacacttgctgactacaacatccaaaaggagtcaaccctccacttggtgctgcgccttaggggaggcatgcaaatctttgtcaagaccttgactggcaagacaatcaccctggagggggagtcctcagacaccattgacaatgtcaaggcaaagatccaggacaaggagggcatcccacctgcccagcaacgttttatttttgccggcaagc

SEQ ID NO: 170956 - DNA, 468 bp, Zea mays
  unsure (1)..(468): unsure at all n locations
  Clone ID: MRT4577_87490C.1
gggggggcaataaacaagagggaaaccaaataaacgttgggaaggggggggggaggcaaggaaaaaaaagggcccgggggggaaaaaaaatttaaaggggggggttgggggggctgggggaaaaaaggaacttgtttttgaccccccgggaaaaaaagggggacggcccccccttggaaaaaaaatcggccaaggacctgaacgccttttccaagggaaagaaaaaatcctcggggggaaagggcggggggcccccccacccccccaaaaaccccctgagggaccccttggggggntcggggttgggggggaacccggccatgtacccccccgtgtcctcctccaaagaattgggggaggggggcaccaactccctgggcgcctttggggaccccttgggaaaaaccttccccgccttgggcgcttttgtggggccaaaaaggacttgagggccccaaggaacccccc

SEQ ID NO: 170957 - DNA, 763 bp, Zea mays
  Clone ID: MRT4577_87491C.1
ctcctgctaaagttgatgtgacacccccaaaagttcatcagccatcggttgcaccccctcctaaagttgactatgccattgacctctttaacatgttatcgatggacggaacaactgagaaagaaccagtgtcatcttccaacgacgataatgcttgggatggcttccagtctgcagaaccagcacctaactccgagaaaaaggatactgctaagccagtagaaagtaaggcccagtctacaacgggaatcgaagacttatttaaagactcgccagctgtggcagcgtcttcagctccagttgcttccaaatcaaacccacagacagatatcatgagtctgtttgagaagtcgaatatggtatcaccatttgctatccatcagcagcagcttgcttttatgacccagcaacaagctttactgatggctgctcttaaatctggaaatgcaccccaaatggttccggggaatgcaccccaaatggttcccgggagtgccagtgtgctaaatgctaatggttctaatgcccctaatggaagcttgccttcccatagctggcctaatctaggttatcagaaccctgcatctattccagcagcagcaccacaaaatggtgtcgccaaggctgggaacaacaatcaggacttcttttctgggaacttcggttttggttcgcccggcatgccagcaaatgggtccacaaccgcaggtgctaacaagagcgcatccacccctacctcttctaccctgccctctcatcaggc

SEQ ID NO: 170958 - DNA, 612 bp, Zea mays
  unsure (1)..(612): unsure at all n locations
  Clone ID: MRT4577_87492C.1
ctcgaggccggccgggcgcaattcacgggcgcagcgacctctcgtctcctctcatctagacaccactttcttctctccgcctcaggcggcgcgcgcgcggctagcttcccggcctcccagcaacatcccgccaccacttcctcctcctcctccgctctctccggccgcgcgcgccgacgtttttttttccaacggaggccgccgcgcgctgcctttagtttcggacccatccatccatacatagccaacatcacctatagcaggcggagggacggaggaccgtccgtctcgttcactccgctggcacgtacagcgacgcgcacccctcagccccgcgcctcctacgcggcatcctccgcgccgagggcccctgcgcgctctaccgcggcatggccgcgccgctcgcctccgtcgccttccagaacgcgatggtgttccaggtgtatgcggnccctgtcgcgggtcgctgggccccgccacctccgagccgccgtcctacgcgagcgtggcgctggccggcgtcagcacgggggcgctgcagacgctgatcctgtccccggtggagctggtcaagatccggctgcagctggagggcggcgtcggggcacggcc

SEQ ID NO: 170959 - DNA, 798 bp, Zea mays
  Clone ID: MRT4577_87493C.1
ccactttcttctctccgcctcaggcggcgcgcgcgcggctagcttcccggcctcccagcaacatcccgccaccacttcctcctcctcctccgctctctccggccgcgcgcgccgacgtttttttttttccaacggaggccgccgcgcgctgcctttagtttcggacccatccatccatacatagccaacatcacctatagcaggcggagggacggaggaccgtccgtctcgttcactccgcgccgcgcgtggcccgatccagcccggccctcggatggtcgccgctggcacgtacagcgacgacaccagcggcggcgggtgcgggtccatggagttctggccggagttcctggcctccagcggcgggcgcgagttcgtggccggcggggtgggcggcatggcgggcgtgctggcgggccacccgctcgacacgctccgcatccgcctccagcagccgcccgccgcgggcgcaccacgccgccgcgacgcgcacccctcagccccgcgcctcctacgcggcatcctccgcgccgagggcccctgcgcgctctaccgcggcatggccgcgccgctcgcctccgtcgccttccagaacgcgatggtgttccaggtgtatgcggtcctgtcgcggtcgctgggccccgtcaccttcgagccgtcgtcctacgcgagcgtggcgctggccggcgtcagcacgggggcgctgcagacgctgatcctgtccccggtggagctggtccagatcccgctgcagctggaggcggcgttcggagcacggccccgtggagatggtccgtg

SEQ ID NO: 170960 - DNA, 307 bp, Zea mays
  Clone ID: MRT4577_87494C.1
gaggatgcatctagttacataatgatacttgagatggttacacagggatctgcatatctttccagacaagcgtgtctgctccatattgctaggatcaatgggaaaaaataatctaagctcggcttgggaggatcaagggacgatgcttctatagtcgatgtcgtgatgacaccattaaaaacttattatcttttttatagctctcgatactgtaaaattagataggatttatatctagtctattggagatgctctaacttaggaatccttttgctttcatgcctccttcccatcccagccaaaatgt

SEQ ID NO: 170961 - DNA, 174 bp, Zea mays
  unsure (1)..(174): unsure at all n locations
  Clone ID: MRT4577_87495C.1
gttggtttggacaggaaanttgtggtggantgggttnnttnntgtgatnttgaagattntanagnnnaagagagtggtggngnttatgaaaaggggtgggagtngttgaagggtggagatggtgtgttggtgtnaggaggttttggngaaagaggagtnnaagggaaaattttg

SEQ ID NO: 170962 - DNA, 172 bp, Zea mays
  Clone ID: MRT4577_87496C.1
tttggttttttttaaagggggttttggttttaacacaggagtcacaccaggcgggcctacccaggcactcaagagtaggcttgccccggctgaaaacagcaagcacactgacgttccatggggcctagcaggtggttaatactccaccacgcagactgctgaactggggtgc

SEQ ID NO: 170963 - DNA, 361 bp, Zea mays
  Clone ID: MRT4577_87497C.1
tattttgagacttgcaacgcaagtatgctctcatccctagatgctccttaatttgttactgccctattcgtgagataggatagaatgtcaagactcaaggtactagctaggtacgtataagaaactaactagccctcttcaacaagcatgccgtctatttttttcgatcctgatcagctgaactctgtctggagccatactggctgaagcctgaagctgaccactttgcaattttcaacaagccttttggtgatcgattctcaatacccgaattgtcgattcttaatggttgtaacactagctcggctctcattctgtaccaaccgcaatgttaaaaaccctatagcaccgcaccgaattc

SEQ ID NO: 170964 - DNA, 655 bp, Zea mays
  Clone ID: MRT4577_87498C.1
cccacgcgtccgcccacgcgtccgcccacgcgtccggctccccggaccggctgcggcgactggtgcagctcgcctaccaccgcccgcgccgcttcacgccggggttcgtgctccgcgacctcatccagtatctgtacagcgacaaagtagaagagaagaaggagctgatcaaggggataacgctcggtaacaaagacaaattccagcttacgcctctcccccagcaagttcttgtgttatggggagagcacgatcagatattccctgtcgagaaggcatttgaagtggcaagggaacttggcgcaaatgctaggttggaggtgctcgaggacaccggccacatgccccaggaagaggatccgaagcggttcaacgaggccatcctcaacttcttgcttccagctccagagtcgtctttgtaacgcgatgtgggagctactcaggcccaaggatcaccgggagagttcataatttaagatgtatcctgcctgattgatgcagttatttgttggctcgatatcacttccaaggttgatggaattagtaattaaatatgttattatggggattgctatttatctgtcaacagatttcttcccccaatgaatgcttgcatctgtcaaaaaaagaaaaaaaaaaaaaaaaaaggccccta

SEQ ID NO: 170965 - DNA, 642 bp, Zea mays
  Clone ID: MRT4577_87499C.1
ccggccggggttgtggtagatatcaacaaaaggaagaagaagaagagggggctttcggtttcccggcgtggggttcgtgtgtgtccgatccgatcattttgaggatcggatttgctgctagtcggtggacatcaccaccgcccagcaataatggcgcagagcatgaggattgtggcgctggccttggtggccctgctggtggtggcggcggcggcgcccgtggccaccgcgtacggctgctacgacgactgctacgagcgctgcgccaacggcaagaaagaccccgcctgcaccaagatgtgcaaccaggcgtgcggctccacggaccagggcgccggtgccgccggcgccgcgccggcttgatcgcccagcgcattcatcgcttcagctcgatataatcgctgctccgtcagcaacccacatatgattcgatcaatcttcctcctctaatttctcgaccccgtcgaatttttttcctttctattcttctactatactactattatctgtttgtcgcgttgatgtcatctcatacatcgatcgaggatcgactcatcgttttgtaattcctgcaatttgtaagtgtaatgacctctatgattcagtcttcctttgaaaaaaaaaaaaaaaaaaggggcggcc

SEQ ID NO: 170966 - DNA, 1959 bp, Zea mays
  Clone ID: MRT4577_8749C.1
ccctcccctagcgttatcgtcgcaccataaataaccatcctctcctcgcctttccccacatctcatcttcgtctgtgttcttgcgcgtacgcgtacacagccccgatccgaatcgtcctcctcgcgagcctcgccgatcccccactcccctcccctcgcttcaagatgcagatctttgtgaagaccctcaccggcaagactatcaccctcgaggtggagtcttctgacaccattgacaatgtcaaggctaagatccaggacaaggagggcatccctcctgaccagcagcgccttatcttcgccggcaagcagcttgaggacggccgcacacttgctgactacaacatccagaaggagtcaacccttcatttggtgctgcgccttaggggaggcatgcagatctttgtcaagaccttgactggcaagacaatcacccttgaggtggagtcctcagacaccattgacaatgtcaaggctaagatccaggacaaggagggcatccctcctgaccagcagcggcttatcttcgccggcaagcagcttgaggacggacgcacacttgctgactacaacatccagaaggagtcaaccctccacttggtgctgcgccttaggggaggcatgcagatctttgtcaagaccttgactggcaagacaatcacccttgaggtggagtcctcagacaccattgacaatgtcaaggcaaagatccaggacaaggaaggcatcccaccggaccagcaacgtctcatctttgccggcaagcagttggaggatgggaggacccttgctgactacaacatccagaaggagagcaccctccacttggtgctgcgtcttaggggtggcatgcagatctttgtgaaaacccttactggcaagaccatcactcttgaggtggagtcttcagataccattgacaatgtcaaggccaagatccaggacaaggagggcatcccgccggaccagcagcgtcttatctttgccggcaagcagctggaggatggacgcacccttgcggattacaacattcagaaggagagcaccctccacctggtgctgcgcctcaggggaggaatgcagatcttcgtgaagacattgacaggcaagaccatcaccttggaggttgagagctccgacaccattgataatgtgaaggccaaaatccaggacaaggagggtatccccccggaccagcagcggctgatcttcgccggcaagcagctggaggatggtcgcaccttggctgactacaacatccagaaggagagcaccctccatctggtgctccgcctgaggggtggtatgcagatctttgtgaagaccttgactggcaagaccataaccctggaggttgagagctctgacaccatcgacaacgtgaaggctaagatccaggacaaggaggggattcccccagaccagcagcgtctgatcttcgccggcaagcagctggaggatggtcgcacccttgcagactacaatatccagtgtctctgccattgcccatggatggtactgtctttcaaagtatttgtatggtttgtgtcgtgagtcgtgactgagctggtttcatggaccagttgtgttctcgttacccaaaactatcgtgcggcagcatatggcttaatcatgaataaatgtggtgtttgaatttaaaaaaaaaaaaaacaaaaaaaaataaaaaaaaaaaaaaaaaaaaaaaaaaaaaaaaaaaaaaaaaaaaaaaaaaaaaaaaaaaaaaaaaaaaaaaaaaaaagggggggcccccaaatagggagcttgtcaccccggaaataaattccgaaccggcccctggaggggacccaattttcccaatagggagccctataaaaattgggggaaaaaatgacaaaagctgttccctggggaaaaatgttatcccttaaaaattccccaaaaaaaacaacccgaaagctaaaaaggaaaaaccggggg

SEQ ID NO: 170967 - DNA, 865 bp, Zea mays
  Clone ID: MRT4577_874C.1
gaatttttctctgttccatttgggctttttggtaaatctgcctatgcatgccgtgattcttcttgtagtgatgggactactgaaggactaattaaggtaagagatgcatacccttttggtgtggaccctgtttggcatggtagccgcagcgagctgccgtttctcaattcactgaagatgaagatgtccattcttcttggagttgcacaaatgaaccttgggattgtgatcagctacttcaatgcaaaattttttaggaacagtcttaatgtgtggtaccagttcattccccagctgatcttcttgaacagcttatttggttacctggcataaattattagtattaagtgaggcacggggtcgctggcagatctgattcacagtatgatctacatgtcaactcacaatatctgagttatatgggtcacactatatgaatatatgattgcattcatttccttcaaatctagactcgttcggaatccgctggtgaaaatggatcttctatgatcatgtcaattcctgacatttaaaacacctttaacagcttaggttgaagtcaacgccttggcacaactaatgacatggaaaacaacggtctaggttaacatgggcttcagattgcattgctgggaaagatggaatggaattcaaattttggtggccgcacaagtgtgaagacttgaattcatatatatacttagttaggctcaacgttagcacaaacagttgatccccaaaattttcaattagtattttagtttggatttagagtacacttatgtataagttatttgataattgcttgtttatgagatattgaatgacacttgtctatattatattaattataatgttattacat

SEQ ID NO: 170968 - DNA, 626 bp, Zea mays
  Clone ID: MRT4577_87500C.1
ttttttttttttttttttcactgtacggcggcgtagatattaatttatatgaaaaaacgtgctgaaagattacaatatttactggcatgaaggcgcgccactgccaccaccatcgacaaacggagtcgacgacgaagatcaagccaacaagcatcaaaacattggagacccgatactgccctcgaagctacagctgatcacgaaagatctgccatggctcgtcggtggcgcggcatcccagcaatccaggttcgcattctggaagcgaaccgtggaccgcgcgaagcgcctccccgccatcctcgtcaactccttccccggcgaaggcgcaggcgactccgaccggtatgacccgccgccgggccagcgcatcctccacgtcgggccactcttcaacgtcaacgtgtcgctggctgctggtgcggcggagaataacggctcgtcatgcgtcccgttggagaagccgaacgctgcagcggccaccaacatgtggcaggcggactccacctgcatggattggctggaccggcgcagtcccgggtcggtggtctacgtttccttcggaagctgggtcgcgccgatcgggccggagaggatggccgagttcgcgctcggtttgcaggccg

SEQ ID NO: 170969 - DNA, 418 bp, Zea mays
  Clone ID: MRT4577_87501C.1
agcaaggcagtatccttggtatatcgtgacattttcaacaatttcactactagggaaatgggccttgctatggtactctgagtctctgacaaccccttaggaaatcaccttacacctacttgtgttgaaaaaaatgctaactatatataattgatctaacatgcaactatcatataccttttcatgacatgtcacacctgtgacatagtaattcatgttcgcgtactcgcctatacacatttctcttttgtttatgtcacatttaagaactaaaaactttactcatgtcacattcaaacaaaaacattgcaaggaagaattatgcaagtgtcatgttgcaaaaaaaggttataaggaagtgacatattctgacaagaagtaataggaaatcacgttagaatactatatcacttacatg

SEQ ID NO: 170970 - DNA, 193 bp, Zea mays
  Clone ID: MRT4577_87502C.1
cttacagtcgatttaacactgatctcagtgggggcagaagctaacacataaattaggcctttaatgaaggacccatttctttgtgtaggaagttctccacagcagcacagtggcctcttcaaggtacttgatgaaaccaatgtccttgtcttttttgtggaaacactgggtggtggggggggggggtacttcc

SEQ ID NO: 170971 - DNA, 1784 bp, Zea mays
  Clone ID: MRT4577_87503C.1
agacagagcgggtgatctgaagaccacgaccccgatcggcgagaggtgcgtctgaccgtccggtcgccggcgtccataaaacccacccccctcccctcccacgcgaggcgatcgacatttcaattcgggcgagagaagtgtctgaaagttgacatttcaatttggccgcccagtccagtcgtcgccatggcgacctacgacaaggcgatcgagtcctacaagaaggcggtgaccacggcggcgtcgctggcggcgtcggcgatgctggtgcggggcgtggtgaacgagctggtcccctacgaggtgcgggacctgctcttctccggcctgggctacctgcggtcgcgcatgtcgtcgcggcacacggtggtgatcgaggagacggaggggtggaccagcaaccagctgtacgacgcggcgcgcacgtacctggccacccggatcaacaccgacatgcagcgcctccgcgtcagccgcgtcgacgagggcaagagcctcatgttcagcatggaggagggggaggagatggccgacgtgcacgccggcgccgagttcaggtggcgcctcgtctgccgcgacggagccggcaacggcgcgggcaacggcgccggcaacggccacggccacggccacgcccgcggcggcagctaccgcgtcgaggtccgctccttcgagatgagcttccacaggcggcacaaggagaaggccatcgcgtcctacctcccgcacatcgctcgccgaggccaagaagatcaaggaccaggaccggacgctcaagatctacatgaacgagggcgagtcctggttcgccatcgacctccaccacccgtccaccttcaccacgctcgccatggaccgcaagatgaagcgggccgtcatggacgacctcgagaggttcgtcaggaggaaggagtactacaggcggatcggcaaggcctggaaacggggctacctgctctacggcccgcccgggaccggcaagtccagcctcattgccgccatggccaactacctcaagttcgacgtctacgatctcgagctcaccgaggtcaactggaactccacgctccgcaggttgctcatcgggatgaccaaccgctccatcctcgtcatcgaggacatcgactgctcgctcgatctgcaacaacgtgcagacgaagctcaggatgctggtaccaaatccaatccttcagaggacaaggtgacactctctgggctgctcaacttcgtggacggcctctggtcaacaagcggagaggagaggatcatcatcttcacgaccaactacaaggagcggctcgacccggcgctgcttcggcccggcaggatggacatgcacatccacatggggtactgctgcccagagtcgttcaggatcctggcctccaactaccactccatcaccgaccacgatacgtaccctgagatagaagccctgatcacggaggtgatggtgaccccagcagaggtcgctgaagtgctcatgaggaatgaagaccccgacgtcgcgcttgagggcctcatccagttcctcaatgggaagaaagaccacgccaaggatgatagtcgtcaaggttaaaatgtggaccatgtgagaccaaaggggacgagaaagagacgacgacgaaaaaaagaaaaaaaaaacatgtcccggtcgtcgatcaaaatctcaatgatgccagagtagcgtggatatcaaatatcagcaccatatcagtagcgccagtataacctgccgacaatgtatggttttcatattttaataagatatcatttttttttgg

SEQ ID NO: 170972 - DNA, 601 bp, Zea mays
  unsure (1)..(601): unsure at all n locations
  Clone ID: MRT4577_87504C.1
ggnaacccttgtggttgtgggcaggnaagaacacagggnagaaggggacgagacggacggcttctacggaggcatcaggaagctgcacaccaaagacgagatatcaacgtggcgacggttctggcccgtcgatgtcctcaactgaagtgaagatcgtattcgttatgcatctgcagactgcagccggtctgagcgcctccgttccaaatcccccgccccgtgtacagttacggagagctctctgcacacgcgtctgaaataactccggaacccttgtggttgtggggggtctgaaggatctattttttgctaaaaaaaaaaaaaaaaaaaaaaaaaaaaaaaaaaaaaaaaaaaaaaaaaaaaaaaaaaaaaaaaaaaaaaaaaaaaaaaaaaaaaaaaaaaaaaaaaaaaaaaaaaaaaaaaaaaaaaaaaaaaaaaaaaaaaaaaaaaaaaaaaaaaaaaaaaaaaaggggggggccctttttaaaaaaaccaaattttattccccggggctgggaaaattaaaattttttttttgggggccccaaaatttaattccggggggcccggtttttaaaaaggggggggtgggggaaaaacc

SEQ ID NO: 170973 - DNA, 439 bp, Zea mays
  Clone ID: MRT4577_87505C.1
aaccggaacgaataatgcaaattgagactacgcaccaactagtcctttggtttgtatcttaatataaaggtttcttttattgacggttcttcatttctcgacatctctcacgatctcaacaccaatcctttctccgcaaaacttctgaagaaggaggtctcagttttggattctactcacttatagatgaaatggttggagcaagacgagagcgcatgtgagttacgagaggaactagacagagttaattcagagaacaagaagctaacagatatgtcagctacagtctgtgagagctacagcgatttacataatcatttggacaagtttcagagtcgccacagccatgatatcgatcagaccgatataccgagtgagacaatatcacatgacccggatgaattcctaaggctttcctattggactcagtagtggaaaa

SEQ ID NO: 170974 - DNA, 623 bp, Zea mays
  Clone ID: MRT4577_87506C.1
atgcgaatacgtgcacataaaagtaacataatgagctgaacaggaaattgtttatagcagtaaaacaattcaatctaaaaaatatacagtatgagcatgcttgtttctgtaaaaactcatgcactttgtaacataaattacacagatgagcatcattttttccctcaccccttctcgtatgctttagtctaaaatagtcgtaggtcataaaacaacggtctcttttatgaattatgcctggatatatagcaagcttctcccttgttggccaaactacaattactcatgttccattccttagcatgcagcacgattgtgcagcaattccatttgctgctataaggaagacaagggtcttctctaagcctgtttataatagattccttcggttgtaagcaatacatattaattcagtgaacaaagcatcaggagaggagtaagaggtaatccatatgagtattatcactaagagaatcgaagtaaaacagaagtgcaaagcatgccttagggattaatcaatcatcaatcctccttgagcccacccagaaatcaagtgacgaagtagacatcgtcataagcagagtttaatcagtatacaatagaatttggtgagacaactgcta

SEQ ID NO: 170975 - DNA, 275 bp, Zea mays
  Clone ID: MRT4577_87507C.1
ccaaaggacctctgtgactcatagaagggctagctaaatcctgaagtagcatagtgggacctggtctacaatgtatgcacatgcactgacagccttgctgtgccacgtgtctcaccaagactcagttgggaaagagcgtcatattgccaacaggttgggtttctctggcctacaactgactaatgggctcgttatctttggagacccctaggagtgtccagtagtctcagtgctatattttgcaattgcagtacttaataaaaattgttgatagg

SEQ ID NO: 170976 - DNA, 654 bp, Zea mays
  Clone ID: MRT4577_87508C.1
ccggccgggccgggcagtgattggtccaggaaagaacattgaagaaactgatattgggcagctgccctatctccaagccgtggtgaaagaaactttcaggctacatccctccgtcccgctgctaccgcggcgtgctccagtcgacacaaaagtaatggggtacaccatccctagaggctgtcgtatgttcataaacatatgggcagttggtcgagacaaagaaacatggcctgaacccgagacgtttatgcccgagaggtttttggggaagacagttgatctgagaggtggggattttgatctcatcccgttcggcggaggacgccggatctgccctgggatgccgctggcgattaggatggtgcatctgcttcttgcgtcactgttgaatcagttcacatggaggcttccagttgagattgaaggaagaggtgttggcatggatgaaaaatttggcctgactttgatcaaggctgtgcctctgtgtgctatggctacaccaatttgactttataatgttgtgaccgttaaatcgtgcatatgaccgtgaaaacactgttttgcacgagcattgttgatagtgtggaatttaaaataagatataagacgagtgagactttggaaaaaaaaaaaaaaaaaaaggcccctagggcc

SEQ ID NO: 170977 - DNA, 309 bp, Zea mays
  unsure (1)..(309): unsure at all n locations
  Clone ID: MRT4577_87509C.1
cggacgcgtgggttttggctaagatcaagtgtagtatctgttcttatcagtttaatatctgatatgtggaccatgtgtttacttcgatattaaatttatttttcgtgggggagggtccactacagtggcttgccactgggctcctcaagcgtcgctcggccgttgcactactgtctgagcctggcgcaccccttaaaaaaaaatagataatttaataaaaattttattaaaattaaaaaaataattttttaaaaattcaaaaaattatatattaataaataactttatttttaaaaaaaattttttntg

SEQ ID NO: 170978 - DNA, 659 bp, Zea mays
  Clone ID: MRT4577_8750C.1
ttttttttttttttttatagaattggtggtgtatgcttttttgggcgacgagcacgaaactgcttgcaacgtcggcagcagatctactgcagcagtagaacgcaacaaaaaaactttaccttgtttctcgacacagcaacaaaaggagagagatgaaaaaaaaatagatcacaacaaacaaacaaattatttgaggcgatggggtaatggtccctgggcgccaagatccatgatatgcttgctatctatctcgctcccaagtcccaaccgcccgtctggagtggagtcagtgtacgcagccaactagaccgtggaccacccaatccccttcgcgattcttgtggctcatcgtccgatctttcatctcccctcaccggaataatctctttttttttaacctcaagttttgatttttttactgaagttttgatttgagcagtaaaaaataagtaatctcttaatccttttcccccaccctaatcttttcccaaacaaattggagcaatgcagagtgtggtggcgtcctgagcctccaccgggacgtgcagacctgcgggtaccaggacgtgcaggtgatgtggaacatgctgagctcggagaaggaggccgcggccggcgcgctgccgaagccgccgcggcggaagcgaccgtcgtcggtc

SEQ ID NO: 170979 - DNA, 336 bp, Zea mays
  Clone ID: MRT4577_87510C.1
cccacgcgtccggggcactgtgtttagagcccttcagatctagtattgtggttcactggcggccaccaggctaaaccctagaaccttgccaagatgaggtctttgctagcggctcagactctagtctcccgttcccttttttcagcgcgccatctaagcggagcacacttacccgtcacaggcgtcggctgtatcgcgctggcatgtatagcgccagttccaccgccttgtttgtcgcttccatcctctatggtgatgcctcgccgtgctgccacacgatatttgttcatatttacgtctggtactgtagcacaagtcatgttcagagcctatgtt

SEQ ID NO: 170980 - DNA, 831 bp, Zea mays
  Clone ID: MRT4577_87511C.1
ggtaccactcgggctcggccggggaccacgaacccgcgaatgcttccgcatccatgatccccctatctacggcgagggccatatcaccttgccacatccctgcagctctcccacgcacctcaattggactaggaaatattttccggcccgcacatggtcggccctctttgtacctggctgcctcacgtgcttctggaacctggactcgcaatgacgtaaaaacataccagcaccgcagagtggtgagaggcccagcctacgggcaatgcggtcaggggcatattggactgttcagcacatcgacaacgcggagactgggtatcgaggacaaggcaaaggaaccgtcggcttctcggaataatgcagagcaacatgttccacctacttcggcatccgccaaactcgccaccaccatcaaatctacgctcaaactcgacaagcctcgccatgaacaaatctacaatctacccaacatgcttactttctcccgcctcatagcaactcctgcagtcggttacctcatcattcacgaccagcatctctatgccttctctctcttcatctacgccgccttttctgaccttcttgacggctggatcgcccgccgctggaacctacagactgtagtcggtagcgtagtcgaccccatggccgataaattcctcatgacaacactggtaacatgtctcgccgtaaacggaagtctacccatgccactagcttgcatcatcctcggaagagacgtcagcctcgccatatctgccctctactaccgctacgccagcctcccagcgcccaaaaccatggcacgctactgggacttcagcctcc

SEQ ID NO: 170981 - DNA, 612 bp, Zea mays
  Clone ID: MRT4577_87512C.1
acaagctttttttttttttttttttttggctgtttttgctttttttttttttttttttttttttttttttttttttttttttttttttttttttttttttttttttttttttttttttttttttttccctaaaaaaaaaccccttcccatgcggggggccaattgggcgcttggccccccccccccccagggggggggggggcccccacgttcccctgcggcgaaaaggaaaaacccacgcaaaggggggaatacgccggggcccccattaattaaaaaaagcccccgggccgcgcccccccaaggggaaaatcccgccaccgggggggccaagaccggggggccggcgctgggccccaagctggggaaaaaagggagcaaaacggttcccgggggaaaagtgatacccggcaaaaccccccacaaatataaagccgcgaggcaaaagggccaggccgcgggggcccaaggggggccgcacccacccttgaggggagcggacacccggccccctttctcactgggaaaaccggggcgccccctcatataaaaaactgcccccccccccggggggggggggttgggaaatggggccttttctgcgttcacgaa

SEQ ID NO: 170982 - DNA, 444 bp, Zea mays
  Clone ID: MRT4577_87513C.1
gggcaaaaagaaacaggcccaaaaaacatccaacagttttgtgggggggaaaaaacctggggggggggcatttttctttttccaaacaaaaaatttttttgggccggtggaagacccctaacagggtgggggggggattttttcctaaatttccatgatacatccggggctcctaatcagttcgcattttatttttaagcctttttcccaatgttgctggacaaccagtccaggcccttttacaaacccttgccagttgggggacaagggctttggatttaccaaggtccctgccccagggggggtaatccaagcttggcagggatctcaacaacttttatggctttaggaaaatttttcttgttggcgaaaacaagccgcacagcattccgtggcttatccttgttcaacatcctgtgcagcttatttttggttttaaaaaca

SEQ ID NO: 170983 - DNA, 446 bp, Zea mays
  unsure (1)..(446): unsure at all n locations
  Clone ID: MRT4577_87514C.1
ggcggtccaacgnaggagcagcagcagcagcaggccggctgccgtaggatcggcataccattcagtgcttgctaccatggcatggggtattgaagaagccttgtagagggtcaatgcgcccaaacattgggtgctctacaagcttgtcggatcttttgttaaccaagctattttctggaccttacagtccagagcagtgccttgctctgatcctaatcttcaagaacaggctcaagtatgctcagaactaccatgcggccattcctatactgatgcaacgccatatacttgataatggtaaggacacgactgacacaacataccctgttgggttaatgaactgtcattttcatccctaaaacattggagatctactggctgctttatgacaccaaaggacgattgcgtattacacccatctgggattaagatgccaacttcaagct

SEQ ID NO: 170984 - DNA, 397 bp, Zea mays
  Clone ID: MRT4577_87515C.1
accgaggtagagactacgattagtacccaggtgaatagcagcaccgcgactgtttcctacccctctcccaaaaagggtaaggataaggagaccgcctctcctggtatctagacctgggcgaagaggaacatctctcggggaaccactccgcgaaggtgtaaggtgccccgtgtgctcgacgcaacaacaaccttcgtcttcgcgatcaaggataactaccatcagaccgtcacaaccgaggcaggtctcaaggttcgaacaaccaccgctattacccgttaggagggtttggttaccactagaaccaccttgctgacctggaaggagtacgtcttcctaactaccactacttaggacccgcaggttgccagaaggattggtcctacgtctagagtgt

SEQ ID NO: 170985 - DNA, 279 bp, Zea mays
  Clone ID: MRT4577_87516C.1
ccagtagtcgtcgcgttttcagctaggcagatctgagttagccggctgatccgatccgtgctcgtggcagtgtgtgtgtgcgtgtgtgtgtgtgtgtgtgtcggtggagagatgtccacatcttacgctcccatggcgagccatgtgatgaagagcagcctcttcgtgcactctatgccgaggtgcctgtcatgcgctgctgcgctcactatgcggcccggccggttcaccgtcaatgccatccagcccgagaaggcaacgtaccatgttgtgcagccc

SEQ ID NO: 170986 - DNA, 253 bp, Zea mays
  unsure (1)..(253): unsure at all n locations
  Clone ID: MRT4577_87517C.1
cacgaaagctcggaacccggctcgagggggtaaaacgagggctctcacgacggaagcaggacangcnacaacgagggatttgagccagcagcgaacccnaccccggcggcaccaaaaggaacngggacgcaaacagaagacaagacgaaggccagcggccaaacaccaggagcacccaagccaccggccaagccaaangaaccagacaggacccagaagaaagaaccagcagcgcacaaagcacangagacac

SEQ ID NO: 170987 - DNA, 274 bp, Zea mays
  unsure (1)..(274): unsure at all n locations
  Clone ID: MRT4577_87518C.1
taccggtccgganaccgcggcgggagccacgcgtcgacccacgcgttcgctccaaacccagcgccgactgctacgagcagtctcacgcaagctgcgggaaacaaagcggtcaacatggcatttcacccaatgtgctcgtagcggaggggcgctgtggccgtggcgctgctgctggcagaggacagccacgaccgttgcagcacgctattacctgcggccaagttagcttcgatatggagcactgcctatgctacgcccgctgaacggcttccgc

SEQ ID NO: 170988 - DNA, 751 bp, Zea mays
  Clone ID: MRT4577_87519C.1
cgccagaaataatcaagggagaaggccatggcagtgctgtggattggtggacctttggtatattcctttatgagctcctatttggtaagacccctttcaaggggtcaggaaaccgggctacactcttcaatgttgttggtcagccccttcggttcccagagtccccaattgtgagtttctcagctagggacttgataagaggattgctggtcaaagacccgcagcatcgtcttggctacaaacgagggactactgagatcaagcagcacccgttctttgagggtgtgaattgggcgttgattcggtgtgcaagccctccggatgtaccaaagcctgtcgagctggatcgcccaccaaaaccggccccagctaacgataaggttgctccagctgccaaccagaagggcccagataactttctggagtttgaattcttctagagttgttttcctttcagttttgtaatgtgggttggtgcatgcaagctggtgtatgaaaggaggaagatcagttcggaggcgtatactgtgatgactggtgatgctctattgtaagctgtagttctatttcgagtagctcttgttcgttttttttctctccattgaactgctaaagaccctatttgtaccgggtcaatgttgcaattttttttagaaaatcttgtggtgcttaaaggacacaggggaatactttcaccctggcattgtaaatcctgtttgatttggcatcaattgcaactgaatttcctttc

SEQ ID NO: 170989 - DNA, 1966 bp, Zea mays
  Clone ID: MRT4577_8751C.1
ctgtgttcttgggcgtacgcggacacagccccgatccgaatcgtcctcctcgcgagcctcgtcgatcccccactcccctcccctcgcttcaagatgcagatctttgtgaagaccctcaccggcaagactatcaccctcgaggtggagtcttctgacaccattgacaatgtcaaggctaagatccaggacaaggagggcatccctcctgaccagcagcggcttatcttcgccggcaagcagcttgaggacggccgcacactagcgactacaacatccagaaggagtcaacccttcatttggtgctgcgccttaggggaggcatgcagatctttgtcaagaccttgactggcaagacaatcacccttgaggtggagtcctcagacaccattgataatgtcaaggctaagatccaggacaaggagggcatccctcctgaccagcagcggcttatcttcgctggcaagcagcttgaggacggacgcacacttgctgactacaacatccagaaggagtcaacccttcatttggtgctgcgccttaggggaggcatgcagatctttgtcaagaccttgactggcaagacaatcacccttgaggtggagtcctcagacaccattgacaatgtcaaggcaaagatccaggacaaggagggcatcccaccggaccagcaacgtctcatctttgccggcaagcagttggaggatgggaggacccttgctgactacaacatccagaaggagagcaccctccacttggtgctgcgtcttaggggtggtatgcagatctttgtcaagaccttgactggcaagacaatcacccttgaggtggagtcctcagacaccattgacaatgtcaaggcaaagatccaggacaaggagggcatcccaccggaccagcaacgtctcatctttgccggcaagcagttggaggatgggaggacccttgctgactacaacatccagaaggagagcaccctccacttggtgctgcgtcttaggggtggtatgcagatctttgtgaaaacccttactggcaagaccatcactcttgaggtggagtcttcagataccattgacaatgtcaaggccaagatccaggacaaggagggcatcccgccggaccagcagcgtcttatatttgccggcaagcagctggaggatggacgcacccttgcggattacaacattcagaaggagagcaccctccacctggtgctgcgcctcaggggaggaatgcagatcttcgtgaagacattgaccggcaagaccatcaccttggaggttgagagctccgacaccattgataatgtgaaggccaagatccaggacaaggagggtatccccccggaccagcagcggctgatcttcgccggcaagcagctggaggatggtcgcaccttggctgactacaacatccagaaggagagcacccttcatttggtgctccgcctgaggggcggtatgcagatctttgtgaagaccttgactggcaagaccataaccctggaggttgagagctctgacaccatcgacaacgtgaaggctaagatccaggacaaggaggggattcccccagaccagcagcgtctgatcttcgccggcaagcagctggaggatggtcgcacccttgcagactacaatatccagaaggagagcaccctccacctggtgctccgtcttcgcggtggttattgagccatcagtcgttgaagctgctgctgtatctgggttatctagtgtctctgccattgcccatggatggtgctgtctttcaaagtatttgtatggtttgtgtcgtgagtcgtgactgaactggtttcatggaccagttgtgttctcgttacccaaaactatcgtgcgaccgcatatggcttaatcatgaataaatgttgtttgaattttaaaaaaaaaaaaaaaaaaaaaaaaaaaaaaaaaaaaaaaaaaaaaaaaaaaaaaaaaactcgagg

SEQ ID NO: 170990 - DNA, 465 bp, Zea mays
  unsure (1)..(465): unsure at all n locations
  Clone ID: MRT4577_87520C.1
ggggggggggggaggnnacccaaaaaaacccacttattggggggcaaaaaacccaaccggggcaaaaccacccccctttttggggggccgggtttaaatccccccaccaaaaaaaccttggcccccaaaaaaagcctttgggggccttaaaccccaaacccggggagggccctaaagaaacccaaccagggccatattggcccccagtttcccttccccccccccgattatagccccaaccggtatcccccaccccctttggggttttcctgggggcccagggaaaaaaacccaggtttccggggcccagaaccggggggccacccgcccggtcccccagggagcccccccaaaagcctttttttggccgagtgggggaaaaaaaagccccccgtatgagagagggcccccttttaatgggggggggcgcggggccccccgttatcccccgggcccttggggggg

SEQ ID NO: 170991 - DNA, 373 bp, Zea mays
  Clone ID: MRT4577_87521C.1
tatagggcgaattgtgaaccgggccccccctcgaggcgggcgctatatttttttcgagcaagctagcaccaagtagtagttgctggcgctgcaacagcagaacaaacaggcagtataagctggagagacaagatagatcgaggaagaaggacaaattgggagctagcttagctatacagagcgatcgcagctagcaatggccaagcaacagcaggaggtgtacttcgtgttcatgaactttgaccccgggttcgagcgcctgacagcaaaacggtcagccaaggagggttcggcacacgctgcacgcgtacctgagccacaagcacgacaagctgctcgccaagctgctccagcccgactcctacacggaaga

SEQ ID NO: 170992 - DNA, 381 bp, Zea mays
  Clone ID: MRT4577_87522C.1
attcggctcgagcgcacctggcgttcattcccgttctaaccaagcaaaacccacaacactggccaggatcggcgcggtcagctgccgggcctgcctgcagctccggccgaccgtggcctctaaaaaccctcaccctatgcctgctccgcaggcgcgggagcagggtgaaaaaatgccgggaggagatcattacagaccaaggactgctatgtgaaaaccatatccatagagcacgctggaagcaattcttaatcgagcacaggaatgtgaatgacggtcgggtctaagcttcactatcaaagaggcaacatgacggacgtggttctataccatgctgatgatcaggacatcatacccaatgattggactattgaccatgaa

SEQ ID NO: 170993 - DNA, 430 bp, Zea mays
  Clone ID: MRT4577_87523C.1
aagtcccgggccgacccacacgtcagcccacgcgtccgaataaattaactggtgataaatattctgtaacagagatagtaacacgttattgcctagcaatatctaagattacttttttcacaataaaaaaaaaaaaaaaaaaaaaaaaaaaaaaaaaaaaaaaaaaaaaaaaaaaaaaaaaaaaaaaaaaaaaaaaaaaaaaaaaaaaaaaaaaaaaaaaaaaaaaaaaaaaaaaaaaaaaaaaaaaaaaaaaaaaaaaagggggggccccccaaagggttcaaacttaaattccgggggaaggcaatttaaaaccccttcaaaagggccccaaaattcaatttcaggggggtccttttaaaaacttcgggatgggaaaaacccgggggttaccaaatttaaaccccttgaaaaaaaacccccttttccc

SEQ ID NO: 170994 - DNA, 277 bp, Zea mays
  unsure (1)..(277): unsure at all n locations
  Clone ID: MRT4577_87524C.1
gacgcacgcgtccgcaatganccaaacacattcaagccaacaatgaaccgccttcaagaccccgagccaaagcgccacattggaggggctcaccatcaccctactctccaccgaaatcacatcaacaatggcgacggagccaacagtgcttcatgaccccgctgaacaccagcgcctcaccaaggagacggcctacgtaaactggataaccatagtccacgcgacggatccacgaaaaccaccagacgcaacacgaggactaccacaccaacaagct

SEQ ID NO: 170995 - DNA, 242 bp, Zea mays
  Clone ID: MRT4577_87525C.1
gcgcgcctcactagctagccttctctaactttgctactgcaagtgcccaagcctgcgacgacgtccgagatgtctacggggaacctggcgggccctgaccagaagcttgccctcgccaagcgctgcttccgagacgcgactcttgccggcgcttaagccgcaacaggtgccactaacaccgcctcgagtcccaccctttcgagcgagcggatgccggcgagggccaagggcaaccataaccc

SEQ ID NO: 170996 - DNA, 854 bp, Zea mays
  unsure (1)..(854): unsure at all n locations
  Clone ID: MRT4577_87526C.1
aatccaagttttcagccacatattgaatacaagagctagtgcattcaatacaagacacaaatagagtgaatcaaaatctctccaagtcacaattccacccaaagaaatagcgactagaagagagagttttgttgtgtttttttgagctcttgcgcttggatcgcttttcttctttctctattcttacttccaagttcattgtaatcaaagcaagagacaccaatcgtgtggtggtcgttgtggggacttagtgtcccaattgattgagaagagaagctcactcggtctaggtgaccgtttgagagagggaaaggattgaaagagacccggtctttgtgaccaactcaacggggagtaggtttgcaagaatcgaacctcaataaaacaaatcactgtgtcatccgctcttattcgcttgtgatttattttcaccctctctttcggactcgattatatttctaacgctaactccggcttgtagttgtgcttaaactttataaatttcagacttgcctattcacccccctctaggcgattttcactctccaccaaccccgtccagaatcagcacacgaagcatgtcgagctcgacctccacttcgttcacgagcgggttgacgtcagagatgtgcaagttcttcatgtcccgactggccgaccacctctcaattcaccgacatcttcaccaagagtctcccctacgtcggtgtttggaggagtttctgtctagtctcttcatctccatggctagagtttcgactgggttgttagagtaaccgtgtattttttgtaatggggtcttgtgtaatgagcctatgccncagaatnttattataaatggagcatccactctg

SEQ ID NO: 170997 - DNA, 686 bp, Zea mays
  Clone ID: MRT4577_87527C.1
ctcgaggccggccgtgcgcacaggatcagctgtgcgtgctgtgccgtgtgcaccgacccaccctctctctctctcccccgaatcagcccgtacgctggacacggcgacgccagcagaggcggggcatcgaatcggctccggcagatgccgctcccttccattccagcctctcggacgcccacgcccatgtgcggggatcaggacggccacccgaagaatcccgaacgccgaacctgacagatctcctctccaaagcaaaagcaggcacgggcatggccaggtgcgcttcactcggttccgcgcgatcatggttcacgatgatgatgacgattccgaatgcggatgatgccatctagcagctggaaacttcctgccgtttcagtcggtcaccgattacttcatcgtcgttaaacaagtgttttcgggagcaaatcacgcatcgacccggtcgccgagaagccacgcctgcttaaaatgcaattagcacggcgcaagtggggcgttttgttaggacaaaactggtgaaagaatactccagtcctgccgctgcttcctctctattttaaattgtaaattatttttatcttttttttttaaaaatatgtttcttttttgctatatacttcatttacactataaatattaattagtattttatatgtaaaaaaaaaaaaaaaaaagcgggc

SEQ ID NO: 170998 - DNA, 544 bp, Zea mays
  Clone ID: MRT4577_87528C.1
acgaacattcctgggagaagcttttctcatttgctgctgatacaaaccgtttcttgctctcctatctgtattgtcaaaacacttcgtctcttgtgctacacccgcttgcctccatcgccggcggctttcgcgtacacgccggagtcggttctcaggatgatgatggtggtgtccttggacacggagatcgccaagttgtccacgtacgacagcgggccgggcctgatcagcggctgcgtatcctccatgtcacggtcctcgtcgtccaggtaggcgtacctcgccgcgctctgcgagggcgcccacatgaggcagaaggcgcagagcagcgagaagatgagatgccacaccctctggatgacccacgccgtgcgccaccgctcgttgtactcatccgtcgacttgaagtggacctcaaatgtgatccagccgagtgacacgaccaccgtgatgatcaagacgttgttcaacctcctgtacatctcaagcttcactgtcattcgtttcgccctgagcttgttcagcgtcttcgacagcgagctga

SEQ ID NO: 170999 - DNA, 550 bp, Zea mays
  Clone ID: MRT4577_87529C.1
ccctcttttttattttttattttttttttttttttttttttttttttttttcctttatttacctttttttttcttaggttttaactgaacacaaaaccagccaggagtaacaggggccaacgaaccacaaaccctgccggggggagcaagggccacgctggccaccagggcatgaccacaggactaacagctgacccggagcgcccggggaaccaaaaacacacaagggcaacaacaaacgagacgaacgaaaaaaaccctggggaccagggaaaacaacaaaggagggaaaaggataggggggccgggcggaccccaccgcgcaaaaacgaaaattcgggccgggggggcccaacccgcaggcacggcaggcaccggcggagggggcaccaccaccaccgcaggcgccgccgccacagtagccgccaccaccaccggaggaaccggcgcccccataacggggcccgccaccgccggagccggcgcccccacggccaccaccgtaaccggcggcgccgcctccaccaccggcacgaaactgggccccgcc

SEQ ID NO: 171000 - DNA, 338 bp, Zea mays
  Clone ID: MRT4577_8752C.1
tcgttttttttttacctggagatggcgtggttccttgtgggggcgtaacacatgacattgcaccggtcaagcaaccggtacatgatctccctctggtactagctagactacatggatgtcaaggggcgtatgagccgtgtcgacatgcacaggctaatcggatatgtgagggctttcacgtacaacagcatctcatggcagagcgagcgatgcaagaagacccccaccaacaggccctgggacaactgcttacaccgttaccccgtcaatgttgcgaacgactgtcaagctttgacctaccgtctacggatatgacgacaactggcgagatactgcgg

SEQ ID NO: 171001 - DNA, 431 bp, Zea mays
  Clone ID: MRT4577_87530C.1
gggagaccaatatcacattaaaatcgggaaagggaactttttatttcgggggggccacatacctcatccaaaaaacttttttattgaattacctctaaaaagcaatctaaaagagggcccccccaatgatgtgttgttggaaggaggctgctgggtttgtcaaaacaagttgggcaaagggcaacaattgttgtatttgtaaaagggttgcggggttagccccaaactgctggtaaaacggcaacaactgttgttgggtcaaaaaggaaacccggcttgctgaacctagctggctaaaggggagaagaatttgctgctgcaaaaaagcagcggggttcagggcggccaattggttaaaggaaaaagttgtttgttgttgaaagtaggcaatacctacctggctaaaggggaataggttgttgctgcaaaaa

SEQ ID NO: 171002 - DNA, 523 bp, Zea mays
  Clone ID: MRT4577_87531C.1
gggagaccaatttcacattaaaatctggaaatgtaactttttatttttggttggccccatacctcatccaaaaaacttttttattgaattacctctaaaaagcaatctaaaaaagggcccccccaatgatgtgttgttggtaggaggctgctgggtttgtcaaaacaagttgggcaaagggcaacaattgttgtatttgtaaaagggttgcggggttacccccaaactgctggtaaaacggcaacaactgttgttgtgtcaaaaaggaaacacggtttgctgtaactagctggctaaatgggaaaagtatttgctgctgcaaataaacagcggggttcagggcggccaattggttaaatggaaaaaattgttgttgttgaaaataggcaaaacctacctggctaaatggaaatagttgttgctgcaaataaacagcagggttcaatggaaacagttggttgaatggaaaaaattgttgttgcggaaagtagggaaaaaggtttgccaaaactacttggttgat

SEQ ID NO: 171003 - DNA, 872 bp, Zea mays
  Clone ID: MRT4577_87532C.1
cctcgaggcggccgggccgggctcgagggcggctacccccaatcgtgttctccatctgcaagccctcgtcatacctcttatcgatagtcgtccctacgccctggatcccgtccagaccccatcaccaccggatctcatctagaccgtgccgcctctagacctcgtctagccgtcgagcctagagctcgtgaagccgcctttcctctaatctatacagatcgacaaagacgaccatgaagacgacaggtggagggatttgttctctcaaccggatccactcccccacgacgccttcaatttcttgtcgcattctgattctcctagtgtcgtccatggaacccatgtggtttggatctgaactcataggttgaagacttccctaatctctccctttactctgacatgctttggaaccgtggtggacgcacactaggtgtgcgagtgtcgcgtggtggcggtcgtcgatccaaacgtggcaaatcaatgtcaactggtgctggccctggaggatccaatatcgtgggagttagggttggtcgtggccttacatcgcccatacaaaggactgaatgccacaacaattttagatcattgcctgtgggagctgctgacgtcttcggccttggtgggtctcgtccaaacgcaccatccaccagattaggacgcgccacactaagaaatttatgtaactatttggttatgtaagaattgccgcctattggtgtttgaaccatttagttgctatgcttgggactcaagaaacattagttgtggactatctatgccattttagaactatttatgcttgttgaccggatgatatatgtttatgctgaaaacagtgctatttttatgctgaaagaatgctatct

SEQ ID NO: 171004 - DNA, 166 bp, Zea mays
  Clone ID: MRT4577_87533C.1
tgtgctgttctgttgtgacgcactagctcagcggtggtgcacacgcgcgtcatacgcccgtgattgcactcgatactgcactcggtcttacactcgtcactgcgcgcgtcactgcacgcggcattccgcgcgtattgcgcgacatcatactatacgccgctactat

SEQ ID NO: 171005 - DNA, 372 bp, Zea mays
  Clone ID: MRT4577_87534C.1
atttccgggtcgttttttggcagtttgatgatctttgttggtgctgtataggtttggtgaggcgttgctcctttttcttaggtgggtcgttagttcgacatatccttcggtctggttgtccacgatgtaaaatgtactcactgaatagttgcttatggatggcctgataaagtaccttccaatttcaagcgccggaaaagaagagtactgataggctacatgaagatcactaaacaccactgtacggtctaagctatcttgaaaaaggcttcttggtgggctaaacgactaaagaaaatatacatgactgcgtggtcattcaaacatcaactgatctatacagtaaccatgttttaagtgagttgccatgct

SEQ ID NO: 171006 - DNA, 682 bp, Zea mays
  Clone ID: MRT4577_87535C.1
atattcattaaaggattgacacagaaccccaccggcgacagcaatcgagacatatggataattgaactttctgacgaccagtaccattacaagctagacacaataggcaagatatactcggaacaaaaagactccagaaaaccggacaacaacagtggctccatatcctcacgtaatgcatacatgagaagtacacatgaaagactaaagactatgccacaccatgctgaaggactgcgtacaggaatgcaacgtcgacgatgtgcccgatctacaacctgacctccagaaccctgatggacgtctacaacaacgactggatgatctacccactgtcgaccccctgaccctgactgatatcggcaacttccatgggggcgtcctatctcgtctcacaaccacaagatcggttgctctgccaagaccatgaacgctgtacttctacctcacgaaggtacgggctggaggattcagctgcgacttcgccaatgatactgtagcactcccctggggagcctgcatagaacagggactactgatgagtatcacgctacgtcagtctcctatgcgatacaccgctacaatctgctacataaaactcaacattggcgtgtacactacctacttcagcgggactaggtcgtctatttccaacgcactgtcacgggcagatcccccgact

SEQ ID NO: 171007 - DNA, 640 bp, Zea mays
  unsure (1)..(640): unsure at all n locations
  Clone ID: MRT4577_87536C.1
aaaccccgggcgcattgccgcaccatgccgctacctacgcgctcgcgcgcttagcgttgatcgccgcacgtgggggttgcaggtctacgaggaggtgctgaaggtccctgtaaatctccattttgacaaagtaaggaatcacaacaaaccctagatgaacataggaactgtcgcctcgtagacgatgtcagacaacgactacaaaagaaagtcccccgtctgcccaaagttcgtctataagaccactatgaactcgacctcgttggctccttagatgaccttctccgtcgtgtattaggaggtccttggcggggatatccgtaccaaagcagaggagtcaacaagtcgccctgtgcacgctcggttctttaccttaggaaatcccacaacccatccaaactcgtgtaaagaccaggagtagaattacacaaattcgctacaggacgacgtgcaccccttttcggacaatgacccgaccttaacgaccacgtcgtagtcggtccgcactaacgtatccaaggtttctctatcccgcagtggaactcctggttagtactcgaaaactcccggctgggactgcgctnttcaggtaaccgtaacggcttcaaccaacggtagcgtattagtgaacttgatcgca

SEQ ID NO: 171008 - DNA, 630 bp, Zea mays
  Clone ID: MRT4577_87537C.1
acaaggttgaaaagttgactgaaaagcttaatacaatgcaaaaggaaagtgatgagcaaaaacgcaaaatcaagaagacagaacgtgctcttaaagtcgctgaggtttgcaataagtttgttttactattaatgcacttttgtcttggttgttgtgtggtatatatactattacatatttgttctttcacattgtaggaggaattgatgaggttgcagttagaagcaactgctaaatcaaaacagctgactgaggttcatggagcatggttaccaccttggttagcgacacactatgctcgttacatggaggttgtctcaggtcactggaattatcatggaaaacctgctgtgcagaatgttttgcataaggcatcagaaaaatcagcacatgcaaagaaatgggctgaaccacatattgagactgctaagatgaaatggattcctgttaaggagaaattggttgtcctcaagaaaaatacagaaccttatgtacagaaggtatcgacaagatcagtggagttttatgagtcatcaagggatgctgtgacacctcacgttgtcaaagttaaagagtttgctcatccctactaccaggaagccaaagaagttttctaagccttacattgat

SEQ ID NO: 171009 - DNA, 2083 bp, Zea mays
  unsure (1)..(2083): unsure at all n locations
  Clone ID: MRT4577_87538C.1
cagcggacgcgtgcgcgggcgcgcacaagttcgccaacccccacgccccaccccccaccccccgcgtgctgcgcgtcgttggaaccaaggattggattagcctcgccgaggaggaggtggtggtcggcgaggggctcgcggggatggggatctcgaggccccttgtgatggcgatggcggtggcgctgctgatcgccgtcgccggtgcgaccgccgaggagcaggagcccctgctggcggcggacgcggtggccggcgcggtggaggcggcgctcggggaggtggagaccgcggcgctcagggccgagctggggcaactccgggcgaagatctcggcgctagagtcagacatagaagagcgatctcaagaactgaagaataaggatgatgccatcatgaacctggagaaagccattgaagagaagtcaaaggctattacctctatgctggacgagattgcttccctccaggcaaaatcgtctgtagctgccgaggagcaggcgaacaaggccaatgccaaggttgacaagatcaaaaaggatattgaagcacaaagcagccagaaagcagcactagagtatagggccaacgatgcagagaagaaggtggaagtactgaatgaaaagcttaatacaatccaaaaggaaagtgatgagaaaaaacgcaaaatcaagaagacagaacgtgctcttaaagtcgctgaggaggaattaatgaggttgcagttagaagtaactgctaaatcaaaacagctgtcagaggttcatggagcatggttaccaccttggctaatggcacaatatgcttgttatgcggaggttgtctcaggtcactgggatcaacatgggaaacctgctgtgcagaattttttgcataaggcatcagaaaaatcagcacgggcaaaggaaatgggctgnaacctcatatcgaggactgctaagatgaaatgggattcctgttaagcagaaattggttgccctcaagaaaaatgcagaaccttatgtacaaaaggtatcaacaagatcagtagagttttacgagtcatcaagggatgctgtgacacctcatgctgtcaaagttaaagtgtttgttcattcctactaccagaaagccaagaagttttctaagccttacattgatcaaattgctgagattactaaaccacatgttgagaaaattagaactactctgaagccatacactaagagagcagttcatgcatatgggtcatttctcaagtcggcaaccacataccatcgacaggctcaagcaagcatcatggactaccttcaccagcgtgatataacaaaatcattggcaactaaggagttagtttggttcctggcttctgctttgctggctctgcctgtcttcattatatacaggcttctagtagggaccttctgctccaaaaagaataaaaggcctcgtagtagtaatggtaaccatggccacaagagatacaagcggcgacatgctgacaagtagatcagtttactgaacactttagggttcagtatgctgtgtaccgtggcagatctttgagcaggattgggtcatgggcacccttaccttgaaagcattgtacaccaccaacatactcttctcttttgcattttcgtcccaggtgtaatatggacttcagtgcagcagaccttttatctgcactttgctgggttcatgtggttatgcctcggcctttgtttgattggtcatttgtttattgtaacttgtgaatgcgtttgaatttgtatgcttgttcttgtcggcgacctacattcgaacttattacttatgtatacagtggttggtttagctaataactggatgtctcctgttcacttcgttcatgtatggcttggtcgacaccatgatctggtagaatggtggctgactcagctgctgaagtgttacgaacaggattacaggaaaaagagagtgtctataaattgctagccatcctgtatgcttggtgtgttatatcaaaatacagaaactcaacatcagtttgtcatgtagggtccgagtactgaacctgagctgctggaattacccaatggaatcacgaccttgaattcttctc

SEQ ID NO: 171010 - DNA, 2521 bp, Zea mays
  Clone ID: MRT4577_87539C.1
cccacgcgtccgtaacaaaccagtgcgtgcgcgcctaaccgcccacgcgtatcgcacgctctttggcccggcgcacgtcgttggcgcgcctgcgcctggtgtaggtacgtccgcacatgacatatactagagtctaaagcatataaaaattaaaaaatatacactccctgtactactggaggggataaactcaaactctccctcgacatggaaataatatcttctcttcatggtctcatttctctcataagctttactttgccactttgtcattctatatctgcctaccaaggtaattccaatttcgagatccctcgggagccatcattatgtttggtttcatgccacaagggtaccctacctcgagccggcgggaacgataccgggtgggcactgggcaggcacacgagcgcgagcacgcacgagttcgcgagtccctctgacccccacgtgcgcgtcgttggaaccaaggattggtcgattggattagcctcgccgacgacgaagagggaagagctggtggctggcgaggggctcgcggggatggggatctcgaggctcctggcgctccttctggcgctgctgatcgccgtcgccggcgcgaccgccgaggagcccgtagtggcggcggactcgggggccggcgcggtggaggccgcggcggcgctcagggcggaggaggctgcggaggccgcggcgctcagggccgagctggagcagctccgggcgaagatctccgccttagagtcagacatagcagtgcgatctctggaactgaagaataaggacgatgtcatcgtgaacctagagaaagccattgcggagaagtcaaaggctattacctctatgcagggcgagattgcttctctccaggcaaaaggatctgtagctgccgaggagcaggctaacaaggccaatgccaaggctgttgaacttgagaagcaggttgacaagctcaaaaaggatattgaagcacaaagtagtcagaaagcagcactagaatctagggccaacgatgcagagaacaaggtggaagagttgaatgaaaagcttaatacaatccaaaaggaaagtgatgagcaaaaacgcaaaatcaagaagacagaacgtgctcttaaagtcgctgaggaggaattaatgaggttgcagttagaagtaactgctaaatcaaaacagctgtcagaggttcatggagcatggttaccaccttggctaatggcacaatatgctcgttatgcggaggttgtctcaggtcactggaatcaacatgggaaacctgctgtgcagaatgttttgcataaggcatcagaaaaatcagcacatgcaaagaaatgggctgaaccacatattgagactgctaagatgaaatggattcctgttaaggagaaattggttgtcctcaagaaaaatgcagaaccttatgtacagaaggtatcgacaagatcagtggagttttatgagtcatcaagggatgctgtgacacctcacgttgtcaaagttaaagagtttgctcatccctactaccaggaagccaagaagttttctaagccttacattgatcaaattgctgagatcactaagccacatgttgagaaagttagaactactctgaagccatacactaagagagcagttcatgcgtatgggtcatttcttgcgtctgcaaccacataccatcgacaggctcaggcgaccatcatggactacctccatcagcatggggtaaccaagtcatttgcaacgaaggagttagtttggttcctggcttctgctttgctagctctgcctgtcttcattatatacaggcttgtagtagagaccttctgcaccaaaaagaacaaaaggcctcgtggcggtaatggtaacggtaaccatggccagaagagacacaagcggcgatacgccgacaagtagaccaatctacccaacactttagggttcagcatgctgtgtttgcattgtcgcgcatctttgagcaatgagcaagattgggttgctcctccctcccggaggcactgctgaaccatacatggaggaaggagactcgggtcatgggcaccctttaccgtgagaagcgttgtagcctacaccaccaacatttctctttcttttacttcttcccaggtgtactatggacttcggtgcaggtgcagcggaccttttatattatctgcactttgctggggttcagggggttaggcctttgttttattggtcgttgtttattgtaacttgtgaattcgtttgagttcgtctgtttgtttgttttttggttggcgacctacattcgaacttgttagctaagtttgaagtttgactctagttgctggagtgtcatgaaccacgcgtatccctcggttgctttctcccccacaccaccaacatgtcgccgccgccggcttccgcccaggtgtactatgaacttcggtgcaggtgcagcggaccttttatattatctgcactttgctggggttcagggggttaggcctttgttttattggttggtttagctaataacttg

SEQ ID NO: 171011 - DNA, 1674 bp, Zea mays
  Clone ID: MRT4577_8753C.1
aatcactagaattaattttagaggttaaaccgccacgaaagcgtcactgcacacggcattccccttccctagcgttatcgtcgcaccataaataaccatcctctcctcgcctttccccacatcccatctccgtctgtgttcttgggcgtacgcggacacagccccgaatccccgatccgaatcgtcctcctcgcgagcctcgtcgatcccccactcccctcccctcgcttcaagatgcagatctttgtgaagaccctcaccggcaagactatcaccctcgaggtggagtcttctgacaccattgacaatgtcaaggctaagatccaggacaaggagggcatccctcctgaccagcagcggcttatcttcgccggcaagcagcttgaggacggccgcacacttgctgactacaacatccagaaggagtcaacccttcatttggtgctgcgccttaggggaggcatgcagatctttgtcaagaccttgactggcaagacaatcacccttgaggtggagtcttcagacaccattgataatgtcaaggctaagatccaggacaaggagggcatccctcctgaccagcagcggcttatcttcgccggcaagcagcttgaggacggacgcacacttgctgactacaacatccagaaggagtcaaccctccacttggtgctgcgccttaggggaggcatgcagatctttgtcaagaccttgactggcaagacaatcacccttgaggtggagtcctcagacaccattgacaatgtcaaggcaaagatccaggacaaggagggcatcccacctgaccagcaacgtctcatttttgccggcaagcagttggaggatgggaggacccttgctgactacaacatccagaaggagagcaccctccacttggtgctgcggtcttaagggtggtatgcaaatcttttgtgaaaacccttactggcaagaccatcactcttgaggtggagtcttcagataccattgacaatgtcaaggccaagatccaggacaaggagggcatcccgccggaccagcagcgtcttatctttgccggcaagcagctggaggatggacgcacccttgcggattacaacattcagaaggagagcaccctccacctggtgctgcgcctcaggggaggaatgcagatcttcgtgaagacattgactggcaagaccataaccctggaggttgagagctctgacaccatcgacaacgtgaaggctaagatccaggacaaggaggggattcccccagaccagcagcgtctgatcttcgccggcaagcagctggaggatggtcgcacccttgcagactacaatatccagaaggagagcaccctccacctggtgctccgtcttcgcggtggttattaagccatcagtcgttgaagctgctgctgtatctgggttatctagtgtctctgccattgcccatggatggtgctgtctttcaaagtatttgtatggtttgtgtcgtgagtcgtgactgagctggtttcatggaccagttgtgttctcgttacccaaaactatcgtgcgaccgcatatggcttaatcatgaataaatgttgtttgaatttaaactattcgctgaatattgttgttttttgtcatgtcagttaatgttactaaattggttgccttctcaaaaaaaaaaacccaaccc

SEQ ID NO: 171012 - DNA, 481 bp, Zea mays
  unsure (1)..(481): unsure at all n locations
  Clone ID: MRT4577_87540C.1
cctcgagngcctgtgccccaacttctccccgcaattccttccaagttccttgcattccaactcgctcccaaatccagacgagaaaaagctccgcgtctgcggtttgattgcgctcgcgccccttccgaatcctctcgccacccgccgccgtcatggacgacacgaccacgaccccggcgcgtcgtcgccggccgccggagagcggtgcccgtgctgctcctccccctcctcctcgccggccgtgccgtggcggcggtccgtgaagcggaagctgggcgcggagaagggggaggagggcggggaggcggggcccacggcgcgggtggaggcggaggacgagtgcgcggcgctgcgggaggcggtggcggcggcccagtccacggcgtcggcgctgcgggccgaggtcgaggaggagcgcctcgccgcggccagcgccgtcagcgaggccatggccatgatgctccgnctgcagcgcgacaag

SEQ ID NO: 171013 - DNA, 1112 bp, Zea mays
  Clone ID: MRT4577_87541C.1
gcacgagacgacaaacacgagcgcgggcgcgcacaagttcgccaacccccacgccccaccccccaccccccgcgtgctgcgcgtcgttggaaccaaggattggattagcctcgccgaggaggaggtggtggtcggcgaggggctcgcggggatggggatctcgaggccccttgtgatggcgatggcggtggcgctgctgatcgccgtcgccggtgcgaccgccgaggagcaggagcccctgctggcggcggacgcggtggccggcgcggtggaggcggcgctcggggaggtggagaccgcggcgctcagggccgagctggggcaactccgggcgaagatctcggcgctagagtcagacatagaagagcgatctcaagaactgaagaataaggatgatgccatcatgaacctggagaaagccattgaagagaagtcaaaggctattacctctatgctggacgagattgcttccctccaggcaaaagggtctgtagctgccgaggagcaggctaacaaggccaatgccaaggttgttgagcttgagaagcaggttgacaagatcaaaaaggatattgaagcacaaagtagccagaaagcagcactagagtatagggccaacgatgcagagaagaaggtggaagtactgaatgaaaagcttaatacaatccaaaaggaaagtgatgagaaaaaacgcaaaatcaagaagacagaacgtgctcttaaagtcgctgaggaggattaatgaggttgcagttagaagtaactgctatcaaaacagctgtcagaggttcatggagcatggttaccaccttggctaatggcacaatatgctcgttatgcggaggttgtctcaggtcactggaatcaacatgggaaacctgctgtgcagaatgttttgcataaggcatcagaaaaatcagcacaggcaaagaaatgggctgaacctcatatcgagactgctaagatgaaatggattcctgttaaacagaaattggttttcctcaagaaaaatgcagaaccttatgtacaaaaggtatcaacaagatcagtggagttttacgagtcatcaagggatgctgtgacacctcatgctgtcaaagttaaagtgtttg

SEQ ID NO: 171014 - DNA, 300 bp, Zea mays
  Clone ID: MRT4577_87542C.1
acacttctcctttaaaaggaatcgccaattttttcccaagaaaaaatcccggtccctctttaatatcagtcccgcagaacctcccccaaaatgcacccatcctcctgtggggcttattattcaaacattggagctacccaccagcccattctctattgcccctcacccttttcaaagtccctgggggggtttcatcctcccccaaaaatataggggccttttggaacccccctattggggggcaagcagcacttcgccctttagaaaagggggggggacaatcccctctgacccccccgg

SEQ ID NO: 171015 - DNA, 1117 bp, Zea mays
  Clone ID: MRT4577_87543C.1
cgaaaccattggtgcttgctcctggaggattctttgaccaagcctggtttgcccaacttattgtcaggaccaggccgaatctactggatgtgatcactcaccacatttacaatttagggccaggaagggacacacatctgattgacaagatcctcaatccatcagtcctcgacgggatgagaagcacattcagcagtcttcaggggctactgaaatccgcaggaacttcgactgtcgcatgggttggcgaagctggaggcgcttacaacagcggccggcacctagtcactgatgcatttgtgttcagcttctggtttttagatcagcttgggatgtcagcaaagtatgacacgaagagctactgcagacagagtttgattggtggcaactacggcctgctaaataccacaacgttccaaccaaaccctgactattacagtgctttactgtggcatcgcctcatgggaaccaaagttctagcaacaacgttcagcggcacgaacaagatccgcgcatacgcacactgcgcaagagattcaccaggaatcactctactgctgatcaatctcagcggcaacaccacgacgcaggtctcggtgagtgtgacgacccaaggggccgtggcggcgcacaagcatggcgcaaggaagcacgtcggcggcaggaagttccggcacgtccacgtccccagcttcgacgaggccgccggcggcgtgagagacgagtaccatctcacccccaaggacggcaacctgaggagccagatcatgctgctgaacggcagggcgttggccaccgacacagcggggaacatccccgcactggaggcggtgaagatggatgcggcacaacccatcgctgtggcgccctactccatcgtgttcgctcgcatttcacatttcaatgcaccggcatgtagttagagtagttagtgggtacagatcataatggcaagggagagtttgttttccttttactccttagaattatgtaaggttgaagaaattatgatgatcaacgatgggaaggggaaaaacttagagttgtaaaaggttgaaagaaattatgatggtcaacgatgggaagagggaaagttagaaatgacagtggaaactcc

SEQ ID NO: 171016 - DNA, 373 bp, Zea mays
  Clone ID: MRT4577_87544C.1
tggaaacatacaaatcgtatttgcataacgtacgaagtcagtccgaaggcaagtcacgcaaacaacagaagaatcaagaacttggcccgtacaagtttacccatcagcaattagagaaagagggcgttatccgcaggagcaacgtcccggagaatcggcgagcgaacatctacttcatgttccgcagcccacttccaggaactttcgtcatcagtctacactataaggggcgtgcgcgtggccttttggaattggacttgaaactggatgatctgcttgaaatgcagaaagacgcccaagaagaccttgatcttgaatacgttcaattcaacgtgtccaaggtcttgacacttttgaacaaacgcttcgctcg

SEQ ID NO: 171017 - DNA, 813 bp, Zea mays
  unsure (1)..(813): unsure at all n locations
  Clone ID: MRT4577_87545C.1
cctcgaggccggccgggatgctacctctcccttttttttggcagattcgccctgtcttcccaagccctgctttgccgctagcgacaaaaccctaaccctaaccgcggggatggcgacgcagtcgcactcctcctccgctgccgcgatagacatgtatgagacggcctctcagccggacgcctccgttgccggcgacgcctacaccttccttgagttcaacactcagggtgacgaattcgactaccccgactttccggagctttctcaaccgccgccccgatcgacgccgctgacgtcttccatccccggcgctggcgcgtcgtcctcgtcgtggcctgccccgccgccgccgccctccgacgcggcctccgctgaacccgatctcacgtctctggacgtccccaccccgccggcctcctcctcctcgccgtcgccgcggtctgcctccaaggcgcgctcgttggctgcggcagatgggctcgcctccggggtagccgcactcagcttcgaggatcctgttggagccggcgccggagaggacgggtacgactacggcaagggagacttcgtggaacacgcctgccggtactgtgggatccacaatcctgcatgcgtggcgaggtgcaacgtgccctcctgccgcaagtggttctgtaactcgcggnggaacacctctggctcccacattgtcaaccacctggttagggcaaagcataaggaagtgtgccttcacaaggatagccctttgggagaaacaatccttgaatgctacaactgtggctgtcgggatgtatttcttcttgggtttatctc

SEQ ID NO: 171018 - DNA, 187 bp, Zea mays
  Clone ID: MRT4577_87546C.1
ggtcggctttcctaccggtcgctgctaaccatacaaccaacctccgggccaaaatttggccaccgccggaggagaggggccatggggtaatccgccgccgccgcttcttgggtttccgggcttttccgcctcccggggtcgggtaacctgcgtgcaccgccacgaagcgggtggcaggaccacaggc

SEQ ID NO: 171019 - DNA, 258 bp, Zea mays
  Clone ID: MRT4577_87547C.1
ggacaaaacccatggccagctgcttcaatgaccggggcccggtcaagacaagatgcaaacggggataagtactggggacgaactctaaccacaacgtcgaccaattaaatatgggatacttggggacccacatcaaggttgaccgcctgatgaatatgacagggctactgaattatttctcaaggactgacggggtttcaccgccctgtccacctgagcatgctctgggaatgacatactgtgcgaccctttatgctt

SEQ ID NO: 171020 - DNA, 500 bp, Zea mays
  Clone ID: MRT4577_87548C.1
ccggccgggaccatacccgtacccgccgtccggcgagatgccgtggcgcgagcgcgacctgccgcacaagcctgaccttgcgtatctatgacgagtctggactcctgaagatcagtctcgtgctcgttacctagagagcgcctcctgaaagaagctagtgcactcagaacatagcacgtaacgctttggtcgttcctaactcctgttcatttatcgctgaggatctcacttgtgcatactctagacagaatgtgagatggccttgaatgcaaggacttccttcttgggtctggctcagatagggctaacgaggaactgctacggatgatatcatgttcatacacgtataggaaacagacccccgcaaactacatgatggaggctcttctgatggtgaccaaggaactgtaacaatacattggtggtgcttattgagtgcccaagagagctctatataaagaattgccgagggcgaggacacagcgggtacctatatgtgc

SEQ ID NO: 171021 - DNA, 629 bp, Zea mays
  Clone ID: MRT4577_87549C.1
taatatgaaaaacttagaagaaacatagacataggattttacttcttttccagtttttttgtggtaaatagatcattattaattttgcataactcgattcataaccgggccgggcatctaattgtgctaattcatttgctgctgaattttgctttgtttttatcagctgaaccctccaaccaactgaaggctacaaatactcctctgtttggacgagggtgaacatgagcttagacttgtcctcattcgatttgcaacgtctcgacaacccttgcacgatctgactctactgttagatcgtccgtacccatagtttatccaaaagaattattttacacggtatgtactgttatgtgttgtagattatattgttagaaaagtgaagtttgaatatataggtatagagatggataaactgtcatagatttagtcttagaggtacaacaccattccgttgcaagcctctgcctcaacaacttgtgccatttaaaatcacttgtcgtctctaccagtctgcctcgtgccatgtaaaaatcacttgccaagctgtaaattagacagttgtactatcatcttttgccaccgccttcaaaattgtatacaaggaatatatatatagtgaattcctt

SEQ ID NO: 171022 - DNA, 1030 bp, Zea mays
  Clone ID: MRT4577_8754C.1
gccggccgtactcgatccacctccgtctgtgttcttgtgcgtacgcggacacagccccgaatccccgatccgaatcgtcctcctcgcgagcctcgtcgatcccccactcccctcccctcgcttcaagatgcagatctttgtgaagaccctcaccggcaagactatcaccctcgaggtggagtcttctgacaccattgacaatgtcaaggctaagatccaggacaaggagggcatccctcctgaccagcagcggcttatcttcgccggcaagcagcttgaggacggccgcacacttgctgactacaacatccagaaggagtcaacccttcatttggtgctgcgccttaggggaggcatgcagatctttgtcaagaccttgactggcaagacaatcacccttgaggtggagtcttcagacaccattgataatgtcaaggctaagatccaggacaaggagggcatacctcctgaccagcagcggcttatcttcgctggcaagcagcttgaggacggacgcacacttgctgactacgacatccagaaggagagcaccctccatctggtgctccgcctgaggggcggtatgcagatctttgtgaagaccttgactggcaagaccataaccctggaggttgagagctctgacaccatcgacaacgtgaaggctaagatccaggacaaggaggggattcccccagaccagcagcgtctgatcttcgccggcaagcagctggaggatggtcgcacccttgcagactacaatatccagaaggagagcaccctccacctggtgctccgtcttcgcggtggttattaagccatcagtcgttgaagctgctgctgtatctgggttatctagtgtctctgccattgcccatggatggtactgtctttcaaagtatttgtatggtttgtgtcgtgagtcgtgactgagctggtttcatggaccagttgtgttctcgttacccaaaactatcgtgcgaccgcatatggcttaatcatgaataaatgttgtgtttgaatttaaaaa

SEQ ID NO: 171023 - DNA, 649 bp, Zea mays
  unsure (1)..(649): unsure at all n locations
  Clone ID: MRT4577_87550C.1
gggtacccgcggccccccctcgagttttttttttttttttttttttttaaaatgaatggtcaggtccatgcggtagatggattgatccactgatgactatacatgcccctagggcttagtttacatccccnctgtttacagcagcgctgccattgacattggcttgctgagcacacctccgatcatgtatcatacgcgcggttggtgcagactatcttacacgcgctacgatactgaacaagatggagtactagagcaagaccaccactgcctcacttccccgtgacggtacctagcgaaatggcataggattatgatcggtaagtgcaccacgtaccgagggttgctcacagcattgtagaatgcgcggggtacaagagttcacgctcgtatgcccaggcagctgttgcgctatggacctntgtgatttggagcgaagagggtcctttatggaagcccttgccggggaccatggggctgtcttaaaaagccgagcatggagaacatggtggggccgggcgatacttgagctccttaaccttgacctcggcggcggtgtccgggtcgtacaacaggaccagagggtggaaagcgccgcctgggtacaccttggcgagcccttacccgagcggtctcccgccgacgcgaa

SEQ ID NO: 171024 - DNA, 299 bp, Zea mays
  Clone ID: MRT4577_87551C.1
ttttcttcatgcctgcgcattatccacacgggagcgtaatttttgatttcattcgaccagacacatggacacaccacaaggactgttaaaacaatgtcagtacccaacgttaaataaatagaaagaaagaaaaataccggcacatgccgtaccagcaaataatcatgaaccatgtcatgctaaccaacacctgcgaatattgattcatgcttgccacgcatggtctggctaggcgtgaaacgcgcacttggcgagcggtccacccaaaaggcacctgttgccgacgaacgacttagcgc

SEQ ID NO: 171025 - DNA, 261 bp, Zea mays
  Clone ID: MRT4577_87552C.1
ggaggacaaaaaaaagtttaaacataaagggggcaggggaaaggccaggttcacaagtaccggaaaaaaaccctaaagcaaattgaaaaaaggctttgggtctaggggccataaggggggttcagagggccttcgccaggtaccacgaaggaaaaaggaaccaaagaattctccaggaagccttccaaagatgccccaaacactaaacccataatcagggttagggacagggtcccgcaaaaaaaaggcaaaagcgggggg

SEQ ID NO: 171026 - DNA, 454 bp, Zea mays
  Clone ID: MRT4577_87553C.1
caacgagaagaaccacagaaccaaagattgccacatgcgacacacattatttgtggcgttcaaaccgtgccacagaatcgtcccgcttgccagaattcacatgtgcctacatgagcccacacaccgctgggtgacatgcggagagggacgcccttcagttgaaaccagggtttgtgtactgagctagaccttacatggacggtgcatgagcagctggtccaccactgtatacatcgccgaatccgcctctaaagccacatagatcccaacggtccccctttccacggacacgggcgacgaagtacctttgtggttgaacttgtttatgacaccgatgatgctcacggagttgttgtcacgctactcccgctcagccttgaccttcttgttagcggtgttataacccaggtcaacgaaaacgacatcattggccttctcggtggaaatcggctgc

SEQ ID NO: 171027 - DNA, 375 bp, Zea mays
  Clone ID: MRT4577_87554C.1
aaaaaaaaacaaaaccgttgcctgccattggggcccacccactggtttttttacccagccacgcggggatttttttggaaacgacaaaaaaaaacgttggtgggttttggttactgaaattaacggaaacgaataagtcttttttcccctggcccgccagttggtaaaagggggatccgtggaacacgggcctgagggggtctttggggagggggccggccttggccttgggtagcttggacaaaatctcccacttggatttggttcccagccattctgggaggtattttttttgcgggtttttcttgggcattttggggagctttttttttaaaagagcgttagggacggttttggggggcttggggaaccttt

SEQ ID NO: 171028 - DNA, 292 bp, Zea mays
  Clone ID: MRT4577_87555C.1
cctcgtactcagcgcatgtgcactggatatacacacgagcatgcatgcatctgccctagctaaaagtagcagagagcactgctgatgaaatagggatctgcagaccacctatatgaatgagcgaatgagtgaatgaactcgtgcatgcatgcaggccgacgttactcctagtgtactggatgaagtcggtggaggggcccatgctcgcgccccacgtggtggcattgatcagctgcacgatgaggatgctggacgcgctggtgaagaccaagtccagcccgcatgatgacca

SEQ ID NO: 171029 - DNA, 416 bp, Zea mays
  Clone ID: MRT4577_87556C.1
ggcttggaacgtttgggctgctttatgtgcttgtttatgtgcttggcctcagactgcgagtggttgattccctccgcccccccctgggataagggtttaataacacggctagcgtaccaacacacacagtggtgcaaataggcgtgactgctggagagcctatacgaactaatactgtaacatctatatatatatcgctctaatcggtgatcggtgcgtgcgaagtgactaaaatcgatttacgacggaaacatcggcaataccaatgcctaataagtgacgaatcgacagacaccacgacgcactatcgtgggattggaggaaggaatatgtgtgtaggtggtttcgtagatggaggagtctacgcgaagaggcatttaatcgtggttatactcagtgcgtctcgaaagagtgtt

SEQ ID NO: 171030 - DNA, 201 bp, Zea mays
  Clone ID: MRT4577_87557C.1
tacaatagctatgacgaacgcatgcactgcgtacagtatagctcggaattcaggctcgcagctccttttcattctcctctctacaagcgtagcttcggagtggggttagagtttactacaaggtcttgcagcaccacaaccaccgtcatagtgaagaggagcgtagaccaccgcccacccgtcctggcctagtcagctcct

SEQ ID NO: 171031 - DNA, 271 bp, Zea mays
  Clone ID: MRT4577_87558C.1
gcggggcgagcgaaccggaagcagcccaacttgataatcggacggtctaaccgaccgaattgtaatcatgcagaggagtactcagctacggaccgggaccaagctctctggaaagggacgcctggaagggtgagagccccgtgcggcccgtgaccctgtggaaacacgaggtgccgtacaacaactcggcttgtttgtgaatgcaggccaaattgggcggtaaactgcgtccaaggctaaatacaggtcgagagaccgatagcgaacaagt

SEQ ID NO: 171032 - DNA, 611 bp, Zea mays
  unsure (1)..(611): unsure at all n locations
  Clone ID: MRT4577_87559C.1
ncgaccctgtccgttaacaaattggtcacagtttttctaaatggataaaagtccataacccaagcctggagcgtgcagccatgcagctgatagtgaactccgaggagatcattgaccaatgcaaaactgtaactgatgtatgtgaactcacattctcaagcaaatctccagaggttaactcaactgagactagatttggtttctcgttaggtgatgcagcaatcaccgaggcctatgtcgatccttcagagactgctttgcttggtcctattgtcttccgtccctcgaatcactgtatgtggtcaagcatggttttaatcagaaacaacctgtcgggtgtggagatgctgcctctccgggcatatggtgggcgacaatctattgtccttctagaggaatctgagcctgcttggaagctagagttcagccttgggtccaatgttcataataaatcaacgatgaccaaacaagagatcccaagctctttgtgcagtcaacagctaaccaaagagatacatgttaaaaacagcggtgacctttctctacaagtgacaaagggtaaagtttcaagagctgattgtggtgtggatggatttaccgtggacaactgc

SEQ ID NO: 171033 - DNA, 199 bp, Zea mays
  Clone ID: MRT4577_8755C.1
gacaagatatatacacaatcttcacgcggtgtagccatgtgtttgctaggaaccttctgtagagcaggaacctggataggaatggcatgatcacctgcatgaggttccaccgtactggctgctcaagaacccgagcgtcatctggttccggatcatcagctggctggcgacggacagattcataatcatcaaccgttac

SEQ ID NO: 171034 - DNA, 328 bp, Zea mays
  Clone ID: MRT4577_87560C.1
ttttgttttctccccaacctagccacccagggggagagaggccataagtagggggagagtcacttcatggcttacattgacgcttacagtagggccgctactatagttcgcgctcttgagaagcttatcgcatccacctcctttctcggaactggctccgccttcaggcccgacgcaacattccgtggcctccgatgttacaacacccacgctcatctccgactctacgaggaggccctgtcggaagacgattgactacccgagtacgataggcggtacggaggccacaactaccctgtgcccatgctgtttttaaaatatttttcgt

SEQ ID NO: 171035 - DNA, 639 bp, Zea mays
  Clone ID: MRT4577_87561C.1
tttttttttttttttttttttttaagccaaaaggcacatcggcttcatgaccttgcttattattaattatactgtaatttacagccccatccctgacgggatgcgggcgatcgagccctttggaagtctctattagagggccgttcgcggtcatcagtcacacttggagcggtcctgcggcgcgaacgtgaagctgccggccgagtagcgcgcctgcagcccgtcggtgcgcgtgacgaacctgcggaacttgagcggagaccccttgttgcggccggggctgacggccacgcggcagccgcgcaccggcgaccgcggcacgtacaccttgcagttcctgctcgtgaagggcgccgcctgcgcccccgtctggaccaggaagtagccgtgcgcgttcgtggcgctccacacggacagcgcccggcggccatgccggcaccgcagcagcgccgaggcgttccggagtggcgacgcgtccctggactcgacgtagccgcggtaccggcagctcttgcaccagacgacgccctccaccccgatggtgaagttgatggggtttggctgccgctggggcacgcccatggccgagcctagggacggcaggccgcacacggctagggccacgaggatcaggcagcc

SEQ ID NO: 171036 - DNA, 125 bp, Zea mays
  Clone ID: MRT4577_87562C.1
cagcttacgcaatcttggtctccattgtgcggacaggaaaagctacatattctcataattcctgcaaaggttcaacaacttcagcatcatttatatcattacatgcaagaaaagctggacttata

SEQ ID NO: 171037 - DNA, 3615 bp, Zea mays
  unsure (1)..(3615): unsure at all n locations
  Clone ID: MRT4577_87563C.1
acgcgggacaccaatgggcatattagattaatattattaaatttaagtaaaaaaactacactttaatatggaaacgtaagaatggaagagaaagaaagaatccgcagtttattatcttcatttttttttcttattctataagaatactatagattctattaatacatagattgaaatattctacatataaggaaggtaaaacagattgaataaagaaaaaagaatccgtgatttgaatgataaacaaagagggatgaaggatctattcttcgtttttccaaatggcccaagctacccattgcatattggcacttatcgagtatagaatagatctgcttctctttcttcttacaaacagaattggcttgttatttttaatggaatgaaataaatattcacgctttctgacatagaatcccctagaagggttaggtacatagaataagtatggatagtcttttccaatgcgataaaataaagcgacatcgtgtctatttttctttgctaaaggggtatttccatgggtttgccttggtatcgtgttcatactgtcgtattgaatgatccgggtcgattgctttcggtgcatataatgcacacagctctagtttctggttgggctggttcgatggctttatacgaattagcggtttttgatccctctgatcctgttctggatccaatgtggagacaaggtatgttcgtcatccccttcatgactcgtttaggaataacgaattcgtggggtggttggagtatttcaggaggaactgtaacgaatccgggtatttggagttatgaaggtgtggcaggtgcgcatattgcgttttctggcttgtgtttcttggcagctatctggcattgggtatattgggacctacaaattttctgtgatgagcggtcgggtaaaaccttctttggatttgcccaagatctttggaattcatttatttcttgcaggggtggcttgttttggctttggtgcatttcatgtaacgggtttatatggccctgggatatgggtgtccgatccttacggactcactggaaaagtacaagctgtaaatcctgcgtggggtgcagaaggttttgatcctttcgttccgggaggaatagcttcgcatcatattgctgcgggtactttgggcatattagcgggcctattccatctaagtgtccgtccgcctcaacgtctatacaaagggttacgtatgggcaatattgaaactgtactttccagtagtatcgctgctgttttttttgctgctttcgtagttgccggaactatgtggtatggatcagcaactaccccaatcgaattatttgggcctactcgttatcagtgggatcagggatactttcagcaagaaatatatcgaagagttagcgatgggttagccgaaaatcttagtttatcagaagcttggtctaaaattcccgaaaaattagccttttatgattatattggtaataatccggcaaaggggggattattcagagcaggctcaatggacaatggggatggcatagctgttggatggttaggacatcccgtctttagagataaagaaggacgcgagctttttgtacgtcgtatgcctactttttttgaaacatttccggtcgttttggtagatgaagagggaattgtgagagcggacgttccttttagaagagcagaatccaaatatagtgttgaacaagtaggcgtaacggtggagttctatggtggcgaacttaatggagtaagttattctgatcctgctactgtaaaaaaatatgcgcggcgtgctcaattaggggaaatttttgaattagatcgagctactttgaaatcagatggtgtttttcgcagcagtccaaggggttggttcacttttggtcatgctacctttgctttgctcttcttttttcggacacatttggcatggcgctcgaaccttgttccgagatgtttttgctggtattgatccagacttggatgctcaagtggaatttggaacattccaaaaagttggagatccaactacaaggagacaggcagcctgataccacattgctatggtatctttcacctccattttttgtttgatttgacatgaggaacatctcctgtcctttctttgactctttttctttttttatatgggaaatgatcccaaatgataagtgaataggtgtggaagttataattgtaaataaaccaggatcgaatctatggaagcattggtttatacgttccttttagtttcgactttagggataatttttttcgctatcttcttccgagaaccacctaaggttccgactaagaaatgaaaaattaattgagtanaggaagncccccggaggggagacttcttacttcaattagtccccatgttcttcgaatggatctcttaattgttgagagggttgcccaaacgcggtatataaggcatacccagtaaagcttacaagtaaaccagatatggagatggcgactaaagttgctgtttccatttttatagaatttcaagattacaatggatctatgaaaagatcgtgtatttacaactacaacggaatagtatacaaagtcaacaccaatgattaaatagaatttatggctacacaaaccgttgaagatagttctagacctaagccaaaacggactggcgcaggtagtttattgaaacccttgaattcggaatatgggaaagttgctccgggttgggggactactccttttatgggggtcgcaatggctttattcgcgatattcctatctataattttagaaatttataattcttctgttttactggacggaattttaacgaattaggtttctactaactaaaactatgacttcatagtttttccatccaaaaaaagcctttctactttaagctccacatttctagacattctggtagttcgaccgtggatttttttgttttggtatctctggaatatgagtgtgtgacttgttagaattgatcctattgataatacatagaaggggcctgttatctctatcaagatgattctaattcgtcagatattatttattctagtatctggaacacgaaatacatagagtggatcaaaaaaaaaaaggaactatgattcatactcactatttagacctcgcaaccagacttaaaaaaaaaatgaagtagttcttaataaaaaaagaaattttcttccttccaattttgtttgcccaaaagagaactcttttctctttcaataaatgatcatcaagcggttcttattcgaagaacccttgccttttgtttatcttgagactgaatcatcgtggctctagtatgaatctaaggttttaattgaactgattcataggatcgcaacaagataatttctatcagaaaaccactagaaattttgattttattttttgactagtcaaaaaataaaatcaataaaaaatagggaagagaaaagtcaagaggcctctaatgatcaacataagggaaagaaagacagatgagccaacttgagattttttggcattattatcacaaagaagaaattctggatttttcttatttcatatcttcaagggcaaatcgatccaataccgtggctgatggagttttgaaccctttt

SEQ ID NO: 171038 - DNA, 263 bp, Zea mays
  Clone ID: MRT4577_87564C.1
cggacgcgtggtgaatttgaagacttgagcgctctatgcaagaatgatgattctactgttagcaacacagtagttggagcatctggtgaccttgccaagaagaagatatttcctgccctttttgctctctactatgaagattgccttcccaagcatttcaccatctttggctatgcacggcgcaagatgacatatcttaaattggggacatggttagcaaaacactggacttgcagaatagataaaagggaaaattgtagcga

SEQ ID NO: 171039 - DNA, 693 bp, Zea mays
  Clone ID: MRT4577_87565C.1
gcacgaggtaacctcagctattttcttggcattgaagttcatcagagctcaaatggccttctcttaacacaacataaatatatcaatgatcttttactacgtacaaatatggaagcttctgtgggctcccctacacccatgctgcctgtggagaagctgtctctccatgacggtgatcccctctctccagaagatgctacgcgctatcgtagcgcagttggtgctttgcaatacctatcatttactcgtccagatatttccttttcactctcttgggtgtgcctgctcctcgcctcgccctctgctgctcagcgccctgccggctgccgtctgggccggtaatccggatgatcggcgaagtactggaggctataccatctttttgggcaataattgggtttcttggagttcacgcaaacatccgactgtgtctcgatcgagtacagaggccgagtacaaagctgtggccaacactacggccgaacttatatggattcaagttttgcttcgagaacttggcatctcattgtcacgacctccttctctatggtgtgataatattggcgccacttatctctctgccaatcctatttttcatcgccaaacaaaacatgttgaggttgattaccacttcgtccgtgagcgtgtagcctctcgtcaacttgatgtccggatcatctcatcgaaagacca

SEQ ID NO: 171040 - DNA, 1853 bp, Zea mays
  Clone ID: MRT4577_87566C.1
tggaattcggcacgaggcagaccctcgccatgggactgagatccccgctcgtgctcctgctgctcctcctcttcctcgccgctactttccgtcccagcgcggccgctttggcccctccaacaggcagcatcgtgaagcagctgtcgtcggtcgtcaggtggccgcgggccgccccctcgacgcacgggcccaaacagcccggccacccccagtacgccgatggccacgtgggggtagccctgcaatttgagagcggctactttgtagagacacttgttgagggtgacaagcttggtgtcacgccgcacaccattagagtatctcctgttgagggtggggagctccttgcggtcgactcggcacatagcaacattgtgcggataaccccgccactttctgagtatagcaggggaagacttgttgctggttctttccagggccattctggtcatatagatggtaaaccaagtgatgcccgattcaagcgccccacaggcgttgccgtggatgatatgggcaatgtttatgttgctgatacagcaaacttggcgattcgaaagattggagaatcaggagtgaccaccatagcgggtggtaaatcgaatatcccaggatacagggatggccccagtgaagatgcaaagttctctacagattttgatgtggtgtatgtgaagaaaatgtgttctcttctggttattgaccgtggaaatgcagcccttaggaagatttctcttccacaagaagactgtacttaccaggattctgcactcctatcttcagatctcatattggtcattggtgctgttgtggctggatatatcttctctggtttccaacacgggtttggattctcaggctccgagaaggtagaggcacctgaaaacgagcagcacgagagcagcacaatcgggaagccacctctggtggtggagagcctgaaagaggaaccaggagctgggtggccatccctcgggacgctaattgccgatctcttgaaacttgccatcgagggagtggggaaactgctactcagcgtcgtccctcaacgcatgcaacacgggaagaggaagacagatctcaccccgctcagggacaggttggtgatgcccgaggacagagaggagacggcagcggcggcgcagaagctcagcagcacaccaatgcggcccgagacagcccacgcccctaaccccgtaaccgagacggcagcacccaaggccccgaagagcacgaagccatccaagctcagggattcttcgaccctgtcaagcaagcacaggtcctccaagcggcaggaatacgcggacttctacggcacctccgagcccgctcccgtaggtgccgccgccaaggtccccaaggacaggctccgccaccgccaccaccaccgcgagaagagcggggaggtcgcctacggcgccgcccatcacgacctgaagcccgcggaagcgaagcctgccgattacagcgatccgagctacgatccgtacgtgaggagcaagtatgccgccgagagtgggtacaggtattgacgtgtcgctagctgtcctgtcctgtcctctcctgccgggggaaacagcggaatgaaaacctttcgccggcgtctcccgggcaatgttgtaagtgtgaagctatatagcctccacaagcgcaaagcgaggcgcaaacaaagctgctgctggtgcctggtgctgctcatggtttggtggtgcccatgagatgtggcaagtagtcatcctagttaggttaggtatggacggccaggacggggttggcatctggcccggtttcaggatatgctaagtgcgattttcgcagagggcgacatgtagagcctggcggcggtttgg

SEQ ID NO: 171041 - DNA, 171 bp, Zea mays
  Clone ID: MRT4577_87567C.1
gggggtcaaattgacgtttaaactcagggtaaattatcggatgaatttaaacggttcccattttttttcccggggtttccacccatactaaaaggatatttccagggtttctacaacccggaaaagtttaattcgggcaagtaaaggggggggggagcacaatgcccttaa

SEQ ID NO: 171042 - DNA, 193 bp, Zea mays
  Clone ID: MRT4577_87568C.1
atatatgtatttttttatttttgggaacgcaaaaccataaatgatttcacttgattgtggaactttaaaccttaagatttttaaatgagggcatatgctacgactgtatgatacccatacagatttatgcttcgttaatgtaggttagctatatggactatatagtttccgtttatatacggggaatccaatt

SEQ ID NO: 171043 - DNA, 214 bp, Zea mays
  Clone ID: MRT4577_87569C.1
ataacatccttttccaccatggtccgactgtttcctaatgtggaattcaccatcaaaaaaaaaatgggccaaagaacaacgaataaaccgctggagggtctaaaaccatgaacaagcacacccaaaaaagaccagaaaaaaaccagaacctgtaacccattgatggaatgtaagaaatgaacgcaaccaaactgatggcacaaaaggacaaact

SEQ ID NO: 171044 - DNA, 365 bp, Zea mays
  Clone ID: MRT4577_8756C.1
gtaagcttggatcctcaaaattggcgccctggggcgttctttctacccaacaacaaaacaagcctaatggtcctttcattaccaatgaagcgcctccccctaaaccttcggcaaaaacctttttcaggattccctgttcctaggggggcttgacaccctttttttttgatcccgagggggaatatcagacagcattcccggaccaatttttttatgggaaaagggcttacttcaatcacaatatctctctagcgggcaacaaaaaaacgcgaagattactttgtcaaacattccggtgaggatgcctgggactggatccccagatcaggacaacatgaagctgttgaaaaccccccgtaatcttt

SEQ ID NO: 171045 - DNA, 111 bp, Zea mays
  Clone ID: MRT4577_87570C.1
ttttgtttaaactcgaaacagaatcggttgccttcacacaaacaaaaatgaccgacacaatggcacacgggagtcccacctacaatgcagcgactttaatatatgcaccaa

SEQ ID NO: 171046 - DNA, 236 bp, Zea mays
  Clone ID: MRT4577_87572C.1
gagcatccaaaaacacaccactcgatgtacattaccaacaacctaacaacggtggctaccaaaatattatggctcctaacactattgcgctatctccaaacacaacaaattcattcaatattccacaatgcttacttgcttcatttttcattattacacagtaccttccaccaaatactttaatatgctcctaacactcattttttgctaacctataagctttaactatctaattt

SEQ ID NO: 171047 - DNA, 748 bp, Zea mays
  Clone ID: MRT4577_87574C.1
ttgggtaccctgccggccgggaaaatttaatgcctctctagatcttttaagctagctatccttgcttcctcccttcactttcttattgagagctctctggcgtgctgtaccggacgacaggggttggtaggtcgtaggtgtagctagctcggcgagcgagcaatccggccaacagcacacgcgtcgatcgccatgccgagcggcggcggcaatggcggtggcagtagtcgtagtagagtgatgcccaacctcccggccgggttccgcttccaccccacggacgaggagctcatggtgcactacctcatgaggcaggccgcctccttgccgtgccccgtccccatcatcgccgaggtcaacatctaccagtgcaacccctgggatctccctgccaaggcattgttcggcgacaaggagtggtttttcttcagcccccgggaccgcaagtaccccaacggcgcccgccccaaccgcgccgccgggtccgggtactggaaggccaccggcaccgacaaggccatcctgtcgtcgtcgtccacgcccacgatccaaaacgtcgtcgtcggcgtcaagaaggcgctcgtcttctacggcggcaggccgcccaagggcaccaagacggactggatcatgcacgagtaccgcctctcgggcgcggcggacgacgactgcaagggcagcagcaccaggcgcagagtgtcctcctcttcctcgtcctccatgaggctggacgactgggtgctgtgca

SEQ ID NO: 171048 - DNA, 1838 bp, Zea mays
  Clone ID: MRT4577_87575C.1
ctgttaagctagctatccttgcttactcccttcactttcttattgagagctctctggcgtgctgtaccggacgacaggggttggtaggtcgtaggtgtagctagctcggctagcgagcaatccggccaacagcacacgcgtcgatcgccatgccgagcggctgcggcaatggcgttggcagtagtcgcagtagagtgatgcccaacctgccggccggattgcgcttacaccagactgacgaggagctcatggtgcactacctcatgaggcaagccgacttcttgccgtgggtttcaagctatccttgcttcctagctccctttggcgtgctgtaccggacgacaggggtaggtaggtgtagctagctcggcctgcgagcaatccaacagggacagcagcggcacacgcgtcgatcgccatgccgagcggcggcggcggcaatggcggtggcattagtagtagtagtagggtgatgcccaacctcccggccgggttccgcttccaccccacggacgaggagctcatggtgcactacctcatgaggcaggccgcctccttgccgtgccccgtccccatcatcgccgaggtcaacatctaccagtgcaacccctgggatctccctgccaaggcattgttcggcgacaaggagggagactttctttttctccccgggcttttttttaattgcacttgcttgcacggctccagacctgactgaagcgtttcgcatggtttcagctggacgactgggtgctgtgcaggatccacaagaagagcaacgatttccagttgtcgtcgtcgtcggagcatgagcacgagcaggaggagccggcggcgggcggctcagcgacgactgtggaggaactagacgctctcgtcgtcgtcgacaacagcagcagcagcgacaccaccaccaccaccatcaccaccaacgacaacaactctactgaaacagcgactcatcacgatcctcagacgatgatgatgctgagcaagtcgtgctcgctcaccgacctcctcgacagcatcgactacgcggcgctctcctcgcagatgctcctcctcgacgcgccccacccccacgctgatgacccgccgccacacatggtctactacccaccggcggcgtcggcgacgcaccagcaagcaataatagctaataacaccaacggtaatgacgactactatgacgacgacaacctgttgccgactgctgctcctactgcggtagacgcggcggcggcgctactcagctcgtcgcctgcagacaccaacggtgtgaacaagaggaagcgagtgacggccgtggactacggcgccgctgaaccgccgaccttcttccaccaccacctcgatgatgcggccggcaacagcttcagtaccaagaagctcaagccgccgccgccaagtgattcgaggcatggcggccatttcggcaccgccacagcgaccagctaccgcgacagccagcagcagctcgtgcacagcccgagtagcagtaacagtaacagtagcggcggcttcttccatcagtacgggtacgggtacgggtacagcagcaacaacccgttcttgaacttgaaccagcagcagcagctgctactcaacagccacatcgggatgcagtagagagatcgagagagagagagatgatatatcattggaaggatctgcagcacgcgtgcagattaattggagcgagttctgtcttgtttgcttccattatatatgttcatgtaaaattagtttaaattgtaaattagtgttctgaaattcatgtgcctgctctgatcatcaatgaatggatgatgacccatgcgcgttgcttgtggatccgt

SEQ ID NO: 171049 - DNA, 177 bp, Zea mays
  Clone ID: MRT4577_87576C.1
gacgacgcccgaaatgaagaacggatgttttaaatggcataagtcttttattacgtcacttaaggtcaggtcagaataagtgaagaggagactgctatgatgtcaaaccaaacatgacaacaagttcaacgatgaacggactaatactgctaaatagaagtagcagaataacgcata

SEQ ID NO: 171050 - DNA, 577 bp, Zea mays
  Clone ID: MRT4577_87577C.1
gggggggggtggtttttttttttttttttttttttttttttttttttttttttttttttttttttttaatatgggttttgtttattaattatttgttttaatttaaaatgttcttactaacactttaaatttaaacaacttttaaggggggggggggaaaaggatcctgcaccaaaaaaacctttctcccaaaaaaaaggggccagggccaacaaaaaaaaaaaggggccgaggagaaaccacccatttttacaaaaggaaaaaaaaacttttcctctaaagaaaagaggtacaacttgaaagaaaaacatttgggccaccaaaaaaaacaacaccgcgttgaaaaggaaaaaaacaaacattgagggggggagtagatctaaccaagagggggaggaaaaacgattgcccaaaccaaaaaatttgaatgaggggccgaaactcctaagggaagggggggccttcttttagccacaatggggggggggggggcgtaaaacaaaactgtagaaattgaggggaataaagcggccaaggggggtcttttccaaatttcgccatggggggggggggaaac

SEQ ID NO: 171051 - DNA, 132 bp, Zea mays
  Clone ID: MRT4577_87578C.1
ccggggagtcctgcctgcgctcgcctcagctcctttcttccccgcctcttggcttttgctcggttgcatcgggccggccgagccgcagagtaaacgctatctatcacctaccattctctcgcccgccggtcc

SEQ ID NO: 171052 - DNA, 218 bp, Zea mays
  Clone ID: MRT4577_87579C.1
tcaggcggcgggcgggactactttactctcagttggctaccccattgtaggaggagcttccatccgggccagcttgtcataggagtgagtggcgtctttctcctgccttcgtacttttcagacccgtccgcagcagtccggagcaacaagcgatccgacggctgcgatggggatcggtgagcacttctagggcgtcaaggcagctcctgggtcgagca

SEQ ID NO: 171053 - DNA, 2925 bp, Zea mays
  Clone ID: MRT4577_8757C.1
atgccgcgtacgaggaaaaccgcgcacaagtccactggacctattggcgtgcctcgtcatcagttggctccaagacatgaagggagcagcagcggcagcaacgatccaatcggagacttgaaagcccaagtggaacagcttcagacggagctacgtcaccaaaacagggtgtgggcacaagacggtcagcgtataaatgagttggcaactgacgtcagacgccttcaagacgagcttgctgatcgggatgtggcggtctattgggccatcaactcacgttcggttgcttgggataacgaagccaaagctcgttctcgtgtgacagagcttagtgtggtcctcgataacttgcagatgccatcaaggactcgtgcgcaggacggtgcgggaacttcccgtggtcgggaagatactcctaatccgccacctgtaccaccaatgctggctgaggctatcgctgccttggtcaatgctactgcagataatacccgcttcttatgtgagatggcgggtaatctattccaacagcatggcggaagagctcctccacaaggatcgcgtgaaacctcatatctggaattctcagagacacgccctccactctttgttaaagctgaagatcctcttgaagctgatgagtggataagggtaatggagcagaagttcggattaatccgttgcacagaaacacagaagccgttgttcgctggccaacaactaagaggccttgctagtacctggtggggaaattttgtggcagttcaaccagccagacatcagccgagtgcccctagttctcgtttccccgccatacctagtccttcaactggctgcttcaactatgggaagtctggtcaatttataaaagactgtccatatctgaagcagaataagttcaacaatcagcagaactctgggagctccaatcaaggcaaagggaacatgactaataattcagcgggcaaaaatgttaagaagactgggcgaatttattacactcaagtgaccactacaccggaaggagagccggtaatgatggatacgtttcttgtggccaatcacccagcagtaattctctttgattctggtgcttcacatacattcataagcaagaaattcgtggaaaaacgttgcattccttgcactgaatcaagggaagggtttattatctattcgcttgggggacaaatatttactaaggaagtagtcttccatgtgccagtaacattggctgaacaagactttcccaccaatatgattgttttgaaaggacaagatatagatgtaattttgggcatgaattggttagcccagcataaagctatcctcaacacagacttaaggactatcaagttgagtcatagccatgaagaggttctcttgtccatccttgtagctattccagccaaaccacttggacgggtctatgaagctatcgtgccagaactccaggatattttggtagtatgtgaatttctggatgtttttcatgaagatttgtccggattgcctctagaaagggatgtagagtttgtgattgaactgaagcctgatacagctcctatttctagaaggtcgtaccggatgccaccaaatgaattggcagagctcaagactcaattacaagacttgcttgagaagggattcattcggcccagttcatcaccttggggatgtcccgcaatttttgtgaataagaaggatcaaacacttcgaatgtgcgtggactacagaccccttaatgagatcgatatcttgttcgaccaacttactggagctcgagtattttccaagattgacctcaggtcgggctatcatcagatccgtattcgacccgaagatatacccaagactgcatttactacgggttatggattattcaaatatctggttatgtccttcggcttaacaaatgctcctgcccacttcacatatctaatgaactcggtgtttatgcccgagttggataaatttgtggtcgtcttcattgatgatatcttgatctattccaagaatgaagaggagcatgctaaacatttacggatcgcattaacgcgcttaagggaacaccaattatatgctaaattcagcaaatgcgcattttggttggaggaaatccaatttttgggacatgtattgtctgcaaatggaattgcggttgatcccagcaagaatgatacaaaattcaactggtcctcaagatgcaacaaagccttcgagcagctgaaggtattattaaccactgctctggtactggctcaaccggacattgaaaagccttttgatgtgtactgtgacgcatcgagcagtggtctcggatgtgtcttaatgcaagagggccgagttatagcatatgcttcaagacagttgtgctggcatgaggaacattatccaactcatgacttagaattagctgctgtggttcatgcccttaaaatatggcgtcattatctgatgggaaatatctgccatatatatacaaatcataaaagtctgaagtatatttttacccagtcagaacgaaacaagaggcagagaagatggcttgagctgattaaggattatgaattagaaattcactatcacctaggcaaggccaacgtggtggcagatgcgctaagttgcaaggcttcctgccattgccttacagtaaggactccagacaccacattatgtcaagaaatggagaaattaaacctaggaatgattcaacatggaaccttgaaccaattgaagcttgagtcgattcttctgcaaagaattattgatgcccaaaggaatgataagggtatgaaatatattcatgagaaaatagaagccggcaaagcgaattgtttcagaaaggatgatcaaggcatagtatggtttaataatcgcatagttgtgcctaaaaatgatgaagtcccacagcaaaattttggatga

SEQ ID NO: 171054 - DNA, 357 bp, Zea mays
  Clone ID: MRT4577_87580C.1
gacgacaaatttttaaaatttccactgaccatttttcaacccccaaacggagcccaaaaaagttccaaacatggggggtgtccaagcaaaaggtaacaaacaaacgtttcctaatttccgatgaataaaagactgccgtgattttgtacaaagtggtaccgcccagcagagagtcgtatgacccactccatggacacaaagatcaattttgtcacggtccggtttatattgttgcctgaaccattcttaagctgattcacaccttgagcgccagcttattggagtgaagagcctccgccttagaggatggctgccaaaggatcgcggtcttggccattatccccagcacaatgaacg

SEQ ID NO: 171055 - DNA, 491 bp, Zea mays
  Clone ID: MRT4577_87581C.1
ggggggaaaaaaaaaaaaccccaacgggggttaaacggcaataaggggcaaaaaaacccaaaggcggaaaaattaaaaaagggggggaagaaggggttttcaacaacacaaagggaaatagggggggaaaaggggggactaaaacgttaaaaatttacagtttggcgggtttttttgggggaaaaacaagggaaaaaagcccggggtggccttttaaaaaggcaaaccccgggggggctccccccaaaaattcccgggggggaatttcccgggcccgggggcttaaacaattgggccataaaaaccttgaaaaaccccgggggggtgaggggaccaagccaattaaagggggggcctggggaaaatttaaaggcccccttgggggggaaaatttttgcccgggggggggcaaaaagggggggggcccccccccaaaaaaaaaaaccctttggtctttggaaaaacccctgaaagccccttgggagcccccc

SEQ ID NO: 171056 - DNA, 194 bp, Zea mays
  Clone ID: MRT4577_87582C.1
ggtgtatctttttgtttggtccgggttttctatgatttttgggaggaaacgactcagctaaaaaagaagacccgttagacaaaaggctgaaataaaggaccaagcgggtttccataagatacttcacttgaatccaaaaatcaatcccttccaaaaccaccggaagaaaaaacacggggaaacccgggggaggg

SEQ ID NO: 171057 - DNA, 263 bp, Zea mays
  Clone ID: MRT4577_87583C.1
atctgccaccattttcctgatcacacacagacacaggaagttgagatcagaaaaatgcaggctgccgtctactgccgccgggtgctccgccgggctgcccgccaagggcaggccgacggcgaggagcagggtgctggccgtgtccccggcacaaggacgagctgccccagcaagtgccgccggcacgaccaagagcggggggatcagactacagcggagcgaggtcggggggcccgatgcggggctgagacgttcttggctcg

SEQ ID NO: 171058 - DNA, 424 bp, Zea mays
  Clone ID: MRT4577_87584C.1
cccacacgtacactaacgcgtaaccatatacttattgtatcccggattgttaatgctgcggatactcaatctgtcaaccggtctttgttctccgcatcaactcccatgtctacttctcttagcttgcatcaacacataacgataagcaacatcatatcgcacacgacgacatacactatctccatgccaacagattctacacgccctcttgctccaatacttcactccacaagcgcaggctaatttgaggaagaacgagtgtacacttgctttgctaccaacacacgacatttatctgctctgaaactgtagcgcttactttattttccgcccttctgaaagtatagtcctttcgaaacataaaagatacagtacctcctactgacaccactcttggtttaaatgtaacctgcacgtgtttgtt

SEQ ID NO: 171059 - DNA, 447 bp, Zea mays
  Clone ID: MRT4577_87585C.1
gccgacatggacttcgaatcagagtcagtcccatcttacctccaaccagaccaagaacggtgaactcagcttacctgctgcaccaactggccatgcagcagtcccagcaaaccagcagcaggtagtgaaactgttgtgagagaatgacgttagatgttgcgtactttttagtgttgcttttgtttatacccaacatcatggtagttatttggtttcctttagctctgtcatgtgcgctaacaaccagttggcctattgcaacatggggccacgcttttaaattttattatctctaaaataaattagcacgtttcgaatttatcccaatgaacgtcagagaagaaaaatgtgatgaaggagaaggtaaaaaaaaaacttaggatgttctctctttatgggtgtggcagtttataaggtagaataaggtagaagacagaacacctgaat

SEQ ID NO: 171060 - DNA, 344 bp, Zea mays
  Clone ID: MRT4577_87586C.1
gatgattagatactaccatggttgactagtacttgtacacccttgaagttccaggcagcacaattgtctccaatgcacgggctcacactagtatgtgcaagtccacacaccccctaggtcggtttggcgaaagccagattaattctttagaatgtataggcaaacacaccttaggggttgcactgctttaaccattgatcaggtactagagtagggatccgtcttcagggtcatagatcccacttgggatgaatatcctttaccgcactcatatgctaccgccatatctcttagtggaagcgaccccaagattgttggctttttcgaaccctttcgtaatgtgc

SEQ ID NO: 171061 - DNA, 209 bp, Zea mays
  Clone ID: MRT4577_87587C.1
aaaggggttaaaccccacaaagcaacaatgggaagcttttcaaattattttactggtaaggaactcgcgagtccccgtattttcatttcctttgcattttcatgttacaggggggggtttgtacaccttttgacccctaacctttgtttgggtggacaacaattgccacaatttttcacaaaatttattctgcctggtgtgaacaaaaa

SEQ ID NO: 171062 - DNA, 327 bp, Zea mays
  Clone ID: MRT4577_87588C.1
gcgcgacgcacccaggccacgcgtgcgggggattatatcaaaacacagtgattaattatatcgaaactagtattaattagataacgactatgcaacagtatcatgacgcctatcaatatttgtcaccgtgtgtataataatacgtatattgtgatcacaaagattatgcaatgcaaaccaaatcggcgacgcgtttatatatacttagagatacatatacctgctactactttcttattggtcgggaaccacatactttttgctagtaggtgcttacattagtcttggcgtaaaggtgtcgtggtcacattgcactaatgcacagaa

SEQ ID NO: 171063 - DNA, 497 bp, Zea mays
  unsure (1)..(497): unsure at all n locations
  Clone ID: MRT4577_87589C.1
ttgggtacctcgaggccggccggcgtgcatttcctggacgcgtgcttcctctgccggaagccgctcgccgggaaccgcgacatcttcatgtacaggggcgacacggcgttctgcagcgacgagtgcaggagcgcgcagatggcggcggacgaggcggcggagaagaggaggaaggccagggcggtgacacgtggggccatgttcgcaagggaagcggaaggcccacaggagagcggcaaggtccgggccgggtcgtccatcctggccctgtaaccgtcgggactcgggagtctgtctttttctgtaccaggctacctgacgagacgcgccagccaccggacatcattgttagttagtctacaaggaaacagtaaacaatcgactgatcgacgtggaggcgttctgtattgctttaataaatgctgatccgtctctatctgtacgtatggttangaaaaaaaaaatgaacaaacctcacatctgataaatatgcggcc

SEQ ID NO: 171064 - DNA, 310 bp, Zea mays
  Clone ID: MRT4577_8758C.1
atgcaccctccgtaagctcgaattcggctcgggatatatagtattagctattctagggttgcaataaaactaagacgggggggaattatactaacacatgcggaacaacaaatgaccggtgaactggggtatgtaacagactgaggctagacttgagcagattacaacctgtgaaatgtatgcgaggcgtgcttgaccacataacgtcggagaatgtacggggcatagcatacattaaaaagaatgtcggagtgcttgttctggatgcacatacactgacagtgatgtgttatgaagctaggaggttaat

SEQ ID NO: 171065 - DNA, 367 bp, Zea mays
  Clone ID: MRT4577_87590C.1
gctgatcgaccgagatcggacaggcacgccaggcagctcatcaatgggacgagcaggaggaggaagcaagaagaatcctgggagctcgcgatgccgaggtggggggacgcggaggaaggagctgctgctgacgaggctgtcgcggcggcagcggcagtgaggctggccaacaagatccggaagcgccgcgcggtgtcgtcgtcggggggttcggacccggcggccgggaggcggctacggtccaggaggcccgcggtgctgctgccgcggcgccggaccagcgcgggcggggacatgtcggaatcgtcccgtggccggcattgccgcggaggcggtacccgcctcgccgacgggacatggccgtccg

SEQ ID NO: 171066 - DNA, 532 bp, Zea mays
  Clone ID: MRT4577_87591C.1
cttgattcagttgctgaatcgagcttcgacatgggagtttgcgccgcaagcgttagttctatagttgttctctgaaagtggtggtctttttgctgtatctgtgagacggtaccaaaatcaaaactgcttttggttgaagcagaacggtctgtgggaggctgagttctgcgggggggaagctgaagatgattggtttggtggcctcatgattcacgaacaagccataggcgttagggtaatcagtagcctttgacgactggattgagagattttcttatccttcttggccagcacccaacagttagtcttaattgctttgtcaacgaacatcaaatttccatgcttaagtccaacccagaccgagccgagcctgctctgttggtgagattctgaccgccgtttcctcttgcatatatttgcaggtttacaggctgacagctgcggccgtcttctgttattgctgtctgaagctctgaactttgaaagacaactcttcttagcctcagcggcttggtgcttgaactgtgactgc

SEQ ID NO: 171067 - DNA, 263 bp, Zea mays
  Clone ID: MRT4577_87592C.1
ccgattcccgtcgacccacgctccggcgtggacgttctcgggaacgaggtgcacgttgcacccaacgtcagtgctgcgggtggtaggcatgcgggctctcgcgcgctcctttgcaccccatcaagccaaggtctcactttcctactcccatcgcgctcgagtctcgtaatgctgtgcccgctcgcaggcttcaaatccctgacgattcatccattccattcattccatacagcacactcacagcaaaacgttcttttaccctc

SEQ ID NO: 171068 - DNA, 2987 bp, Zea mays
  Clone ID: MRT4577_87593C.1
aacacctaagcatacgcgcctaactccgcgtcctcccccccctccctcgaagcggccaaggcggcggcagcagtgccggcatgggcgcaatgtcggcttcgatttcgtcggtgaattggctagtcgaggatgacatccttctcaagaacgccgtcgaggctggtgcttcgttagagtccttagccagaggagctgtatgtttttcccgtaaattcactcttcatgaaatacaggaccgctggaattcattgctatatgacccagatatctcaacacaagcagcttctcggatggctgagtatgagaatgaactttctacttccgatccagccaaggcacataaacttttcaactcaaaagcaaaggatttttcatttcagaaacggaaaatagacagtgtaaagaatctatattatgcgatgagaaaaagagtacgcaatgatccacgcaacagtggcgaccttggatttcttgtcccctgttcgtgtacggcaattggtagtgagtgtatctgtggaggcctacctaacaatattgaaccagagctgaattcagtaagccgctatgggcaagtaggttcaaggtacaccattggacattcatattctgaaatgaacgaacatgcttttcatacgaagcatactgaaagcatgacaagagatggggatggcaccagtaatgttgtgtatggctactcagatgtaggccaactatatgaacatcatgcgtacacagcgaataatcatgggaatagagaagggaacaatctttctctaaagagtatcacaaattttcaggattctatgcagtttcagcagttggacaacaatcaatgtggtaatggggtggtagactcaaaggctttggtgatccctaaccatttcagtggaagtgtgcaggaacctatgcctctccaaatgattggtcaacctgagggttctgaagcaccaggtggtgcaatcttgagtcttcagcgaagcgacaggctcgctcttgctgatgataaggatgtaaaatcagaagacagggaccctctcacatttgaagcgcatttagatggtgggatatctggtttagatcacgctactgagtttatggacttcccatatttcactaatagtgaagaccttgatatcctgaatagtgaaaatcttttgaattctccaagtgagggaatccaggaggatttagacgatactgcattagttgttcatggggttagatcaaccatgcaaaatctggttcatgctgatgaagccaatatgtcctgtgatcaaatagatcttggtgatgtgaaaaataatgtagatgcttctggtataatcttatttcctacttcattagtagtgccctgtcctggcctgtatgttgagtgcaaattgaacacagaagatactgaaattccttgcaacgacgatgtttctacaccaacagagtatcctcttgaatgctgtacttctacctttgggcagaaatctgagaatactatctattccgtctcccctgcaatcagccctccatcaattgctgaacagcccaacccatccacttcagaacaaaaagaagattcagtggctcatgacgaaggtggtgtcctaggagctaaaccatcagaaggtgctttaacagttggaggccttttgcctggtaacattgacacaaatgatgcaaacacatgcatgctagctttgccttcttttagcactgctggatttggtgaaggatcaccttgtagtttaggaccacacgagagctttgataactctcatggtttgactttgcaaaattcagttcaagctcctgatcagatgcaacacaactcacttgatggtaaaccagaattaggtgacaaggctgctctacagaactgtatgccatcaaatgcactgcccgatttggatattcagaacactattgcaaatgcgccaacaccagctcaagcagaagaatgccctgactatgaaaaagatgttccaaattactatgatctagaagctttgattcttgaccaggatcttatcccgtgggaccaagactccgattttatgcatcctgaagttaccggatttcctcacccggaaagcaggaaggcattgattagattggagcaaggtgctcggtcttgtatgaacagagctatcatgtcgcatggtgcctttgcagttatctatggattgcacttgagatgctacataaaggatcctgaggttactcttggaagagagacagaagacattaaagttgacattgatttaggaaaagaagggagggcaaataagatatctcgccgacaggcggttatcaagatggatgaatctgggtattttcatattaagaacactggaaaatgtccaatctttgttaatagcaaggaaataccaagctgcaaacgcatcaacctaagctcagactcattaatcgagataaaggacatgaggtttattttccatgtaaaccaagaggctgtgaggcagtacattgatcgtgacctgaagccagaacgctaatttcccctggctttccagtcagcagcagcctgtgagtgactgcctcattaacagcaatagaagtagcatagcagtaaatttgagtaagcattgctcgtttaggatgttccttcatatgatgttaacaagttaggttcacttggctccggtctgtaaatggttgtagtttgttgcgttttctgtctgtttggcgggcataaatcatgcatataaccagcgcatttgcttccagtttgtacctacactcccaggaatgatttcatttgtaatactggcaccctagattgtggtgactgccgccaagagcaagaggcaaccaatgcaataaagtgcggaaaagaatcaatagaagggtagattctagggtagaacaggaggagggtgcacttgtgcaagaaaccattcggttcttgcgacgctataagcataaactttattggtttttatttatataccctgatgatcttgaagccaagggac

SEQ ID NO: 171069 - DNA, 341 bp, Zea mays
  Clone ID: MRT4577_87594C.1
gggggcaaaaatttggggtttaaaatggtaaaaaaaaaatttggtggacaaacaaacaaaaattttttttccaacccaaaaaagcgcgataaagagaaatttttttgtagacagaactttttaattttgtcggaaaggaaaaccccggagggttttttggttaaaaccgggggggaaacccaggaagactggaatcccctcctttttcaaaatggccctttcttggggggggggcagtaccgcccctaaacagggggcataatcttttggcaaaaatatttcttggggaggtttttctactccagcgccgggggaaaatttttgggggggtttattttcac

SEQ ID NO: 171070 - DNA, 395 bp, Zea mays
  Clone ID: MRT4577_87595C.1
ggccgcttttttttttttttttttgtgcggagtacagcagtattcgaacacaaaatatcaccactgagtaatcctaaacacttgttacaaataaacttaattttaaactacaggcaggacaaaactttaagcctagacaaaagcacagagccaagacaactctataagatcacgtcataagcaaccggggggacagactagcctagatctagaactagcaaacaaactactcgggagcataaacctcctgcccagccccatgtccctggcaggcctgtcaagcttcacaccaacatcctggtccctagcaggcgtgaacctgcatgagctctccgaagatccaacagggcggccaagaggatgttcaccatggcggatgaagacgttaagaagtg

SEQ ID NO: 171071 - DNA, 522 bp, Zea mays
  unsure (1)..(522): unsure at all n locations
  Clone ID: MRT4577_87596C.1
ggccgggagcatcccaccccacgcactcccagccgccagccggctgccggcgagcgcacgccaaatcatgaaatcagggagagacgagtgcaatgctgggcatcgggcactcgggcttgggcctcggcagtcctaggcacccaagcgaccaggtcgcgcggtcgtgctcgtgggcgaggcgtcgcgcacggtgacggcggacggcgcacgcgcgagcaggcagcactgtgccaccgcagcagccgtcgacccagcgtccatcctccggtcctccctccaccacgccttcgtcccttcaccgcatcgtcttcacctccctcgtcgactcgctatcctcactcggcctccctggcaaaccctcctccagcgacgcccatatagtaggtgccagcgtgcgtgcgtgaacagtgtgggtttctaaaatgctcccgcacaatctttgaagatgccagaatattatatgcaactcgttgtataaaaaaaaaaaaaaaaaatttgcgggcgnnnnaaaaaaaaaaaaaa

SEQ ID NO: 171072 - DNA, 682 bp, Zea mays
  Clone ID: MRT4577_87597C.1
ccggccgagctccacctctcgtcatctcttcacttttgatggggccagtgctgcccgtggtgcccgaaggaggccacaggggcctttccccctacaccctcaaaggctcgtaggaaagggtggctgaggcggagaggtggcatcatatcaaatcagcctcgacctaggccggcatgagcctggagaccattgagcgcatgcttggtagttttggagaggcgacttcgattgccagggtgtcgatgacgcgagattttgtcccttttggccattgtctcttcatgcggttaacggcttggacagaggcattgttgtacgtttaggtggaattggagcagttacgcgcgagggccgcccatctcgaggtcgatcgacttcaaggtgaggcgtcgagcctacgcacggagcatgacgttgcgcgaggtgatgcaaatcgcctccgagaggagaggtctcaactccaaggggtcctccgcgagacaagggccctggtcgaggaggctaagtcgactcttacggtgtgtttggtttgtggagtcactctatgcttcatgaggtgatacatcataagttcattccatcaattttaaaaaaatcaacccggcggacaaaaatatactaattattagcttatgaggaatgggggtggtgatggacaaaaaaaaaaaaaaaaaaggggcgg

SEQ ID NO: 171073 - DNA, 647 bp, Zea mays
  Clone ID: MRT4577_87598C.1
gccggccggtccgggagaggataccaccacgcgcaggaaagcgagtacagggccaccgcacgcaatcttcgacacgccatcgattcatcctggatgagcgcactgtggatgtcaccagggagccatggaagctagtgcagacatcactcgggaccggagatgccctgctcacggtggattgcacaccgacggaagtctcagccatgaatctgccccacaccgcgagtcgatctcttcgtgacatcaccactgataacggccagttggtggagtccgaaggagttgcaggtgaagaccctgagcagcagtcggttggtgaaggttgtccatgttgcaaccactgcttaggtgaagatgaagtcgtggaggaggacttccaagagttccaagagtacgatgagttctaggcgtgggttagcggcaaaccccgagtcggctgcctgtgtaggccgtgtgtatctacgtttcttttccgcactttgattattgttaaatactatgtggatgtctcgtacatcatgatgtaattgactattataccctattttatgtcattattttagcactgtgtgatgatttccagttatataactgctgtgtacgtgaattgttgatcctggcaaaaaaaaaaaaaaaaaaggccccta

SEQ ID NO: 171074 - DNA, 493 bp, Zea mays
  unsure (1)..(493): unsure at all n locations
  Clone ID: MRT4577_87599C.1
gggttnttnnnnntnnnnntttttttttttttttttttttttttttttttttttggccggaataacccccacttgaaaaaaaaacctgagggggggaatagaaaacttgatttattttgcaattcatacagaaaacttttaggacagcaaaacaaagggggggggggatggcaagcttaccacccgggcaaacgatcggaggatcaggacccatcagtagtcgtcgtcgccgccatagtcgtcgttgccgccatagtcgtcgaagccacccccgtagccgccgccgccgccgccgtacaattcctccctttccaggttgtcctccacccgttccgacacgcgctccttgaacttgtcctccaggtagctcgccccgccggccagggccagcccttcgagcacgcccgccgccgggcccactggcagccccgtccccatccccattttgttcttttttttcccgtcggaagcaacggcgccggttccgtacgcg

SEQ ID NO: 171075 - DNA, 249 bp, Zea mays
  Clone ID: MRT4577_8759C.1
tcgcccacgcgtacgggaacagctagctatagcctgtggctagcagctagcttgagtcacagggcggacggggggctcacacacagctagccgacgtcgctgatagcttagacaccaggagggcgcactgatctacaggcagggggccagaaggggcaggtagctagctagtcgtgcgccggcagcatgatgaacctgaacctgaagcagactctggtgctgatcgcgcactacagtgatgtctacagc

SEQ ID NO: 171076 - DNA, 199 bp, Zea mays
  Clone ID: MRT4577_875C.1
gatccaagcgtccagacgaagccgtggtgcctgtagacgacattggcagtatgaggaggtataacgagacgttgagcggatgccaaacaccactcggttggatatgcgacctcgcgagatccatcgagtcgctgacgacatagacatcggatcatcaggggttatcacgatgaatcagtgcatacgctgcgaatgcaga

SEQ ID NO: 171077 - DNA, 1054 bp, Zea mays
  Clone ID: MRT4577_87600C.1
ctctgtgttcatggcggtctttctcctgatgtacgtactattgatcaggtcggtgacttctcttccataactttattataaccatctgtgaacacatttgttataaatgaataaacccttaagtatgacccttccaatctcatcgggtgctgagcttcgtgtcttgtagtttgccatacatgacagatacctcaagaattacagttgtttgaaaacttcactgttatcggtgataaataaaatgcttcagtggataaaaatttcgacctgcggggggtaagacagcccccgagcattgcattaagagaagactttcttacacaagtcggaaaaaaccctgtatccctatcccacccatacataatggtaaactagcccctgagagaagactgcatgggttttaaaggggtaaggcgagacaaggtgttggaccactgcctgaacgcctaggcgaggtaggcgggcaagacgcctaggcgttggacctccgcctggacgcctaggcgacgccttaagaacagggaaacacactatataagtccagagacaactgaaaaatacgatgacagtagctatatagcgagagcgcacaaacatgaagaaattgtcttttctttgggatggtagctccgtggctggttgagggatgtaaaaagtgttgaggtcgatctcatccgactcggtcaaaggatcaagtcagacacaactatcatgctttggtcaacggcgcaataactttatggttgtgatcccctttcacaccacgtacataaatagggagagggccggcgcacgaagcacgaactaacattcttcgtagtctcctctctcgtacacctctagtgagatccggtttgtctcttacgtggctagtgaaggaaaggccaccgcctcggagtggagctacaccaccctaatgctatcaccgtccaaccctgaacgtataattcaagttctattgtatctagtggctagggtttgagcacaagggtcatatacgagttctaacaaaaagttaatagtttgcatgggacaaggacagacatcagggccc

SEQ ID NO: 171078 - DNA, 379 bp, Zea mays
  Clone ID: MRT4577_87601C.1
tagcaagattcgacccaacacagcatgtgcacaccagcagagcacatgtgcacaaacaaagcatttgatcccaaccaacgaggcaagttaatagtaaatgctttcgtcgccttcaatagcttaccgaaccttactgcgtttgtgagcacggtgctagtgaaagtggctgagcaggtagacgcgaacgtggaagaggctgatttggacggtgaggccggcgtcaagcaagatgtggactgcccagttgttcattgttcatgggccgactcacggaggccaaattcaaggggaagagcgtctttgtgcgctgtgacctcaacatgccactcgacgggcaccagcgcatcactgacgacacccgcattcgggccaccatccc

SEQ ID NO: 171079 - DNA, 793 bp, Zea mays
  Clone ID: MRT4577_87602C.1
gccggccggttctggaatccatccatccatccatccatctcgtgagcgccggccaccgtcaatcgattcgatttgatcgttccccttccccgcgcctcctcgttcccctgaccagtcgccccgatttttttctgttccaggtcgcttctctctgttccgcgtgcgatcgagtagatcaaaaggaggaggaggatggcgaggagttcgttcaagttggagcaccccttcgaaaggaggcaagctgaggctaaccgcatcagggagaaataccctgacagaatccctgtcattgttgagaaggccgagaggagtgacatcccagacattgacaagaaaaagtaccttgttcctgccgacctcacagtcggacagtttgtgtatgtggtacggaagcggatcaagctaagcgctgagaaggcaatcttcatcttcgtaaagaacaccctcccaccaacagctgctctgatgtctgccatctacgaggagaacaaggacgaggacggcttcctctacatgacgtacagcggcgagaacaccttcgggctgttctgagtgggcgccgctatggatccacattgggcaatgcctcctgtaaatactaaacatgcatcacaagaatctgtgtccataacgtaatctggtctgtctgtctgtctgtctgtctgtcattacgcaacttgacgtgcaatgctaaacacatttaagtaataatatatactactctgctttgggatgcttcaaaaaaaaaaaaaaaatgtaacatgttgaaaaaaaaaaaaaaaaacccgcggcc

SEQ ID NO: 171080 - DNA, 151 bp, Zea mays
  Clone ID: MRT4577_87603C.1
gctatgcgtgcgcccacgcgtccgtccactggtgcggctgtatatgatgactggaaccacattgagaacgctatgctggtgggggtacataccgatcgtgttatgatcgatagtttgtggcccatggactccttattaactcagtgtaata

SEQ ID NO: 171081 - DNA, 462 bp, Zea mays
  Clone ID: MRT4577_87604C.1
tcgagcggccgcccgggcaggtacaagcttttttttttttttttttttttttttttcttgggtttttttttttttttttttttttttttttttttttttttttttttttaattttaatttttttttaatacttttttaatttttttttttaaataaaaaattatatttttttttttttttttttttttttaaaaaaaaaaaaaacattttttaagaaaaattaaataaatttggaaaaaaataaaagaagaaccgggggggaaccaaagtttaaaaaaaaaaggggccaccccgtgttatagggaaaatttgaacaaaattggcctcccccaaaagttcccaaactaaaccacaaagggcagagagggggtgcctatggggtcacctagaaaaattaattgggttaaaatactgcccaaaaaaaaaaggaaaaattgaggaaaaattgttggagggttttat

SEQ ID NO: 171082 - DNA, 187 bp, Zea mays
  Clone ID: MRT4577_87605C.1
cgacccgaatttcccggggggggcacgccttccgggttaggcttcaatccattgtgacccctttaaccaaatttgaccacccttaaaaagggggtgctcttcattgtggggcaacaaggtgcaattatcctcaacttacaaactttattgagagtgatcctcgaagagcaagttgaacccataaaca

SEQ ID NO: 171083 - DNA, 261 bp, Zea mays
  Clone ID: MRT4577_87606C.1
ctttctcccctcttccgcacccgcttctcgctccggattccctctgctgttttcctaatgttggttgctatggtggggcgaggtatcgcgattctctttcgcctcgtctatcctgccacgtccatgcgctccaaggctggcctccagttccccgtgggaaggatcgccaggttcctcgcggccggcaagtctgccgagagagtcggcgccggcgcccctgtctacctcgctgccgtgctcgagtctcttgctgctgaggtt

SEQ ID NO: 171084 - DNA, 101 bp, Zea mays
  Clone ID: MRT4577_87607C.1
agcacctggacctttccatcagtgagaagttccatgaactccaccgtgacttgcaccagggcattgaggcagccagtgaccaagacgatctgcgctggtgg

SEQ ID NO: 171085 - DNA, 690 bp, Zea mays
  Clone ID: MRT4577_87608C.1
actgcgatccgacacacctgaaccctattacaggtagacatcctctcgcctgcctgcgtagaggatgagccaagctgagctgatcgtcggcctcgtggcttcgctcttgcgggtgctattctcctccctccgcctgcacgagtagatctgccgcggagagctatgcggcggcgtagatctgcgagggtagccaagaaggaccacgagggaaagggcctgcgaatagttcaggtagcgctcgatcgcgaccaccgcgagggcgctgtaaaatttatggatatcgctggggtctcgagccctcactagcgcatcgaggaccggatcacctgccttttccacgcgcagagaaagtcgacggcttcgtcatcatcatcgccgctgcaatcacagccgactggcgcagaagtcatcttcgacgtcgatgacactgatgctctgagatacatgaagcacacaggtcaaaaggaggaaagaagaagactgtacgactcctgctggatggtgctcccgcacggagcagctccaattccaggacagacacggaaacaccacggaggtgatgctgtccacgctcagcatggacaacgctgcctggagatcctcgagttcaaggtcttcggaaagatctgcccacggaggacgcgaacaaggagaccgacctggacgcactggacatcgtcaagctcaagg

SEQ ID NO: 171086 - DNA, 567 bp, Zea mays
  Clone ID: MRT4577_87609C.1
ctcccacatccgatcacggaatccttagttcatgcgatgatccgcgagcactcataaagtgtggcaagggcgtggatggaattgtgcaacagtgacaccaagcgtaacacgtagagctatccgttacaacattcattgcataacctaacactggaaacagactctgtcaaggtggggcaaggttataatcatttattggctgatctaaaacaatacctgaggaccgctagatacttaattggtacaaacaatcaaaggatcaccaacatacacaatgctcgccctaagcaaacacccaacagtcatggacctaacatacaccataaaccaccaactatttatcctttaccgttactgaagctcaaaggttctacactcaatggacagcggatccaaagaaaaacttaaaattcaagaaatgaactatatccaggttcaattgatgatgtacgctgtattattataaatagtcattatatgtacaatatgttacttctgactactataagccaatggcaaacacttatatatgaatgcagaatcttcctgttgcctgatgagcaaggt

SEQ ID NO: 171087 - DNA, 555 bp, Zea mays
  Clone ID: MRT4577_8760C.1
tcgccttcatgcgtacgtattcttttcttctctaatgtcttccgcccttttttttttttttttttttttttttttttttttttttttttttttttttttttttttttttttttttcaaccgagggtttttaatttttttttcaaatctaaataaatgtacaaaatgggtggggatgatgtacattgtttgctaagttcctgcattgggtgtttcgttttacaaaatttttaaactacagatttggttacagcttaaagccttatttttggggggggggatccacccatcggccatggtctttgatcagttggataaaggcgtaagttgcaccttccatgggaatggccccctgaaaaacggttttgccaacataaaggtcgttttttccgggagcgcctccaacgtttccaaaatgggcttaagccatttttcctggtccattgacaatacaacccatgatggcgatcgaaacacctggcaaatgagaggttttttttttaatttaagcgctgtattcctgaaggaaaaaaagtgttcggccccaggaaggacaa

SEQ ID NO: 171088 - DNA, 1285 bp, Zea mays
  Clone ID: MRT4577_87610C.1
gcacgagcctgagtcctgaaccgcctcgagccgcggcaggcttcgaatcccgacaacctccctccccaagctgcttagccgccggctgggcctcagacctgcgtcaagcttccggcggcagcccatcgagcaccacaatggcgtccggcggagcggccatctcggcggggcctacaccgccgtcggcgacggcgtcgtcggttgagtggcaccagcggccgccgaacccgaagaaccccgtggtgttcttcgacgtgaccatcgggtccatcgccgccggccgcatcaagatggagctcttcgccgacatcgcccccaagaccgcggagaacttccggcagttctgcactggggagcatagaaaaaatgctttgccacaaggttataagggctgccaattccatagagtgatcaaagatttcatgattcagggtggtgacttcttgaagaatgatggtactggatgcacatcaatctacggtaccaaatttgatgatgaaaattttatagcaaagcatacagggcctggactgctctcgatggcaaacagtggaattaactctaatggatctcagttctttataacatgtgcaaagtgtgactggcttgacaacaaacatgtggtatttgggagagtgcttggagacggtttgctcgtcgtgaggaagattgaaaatgttgcaactggagcgaataacaaaccaaagcttgcctgcgttataagtgagtgtggtgaaatgtagtttgatccctttgtgtggctaatcgtggattcttgacgctgctgatgtagaccctgtttggttgatggaagtacttaaacagtggaaacattgatggaaatgtattgtgtctaggcaacctgcagaataatagaccaaaaaaactaatattcttgtttggcttgggagttcagccttatgttgtgcggaacatgtttgatcctgttgtttctgattagagatggcaatggccttgatcctttattccccgctggaaaattcctccattaaggactagtttgggaacttcaatttctaggggtttttatttttccaaggaaaaataaattagtttttcttaagaaaatagagatttccaaactagctctaatcgagaggatgggaaagtttctttccatacgggaatataaataggaaaagttccttctccatagggatgagaacggagaagtattccccgtttctcacggcacccattaaacttgtacttaatgatgttttagtgtgtaatagataatgataaaaataaataattacttttc

SEQ ID NO: 171089 - DNA, 196 bp, Zea mays
  Clone ID: MRT4577_87611C.1
ctcccgatctagattgctaacctcttcgtcttctgtttcatgacctacttcttcgtgtcctcccggcgggtcttgatggagctgtacgccaactatgtgcccaataccgctcagaactttcgctctctgtgcactgtccacaattgcgtgctcaatttctttaagccgctatactacaattgctccatctttctac

SEQ ID NO: 171090 - DNA, 300 bp, Zea mays
  Clone ID: MRT4577_87612C.1
gggaagcagaagcgagacaaatccccagccggctccaaaccctagccacctcccccgtcgatcccttttcatcacccagatctcgctggtgtctgctccgcctcgcttcgatgtgaccctaccctacggtttgagaccgtgttgcggtgtgtgcgtgtgtcgcggcgattcgcgactcgagtacgactcaaggtgtcagaggcggtgcgagcgcaaatgaaagactctgcgcaccgcactacggtggtgctccggcggctgccgccggcgatctcgcaccaagtcgtcgtggtccaggtc

SEQ ID NO: 171091 - DNA, 262 bp, Zea mays
  unsure (1)..(262): unsure at all n locations
  Clone ID: MRT4577_87613C.1
cttccgcttctcttcgacagaaaactagggttgtgctcttgcatctctctcntcgctgccgccgccgccggacagtgcaccgacgatacgacctcatctatcctccgatctagccttttcatgcgcggatcccgtacaagatgcttccctctcgctctcaagatcgccagggcaccgaatctcgtgagctgaagaatgtgagcgtacacggcatctggtcattgcgacacgggatgacatcgacttaggacgtattgcactc

SEQ ID NO: 171092 - DNA, 194 bp, Zea mays
  Clone ID: MRT4577_87614C.1
gtgccgcgtcgttcgccttcggcgatgcccgttgacgatgcgcagaggcggcggagcgatgcagcggggggccgggagcccgtggtacggaccggaccgcttgctgacctggggccagtgtgcggaaagcgatcgagctacctgacgggcgagttactggtcgactactgctgggacaccggggggttgtgttt

SEQ ID NO: 171093 - DNA, 296 bp, Zea mays
  Clone ID: MRT4577_87615C.1
gaattcggctcgtgccggttcgactggcctgttatcaacccggcggcccctaactccacttagggggaccactgcagataatcggcggatctaacccccctcatactgtataccgacggtttcttgcatttcacggatcgggttcgcgtttactattcaacactttgatcatattgcctgatcctgacaccaccggtacgatccctgttctttgcaacaaatgccaacgcaagctacctgaaacaactggctctgtcaaattggcaaaactagttggacgcacttgtacatatcct

SEQ ID NO: 171094 - DNA, 284 bp, Zea mays
  Clone ID: MRT4577_87616C.1
ctaaaatagaatatagcatctttcatatggtaggaaccaacaaggaaactttcctttaactccctttttacactttatggtaagtagcagggggggaaatgcatttatagatcatttctaggcaaaattgtgaagctaatgaccaacctgtttctacctatatgcagtctctttatattactagaaatgggaatcatggcctcttgaagagaaaaaagtcaccattctgcatttagctgtattcatatattgcatttctgtattttttgtttgtattgtaaaaa

SEQ ID NO: 171095 - DNA, 375 bp, Zea mays
  Clone ID: MRT4577_87617C.1
gggggggaccaaaggcatattccattgattcctggaactggaccaggggcatattggatttgcttacgccttaccataccatctgcagtgctaggtttgtcttgtacatacatacaaacaacacagatacatgtgaactacaccctgggggaaacacatacagcatgcataggctcctaaaaccaccatttcccttgggcatgctgggggcatgatcaggcgatatattatacagcaagggggcgatggttatcattggcagcagggcgcgaaccagactggtgccctctaccgcttgtagttacaaaatggggcatcccttttgaaccttcttcttcctcttcttttggtttggtggctggagaaccaccttaa

SEQ ID NO: 171096 - DNA, 336 bp, Zea mays
  Clone ID: MRT4577_87618C.1
gccttcttaccccagaaaccggagcttttattatagcacagaacccagcgacacagacatgatcctccactctcagtcctgtgcgaataaccagacgccgaccatactatccattgaccctgcagcaattgatcctaacccgcccctgcgaccctgtaagcgggctgacgttccacatcttcaccatcccccatgctaaagcgctcgcgaaggctccgactttggccgctaagctggccaccgtgctcactgcccctccggagaaaaaaagccactggtccgagtgcaggacaccccatcgagacagcaggttcgaggtgcaggcgccatcaaaag

SEQ ID NO: 171097 - DNA, 341 bp, Zea mays
  Clone ID: MRT4577_87619C.1
cccaccctcctttttctgggtaggggaaattttttcttttttttcgcccctaccccccaaaaaaaactctattcccgtcacgaaccaattatactaactcacacaaaaacccatcgcgcccacctaacaaacccaagtcccaaaaccctggccaaaccccaaaccaccaacaaacaaaaggcacccccgcaaacacaaaccggcgtgaaaaccccccccccggcggtctaaatctccctgaagaagaaattctccctccccttcaggaactagtcgggccaggaggagatatcccccttaaccctggcctgccccaacaaaaaaacgaagccctcccggaa

SEQ ID NO: 171098 - DNA, 328 bp, Zea mays
  Clone ID: MRT4577_8761C.1
atccagccatacattgttcccgttttcttttacagcttatagtctcgcacatttaaatgaatttactcattgaaatagcaactttgtgccaccaacagtacatgttgctgcttttttcacaattccagcgaagacttgtcgacctacagcttccaggcgaacaaacataatgataagctgcaaaacgtcgaaaactgcagcggctggaccaaacatgctacctgccctccgaggattccccaagttaacgaacagggatagacaacccgagagctcaggtggaccgaccagcaggtcagaatggagagacctaccctttacatgccga

SEQ ID NO: 171099 - DNA, 473 bp, Zea mays
  unsure (1)..(473): unsure at all n locations
  Clone ID: MRT4577_87620C.1
ttttttttttttttttttttttttttttttttttttnttttttttttttttttttttttttttttttttttttttttttttttttttttaggcaacccccacatggggggaacacctttattgaagcattttatcagcgggttttacaccaaaagcttggacattaaattggaaaacccaacacaaacaacaaagcaactcaaaaacccactttgttttaacactgacaccggccgttccaaaaaagaacactgaaccccccatgttaaaaaacaacccatgggcaaaaactccttccaaaagtggaatttcctggcctggtgccaacccattcttgattggggggttgaaaaaaaaaaccaccatgtattttgagttgtcaaaaaaaaaagggttggggccttaaaaccttaattttgcctcaactccttcctccttaaacaagtcctgcaattttacaaggggggacttcc

SEQ ID NO: 171100 - DNA, 506 bp, Zea mays
  unsure (1)..(506): unsure at all n locations
  Clone ID: MRT4577_87621C.1
cgcgaggctcctccctttctctatttctctgactagtacatactacgatatgctgtctccgcgctcgtccgtgcagccttttgnttctctcttgcccttttaccctaacttaatctcttgggcccaagggaagggaagggcctgggnatttccgttttccttcccggggggnccccaggggtttgggggccccccttttttattatcttgtctccccccgggggggggcctttttttattaaaaaacttttttttttttttcccccggggggaaaaaaggggggggaaccttttccccccatataaggggggggcccttttattcctttttttttggaaaaaaaggaaaaactttcttttaaaaaaaggggccccccccccccgggggaggcccaaaaaaaaacccccccccttttgaaaaaaaaaattgggggggcccacaacaaaaaaaggggggggggggggcgggggcggcggataaaaaaaaaaagggggggggagaaaaa

SEQ ID NO: 171101 - DNA, 442 bp, Zea mays
  Clone ID: MRT4577_87622C.1
aaggaacgaatctaagggccaatctctggggggggcctttatttatcgaaattattcaagacccaacaaggagcagtaggaaaaaaaacggggggggactggaatccccccgaaaaaaccgggggagcaaaacaaggagctgcctttggcggcaggcatcatcacagggatcgcacgtaaaccccaactggggggggggagaacccaactcgggcgaaaaaacccaccatggccctcccttgctgcacggggaacgggaatggaggggcactcccggccccccatgctccaaaaggcccctaggtcttgaggcttgggaccaacctgatggggggtatgacggggaggccctcaactttgcccaacgtcccggacaggtccgggagcaccttggaggccccgagctggatcaccggctcaatttctccaccggaaccgcccc

SEQ ID NO: 171102 - DNA, 481 bp, Zea mays
  Clone ID: MRT4577_87623C.1
aaacaactacatggcaatgggctaggtatattaattaattattacaaaacaggatgcagaatatgagccatgcttattattacaatgggaataatatgccaagattttacacttggacgttgacaccaagagtgaatatgaaaggccggaaattacatatgcttagggaaaagagacactttcaactccgcatttccatccaaatctgacataacgccaccatccggaaactgattattgcagggcactctgaaagtgagtgaagagaagccgcctatacagtgttctgcatgccggcggccatgcccttcatggagaggataagcgtgtcttcgagtccggaacgggtactagactcgccgggtgtcagccttgaccagcctcggctggacttgttctcgtcccgtgaacatactagagacataatgggctggggcgtcaccttgaagatatggtcccttatccgtttaagcgcgtaggc

SEQ ID NO: 171103 - DNA, 429 bp, Zea mays
  unsure (1)..(429): unsure at all n locations
  Clone ID: MRT4577_87624C.1
gtccggccacgcgtncgagcacgcgtacgcccacgcgtccgtgactggttatgctttccgcagttaggcagcacgaatgccgggtccatctcctgctgagatgcttcccttctctttgttgatcaaacactttacacccaaataagcaactgcattgacattgaccctggctgcaccaaaactacatgaactgaagaaacttgtggcctgcgtgacgcggatcaatcagaacataaagttacggcttctggttggtaaattatgctactcttcagagtctgttcccgcattgtggaggtatcttgttctggactggctctgccgaaactagtttccgggttttccatgtagtttttttatggttgtgcaacttctcgccgggaccagtttaatgtttatcgactttgattggagatgacccgatgcttt

SEQ ID NO: 171104 - DNA, 272 bp, Zea mays
  Clone ID: MRT4577_87625C.1
atctttaccatcaattatctttcatcttagtagtataggcgccagttcaattctgcaacatcaattatctaactccaaaaaccatgaagctggtgcttgtggttcttgctttcattgctttagtatcaagtgtatcttgttcacagacaggcggctgctactgtggtcaacaacaaagccatgcgctgcaacatcatccacaacttcattatccactaaaacaactacatcaaccaccacctcaacatcacctgctgttgctactccaacaa

SEQ ID NO: 171105 - DNA, 268 bp, Zea mays
  Clone ID: MRT4577_87626C.1
agggcaagcaaaatttttttttttgggcccgaactccgggggggtttaagacaaacatttttaaattccggaatcagcccacctttttaaccttgcgaactaaatggccccccaaagccttaaaaaacaaaggggtgaacagggttaagggtttaagggggctggggacaaaaaagaccaagccctttccggcccggggggaaaccccaggttcccccaattaaggccttttggggggtataaacgggccaacggggggtaccaaaaa

SEQ ID NO: 171106 - DNA, 316 bp, Zea mays
  Clone ID: MRT4577_87627C.1
gggccaaccaagcgagatatatggcacaataatagagtttatttggccaagatacatacaacagatttacagaactttacaaataaagcttttttccagggcaaatgaagatgcgcgcccacacccaaaagatcacattaaacagacacttatgcatttttaacgggcgggcatataagtacagcattttattcgggggggggggtcccgcatgggcacatttccacgatgatggacgcccatgcccttcaaggaaaactagcagcagcagcagatagccttgaggcagcacttacaggttttgaagcaacaaaag

SEQ ID NO: 171107 - DNA, 641 bp, Zea mays
  Clone ID: MRT4577_87629C.1
agcgagggcggctccggcggcacaatcatcgactccggcaccacgctgagctacttcgtggagccggcgtaccaggtgatccgccgcgcgttcatcgaccggatgagcggctcgtaccctccggtcccggacttcccggtgctcagcccgtgctacaacgtgtccggcgtggagcgacccgaggtgccggagctgtcgctgctgttcgccgacggtgccgtctgggacttccccgcggagaactacttcatccggctggacccggacggcatcatgtgcctggcggtcctgggcaccccgcgcaccggcatgtccatcatcggtaacttccagcagcagaacttccacgtcgcctacgacctgcacaacaaccgcctgggcttcgcgccgcgccggtgcgccgaggtgtagccgccgccgagagcctgcccgagaggaccaacaattccaactcggtcctcggcttgattgaatgcattgggtgtagatactttttggtcaaagtataaagttttgttttttttttctctttgcacttttcaacgaggagagaagataggaacgttgtagtgctagagcctagaggtcgttgcaacgggaaacacgggatttgaataaatggctaaaattgaggattgcaa

SEQ ID NO: 171108 - DNA, 147 bp, Zea mays
  Clone ID: MRT4577_8762C.1
gggcccctagaggattgacggcctgctgaactaaacttggagattgcacatgtcacacgaaaggttgcagtgtgaactatccgggatcaaaaggatctgctaggatgcaggcgccttcttgtctgtgacctgcaactggcagctttg

SEQ ID NO: 171109 - DNA, 350 bp, Zea mays
  Clone ID: MRT4577_87630C.1
cctgggtcgtcctagggtggctgctcatattgccactggaactccatccagatagggggcacatgcaaattgttagggcactactctaaaatcagtcaccgaacactaaatctgaaagccatcgtgatgctctcctagctatattctgccagcacctgtacctggacatcatgattaccaatgtgggacataccgtacaactagcttcttaactgccgatagttcatgaccagacgtacttgaagcattgcgactcaccacccgagtgcgtagcctaagagaacatactgaccatagctggcggacattctcgcgtactgctcgttccacggatctgtgcatcctcatgt

SEQ ID NO: 171110 - DNA, 472 bp, Zea mays
  Clone ID: MRT4577_87631C.1
acgtaagctcgttattcgtttcgagtacggttttcaaggacggagtggtgacttaggacatcaacgcggcgctggccaatgtgccgtgaagagcgccatttcgtgacgtatgacgtgaaggccggaagtacagggagtacgtgtccgtggtccggtgcgtgagaacctggtgatggtggtgtctggtcccttatatggtgatatttgttatctgatcttattgtgaacttttacccttaggtcacgttctcgttgtattgctatcggttacatatttcttgtgtttctgtttccattcttgttataattgcttgcctttatttcttttatgtaactttatttcatttttaatttttattttttttttataatttttaatacttattcatcttcttccttttatttttattctttcatataatcttctttcattatattcttttaatatacatacctcttgtctattttattt

SEQ ID NO: 171111 - DNA, 461 bp, Zea mays
  Clone ID: MRT4577_87632C.1
ctctagccatttggctaacacgcgctaactcctaacagttctggggcatgagagtcccaagttttcccagggatcacctaatcaccccccctataggggctctaaaacgtaagcacaaatacacagagcacctgtaaaatgcttaattgagatcccacaatgggagagcctttaattgtctacaagctgggaacttatcaacaaagggcatgaacataagggggggcactctacctttcacagcatcttgaaaggaaccaagaaccccatccgttctcaatcctgattgtaccaaattgccatgcatgctgtgagatgttattatgtacatagtatcctggcaagaaaaggaggatacaaacccacccgtactggacaacatcacctccttcaaatcctgtgaatgaactcatctctcaaacaactatttcgtgctgggtagactgcaataatcaagtttt

SEQ ID NO: 171112 - DNA, 360 bp, Zea mays
  Clone ID: MRT4577_87633C.1
aattcggcacgaggcgagaagggggaaaaacaatccaaacactctcgccagcacacaaatctcgcgcacgggttcgggggcgccagctcgatccgcggccgaaaccctaggtggtgacgacggtggtgctccgtggtggtgctggaggacgaggaggagggctgggagcgatgacgtcgccgaggaaggacgcggggttcctgacgcaggaccagcgggagaagctgcggatcgcggtgcagaacgcggagacgcagtcgctcgcctccccgcgctcgcccacggggggcaccacctccgcgctgctgcagcagtacgagctgcagatgctggagcagaagcgcgccgcccgcggccgcc

SEQ ID NO: 171113 - DNA, 154 bp, Zea mays
  Clone ID: MRT4577_87634C.1
ctcttgggtgcttgctatcgccatgtggtgcgcgctgaggtcagttctgccgagctgcagtcgggcttcggtaccccggcagcgctctagatcacgttgactcggtggcccgactgggcacccagcctgactcgggctcctccacctaccagga

SEQ ID NO: 171114 - DNA, 412 bp, Zea mays
  Clone ID: MRT4577_87635C.1
cccacgcgtccgatactacaacgcggaggccgacaagatcctgcacatcaatctctcggacggggaggcaacagccacgttaccgtcccggctgagcaatgcgcgccaacagcaggccagcgcacgccaggctcaaggagcatcgtcatgctcgttctctcatcaccgtcccgggcaccattgaccaatgaccgtcagtggacatgcgagctcatcaaccagatacttcccacaccattgaaggacaatcagcgcgtcatcgaatgatctcctcggctgttcatcccgcatagccccagagcggtgagcgacatctccatccagatcctcgacggcctcctgcacggatcctctgtcgccaaacactaagctgccggcctgctgttgcagctgcagctgctcaacaagacca

SEQ ID NO: 171115 - DNA, 728 bp, Zea mays
  Clone ID: MRT4577_87636C.1
ctagatatagagcaattgcaaaataattagctgtataattgaacttgttagttttaaggctatgtcttttcacttttgctcatgtcttactttttccttcttgtgtcgagtttgtctgctatactgagcatcgtttatgtgtgtgtgcagcgattattttggtaatcacctgtgctataaatacatatcatggttcaaattttatcatttttgcagttcacaagactgtaaggcccagctgaagctttcacctccagacagatagtccctacaggacagagggacttggacaccttccattagttgcagcatcaactgcccaatctgctgtcaatgttgtctaagacagcataaaagactgcttcgtctcctccccctctgtatacctctccggctcagggactggtcccattgatgattcaaattattgaaggcttgcattgtgatcccaaaacaaattcttgaagcatcttcttggattgcgaatggatggagtagatgactccaggttttctgcttaatcaattgcttgcatgtcgcgatggtcattgtttcttccaggatgtctcattctggtgtgtaaggtgctgtgcagctcctcctacagcacaatgtaaacatagaatgctatatgttttttattaacccactttcggtctctgaactagatgataagttgactgtacgatgttgttataagttttcgaactctgaaggatctcttattg

SEQ ID NO: 171116 - DNA, 365 bp, Zea mays
  Clone ID: MRT4577_87637C.1
actaattttttttttaataaaaaagatagagaaaacatagggggatttttaatatacattcggttttaggaaaaaaacaagagaggctttactggggcaaaaagaaaggaacattccaaaaatggaaacgccggggacacaaaatccaaaacaaaacttggggcagagacactgaagagaaccaggaacaaataaactggcccgaggggaaatagaacagggggttaaaggaaaaaagaaaaaaaacggatcagaggggaacaaatacggggcctaaaacaataaaaacatcagagtgatcttatacccataaaagattaaatagacttataaaaatggacaatagaagttataagaaaaatggg

SEQ ID NO: 171117 - DNA, 202 bp, Zea mays
  Clone ID: MRT4577_87638C.1
ttatgtgattgtgatttggcccgcataactcatgttgcagggacacccttgtccactctacatcagtaatcaaccccttctcgatctcaccgttctcgctccgaaaaccaagcaatcgttctcgtccaccctcctctactaagctccctcaccctcacattaatcacataccagaacctgcaggcgtaccaacttttcctat

SEQ ID NO: 171118 - DNA, 179 bp, Zea mays
  Clone ID: MRT4577_87639C.1
cttttgcaacagtaatttattgtcatagggaaaatttttagcatttgttcatgctataaagtcagttttcacttaaatttaattatattaaatattagcttatcatgttgaacattggtccagagttctataatgacaaaaagaaataagatagaacaagggggggtaaaatattatta

SEQ ID NO: 171119 - DNA, 378 bp, Zea mays
  Clone ID: MRT4577_8763C.1
ttcttaagcagtggtaacaacgcagagtatttttttttttttttttttttttttttttttttttttttttttttttttttttttttttttttgttaaagacacacgaaaaaggggggggccggggccccacaacaaccaacaaaagggttcatggcacaaggagcacccccggccggggggggtctgaccaaaccatggtcattgaacttggccctaatttaattaccacgacatatagcaaatatctttggctcgcccgggttcctacggcctaccaatagggattaggggtttatataaacggaaacccgggggctgggggcctagcccttcaacgagggggatccatttctaaaccccggggaccctgggggggt

SEQ ID NO: 171120 - DNA, 412 bp, Zea mays
  Clone ID: MRT4577_87640C.1
ctttgggctgatttatgtgcttgattattgtcgtactggctctgattttcgacctttgttgttatccgtcctcccgacccgaccgtacctggcctgcctggcgttttctttgcttcggactcgccgtgtgagagtgtggtagtgtgtgagacctgtttttcctctcctcttcaggaagtaggaagtaagttgattgtctgtcgagtgttgttgttgacggttgctgtggcgttgacgaagtctcggagggcggagatttgtggtaaggttgttgttgtggggtttgatgatttttcgtgtgcttcggcgatggcgattgcttctgggagtgttggtttgccgtgtcctactgcttctgagggtgatatggctgttgtgtctacttgtggtgtgtcgtgtcgtcatgtttgtg
